United States Patent Application Publication US 2014/0325702 A1 - sequence listing, part 29

SEQ ID NO: 46076 - DNA, 2790 bp, Heterodera glycines
tttaagcataaagatttgtccattgtccgtgccactgctggacaaatgcagcccaagccgctgggaacggttgatcagatcaaatttggacatcacttttctgatcacatgatggaggtcgattggtcggacaccgcgggatggaatcaacccgaaattagcccgttgcacagtgttcagcttcatccgggcgcaaaagtaaatttttaaaaaatctttaaaaatcagacaactataaataaaaattgcgaaataaattaaatattaaaatgaaaatttgaaatttgaaatttcgaaaaagcatacaatctgaaaaattggaattcttcaaataaaaattcttaatttatatataaataaaaattttttttccattataatccttcaacacattatttaaacaatttaaattaatttgaatgaaaaatattcgaatatttctaaacaaatgaaattataaattttggggatttgtttctaattgttaatcacacaaaaaggtgcttcattatgcgattgaactgttcgaaggcatgaaggcttaccgtggcattgacgacagaatccgattgttccgtccagaaatgaacattgcacgcatgaagcgtaccgcggcacgtgcggcacttccggtaattgtacagtgccgtggcattctcacccaccattctccagccccccccccgccccgggtgcgacatttccactaattaatggcattttccacagttttgaatgtcttggcattatttttgcactcttttatagataaatgccattttctgtttctgagttccttttgagatggcatcttttcaaatttcttaggtggaatccgattttttttttatttgcactttgcccattatttatgctgaaaacctttttaaacaaatttaatttttcaaattgctttactcctcaaacccgaaacaggattttgatgcggaagaaatgctgaaggtcatcgccgagttggtccggcttgatcgggaatgggtgccctactcggcctcctcctccttgtacattcgtcccacattgatcggcactgatccaacgcttggcgtcgcacactcgcgcaccgccaaaatgttcattctgaccggcccagttggcacatttttcccaaccggcttcaagtccatttcgctgtttgccgatccaagctatgcccgcgcattccccggcggtgtgggcgcatataaaatgggatggtaggcattttgtcaatgggacaaattatcaccaaaaatgggcaaaatggaatacattggggatgatcttttgtcattggaatatgatcaacaaaactgtgctattctacaataaggaaggaagacattttgtcaatgacaatggtcaccaaaactttgacaattatacataattttggagtaggcattttgacaacgacactaattaacatagaattgagacaattgtacatataatagtgtggtaaataaataaacaccaaaatgatatacaattcacacattggaggttcggcatttttcagtgacaataaatcgaaaattaattaaaatagacaaaatatgggaactccaaaaagggctggatgaacttttaaatttctaaaaaatgaaaaacactctaaaaagtaataaaaatttaaatttatttttagcaattatgctcccactcttctgatcggaaagcatgcacatgatctgggataccaacaagtgttgtggttgactgggccagatgagaagatcactgaagttggtgcaatgaacatattcatctactggagaaatgaatgcggaggtaaaattaaaatcataatttaaaaaaaagaaatccacggagttaatttagactttttgccgatttaatgtgccaaagtttttaaatttatatggcctattgaaaaaaacaaaggaaaactttttgaaaattaaaaaaatgatattcgctttaaaattttaacttttatacagaggcttagtcacacattaaagattttttatttaatcttttaagtttaaatattttattatttaagaattggaactggtcactccgccgctgaatgacggactgattttgccgggcgttgtgcgcgactcggtgttgagcatagcacgtgagtggggcgagttcagggtcacggaacgctacccaacaatggcggaattgcgccgggcattgcacgagcggagagtgcgtttcaaaattattttaaattaaaattagaaataatttagaaataattttaaaatgatgaattaattaatttgcataaaaattttaaaatttaatgaaatgtttttaagaaaattctaaagcgataagcataaaaatttctcaaattgctaagttttattaaagtaaaaaaaagagttaaacctgcatttccctcaaaatagtttaacaaaaatgccaaaatatactgaaagttacccaaaaatgccgaaatatgagcgtaaggcacaaacaaatcaaattaaattaaatttttttttacatctttctgtcgcaatttttaacaaaaaatgtaaaaatctgccaaaaaaaataatcgatatttctttattttaattatatgttttgttgcagctcctgcaaatgttcggctgcggcaccgcttgtgtcatttcgccaatcggacgcattgcctatgttgagcgtggcacgggccgcattgacgagctgcacattccgacaatggcatccaaagcgacagtgatgcaacgcatgtacgatacaatcaacgacatacagtatggccgcatggacagaccggactgggttcggatagtg

SEQ ID NO: 46077 - DNA, 1147 bp, Heterodera glycines
atggtttacgggacgccatttgaaaagttagaggatgaaggaagtaaggaaagtcggtttaagcacataatttttatcaataacttacagggaatgcaatttcaaagcggcctaagggaattcaagaagaaattgtgacggacgagcgcgggaaaaggcgattccatggcgcttttactggcggattttcggccggttatttcaatacggctgggtcaaagcatggtgagtattggctgtattatactgtatatgatatacttgtttaccgtttgagattttaatcaattttgaattcaggttgggtccctcaaacattcaaatcatcacgcgaagaccgtgccgacaaagttcaaaacacagccgaagattttatggacgaagaggtactgaattgctatataattgggaacaagaaaggatgtacgaatcggtcaaaactttcttgttgcttcgatgaagtccgaattttaggaccttggagagtttgggatcgcagcacgaaaactgcggccaaagatggacttcatcgactcgctcatggccactcccggcgaaaagtgtcttttggcctgggaacgttcgtccaccactttctcctcttcagaatcaggcgccgtggctgacagcggaagtttggtggaaaaattgtcagaaatgcttcgtccggtaaggtaggaatttcgcgatcttaaatacgttttatttgaccaaaaagttattgcattagctttgatttagtgattcgattggtgttcgtcttctcaagaaaatgggctggcgtcccggcaaaggaattggcatgaaaatgagccgtcgtcagttggaacggcaaaaaggtcctctttttgttataatgttgccatttctttttaatttttgacgttcagtgatcgattcgcgcgaggctggtcgccatggtcaattcgatgaggaagccgttctcgaggtcgaagagcaattacgatcgcatttccccatcgaattttcaccggacgatgtgtcaatggtcgaactgagtgcgaaagaaaatgtgcatggtctcggctacaaaccgctggcagaaggtgccgttctgtcacaaaagtacggagtgatggaatcggcactgaaaataaccaaaaagagcaaaggcattcgtggacag

SEQ ID NO: 46078 - DNA, 588 bp, Heterodera glycines
atggaaggcgttgttctagaagagactatggaagagaatgtaatggatacagaatgtaagatataaaatgaatttttatataaaattaccagtttttagtggacgacctcaaaaaaggagcagcggtaaaaaggggccgtggttttgaggggtcgcagaaaagtgctgtccaagtctatgaaactttggacgaggagggctccgtcggaggaccacagcgttctgttgaagtaaaatctgtttaaaatgtcatttaccaacaggaataaattaagggatggatagtttttgttacgaatgtccacgaagaagcacaggaagacgagggttggttgtccgatttgtcattttattttcttaaaatggatttcagtgaaagatctgttcaaagaattcgggaatgtgatgaacatgcatttgaatttggaccgtcggaccggctatttcaagggctataccattgtgcagtacgaaagccaagaggaagcggcagaggccattgccgggctgaacggctacgactttttgggacaggaattgcgagtggattggtgttttgtgaagggcgggcgcgagagaaagcgatga

SEQ ID NO: 46079 - DNA, 317 bp, Heterodera glycines
  unsure (1)..(317): unsure at all n locations
caagaagtgaatgagaaattagtcgataagcaattcgccatttggcgcgttgacgccccgtggcttccgcgggtgcggcgtccgccatcaacaaaaaagggcggtgggaaggggcccatccatcactacgagacaccggtcagaaccggacgggtcattttggagctcggcgggtacatcactgaacaggaggtgatggcggtggattggtggtgctgttttaaagcgacatttactttttgaaggctcgttctattttgatgcatctctatttgcatatgccattcccagaagagatttgtcagccaagaanttga

SEQ ID NO: 46080 - DNA, 1274 bp, Heterodera glycines
aacagagcgtcgattcgttgtaccctttcttcgtaaaacatgctcgttgtgtgttcccccacttggaatgtcttaaagagcttcaagtcatttctgatcttactcagccgcacaattggtaccctcttgctcgagaaatcaacagaaagatcatttttcatgcaggtgtttataaattatgcattaattttattttttttgatttttaaaggaccaacaaatagtggcaaaacttacgaggcattggaacattttaaaaaggccaaatccgctttgtattgtgggccattgcgtttgttggcatacgaagtgtatatgaagatgaacgaagcaggcaaaacaaacgtagtaaaaggaattgaaaaacgatgtttatattttataggaattccttgtgacatgattacgggtgaaaatcgtctctttgccgttgactcggacaacccatccgcccacacttcagcaaccatcgagataatgtccccagagcatagaattgaactttgtgtcatcgacgagatccaaatgctcagagacccacaaagaggtgctgcttggacaagagcactgatgggagcgcctgcggatgaggtaagaaattgggacgtaatcgtttttaaaaacatttttcctttgcgatttatcgggtttaatcaattttttttagttatttacagtaagaataaatttcttttttaaacaaaaattttcgagattttagttcaaagacttaaaaaagacgatttccttttctgcatagctttttaaagaaaaaacatagaaacagtattatttctagagaccgagatttcctttatttattttttgcctattttataagaaaaactatccttcattttttaatctaaaaaatgatttttttaattatttagttatattatacattaattaaaatttactgatttttgtgtggaaactgcccgccattgaaaaactcgtttgactggcttggagaagccggatccagactggttgaaaacagcagtttccgggtccggcctctcaaaaatcagtcaaaccgggtttatatattttcggttttctccaagactatacccatcgttgtttccataggaaaatgcttgttttacaatattcagattcatctttgtggtgaagaatccgcttatgatatcgtctgtcgtttgctggaccctattggtgaacacgttgaccttcgtcgatatgaacgcaagggcaagttggtcgttattgtaacccacggacttcgtgatctgagcttaacaaaggtc

SEQ ID NO: 46081 - DNA, 1207 bp, Heterodera glycines
atgtacgaaaagttgggccgaatggtcggacggagttacgaggaaacgttccaatcactcgccaaatggatgaaaagtgccgaggtttgtttcgggtgacccccttctttaccttcattttctgcttattttacagtcgtctgctcgggtagaaatttggcacacaatggccaaaatggtgaagggccttggcgccggggcatttccgatttacaaagaaatttacaaaagtttggccaagtcattagcggatcgggtgagtgctataaaaaaaatttgccgtcataaaacggcggaacaaacgaaatgaaaaaatagaaaattaatttattttgcaggtgctttctgtccgtgcggcagcagcgaaagtaaaatttagcacaaattctcatttttgcagaaaaatgttgcaaatgccctaaattaattaatactttcgcttttttaaatataaaaaaccataaaagagtgtatgacccttacttcttcaatggcttcagtgtttggtttctcttgtggccgaacccgattcgccgctgtttgcccagttcgacttggaatcgatgtgcactttgtgcatcaaatcgctcaattgtgccaacttcgaagttcgccaggccattgcccaagtatttgctaaaatggcggcacgcgtcgcagcgcaaacgaaacaaagtgcgccaaatagggcatattctcttattgttaactcatctctttgggtctttttagatcggagcactttaaattttataacttttaataaaacttcccatttcttcagttgggtcgaaatcactcggccaattggccacgtccgtttcgtcccctgcgggcggcccctctctcggcccttgcggctccaagcaaactgccggcactttggaggacattcttcgctgtcttgccaacggaatgcagcggggcggagttggaggctttctgaagacggcggcgaagacggcgaccggctacaacccacggggacagcgcgagacgcgcattggcatcgccgaagtgggatagggcaccgaattagctgcctgtctaattggaaaacgtctccctctcggtgcaggcatatgtggcgatggcacacgagctgggaccacggtggctgaagaagaacattccgttttggtccaaacatttgttggaattggtcgccaaatgcgccaccgatcccccaaatgccaagcaatccgtg

SEQ ID NO: 46082 - DNA, 1123 bp, Heterodera glycines; identical to SEQ ID NO: 28048

SEQ ID NO: 46083 - DNA, 354 bp, Heterodera glycines
actcacgcgtagcaaaaaacttcttgccacaatcaacaagaacttcgggactttggcattttgtcgccggtggttggaccgactgggcgaaaccaaatatttgatgtcactcagagacctttgcggtttgtaatagcttctattgcacactttggcaacaaaaacttttcagagaaggacattgttgcgccttatcctccgctctgtgatcaggtccaaagcccatggcaaattaacgcctttttcacatgtttcacttttctacagaaaggctgttacacggctcaatgggagcacaccattctcttacggccgacatgtaaagaagtggtgagccgtggcgaagattattga

SEQ ID NO: 46084 - DNA, 528 bp, Heterodera glycines
ctttttacgccattttggccaattctttgcctccatccgccaattcaccaactcatccatcaataatcttcgccacggctcaccacttctttacatgtcggccgtaagagaatggtgtgctcccattgagccgtgtaacagcctttctgtagaaaagtgaaacatgtgaaaaaggcgttaatttgccatgggctttggacctgatcacagagcggaggataaggcgcaacaatgtccttctctgaaaagtttttgttgccaaagtgtgcaatagaagctattacaaaccgcaaaggtctctgagtgacatcaaatatttggtttcgcccagtcggtccaaccaccggcgacaaaatgccaaagtcccgaagttcttgttgattgtggcaagaagttttttgctacgcgtgagtctgaaacgatttagcttatacaaataaaaaccctttttttacgcattggattaacacttcacctgagaggaatgtgctcctcatggaggtcgtagttcttcatgtaatgactggt

SEQ ID NO: 46085 - DNA, 2462 bp, Heterodera glycines; identical to SEQ ID NO: 5636
  unsure (1)..(2462): unsure at all n locations

SEQ ID NO: 46086 - DNA, 828 bp, Heterodera glycines
atggaaagaattcttagccaaaatatttacaactttctcctaaaaaacaataaaatttcggaataccaatttggttttgttagaaataggtctacgacaagtcaactaataacagttgtggaagattggtacgaggcaattataaatggaaaaaatgttgactgtatttatattgattttcaaaaagcatttgactcagtgccccataatttactattatacaaattggaaaaaattggtataaagggcaaacttttgatgtggataaagggctttttgagtaataggacttttcgagttaaaataggggattctttatcctcaagtaaaaaagttacctctggcgtcccccagggctctgtcctgggccctttattatttttgatttatattaacgatcttcctgatgctttgccatcaggagtgaaaataaaattatatgctgatgatgttaaattgtatatatgctataaagcaagagcagatacagaaattatgcataaagcattgcataatttattcgaatgggcaaataaatggcaaataaaagtttcagttcaaaaaacttttgtattatatttgggttcaaaaaacccaaaagaaacatataaatttgatggaaatacaataaatgctgtggatacaattaggaatttaggagtaaacattgataataaattacaattttccgatcatgtaaacaaaataacaaggaatgcgtatttacgtatgcgttccttgtttcgaataattaaatccaaatcatctaagatttggattacgttatataaaacttatattaggccgttattggaatacgctccggag

SEQ ID NO: 46087 - DNA, 179 bp, Heterodera glycines
ctaattgcaagaattcaggccggtttcgcgggcgatgacgcgccccgcgcggtgtttccgtccattgtgggccgcccccgtcatcagggcgtcatggtcggcatgggacagaaggactcgtacgtgggagacgaggcgcagtccaagcgtggtattctgacgctgaagtacccgattga

SEQ ID NO: 46088 - DNA, 294 bp, Heterodera glycines
atggctactctttcgtgccgtttttatgcggacgaattcccggaaattgacgaccccgtaatggttaaaattgataaaatcgaggaggtcggcgcatatgtgacactttcggagtacgacaataaaggtacaaaagatgcaaaatgttatttttatttacgttttgtcaaatgtttgctttttcagaaggaatgctccaactttcggaactttcccggcgtcgaattcgttctgtcaacaaattgatcaaagtggggaggagcgaatgcgttgtcgtcgttcgagtggaaaaag

SEQ ID NO: 46089 - DNA, 780 bp, Heterodera glycines
atggtttcccccgatttcgaatgccgcgtttgccatgcctatgccactgggcatcattttggggctcagtcgtgccaagcgtgttgtgccttcttcagacgatccgttgtgttaaaacgcaattatttgtgccaaaaactatcgaaaattggagcgaattgtcccattgtgtacagtaagtttggaaacactcctttaacattttaaagagaaagggtaacaaaataatggccaattaaaatttcagcagagaaagttttgtgccgatcgtgtcgaatggtgaaatgtttgaccatcggaatgaataaaaatggtaaaagagaaatatttatttttaattggtaggtaattaagctgtgcaattgccggagaaaaggggcggcgaccacgcgaagaagggaagggcctatttcacaaagtcgggccttctgagaaacaaacgatttgccaacaacgcatttggggtcggcattttcacttcgggataattaaataaaatggaagaaaattaaaatattttaattggtaaaatggaagtgattaaaagcattgaagatggatggatgagcagcggaggttttgaccggtcagaaaatgcgtttagtttagttgtgctgcgacggtttgcccaccgccccccgccggtcggccgattcgccgctttcctccgccgcttccgcccattccgccgattgtccctcctcctcctccgcttcgtcttcttccgcttcactaaccattcatccatcttccacttttgatcactctttctccacctct

SEQ ID NO: 46090 - DNA, 346 bp, Heterodera glycines
atttgtcagatgggtgatcagcatgggctcgtgtgccaacggtggcggttattaccattattcctattcggtgttgcgcggctgtgaccgggtcatccctgtcgacatatgtcagtcattctcataaaaagaattttcttttaaatccctctcgtccatcaaccttccttaagttctttttggaaatgtccccctattttgacagtattaaaaatttgtttattgcatttccaaattgtcagatgtgcccggttgtcctccgtctgccgaggcgttgctctacggcgtgcttcagttgcagaagaaaattaagcggctcaagaaagtgcaaatgtggtatcgcaaa

SEQ ID NO: 46091 - DNA, 1761 bp, Heterodera glycines
atggacctaaactcggacggtcaagtggatgagttggaactacgggagcacatcaatttcatgcagaagcgttatgtggtgcgtatatttaagaaaaaaaaaattaattacttgagggaatttatttttttaacttagctgaaagattttaatttttttttttgaaaaatttgactgtcttcttgggtttataatttttttattttaattaatttcggtgaaattttttaatttgaaatttttgattttcactttttttttatatttctcataatcccttcatttgttttttgagaattttttaaagctttttatgtggtgcgtaatatttaataaaaatattcaaaaatttctttgatttaagaatagtatttttttaatgtaacttttgttgaaagtttttttatttcgaacatttttgactttgccattctttttagctttcccattattcctcatttggttttctgagaattttatttttggtaaaatttaatttacattttttgaaatgactgcattgtgcttatatcttttcatcgattttctaagcttcggtttaattagtttcgttttttaaatgtatttttccataagttctgctaatccctaaaatctaaacgctttttgttgaacgacggtggaaggtcagaagcaggccaaagacctgctaatttacattttaaattcgagtggctaatttataattttttattttaagtaatttcgctgaaattttttaatttgaaattttttaattttcacattctttttacatttctcataatctttcatttggttttttgagaattttataaagcttctttttgacaattttgacggccttcgttggtttacttatcttttgatcgattttctaatcttcgattcgctataaatttcattttttttttaattttttcaattaattttcttatatctgactaatccttaaaactataatggtttttgttgaacggcggtggaaggtcaaaaacatgccaaagacctgctaatttacattttaaattcgagtggctaactcccaaaattaaattcttatatcaaatttttaaatgctttccatacagtaaactcaaaaattgatttacaggtggctgactacaattcggacggtaaaatggaccgcacggaatacggctgtttcatgcacccggaggactgtgaccatatgagagacattgtggtgcaggtggattagcaaatttatttattaaaaaaaaatcaaattagattattgcttattaaagtccctttttcaatgattttcactttatatatttttcacttgtcttaacttggttgaaatatcggggatttagggcaaattcactaaatttccctaatggtaaacaaaccctcaccctaattctcatatttacccatataattttacctaattattcctaattgcttaataaataattaattgttattgatgtcctttccttaaaaatccttaaaaatttctgtacaggaaaccgtcgaagacattgacaaggacaaggacggtttcgtggacatggccgagtacttcggcgacatgtacagaccagacgactatccgggactgaagggcaaagaaccggaatgggtggagtcggaacgggaaatgttcagggagcaccgggacaaggacaaggacggcaaattgaacaaggcacggtgaaggggaagaaaaaagtggcacgaaaatggcaatttggcaacacgaggcatttctctcacccgaccattaaa

SEQ ID NO: 46092 - DNA, 3840 bp, Heterodera glycines
  unsure (1)..(3840): unsure at all n locations
atgtttttttcaaatcttttccaattcaaggttttttgtcgggttcggcctttgaatgagagcgagaagaagaacagctccacaaatatcgtcaagtttcagtccaaagacaccatcgtcgttggggtatttacaaaccgataatttctgttcaaagcggcattccaagggaaaaccgtacgcctatgaccatgtgttcgagccaagttccaaccaagaggccgtgtacagcactgccgcccgacacattgtgcaggacgtactcaccgggtacaacgggacaatttttgcctatggacagacttcgtcgggcaaaacgcacactatggaggttttacaaaactaattcggaaaatttacgatccttttggctcttttagggtgttattggcgactccgagaaacagggcataattccacgcattgtcaacgacatattcactcatatctacaattttgtgagcagctgctaaatttatttttcattgcaatctccctcctttccgacattaaatggtggtaattatttattttccaggtggacaccgaaatggaatttctgatcaaagtgtcttacttcgaaatttacaacgaacggattcgcgaccttttggatattaccaaaacaaatttggcaattcacgaggacaaaaaccgaattccatttgtgaagaatatcactgaaatgtttgtgacaaacccagacgaagtgttggcttacatcgaagaaggaaagacgaaccgacaagtggcggtgacgagtgagtgaaattcggggaaatcggaatgacaggccaatttcagacatgaacgagcattcttcacgatcgcacagcgtattccaaatacaggtgcagcaggacaacaaaacaacgctgaaaaaactgaccggaaaattgtatttggtggatttggctggtagtgaaaaggtcggctgacacaattgtcgaatttttaactttattaggtggatttaaggttagcaaaacgggtgcagaaggagcggtgctggaagaggcgaagaacatcaacaagtcactgtccgcactgggcaatgtcatctccgcactggcggagggaacggttcattttacacgtcaaaaatgaaaatttacgaaataaactccagaaaagccacgtgccgtaccgtgacagcaaactgacgcgcattttgcaagaatcgttgggtggcaattcgcggacgaccattgtgatttgttgttctcccgcttcatacaacgaaggggagacaaagtcgacgctgcttttcggacaaaggtcagctcggggaatacaaataaaataataattactaaattggccgtccattaagggccaaaaccattaaaaatgttgtggttgtgaacgaggaactgacggccgaggaatggaagcggcggtacgagcgagacngggagaaggtgacgcgactgcgccagcaagcacagcaaatggagcaggagctgcgcaggtggagggcgggcgacagagtgagcgagtcggactgggcggacttatcagcgaacatgcagcagacggacacgagtgggcaaagcatttctcattttccgtggcaggcattttcgattgtttaaatggcaattgttcagtgactccgtcaatgatgaccgattcgatggccaccttctccgaaccaccgtccaccactcagcagccgttgctgtcctctcgcgaagggcccattgtggacgaagagaggcgcaaatacgaggaggaacggtccaaactgtacgcccaattggacgagaaggacgacgaaatccaagtgcagtcgcaaatggcggaaagtttgaagcagcaactgatggagcaagagaaggaaatcaaacagcaaaggcaggacaaagacacgctgatggcagagttgcagaaggcacagggtttgccccttttttgagtttgcatattcacttcgaaccatggatgtttggcatctattgtaactaattcctcaccatggattcatttttgcattttatctttttcaatttaatcattttagagcaagtcaacaaaacccatgaggaaggggaggagttgttctcggccatccaagaactcgcactgaatcttgatcagaaaaaggcagagtgtactcaactggtgacagacaatggttgttgtttctcattccttataattaatgcttttgactcatttgaccagaacgacttgctgacgacatctccaagaaaaacctcgagtcgactttgatcaacaccaaattggaagaaatgcgtgaactttgtgtgtcacaaaaggtgcctcttctcccgattttactttgctttttatttttcacttcgcaattttagaaacgtgtttacgatagcattcaaagtatggtcaaagaaatggccgacttgggcgagaccaatttcgccttttcggaaaaggtaatttattttaaaaaaactacaacttcccttcactgacagatgcaaactgatcttgcggacaaaaacaaaccgatcgacgacgaaacgcttacccacgcgagaatttccatttcaaaactcgccagcgacttcagggccaatcgacaggtaccaccttttgacttttggtgcactttttacaaaaaatatttcagaaactaagtttgttggagacgggcactgacgacacgatgaaaaagttggacgacgtgacgaaagaattggcggactgtcgattgcaaatccaacaaatggacgccaagaacaaatcactacgggaaacgatcgatgggcaggaaaagcagaaaagacagttggagaacgaattggacggactcaacgcgaagttggcaaacgcgaaaaattcggactcggccgacgacaacagcgaactgcagcagcagcatcagaagctggtgatgcagctcagggaccagatcgcactgaagaacagtcagatcaaacagttgacggtgaattttggcattgaaaataaaggcgtcactttattggactaatttaggaatctttgcaagagctggagctgtctcgtgaacagctccagcaagactttgaacgccttaaaaatgacgagactgaaaaggagaagcgcctgaagtcactgtccgcactttctgacaaaagagaacaggcgaagcaggatttgaagggtaatttggcatgcgatgagagagtaaacgaattgaataatccgtaatgattaagggttggaagagacggtgaacaaggaattgcaaactttgcacaatttgcgcaaagtattcgtgcaagacttggcacagcgcatgaaaaagacgccgaccggacccgagggcgacgaagaattcttgtcaagtccgatccaaaagcagaagatcatcttcctggagaacaacttggagcagttgaccagtgtgcacaaacaggtggaacattcatttggatggaatttgaacaaccgttcccttttctgttcagctcgtccgcgacaacgccgaactccgctgcgagttgccaaaattggagaagcgataccgtgcgagttcagaacgcatcaaaagcctggaggtcgccctccgagagaccaaagagaacgcgatgaaggaccgcaagaagtaccagtacgaagtggagcggatcaaagaggcggtccgacagaggaatttggccaggagggggctgcaaattggtgtgccatccttttttgtccctttccactgggataatcaattttcttttcagcgaaacccatccgtcctggtcagcactatggcactgctcgccctgtgaacggtcagtgcttttcccatttgcctttggttttctttgcctccctccgttcgctgctaatccgtcttctgactgattgttcactgattcc

SEQ ID NO: 46093 - DNA, 1440 bp, Heterodera glycines
agatccgttcttcttttgctggacatcgtactggtgtcaattgcattgcattcagtgctgactccctaactttggcctctggtggaaaagactcttcaattgttgtttgggacttggtcaacgaatcgggcatttgccgtttgggtggccacaaaagtaccataacacatcttcaatttgcacaacgcgaccgttttttggtgtccaggtttgacttgaaaaccctccgaaaacagtgaaaatttcagttcaaaggacagtcaattgaaattttggtgtctgacgacaaagtcctgcttctataccttggccagcagttcatccgaagtgtacacattcgcactgattgacgatgaccgtctgctgttggtgggcaatgcggagatcgaacttttggtgttcgaactgtgctggcaaggacaagacgggtgggaagacgaacgaacggagcgaaacgaggagaacgaagacgaaggggaaaagaggccacgaacgacactcgtgggccacgaccaattgctgctgttggactctgtcgaaaagggtgatgcgtttgacacggaacagcaagcgaatgtcagtgattgtgccctcacacattaataaatgaaaaataacgaaacttttaaattaaagtagggcaatctttatgcttaattttggataaattaatgtctcactcctacaattctttctgtattaggttttgccaacgagcaaaattccatcattggcttttaattatcaacgattcttttagagaattttgcgctgcattaagcggggagcattgatcagacaagcaaaaggtcgcgcacttcaattggcggtttccagcgacgaagcaatcgtttgctgtgtggtcggtaattaatggagtaaattaacaaaaggaaaggagtgcattttagggttccgactcaatgttggacatttacaggtcaatcggaagcatttgttattcgtttactttccttttaaggcatttcactgttgaagaaagcaaaaaacggtaccaaaagaaactgcggaaactccgactaagggcggactcgcaaccaatggaaaggtgttttttaaactaatttttcacgtgaactcatattttcctacccacagtttcttttggaatttttatagcgaattttgtaaaagaacaaactttttgggactgaaatttaaaatagtcaattttctgcaataaaactgttaaaaattgcacattttcatgccccgtatgccgtttttatgcattttatcattaacgcaaaaatatttagtgagaaagaaacaaatgaagcaatggaaagtgaagtatcgcgtgatgtcactactctgatcaccagaatcggggattttagagccgattccaagctgaaatgggtcgatttatgtgaggggtttgctgaattgaacaacaaaaatgttcgagaataccga

SEQ ID NO: 46094 - DNA, 771 bp, Heterodera glycines
atggcattccacaaaattgacaatgacagtgtgaactccatcaccaatgccttggactttttccgcatcccgccaaccaacgtcagcgtctcatcctccaaagtgtttgaactgctcccaagtaaccctctgaccgacaccccctatcacttcaagcttcactccagtcaaaattatattgatctctccaaatgctatttactatctgagtttcgaattcgcaaagaaaatgcaaatggtcaactggttgaccttgcagctgatgaggttgctccgattcaactggttggacacacattcatccgtaacatcaaaatgagcatcaatggccgtgaagtgttcaacgcaaattctctgatggcctacaaatcgtatttttcacacgaactctcctattcaacagcggccaaggactcgcatttgaatgctgcaggttactaccgtgacactggtggtgtgcttgaggtgggagacggatgcactgcacgacgcaacctgtttgtaggcagcagaacagcacaattcattgccaaaattgacgccgatttgtttaaccagcctctctacttgatcaacttttgtgagttggacattgaaattttgcccaacgacaacgactttgtcctaatcacaccacccggtgttgctgcagccactcgctaccatttcgaagttgtcggtctgaaaatgtatgtgaagaaggtgtccctgatggacggattggcgttggacattgcacgaaaacttgagttgaagccggcacgatatgca

SEQ ID NO: 46095 - DNA, 611 bp, Heterodera glycines
atgactttttcccatgctgcaccagtgcttttcatcatgtttgccattttgtctggacaatccggcgaaacctttgcgttccaagcggagatgcccctgatcatcaacaccttctactcgaacaaggttttaaaatgggaaatgctctgggagtctaattaacccgtaaagtctaatctaatcagtttttaaaatcttaatctggtttaggaaatcttcctccgtgagctgatctccaactcctctgacgctctggacaagatccactaccaggctctgaccgacccttctcagatggagagtggcaaagagctcttcatcaaaatcgtgccgaacaaagccgacctcgtcaacaaccacaaacccggaactgaggcgttcattgaggctcttcaggttttgttttttcgtttggtcaacccctaatccctaaaaaacacttttgttggtaatactggagaatctggactccacccaaaaaatcatttttaagttgtggaaaaacaacccgggattttcggcccttctgatcacgaatatgatatcagatttgcaaaaatgatttattttatcattgtctggtttttgagaccttagatttgaaattttga

SEQ ID NO: 46096 - DNA, 1333 bp, Heterodera glycines
atgacttgcctacaaaaaatcagcgacagcagtcctctagcaattaacagtggcctaaacattttctcagttccaccgaccaatgtgtccgttgttcgctcattctttcgtcaggtgcttccactcgcaacaataacgcaagaatcgccttatctatttcgtctttacagtgacaatttgtggactgatttgtctcgggtttatctttatctcgaagtgtccattgaaaaaccaggagcaaacgataaatgggttgcaatagaggacggggatactcatgtctctgccattcaagggattggtcaaacatttgtccagcaactaaaagttacggttggcaacacggaagtatacgatagcggaaacctatacccattcaaggcttatatcaccaatgagttaagctttccaataaatgccaagaaaaattttcttggttcaacagggtattatcacaccgtaaaccaagatgactcaacagacgaggggttcaaagagcgttgtaaaatttttaagggtggaaaaaatgcgcaattcctctcccgtctcgactttgatttgggaaaccaagagctttatctcttaaacaatttggatttgctgttcacaatttataaggctaaagatgtctttcttttgcaaactttaaaagcaaatgattcaaccaaatatcgtttgacagttcacgatgtcaagatttatgcaaaaatggttgaggtccaaccctcactaaacatgagcctttacaaaacccttgaaaaacaacccgccacatacgcagtacgcaagaccgaaatcaagtcgtcattcatcagtgtcggtcgatacgaatttgagtacaatgtattcagtgcaaccattcctcgacgtgtgacaatcgcgttagttggaaattcagcatttcatggtgactacaaactgagtcccttcatgtttgagccgtttgatttgcgtgagatttcggtacatgctggtggcgtagtttacccagctgttccttataaactaaatttttcaaatgatcactttgtcagcgcctttgttgacatgtatgaggcactcggaatggccaattcagaacgttcatttgacatttcaatggcccagttcaaaaaagggtggaccttttttgtcattccattgacttcaacgcttgacgacagctgtggatttgagctgttgagaagcggtacgacaaacgtacgagcaacattcaattcaccaattccgcttggtggtgtagagatgattgtcttgggtgaattcgaccaaatgattatggttgattataaccggcacattgtgaccgattcaaagcttggataaattataa

SEQ ID NO: 46097 - DNA, 1177 bp, Heterodera glycines
aggacttcttccactccttcggcgatgggtcggcctcttccccggccggcgaaggtccgtccaattcagtcccaagcgggggaggcccttacttctcgtgaagggtcggcctcttcctctcgcctcgtccgcctcgtccattcctaccttttgttctactcggttattcgtcctcttctgccaaaacttccgccgcttcgacttcgtcttcggcggcggcaaaatcgcaagaccgaaaaaggccgtacctgtgcccgacttgcgactcgcgattcggttccaaaatggaattggaagagcatcagaactcgcacaccaggattagaaaccagttccaatggcgatggtaatcttcaaacatggccaatttcaatttgcattgaatgcccccgccccctcccgcccctccccggctaaaggtctgtcagtcgcggttcaatcgacgctccactctttggaaccataagcgaattcacagcgacgcgaagccgttcaaatgcacagtgtgccaaatgcaattcaaatggaaaaattcgttgaaatgccataagtgggaaaagaaagagaagagaaaagcacacaaccattcccacccaaacagagaaatgcatttgcgaaagaacgaattgagtcaggggacaatgccggacacggactcgcagcttctcacttatgcgacggccgcaaaaaagacaatggttcgcattttgctgctgtggcccattaattatggtagcctagggatcgctctcttctcaaatggatgccatcggtgccgctgcgtcgccctcggccgctgtgctgccccctccggcgatggctgtgcttccctactcggccgccccttcgcgccttttgacatgtgccggaactccccggaagagagcaccgccaaagagcgggggaaacggaaaaggactcaaagttggcaagacgaacgatccaatggagcggagaaaggacggcgaaggggcggacggaaacggcacaacgcaaatcgaaacggtggcggaaggacagctaacgcaattcggcattaatttgttcggaattggggaagtggcggagatgacacagctgaagaaggagtcgaaatacgcgcagcagaccgaagagattgcggcacttcggagggagcaggcacttcaacaacgccaacatcagcagcaaccctcgc

SEQ ID NO: 46098 - DNA, 1587 bp, Heterodera glycines
tgtgcgtaaattgccctttccattggaattttttacgtcgtccataaaaatgaatgatttctcagcttccatcaacaaatagcagcgaattgcactggagctcagttcttctctttcgcgctgcttctcaacaattggagtcgtcccaattgcttcggctatttgtggcactttggccttgattggcaatgccatttaatcgctccctttctcctccatttgctcttccggcgacaaagcgtcggtttgattgtcgtcgccgttttgatcatcggttcgatgtgtcttcgtgctttcaaatgcgtctccaatggaatatgcaataaaagtgacgtggacattccggtgggttcactgctttggacattggcatactcattgtcagatagcataagactcaatgttatgtaaagaaaattgttatcgaaaatataccaagaaatcggacccattcgcttgcttaaaccatctcttcctcttccaatgcgtcagttcgtctccgtccgtcctgagcatgtgtcccttgtccaaatgtacatgcgtcccatgacaaaatgtggtccttttcttgtcggccttctcctcggtgtgttttctttgtctctcaccgattcatcgccgccaaaatgggccgaaaagctcaaaactcagcaaaaaaagcttttctgtgcgggtttttgtcttgcggtcggttgtgtttatgggattctgccggagtattggtacccaaacgacggagtcactctgtacaacactctctacacggcatccttccgaacactgttcgcttgtggcatcggactgatgatgctcagctgtctcctctccataaaaaggtctttaatatgtcgtcgagtttcccgtgccccattttttatttttgttataaaaatctgtgagctataagaggcatcggattgtttagcattaacccagccattaggtcaatcagacccaatcaaaatctaaaagcagactgacccaacgcagagatctagcagcccctcagggtaattgggtggacttaggacattgggtacagaccgaggagcaaatgacagcaaaacaaaagggaggggacgaggaaacgataaaatatgcaacaaacagcaattaaattcccttttgttcattttttccctttttgggcttattttggaggaattatgttcttataaatataatattacatttttatttacgtagcatcgaaaattttttatttcattctaaagctatttttaataataattaatagtaaaatgtccgctgtcatgatgtccatttgtccacttctgtccaaatgtccgttttctctttcttttcagcttttttcggcctcgtctcatccatcgaattttcgctgtgttcgcccgtctgactttctccgtcgctctcactcacatgcccatcgtttttctcttcacgcgtatcactgccttccaagagacagaatcaccttttagcttaatcatcgcccttccccccgcaattttaatgagttttacggtcgccacaattttctattgttttatccactggccaatttcacaaattatttcccgaataattaaataaattatttaa

SEQ ID NO: 46099 - DNA, 2758 bp, Heterodera glycines
atgcgaattgttctctcctcgagaaggtcatggcgttgcttagcggtaatttagacatggacaaaggaagaatggtttcgtcgttgactaccgggttgaaaggtgcgttattttctgactttttaatacaatgctttttggattaaggccttttcgtccaaaccaatcacaacgctaccaacattcaacgctttccaatcaaggggctggaaagaaaaggcgctaatgagatgcaaattgaggttgatgggaacgcctccacaattgagcagtattttaacaacaaatacggtcgtcgtctggagtatgaaaaaaacatgtttggttgaagtgaaaatatctttagctacccaaaccttcctttgattgcaatgaattcgagatttgccaatgagaagcgagtgaattactacccaatcgaggttttggacatcattgacaatcagcgagtcaccactcagcaacaaactccgacaatgattcagcagtcaatcaaagtttctttcctttattagtaaattgtgcatatatgtattctagaagtgtgccattccaccattagtcttcaagcgtcaggttcacaacactgcgaagtctattcatctctgggacagtgaatatctagatgaggcagggattaaattgactaccgagccaattgccctcgtaagtttttcattgttttgataaacgattcattcacctttttgaagagagctcaccagctcaaccatcctgaagtcaaagctggcgacggtaacatgcagaggccgatggtggaaggttctgctgcttggcgaatcaacagtgtgctggtccctcaatcggtgtttgctgacggtacttacagttggatgttggcgtgctttgttcaacttggtggtcgcggtcttagcgagccagaccttcagtatgtttccataaaaaagtttttatttatcaatttatttaagcaaatttatccaactgcttgaagaccaggcaaaaagacgaagccttaaacttccagcccttccaagggaccatttgcgactggtgaatttccgatcaaaagaagtaataatctaattcgtggccaccacaaaccttttaatttttattttaaggacatttcagcgctgttccaagaggcttctcaatcaggaattgcttttatgctttgcattcatgccgatggggatgatttggcacatcactttatcaaaaaatgcgaacgtgactaccaaattatcagccaatgtgttagggctggtactgttagaaatgtcgctgcgaagcagcaacgtctcactgtagacaatattctgaataagaccaacgtcaaactcggtggtatcaattacaatcttccgcgatctccgtgagttttagtgctgctattttcctcttaattaaattgttttaaggtttgttactagtacggacatgcttattattggtattagtaccaatcatcccggaggcggtattggcgagcgtcctatggctgaagctgaaacattacggagtgagactctttctgtttcgtctgaggagtccattgttgctggtcctccttcggtcgttggggtttgttcatttattataattttgcttttttcttactatccataattttagtttgcggcaaacgttgggccgacaaagctcccatttgatttcgttggcgattttatgtatcaggttttgtcgcagcttgttttttaaattaaatctttattttagagagctcggcgtgaagaaaaggtcaacatcatcgagtcgatcgttgggaagtgcgtgggctactttaaagaagtcaggggaagtttgccaaggcgtgtcgtcatttaccgaaacggatgcagcgagggacagttcaaaatggttttggatattaattctttctggtgtatcatttactttaagatcttgaaatttgaagttccgctgattcaatgcgctttgcgttctgccggttgtgataatgtcggtctgacattaattgtctcgaacaaactgcagaatgttcgcttcttcagcaaacaggtaatctttctttcctctgaaaatttgatatgctcaaattcaacagattcaacctaatgcgaagccccctgaacaaaacatcaaaccgggtacggtcatcgacacggctgtagtgcatccgtcaaactgcgaattctttctcaattctcatcgtactcttcaggtttattttttgtatgtgcaaaacccattaagattttttaaggggactgcacgtaccccaaaatacaccgtagtctacgacgacaacaaattcagtctcatggacctcgaggaaatgtcttaccacttgtgctttggccatcagatcatcaattcaatagtttctttgcctgcgcctgtatttaaacatatttacgactcgattctttactcaattttcaggtttacatcgcaaatgaatatgcaaaacggggccgcaatctcttcaattactatgatgctccacgtgacatggaaacgttcgctgatctgaatcagaagctttgtctggaacatgccggttggattgcacctcatcgagtcaatgcctgattttgagagaatttcttcgtacaccatttgatttccctttgtcccttttttaaatttaatttgttcccacttaagatttaaattgttcccacataagatttaaattgttcccatttttaagatttaaattgtttccactttctcatttgtttctaaattgttgtttaattattttcatttatttagatttaataaa

SEQ ID NO: 46100 - DNA, 1045 bp, Heterodera glycines
  unsure (1)..(1045): unsure at all n locations
atgaacacgtatttttccattttcgcacaggttcgcctttatgacaacaatgcggagcgcgatcgaattgacaacatggctgaactgtacgcgatggtcaacgcgttggagtgcctggagaaggtgttcagccgggattatatccacgccaaggagtacacggcggaatgctcaaaactgcttgttcaaatcaaggttgtactgtttgatcgacgtcgaaaacattggttatatccttacacctttacatttttaggcatttttaaagtattttatttaaaaattaaaaggagtgacacttatgtttttggcacaacatttcaggggtagcgacgatcttttttgttgcattttacataaaaaaaactatttaggtatgtgatttttgaaagatataaaattttttgctataacacgcaaaaatggccattttaattgcattcggaattagtactttcaaaaacanaagttaaggtggctttgcgattggttccccgcatgacaattgacgagtttttccgctcatattacattcaatgcccggccgcgttggagcgtattcgtgaggttttttttaattaaaaaagagcaaatttaattttcggattcacaaatttgtgcataaaatttaatcgttaggaccgacccattacggtgcgcgacgacaaaggaaatgctctcaaatgcattgcggacattgtggagctgttcatcacattcctggaccaattgaagctgaacattcgcgcggtggacgaacttttccccaatctgaacgacctttacgcctccatcaacgcaatggtaggatgctttttttattcctattccacatttttcagagtactttgccggacgatttcgacgccaaactcagggtgaaatcgtggtaaatttggtgacgtttttattgtctgagcatgacgactttttcaggcatgacaagctgcagggaatggctgctcatgaggagattacagacgaagttgcacgacaggtaattttggaaggcaacaaaaacagttacgatgattccctgacttag

SEQ ID NO: 46101 - DNA, 3186 bp, Heterodera glycines
atgatttgtccggtcgacaattcgggctgtttcacggatttggtgcccgacttcaaagggctcttcgtgaaggatgccgacaaacaaatcatcaaaatgctcaaggagaagggacttctggtcaagcaggagcagcacaagcacagctaccccttctgctacaggtcgcagactccgctcatttaccgtgccgtcccctcttggttcatccgcgtcgagtcgcttgttgaccgactaatgaccaacaatgaagaaacctactggtctttacttgaaaaacgactcctttcaacccaataacatttttagggttccttccttcgtcagagacaaacgttttgccaagtaaaggatttttggcttcatttttgcgctaatactcaaattcaagttggttgcgtgatgcgagggattggtgcgtgagcagaaatcgcttctggggcacaccgattaacctttgggtgagcgacgacttccaagaaatggagtgtccaggatcaatcgacgaattggagcgattgacaggcacaaaagtcactgatcttcaccgagagaagtataattttggaatgtcaacgtagttattctttgctattattttaattgggttatatttcagcattgaccatcttcaaatcccctcaaaaacgggccacggaatgctcaaacgtgtcactgaagtcttcgactgttggtttgaggtgctttgggtttgatttttcctctgcattttcgcttcccttttagtcgggttccatgccttatgcccaacaacattatccatttgaaaactcagaagtttttgagcacaatttccccgctgattttattgcggaaggttaacttttgtaaattctctttcatctttgatttttctggcatttcctttaggcattgaccaaacccgtggatggttttacactttgttggtcatttccaccgctctgttcgaccgtcctccattcaaaaatttggtctgcaatgggctcgttttagcttcggacggaagcaaaatgtcaaaaagcaaaaagaatttcccaaatccgttggatgttgtcagaaagtacggagcggatgccttacgtttgtatttgatcaattcgccggttgtccgtggggagaatttgcgcttccaagaggaaggagttgccgaggtcagcaagcaggtgctgaacccgtggttcaacgcctacaaattcctcagcactgcgatgagcatctatgaaagtgttcgtttgacccaacaaataaatatacattcatttgtcattcattcttttacagaatgacaaacaatttgagctgcgaagcgccggtttttccaatgtgatggacctgtggattttgtcgtttactaacagtttgatcgcttttgtgcgcaaggagatgaagtaattatcaatcagtaaacgggatgaggactaattcatacatgtacaaggggtgtctcagcccagggccatacgacggacgattgggacagaaggggggggggtgtctcgggaccgattttttatacgaaggtccaatttttttctggcgacctttttttgttgctattcagccacacttttttgcggcgtgttttacaaatggggaaggagtgacgggcgttccggcggtgccgataggcgtcgccgggaaaatttttttgtaattttgtatggatttcgctaaggaaattgttcaaattttcccccttcgttaaccacctccctccacgagagaccccctccctcttttacagccgccccacttacgacgaacgagaggggggggggggggcggggtgtcgagacctccttgtacatatatggactaattgccaacgaattaggggaattggttttttgggcatcaatacttcggctttttgaatcaaaatgtgtcgaattttgactccaatccttttccgttccctgttgtcgtttccttcgtttaaaagtgcaaatgcttcctcatcagactgtaccatctctatgctgtggtcactccgctggtcagctatttcgagactctcaccaacacttacattcgcttgaaccgttcgcgcatcaaagggactgtcgccggtgcgtcggccgatgaccaaatgttggccctctccaccctttcgcatgtgctgttgcaaatcactcgactgatggctccgttcactcctttcttctccgagttcatgtggcaaaggctaaaaccgttggtttgtgcgggggggggggcaaaacagaaaagtcaagtccctactttctaatatttgtaaagattggcgatgctgcggaaaagtcggtgcactttacgatgttacccttggcagaagctcagttcatcgacaaagtcgtggagcgtcgggtggcagcgatgcgaattgtggtcgaaattgtcagaacgttgcgggaacggaaaggaatatctgtgaaggtgccatccaaaattgccatttcattaatttttatttcggcatttttagtacccactgaaagaaatggttgtcataaacaggtcggtatttttcgcaaataaatatcaaattgacaatccaataattttttcaggaatcagcagttccttgacgacctcagctcgctgagggaatacattctgtccgaatgtaatgttgaggaaatgaccgtttcccaggacaaacaaaagtacggtgttcagctgaaggcggagcccaactttaaagttttgggagcgaaattgaaaaccaatttgaaagcagtaacaaattatttaaaagtgatgttttctttcgattaaatgtgttccagttcaatgcctactctctctctctgtcattcagaatcaagtaactgaagttgaactcgaagcactgttggccgacgggtcgctgactgtgctgggacacgaattgacaacggaggaagtgaccgtttcgttcactgttaacccgggcaacgcgacgaaatccaatgacaaatgggaaacggcgaccgcaaattcagtgagtcattcgctcacttttgatggtttctttccattggttggtttttgcagtgcgttgtgatggtcaacacaactgaggacgactctttgctttcgcgtggatttgcccgagagattataaaccgagtccaaaagctacggaaacaggtgcttacagtgggacaattacagttttctaagattatttttgtgatggcagggcaaattggtcgagactga

SEQ ID NO: 46102 - DNA, 2297 bp, Heterodera glycines
  unsure (1)..(2297): unsure at all n locations
attgccaaattcgagactgatctcgttcaattcaaaacgcgtatttcncagccagacaatgggcaatcagctgatgttcgcactgttttggtgcgcaaattggtggaaagtgcgaaagaagtgctctccgattggttggacgttacccggggaaatacggtcactaaacacgacattttcgcgaaattggccagaaagtaaggaaatccgaatatgcctttatttgagtcatgttttttaaggtatgaaaatgaatttttgtgcgatatgaatgcgttaaatgttcttgagccggacgtgttgaccagggtcagcgagtacattcccgaaatcattgattatgtgcagcaaatcatccgcaacggatacgcttatgtgtctgatggatcagtaagttttttttgaatgcatttgatctctacagtgatccttttataaatgtttctttagcctttctttttacccaattttattccttttaggtgtattttaacactgcccaattcgcatcaaaacccaaccattcctatgcaaaactcctccccgaggcgtatgctgatgcagaaagtgcggaaaaacatttgcgagagggggaaggcgaactcagcgtggcagtggacaatttgaaagtgcgcaacaactgcacccctttttccccaattaattaattgtcgaatttattgcagtttttgtaggaaaagcgctcgccgtcggattttgcgctttggaaagcctccaaagacggagagcccttctgggaaagtccctggggcaaaggtgtgtcatttattccacatcacctgttttccaatttgttttctgttcaggtcggcccggttggcacatcgaatgttcggcaatgagtggggccatttgcggggacaaattggacattcacgccggcggatttgatctcaaatttccccaccatgacaacgaaattgctcaagtgagtactctaactgttgatggaaaattccgttttgaatattttttcctttaagtgtgaggcgtacaatgacaacgatcattgggttaactttttcctccattgcggcacattacgaatcgaagggctaaaaatgtcgaagagtttgaagaactttgtgacgataagggaggcgttgaacaaatacactgctcgacaactgcgcctccttttcctgatgcacaattggacggacaatttggactacaggtggaccaaggaaatggaggaaaatacggaattagacaattatggcaaaaatgaaattgcaatcctaaaaaataattattgtcaaaatgttcagcgaatcgacgatggaacatgccattcatttcgaaaaatgtttctgcgaattcttcctcaatgtgaaggatattataagaaagcaaattaaagaagtggatgaattgtcccaggtaaaaataattttaaatgataacgaaaaatttaaaaatttcaagtgcttcaaaaaatacggtgaagaggagatggaagtgctgaacaaattcaacgcgatcaaagtgtccgtgcatttggccatgtgcgactccatcgacacacgcgcagttcttgacaaaatcaggacgatcatttcccttctgaacacttacattatggtccggaaacaggaggaagccgtacttaattgccaactgctgacaaaatgtgccaatttcgtcagagaattgctttgcatatttggcgtacagccggacgtgggcaaatacgaattctttactaaagactggtaaaatattacttgagtaagctcgatattctgcaacgaccataccaaattaataactttttgtttttacttttaaaaatttaagaatggcgcaatgattattaagccatggaatcaaaaaaattctcattttagctgcgcaacttctgacgacagagaagcgattatcatgccgtacttggaaatacttgcacagtttcgagaggtcgtcagaagcgaggctcgggcacagaaaaacattggaattttgaaagtacatttaaaccagttaatatttcaaactaagtttgctccattttccaggagtgtgacagactgcgcgacgaaatcctcccggaattgggcgttcggttggaggaccacagcaaagacacttgtgttaaattggtggacagagagacactaattaaagagagagaacagaaagaggcagcgcagagagaaaaagagcaacggaagatacaactgcagaaggaaaaggaaatgaagagacaggcgaaggaagagcagaaaagaaagacgagagagacacaacagaaaaacgaaagggaaaaccaatga

SEQ ID NO: 46103 - DNA, 1500 bp, Heterodera glycines
tgaacgaataataaatacaacaccaaaactatcgttgacgttccttcccttttcttcatctcgaagaagtgttttctcgaggcgtttaaactgtgttttacttcaatccttcaaaactcaaaagttcgattaaattcaattttgaaagaagcaaaagaggaaagagacggagagaaaagcggcgggcgaatgcaccggcggaatgagtgaatgcatctgccgtccgtctgccgtccgtctgccgatcagacgatgggcactcactcactttccctcccagcttttcctctttcaactcgccgttcatcaattcactatcttttttctctttcaaacgaagggggaaggggaaggacagctgttatttccacaattttttccattaccaaattttgatcgttactttgtccctttcccttgtctcgtgattcattacaatgaatttgactgacattcataccatcacatttcaatcaatattaaactttgccaaattcaattggctttaacccctttccctcaggctttacacaattttattcttgtattttgtcgatttatggatttgacctcagattctattaccaacattgacattgatcaaatgctgaaacaaatcaaagcgatggttcgttcgctcgtgttcattttggttcaattattgcttaatttttaggttttcaaattggctgagaatggtgattcggaaagattgcacactttgctaaatacattaaacacggaacaattgaaacatttgctgaacgtgaaagaaccgcgagagaatggcagaaatatgcttataattgcggcacgaaacggccatataaaagtggtcgaacttttagtgagtgaattcaattaaaataaattcggaaatgccgttttaagttgaaattgggggctgacccgcatgagactggcacagtgaccttcgacggtgaacagataagtcagtgcactttaatgaatatatttgggtgctgggctaaaaaggcagttttttttatgactggtatgccattttatataaccaaattcagctcgagttcctccgctttgggccgcggcggctgcgggacatttggaagtgtgcaaacagttggtcgccaggggagtgaatgtcaaccaaacgacgagtaccaacagtacgccattgcggggcgcatgttatgacggaaatttggacattggtaattgaaaaaatggacgacattattattcattactttatttgtgaatttaaaagggcactttcacatatttggtttagtcaaattcctcgttgagagcggcgcggacatcgaaattccgaatcggcacggacacactgcgctgatgatagcatcgtaccgagaaaaagtggaagttgtgcgctatttactttcggttggggcacaaacggacagaacatcgaccaaaggttttttttgttttgttttgttgtttatgtaaaatttgaaaattgtaattattattatttaatactaattccatttc

SEQ ID NO: 46104 - DNA, 1531 bp, Heterodera glycines
atggtgttcaaaacggagcgcgaacggcccccgcactgtgtgcatgacaatttggcattttatgtgaaggagcgacagctgcgccgattggacatgaacacgaggtgagattggatgggtatattgcatcaatgttttcaaagcctttacaattagttaacgaaaatctatccaatttagttttccattgcatttttgttcctaaattttgattggatgacacttattgttattaggtaattgcgatagttattcaaaaatgggttaatatcaaattttagcccattttcgaattgaaaactttttacaatagccgtagtcagatgtcgtgtttatccaataattaaatttactatgaaaatagtcctcctttaggggaaaaactaatttttaatttccagcaaagacgtggcgttggctcaggtgaagctgaacaagttgactcagccgtactattcgctgcattacaatccggcggagaattgctttttgctcgtcacgcgtcccgccgcaaacattgagaacagcacatacgacttgtacaaggtttctcaaaatttaaacgcatgatgaaatgaatttttggaatatttaacattttttatgttcccatatatttcctcctaaactttgcacatttttcgcacagatttcggccaaggaaggcgagttggacccgctggacgcgaaacggtcgccgggccttgccgctgtttgggtggcgcgcaatcgattcgccgtgttggacaaaacgcatcagctgaccattcgggacttgcagaaccaggaaagtcggaaggtgagtcgtcaattaacttgtttatttatttcagacatttctgccaatttgaattttaaaaatgtttgtcttcctaaaattacctagaaattttcgaaattatgtttttaagaaaaatgctttaatgctatgctattttttcacttaaatcttatattttatcaccaattggtcaaggttgaatacacgggtgccgtcgacgacattttctatgctggcacggggctgttgctgttgaagaacgcggactctgtgcaaatgtacgacttgcagcagaagcgtgtgctggccagtgtcaaggcaacaaaggtgttgtaacacaaaactgggtgttcaaaattactgaaaatttgaaaaaaagtgtttgaaattgaagttttatccaacgataaacctaaatcgtcactctgtttccgcaatgtttttgctttcaggtaaagtacgtcatctggtccaagaacatggaatgcgccgctttgctcagcaaacacaccgttaccctcgtcaccaagagattggaggtggcgttgtactctttggtctcgtctttcaatcttttttctccaggtgctcggcactgtgcaggagtcgactcgggtgaaaagcggcgcttgggacgcgggcaatgaggcctttctgtacaccacctccaaccacatcaagtacgcgttgaccaccggaggtgaccatggcatcatccgcaccatggatattccgcggtacattttggcg

SEQ ID NO: 46105 - DNA, 2862 bp, Heterodera glycines
  unsure (1)..(2862): unsure at all n locations
atggctgcgaccattaatcatatatctgcaagcaacggaaatgatcaaaaacggcgacatttggcaagtggaaatgagccgttgcaacgcttcggagaggcaaaaaaatggatgactgatatctatgggcaattggatggacatgttggagagttactcgaattctatttgggtaagatagaaacaaattattgtagttgtaactggaaagtccaggtttggttaaaaacggacaaaaatttgttcctcccgctcaaattgatgaaattggacattttcgcgactcagtaagggcaattcgtgaagtaatcgggcgggacaagatgaaggtcgtcttcttcgggaggttgattgcgggatttctctagtgaaaatcagttttatgtggtttcagaacaagcaacggtaagagcagtgtgatcaatgcgatgttgtcatgccgagtgttgccccaggggatggggcacaccacttgctgtttcttacaagtggaaggggggtcggagcaggacaagtacttcatgatggaagacggggcgaagcactttccaattgctgaattggattcggttgggcatgcgttgggctcggaaggcatgggctccctgggacgcgactcgctcattcacattttctatccaaaatcggcgtccaaattgcttcaaaatgatgttttgatcgtggacaggtacaaaattatggctaatttgaccatttcattggtttgcgtctttcaacagccccggcgttgacctcagtcccgagtttgacagttggattgacaagcactgtttggatgcggatgtgttcgtgttggtctccaattccgagtcaacgctcactcaagcagttcgctttaatttaaagctcaacaaataaaacatatatttactgaccaattgtaggagaagaatttcttcattcgcgtcagcaaaaaattatcgcgtccgaatattttcattctttgcaatcgatgggatgccagcgctactgagaccgatgagagccgtgcccaaatccgtgctcaacacgagcaacgatttgaggattttttagccaacgagttgaaagtgtgcagtgtggcggaagcaaaaaatcgctactttttcatttcggctcgggaaatgcaagacgcaaggcttagggagaagggggaactgaccaaaacgagtgggtcagcaaacaaaacgaaagataagccatttttaaggtccctaccagcaggagggtttccaacggcgagccttggagttcaaacaattcgaagagcaatttgaggcagggcatttgaaaattcggtgattctatgcaattgaatttagaaatgcatttcgaagtcagcaattcggacaaaattcgaggcgcataatcgccgtgccaatgacatagttgaggcaattcaacacaaccttagcacagtgctcgatttggccgaccaagaacagttcaaacacctcaaaatttaaagaaaaatccctattccaaggaaacgccttgcgctggaattccaattaaaaaccaaagaattcgcaagttgtcgtgacaatttcaaatttttcgagcggacttatttcaccgaacaacagaaattacgttctgaagtgcatttgaaggtaaaatatcataacagaaggaagggggagaagaaaacagaaaattctttggtcatttctatgggcgccattgataaatttcccctccaaattttattttcaaacagttcgtttaaggtcaaaggagaaaaattcaaactaataaaaaaaaattaattattagagaattttaatgatctanaattcctcagcgtcgtaattattttttgttcttttaacaaaaaaaatttttaggtttcggctgactttttagacgaaattggacgcttagaagcgatcattgaccgtttcaacactcatttgttgatgaccccgaactgatcagcgattacaaacgccaattggccatccatgtgaatggagtgttgtcggaagggctgcaaaatcagtgcacgggcggactaatggcccaaatttggagtttggagcagtctatgcacggtgagtgatgaccaattgaaagaagcattcatcctttcattacttcaaaaaaaattagcctttgtcaaaaaaattcttaacgaacggcacgctgcgcagctggacaaaatttggcagtataaacagcccttcaaattcgcaattgtggtgaactgtcctgaattgatgtccgatttttacgaggacttggaattccgcttttcacttggagttgagaatgtcgcacgttggattttgtccataacacgaggccaaccgatcaccgccattgaccgaaacgttttggtccgatacaattttattaattaaaataatattaatttcagcggatgaacgtattgtcacgacagggacacaatgacggttgatgacggagtactaacaattaaaaagaaaaactgatactgttttaggggcccgaattggccatggacagcaacggcctgacaaacgcgaggtagacgcgttcttgtcgaacatcgttgtgcagtcggccacctatttgatgaatggttccgttggcgtgaccattgcggggctggtcatttacaagaacgttgactggcgatgggtggtcggaggagtgggactcgttgccggactatacgcattcgaacgcctccgatggaacaacggggccaaagaggagcgactgaagacccaattcagacagcacttggaacaacggcactcaattcgtttccatttgtttgaaaataaattgaaatttagcctccatcaaaccgagagtatccacaccagcagctgtgagcagcaagtgacccgggagctggaccaagtgaattga

SEQ ID NO: 46106 - DNA, 930 bp, Heterodera glycines
gttcagtgtcgtccaaatagtgtttctccatcggcgtttaattccaattggcatttctttacattttaaacaaaaagttatgcttgatattaaatctaccgcagcagacatgttgcatcaaaagataaaccaaaatgaaagcacagaatgggaacaaaggttggcaaaaatgggagaggaaaagagggtaaaaagggggaaggacaaagacactgatcagacggagaaccaaatccaaggggaaggacaaagacactgatcagacagagaaccaaatccaaggggaaggacaaagacactgatcagacagagaaccaaatccaaggggaaggacaaagacactgatcagacagagaaccaaatccaaggggaaggacaaagacactgatcagacagagaaccaaatccaaggggaaggacaaagacactgatcagacagagaaccaaattcaagaggaaggacaaagacactgatcagacaaccataatcgtaattcactgatctgctggttgttaaggccctcctcctccgtttctgttgccgagcggcgtctgcccgactgtctcataatcggagtacgaaagggaggcacccgcgctttgttggatgcgttagctttgcatccgcggattcgcgtggctcggcacgaagtgcatttcttcgaccggacggaactcttccgacatgggattgaatggtaccgcaagcaaatgcctttagcaaagacggacgaagtgggcagaagagaggacaaacggtgggcaaacaacggcacttttaggtggtcgtggagaaaacgcccgcctattttacgagccctgcggtgccgaagagagtgcactcgctgaacccggggatgaaaatgattctcattgtacgcgagccggtgaccaggacaatcagcgacttcacccaggcgaaaaacgatt

SEQ ID NO: 46107 - DNA, 1403 bp, Heterodera glycines
ctttcgacggcggatgaatccccaaattgaccgtgtccatcgggtggacaattttttgtccatttgggttttggaggcgaagggcgtcccggcaaagcgacggtttttctgcgaggtttctcccttttgtaaacctttctctgctcaaacggtacgcaaatttaagctgtctttggacgggcaactgaaggcacgcacttcgacgaaagtgagggaaaagcgaaacaaaataaaatcagaggaataaataataaaaacaattaaaatgaattgagtataaaatcattttttgctgcctttcctaggggatgagcgatggcatttgcttttggggcgagtctttcgagttcggctccctccctccttcccgtttgctgtgcatcgaccttttccgcgagttggacgccaaaaagacggcatcggcacggagggcacgcggcggcgccgaaagggaggacagacaaactctgatcggattggtgcacattccgttggcggaattggcaggacgacagcctgtcgagaaatggtcgagaaatgcaactgaacaattaattaattgttgagcatttgggggggggggggtccaacttttgtactagtgaattcaattattttatatattttttataatagaattacatatttataagcatccataattctatcgcaaaagttttcaacttttggctaccgtaacctccgcttttacaccgtaattattcgtttgttttttaggtattctgtcagttcaaatgagctcaacggcaatggcagcagcggcgcctcaacaaatgccaattgcgctgattctctgccgtccattcgcatcaaagctcgctaccaatccgtgcacattttccccctccgcgcgtacgcgccgctcagagaagtgccattttaattttcaattttaattactttacacttttttttcgctcatttgttagtatcttcggcttcactttttgccactttgtgccacttttgagcccattttgggcgtaaaggccaaggaggactttgcaagtgcgttggtccgcgttttgcagcacgaacgacgggcggccgaagcattggccgatttggcaatggtcgaagtggacgggcaagaaaatggtgagaaatttcattggcattctgttctttttggcattccattcacctctccctctccccttcttttagaccatctccttttccgtggcaattctctggccacaaaagcagtggaggcgtacatgaaactggtggccaacgactatctgcaggtcattcattcattcgtccattttggcactttcccctccctttggcgttctgtcctttccctctgattattcgctcgtattttcagagtgttttgggcgatttcattcgccatttgttggccaccaatttga

SEQ ID NO: 46108 - DNA, 834 bp, Heterodera glycines
atgattgtgaagcctgttaaaaatttttttcaaaagaatgtgaccaaagtttggctgaagccgccgcctcatgacacttttattgagccttggtttccctatgctttgtatgtttttcaattcaattttaaataactttttaccttcttccattttagaattctaaagccaattggtcgagcatttcagcgtttgggcgtatacacttacaacaatttcatcgcccgaaccacttttggtctttacccgcgagaatggaacccgcgtgtccacggcccatatgttcattatcgttactacggaacaaacagtgagtttgaaacctttatttcgttaagaacattgtgctaatcatttcctctagttcattgttaatttacttttccttccaataatcgtcaactttaccccgtggattaattgactcgaaaatattagcagtattaccattccattcagatgacattccgctaatggaagtcaaagtcaatgacttggccgcgtacatcgcccgtcgtgacaaatctccgcgtgccatttggcgcgaatttatgcgcaacttctacaagcttcagtacttctacttctcggggcccgagttcggcaaccctttgacaatgatttggcgctatctcgtcattttcatcgtcggctttttcttgaccctccgagttgtgaccggcgcggacacgcgtttccgacacgctttgtaccattggtagacggacggacaaagagggccgatgagagaaaaaggaaacagagcgatagagcagaaacaccgtccgaattattgttaggcaatgtctccatattttctgtgctgttattaaa

SEQ ID NO: 46109 - DNA, 2279 bp, Heterodera glycines
atgtccggcgctggaagtggacgccaaaagaggggcaagacggaagcaccgcgacgcccaacccgccggtcaacgcagcagactcgtcaggccgacactcagcagcagcaaaggcgtgcaccagcaacgcaggaacagagtgtgctcgcgccgcagccaactcttcgcagatgggaggacacggcagaattcttcttcgccctggaacgcttcgtcaacgacacaacgccgcgctccgtgcaggacctggtcagcgaattcaccgaactcaacgcagcgccacgaccggagccatcgcctgagtttacacggtgggttttggcgtcgttttcaatttgtgcatgtctaattttcccaattttcaattgcaggaacttggaatgcaaccgcgaccgagatgtgatctgcacggaaatcaaccgggtgcgactccacagcggacgctacatccacgccaactggatcagcacgttcggcgagaaccgcttcatctgcactcaaggcccgctcgagacgacctgcgacgacttctggacaatgatcgtgcaggagaacatcgaaggcattgtgatgctctgcgacaccatcgaacaaaatcggatcaagtgtcatcagtactggccgaccgcggacaacaaggtgggttttgaaattttacccaatttaacaattaatcgtttccccttccctcctagctcatgcgcttcgccaacaaccagatcattgtcaaattcgggcgcgaataccacgtggaaggcgcgctctacaggacggacctcatcgttggagcaccgcagatgcgacagggccacttgcgcgttcaacacttccactggcgacaatggcccgaccgcggagtgccccacagcgacctggccccgctgcgcctgctgtaccatgtgatcggcgtcccccgagcggttgtgcactgttcagctggtgagttaacggaaacaaaaacactgaaaaattaatcatttttcccattgcaggcatcggacgcactggaacgctcgtggcggtgtacttggccaaccaaacgctgcacctcggccagcctctcaacatcttcgctctcatccgtgacctccggcgccaacgatcgcaaagcatacagacgctcgaccagtacctctacatttacttcgtgattcttcggtgggttttcaaattttcatcaacaaaaatgaaattttaattttttcagttatgcacaaaacaaggcgtcaaagctgaacatcaacgtgaacgcgctcaacgccctcgtgcaggcactgaactccaccatgcgacggggctgagctgctgctgctgctgacgtcgccgggccggccgatgacggagggatcgtcaggatggaatatgatcatttgcgaatgtattgcgttgtcaccgtgtccataaactgtcataatgccccatattgtaattgtcaatacacccgatcatttgaattgtatgtatatgtattattgttgatgtgtgcgcatatataaactaatcaaaatgagaaattttcactttgtcactttttgggtgtttcggcacttctgacttatatagaggggggatttttaaaaggatcgaaaaatgactaatttggtatcatttgaaagctctagatgagatataacggacagattttcccacagccgtcaattcggagcataaccaagactggcttcggggggggggggggtgctaaagacaaaaattcgatttttaaggggtgtatttttctttttcagccgatttttaggggtgtatttttgcaccctaaaaattgactactttacgtttcttaagcatttagaaaatttctttatatatttaaatgcctaaagcagccaaatcaaacgctgtgttaaatcgtcactggatttcaaagttcccggaaggaacttattcaactgatggaaaaattaatccgggactttacaaattgattgatatcgccaaaattttcattggaggtcgggcgaaaattgataaagactgatattaaatatgatttttttttgcgtaaatacacttggtttttccaatttttagcacatatttttgcattttttaacacatatttaggccttttttttggtttttagcacatattttgggtttttttagcacatattttattacatatttcaggatttttagcacataaaaatcccagccctaattataacagatattgtaccaaaaatagtcaattttcatttttgaagcatatttttgaaatatatttcatagaatttcattaaaaatcgaatttaaga

SEQ ID NO: 46110 - DNA, 832 bp, Heterodera glycines
atgtcttttgaaaaagcctatgctttttaccgtaaaaagaatgacacggccgctcttggagtgatcagaaaattggatggttccgtgccgcgtgtgatggaattgaaggcgcaaattctgtaccgaatggaacaataccaagaagctcttgaattgttcaagttagccaccacattacgaattctttttctgtatttcatttttcaggaagttaatccgaactcacagcgacgaatttgacgacattcgacgagcgaatctcatcgcagtcaaagcgcgacttcagtcccaaggcgactcgcaagaattggacttggccaacttggagtccttcgagactatgtacaatacgtcgtgccatatgatcgcatgtcaaaagtttgacgacgccctccgactgctcgaaaagacggccggtaagtgaaaagaatcattaaaggtagtagcatttacaatttcttccaaaaatgcttttctattcaaaaatgtgtcactaaatacagttgaatgtgaacggtcattgaacgcggacggccttggcaaagaggaaattcagcaggaaatggcaccaattttggcacagaaagcgttcacattacaaaaattggaccaaaagaaagaggcactaaaattatatcaaaatgtgctgaaaaccaagtaaattattgtcattccattctaataaataaaatctgtttttagagccttaaattggaaattgaaagcggcgattgtcgagaatttggaagcggattacgtaaaatttgggaagaaatggcgaccgatgaaaagtgcacatggcgacgaggaggagccgatggaggaggacggg

SEQ ID NO: 46111 - DNA, 781 bp, Heterodera glycines
atgaaccgacttttgtccggccgttctctgctccccaaaatcatgcgaaatttttcacacagcaatcgcctcgccgcctccgaggcggacccggaacattacggctatttcccggacccaaccgaacagacgtggggcctggagagggaaatgcttgctgcccgcctgaagggcgaagatgtgggagaaaaatttcgatttttttttgaaagtttttttgaaattttagcgctactcacccaaaatttattaccgcgctgaacattcgaccaaggatgtcccaaatgtggtgcatgtccatttggaggacaaagtcgtcggatgcctttgtgtgtgaaagttacaaatttttgcgctacgttaaaagtgggggattttgaattttattaaaaaacaggggggggggctttttctcggagacttttggggtccctgatcatgaattttacatctattttgatcagtttctaatccctaactcgaaattgaacaaaagttgaaaatccgattcgtgattagtagagctcggcctggacctggatttttcctgggtccaggtccgggtccaggtcatttttcgtcaacctggatttttcctggacctggatttttgtccaggaaatccaggtccaggcttttttcaaaataccgagctctagtgattagggattccaaaaagctccgagaaaaagttttaaattttaggcgaacacgacggagaccatgtgaattattggcacatcagaaaaggcgacacaaagcgatgcgagtgcggacattg

SEQ ID NO: 46112 - DNA, 1353 bp, Heterodera glycines
atgacaactctcaagaaaatcgacacggcgagtgaggacggtctcgaggggggcctttcacttttcgacatccctccgacgaacgttgcaattaataaatccagtattcgggaattactccctctttcagcaataaatcaatctggaccgtatatctttagacttttttcagataatcagttttgtgatctcaataaaacttttctttatttgtcaacttcaattgagagaaaagacaaaagcaattggattccgattaccaaggacagtgaagctgaccaacacgtcggtgtcattcaaaattttgggcacagctttgtcaaaaccttaaaggtgtcaatttcaggtgtcgaatcttatgattccggcatttactatgcgtttagggcatatatgatgaatgaattgggattttcagaagatgtcaaaaagggtctctgtgaagcgtcctgctattatgtcgacgatgtcgaccaggatgattatacaaacagtggctttaaaaacagagcgtcacgttttgctgatggtgcaaaatgtgaaacaatggtgaaacttaattttgatctcggccgtcagcccaatctattgcttaataactcggatgtcatttttagcatacaccgtaacaccgatgattttctaattatggcaccgccatatgtttcaggaaatgcagtcatagcgaacccgcacacatatcgtattaacatacatgatattagaatttatgtaaaaacagtcgacattacccagtcattaaataacgtaataagcaatcagctacaaaccacctcggccaaatatcctatgagaaaaattgagatcaggagtcttttcatcccacgaggcacttctgatctctcacacaatgtttttaccagcattgttccgagacgtttaatcgtcgggtttgtttcaaccggtgcgtataccggaaatcctaaagagtcacccttcgtctttgaacatgcaaaaatacgctctatcggtgtcgaagcgaatggaaacatattccccgggtcaccctattctcttaattttgatagaaacaaatacattcgagcatttgttgacatgtatacaggactcgggatggacgacggtgaaagaacaatgtcgatcaatatacaaaaatttgtaaacgggtggtgtttcttcgtcatcccgatgacctctactctagaggacacccccggttttgaattaattcgaaacggaacgaccagcatcaaggtgcagtttaatgagcctataaaggacggcgggtatgagatgatagttctgggggaatttgattcgattctatctattaatgctaatcgtgtgctcagtagcgacggaagcatatga

SEQ ID NO: 46113 - DNA, 838 bp, Heterodera glycines
tgatgtcataccatcaggagtgaatataaaattatatgctgatgatgttaaaatctatatttgttataaagcaagaacagaaacggaaattatgcataaagcattgcataatttattcgaatgggcaaataaatggcaaataaaagtttcaattcaaaaaacttttgtactttatttgggttcaaaaaacccaaaagaaacttataaatttgatgggaatacaataaatgctgtggatacaattagggatttaggagtaaacattgataacaaattacaattttccaatcatgttaatcatataacaaggaatgcgtatttacgtatgcgttccttgttccgaataattaaatccaaatcatctaagatttggattacgttatataaaacttatattaggcctttattggaatacgctccggaggtttggaatccgtctcttcaaaaaaatattaaaaaaatcgaaaagtgtcaaaaatatttcaccaaacgggtgttttttaaatgcagccttccgccaattccataccaaaatcgattagaatacctgcaactaccaacacttgagaaaaggcgaaagctatttgatctgttcatggcgcataaaattgtttatggccgaacagatctagatatattaaaaattttcaaaccttctgaacgctttaatgtccccttttataggtttaacacaaaatataaattaggcaaaaaatttattccctttgcggggagggctacaaaattgtggaatcagctggataaagaaatcattaaaataaattctttaaatcaatttaaaactaaaattaaactccttaacgtataaaatgaccgg

SEQ ID NO: 46114 - DNA, 548 bp, Heterodera glycines
atgatttacgtccgaaagcagggcgaagagattttcacgccgcttcatttggtgccgccatcgcttgggtaaaatatttaaaaattaaaaaaaattgtttaaatttcaatgacattttttagagggttggcacgcgcagtcagcgaaaaatacaatttggacgagtcaaaaattgaggccttctacaaacagtgccaaaaaggattgaccgtcaaaattgatggtgggaaaatgactcattaaagcaattaattattaaattatattttgcaaatttaaatttttatcagaaaatttaaattattttttaatttaaattgattaattttaatcaaaaataaaaaacaaacttatgtattattttcagatgatatgctgcgccactacaccaaccaggacacttttcaaatcgagctgaagcagtccgagttggacaggtccgttgacaatgagactgggcctcgataactcaaatgatcacagtctgatcagtcagagccctcttttttctaaacctattgctttgatcagttaatttattccggaga

SEQ ID NO: 46115 - DNA, 753 bp, Heterodera glycines
tttctcaggtgtccgaattgcaacagactggccgtcaaatgctgatggtttcatcgggcgccgttgcgtttggccgtcaaaagttgcgccaggagttggtcatgtccatgtccatgcggcagactttgcgcgggcccgccggcatgcagacggacaaaagggcgtgtgccgccagcggaatgccgggactgatgagtctgtacgaacagctgttccaacagtacggtatcaccgtagcccaggtctgtcctgtccaaccatttgtctatccccatggaatatggtccaatttccatggtcattttgcaggttctgctcaccaaaccggacattgacgacccgcagcgacgcaaaaatctgcaggcgaccattgaaagtctgctacgtctgaacattattccaattgtgaatgccaatgacgcagttgcacccgacccgaagcttaacatggtaagcggggcgtgaccggaaaatgcgtcagtgatacaaatattttaatattaagttttgtagtattgatattgtaatacagaagtataattctataagaatattgttctgaatttcgaaccccgaacccgtattcgaacaaaaagttgaaagtcaaaattttcgaaattagtgtttttcttcaaaatcggtttaaatacaaggaaacaaactgatccatcaatccttcaataagagagcatatatgccgtttttgaaccaaaaatgcaaaattcgaaaatttggactttcgactttttgttc

SEQ ID NO: 46116 - DNA, 630 bp, Heterodera glycines
atgagtgtcggtttgtcctcaattgtcgatgattctcaccagcgacaaagtcacttttgggctgagattctcccgcccggcgttggtcaccccaacgacatttcgggagatgccatttggacactttcgagctgtaaggagggccttggggtgcatcagttgttgaacgaccgcgaagacacttattggtaagggggggggggggggtggcacactagacatttagtgggaagggaagcgaaactttttggcgattgttccgtcaattccttcccttcaggcaaagtgatggtcttcagccgcactcaatcaccatagaattccaacggaaaacggaagttgactttctgctgatgtttttggactacaaactcgacgagtcgtacactccctccaagtgaactttgaattttgttgcttttgcttttacctttgttttttcagaattcaagttcagaccggcgcttcggtgttggatttggacgagcccaagtccctttccttcacagagccttcggggtggcaaatgatcgaccttcgccatgccgggacgaagcgaccggcgaatgtctttgtcatcgttgttcagattatccaaaatcatcagaacggacgggacacacacattcg

SEQ ID NO: 46117 - DNA, 499 bp, Heterodera glycines
cttcagaatacatccaattttgtcgtgcgcaatttgaagtgtttaattgtcgacgaggcggaccgaattttcgacattggatttgagcaggaaatgcaccaaatcgtcaaattgttgccaaagaaacggcagagcatgcttttctccgccacatgttcgcccaaagttgacgagttggtaaagactgcgctgaaaacggacccactgaaaatcggagtgatggagcagcaaagggacccaaatgacatggccacggttgaggggttggagcaggtcagcgaatggattctagcgggactctgtcatttaattgcaattttttgttgaaattgttttgcttgtaaatattcaaataaatctttttgtccatccgatctgaaataattactttttagggttacgtcgtttgtccttccgaaaaacgttttcttctgcttttcacttttttgaagaaaaaacgggaacaaaaaggtgcttttttatgtttttctcttttaat

SEQ ID NO: 46118 - DNA, 340 bp, Heterodera glycines
gactttctcggtgactcgcactcgtccatttttgacgttggcgcgtaagttttaccgttaattataattccattacatttgcctcccgccccctttggttcagttgcatttcgttgaacccgcactttgtcaagctggtcagttggtacgacaacgagttcggctactcctgccgtctggtcgatctgatcactcactgcgcttccaaggcatagaaagacgacgcgcaaaagagggaggacggaggaggaaaagagaaatatgctaattttgactctgcgtttattccatttctctttttttgatgccgtccaatgacgtattttcctgaatttgtttt

SEQ ID NO: 46119 - DNA, 621 bp, Heterodera glycines
atgcgtttgtccttgctccgtgccagcgagaaacattttggcaatttgtcgaaggtctgttttattatttggtctatgtctatttgcatggagaattcttataagtcataaccatgactgtattatcaaagcaattcaagctcatttcatgtagactcgaaatgcattcaacattttgattaagtccaaaaagttcactgtcatttagactattaaaaattaatccacgggatgcaattttctattgttttaggcttacggttggtattacgttcgcattgctccggttgaacagaaagtatggaagggctttttctttgatgcgtttgttaaggtaagaaaaatgtgccataacccacaaaatttattgtgcttttcagccggtcaaagagcagttgccccactggtggatgttcttcttccccgtagtcacttactttttggtcaccgactgggccaagaaagagtaccgtcgtctgggacggatcaaagaattcactgacgaagaatgaatgtcgaattggccattcggactgttatttgtaggaaagaccaccgagtcgacagaatataaatcgaaatgttttggtactgtcaaattgtgtgttatgtccaaataaa

SEQ ID NO: 46120 - DNA, 961 bp, Heterodera glycines
atggcacagtttgtgccctttacactttacccttcgccattcccacgcgaattgttcgaccaggcgatggatgtcaacaaagtgactataatatacggacaattttataaatttaattaacaatttttaattttaaaaatgttttaatttctctaattaatttttagacccttcttttgatgtatttccgtgcgtcgttaccgtccaattttgaatttttgaaagaattgcataaaagtgttctggctgtgagtccatcactccgatatactgctgatctaatcgaaagaaagcataaggagggcattcgacagccattgatgttgatttgcataagagcggtgggataattaataattaactaattttgttgttttcttaaatggtgggataattaattcttatgatataaggatatgataataattgatttcattttttcaaattttgtatatttattttattttttaggattatatggccagcgaagaaattgatgaaaaaagcaatgagaaaaaatatgcgctaaaacaggtaaataataattagcaaatgaacactcttttatttgttttcctaagaatcaactcttattttgatatttatttaattaatatcaacactatcaacaagaatgtggaatcgaaattctatttttaattttttttgccggaaaaaagttataatttgttaataaattttcaccaaaaattgccaatgttcggtcaatttttaaaattttcggctatttcgaagtgccgccagtaaaaatttgaaaacgaacttgttctctgtttaagattgaattgaatggcggctcaattggcggctacggcactcctcagccccttaccgcacttcatcgccgaatgctttccaatgtcggcattgacaattcaatatcggtgatgccggaaaatctgaccagcgaaatgttggccacggcaatgtacagagcatg

SEQ ID NO: 46121 - DNA, 1412 bp, Heterodera glycines
atgattttgatgaccgcttcatccaccgcgtactcacataaccccaacaaaacggttgaagaggtgtgttgggacaaatcagtttgatcccattatttatgccttaaattcattaaaaatttgttttctttatgacagagttttcttcacttttcagcgtccttcggctgttggcaagtcgacaattcttttgggagctttgcaggcccggaacaatgcccgtgtcattttgtccgggtctttggactttttttcgaacaaattttttactgcgacggtgaaccaagcggggggccacactgccaagtgcccaactttttttcttatattatttatttggacattttattttatttagtgccgtaaaaagtgggaatcagcaattggctgcgtccgtcctcaaatggttgctcaaagagtccggagttttgcgcataaaatcagtgaaacatcacactgttggccaaaagtccccgcccgccgagtacacaattatggactatgtggtgagaagagcgagcatttttaattattattttttatttatttatttccactcagcgatatgaaattggcattgaggaattgcagaacggaaaatgggtgcccttccaaggcaaagatgttcagttggaatttgttcgaattgacccatttgtgcgcgtcactctgaaaaacaacagtaagtcgaggaggcgggggattataatcattacatctcattggtaattaaaaaattacgtttttcatcagatggcaaattctcagctgaattcaaaatccccgacgtttacggcgtgtacaaatttttggtggattaccaccgaatcggatacactcatttgactgacgttcagcaggtcgttcacgccttccccattcgtcaattgtttctttgttcaattcattcattcatttcaggtctctgtccgaccattgaaacacacgcaatacgaacggttcagtcgctgcgcttacccttattatgtgtccgcattttcaatgatggttggggtgagcaaatttgttaaattatttttcaaaattcaaatgcgtaatttcgggttcatttttgggaatatttgggctacatatatgggttttattgtatttttttgcagttcatagtcagtcattttttggacgcatgccaaattagctaattacctttgccctttggtcaggtggtgctcttctccttcgtcttcctctacttcaaagagtcgcccccgcaaagttcgtcctccgccgccccttccgccaaaggcctccaaaaggcaaaggcttcgtaaaaggcgcatttccatcttgagaaaggcttaatgtgaatgttgttacatattattatactttcctttaacttttgctctgcttaatttatttcattgtttttgtttaagggtctttcgtta

SEQ ID NO: 46122 - DNA, 1120 bp, Heterodera glycines
  unsure (1)..(1120): unsure at all n locations
atgcgatacatcgaatgtttggagagggtcggattcgtggacattcaagtgaaggacgaacggaccgcgggaattgggtcggattctgacaaattgttacaggtggtctacgaaaaaatcgacaaaaaaggaaatccgaacggtgaaagcaatgcgagggaaattcagctgatttttgcacggaaaccgatgctgccgttgttggaagagaattggtcaaattgggcacagttcgaacgacaaatggcggaggaaacggaacttcgaaagttggcggaggaggatcaggacgaagtgcgacagattgcggcggggaaaacactgagagaattggagaaagaactgatggaacgttgggagagagagcagagggaaacggagaccaaccgaagcaacagagagagacagccgacagtctttgccattgacagacgcaagtccgactgacagtgaccagggccacacaattcatgccaatttttaaaaatttgtttttttagaaatttcatgataaaaatatcagaacctaatgagaaaaatttaattcctgggaaattgaacttccccattttgatggttgtttttcatttttgtgtgaattcagttcattttatatgacatnaattttttttgcaagatttactcacccatttcagacttcctttggacggacgaagaaatggttttgattgcctccgcgttgccttacgttaataatgtgccgcatttggggaatatcatttggnntccgtgtaagtgtgctgacgtttttttccacggtcgtcccaacaattcttatttttaatttgctttcgatatttttcccttattttgtggcacttttccctgtataactttcattttcagttactgtcgcatgagagagtaccaaagtcttttcatttgcggcaccgacgaatatgggacggccacggaaatgaaggcactttcgggtctttttttgcagtcgtcctcagaatgtttcattttcttccttttcagagggacttacaccgcgacaactttgtgacaaattttacgagttgcacaagaaaacgtacgattggttttccattgattttgactttttcggacggacatcgaacccaaatcagacaga

SEQ ID NO: 46123 - DNA, 428 bp, Heterodera glycines
aacgaaatgcctttggctgaagatttgttgtatcctgatccgcaaaaggaacgtcaaaagcacaagctcaaaagactcgtgcaacatccaaattctttcgtatgcattattataaataaattaaatactgtcatcccttttttaagtttatggacgtcaaatgccctggctgctataagattactacagtgttcagccatgctcaaactgttgtggtatcgatttattcttgccaaataatttagtgatttaatgagctaagcaaatgaatagtacacacttagaccggtcataaatgagctgtgttttgtagaaatttgcatacatttctaatttaggtctgtgttggttgcagtacagttttgtgtcagccgaccggcgggaaggcgcgacttgtcgaagggtgttcgttccgaaagaaaggacac

SEQ ID NO: 46124 - DNA, 827 bp, Heterodera glycines
ggggactgtgcttcgtgcaaccaagcagtgattgggcccgtggtaagtctttggctgtataaaaatgagcagtcggaagcgaagggtggcagaaatgggatgttttacgggatacgaagcaaaatgaaaggattttgaatgacaaagaacaaagaaatggaccattttatcaaggtgatagcccttgggaagatgtggcatcctgaacatttttgctgcgctcattgcggagattccattgaaaatcggaattttttcgagcggcaaggaaaggcgtactgtgaaagcgattaccacggtgattgggtcattagcttatttgctagtcaatgttgttgtttttccaagttacactttctcttttctctaagatttgttttcacctcgttgttcctactgtaacgggcccatcaaagaagtacggtggaagaattacaaattagaaaaaaaatacttgaagcaaagcaaaagcattcattttaattactcttacatagcctttttgtttagcgttgtgtaacagcacttggcggaaagaattttcacgtggaggttaaaaaaattaaccttttgaaacttaaaactttctcagcattttgtttgcgccgaatgcggcaaaagcttcggagacggcagattccatgagaaagtcggaaattttattggataaattaatgttatcaaattttaagtccaattccgcgtactgtcgcgattgtttctaccgtacttacgcgcccaagtgtcagtcctgcaaacagccgatcactcacaaattcatcacggcactcaacacacattggcaccccgaatgcttttgctgtcag

SEQ ID NO: 46125 - DNA, 1184 bp, Heterodera glycines
  unsure (1)..(1184): unsure at all n locations
atgattgaaataattattctttatgtattattttattcaatcatcatgcggctttgccaccgaataactgcaaagaaaactactttcatccaaatcttcgtcaagactcttggtggaatgacgctgactatttttgcccattccttggacaccatcgagaatgtgaaggcgaagatccaagacaaggaaggcatcccaccggatcaacatcgtctcattttttgcggtgggtttttagtgaaaatagttaaaaaacggcatttgtaattgttaaaaagaattactaaatcgaaaattttgaaactacaaattttatttgtttttattgtaataataaggaatgtaagtaagaattactaaaacatganaattagcgaaaactaatgcacttttcaggaaaaacgctcaaagatggtcaaactattgccgactacaacatccagaangagtccactctttacctgcgcttgagtctgataggaggagcgcggacgaggcggcagcaagcacaagaggtggcttaagggcactgtcttttgctcgcctgacggcgggcgctttgctcgcctgatggcgggctctctgctcgcctgacggcgggcgtatgctcgcttgacggcgggcgtatgctcgcttgacggcgggcgcttgctcgcctgacggcgggcgctttgctcgcctgacggcgggcgcttactcgcctgacggcgggcgctttgctcgcctgatggcgggcgctttgctcgcctgatggcgggcgcttttgctcgcctgacggcgggcgctttgctcgcctgatggcgggcgcttttgctcgcctgacggcgggcgctttgctcgcctgacggcgggctcttgctcacctgacggcgggcgctttgctcgcctgacggcgggcgctttgctcgcctgacggcgggctcttgctcacctgacggcgggcgctttgctcgcctgacggcgggcgctttgctcgcctgacggcgggcgcttgctcacctgacggcgggcgctttgctcgcctgatggcgggcgcttttgctcgcctgacggcgggcgctttgctcgcctgacggcgggcgctttgctcgcctgacggcgggcgcttgctcacctgacggcgggcgctttgctcgcctgacggcgggcgctttgctcgcctgacggcgggcgcattgctcgcc

SEQ ID NO: 46126 - DNA, 1779 bp, Heterodera glycines
ctgaaaatgccaaagaaaaagaatggcaccaccgaccaatagggttgccttctgatcacaaattatttcccaattcgtaggagcaagcgcataacaacgaaggaacttgaggtttgttttattgcagttttctcgttttttccgatattaaaaacatatatatggttttcttgtgaattatacaacaattttaaagaaatttaagatgtgggccttaataaatgtggaacattttaaattctccagcaattgggcatttcaaatggaggggttattcctaccaattgtttcaaaaaagataattaaataagcattttcgctgccatggtcaaaatcgacacaaattttgcctaaaataacaaattttatgacttttggggcatattttgtcaaaattaatgcaccggtcaaatatttgaaatttgttaaagtttggatcattttcaattacccaatttcttttttctcttaaaaaatcatttccctcctcctcccatttccaaggacatcaaattgaaggagctcaaggagttgatcgacacagggttcaacgaggaccatttggaggtgtttcggtgttcggtgaaggggcgaagtgtccgtgcgtcgaaatgctttcaaaggggcgaatttgttgtggagtacaaaggttttccgggcaaaaaaaatgcatttttatttccaagttttttgttcatttaggcgacttaatcagtgtgaagacggcccaactccgcgaacaacggtatgccaaagatgagaacgtgggctccttcatgtactactttcggcaccgggacaatggtacggattggatcattggtttaggagtcgatatttcgaacaatttcgaagtcgaacctaaattgaaagttcaaagaatttttgttcaaaattacatgaatcggaagtattaatgctgttataacgcacttttaactaatttattttctgctttttttgtcgaatttggctctacgtgaattttacgggtccaaatttgagtcacgaatccttcaattattttgatcaattccgatttcctaatctaaatttgaacaaaaaatcataatttgaaaaattcaaaatttcgatttttattcgagttcgggttagggattagaaattagtcaaaatacacgtcagattcgtgattagcgacctttaaaaccccggataaaaaattatcatggtttttatcttaaaaaaattttgcaaaacaaaagggtccccccccccttttgtttcaaaaactgtcactttccatatagtgcccaaaattttagggtagtttaggccgatccattatgaattttaaaccgattttggacatgggcacaaaagtcatctaacaaccggtggtgaatttgtagggattctcaattaaaacaccgattgtggctttgaatgggatgccaaatccaaaaattttagattttgtgtaaacatcaaacaaattttagtgttttgtatcgacgcgaccgatgaaacgccgtacaaaggccgactgatcaaccacagctatttgaagcccaacctcaagacgagggtattcataatcgggcggacatgtttaataccccgatagtttcttaatccgctccatgaactccatattttcttcccaattcgctattttgccaggtggccgacttcggctgtgacggcttccatttggtgctcgtcgccatgcgcgacattgacaacggcgaggagttgttgtacgactacggggagcggcggccctccgtgctggcggttaacccgtggattttgggc

SEQ ID NO: 46127 - DNA, 1715 bp, Heterodera glycines; identical to SEQ ID NO: 28733

SEQ ID NO: 46128 - DNA, 1332 bp, Heterodera glycines
atgcccgaaaatgcgcccgtccgatcggtggttgttcaggtccaagcccacaatgaggctgatcagtcccttttctacgctttcggagtctccgaagattcgcggtttgaattttctgattaggccaaaaattaaattaattttgttttattgtttttgcagttctacaaatttattttcacttgacacagtcagtggcgaaattcgacttgcgaaagcattggacagagaaacgcagccaaaacacgtgttgaaggtgggtggccacaccattaattaattaataattaattatgtaattatgacgactctattccccaaaaggtcaccgctttcgagcgattggacccttcccaattggccaccgtttcggtgatcgtcgaagtgatcgacattcaggacaatgcgccttctttcgagaagtccacttatattgccgaaattcgggaggacgccccggtaattgaaatgaaggataattattaattcatcggcttaaatatttattaaacaatttaatttcgctgattttccttttttcagatcggcacgactgttttgagtgtttttgcacgtgattttgacgacggtgccaatggcgaagtgaaatattcgctggacaatgtgaaggaagcggcggaagttgcccatttatttaggcaaattaaaaataattaaaatcatttgtttaataatgttttaagcatcaatcccaagtcgggagttgttcagactgctgcccaacttgaccacgaggcgttgccccaacttctgttgctgcaggcaatcgccacggacggaggccaaccgccgatgcggtcgaagtcgggcagatgaaaagagataattaaactaattattcatttggcatcagtgccaatttggaaatcgccgtgttggacgtcaatgacaatgcgccgcaatttgagcagtcaaatgggaccgcgtgtgctgtgaatgttacggaagatgcgcccgtgccatcggtgattcttcgccctcgggcacgcgacgcggacgcgggagcaaatggtaattgaccaggcaattagggataattagaggcaatttgggatttgtttagggaaggtccacttcagcatcgtctccatgtcagtgccgctgttttccattgactacgaaagtggcgaagtgacactgcgaagtcgcgcgagcccaaaacagtcgcccctgacattggtcagcaagcagattaaattcaaattgatttgcttatttagctgatcagagcaaaggacggcggccaaccatctcttttttcgactttgcaatgctccgtcacaataatcgacgtcaacgaccattcacccg

SEQ ID NO: 46129 - DNA, 542 bp, Heterodera glycines
atggcttattctcgttcaccaagtcccaatagagaacgttcccatcgctcaactcgaaaacgctcacgcgatcggagcaacgagaggcgacacaaagcgccacgctcatcacacaaagaaagacatcgagacaggtcattttatttaaggacggaaactaagatgagctactttttcattgtgcaaagagaaaatgggtcccctttttcaccattttctaaaaattaaatccagtttttcgttaactcaacaaaaaacatagaaattacagggaccggcgcggagatagggaccgagacagagaccgagaaagggagcgccattccagtggtggagataaaaatcgcgagcaccggagcaagaagaaagacaatgtagctcacgctacaaaggttgtttgtgaagcttgtacgaacatttcaattgtttttagtctaaccctattaatgaaattgtcgatgttgatgaggacatgatgcgaatgatgggtttttctaattttgacacaactaaaaataaacatgtcgagggaaatgcctctg

SEQ ID NO: 46130 - DNA, 144 bp, Heterodera glycines
aggcgttcatcacaatggccactgaaatcaaaaatcgcatgggccctcttcaacaggccggtggcaatgcgtccgccgtgcgcattggtccgtctcagccggtgcgggacaaaaaaacgggcggatgttgctgagttagccaac

SEQ ID NO: 46131 - DNA, 954 bp, Heterodera glycines
atgacagagagacagagacacggacaaatgaacaaatgtgaacagaacattgtgctgtgtgtgatgtgcagcataatgcgaatgcgacgaaagagaagcaaaagaattgatgagttgtgaaagaagacacgaagcaaaaagcttttttatttgcattttcttaatattttttttattaatgcgcaatacagacatttcagattttataaaacttggcaaaactcttattaattgccgttaaagattgatttgaagaatggctgccatgaatcctgaatagtgagtaactcagaaatcatacattttgctttatttgtcactttctccagtgactatctcttcaaattgctgttgatcggcgattctggtgttggcaagtcgtgtctgttgcttaggtttgcggatgacacctacacagagtcgtacatttcgaccatcggcgttgatttcgtatccgaaataataattaaatcgtgctaataaattcatttagaaaattcgcaccattgagcttgaggggaagacgattaaacttcagattgtgagtgacccatatacattaaccattcattatttattttagtgggacaccgccggacaggtgggcctttggttccatatagcgcgtagcaaaaaaaaagaaaaaaaactttctattgtccaatccgttatatttacgaccatttgtttttacaaaataggaacgcttccgcacgattacgtccagttattatcgcggagcacacggaatcattgttgtttacgacattacagaccaggtccacagtgtttatacttgttttagttgttcttcattctcaggactccttcaacaacgtcaagcaatggctccaggaaatcgaccgatacgcatcggagagtgtgaataaacttcttgtcgggaataaatgcgatttgaccaccaaacgtgcgatagagacgaatgttgccaag

SEQ ID NO: 46132 - DNA, 1010 bp, Heterodera glycines
atgggacgtcgtatccgagctcaacgcaaaggacggggtgggattttcaaatcgcacagcaaacatcgcaagggcccggctaaattgcgcccagtggattactccgagcgtcatggcttcatccgaggcattgtaaaagacataatccacgatcctggccgaggggcgccattggccattgtacaattccgcgatccatacaaatatcgggtgaagaaagagacgatgattgcggcggagggattgcacactggacagtttatttactgcggcaagaaaggttcgtttccacttttcgattgataattatttccaatactttggtttggctatattcaagtttacgcgtccaatcagttaccatccttagtttcttaggtgataacgttttcttactcatatattcttggtatcaatcgaagcttaaagtctacagaagtttttatatagtaaaaatctgagaaaatacaacagacaaatagttattgaatatacgcaaaaaatgatgaatttcgggtttctcattacatttttcttaatgcaagtattgcgcttatcatacatagcctaagaaactgaggatagtcactgattagacgcgtaagctggaattgagactttgttttatactagggtctgtccagttttaaatgtccatagtattttatgcgtccagccatgcttttgatattaactcaacaatttatatttttagcacaagtccaaattggaaatgttatgcctattggagaacttccggaaggtacgaccgtctgcaatttggaggagaaggccggtgaccgtggacgtttggcaaggacttcaggttgttattgtgcaccttcccttttgtcccttatgtacatccgaatgttaatttattcattatctttatcataaaggtaattatgccattatcgtcgcacataaccccgacacgaagcgcacgcgaattcgtcttccatctggtgccaagaaggtcgttccatccgccaaccgtgcaatgattg

SEQ ID NO: 46133 - DNA, 4355 bp, Heterodera glycines
atggctggccttatctacaacaagccagaggaccccatccagtttttggagaatgccattcaaaagattcgaacaaatccaggaatggcatttaaatggtaattttttgttttttattattaattgttatttaacttttgaaagaattaataaatataaattcatctttatcctttcatcgcttttagcttgaaacttttaaaattcaaccaacaaattgtcaaactattaaaaaaacatattttaagttccgaaagacgtttcagttcattatattaatgcaaaaaataagaaactgttaaaataacaaaatataaaaattttagcattttagcattgcttttttaatgaccctaatttattttaattgatccaatattctcttgagggattcttttgtgacgccgccccaaccaaacaaaatgagcgaggaaaaaacggcgacaaacagcagcgaaaaaggcgacattggcacaacaactgcttcctcagctgttgatgagaatatggggaagaagaaacggggggaggaaagtgttgcggtgaaacggcaccaatcgacggacaatgaaacggcggacggcggtgggcaaactgacaaatgagcgggaggaattttcgaaaaaaattcaattttaacttttttttaaagaaaatcaaatcaaaatcctagatatccgttcgatcaccttttaaaattctctgttagcaggcaactttcaataagttatgacgaatttttgtcaaaaaagtactaattaggctaatctccattatgacgaatttttgtcaaaaaagtactaattaggataatttccaaaataaaaatgctgttgcggaatggtccagcaaatccggcgcgggactgagaatatcgaaaaaataaatctaaaaatttgggtaaaattttatcgcgccctgtataaatgaagatttttaattatctaaaataaataaatttttgaaatttttatcattgtatgattgatttgattgtccctctcctcttattttacttttttattttcttcccggtcgatggtttgtctcacattttatttttttgcttattgttatgccgtgcttttccttcgtccaattgtttccgtcacattatgtggcaaaaggcttggacagacgaacaagtcttggccaaattttaggctcgttcctttaactcctcaaaaataacaaaaatacctgtctattaaagcataatatttaaaattaaattttttttttttaatttatcaggctctcaccctctttttccaactcgagaaaattagaaaaaaaatgctcgccaagataattaaaccatgtggtatcggatcatctatacgttttaagaaattgtactgtatttggtctaacttatttcagcctatctttattttaaaaatctatcattattttaaattttcttttttcaaatttcttaaaaattccaaatttttctccggtgactcatcgctattgaaaatatgctgctatagattttttggaataccttagctagtgaaatctttaaaattaattaaaagaatttaaaatttgtattctgaacctttttaaatgttcagttgtttaaagattaataaacaaattgcctttgtccattggaatcttcttaaataattaatgagtcgttctcggtgtttggtccaacttaaagtgcctgactgggaacgtttgttctttcaattttcttttaaaatttaattaggagccaaaattaaatattaatgattttttaaattttaaaattttagcgcgtccgcccgttgcgtcggccgttgtagcgccacatgcgacggcactcagtccaaagtcgtcaaagcgagctagcagagacgcaagtcatccatcgcggaaaaggcattgttttaaatttgaaaccttttttaaattaaaaaaagaattatttcggtaattataaaattataatttcattgctaattgggaattggattcaatgcgaaaccaataaagctgttaattatactgcccaacggttttcgccatatttttctgcggaaaatgctttaagccgacggcgcctatcggcaaaaccgtcctcaaattaattaaatttataaaattatgagaaaatttttggcgctgatgagcaaaattttttttttatttttttgcatttttgtcacaaattttaccattcgtagcaattcttttgcacttatgtatttattttgctttttaagtacctacaagtccgaacacaaaatataattaatgctaaaagttttaaacgaagataaaaatctcttttcatctttttctacatatatttatttagttcttcttttatttttactttttttttctttaaattaaaacttaaaaagcagacaaatttttcattttttcatttaatcattttttttatttaaaaatttttaattggttctattagttatataatatgttaaaaagcattgccacacaaaaaaattttctaagattgaattcatttcaatgtgtgtatagctcaactcagcagcagaatgggacaagaagtcgcgtcaattcctggtccaactcatcaaggcccagctcgctagttcaggcggctaaggacgcttgcattgctccggacgcaccaattattctattcatgggtatttatttaattgccagggcttggacgtgaggcttaaatctgctaacatatttcaaggtggcccgggcggtggcaaaacacgatacgcggccaaattgcaggaggagctgcgcgatgaagggcttgcacacatttgcatgccggtaggcacaaaaatgaatgtaataaagtttttcaaaaaagttatgactagaatcttgatcaagcaattattttcacgatttttggggtaaaaaaaaagcatgacttttaaaactcggttcaatactctcaaatgcgcatatttgttcaatcgaatttgaaaataatttaaatttttttatgggtttattgcgcaaaaaaaaagtataaaaggttctaaaagcgcgaattcgtctaatccattcccccgcccccctttttttttcttctaaggatttgatccgcacatcgattgctcgctacaaggaccgatcatcggaatggcgagtggcggccgagcgctaccagcgcggtgagctgatccccaacgaattggcccagcaattagtcaaagcggagatgggccgccaaccgtacgcaaaagcgtatttcattgagggctttccgcgcgaggcacgacaagtggaggactttgaacgcaatgtgagtgaaataattaaaaagcaattagcagattaatggatttgttggcacgaaagacggcacggcacataaatttgaatgagtggacatgagtttttatgagctcacctgcttcaacagctggacaccaattaagccacagagaatgggggagggggtggagaggctaatgaccgcataatgattatccgtaatagtctaattagcgtaaaaccctggtcacattggcttctgtttctttgccagattagctgctaacaataattattattatctcatcaatttgaatatgttcaggtcagaccggtggatatggcgttgattttggattatgatgaggatgtgctgagaaggcatatgcaaagtcgtggcctgtttcccgaggtgtttattaatttaatttattaaatttaaaaattaaatttaattttaaaatgcattaggtgattgaacggcgtatcgatgagttcaagcaaaagacattgccgaggtgaattaaattattttctgatcaaattatttgtaattaggaagcatttttttttaaaccttaccgatttatcttttcaatttcattgttaagctacaaattataaaaaaattaattagattaatcctgctatcattaattaaaattaaaatgttaaaaaaaaattttaaacattcccaccctgtttttttaagtgcaaaatattttgatgatcagcgtctgctccatttgattcccggcgaaaaggacgacgcgttgatcattgagcgaatgcgcaagttgatcgtacgcgcaatgcgtgctggcgttggcgccggagcggtgactggagcggcatcatcggccggctcggcacattcgtcgacgggcggcaccgctgggaaaacggagcatcagcaaaaaaatggtggcaataatattaaaaaaaagaatgtgttaaatttaattttcatttttaattttgtaaaatatctgttgccgaaaatcataaataattatttttaggctttggacaatcgcccgcggcaaatgaagcggaaaactcaaccaaagaagcagaaaaggtggcggcgactaaatgttctgctgctgaaagcaatg

SEQ ID NO: 46134 - DNA, 533 bp, Heterodera glycines
atgtctgacaacaaagaagaactcgtccaacgggctaagctggctgaacaagctgagcgctacgatgacatggctcagtcgatgaaaaaagtcggaaaaaaacgaaaatttcgatgaatttttctccgttgaaggttacggaattgggcgccgagttgagcaatgaggagcgcaacctgttgtccgttgcgtacaaaaatgtggtcggcgcgcgccgctcctcgtggcgcgtcatctcgtccattgaacagaagacggagggctcggagaagaagcagcagatggccaaggagtacagggagaaggtggagcaggagttgcgcgagatctgtcacgacgtgctggtgtgttgaacaataaatcgaattttttggaaattttggacctaacttccgccaatttttttcaggatttgctcgacaaattcctgatcccaaaggctggcaacccggaatccaaggtgttctacctgaagatgaagggtgactactaccgctacctggccgaggtggccaccggtgacgaccgcaacg

SEQ ID NO: 46135 - DNA, 1496 bp, Heterodera glycines
tcttcaggttccccaatttctgctggataatgcctccctttagtggcgtccgacacgcattttttgcactcagccgcgccgtctgccggcaattgccatagcaagacgcgtggccagcgaacgtggcgagcgtttcggtgccaccgttggctatcacattcggcttgagtcaaagtatggcctctgacattggcttagtttcagtttttcaatggaattctgcgatttttgtccctaattttaaaacagttttttgatcctaaagacatttatttttgaaataattataaatttagttgctccgccgaaacccttttgacttattgcacaagtggcgttttgttgcgcaaattgactaatgacgaattggccacagaagccacccacgtcattcttgtgaggttttgctgaaactaatgggaatttttaaacatggaaaatgctgaccacaaaaattcaggacgaagtccacgagcgcgagacgaacacggactatcttttgattgcacttcgcgaagcgctgaaaaaacggaaggacctgaaagtcgtgctgatgtcggccacaatgggcgacaatcggaacaaattcatgcgatactttcgcgagacgggcatcaaatgcgtcgatggttattttttaggaattttctatttttgggcacatccttttcaatcgttttgtttttgcagtgcctactcaattgttttccgtggaagtgtatcatttggctgaaatgcttgccatgaccggttatatgccgagttcccactacggcggaatgtttgacgagcgatccatgacggtgcgtttggctttggtaatttgttttttttaatattttccaatttagcagaatttccctgcccctccgcctcctctgtttccttccgctgtgcccgtcaacgcattcgccgcttcttcccaacctcggccacaatgttttggctctttttccaattctccctggggcttcacttctttcccctccggccaatgcttccccaccacacacccccaacttcaaatggttccgccggaccctttcgtttcaccgaccgctgccgccgcctctttggacggcttctttttgtggaatgattgcagtgcattttcagcagagcctgtatttttgcatttgtttcccaattatttgaagagaaaactttaagggaattaatcaaaaattgagtgctctgttgagagaccgtcccatgcatttcttgcccacctatgtgcgacgcgtgcgcgaagtgttgaacaaatgcattacgaaagacgctttgatcgaagttagcttgatttttacatccaactcataaaaagtagataattttagacttatttggatgctggtggccgccaatgggaagactccgtggattgcgaccttatcgctgagttgatctgttatctaatcgactgccaaatggaaggaggaattttggtgaacaattttaattttaaaatttgctaaatcattagtagaaaaataaag

SEQ ID NO: 46136 - DNA, 3384 bp, Heterodera glycines; identical to SEQ ID NO: 5843

SEQ ID NO: 46137 - DNA, 1605 bp, Heterodera glycines
atgggattcagcgggaaacgatgtcaaattaaggtgcttcaattggatgacattggtgtagcaaaagcgtgtcaatgccaaattaggacaatttgtgtgacccgaaccccgtgcctaaatgctggtcaatgtgtggacacgctttttgatcggcattgtgtgtgtcgacaagggtggacgggcgcattttgcgagcaggaactgaacgaatgcgagcagaacccatgcaagaacggggcgacatgtcgcgatttggtagaacaattaatttaatttaatttaattgccgttgcaggagaacggcttcgagtgcgaatgtgccccgggcttccacggctttcagtgccaatatatggtcgaccattgcgctgtctctccttgtcgcaacaacggcacttgcgtcaaccacggccccacctacgaatgccaatgccgacttggctttgatggaatgcattgcgaacataacctgaacgagtgtgagacgatgtctccgtgcgacgcgacggggacggaacgatgtgaggacattgtgaatgggtaccgatgccattgccggccgggctacgcgggcacactgtgcgaacggcacgtgaaccaatgcgagtcggcaccttgtgccaacaacggcacatgcgttgacttgggcgccggtttccaatgcgattgttcgccgggatggaagggacagcgatgcgaacagatggagtcggtgtgcgaggagcgcaagccgtgccagaacgccggcagatgtgttccgttggtggacgactatttttgtgtttgtccggagggcgtaagcggaaagaattgcgaattggcacccaatcgatgtttgggcgagccatgccgaaacggcggagtttgcggcgacttcggttcccattcggaatgcgcatgcccgcaagggtttggcggccccggatgccaataccgtttggatgtatgccgcgccggaacatgtcgtaacggaggcacgtgtgtggaagtggaggaccatcagcaacagactacggcattgccggaaggtggtccccgcgggttcaaatgcatttgtccgcccggattcaccggcaacgaatgcgagacggacatcgacgagtgccgtccttctccgtgtcctatggtcgcgcaatgcgttgatttggtgaacggctttcactgcaaatgccccttcaatagtgaggcctttcctctggccgttttacattgctttcctttctcttctgtccagtgaccggtgccaactgtgagaagcgcattgatcccgacttcgacctgcgcttcgtcgagtccgcccagcaaccgtcccgtgccgcgctttccattcctttccgtttcacttccgcttcactcactttgagcatttgggtacgctttgagcacggcgcgtggaggggcggaaggtcacttcagccgcagagggccccggcgctgtttttcggattgttcaacagcgagtaaagcggaattttgtgaacattgatcgatgacgaaatttgttcaggaatccaaaccaaccgtcgaatttgactgaactgatcagaatctctgccgatgcgctgctcgtccgtctgttccccgacaaagaaatggctccctctg

SEQ ID NO: 46138 - DNA, 1533 bp, Heterodera glycines
atgggtgaacgcaagggacaaaatcattattacccacccgacttcaattatcaaacgcacaaaacgcttaaccgttaccatggcgtgcatgcactgcgcgagcgtggcaagcgtgcaaatgaaggcatcctcaccattcggtaagacgcggacacaattttatacctggaaaaaatttagaaaattttttccaaccttttagctttgagatgccgttcaatgtgtggtgcctcggctgcaacaaccatgtcggcatgagcgtgcgctacaacgcggagaagcgcaaagttggcatgtaagcggaacaaaacaaaaaatttttttcccaattttcgacgaaagggttaggggctaaaaaaatgaccaaatctcttacaattagaggatatttaagggttagtaaagtaaaattacttgagttttgatgtattcctaaggtttagattgattttcatattaaaaagtaaatctttttgaaaaaaaaatgttaagtaagccctctaaaaaaaattttttttttgtttgtttaggggagaggggtgggactgttatgaaggagctttcaaaaaatgaaaacctctgcttttttacagtttttttttataataatggctttccatttttgttaggtattacacaacaccaatctacgagttccggatgaagtgccatttgtgtgacaactatttcaccattcggacagacccaaaggtaaaaagttaatggtgcccaatctattttggcaattttttttttgatattaaaaattatatcaaaacttaaaagactattaatttcaactttttttcccagaattttgactatgaattggtggagggcgttcgtcgtcaggaaattcgctttgatccgtccacaattgacaatttggcaccggtggaccgaacaatgagtttgaaattgggtgccgatgcaatgttcaaggttggtttggatggagtggaattttgaaaaaaaaaaagttagagtctggctggactatgctttgtttttgctaggcccaggttctgggattttagcttacaattaaattttttatgagcctggctggagtttctatccaaagttaacaaacaaaaaaaaaatttttttttcacgggggacaactattgaaaagagttatacgccgtatacgacgggcttgaggcctagttgtcccccacccgtacattacacccccatcccgtctaagtctcctccccgtacaaaaatttttttggtttaaaaaaatatttttaggccgaacacacggtggacgacaagaaaaagttggccagtgcggacgaccaaattcaccggttggaggccattcagacacgactgtacgacgactacacggccaactcagtgctccgagggtcattcagagtgagtgggcaaattggaaaatttggcgtttttttttattgttttatcattgattgctccaaaaaatgccagaaaaagcaattggaaaatcattaggtttttttaaatttttcccaataggtcttgctgatgataattttcaataaa

SEQ ID NO: 46139 - DNA, 208 bp, Heterodera glycines
atggttgaagtgttcgactctctcagcaaactttacgcggattatcaacgcacaacggcaaagaagttgaagatcatcgatgcttacatggtctacattttcttaaccggtgtcttccaatttgtctattgtttgctcgtcggcactttcccttttaacgcgttccttgccggattcatctccaccgtggcctgttttgtgcttgccg

SEQ ID NO: 46140 - DNA, 3209 bp, Heterodera glycines; identical to SEQ ID NO: 5865
  unsure (1)..(3209): unsure at all n locations

SEQ ID NO: 46141 - DNA, 369 bp, Heterodera glycines
atggcgttccgtgtgcccactccgaacgtgtccgtcgtcgacctgaccgctcgtctggagaagccggccccgttggacgccatcaaagaggcggtgaagaaggcggccaatgggaagctgaagggcattttggcgtacacggaggaccaagtggtgtccacggtgagtgatttccttggctggtgcggtacgtcaatactcaaacggactcattttacaatgggttttgtgttccgttttcaatccaacatttcattttttgataataccatgtttttgttcctttcccttgccttgtgcttcatatatcaataatgtttttcaggactttcttggagactcgcactcgtccattttcgacgctggcgc

SEQ ID NO: 46142 - DNA, 416 bp, Heterodera glycines
  unsure (1)..(416): unsure at all n locations
atgagtctattcggcaaaatttttggtggaaaaaaacaagaggcagctccatcgacacaagaagtattgcagaagctgcaagagagggaagacatgtttcaaaagaagcaggaatttctggaaaagaaaatcgaaacagtaattgttcgagattgaattcccctgggttaaattcctccttttaggaaattgccacggcacgtgcgcaagcggcaaataaaagggtcgcgttgcaggcactgaggcgaaaaaagggctatngaaagcaattggaacacattgcaggagtgctgaacaccatccaccacncaaagaccgcgctggagaacgcgtccatgaactctgatgtgcttggagtgataggcgaatcagcaaaagcngtgaaaaaggcgcacaatgaaatggacgcggacaaa

SEQ ID NO: 46143 - DNA, 1700 bp, Heterodera glycines
cagcgcgaatgcgtttccattcacattggacaggcgggcgtacagatcggaaacgcgtgttgggagctgtacaaccttgagcatgggattggcaatgatgggcatctgctgaagaaggacgacggcacttgctctggggaaagcgcagcggaagatggccaatacatttctaatatgtcggcaaatcataattcaaaggcaaagtgccaggtgagtggggggggggggtcaaagaaagtgccaaattggcaaatgatggtaccttccgtaatttttcaattttttttatatcctgtaaattaatgcattttaaaccaatcggacttttcacgaaaaccctcccgaattagtttgatttttctcgttcaagtattacaacacgttctacaccgagagcagcaatggtaaatatgtgccgcgcgcaattttcgtcgatttggagcccacagtgattgacgaagtccgtgctgggccgtatcggcatcttttccacccggaacaattgatcaccggcaaggaggacgcggccaacaattacgcacgaggccattacacaatcggtgaattcaaatgggagaaagtgaaggggaaaagcattaagaaagattttaggcaaggaacaaattgatcgtgtgctggaacgtgtgagaaaacaggtgccaacagaagaagggcaaatgaattaagaataataattattaattatttttaattttcttaatttatacttttttgtaccctgaaatggcatttgtcccaattaggctgagaattgtgccgggctgcagggtttcctcgttttccattccttcggcggtggcaccggctccggcttcagctctctgctgatggaacgtctgtcggtggaatatggcaagaagagcaaactcgagttcaggtaatgaatgggcccaccaataacttatatttttgtatgactaaaattccgattcgatccccagggcctaattagatcgttaattacttttaaagcatttacccggcaccgcaagtggctacagcggtggtggagccgtacaactccattctaacgacgcacaccacgctgaaccactcggactgctcgttcatggtcgacaatgaggccatttacgacatttgcagaaagagcctagacgtggaggtgtttttgttaaaatttaaagttttattccgatttattttaaagatgccctcctacgccaatttaaatcgattggtacgttcgttcgctttttggcattacggaaaaagtggcactttttttttgtcagattgcccaaattgtctcatcaatcaccgcttcgctgcgctttgatggggctctgaacgtggatttgaccgaattccagacgaatttggtgccatacccgcgcattcacttccctttggccacctacgcaccagtgatttcggcggacaaagtaattaaaaacttagtttttattttcgattaattcacatcgtaatttaatccgtttgcttcttttccacaggcttaccacgaagcgctgtccgtctccgagatcactcacatgtgcttcgagccggccaaccaaatggtcaaatgcgactcgcgcaagggcaaatacatggccgtctgtttgctgtaccgtggagacgtcgtgccaaaggatgtgaacgcggccattgcttctgtgaaggcgaagcgtggcattcattttgtggattggtcagtg

SEQ ID NO: 46144 - DNA, 1463 bp, Heterodera glycines; identical to SEQ ID NO: 29006
  unsure (1)..(1463): unsure at all n locations

SEQ ID NO: 46145 - DNA, 403 bp, Heterodera glycines
atgacaattcactctcgtaaagtggtggcctactattatgatggtccattttttaaccaaatcggtctcataaattccgttacaggtgatgtcggcaattactactacggccaaggccatccgatgaaaccccaccgaattcggatgactcacaaccttctgttgaactacggactctatcgcaaaatggaagttttcgtaagtatttattgctttttcgtttaaaattgcctttgcagagaccaaaggctgcgtcactagaagaaatgactaaatatcacagcgatgactatatgtgttttctgaaggttagtcaggttaaacacagtaacaatttaaaacgcttcagagcataaaacccgacaatatcgccgattttggtcgtcaaatgcaacgcttcaac

SEQ ID NO: 46146 - DNA, 1023 bp, Heterodera glycines
  unsure (1)..(1023): unsure at all n locations
cccataatttacttttatacaaattgggaaaaaattggtcccccaggtaaacttttaatgtggataaaggggtttttgagcttaggacttttcgagttaaaattggggattntttatnntnaagtaaaaaagttanntntggngtnnnnnagggntctgtnntgggncctttattatttttgatttatattaacgatcttcctgatgccttgccatcaggagtgaaaataaaattatatgctgatgatttgttataaagcaagagccgacacagaaattatgcataaagcattgcataatttattcgaatgggcaaataaatggcagatcagaatctcaatttaaaaaacttttgtattatatttgggttcaaaaaacccaaaagaaacatacaaatttgatgggaatacaataaatgctgtggatacaattagggacttaggagtaaatattgacaacaaattacaattttccggtcatgttaaccaaataacaaggaatgcgtatttacgtatgcgttccttgtttcgaataattaaatccaaatcgtctaagatttggattacgttatacaaaacttatattaggcctttattggaatacgctccggaggtttggaatccgtctcttcaaaaaaatattaaacaaatagaaaggtgtcaaaaatatttcaccaaaagggtattttttaaatgcagccttccgccaattccataccaaaatcggttagaatacctgcaactgccaacacttgagaataggcgaaagctgtttgatctgttcatggcgcataaaattgcttatggccgaacagatctgaaactattttctatttttaatccctcaacgcgctttaacatccccttttacagatttaacacaaaatacaaactaggcaaaaaattcattccctttgctgggagggtaacaaaattatggaatcaacttgataaaggaaaaacaaattctttaaatcaatttaaaacaaaacttagaagttcactagggtaatatgtaagaccg

SEQ ID NO: 46147 - DNA, 383 bp, Heterodera glycines
cacgaatccttcaattattttgatcaattccgatttcctaatctaaatttgaacaaaaaatcataatttgaaaaattcaaaatttcgatttttattcgagttcgggttagggattagaaatgacatcggactacatcttcaagacgcgctaaccgaagtgcatcaacatgaacccgccgaacggagggctcggcccaaaggaatccggcaaggtggacggctcctgcgacgccttcgaccccggcagcgaggacaccaagggcgaccgagtgaccgtggagtggaccaacgcgccgaacccagccgccaccgcggtcaaggtcgaggggttccagggagacgggatggtgagccgcaagaacttgtcgatcgagtacagcggc

SEQ ID NO: 46148 - DNA, 433 bp, Heterodera glycines
atggatggacgaaccgccgatgaggcgatcgttgccactgtgagtaaagttggcgagaatattcaactcgcccgagcatctgtcatttcttcttcaccagcgaacaaactttttggtcaaacccatccaaaaggtcgtcgtatggtttttatgagtgaaataatctttgtttttagaggaatttaacggcgttcaattgggacgttttatttcgttggtgtctttgggtcacaaatcggatgagagtgtttctgactttccaacagcacaacttggccaagtgatttgtcagcacatcattggaatggcgccggaaagtttgggtgaaccaaggaaaaagggagctaaacgagcaactcaaatggaaatcgttgatgaaagtgacaccggagaagaggaggatttgaacgcttcacaagttgaccaatccgag

SEQ ID NO: 46149 - DNA, 4425 bp, Heterodera glycines
atgactaattggggtcatttccaacaaatcgacgcttcggttgcccacgttcagacgcttttcgctatgtacaagcagcagcagaacgagcagcagcagacgcagtgcatctacgacaaggcggtggcgctgggcgcgctcggcaacgccggcctggacattgcgcttgcggacctggagcggatcatcaaggacacgcgcgaggcacgcgtggtccgcatgatggccattgacgcaacgcggcgcatgcgcacgcaaatgccgcacagcgtgcgcgccatgttgctgccggtgttcctgaacacgggcgagcagccgcaggtgcgcatcaccgcttttgccaacattttgggcgcacaaccaacggccgaagtggtggaccagctggtgtacgcgattggcaaggagccgaaccgggaagtgcaggcgtactgctacagaacgatgaagaccatggccaactcgcagaagccggacgagacgcaaatgtgagcaaattcaaaatttggcaccgaaaaattggccgaatttagtgccaaacacgtcaaatcgtcactgaaacagttggcaaatgccgtggacgagcagcagttgcgtaccagcggaaagtggcagttcgagcagttgtacaacaatgcgcaacgcgagggcgtgttcatgtcttttgtgaacgcggtttcgtcccgctccgcgctgcccgcctacgcgcacgtgcagttggactcgcacttcaacgaccattatacgtacaacaagctcaacatttacatggtgcagcaggaagccgagcaatggtacgagcgggcaatgaacagcttcggcaacagcaagcggaagcagaagcagcagcagcacggcagcaagcagttgagctccatttacgagcagttgggcatcaaaagccatcggtccgactttggcacagtgccaacggcggcggacaacgacaacgaggcgtaccagcaacaccagcagcagcagcagcagaacaacatgcgtccgttcgccatgcttggcctccgctccaataacgtggacaaggcgttcattgcgctggacgagcacacgattggggagcagacgcgacggatgctcaacggggaggagatgaagccgaactgggccgccattctgtttggccacggggcacagcagcagcatctggacatggcaattgtgcagaacatgggcgagaaggaggccaaaattgcgacgtcggctggcgtgccgttgcgcattctgagcacaacgccaatgatggcaaacgttgagggacgcgtgggggcaaaggcggcgccaaaaatgggaccatctgctgctggtcatgggctgagtgcccagttcgagttcagcgccatgtcggcacggatggcacaaattcagaaaatggtttgccataaaaaataacgcccattttttaccgggacccactcgtcatgttggcattttctcaggaactgatcactccgtttgctgccagcggcgtcgaaagtattcgctcgctgcacatcaatttgccgctgcaaggcgagctgagtttggtcaactctgagcagcagcagggcatcagcatcaaagttaagttgccccagcgcgggactcagttggccagcgcccactcgctgccgttcactttcatcgccaaggcggagcccagcgctcagtttgtgcgcgagccgcgccaaatcatcgccgtccacgaccccaagctggaccagcaacagcgcgaagtgaattccgtgctgggccaaaaggcgttggcactgccgctgcagattcgcggtaaattggcgggttcgatcagagatagagagtggcatatgatcagaggaagtgataaataatgacagaaaagtgaaattgatcagaggggaccatggatgcactgatcactcaaaatatgatcatcggtccgaaaacagggcgactgatcagtaataggaaaaatgggtgggaaatcatgtgactgatcacgaattctgatcagagattaagcctgagatagacagattggcagaccaaaacctcaaaatttggaagttttcgccgtgccccacccattagccgctccctgaaacttttcctgtattaaagtcaggatcggacaattagttacagattgttggtcattagcgcaattgattccgcttaattggctagctgctgtaagtttccgttgttcaggccactaccatgtgccagccgagccgtccaacctgctgcagtttgcgcagctgctgatggccaccgagaacgcagtgcacgtacagtaccaacccaatgaggagagcccgcgcgagttgaccatccgcgcaagcggcgaacacttccgcaaagcggcacagatgcaactgccggacacgccgcagctgcacaatttctacgcacaacagttccacagcagcagcagctgcgacagtgacgactccgtcaatgcagcgaactgtgaggagaacgacgcgacggagcagcaacagggtgaaaacggcggcgagcagtacattagtaacgacaaccagcagcagcagctgaacagcttcatcagcgcgtacaagccgcgtcagcaatacgcacacgcgctgcgactgagcgcgcaaacgagcggtggggcacgggacgcgacggcgcacgccaacatccaagcgcaatgtgacgagcggatgcgctactgcacggtgcaggcggatgccaacaagaaccaacagtggacactgagcgcacaagcacaagtggtgatgccggacactgtgccgtcggtggaacagttgcagcagcccaccatgttgaagcagttcatcgcgctggccaaagcgcagtggggcgaccagcaggacaaacagcacatgaacgtgcgcattcgcggcacgcaagcgcacacggagcagacacgcgcggtgatggcgcaaatccagcagcagcacgagggcaagcgacacgggttcagcgctcaacagcaacgcaaaatgctgcagcgcagcgccttcctgaaccaattccatgtggaggctacgtacgcactaaaggcgtacgcacagaacatgatgaaccgcggaatagaactgctaaagtcggtctacttctggaacaccaaatcgcaactgttgggcggaccgaacgcaccgaaaaacggaaaggtaagcggaaacggacattttgatcatcacccaacaatgatcagaatcactgatgacttactgatcaaaaggatttgatcagaaaacggggcattaaaattgccgaaacccgctgctgatcagttgagcatcaaaaaatggggggaatagccatgatcagacattggtcaatcagtagttatcaaaacagaccgatagcgaagggtctctctaattgatcagcggaactacctcccctccaaaatttgatcactgattagagaatgcgatggcattgatctcgccccccttttgtgccacagatcgccgccacaatttccattgatccgctgcagccaagcaatgccaacgtgaccatccgtacgcctgcgcagcagttgcacatgcagcaaatccaaatgccggccgcggtggggcgccccttcccactgatccgtcaacagagcgcgcagcagacgcattcgctggcacagctgttctacaagcagttcagcctcaaaagccgtgcccaatgcattgttgacggacgaaatgtggacacttttggtaagggggggggggacggcacattagacaaagtcgggaatcaatttgggaaattctcgacggactattcattatccctaatcatttgtctgatgttttaagacggctttgccttcaccgccccgctctcctccaattgcttttctgtgctggccaaacactgcagcagcccaatggaagaacagcatcagcagcagccccaatttgttgtgatgctgaagaaagtgccgggcaaacagaacgccaacaaatcggcacaaaaagcggacaaagtgaataattgaaattgaaggagcgagaagaatttaaaaatgatgacaattttcaaaaaaaggtgctgaaagtgatcactgctgagcaacagatcgaatgtcagcccaaaacagcgcagggcaaaaagggacaaatgatttgcaaagtgaacggacagccgatcagcggggacgagcagtgtcaggacgagctgcagcaccagcagtgcgtgcagttcaacgacccacgccagacggacgtgaccattcgcacggggccaatcgcagtgcgattcaacggacgcaaggcgtggctgaaggtgtcccaggcgtacaagaacgcccagtgcggactgtgcggacactacgacgacgcggacgagcaggagcaggagttgaggatggcaaatggccaaattggtgggtttggagggcttaatttggccaaattggtggatgaggtggaccagtggaccaagcagaaggcggcataa

SEQ ID NO: 46150 - DNA, 1217 bp, Heterodera glycines
atgaatctgatgtcaaatcctcaagtggccgatgctattctgggcaaccgaatgtttaatcactacgacagagcctcgattggtcaattatgtgaaaaagctggtcttccgcaaagggcgttggaacatttcaccgatttgtatgacatcaagcggaccgttgtgcacacacaacatttcaattcagaggttattaacctattcgttatttttaaacgacaattttttcagtggcttgtcagttattttggccgtttgaatgtgcaagattcgttggaatgtctcaaagccatgttacaagcaaatctgcgtcagaacctccagattgtcgttcaaattgcgtccaaatactgtgaacagcttggcacgcaatcactcattgacatttttgagtcgttcaaaagctacgagggacttttctattttcttggttccattgtcaacttcagtcaagactcggaagttcatttcaaatacattcaggttccttgagtcgtccattttaatttccatgtaaattttcttaaggctgccaccagaacaggacaaatcaaggaagtcgagcgcatttgtcgcgaatcgaattgttatgatccggagcgtgtcaaaaactatttgaaggaggcgaaattggctgaccaagtgcttttttaatctcttctatttgtaaatgtcaaattttgtttagttaccactcatcatcgtttgcgaccgccatgacatggtccaagatttggtgctctatctctaccgcagcaatctcatgaagtcaattgaagtttttgtcagcaaagtgaatcccaaacgactgccaattgttgtgggtgcattgctcaacgttgactgcagcgaagaccaaatcaagcagttgattcaaatcacacgtggcaaatttgacatcgatgaactcgttgaggaagtcgagaagcggaaccggtcgggcttttggattacatcctaccggtttaccttttatttttagtctgaaacttctgaactcgtggttggagagtcgtgtccatgaagggaatcaggaccaggcaacccataacgcactggcgaagatctacattgattccaacaacaatccggaacgctttttgcgtgaaaatcaattctacgactcgcgcgttattggcaaatattgcgagaagcgcgacccgcattacgctcttttggcatacgagcgcggtcggtgcgattctgaactcattgcg

SEQ ID NO: 46151 - DNA, 3130 bp, Heterodera glycines
ctgaaaaatttcaaaaaattaaaggatttggggcgcggagcattcggcatttgtgcactttataaggtaaagcgaatatttttaaaaattattttcaatttatattaaaattaaaatattggcgatttttgtatttttaattcccttcgaaaaaaggatgaaacaagtcggctaaacaagaaagtggtgatcaaacgagtgtcacttgaatgccaaagcgaaaatgacaagcgggcaatttcatgtaggacgcttttattcaattgaaataagctaaaataaattatcaatttttgaaataaaattataacctaccgtaacaaattataaataaataattattatttatgagttattaagatgaagccagtttgttgaagaaattgtcccatccgaatgtcatccgtttctacgattcatttgttgaattggaacagttgtgcattttaatggaatatttggatggtggcacaatggaaaggtgataaaggcggttgtacggtccgcaattgtcgtaacaccgtgataaacaataattaaataataaaaattatttatgtatattaaaataaaatgcttattgaggatgatccaggagagaaaaggcattaaaatgggccaagatttggtgctttattattttacccaggtaattaattaattaattgatttttgtgatagcctatttataccataaatgacctactttaattaaagccaacactaattggacttttattttaagatcgttttggcattggaccatatgcacgcgctgaaaattcttcaccgcgatatcaaaacagcgaacatatttttgaacagaaaaatgacaattgtcaaggcatgtttaacttttagattgccaaaaagggtaatttgtcccctaatgattcaggttggcgattttggcatcagtaaggtaaaataaaataaaagaaaaaaaaataataataagtaattgagaacttcactggcttatgtttttgttaggaattgaattcgaaatgtgctcaagcgtcgacatttgtgggcacaatgaattatgtgtcgccggaaatatgcgaaggtcaatttagaaaacaaaaagcattaattacacgcacaattatgtaattggtgaatttgcaaaaattctgatcacctaattaatggtattatcatttcatggaataggccgcgcttatgggccaaaatcggatgtgtgggccgttggttgtgtgctttacgagttagtggaggtaaatgacaagcattataaaaataaatgaattaattcatcctttaagttgcacaaagcctttgacggcgactccatccaacttcttttgctcaggattgcaagagtataatatgtttttatttttaaattacagtttaatttgctaattgccagggtcaacacggcccaatttcgtccacagttacgtcgggaatgcgcgaactcattgaaaatgttatggaaattgatgaaaaccgacggccaaacacaactggtacataataatacatataatctaattcaataaatatttttgcaattaagagattcttctcaaaccgatggtattgcaaaaatggatggaaattcatacaaatttgggtaggaatatttgacttttaaaaattaaatttaaaaacaaactttttagggcgaattgagccggacatcgaattgtacacaaaagaaactcactgaagacggaaatcacagtgaattaaaaaaaataataataatgaactctgattggtttaaaaagtgtttttacaattcctgtgttaattttcttaattcagggcgaaagagagttggagacaagaaaatgcttctcaattcattttaacatattacacttcagcttaatgttagtataattaatttgcaatttttgaggatttttcgcgaaatttttattaaacgcaccttaaaacccaaaatttcgaaatttttcgtacatattttgaggatttttgagaatttataaaaatttcttgtaaaaaattaaaaaaaaatttctggaaatgtacccttaaaaatcggtatttttcaaaaaaagagatattcaaaaatgaatttttaaagtgcaaaagatgaatctaaacctagtttgagttattattttacatatttgtcgatttttcttacataacaaagaagccctaataattagaggtgcgccctgaaccacggtcacggttaccgtgaatttcatgagttttttcactcacggtcacggtcacgattcacggtaccaattcacggttattccgtgaaaaatttacactggataaaattgaatatttatgaaataaatattgttttcatagaggaattttgtcttttttgggcaaagtttgctaagaaacagagcaaaattttcaaaaatttccccggcgcgcctatcggcaccgccggccccctcccctccaaactacctatattgtgcgaaaaacaaataaaaagcaaagtttcaaggatgaccctttaaataaaaactcattaaattaaaaaaaactcgcacgaaataaagctattttgggcaaaatcagttaacaaatcccaacaaattttcaaaaattttccactaaaatccctatttttttaaaattgggtaatatgtcttataaaatcatttaaaaaggtcggaatcgatttggacgcaaaatgatgagaaaattcgttgttttttgtctttgtaaattgattaatgttgcaaaattcgctcattttaccggacatatttgtgcacaaattgaactcaaattttatattttctcctggcggcgcctatcggcaccgccaggcttccaaaagcgtatttttcataaaaaattggttcagattcgcaaaattttgccatttttgacaaaatctgtgcacaaattgaattaaaatttttgcggcggcctctatcggcgcctatggaccagggctgcacgcaagtggatttacaattacggaaatccgcaatccgcaattacgggttccaaaaaccccgcaatttccgtaatccgcaatccgcaatttcgtgcagccctgctatggacccccgtttcccaaaaaattttttttggaaaattataccacaaaaaaagacagtgaaaaacaaaaaattcgccgacagggaaa

SEQ ID NO: 46152 - DNA, 4627 bp, Heterodera glycines
tagcctataactttgtcaatactagatcaaataaaaccattttatgctcattttgaagggaaaattctagagaatattgttagttttatttgatttggccttaaatagcgcacttggctaaaaaagaattaaagtattgaaatgtttgccatgggaaaaaattttttcctgtgggtaactttttttgaaattttgtataggcccatattttgtcccccactaaataaataataataaacctatttgcactgagagcccaaaattgggccgctgtgtttataaatagggaacggatttctaagtttttgcttattttttctgcggctttaactcgacgagaaatgcacgaaaaacacattttttgttcgaaaattttgtgttttaacgcacttattcgaacttagaaatgcttattttggcgtttcgtgcttaaaaatgcttattttagaggttcgcccttaaaataagtttttgtacttattttagcgttttatgcttattttcgttcttatttcgcgatttttgggaaatttattaacaaaaatgcaataaaaatgataaatacacccctaagaatcggccaaaaaaatttcggaaatatacacccctgagaattgacctaaaaattttcaaaaaatacactcctaagaatcgacccaaaaaatttcggaaaaatacgcccctgagaatcgacccttaaatcctgaaaatttctaaatgtacttcatttctaactgcaatcagtaaataaaattgtttgacttaattttaactaatttgcatagagaaaacagcaattttaacaaatttcacctctacatttggaattttttcatgcttattttcgcacttatttcgcgcttttttcgcccttatttaagcacttattttggactttttcgcgcttaaaaatccgttccctatttataaatcacaccgatcactgcctttttgtattacctatttaggtatttgatcagccatagccatggctctctttcataaactgtatgtacaagttttatattattcgaagattttaaatgagatagtaatcttttttttaggcaaaagctctgcaatttgaaatagaataaaaattgagttttacaaaattataaataataataaaaagtatttcttttcctctccttttggcgtactattttcatgtctctaacacattaaaaatcatgaaattcgcaaatgctaacaattttctctaaaacggtataaaatcactttcttcttttagaatcaatagagaaaataatggttttagcatttggttgaaatcagcagtttaggacttgagttataacgtaatgaaaatttgaaactcccacaacttttttctgatatgtcaaattgctggtactagttaagtttgggtcccccttttgggtcaaatttttcaaaagcgtagacagacagtcagacagtgcgctatttccttctttatttttctcacttcttcccttttcccacacacagtgctgctgcacagcgagctacttatcttagatatcaaatttgttcggtttggttgggaatgaagcgagttgtctgattaaaataataaacaatacaaaaaagacatttaccagtgtaaattttgaattaacgcgcaaaaatttacgccaaatacgctatttggcgttatgagtaattttgtctaacactgggcttgacccatagtgcatttattgtcttttcgtgtttaatactccaaacaagaaattcacaaattcttcgctagacaaatttttagtgtgactttatattagagtagagcgggaccgggaccaaaacacggacaactgagtacaactgagtaccgaggtcccggtcttgaccgggaccgggaccagtcccgggttttttcccggttttcccagccaaaaattcccggtttttcaacccgaaaaggtcccggtcccggttaagcccaaaattcccggtctcgctctactctactttatattaaaaaataacttttttactggttgtgttaactacatataaagttgtagttgatgtaatttttttcttgtctttttagagaaaatttgatatggactctttccttcaaacaaataatgatctcattatttcaattcacaaggccttagttgaatctactcaggaaatcaccaggaaaatagtaagatgctgatgtatatgggatacacaaatttggctaaatatcatctagaatttatggcacttttccagttgatggcccctaaatttgaagtcgtgaaaacttattcaagaggttttcgtgatcactaaattttgccaaacctccaaggaacaaaccaaaagtgcaaattttcgaatttatagttttacaacaaatgttcacgaccttttatgacaaaaaaatttttagcaaaccaaaaggggtccctccccctttggttttttcagggaccatcaactggaaaaagccgaatttgttaataaaaataaaaatctaggagaatttgcgggatgatgttcgtgacgtgaagttgtcgctggctaagaacgatcgtatcatgcaggaagaggctacaaattggcgtcgtcatacggaggctattgttaaggagttgggggaccgacatcagagtgacatttctggactccacaaattgctattggaactgtgcattcgctcttcacaattaccacaagctcaactcgctgttgtagaaacgaaacagtcgaaagaggacgaagttattttttttgtttaaaaattttaaaaccctaattttaaggatcacacgaagaaggatgttgaagttgtgcagattgctaagaaggatgttgaagttgcgcagattgctaagaccgttgagcctgctgagtttaaaccgactgttgagcctgatgcagaagttctgaagactcttaagaccgttgagcctgttgggtttaagccgactactgagcctgtcggatcacaatttttgcatcattattttgtaattttttctacagactcctgctgttaccaccgctgtttctgttgctccgttgagtggcactttaaccttcaccgcttcgtccatccctattagcggcagtctttttggtggtgcttgtcgacccggaacaaacacgttatcgaacttggcggccaaggtcactgctaagaccactgaacctgttggatttaaaccgacttttgagcctctggtaatccaattttttttcctttaaaaaaacttactttagcttcctgctgttactactactgctgtttcggttgctctatttaatggtgcttcaaccttcaccactccgtctgtccccattggcagcagtctttttggtggtgcttctcgtccgggaacaaacacttttgcgaacttggcagcgaaagtcaaattttgttttttttttactagttttgcttattttttgttatgtaggcagctgagtcgggtggtggttttttgggcggtggaggcgtcactgcaaaaccgatccaatttggtcaatctgcatttggaaccaatgcaaaggatttcaaggtttgctaattgaaaacaacaactgaatctgtacgatattgtgataatacgacttttttatagcttttccaacaaccgccttctcagccttcattcagttcaaatattcataccgttgataaaactaccgatgaatcgtacagaggtgatgaggggtcggacaaagaagacgctgcagaggaattcgttccagacgtggtaatgttaattttggctttcgtcacttgctgattgtgctcaccaatgcttgctgttttggagtcccctaaaaattatgtgaattattaatagccataggggtcacccttttggtttgtaaaattaaattggtcttattgttaaattagtgatcaacaaccccaaaaaactaacgaacattttttataccttattatgataaaaaaaaaacaatagaatccccatttggttcagtgataccccagcaagcattgggtattaccatcagaaagagtcactgattgtctaatccacttttccagcattatgagcctgttgttcctcttccgcccgaagttgaagtttctactggggaagaggaggaagaggtctgtcgcatttttattaagcattttattaaaactgtgaaaaaaaattctaaaggtcattttctctgctcgttgcaaattgtaccgttttgataaggatgctcgggaaaacaaggagcgtggtttgggtgatatcaaagtaatttatccaaatttaactcctttttaattccttttttcagttgctttacaatcctcggagcagtcggtatcgttgtgtgatgcgtcgtgagcaagttttcaaactgtgcgcgaacttcccaatttatccggacctgaaaattcatccgcgtgagcatatgccaaccgtttacacctgggcttgcagggtgagaaatataaatgttcagtctatttctgtttaaaagccacttagtgattttatgcatgctttttgtatttccatctttaggacttcagcgatgaaccgtcccaaggagatgacgtgacgttcagtgcgcgcttcaaggataaggtttgacattgggtgaaaaaggctttaaatggtttttgggttttaggcaatcgccaggg

SEQ ID NO: 46153 - DNA, 442 bp, Heterodera glycines
atggattcctcctctgactttgacaaacacgctgcccagcgcgaggcggagtcgctccgcactttggccttcttcggcgtgtgcctgtccaccgtggccacggttatcgctgtgatttccgtgccgttcgcctaccagcacttccagcagcttggcacccaaatgcagaacgaagtggacttctgcaaaatgcgctccggcaacatgtggcgcgaagtaaagccgaaaaagcggaggggaaaagccaggaaattttcaaaaaatttcaacaaattttcaggtcacccgcacccaggcctactccaaggtgtcgcacgacagacgtcacaagcgccaggcaggcagttgctgtgtctgcggagtgtcgcccccgggcccgcccggaccccctggtccatctggacaacccggtggagacggacaacccaggaggctcacgaca

SEQ ID NO: 46154 - DNA, 3392 bp, Heterodera glycines
gccgccaatttggtgaaagctgaccatgacgacgatgtcgacgaggtggtcgagagtctcgacaaatttgacagttttggcaaaagcggtgccaaagaggaggacgcgttggaaattattcaaagcattttcccgctcggcggacgacctttcacggcactccatcctcagctggtgccgcaatactttgaggagccgttggaattgtaaaaatttcaaaatttggcattttttaaatgccaaaaaccgaaataaattttggaatttaaatgccaaaggttcgacgagtttggttttcggctcgcgcaagaaacggagaacgatcatcagcagcagacggtggacccaacgctggagaagccgccgcttgaaagctcgtcgcacaggtggcacaaaaaaagtgccaatcaatgatttcaaaccggacaaaatgccaaaagaattggcactgtcctgcgcaatttgatttttgaattggaatcaagaatttttccaaattttcggcaccacagaacccaatttaccttcataaaaatgccgaggccagaattttttctcggctttgttgccaaaagttccgaaatccaaaaaaaaaattaaaaaaaaaaattcaacgaaaaataattttgcttttttaaagaaaggaagggttgatacaacaaataaatttattttttggtgaaatttgttaaatctttcaaaaattccaaagtttttgaaaaaacgcaccacaaaaaaaaaattataataaaaagaaatattgttaattactagggttataagttgtatgattttgcatattttttctacgcatatgctatgaagaaaggggcttaaaaatagcatttctacgttaaaattttttgatttggttaatgtttttagtgcatataaaagcatattttgggggttttcgggaataaatccatatttcgccatttttgggtttttagagcatatttcggctcattttttggaaattttcgtaaaaaaatggaaaaagcgaaaaatacaccccctaaggatggactttttgagaatttttataaaaaaatacctttaaaaatcgaaaaattttgaactttttgtgaaaatttttgaaaaaaatttcttaatataaaaaatgtaattttgttttagcacaaaataaaaattttataaattctaaatttcatatataaagttttaaaattaaaatgttttgtaattgtctgaaaacgctccttagtcattgttttggtgttttaaagtctctgaatttttacacaatttttggcatttttttgagggttaaaaaccatttttggcagtttttaaggcatattttagtgcatatttaggcatttttcgggtttttagggcatatttgagggatttttagtgcatacaacttataaccctattaattactttaaaaacatacttctggttcgggatttctaaaaaagaaaaatacaccgctaaaaatcaaatttaaaattttgctaatgatggcacatttttttggcaattaatcatgcatggcaaaataaaattaatcagaatgcgttggttggcactgatcgaaagtgcgcattcccaagtggaggacgaactgtgctgggccaaggtggacatgcaacggttgcggcacacgcccaaattcatgccgatggtcaacgacggtggcattccgcactcgttgaggccgttcctatggccacggctgtgcagtgccgcggaaaagcgcaaaaaatgtgcgtgcgcattgcgcatttgtttcactgtttttttttcattttctgggcgtcgttttttggcattttgcgggcactgttttttggcattttttggacactgttttttggcgttcttgtgggcactgttttttggcattttttggacactgttttttggcgttcttgtgggcactgttttttggcatttttcggcactgtttttggcattttttggacaccgtttttgtcattttggcatttttgttggcaccgtttttggcattttcatgggcaccgtaagtgccatagcgattttggcacttcaaactttgtggaattttccgcgaatttttcgcgcaattatctcagagattagtcaaatcttgggtcgttattcatatattaattaagcattttgcttttttcagccccatgtgattacgcgaaaattgtccggaagtgcaccaaggacagtgtgccggcgtgcatcaatgtccaaattgaaaagtgagttttacactcaacgagttcgagagtctcgaccacagtctaaaattttgaagtgccaaaaactccgtcaagctaacaaatttatgaaattgcagaaaaatgtttttggcacttagcgggctcgagaatcttggaatgcccgggcgggatcgggatcctgccgggattttccttgggtccagatcctggctttttttttgaaaagggacgggatcgggatcccgacaaaatcgagatttgggtcccagggtcgggattaaaatcacgagaaaaccggatcggttcgggatcccggcaaaatcgggatttcaattccgggaccaggactatcccgacaaagtcagaatttcaatcccggaaatcccatcccggcctggttccaatccgagtgccgattccgacttttttttaaatataatttccgggactagggacctgctgcgcactttgcccgcccatttctgcttcggccggccccattccgttggcattgcgccactgcgccgtgtgctccgtgccctggcatttctgttccccgagattggctattgccaaggcatggcatttgttgtcgcctcgctgctgttggtgtgctgtgaggagaacacattttgggtgggccaatttttcggggttattaagtaattttgtcgaaactttgatcgatttttttctgatcacttttggcgccggagccaaaaaagccgaaaattcaaaatattctctacaccagggatgggacattccggggggccacaaaagtcgaaaagcggatttccgacatccaaatatgtataaaatcggaattcccaactatgtccaaaaccggtaatcggaattccggccaccaaaaatgtcgaaaaccataaacagtaaattccgatccaaatttattatgggaatgccgtccgttttgcagatgatgtgctctctgatcgagggcattttgaccccttccttgtatgcgccatcactgcttggagttcgggctgatgaacgcgttatgcgccatctgatccaggcaattctgcgcacgagaacagactttcctgggtctgggattaagccggatgactttaagctgtctgaatgcgtcgagaattttaactggagacaccctgtggatctctattaatccccctcctccataattacagtatataa

SEQ ID NO: 46155 - DNA, 629 bp, Heterodera glycines
atgagtgccaatggcaaatttcggatgggattgaatgtgcgcaaaagcgttgagacggcggtagggccgaaaaagacggccaatatttttggagacgaatcggacgacgacgaacaacaaaatgcggcggagaaattcgagcggaaatacgccgcatcggccgggacaaaagcgtagggaaaaacaaaatggaatgggggacaatgggaaaaacaattgtttaagccgagaacagcgaattgttgagaaggaattggcaaaaaacccggacattttcgactacgacacgcattatgaggaaatacagcagcagagagaccaaaaagtggcggcgcaaaaggaggcggacaaagagaaaaaggtggacaaaatgggcggattgaacttgttgagttggaagaaattcatggcacaatttcagcccaaatacgcccatttgttggccaaagcgcacaaacagcgcgagctgagcaaactgttggtggaggagaacacttacaaaaaggaacgcgaaaaggaggcgggccaatttgaggacgaagaagtgttcgtcacgggggcgtaccgacagcaaattgaggagagggaacggcacaaaacggagatggagcgggaggaggcactcgaaa

SEQ ID NO: 46156 - DNA, 1237 bp, Heterodera glycines
atgactactgaaaaagaatcatcgagtggctccgacgatgtgattaatgccagcgaatttgccagtgaggaaaccttttactcgcctcctgcccaaaaatcggtgaaggaaatcatcgaagctgaccataacgacgaaagcctgaaaaagtcggaacatagaaaaaacaattaaattgcctcactaaatcttcgagatttaagatataaagagcaacttctgggcgagaatgcttcaggcccggtgttggtggagcccgacaaccccaaaaatgtgcttgtaagacgcatttcgctggtttcggacgaccaagtcaagcacagcatggacctccccggttggttttcacgcattacaatatacaatacactttattttgaaaatgagttactaataatttgttggctctattgcagttcacacgaccataaaattttaatgcatcacaactttttctagaaacatccaaattaaaattattggtatctttcggttagcccaacgagtcctctgttcgtttactaaatttcaaaaaattcattatgtttcaaaaaagctatggccaagaatgtttagaaaaccaaattttcgaaattttctggccataattttttttaaacacaatcaattttttgaaattttgcaggataatagaatgtttaatttggatgcttctagaaaaaatgttgtgcattaaagttgcaaaaaattttatggtcagatgaactggaataaagccaatatgttccccataattttcgaaaaagtttctgaattagaggcccggaatcgaacgaaaagtaaaattcactggtcccgatagcccatttgtggtaatgaatgtatttttaattttttctcaaaaagtggacttaacattactgttacctaaaagtttgttttttctaaatccatgtttatgggtcaaggttaaaatggttattaccatttcgaaaaatggcctcaaaaattcagcaaagggtgacttcgtcttctgcgtgaaagaaagctgcacctatcggatacgcttcgaattcgttgttcagcgtgaaattatatgcggactcaaatacgcacacaaagtgagtcggcttggcgtcggaggttggtgaatttcgccaacccttttataatatgtctttttttgaagtgccaaaagagttgtacatgctcggctcctacggtccccggcacgaaccgtacacttacgaaacatcaccggaggaggcgccttcgg

SEQ ID NO: 46157 - DNA, 2879 bp, Heterodera glycines
atgtccagcgatattgtcgagaaaaaggagacaaaccccaatgagacggatgacaaaaccaaagaaataaaatgtgttttttgtgcttaacccaagtaaaacccatcatatttggtgtttctttctgtttcagcgcttgacgaggatgaaattgccgcacttagtaattacaacatgggaccgtacgcggatcagttgaagcaggcggagaaggacattgatgaaattcagaagcgcataaacactctttgcggagtgaaagagagcgacacggggctggcgccgcccattctttgggacattgcggccgacaaaatggccatgtcccatgagcagccgctgcaggtgaattttattttgattttggtcaataagacttgtttaaaatcttaaagatgagtgaaaatgaaaatagtttaaggaaaaactgaaaatgctaaattttaatgttagggattaggaaatggtcaaattcttggtgggtcaaaaatatcgaaaatttacaataataattcgcgacgctccaccttaggcaaatgttgcattcaatacaaattaaaatatctttttaaaaaggtggctcgctgcacaaaaatcatcaaagaagagggcaaagaaacgcgttacatgatcaatgtgaagcagttcgccaagttcgtcgtggacctgcacgaaaatgtggcgcccactgacattgaggagggaatgcgagtgggggtggaccgcaacaaataccaggcaatgtgcacattaatttatttcagaatttgcgtttcacagttacttaaacttttctgtgggttggaccatttttaagggatttgacaaaatacgccatgaattgattttaaaaattaaaaaagtgggcatttgactaattgtaagtaaaggcacaacaaaatcttcctttaaataagagagcagcatcttgatctcccctcccccgaaaattttccacaaaattttctgatgtattctaagtttttcaaaaaacgatttctcaccatccatcggcttacaaaacatttcatttttaagattcatttgcctttgccggcaaagattgacgcgtccgttacgatgatgcaagtggaggacaagccggacgttacctacgcggacattggcgggtgcgaagaacagatcaaaaagttgcgtgaagtggtcgagtttccgttgcttcaggtcggcaattcaatctctgtttttgtttttgttccattttgcctctttatttttagcctgagcgtttcacgagtttgggcattgagcctccggtgcgttttgccacaccttgggattgtctaacgttttccatttcagaagggcgttttgttttttggtccgccgggcaccggcaaaactttgtgtgcccgcgcggtcgccaatcggacggacgcgtgtttcatccgcgtcatcggttccgaattagtcaaaaaatacgttggcgaaggcgcgcgcatggtgcgcgagctgttttcgctggctaaaacgaaaaaggcgtgcattctcttcttcgacgaagtcgacgccatcggcggagcgcgatttgacgacggaaaagggggcgacaacgaagtgcaacggacgatgctcgagttggtcaaccaactggacggattcgactcacgcggggccatcaaggtgggtggggggatgtgtcttccattttggcttgaaggggaaggcaaagggggaggtcaaccgaaatttttgcgaacgggtccggtcttttaaatcgacgacttttagctttttttgcggcgccctttttgtcaaaaaaacttagggaacgggcaggggacccggcggtaccaataggcgcagccgtggaataattattgaatttttgatgaattgttaagaaaatttgttcaggatttctaatttcaggttttgatggccaccaacagaccggacacactcgacccggcgctcattcgtcccggtcgcattgaccgacgcattgaattttccttggtaaccaatgaaaataaatgccgatctgacaatgagtacacacactgctcattatgaatcttttcagcctgacctcaaggcacgaggaaacattctccaaattcacaccaaacggatgagcgtcgaccggaacattcggtcggtcattgtttttgacatacatttaaaatggagtacaacatgttcggtgtttcaggtacgaattgattgctcgactctgtccaaacacgacgggtgaacgaacgcccattaaaatgaaccctcttacaaatagcgattgcttaattaaccagaaaaagtacgttttgctttttgaggtgccgacttgcgcagcgtttgcactgaggcgggaatgttcgctttgcgtgcacgtcgaaaggtcataacggagcaagactttctcaaggctgttcagaaagtggtacgttttccttttgattgtgccaagtggattcttttatttggcttatccaaagtccttcgtttgttcgttctctttcgccctttgtattttacgttttaatttaaggtgaaaagctacgccaagttcagttcaacgccggcgtatatgacgcacaactgacaatacagttcttacaaaacggacttttttatatttgtgcacttttgtttcattacaatataaatgaggaaaccaattccgcagaatgtcttgttaacaaggactacttttacggcttttggaaattcaagcgtaaaaattgagtggcggtttcgtaaatgccgtgttaataatgcagtcccccccccatgtgtatgcggaaaaaagtggtttgtgcccagggatggcacggaattccgtcttcctaaattttattaagtagtaaagctaaagcaccacccaaaacaattgaccgataagtgtttaaaatttacca

SEQ ID NO: 46158 - DNA, 306 bp, Heterodera glycines
acaatgccgcgccaaataactgatattaaggtaaagcgatacaagcaccgatttgtttatgctttaattaacgtcatttagcaatttctgctgactgctcgacgcaaagacgcgaagtcagtcaagatcaagaagaacaaagagaacaccaaatttaaggtgctaataattcacttttctcagtccttttttccggttaaggttcgctgtacgcgctttctttacactctcgtggtggatgacaaagagaaagctgagaaattgaagcagtctttgcccccagggcttcaggtcaaagaattgaag

SEQ ID NO: 46159 - DNA, 1739 bp, Heterodera glycines
tagggttgcaaccccgacgtcggggttggaaaattcggggttcggggttggaagtgtcggggttcggggtcggggtttttcaatttttgccttatgccaaatagtcaaaatttttttaatattttttcggaaataatatttattaatttccataataatatttgtattgtttttatatttttttatttcttttttatcagaaattttgtatagaataaattttttttcttgaaattttaaaattttttattacttttttgttttccaaaacatcttttttcacgtcgctcttttctaaagacttaaggagaaaggtacggcgtccggcggtgccgataggcgccgccgggaaaattttgaaaatttggttagatctgttaacagattttgtccaaaatatgctaaatttttgcgattttgagccaatttttttaataaggtttatgactttttgggccctgtatgccgataggcagcgctaaattttggaattaagctctattttctaagatttttcaccaaaaaaatttatgaatttcggtaaatttttgtttttcttcgatatgtattttgtcaaaatatgccaagattgtcgatttctatgagtatttaatttaaaaaaaacaatttgtaataaagaaaatgactaaagaagaaaacgtcaaacggtatcgaactcaggacagaaagtaatgtcaatgtggtgcattaacctctacaccacattccaaatgtccaaatcgagcaaattttctttatttaataaaaatttggcaaatggttaaaaaaattcaaattttgtctaacttttttgcattttctcccacgaaaatgccattcttaggggtgtatatttaaccccgaccccgatcggggttaagggtcggggtatgaagcgtcggggttcggggttttccccgaaaatggccaaaaatgtcgggggcggggtcggggacgcaaccctatttttattttaagattggcaactcatctttcgctggcttttattctctacggcattttcctttggaacggactttctcatctttttacgccaaataatgtaattgttacgccaataactaattgtagaccagctcttccaattatagcatagcaaatctccggccattaaaaaattccgagggatggtacacggcaacaaactgatgatttttatgactatcataatcggttccattcatttatttgtagaaatatattcacgcgttctttgattttgctcattgtcaggtgccttcgttgctggtctcgacgctggactcgtttataattcatggccaaaatacgccgatcggtggattcccgagggagttttgtcccatacgccgaattggaaaaattttatagaaaaccctgccactgtgcaatttttgcatcggaacatggtgaaaatgctatgtgtctttgtaattagaccggaaagatttaggcctatttgacactgattttggccactttgacatggattaagggcatccgaactccgctggggtttcgttcccgtttagcacttcattcgcttttagtgactgcatggctgcaacttgcgcttggaatctcaacactggtatgaatgtattggaaaatattttcacctaattcttttttagttacaccatgtccccgtttcgttggcatcgatgcatcaaaatggggcgttgctcctttatagctcagttatttggctgtcaaatgagctcagaaagataccaaaa

SEQ ID NO: 46160 - DNA, 316 bp, Heterodera glycines
atgcccgaaatcagcaaaaccaacctgctctattttctgctgcttctgctttgctgggaaggtgctgtgcaaaattttacgatttttttacgaaaattctttttttttaatatttttttgcaaaattttgtcaggttgcattgcattggccaccattctgaagccgttcctgtcctttttcctctcccggcttccaattggcgaccgttggccccgtcggaatgtgccatggcttttggtgatgaagcgaggcaaacgcgaaatgaaggagggacagttggagagggcggccaaaaaggatgcggtccgtctttaa

SEQ ID NO: 46161 - DNA, 2435 bp, Heterodera glycines
tgaatttgttttagtgttttattgcctttttaatattcattttcattttattatttgtatttccgctctttaataaatctttgtcattagtaaaattgtatagtgaaaacaattttaataagattttaattaaaaaaataagattaatatataataaaatttgatatttttaaagaccttcgaaaaaaataaaaatacttttttttccatttttcaaaatttttctttaattaggacgcaaatatattgattgatataaaaaaatcgcgaaatatggccataaaatatagatctacatcgcaaaaatatggacatatcgtaaatttccataaaaaaggaaaatttctcaaaatttcttaaaatctcttggaattcgaatttaaaatcaaaaattcgatttttaggggggaaataagaagaaatttacaatcggataactggcgattgcttattattattattattattattcgaatttatattatttaacagcattaaaattaaaggccaaaattaatttgtccaaatcatttaaaaaaattaacgcaacaaattacaaaacgcaatttcttgcacattttctcattcatccaaccaattcaaataattaattcacattaatcacaaaactacaaattgattaataaatattacaaaaaaggaaaaaaaccttgccactacatgtaaagtgaagtgattgcacctaccaaaatgatctctttcgaaaataatatttatttttccaaattaaaattataattaaattttttgacctaatacgtttaagattaaatatatttaataaaaaatgatcattaaaaacactacaaaaaatgtattctcttctgcaaaacaattaaattcatttgtgcttgctaaattctccacagtttcaaatattagaaatacatttttggtcggtttattattattttttaaaaacgctttaattagcacgacgaattgagcattgttcaagcgacaggccaagaattaaagccaaaaccgtttgtcaatggccaattgaaatttggccaaaatttttcggaccatatgatggaggtggactggtccgatgccaaaggatggggaaaaccgttaatttctccattacatccgctccaattgcaccccggggcaaaggtggggcaaataaattttaaaaataatttttaaattttaattaggctttacattatgccatcgaactgtttgaaggcatgaaggcttaccgcggtcaggacaaccatattcgactatttcgtcccgaaaagaatattgcacggatgagacgaacagcggcacgcctaatgctaccggtaaaattgccgttaatctgaattggtaatgttgtactgctagaaatctcgcaaatcagtgcaacatcgggaacataattttttttttttttgaaaactgggacattattaatgggaaaaaccattgtccgctgtttttgtgtatcatccaagtcgaaaaaattagttggtacaaagtaaaaatagtttaaaacttactttgaccaccgaattatcccaaaaaaaatttcatttcgtgccatttaaaaaagaacacacaatttcggtgccctctaaagggtgtagtgacaaaaggcccacggaaacgtacacacaaagacaaaataccacggacaaatgacccacaaaaaaaaattaaaagataaaatgcttcaatttataaaaaaaaaacttttaaaaaaattataagcaacgctgattttaaagaaattttagtcgtttgtctttgtgagtcctctgtccgtcggccctttgtcagtgtggtatatagtataaatttttgctttaagtgattaattaattttcttcaacataatataaaaaattgcaggattttgacggaaatgaattgctgaaaatcattgacgaattggtgcggactgatcaggattgggtgccaagttcggacgaagcatcgctgtacattcgacctacaatgatcggcactgatccgacattgatcgaaggatggtcaaccggttccaaactgttcatagtcactggaccaactggcaacattggggaagctgcccattgtccgaagccaattgcacttttggccgacccgaatttggccagaacatcgcccggcggggttggccaatacaaaatgggatggttagtttgtcgaaattgaaagttttaaaactttttgatcataataatgatttgtatatgggggcaagtatttggttcaggatcaaaaatgttcacttttcttggccagagtaattgtcagaaaattccaagtttcagtttcttacagtgatgttccagtgatgagaaaaaaataaatagagattttggtcgggaacgagaaaagtgccgtgaattggatttcggaaagtcccggaaaaaacggtgctgtaacggtttacaatggtggaactcttgaaa

SEQ ID NO: 46162 - DNA, 746 bp, Heterodera glycines
atgaagcgcgaaaatgttgttggtacgttgaatggtttttcagtttttgaatatcaccctccccccccccccctaaaggtgtttttctgccggtgttcgaagcccaccgaaaagagggctctgacggagacgcgtacaatttgacgggacttggcaaaggcggggcgaacattgggaagctcaagcgcaactacaacaaagcggtggaactgctggtggagctggccacgctgcagacgtgctttatcacactggacgaggccatcaaagtgacgaatcgtcgcgtgaacgcaattgaacacggtcagtcgggggaatggacaaaaatgcaacagatacgggaaaaaagcgggatgaaatgaccgagataacccccgtcctgttggtctaacaataaagtccaagtggaatttacaaaacatgaccaaaacaaaaaacaaattcgtttttcgcggcttcatttttgtcacggttcgttttttgtgtgttatatgtataggctatatgacttctcgctgtttgaactcctaataattataatgacaaaaaatgaataatccgcgaaatgaattagggggtcattcatggaaccgaaatccatctccatttgcacattgtcattcattagatttaactgaaaaccgccattttcagtaatcatcccgaagattgaaaatacgctcacttacattgtcaccgaattggacgaaatggagcgcgaggaattctttcggtaaaaggcaaaa

SEQ ID NO: 46163 - DNA, 1057 bp, Heterodera glycines
atgcacatttcctttgtttctcgacaagcgactgcctttttgggtgttgccagtagaaatggattgccacgagtcgccgcagaagcaccgcctgctccgcttacatatcttagcgaggacgaagtcgcacttaagcattcgggttaaatacgcggaatctatttatttttggttcttttatagttaaacagttttctgagagtgtcatacgaccgcttgtgaaagaaatggatgtgaaatcggagatggacaggcgagtgatcgaaggcgtatttgcaaatggggtacggatccacgaatttaccagttttgataatttatttcagcttatgggcatcgaaatagcagagaagtttggcggttccgagtccagcttcttcaatgtggctttaaccgtagaagaattggcaaaagtggacccatcggttgcggttttggtcgatgttcaaaatgtgtgcctttccttattcagccagaattttgcttattcattgtttatttagactttagttgcaccattgattatagaaaatggaacggaagagcaaaaacacaagtatttgacacgaattgtgaaggattgggtaggacgggacttgctccctcctcgttttatttgtctatcaaaagattggtgccttttgcctttctgaagctgggagtggatccgacgcattcgcattgaaaaccgttgctcttccggacggcgatgattttttgatttcgggctcaaagatgtggatttccaatgcctctttcgccaagttttttctcgtatttttttcgattccattagtttgaacaattccatctttttatgtgatggccaacgcggaaccaacgaaagggtaccggggcatcacatgttttttggttgaccggaatctgaaaggttaacgacgaggttcatttgctgggaagacatttcaacaaattgcaggagttactgttgcaaaacatgaggacaaactcggcattagagcaagttcgacatgtcctgtccatttcgacgaggtccgagtcccgaaaagtgccattcttggcgaatatggcaaag

SEQ ID NO: 46164 - DNA, 718 bp, Heterodera glycines
atggttgaacgatttttcccaaaccctgaagaagcgccattaattaaagccatccgagacacttatgcaaacatttggagaattgaagagaatgagaacaatgagccattttctgagataattgaagtaaaacgaataaataaaaatatattaaaaatgtgtttaaaagtttcatttaattgttttcattttagagagtcaaaaaacagccaaataattttgtaatgaaattaactgaatatgcattatgggacgcatggattaaaaaggatgtggagaaagtatattttggcaaagaaattctcgaagctttggcaaatttcgatgctgacaaacgcttggcatacattttgatggaaaaattacggccgatgtctgtgaaggtaaagtcgggaaaatgcatcaattgtgagcttaattttaaaagtctcagtttcaattttcaaattcttaaaataattttataaattcatttatgcaaattcagaatcacattatttgggcagaggacggagaagaaagcagcggagaagactttttagaagacgtgaccccggaattgggaatttttggcactttgctcggcaacattgtcaacggtgaagtattgtacaatgcgcaatttggccatcagctgaagaccaaattggccagcgagaatgagggtggcatcgcaagtggaaacagtgcttatgattcggcatatttggtggactga

SEQ ID NO: 46165 - DNA, 1507 bp, Heterodera glycines
cgcccaacatttttggccatgacgaaatcaagcgtggccttctgtgcctgctgtttggcggcacgcgcaaagcggtggacccgacggacgacgcgtcccgtgtccgactgcgcagcgacgtgaacattttgctgtgcggcgacccgggcaccgccaagtcgcagctgctccagtacgtgttccagctggtcccgcgctcgcagtacacatccggaaaggttgccattgtggttcctttttaattaatattttaaaaaaattccccaccccgaaaaaatggagtagagtaaaaccctccgccgataaattattttccgtttttttttgaattaaacatacattttttcaaggaaaggaggggtcgcaaattctaggaattttctttaaagacaataaaaattccaatatttttcccggggcgcctatcggcaacgctggacaaaaaactccaatttttattaaaaaattaaccgaaaatcataagatttgatcatttttgaacaaaatctttaaccaatcgcatgaaaaattacactttacctctctgttcccaaaattttttttggaaaaacgcaccgcaaaaaaaaagcgggtttttaaaaaaaagttatcaaaatcggcggccgacctccctccccctaaaattctgtcgtttaatgatgaaattgaatttcagggctcttccgcggtcggcctgagtgcgtcgatcacgcgcgactcggactccaagtcggtggtgttgcagacgggcgcgctggtgctggcggacaacggcgtctgctgcattgacgagtttgacaaaatgagcgacggcacgcgcagcattttgcacgaggtcacaaaaaaatgggtggggattgatcagaccacccagaaaggataagggtcaggacctccgaccattcggggtaattcccgcaacttttgtcttgccccgagcccaattaccaattcgggacccgacggagtgacaaataaaacgaaaacagccgaaaaaaacgatgggttttgtttatttttcacaaattttcaataagttttttggggtatggaacagggatgcttcgggtcaagaaaaagtcgggttaggtcgaccgaaaaactttggaccgtgaaaaaaaagtccggtgccggacttcgggtaacccgtacaaatccctgcgcgcatatggaacaaagagctgccccattaaaaattggtgatcagcaagcagcggcgatcaaacaaacaaaccctgatcactcactactactgatcaaccaattaatttttcaggtgatggagcagcagacgctgtccattgccaaggcgggcatcatttgtcagctgaacgcgcgcacttccgttttggccgcggccaacccaatcgactccaaatggaacaagcggaagaacattgtgaagaacgtgaacctgccccacacgctgttgtcccgctttgacctcatctttttggtgttggacccgcaggacgaggcgtacgaccgccgattggcacggcatttg

SEQ ID NO: 46166 - DNA, 683 bp, Heterodera glycines
atgctttcctacaatcgtaaagccactggttcagaggcatttcacttatattgcctaaattcaggtgcaaatcgtcaggtggccatcctttgtaaccatcaaagggcagtgccaaaaacgcacgaaaagtcgatggaaaatttggagaataaagtgaatatgacatgaaacggaaacgcaaatcctaagcaaaattcagataaaagagaagaagcaggagtacaaggagttgaaggatcagctgaagaagagcaaatcggtggacgagaaaatggcaaaaaaatacgaaagattgaaggaacagatcgccaaactgaacacacagcgcacggacaaggcagggggaaggaagggttggcaaaaattccgaacaaatttggaatttgatttttcggggaaataagtcacccttcaaatcaacgaatcgggaacagcaaagattggtcatttttgatttcaggatgaaaacaaacaaattgcactgggaacctcaaaactgaactacttggatccgaggttggttctatcgaatattccaatttactatgtccaaaaaaaatttcaggatttcggttgcatggtgcaaaaagaatgacgtgcccgttgagaaaatattcagcaaaacgcaacgcgacaaattccgctgggctctcgacatggcgaaggaggacttcattttttga

SEQ ID NO: 46167 - DNA, 1985 bp, Heterodera glycines
ttgccatcgatggcttcgtttatgccgaatgctgtttccggccattacccgggctggcgcggccgatttccctcctctcataagcggcgttctgagcccgagtggtctgtgaaggagctgatcagaatgaacccattgcatctgtcagtgtctttcaatcggtcaacaaaaaacgaatgcttttccttttgcagctttttcctaggctttgtccctccctttttgggggcgattgggtcaattgtgacggcactgcttctgcacaatgatgaaataaggcaaatttaaaattcattcaaaattcgtcctataattttaatttcagtaattacaattggcagtgcggggtaaacgttgagcaattaacttttaagctaattttaaaactgcagagagctcggctcccttcgctttcgcgaataataaaccttccgatggaaagtgagtggaatttgcaaaataaatgaccaattaaagtcgacgattaaccaagggattttctggcaaatcactttccttttccacattccgctgagagcagtcgaaattgcagtgggatgtgagtttctctccagtcgaagacttatttgatggtcccttggtcatttcctttcagttttccgttatggccgtttacggagtgtccactgcaattggccgcgtctctattcgctgtgccgacacttttacctttggctcggctctttggaattgatttttctggtcgtaaatttcgtagtgattaggctatccgaggatggcacatgaccgggctgggctcaaaaaaacagctttttgggatttggtctggtttttccaaggttttcctggtccaaacatttgggttcgggggtaaacaatggaccaaacaatcactggcaagaatgtaaattgtaaggatagaataaaacacttcaaaaaatatactacatttggtacaagggtttaacgaacttttctttttcgattttaattttattatcaaattaaattaattgttttttgagttgtcctaatcttagccattttaaaatactttctctgttttccaacattaccccaaatgtggacactttgtcacattaccccaaatgtggacactttgtcacattaccccaaatgtggacactttgtcacattaccccaaatgtggacactttgtcacattaccccaaatgtggacactttgtcacattaccccaaatgtggacactttgtcacattaccccaaatgtggacgctttgtcacattaccccaaatgtggacactttgtcacattaccccaaatgtggacactttgtcccattcgttgctttttgttaattaccccccccccattttcaaaggtcgctctgtcggtggtcggggagcgtgagttcatctgttggtttggctttttgatctcctttagccgccatctttccttaagcttaccatgtgatcttcttttacgccttcggtgccttcgccattggcttctttctgaccaatgtcatctgtcactcgcagtccctttattatttgaacccttatgtattgccaattttctttgttgtccatttttttacatttaattacgcagggtcgaatttcgtaccatttcaaaattgtggtgaccattctgtaagaaagtgggcattcgtcgttagcttaactcagtatttttaaagttacgtcatctccgtgcccgttctgttcggcgcttttgtgctttattggcgaaaatgcatcaccatcagtcagtttttcatttcatttctttctcattttcgcccttcataaaacaatgcttttcaaatgcttttcagtgtacgatgttttcgcagtcgccgaatatatcgacgtgtttttgaccatcgcttatcattgctgtgccttctttgacattcgctacaaagtgattttcagtgtcagggaagtccgagaaaggaaaatgcaatgagagaaggaaaagaaaaggaccgaagaacggacgaacgaaagt

SEQ ID NO: 46168 - DNA, 791 bp, Heterodera glycines
atgcttctttcattcataatcctgcttttcctgccaaatgcttttccactgattgtgtgtgactgtatcatttgtcgtccgcaattccttttgatggatcgaccgctttcagttgacccaaaccgatcaatttgaatttaattttcaaatttactttcatttgctttattttttgtaataaaattggccatcattataacaaatctattaccataattaaaggtaatgcataattaacctgaacatttttgttgcattgtttctcccatttgcttgtttataatcacataatttctttccaaaaccaattttagcaagacaaaaaatcagaagcgaaaatggtcaacccgaagggataccgtcgcggcactcgttacatgttcgcccgcccgttccgcaagcacggcgttgagccgctttcaacattctaccgcgtgtacaagcggggcgacattgtcaccgtcaagggcaacggcgccttccagaagggcatgccgttcaaggcgtaccacggcaagaccgggcgcgtgttcaatgtgaccaaacatgcgctgggcgtcgtcgtcaacaagcgtgttcggttagtatttttggatatgttggtcggtgttcaattcggaattgtttaatgagttgtaatggatctgtctggccgacatttagccatgtttttcgggatgagagaccatcaccattcatagaaatcaagataagaatttttgagggaaaatgttggttccagttcagtttccatgtctctcaatcattgagttcttgtccaatttgtggaa

SEQ ID NO: 46169 - DNA, 1902 bp, Heterodera glycines
aaattgggcaacgaagccaaaacggcggcgcagggcaattccctctttgccgaggtccatttttgttgccattttttgtgtttttaactctattttttaaacttatttgattttttcagatcgtttctttgactgatgttctcggcgttgcctttcggccctgtccaaatgcgcgatatatgcttcagaatgaatttgagccgtccgtgctgctgaatgtcatgctcagtcccgaaaccgactccgtttgatttattgttgttctttcccctaaaaatttttgccatgatattttatcttgtctttgcgcaaattgcggccgtgatcccagctttaattgcttatcattccaacattttttatactcatttgatgttttttcgctatttgagaaaaattttttgtattcctatttcaaatggcaattgtttgttgtcattttacctttactaattcaaaatttctttttctataattttttcattgtttttatgatttttctctgatgggtaatttctttggcattcggacaaaagcgaacagatctccgccagcggtaactgatcatgaccgaacgaccttggtaagtacaaacgattacaaaaaactttgacttataagccggaattttaagggtccgctttcagtgagtactttgctgattgtgacaattttaagattctggacaaagttttgtcgacgcgctcccgaaatgattatagtttaagaacacagaatttttgcaatatttaggagaaaattgagtccaacatttgttaattgcatggcattgttttatataaatgcagttgcatcaattttcagtcgttgaaaatgcagcgcgacaaattgcgccaagcgtgtcaacggtacgagcgcaacatcgccaaggacgcggagagagcgcgggcactgctcagagacggacgcaaagagtgagcaaatggggaacggatgctaatgaggaaaagcacacagtgacaaactcaccaccccctttgaagccgagcattgttactgttgaaaaggaagcgcttccaggagacgatgatcaatcggatcggcggattcatggagcaggtggagcggacgatcaccgacatggaaatggcacagatcaacagggaagtgttcgacaaccttcggcttggcaccgaggcattgaaggcactgaacgaggcaggcactttcggaataattgacccgctcacattgccaactattcctagaaaatttgaaaatttcttttagacaatttctttggacgaagttgaacgtttaatggaggagagcaaagaggcgcaagagtttcaggaggtcctttctaagatagagtcaatattttgtgttgttattgccctctgtctcgctgatttccaggaattgtccaccattttgggccaacaaatgtcggaggaggacaacgacatggtggaggaagagttcgagcgaatgctctccgaacaaatgccggcagtgccaacggagcaaccgacggacacaaaagagggacggaaaacagcggacgaagagaggacaaagggtacggtgaatggggtggggtaacttattgtgggatttgttggtcacttatcataaaatggaatgtacccattgggggaggggcaacaaattacgtattgtccgcttttttacattttagaaaattttcggttgaattttgcatttgaacattgattaaattaaaaatttaatgtctctcggttccttaaatgaaagaagaaatttattattagaaaaatgtgaagaatttctatttattgctcaattgttttcgcttaattacctttttggaatggcattatcagtggttttcacttcacttattttttagaggagaaggagccaaaacgacggagggaggcggtggcgcaggaggcg

SEQ ID NO: 46170 - DNA, 1665 bp, Heterodera glycines
atgggcctccccaagaagttgttggtcagtgtcaacacaatctattataaacagaatatattgcacttattgcagcttcccatcagaaaaagcacaaattacttccatttagagcttggccatttcacgcattcttgcgagaatgacatcgtttgcttaaccacctgcggaaaaatcccctacttcaatgcgcctgtttattttcaaaataaagaacaaattggaaaaatagacgaaattttcggtggacccaaagacaatgtaagttttatttattgctttatttttaacttgaataattttgcctcggatttttggtaatactgccggcggaggacggaccccttgagcaaaaaaattcgacctttatttaaaaccgcttcaaatgcacaaaggaacaacgagttcgccagtgttttcagcataatattggctctattgcactttatgagtccaattgctttttatgaggtttcgacggatggtttaaatacctcttgaaaagccttaagaaacaattttaagttactcttattccgttgtaaatgtaaatgtttcagggcttctcagtcaagctcaatgaagggctaaaatcttcatccttcaagaaagaacaaaagctttttatcgaccctgctaaattgcttccattggagcgttttctcggcggaaatcagtccggcggtgggagaggcaggggacagcagcgggggagaggaggcgcgggacgagggggccgtggaggcgggggaggacgcggccgaggctttaacgcttcaggcgcaggcagcggagggagaggtaccatattaacatacaaatagaattggccaattccaatggaatggtgtcgctttttgtaaccgcttttaataaatttgccaataattgaaaattttttggtttcggtaagggggtgggctacgtaagttacacatgttgatattattgtaattggtggagattaaattctttctcaatcattgctaattttttgaactttttatgatacatgacctattagatgcaggcctatttccaaccacacacattgataggctataatataaaatttcaaaatttataggtggaggaggatttagaggcggaggacgtggaggaggaggcttcagaggcgcttcagggggccaagggggtaatttccgtggccaacggggcggtggtggtgggttcaagagaccattcgaaggcacacccgcggccggaggactttccaagcggaagaagtttaacgaatgatccatcattttcttgattcatttcctttgttgccgtgttctctttttggatgttctcttgaattaatctttcccttttcttgagaatttactgacggaaagcatccaaacaaaattcattgttgcttgtttcaatttccaattataaaggttttgcttttaattccatttcttaacattgccaagtcggtgattgaacatgccatccatttccttctttaatttactggcacatcttttccaccgtcgttcctcctttcccgacttcgtgcttctccaaagactgaaagtgaatcatcacgcggtcgggcggaatcccaaggcgactttggacgaattcgctgatgttcttacagtgaattacattttcatctgcgctgacacagccaattgatttgatcttata

SEQ ID NO: 46171 - DNA, 1105 bp, Heterodera glycines
atcattttgtgtgttaaggcggggagacgttcgatatttattgtgtgtgttagaagaggaagagaagaagcaggaagagtggaagatgagcgcgaatacggaatgctatcgttgccacgaattcggttggatggagagggagttggtggtgttggtgtgatttcgggtccgtccgggttctgttggtggtgttgagagagaaaactgttggtcctgtcggatggtgttagcacattgatgagaggagaaatgggaggaagaggtggtgtagagagaggtggtggtggtgtttggcttgctcttctctgttgttcctgggacttggccgtctgccggtcgtctggggaggcggggcggtgctgaaccaacgcccttcttaagggcacatttcgcgtgactgtcccaatgccggtcgtagtggtggtggtggtggtggcggtggcggctcgcgcggcggtggaggcggtgagcatttgttacagcaaccgactgatttgttttgtttttcagaaaccaagtgttataactgtgagttttgcttctgacaccgtttaattgggaatggaacataaattgtgatggtttttgtatcaatttttcaggtggacgttctggacattttgcccgtgaatgccgtgatgccggagaccgcgaccgtgggcgcggtggtggtggcgggggcggcggacgaggtggcgatgaccgcggcagcaaatgttacaactgcggtggttacgggcactttgcacgcgaatgtcgcgatgagagaagcgccagcggcggtggacgtggcggcagagacgacagggatgaccgaggcaacaaatgctacaattgtattggcacccgatttatataaccaaaaaatgaggaatttcactcgaacaaaaaggccctcagccaaaatcccactgataaatgacagtgagtgaaaagccacactaattgttgttctataaaacggtagagctgtttgaacattcttgttaaggtgggaaaagcggtcatttttcgcgcgagtgtccggagggaagcgaccgccgcggtggtggcggcggtgggcgcgaccgtgacgaccgtcgctgctacaactgcaatgagccag

SEQ ID NO: 46172 - DNA, 482 bp, Heterodera glycines
aacagaactatttgcgtttatcatcatcatcatcccttcattgtgcaataacaacaacacttcaaaagcgacctcatcgccgtttctcatcgttcattcgtccgtccgtccttcacatcaattcgctcgccgttttcgcaatggcacgtcgacgcatccaaaaggtggcaaatgacaactctctgatcaaccaatgctttaaatgttttgatccatttgcaggaaatggcggagctgcatcaggaactggtcacgacgggttacaccgcggcaccgatggatgacggcagagacttgtaccattggaaggcctccatcaaaggaccgcccgagtcgccgtacgaaggaggcaccttccatttggacatcgttttccgtcgcgactacccattcactccgccaaatgtgaaattcgacacgatcatttaccatccgaacgttggagaaaggggcgacatttgtttggacattctgaagcagat

SEQ ID NO: 46173 - DNA, 557 bp, Heterodera glycines
caagccagcaaattcaatgaccaagagggcaagctgatcctggactgggtcaaaaagctaagtggtgaaaacttcagcacggatggggtgacgaattaattggatatggcaaaatccaaatttgaaacgaatcttttcagagccgtgagaatttctataaattgttgaaggatggcactttgttgtgcaagttagtgacatttagagggattttactaatgcgaaagcctgcctatctgatcagattggccaacggcattcagcccggatcggtcaagaaaattcaacaaccgaccggcaatttcgcctgtatggaagtgagtggagaaaggagggagaagcatcagaagacgaataactcccctttagaacatcaacgcttttgtgtcatttgccaaggcccaaggagtgccaacggaggaaacttttcaggtgccattcattggatatttaaatttggcattcactggttaattgcaccttttcagagtgtcgacttgttcgaggctcgcgacctgtactccgtttgtgtcactgtgctttcattgggacgaatc

SEQ ID NO: 46174 - DNA, 647 bp, Heterodera glycines
atgaacgaggaatactgcttctctgcttcgactgctgttgcacagagctgggcccaaacaaacttccgaccagtggacgagcaaccgaacagccttgtggacacgctcatcgccaaactttcgcgcacgactttcgagcagttcacttccgaagtaagtgatgcgttcattttatccgttctttcatttcaactctcttcaggtcagtgctcaggacattcacaagctttgcgatatcaccgtcagtgttctccagcaacagtcaatgctcatccgtctgcagcctcctgtcgtcctttgcggcgacatccatggccaatttcgcgacttgctgagaatcttcacgacgatgggctttccgccggacaagaagcacctcttcctcggggattacgtcgaccgcggcacgcaaagcctggaaacaatggtcctgctcttctgctacaaagtgagtttgctgaggcgggttgagcgagaatcgttttaattgtccactttttaaggtgaaatatccggacagtgtcatccttctgcgcgggaaccacgagtgcagcaacatgaaccgagcgtgagtttggaattggacgaggcctgggggaactaattttctgcttcctttagctatggcttcttcgaagaggttgaac

SEQ ID NO: 46175 - DNA, 488 bp, Heterodera glycines
gatttttggattagcaaacaattttgcttttgtggttatgctaagtgctgcaaaagatataatcaaaggaccgacgaaagaatccgcaaatttaaataacgcaacaacaaatttgtcttccgaaaatttatgtcgggtaattaaaaattaattatttgattttaattttacctatttttatttgtattttcataaattttaaatattttcagcatgttctaccaaagccaagctgtaatagcatatcaacaggtgccattttattggccattatcatccctgcattggtcattaaactaatgtgcccatttgtttttgatcgagtgccatttgggttattaattaattaaagttattattttatttatttattagcttccgtcattttcttgtgtgcataatgcaagcactcagctttatcattgtggcattttccaactctttcacacagtcattaattggcgtcatttttacatcattaggcggtg

SEQ ID NO: 46176 - DNA, 1333 bp, Heterodera glycines
atgacttgcccacaaaaaatcagcgacagcagtcccctagcaattaacagtggcctaaacattttctcagttccacctaccaatgtgtctgttgttcgttcattctttcgtcaagtgcttccgctagcaacaatcacgcaagaatcgccttacctatttcggctttacagtgacaatttgtggaccgatttatcgcgggtctatctttatctcgagctgtccattgaaaaaccgggagcaaacgataaatgggttgcgatagatgatgcggatactagtgtctctgccattcaagggattggtcaaacatttgtccagcaactaaaagttacggttggcaatacggaagtatacgatagcggaaacctatacacattcaaggcttatatcaccaatgagttaagctttccaataaatgccaagaaaaattttcttggttcaacagggtattatcacaccgtaaaccaagatgactcaacagacgatgggttcaaagagcgttgtaaaattttcaagggtggaaaaaatgcgcaattcctctcccgtctcgactttgatctgggaaaccaagagctttatctcttaaataatttggacttgctcttcacaatttacaaggccaaagatgtctttcttttgcaaacattaaaagcaaatgattctaccaaatatcgtttgacagttcacgatgtcaagatttatgcaaaaatggttgaggtccaaccctcactaaacatgagcctttacaaaacccttgaaaaacaacccgccacatacgcagtacgcaagaccgaaatcaagtcgtcattcatcagtgttggtcgatacgaatttgagtacaatgtattcagtgcaaccattcctcgacgtgtgacaatagcgttggttggaaattcagcatttcatggtgactacaaactgagtcccttcatgtttgagccgtttgatttgcgtgagatttcggtacatgctggtggcgtagtttacccagctgttccttataaactaaatttttcaaatgatcactttgtcagcgcttttgttgacatgtatgaggcactcggaatggctaactcggaacgttcatttgacatttcaatggcccagttcaaaaaagggtggaccttttttgtcattccattgacttccacgcttgacgacagctgtggatttgagctgttgagaaacggtacgacaaacgtacgagcaacattcaattcaccaattccgcatggtggtgtagagatgattgtcttgggtgaattcgatcaaatgattatggttgattataaccggcacattgtgaccgactcaaagcttgggtaaattataa

SEQ ID NO: 46177 - DNA, 2742 bp, Heterodera glycines
atggccgcacatttcccacacattcgttctcgcattatcagtgaacaaatatcactcattgaagaaatcattgataaactctttgattatcttaacaattcctacaatggacaccttggacccgttaagaatggcaaagagaaccaggaaatcgaagtgatgggtttgtttttctttcgcttgctaaattactccagataactaactcattgtcagttgagcttatgagaacgacttccatactcatcggccttttgagggcatttggcagatattgcaacgacatatcgtttccgctcatttcgcttatttaccctttgccgtacaatttaccaagaaaaccaactgacgagagcatccatcggaagtccaacgcgtgtcatgttgggtaagcaaaagggaatttaaattagaccgaataaaagactcaaaatttttagctcacaaattacccaattatgtagaatcacctcaattaaggatttaaaaaagatatcatactagcaataagacatttttgagttaaaaagcgtttcttttcgttttatttatttatttttttgtcgtgtcggattaaggaatgcgtttttcccgacaataagacactttcagattgaatactgattcttcaaattggttttggaacgaccaaatgaaaactgaaaacgacacaaattgttacaaaaagttgttcacccgacatggaagtagttttttgttgcaaagagaaccgtcatctgttccaaaatttcgcgtttgttttggtgaaattcaaaaaataacgaattgcgtaagttttattaatagagtgctcatttttcagcacaaaaaagcaccaaaattgcaaaattagcacaaaaattaaaaaagcgagaattcagcatgaaaaagttggacttaaagccctcattataacttagaaatgcgtttttcatgcgaagctccaagttagcaaaaaatttcagcaaatgctgcaaaatgggcacgctgtatattatatatttaattttattgattttaaaattatattcacaggtcaaaaagttactttctttggatttattgtccaaacttgattcaatcgcgggtcaagtttttctatcgtcagaattacgcaaatttccttacaaaaccgtttcggagacgctcattttggtatcagttacacttttgagagatattctaagcccactgtcaattggaagcggtgggaatgaagttctggagtgttttgctggcgaggtgattggtttccgaaagatttaaatagtttttgatttactttttgggacaattccaaaccctataaatccacttgggtgcatcgataataaatactctaaaattattcagctgaacgagttcgttctgtctttgttcaaacatggtcaggattccatcgctcagaaaagtcaaattgacgagcgcaacgcttcttccgtcgacagagaccgttctcttccacttaaacaacagattaatgataaagaaattgccgtgaatcgagtcaaaatgctggtcattgccaattctatctgtttggaattgatcgtttggagtgcggtggatgaaagtggtaagcaatggaccaattggagaatgggttcttttgtccatttcagacggggatatgatttgtgggacgatatcagagaaaatgtggctgccgcaccgccacgtgttggctcatatgcccgttaatgtgatggcactggaggcattgggcagtatggcggagaaattcccaactctctcaagcactctcatcattcgtcttctgagcaaatttctgactgatccttgcccaattttgttgaaaattgcctctgaattagtaagatagatgggttttggcttattctaatgaagtgccatttcaagaaaccgaaggatcaacaacaccaacaattaaatgcacgagaagaattactttccactcgacgaaaaattgggctggcaagtctgcgatctgctgcaattaattctttgtcgaggttggtccgttttgaagaccaattttacagcgccgtactttagggcgctgaagtcggcgttgctgatcgatcagagcagccttcaggcgtgtctcgccagtctctcgtcacgtctttacactgtcgcttcggagaatgataggtggggtaagaaataagccacttttagattacttggcgtctttagcaaggctcttttggtgtctgaaaatctcatccaaactcttggcaaattgggcgtttcctttgtcaacgatgcttcttcttccgaacttgtccttcaagtatttgtcctcatcgtcctgtcgatggacagccaaaaaattctttgttcagatatttttgcaacgtttttcgaacccaccttctcagcaggacaatttgatcatttcttccctggccgacatgtggatagcgggagctgtttgtcttttctcttctttttctaacaaatttattttttattgtgtagaattccattcacgacaagacaatgaaactgttcaccagagtcaccattgagtcgagcagtcgcgtttattcttccgatgcgctgcccgacagtcgttatttgtaactctcactggaattaatcgttcacccaaaatgcatttaaggcacgtttcattggcagttgacaatgcactcgcgaaaatagcaaattcattggattctgaagaacagcagactcttttcttattccgtcttttggaacttttcattcaattgggactcgaaggacaacgtg

SEQ ID NO: 46178 - DNA, 2018 bp, Heterodera glycines
tgctccattcgctctttggtacgaactcaaacaaatggttgagtaatacaaaatctttccccttttcagactcaacttcccaattcttatgaagtgttgcgagaccgcggtgacactgctgagctgagtcagctgaaaaacggctttcgtgtcgcctcttatgcaaacggacgtccgacagtgacggtgcgtttggatttgcatttccgcattagcttacaatttacaatattctaaaaactcaggtcggtgtttggctgaatgctggctcgaggattgaaaccaatgagaacaacggaatcgcttcactttttgaagggttgctgcacaaggttcgaattttctcattttttggtaacattggttttgataccagattttatagtttggtggttaactaataaattttagggatcagggaaacgaaattcggtgcaacttcaaacggagctcgccaaacttggggctcggcttcgctctttcactacccgggagcattcggccttttttgtggaatgtcttaaatcggacaccgataaaggttcggtcatttctcttttattttaggctttttcatcactttatagtggtcgaattgcttgccgatgcgttgctgaaccaaaactttgacgcgtcgaaaattgaggagcaacgcgccgtggcattggatcgactgcataaggccgagaagggcgacattcgcggctcagtgctcgacaatttgcacgccaccgccttccaaggaacaccgctcagactgtcaccacttggcacaacaaaagcattgaagtaagtgccaaattggaaacaaaaaagtggggcaagcaaacttaaaaaccaacaattagacggagtctggttcaattgatgtgactgctttagctcattgaccaaagaatccgtgtccgaatttgctgacgacattttgaaggccagcggaatggtgctgacggctgttggtggtgtggaccatgagaaaatgagcgatttggtcagttggggcatgttacaacattgcgttttttatattatcattattactttggcggacttctttggaattttttttccattctttcatttattttcaggccgaaaaacactttggccaccttggcaattcgtacaatcgcaaagtgcctccacatgtggcgtcagtgaacaacattggtcacgaacaaatccgtccaaagggttatcggttcactgccggcgagttcctctaccgggacgacaattacccgctaatgcatggcgcaattgcggtggagggcattggcagaaaccaccttgactacatcgccatgctggtgggagaactgggggggggggggcactgaaggcatattttgggcacatcggtcaacatggcgtttacaatttttaacgaatttgtttaaattttatttatttgaatagtacaattttcgatgcttttttcaggggggggggtgggtcggcgggaggcaaacgtagtgcacccattcccaacttgtttgtccccatccataattgttgtacgtttgcatgtttttcataggttgcaaatgcctatgttggcacatgggatcgttcctttgccgcatcgctgaacgctccgaagtccacggtgcagaagatgtgcgccaacgacgatttgatcggatatgaaaatttcaatatcagctacgatatcacagggtacattttctgttttatttagtaaacttttaatatatttttttcagcctcttcggcttttacatagtgatgaaagggcatagtgacgaagttactggcgaagccacccgtgccgttctgcacgcgtggaagcatttggcgatgggcatcaccgacgaggaagtggacgcggcgaaaaacgcactcaaggcccgcctgttcctgggactggagaacaactcgcaaattgccactcacatagcatcggaggtcgggggcatttgacgaaatgggaggaggggggagggagggggaagtacgatgatttgtgagaaataattagttttttttgcagacct

SEQ ID NO: 46179 - DNA, 298 bp, Heterodera glycines
atgtcgtcacaagaggatgaatatgactatctttttaaaggtacttttttcagagatttaaccgttctcggacataaataattctgaaatttctgtaataaaattttggtttttcgattttgtcatttcccttatttttgccctggctattccccatcatttttcagtggttttgatcggcgacccgggcgttggcaagtccaatttattgtcccgtttcacgcgcaatgagttcaacttggagagcaaatccgccgctggtgtggatttgtttttcgaattctcaccttccattaag

SEQ ID NO: 46180 - DNA, 353 bp, Heterodera glycines
cttttttcgctgtccctaaaaattttaaattggtcgctgcgcctctttttgagctatacgacaattccgcaggctatgggccgctgatcgccagccttcctcaaattctgagccggtatttcactccctttctgatttttgagtttcttccccgtcctttagcttcaatttcctctacaactatgcttaagtggctctgccgttctccccgcttcgctttatgatgacgaattcttcatttgtccgatcattttctgttgcaccaattggttgcttgttaaatctcatctcatctattttcggtcctttctcatcgtttcgaattcgattcattgtttgttccattatttggt

SEQ ID NO: 46181 - DNA, 598 bp, Heterodera glycines
atgggttgctacaaaagactgtcgaatcattgggtcattttccgctgccggcaaagacaatgggcaaatatttttcccgcgatgtttgcaaaagtttttcctgaaaaccttaatctgacaaaaagttcttttataggcatggtgactcattgctcattttggacaaaaccggaagaatacaaaaatttacacgggaagggcatttcgtagaaatatcagccaaaattgatgattatattgggaacggattcacaattcgagaggacgaggctgtgatcgcgtgcagtggtattgtgaaggatgaggtgacagtgggagaaacgaaggacgaattcatgtgttgtacaatgcgaaatgttcaggaaggaaagaccatgtgcgacgattgggtggaaaacattcgcttggatgggtcgagatggacggaggaagcgtaaagagcggcttaaagaaaagaacacataaaccgaaagagaaaccaagaaatatctctcaaaaaatgtcaaaatttgggcattttcggttgtgaatcattacttaaatacctaatcgcttcttttgatttaaattccttaccctttttaattaatttaataaa

SEQ ID NO: 46182 - DNA, 920 bp, Heterodera glycines
atggcacaatatgtgccgtggtattacaaacgctcaccgcccattttttgtggcgtttgtgtgcccgtttatttgggcgtttggtccgttcgtaagttcatcgttgtgcttggctttctgctctttctgatcggcgttctgctactgctcggtcttctgctcatttgcgtggccatcgaatgttccgctgcgtttgtcccccttcttttcttcgtttatttgtttttcttttcagtgccggtgctttacttccgttcgccttagtgcttatcattgctgggctactacttttgcactgcggatgggctgctcatcttttggacgttggcgagggaatgccgtacgggtgagtgccgaagtcatacgaaattttggatgagtgccgaatttctgcggcattcccccgtggatatctttccattatttaagtgaatattcgacgacaaaaacggtgagcacttcgaccagaacgaaaaggacggcgccgaagggggaggaggagccggtgttcgaagagatcgaaggcaaacagccgccgcccgagatcaagcagggattttggcaattcgatgagcgcgaggcgtggcaaacggtggccaatccgtacccgataaagtggactaatcttcacggaccttcgctttgactgttttgtgtgttcagttacacgctgaagccggtgattgaacgccaaccgtacgtgccataaccatgggaaagcaatgaaaatgccattctctgtgccaattttggacaatcccatcgaatgccactgaattttcattaaatttttctttctctgttgccattctcttatgtgtcaaaatagagattaaaagtcaaaaattgctcaaaaaagtgtggtaaattttcttcttctggaatatattttaattatattaaagtgtaaaatgtgacaa

SEQ ID NO: 46183 - DNA, 474 bp, Heterodera glycines
atgccggaacgtttgacttatcgtagaaggctttgctacaacacaaagtccaataaaacgaaagtggtgaagacgcccgggggacggaatgtgttccactaccgcaataagcttggttcaatcccaaaatgtggcgacaccggtgtgccgttgaagggggtgagcaacgcaatgtcattaatgaaatgattggttaacgggaaaggcgaggtttaatttctgtttttggttgtttaaactgggctggacatacttttgcatgagagataaatctcccgtgggatatgccgacttatctcttcccttcagattaaagccgcgcgtccgcgtcaattggccaaaatgacaaagcgaaagaagacggtcacgcgcgcttacggcggttgtctcagcgctgcggctgtccgtcaacggatcatccgcgcctttttggttcgtacttatcactggactcaaagaattgttttgtgttga

SEQ ID NO: 46184 - DNA, 903 bp, Heterodera glycines
attgatatatgagcatccttcaatgtttagggctatgtgctccgaatttcgggtggtaacgacaagcaaggctttcctatgaagcagggagtgatcaccaactcgcgtgtgcgccttctcctctccaaaggccattcctgctatcgccaacgcaagaagggagagcgcaagcgaaagtcggttcgcggatgcattgtcgactcgaatatgtccgtgctggcattggtcgttgtgaagaaaggtttatgatttggttttttgtactcggccaattgttttttcggtcttaaaccaattaacgctttaggtgaacaggaaatcgaaggactgaccgacagagttgtgccccgtcgtcttggtccaaagcgtgccacaaagattcgccgtctgttcaacctgaacaaggaagacgacgtgcgaaagtacgtaatccgtcgcacactgccggctaaggaaggtttgtgtttacattaagttcactgcttttttgcgaagttttatgcacgtatgttaaattgacagttacaagttttggtttgtaaaaatcctttcaaaatgatgtcaggtcgtgagcatttcgagtctatgatcatgaatagtaacatcgattttgctataatgagcttaaatccaaaatcgaaccgtcgaaaatttaaaaaaaaatggtgtttaaatttcgcttctttcgagttctaattagaaattagccaacccctgatattacactttagcgatttattgccaattgtaaataaaaaggccctcgtcatttttaaatgtgtccaatactcaattatgttgtccttgctcttgtcctcttaaaaaaaccgagtctgaagacggactatgttttcggaataaaagattttcttcgtattcctatttcttcgcccacgaagacat

SEQ ID NO: 46185 - DNA, 297 bp, Heterodera glycines
atgctctcaaaaaaacttttccagtctatcttgaacaaatctccaaaggttggttgtctgttaatatttattcagctattttcctttcttcagactgctttctcaacttcggctcgtttgtctgcgtcaagtgctgaagtttccaggattttggaggagaaaattcttggacaggcgtcacaaatcaatttggaggaaactggaagagttctttcaattggagatggaatcgcacgtgtttatgggcttaagaacattcaggcagaagaaatggttgagtttgactctggaatgaag

SEQ ID NO: 46186 - DNA, 396 bp, Heterodera glycines
atggaacaagaacaacaacaaaatgttcatcacagtgggcgcgaagtgcgtcagatgttcatcgactttttcgtcaaggaaaaggcccacaaatattaccattcctcttccgtggtatgcaacggtcgtttccgctctccttttgaccattttcagattccccacgaggatccgactctgttgttcaccaatgccgggatgaatcaatttaagcccattttccaagagactgtcgacccgaacagtgacatggccaagctgaagcgtgcggtcaacacacagaaatgcataagggcgggtgggaagcacaacgacttggacgacgtggggaaggacgtgtaccaccacacctttttcgaaatgctcggcaattggtccttcggcgataatttcaag

SEQ ID NO: 46187 - DNA, 1861 bp, Heterodera glycines
atgacggattcattggtggagctcagcccgggagcgctcgtctccggccgttggactgtcatcaagaagcttggagctggcgcgttcggtgccgtctacttgtgccaagaccaagatgggattacaaagggagcactgaaaaccgagccaatcaacgcgccattcccacttctcgcgctggaggtagagtttgagtttgaggggggaacacagaaaatttggtgtaatttttgtttccctttatttcaggccatcgtgttgcgcagctttgacacacttcgagcgagcagtggaaagcatttttgccgttgcatggaccttggacgcgaccaacagctggatgctgcttctggacgtacgctggagttcaacttcattgtgtgagctttgacagggccggatgtgtggagtacataaatctttgtccccccattttcagcatgtccctggttggccgtccattcgacaagcttttgcaagaatccggcgactgcttcagccccggcactgccatcggcgccgcactccaactgctcaaagcactccaggccctgcacgaagttggctatcttcaccgtgacatcaaaccagcaaattttgccatcggactgccggagacgaacgagcagcggcttctctacctcctcgacttcggcatgtcgcgcaaatacctcaaagacgacgtgaggagtttcactgctgctttttgtttttgaatttttcaaaatctgtatcccccgcattttcagggcactatacgacgccagcgggcctcagcaaactttcgtggaacaccaatctacgcgccgatctccgcgcacatcaaacgcgactacagccgtggggatgacatcgaatcatggttctatgtgctcatcaaattctacaaaggcgccgtcccctggaagttcatcaaggacatcaacgaggtgagtttttgcagcgccaccaggatttaatgatgattaattaattttaatggtcccccatttttcagattggccagtacaaatgtcgccgcctgaaggacgagccggccaaagtgcgaaaagaggccctcgaggagctgaccggaggatgtccgcccgagttcaacaaaatcttagcgcacattgtgagttttctccgtctcattttttcctcttaatgctttgcatttttcaggatggtttggagccggaagaccgccccgactacgaaatgatcgagaagacactgcgcggctgcctcaagaagttggacgtccgggagcatccatacgactgggaggtcggacgacagaacgtgccactccaacaacggcaggcgagcagcgaccaggagaagaagaagaagggcggttcgtcgcacaagaagagcggttcgtcggataagaagagcgcttcatcgcacaagaagaagaagagcaactcagcggaggacaagaagaagagccaagcgccgcagaagaagaggaagagcaactcggaggaagaaaagaagaagaagagccaagcgccgcagaagaagaggaagagcaactcggaagagaggaagaagccgtccaagaagaagtgagcgcagcgggaacggcacggcaccattctgatcaccaattgctcaccattgtgcttatatatatatatatattttttttttttgtgagcggcggagcccatttgatccccaattgctcatcattgtacatattttgtgagtggccccatttgatccccaattgctcatcattgtacatattttgtgagtggccccatttgatcaccaattgctcatcattgtacatacatattccagtgatcaaaattgcctgtatgtacacataattatttgctcaccaatgttgtaatcatttccatgtgca

SEQ ID NO: 46188 - DNA, 782 bp, Heterodera glycines
  unsure (1)..(782): unsure at all n locations
tattctgtcagccaacagtgcaaatttgtgtttggtgctgctgccgaaattggtccttacatgccaacttgtcgccgtttgtggtgctccgtgtccttcggataccaaatgggatgccgaacacaagtaaattatataaataattgattcattttaattggcatatatttggtaaaccaaaattttttcgtgtccttttaagcatatgccatgggccgacggcacgccctgcggcgataacatgtggtgccatcggggacaatgtgttggcatgtcgccaatgcagcggcaacccgttgatggcggatggggcgaatggaagccgtggcgtgagtgttcgcgcacatgcggcggaggtgcttaattagggcatagagtcaatcaataaatgatcagcgattcttatcaggagtccaaaaatcgtttcgagaatgcgactcgcctccgcccgagaatagcggcaaatactgtattgggcagagggaacggtatcgaccatgcaacatccaggtcagtattaatgagtaggtttttgatcatacatcaattgattgattagattcacatatgcacagttagtgatccattatttgaattttaaaaaatgcagtgatcaattgcttaattgcaaaatttttaattataatggccaccttttcattctgatcagtgattactcgcatttgcgtgatcataatttcagtgatcatcatattttgatccttatcactttgttttaagaacggtccctgggaaacgcccgngttttcgtgagcttcaat

SEQ ID NO: 46189 - DNA, 3456 bp, Heterodera glycines
atgtccgactctgaactgatggatacgctggaaggtggtctaaatcctgatgatgaattaaacgacacagttggtgatcccgactccatggaagaagatgaggagcaggaagagcgagagcaggatggggcggatgaagatccgatgctggagagcacttcaggacaaggtcgaaaatttagttaaatgcgaaaatagttttaacactttttaaattaaagcggacgatttgtctaagaagtcaagaaagttcgctggagggaaaaagaaaggtcgcaaagggaagcgaagcgcccgatcgggcgggtcgcgcgagcaacttcccgacgcgtacacgcattccagcacggaattgtgcacaatgttgagtatgacaaatgcggaatttgaatactctgaagacgacttcaaaaacatcacttccggaaagacggtcaatagtcgatttcaccagacacttcaggagttgaaccccaaggcaagctgggcacgtttgcaatgtgtgatgactgccaagtacaatgagtaccaggtgtacagcaacaaacttgaaagagatttcaattaattgttgcagaaaatgttggccgatcaaggaagacaaatgccgaaaaaggtgccatcgcgttcatccgccgttggcaacgccggcggcgcaactcccaaagaatcaatggcaagctcttcaccatcctttgtcaagcatcttccatctgggagttctgcaacaatagctgagaaagtggcgcctttgaaaattcggttgtccgcccgcaaaaaacgtcgtaacgatgactcggaagaagacagtgagaaaattaccgagaaaattttcaagattttacttttagtgaattctgatcaagagttcgagtctttgttgaaggagcacgaaagacaattggacgaacaagacaaagagaaggaggaaaagaagcaggcgagagtggcggccaagaaagccagagatacgacgaaacagcagcagaaagtgaagagacgcaaggaggaaggcggcgaggaagcggagggcgaattacaggtaattggcatggattagtagaggtgggactgcaaacatcgtacaaatgcaatttgatattaattttgcgtattcgtaaattactttttccaaataaggaaaatcaaaaatcccatacaatatgtcatttttcttcagcaagagcatcaagattactgcgaagtgtgccaacaaggcggtgaaattattctctgcgacacttgccctcgtgcttaccatttggtgtgctttgatcccgatttggaagagccgccggagggcttttggtcgtgtccccattgtgaacagaacggagtgccaaagaccgccgacggaggcgacgcaaacgctgcgccggggaacatggagaagtgcagagtgtgcaatgtgaggaaaatgaaaggccattgtatccatagattaaaatcttccctctcttaggagcatgatttcttgttgatatgttcacgttgtccaagttcataccacgcattttgtctatcaccaccactaacggaattgccaaatgaacacgaggattggacctgtcctcgttgtcaagtattgcctggggatggggaaattataatattgagtaggcatgggtcagaacttgaatggaaggggaggctagtcggaaagcacacaaaatttgagatcaaattttagaccaaagagccgaaaaatcggccggaaaaaattctgtcgtggcggtggatcgagtacaaatacccggaacaagtctctgaagaggacgcactcaaagaaggcgaacagcctgcaaacattgaggacgaagcgcgacgagttcgactgtttttgcaccctcaaaaagaaatgaagccacgcagagaacgcgaattttttatcaagtggaaatatatgagctattggcactgtgaatgggtgccagagcttgtgctcgagttgtactttacgcaaacactccgaatgtattggcgcaaaatggtgcaagaatattcgaacctaaaaaattaatttgttgtttttaggacccagaagttcccccggaagtcgatgatgggtccaacgaggacatgaagacgggcaaaattgacgacagagaaaaagtgatacgccatggacttattggaattgagacacaaccatttaaatttaggaggatgacccgcacaatttagaacagaaattctacagatacggcataaaacccgaatggatgcaggtgaaaggaatcatttgaatgtgaacaaattgaaaggaattttaaggtccaccgagttatcagccacgtttattatgagaagaatttatttgactatttggtgaaatggcgcgagttggtttatgaccaggccacttgggaacgcgatgactttgacattcccggcttggaggaagccattttcaaatattggatgcacaggtgccaattgcagtttatgcaacaaaaaacgatgtttagggagagaatgagcggcgaagcgatgccaaaatacattttgaagaaactgaacaaaaaacgggccgagcagggatttgtcacattcgaagaagatgagaaaaaaaggaaaaagcgtgagggcaaagcaaccattgacgtaatgatttggaagccgggaaacagccatcgcattaccaattcagataaaaaagaagtacgatgttcaacccgactttgtcagtgagacgggcggaacattgcacccctaccaattggagggcatcaattggctacggcactgttgggccaacggaatcgacgcgattttggcggacgaaatgggactgggcaaaacaattcaggtgccgaagggtagcggaaagacagcaattaaaatgccatatttagtcacttgagttcatttattcattggtcaaagaggggcattcgaaaggcccttttctaattgcggcgcctctttcgacgctgatcaattgggagagagaggctgagttttgggcacccgacctttacgttgtcacttatattggggacaaggaaagtcgatcggtcgtacggtgagtattcccttttcttaaaatgattgttttcatgtttcactttcagtgagcacgaattttctttcatcgaaggcgccactcgcggagggccaaaggcaagtcggttgcgcaccgaccagggcatcaaattccacgtgatgcttacttcgtatgaggtgccaatgtttgcttacggtgtttttctgttttgcaacaacagttaatcctttcagttggttagcattgacaaggccattctttccagcattgactgggctgtcctggtggtcgacgaagcgcatcgtctcaaaaacaatcagtcgctgttcttccgcacgttgcgcgagttcaacatcggctaccgtctgttattgacggggactccactccaaaacaacttggaggagctgttccatttgctcaattttttgagccccgaccgcttttag

SEQ ID NO: 46190 - DNA, 900 bp, Heterodera glycines
atgcgtttcatggaggtgccgcagcggttgcagacactgctccaacagcccgacccattgatcattcaccatgtcatccgctgggacggaagcggctcatcagtgggggccgcagcggcagcggacggttcgccgactgagaacaaaaacacggcatgttacgatgtgaggaggacggggctttagggttggtggtatgtcaaaatttggcacttttgtgcctttgcaggtcgatgttgagttggacgacccaatcaaacagcagcagtcggcctttttgcagtccaatgccaatgtgcaagaattgatggcactcgaccataaggttggattgagagacattaccaaaatgggggacaacgaccccaaaaaatttaaatgggaaatggcacggtttatttttgtttcccgacagtcgaaatcggcattgatgcatattcaaaataaccaaaaagtcccccaaaattgaaattttgttttcaattaagatttacaacactgttgaagagattaacgaactgaaagtgcgacgcgacttttttgccagttttgtggagaatccgcaagcatttgtggagaaatggctcatttcgcagagcagagaccttaaggtgagaatttcatggatttggatttaattattccccgcacccaaaactgaaaaattggatttcattaaaaatcgcctctgatttcccccctcccggccaatcttaaaaaatataaacacacaaaaaagtcctttttgcaatttattcctaaatttcccattttgcattgttaacaaattgcgccattttacagaatttgtccgaaatttccgccgattatgagatggagcgtcgtgccgacaattattatcagcccgttgttcaggagggcgtcttccgttacatgtaa

SEQ ID NO: 46191 - DNA, 830 bp, Heterodera glycines
gttgccaaagcattggagcacattgagcaaatgaacacagtcccggagcggctgattcgggtccgattcaatgcggtccgatcatttttttatttaaaaatgattttcccttttttcctattttactccaggacgtcaactcatccatgcagtggaaattcaagccggtgcagaacgaaatttatgtgaaccccggcgagacggctttggcatttttcacgggtaaaaaaatcagagacgaaaaacagcaaaaaaaaaaaaaaaaaattattgcccccttaatatttgtggcaatttgtttttataataattggcataacttttgaattcgcacatttttttggctgtttggctttgaaaaagcccaccccaccacagattggtgccatttctaaagcctaatgagtcatctattttttgtttgattacgtgcatttttttgcggaaatttattttttaaaactttttaccgaattttagaccaaggttgtgttttggtaaaaaagcccgtaaaacgcatggaaaatttaaaacaaaagatttactgaagtactttttatctccaaactagactatgtaaattggaggtgtattatttccaaatctgcccttcagatttgtcatgtgatttcgaaaattaatgattttgtcaaatcttttttgttgaagatccgggtgttgattttgggtcgggcccaattagcgttaattacccactcctaattataattgttgcgttttttgcagcggagaatccgtcggacaggccaattgttggcatcagcacgtacaatctgacgccgttccaggccgcctattacttcaacaaa

SEQ ID NO: 46192 - DNA, 504 bp, Heterodera glycines
cgggttggaggggcacgaaaaatgaagtgaaatgtgtggcgttctccgccagcggcgaacacttggccacctgctcccgggacaagtccgtctgggtgtggcaagtcagtttttcgttcaataagggaaaatcagatggggaaattaaacattgttgcttttttggatatagagaccggacgagtcggaatccattcgggcttttttcaaaatcctgatcccatattctctgaaaattttctggtttgttggttttgaaaccgtccaaaaatttttgatttgctaaatgcatgtcccatttttggttatttccgaaattcgcacagatggacgacgctggcgacttccaagtgatctccatcctgcaacatcacactgccgatgtgaaattcgtgctttggcatccccgcgaggaactgcttgtctcgggcggctacgacggctccgtccgcttttacgcttccgacggcgaagattggtgcactggccattcggtgaatggtg

SEQ ID NO: 46193 - DNA, 1235 bp, Heterodera glycines
  unsure (1)..(1235): unsure at all n locations
caggaagaggaggaggacgaggacgacgaggagtacggcgatgacgacgaagaggaagaaccgggttagcaaattatctgggcggaatcagggattttagaggaatntaaaaaagggaacgagaaatgacaatgggaaaatagaattggaaaaaacaaaaattgatcatctactctttttagatgacaaaaccgcaaagaaggagacgacggcggacgcaaaggccgagcaggacccgtactttaaggacgacccgcaaggcaatgagcacgaacgtttccgtgatgcggaggaacgtctagagaaacgccatcggaagaaagtgaccaaagtgatcacggaatggagtgaactgtttgaacggtacagcacaatgaaggagaaggaccccaagggggcggagcagtacaaacggaatatgtgagagggaaaatgggagggaagggacggcactttttggagtgacgcattcccatcgaaggaccgcaaaattccgaaagactgtggcggcactcgaagcggagaacaaagagcagcgcaagcaaattgaggaattgcacgacgaaagagtgcagacggcgctgaacgagaagaagcgacaggtgagcagaaagagaaagcgaaacgatgggaagagaacggaatggaaaatggcaaggaaaaccacgaaaaacgggcatttggttggcagggtataaacacgaaaatcaagaattctcaacaaaaaaccttttctttcaaaaaaccatgtacggactggactgtccatggtctttgaagacaaaaatatatatatagttttgctgtaatgttgtcggggaatcatcagagccgtatcttccaaatgggtgggggaaggggacgggctgtgacttttaatgcattatttattaccaaaattgttgactaattgcaacaattaccaaggcaacccacgagtaccgtgccgcgttggctgtccaagtgggtcaaacgaatcgacagaacgtgttacggacgctgaaaaattacatacgggcggaggagaaggaccggcaacacatgctcaaccggtacagacatttgttgcgctcggatccggaggtttgtttagcgaccaaaagtccatctttctgaaccccccccccccccttaggcggccctctcttttgagcccattttgctccatcgtttgcgttacatcgacttgcgcatcaatggcactttggccatgctgcgcgacttttcgtcacttg

SEQ ID NO: 46194 - DNA, 1317 bp, Heterodera glycines
atggcattccacaaaattgacaatgacagtgtgaactccatcaccaatgccttggactttttccgcatcccaccaactaacgtcagtgtctcatcctccaaagtgtttgagctgctcccaagtaaccccctgaccgacaccccctatcacttcaagcttcactccagtcaaaattatattgatctctccaaatgctatttgttatccgagtttcgaattcgtaaggaaaatgcaaatggtcaactggttgaccttgcagctgatgaggttgctccgattcaactgattggacacacattcattcgaaacatcaaaatgagcatcaatggccgtgaagtgttcaacgcaaattctctgatggcctacaaatcgtatttttcacacgaactctcctattcaacagcggccaaggactcgcatttgaatgctgcaggttactatcgtgacactggtggtgtgcttgaggtgggagacggatgcactgcacgacgcaacctgtttgtaggcagcagaacagcacaattcattgccaaaattgacgccgatttgtttaaccagcctctctacttgatcaacttttgtgagctggacattgaaattttgcccaacgacaacgactttgtcctaatcacaccacccggtgttgctgcagccactcgctaccatttcgaagttgtcggtttgaaaatgtatgtgaagaaggtgtccctgatggacggattggcgttggacattgcgcgaaagcttgagttgaagccggcacgatatgcagtgaggaaaacgctgatgaagtcgctgttcatcagtcatgggcgttttgaatttacgtctaatttgttcatggatcaaattccccggcgtatcacaatgggattggtggccaatgctgactatgttggcaccgtttcacgcagccccttcaactttcaaccatttaatgtgcgtgaaatttccataattgccaatgggcgctcctatcctcaagcagcctacgacttggactacccaaacggaaagtatgtgcgccccttcaacgacatgaacgaagcggtgggattcgccaactcatcggaaagcaacgggattactctcgcacaattcggcactacgcattgcatttacatgttcaacttgacgagcagtggagacgaccaagcggcgctttttgatctgataaggaacgggaccacagcagtgagcatcaaatttaatcaggcggtgcccgctggaggaataatgttggtggtgatgggcgagtgcgactcgctggtgatgttggataaaaatcgatcgatcagcactgacatcactatttaa

SEQ ID NO: 46195 - DNA, 1476 bp, Heterodera glycines
  unsure (1)..(1476): unsure at all n locations
tttttatcaatattttaattatcgagttccatctcgaccacaaatttaatctttaattagaatctttatccgaatcgtgaaaatcttattcaaacaatttttagtattttgaagccactgaatacacaatagagcttgaaaccattgaagatttattgggtaatttaaataaatccaaacctaagacccaaaaaaagatttattgtttaatcagcgcaaaactaacaccatatttcatttttggaaacattttcatataaatttatccaaattacatcaaaagtttgagttaacaacggattgaaaataattcaatttgattcaaaaatgaatttaaattttaaaattgctaccgttgccatcatcttgacttttacatacaggaatgtgctttctgaggataaatgtcaaagcatttttggcttacaaatggttaaaggtaaatttcagaaaaaagttaaatgaatagcaaaatatcacgatgttttttggttataattcaaatctcttaagatagggctgtgaaatttgaggattttctacatttttttttgggttttttgttgatatgattgattaggatttcggatttaaggagattcctggatttttgtaaaattaaaacattagttttatggtgggggcggataagaaagtaaaaaggagaatgtcttttaccaaaatctgtaaacaaaaacggctaaaattgtttttttgttaatttacacaaaaccgcaaaatctgattattatcaataaaatttcgaaaatttcccggcggcgctttggcatcgcggacccctcctcattctcaaataattttttcaatacaatatttatatttaattttgttgttagaaattaaaattttttcaagaatttattcttatttttttagaatgttcatatgacgaaaattcaccaccacaagcgagtgattgtccaaatatcaatcccaatagtaaccccagcgcagactcagaggaaatgcgatcttgcattcgggcattatgttgccatcagtgccatgaagccggcgcaacgatgtatccgtatttaagacaaccatccaatccgttttcgtcaaaatacactaattacatttgctgctgcaaagaaagcatgacaacaagcacatcttcaacatcgacttcatcaacttccacaacaactttaagtacctcaactgcaacaacaccaacgtcaacaacctctagtagttcaacatcgtctactccgagcagttcaactagttcaacatcatcaacttcgtcgactctaagcagttcaacaagttcagcatcatcaacctcgtcaactccgagctgttcgagcacttcaacggattcgactccatcttcctcaaccacgtcgactccgagcagttcaagcatttctacaagttcgacagcgtcaacttcaacctcatcaactccgagtagttcaaccacttcaacgagntcgaccccatctacct

SEQ ID NO: 46196 - DNA, 1313 bp, Heterodera glycines
atggccacactatcaaacacagacagtgaagaaatcccacagaagcggccacgggaaaatgacaaaaaggatttaacgacgtcagcagaaaaaaataacagcgcgaatggtggaagttcagaggtaacaaagaatttttgcctgtttacattgaaagtgtgcttttgatttgtttacttagcattcctaaaataaattcagagtgccaaaaccacggctgtttcgcacagggctccctttgacgcgacccatcgcataaatcgccttggtggaaaataccatgttttattagcggtgacgggctccgtggcctcaataaaagtgaatgaactgatcgccgaattgtacaagcaatcacccgagaaccgtttagcaattaaagtcgacactttcttttattccgtctaattttccacagttcaggtggttgcaacccaaagtgctctgaacttctttgacgcggctgacacacaagaaattgtttacgatgacagagatgaatggaatatgtggaagaagcgcggagacccagtgctccatattggtaaagtcaattttatgatcgaatctcaacaaatacaactttataaagaactccgaaaatgggctgattcgatgctggtcgcacctttggatgcgaattctctcgctaagatagcaaacggaatttgtgacaatttggtgacgagtgtcgtacgagcgtgggatcagcgaaaaccgctttattttgctcctgcgatgaacacagcgatgtgagacttgagaaactttgtacgggttagggattcggaaatagttaatccgattcgtgatcctacctcgaaaacctttatgaaacacgctttcacgacttattaatataaaaaattacaaacaaaagggcctctcccctttggtttttaataatttcagagagttcaatttttaaataagtgccaatgtttattaacaaattacaggtgggagaacccattgacatatcaacacttgaaaacgctgaaggaactgctcctgtacagggtatttttgaattttataagaggttactaaaaacagttttttccttaacttaaaaaaaatatttttagtttattttttctttgagatttaaatttgtctaataattttgtggtttcattgaacttttattttttttaattaaggagatcccaccaattgagaaggaaatgatgtgtggggacaagggatacggcgcaatggcctccgttcaaatgatagcatcgataatttcctctgacatcaaaaacaaatacgctgtctattcatactcctccgaaaatgcgtcttcttaa

SEQ ID NO: 46197 - DNA, 2044 bp, Heterodera glycines
  unsure (1)..(2044): unsure at all n locations
atgcgcgagatgaaagcaaatggacaaaatgggaangaggaggcgtttgactggcgtatttataaccaatggaacagaattagccatgttgttaattgcaatgcgcaattgggagatgggtcagcgaatgcttattcaaacattcaagtttntatgcttttcttttttaggcttctcaaagcaactcccggccncaagtgatcagcagaagtgaatgaattgatgagaagtgatcaatcagattttgaattattggcgtgctcataaaaatgttattttttattggaatgatcactttggatttttgtgggccattagtataatttgtggttctccaaaatataaaaatcttaaaaatcatatcatttttcaatgttttcccgaccgacggtgactatcggcactgttggcccatatcccaaaaagtgtccgaaaaggatcgtcgatttttttttaatctaatttttgtcgtcaaagtcttagttttgcgggttggaatcactttggcgtaatttaagcataacttcataatcctagaaacaaagctggagaaattttccggtttaaccgggggcatttagtaaaaagagagttttttcttcattctgtacattgtttatatttcgaaaaaatttattttatgtgtaaaatattttttggcgttttgaaatattttattttctcacttatgtacatttgcaagagaatggttaaatgatttcaaaataaaaacatcttttttcgagataccaatttggattttcagcagggttcaaatgcattttttctctaaaaaagggatttttgatccaatttatttaatcgattaattaaacccagatttcgaatgtgtaatgtggacattttcgtcattattaacattactttttcatttttaagatttttctaaatactaatgccgaagaataaagggaaaggaggcaaaaatcgtcgccgagggaagaatgaaaatgatataatgaaacgggaactcgtcgaaaaggacggcgacgaccaaggcatgaacttttccaagacaattttattccatttttgttttactcagaattaaccattaaaggcccgagatttcccatgcttccataatctttaaattattgtacaatcctcaaaaaaaagctggagttatttatgttttaggatttgcaaaaattttatacaattagctttagtgaggttccaaattcgaacaaatgtcacaaattgaaaaaaacaattgttttttcagcatatgcccaggtggtgaaaatgttgggcaacggtcggttgacagcattttgttttgacggcaaaaatcgcctgtgccacatacggggcaagttgcgcaaaaaagtgtggatcaacaccggcgacatcattctgatcggcttgcgagggtaccaagatgacaaggcacgtggggcagtagaaatcggactcttgaaaaaaagcgggactagaaaatggtagggtcggcaatcccggaccgggatttccattttcctggactcaaggttcagttgctttctctgaaaaaaaacctggaccgaaatcccggcaaaacggctggggtcggtcccgtccgatgtatagtttttattgtattacatttgctataaaaaggcatcatggattttttgaaattgcgaatcactcgccccttttcattgccccgaaaaaatttttttgggtaaaggaaacaactaaagaaaagtctggcaaattccaatcgttgtttgttgtcccggtgttacaagtttttctaaaaatggacacaaaaatcgcatttttcgtgaataacttcccctgtgtttttcagctcgccaggctttcgtagataacgccttcgtttcttaaatttactgatttagactgaaaatttttccaggcggatgtgattttaaaatacacgccggacgaggcacgcattctgaagaattcgggtcagttgccggagagcacaaaactgaacgaggtcggcgaggagcaaaatgagggcgaagtggaattcagtgagttcaacagcaaacaacagtttacatga

SEQ ID NO: 46198 - DNA, 545 bp, Heterodera glycines
tgtttatccacacacacagtgtgctgggcgtatgcaccagcaaacatgacgaggaattgtgcaaagcgggcggtgatgcgtgcgaatttgtgatcgacggttattacatttcggtggcaatttgcgtggtcgtcggtctgctgtggtatcggtcagttctgttatattatttctcgatacgatacgaccaatagaaaaacagtatcagaatgttccgaactggtctaacaacattgagaaattgttttgctaaggatgaagaagaaattttctaacaaattttattggaactttacaaaaaaaaatttccgacgcgcggttcctcccccccccccctccgaaaattgtgcggacttgtgtctgaaattaggtacgattcagtcttttctccacaattcaatgtggcgttgttttgttttatcgtattgttaggcccactaaatttgattgatagtttttacgatttttattttagaattttctaccggcgcatcaaatacttccagaagattccccgtcaagattggcgcgtgatcaaaacaaaa

SEQ ID NO: 46199 - DNA, 461 bp, Heterodera glycines
atgtctggacgcggaaagggtggcaaagcaaagtcaggaggcaaggccaagtcgcgttcttcacgtgccggactgcaattccctgttggtcgtcttcatcgccttttgcgcaaaggtcccatccaacaaatttcttgtccttagttcaattaggtcactacgccgagcgtgttggagctggtgcccctgtgtatttggcagcggtgttggaatatctcgctgctgaagttttggaattggctggcaatgcttcgcgtgacaacaaaaagacgcggattaatcctcgtcatctccaactcgctgttcgcaatgacgaagagcttaacaaagttttctgccactattttatatttctaccatttcacctttagcttctttctggtgtgaccatcgcccagggtggcgtgctgcccaacattcaagcagttcttctgcccaagaaaacccatggagaaagtcag

SEQ ID NO: 46200 - DNA, 674 bp, Heterodera glycines
tttccagcctcgtgttcggccctctgatcaagctcttcggtaggatgccccttttgatgttcggtgccgtgataaatctgttgatgatcatcactttgatggttcgccttccttacttcttttgtcccatcattttgatcaatagatttgggttgttaatcccggcgatcggactttgtttaacgctgtcgccggtgtttgggggatggcagacggagtttggaatacgcaattgaatggtaagcaaagggaggggcggcggggggagggggaggagatggcctatgtccaacaacagtattcccggaatccgctcccacccccaccttttgcgtccactccccccccccccttccggggttggctctgactttatgttcaaggcttttgggtcgcactgcttggtcccggccgtgaccaattggaggtggcatttgccaattatcgtttttggatgtcttttggcctcgcgctcggcttttttctcatccgcgccacttccatcgacactttccttctcatctctttcgccttccttctgatgggcattctcggctattttttggtcgaattattcgaaatcattgcggtaaaatcgaaaattcgaattgggcttaaaagaaacatttcttcagatgaaattggaattagaaagaagaacaacggaagtgata

SEQ ID NO: 46201 - DNA, 917 bp, Heterodera glycines
  unsure (1)..(917): unsure at all n locations
atgaagcttggaaaaatggtcaaaaataaatgggttagaatttcaactgggaaatgttttgttctntatttagggaaaaataatatgaaaaaagattatntaattaactcaaaaaagatttcagaatcggataatgttcgtgacctaggcattttaattgactcgaaactgaatttttcagaaaatattaacaaaattgtacgaaacgcttatcttagagttttccagattttaaaagtcttaaaaaccagggaaataaagactctaacaacagcttataaaacttttgtccgacctcaattagaatacgctaccgaagtgtggaacccaaatttaaaaaaagacattgacaaaattgaacgggttcaaaaatttttcacaagaaaagcatttagaaaatgtggttttttgtacagaaaatataaggaaagactaaaaatcactgatttacacaaattggaagaaagaagaaaaatcaatgatttaacaacagcttttaaaattataaaagggttcaccagcctcgatgctgaaaaaagtttctttttctcggaaaggcccaggaggcctttacttttgcgagtaaagcgccacacggccaaaactcaaaataattttttcaatagaatagtaaaaagctggaataaccttccagtggtagcggtgcaaattaataaggcaaaggaattcaggggtttactaaaagcaatgagttctgagtaggattttccatgttgccatatttacactatatttttatcacctgtgaatttttaacatttgattgatttatttttattcattttttttattacgatattcattttgtattttttatttgaccaactttatttgttgttttctttttggcaccatataagagcactcatgtgcctttggtttgctcgataaataaa

SEQ ID NO: 46202 - DNA, 193 bp, Heterodera glycines
gccgtttcgccctctttcaactttttgcgtcgtccgttgcctttgttggtctttcgtcgttccctttttaaaccgccattggactcaccgttctgtggcatttaccggacaaatggcgaaatttgccggacggatgacattttggtgtgccaacacaagatgaactatcaccctggagcaaatgtacccagga

SEQ ID NO: 46203 - DNA, 681 bp, Heterodera glycines
agagttgatcggcctgtacatccgttcttctcacaacatcatccaacaacacaaatggcaatcctatcgtgacaaaatcatttatcgtggacctatggatatagcagtcgctctgagcaaattacctccgactgagcacatcaaacaatcatttctactcgacttcaatttcacttctgtgggttattaattaaattgttgtttgtccattcactcaaatgttctgcttaggaattgattgcttttcaggacaatttgatcgtcttatcgctgcaaggaatttttcgcgatgggaaagaagtgtcggatgggtctaccaactttttgaacatgaaatttttcacccgacagtttgccattgtcccaaaaacggaggggtaatttatgttggtcaacaaaaaaaaacctttttttttgccatttaggatcgcgataatttcggatattctccaaattacaccgattagcaatgctcggatggaacggtacaacaatttgctcaagaatgcgactgtggcgcaggtcataaaacatttcttattttgttaatgagaggattttcaggtgcagcaatcggctctcgtccctggcggtgtcttggcttcggctgtccaacaacaaattgatgggatggccccaccgcctccgagtccacagacacaacctgtgttgatgatataa

SEQ ID NO: 46204 - DNA, 763 bp, Heterodera glycines
gtgttaaatgcgtccggtacaccaatcaatggagcgttcactttttggtcagccccttccactgctgctccggcagcgacagcatctgtctccaatttatcggccacaacaacagttatctcatctgaaccggatctcactccactcacaccgtccacttcggacgtgacagttaatggtatggtaaattaaaagattaattcctgtttttggcatggctattaaggttttatcaagtccctttgtcgggtatttttttgttgaaaaatacgccgtggattactctatgagtcctgagaacggctttttaatccggtcgagtatagttgccaaattttggtcctttcaaatcctgctgctctatttatgatgaattgcgcaggaatgccaggaccgggcaccgcccacacaaatttcaaaaattaaaatacttttcaccggcttttgtggcacggcattgttttctttttgtatggttgtttatccccatacattttcaaggccacagcagcaatgtgaaggtgcttaagccggtgccgttggtgatccgaacccaaagtgcggacgaaattgcgggtgccgttgcgcacccgaccaaaccgtcggagatccggaaactgatccggtcaaagatggtccgatgtcgcatttgcaggaaccgttttctggacaagcacatttatgagcgacatttgcgcgacaggcatcccaaggaacacgcggcttatctgagccaacaggaggacgaagttcgacagcaaag

SEQ ID NO: 46205 - DNA, 828 bp, Heterodera glycines
  unsure (1)..(828): unsure at all n locations
atggccatgggaccgaatggggcattggtctattgcatggaatatttggccgacaatttggactggctccactcgcacctcaacgagggcgaagacgactactttctgttcgattgtccgggtccgtttttagagtttaatccctttataattggctgtaaaataagggccaaatggcggttgtttttaggtcaaattgagctgtacagccatctgccggtgatgtgtcaaattgtgcaggcgctgcgcgagtggaacttcaacgtgtgcagcacctttgtcatggacaccaccttctgcttggactcgaccaaattcatgtcagccactctcaccgcactgtcaacgaccgtttcgctgcaaacgccggcagtgaacgtgctcagcaaaatggacttactgaggccggaggaccgacggacagtcgaagaaattgtggacggagagctccaaaatgcaatggaaaaggtgtaaaatgaatgcaatgcaaagacacacaaataaattatatataattanagcaagggaaaagccaatgggaggaaaagcatcgncaattaacggacgcactctcgacagtaatcaacgactacagtatggtcagattcattccgttggagcttcaggatgagcaatcaattgaaggtggacgaatgaacgaagaataatggggaaaaccccttcgtccgttaattttagaaattctcttggccgttgacagtgcaattcaatatggagaagatgcggaagttaaggtcaaatatccggaggaaagggatcaagattttgaatgacaaatcgatggcagttgttgttgtgtttggacaa

SEQ ID NO: 46206 - DNA, 734 bp, Heterodera glycines
atggcaacgcggaagttgagttttcctgagaaaattgccaatattcttggagttatttatcgctatcatgaaccgcgacttccacgttacaaagtttgaatgatttgaattatttatgttactaatccgactccgttttacttaaggacattctgaagaaagtgtgtgtccgagaattggctcctccaactccaaaggattggcctcaggtttatacattcttcaatatttatattttttcatatataaagatcaaagcggattatgccaaattggacacagtgatgagaacgcaggcctacagacagtttaagttgaaggtaacttttttcaggaaattcacttgcatttgtcaattgcccgtaaattaaggaatttctcgtttattcggctgttttcgtggaagtgctctgttggtttttcgtcggagagatcattggacggggcagtctcaccggatacatcgtccgcagttctttcgttgacccggtaaaattttcgattaggcatttgtaaaaaacgaaacaaagaaattggtacaaaaccttacaaaaaaaaatagggaggttgatcccccccattcgtccgcaaaggcaaatatttgctaccaattgttgaattgaactttgacggtgtttttctttcagaaggccgcaaagaaaatggcgcactttaaatgggacgatcatcatgaactcaaagtggagaacgacgaagagcaaagcgggcactga

SEQ ID NO: 46207 - DNA, 1109 bp, Heterodera glycines
tttgactcgggttttcgttactttgtccatgagaagttttccatgccgtatctgtccacggaaggcataagcgtttctccgggcatcaaagtgttctccgccatcagtccaactcatgtaaatcaaattcttaatattttcccattctttctttttacaaatttacctcagctaattattcccaatttttcagtacattttattaccccatgaaatgtggggcaattgttcggatcagtggcccgaggatttgcaggaaatcgtgaatgatggggcggctgatgaaaggcaaagcgaataactaattatactgtataattagggagcccattaaggtactcgtcgttgaaatgcaaaacgttgtgccgtgccaaatacttcaacgaattgtgcggctgcagcccgttcagttacaacatcgacgaatgtaacaacaagcatttaattgttgaattatttctccattttttcagttttctccgtttgcactccctacgaaatttacaaatgtttgggctccaccgttctgaatgacaccaaactgtcgcagaatggtacaaatgccaaaacaacgtcttaactttagcacatttcaaattcaaaaaaaagagtgccaaaatatttcagagcaaatccttccgaattgcccgcaatgtaaaatcgaatgccaaagatgggtttaccacacgtacaattcgtacaccgaagcatttgtccgcaaaccaaaggacaaatggaggcgaaaagctgaacaatggcaatgaatgtttaaaatgaaaaacaattgacagtttgaaggtcgaccatcgcttcgctgaacattttctaccgcgacatggcttataccgagtataagcaagtgcaaagcctttcgatgactgaaattctcagtatttattcagcatttgattatttagattaattaattaacatggcttttagccttttttcaaatttgcctctccaatttcaggtgacattggtggcaatatgggtctgtttttgggcatgtcattgatctctctgatcgaattcgtcacttacatttgcaaaatcagttggcttttcgtctccaaaaggcgaagggatcatatggcaagaaatgaaat

SEQ ID NO: 46208 - DNA, 2235 bp, Heterodera glycines
atgactgcctcgagtcaagggcgaccgcttccggacggcaactttggcaaccatgcaggccctccccatccgcgcagacgaaaggcactgcccacttcggacgacgtgacggaacagccaacaactcatccgaccatgtcaccagcaccatttgttccaactcgacaaccagcgcagcctctgtcagtgaattgcatgcactccccattttgttgttgtgtttaagtctgatgaatcgcgtccctttctcctctttcagcactgatgatggcaccggcaacttcttcatgagcgcatatgccatgtcagcgcagaggatcgccagcgattcggagtggaagaaaacggtgggtttcgggggactgacttggccagaaaaaaaaaacttggcttaaattcattctttcattttttcagcccctcggacaaactggcctcttcaatatgggaaatacgtgcttcatgaacgccactcttcagccactgttccatacgcccggattttctcaactgttccaagaaaagagcgcgcagcgattcgtcaatgggtgcgtcaggaggggggagccgagcgccgtcttcgaattttcataaaattcattttttgtttcccttttcaggaacaactcgtttggcacgaatgggatgatctccggctcattctctgcgctcatcgacctgatctggtctggcaagttcaacgcacttcggcccaccaccttcctggtgagtgactgtgcctttgatcaatccattctaatcaaatttttgcctttttcccccaggaattcttcgctcgccgtgtcaacaccgaaatggccgaccgacagcagcacgacgcccaagaatttcaactctatctgctggacgcgcttcacgaggacaccaaccgggtgagttttgcgattttatgttccatttttcaccctcccccctccccattttcaggtcaacaagcgacaatcgtttgaacagaactacgacgacaccgatttgggcgccagcgcttcggatttcaatgagaggtcgaaactgttctcttcgtcgccggtcaacgatctgttcaacgtgagtttggagccatcattcattttgtttgtccgccgccaatttctaatcattttcccttttgttcagctgacaaacatctccatggtccaatgcagcacgtgcaatacgacgagtgttcgcttcgaggtcgtcaaccaactaaggtgagtttttcacagacccaaaagaaattccataatttgaatttccctttgaatttttcagcctcgaattgccgaccaacaccgacgacctgacgctcaaggactgcctggaggcgcacttttcatcagcagtgagcagcacctcagcctgaatttgtgtctgatcccatttcccctccctttttcagagtctcgaggataaatgggattgtccgaagtgcaaaagcaaacagccggcgacacggagcacaaaaatttgggagatcccgaaggtgctgatcgtccatttgaagagattttcgctgaatgatggacactacgtcaaaaataacgtaagtttccgtcggggttttttttgagcgtaattttcactgattttttaaacaattttcaggtcgaagtaacgtttgatgtggccgagttggacctggcgccctttctccacgagaagtctccgcatcacaacacagcactcagtctctacggcataacggtgagtgatcaaatttggttaaaattgtcactaatcacactaattatgtttcaccattcccccttcaggatcacagcggtcggctgaacagtggccattacacatcgtccgtgatcaatttgatcagcactgatcgggagtggctgagtttcgacgacgaagcatgcattccgtgcggcagcgctccttcgcccgttgtgagaatttcgttcccgaccattcaaatgaaaaaaataataatttcttttcccctttttagagcaagcacgcattccttctgtactacaagcggatgaactcgaaagccacgtgatacaagcggatgaactcgaaagccgagcgcgacaacaatgccaatgcgagtccttcggtgctgagcgacgaagagaataacggatgatattattgtgtgtctacaagcggatgaactcgaaatccaattgatattattgtgtgtgtatgctctgtataatatgtattgtatttgtattgcattgtatgttcatattagtcgtcttgtaaaataaa

SEQ ID NO: 46209 - DNA, 935 bp, Heterodera glycines
acccactcctccgtcctgcacatgcgacttgcactgactgtcacccatttgctgctcgtttcgcttggtcagtcagtcggcttttccctttgatccccccaatgtccaggaagtgttaatctccttgtcatctttgtcatcttaattcggccttacatgcggtccatcaccaatgtttacatggtatgaaaagaaaggcaacgaatgccaaatccctcacagatttcactttgtttggccgacttcatttacctgaccaatctgacgctggtcgccgtcactcagctcaacgacaagtcgtggcctttctcttcctttctctgcactttgtacgccaacattaacttcttttagttttccctcgtttaggtatcacgggactgaaacgacaggtaccaaccgactcggctaatgatggcacagaaattgctttaacttaacatatgccatcatttttagtactttacgccacttttgcagcttttccttaggcaaatacgccagcgtaatgttcgtcgttctgttggccgtcgaccgttactgcgccatgtgcaagtccaattggtgcgctcgctaccgcacgtaccgcggcgcggtgctcgtgtcgcttgccgcgtggctgttcgccgcgctggccgcttctccgttgtatttctttgccgaagtcgcgcttttgacgcttcgttcccccgtttcgcctgcgaatcgccgcgaattgcacaaattgtgcatcgcaaaatggcccaattctgatgtcgctcgatggtatgcccacttttctttcgttttacgagaatgggacggagtggcccctcgggagtactctcgacaagcctttgtttttcgttccctttaaggtacattaccatttcctctgtgctgatcttcgcccttccgttggctgtcatcttcttctgctactatcacattctgag

SEQ ID NO: 46210 - DNA, 749 bp, Heterodera glycines
atgagtcatgacaatgggaacaacgcttttcccgccgcctcgtccatttacccctcccttccgtcggccctttgcgatgaaaagccttcccccgccgccgttttgtcccattgcgatgatatggaaggcatcagtctcttggtaaaagctgcggattttgcagctcgtagacaccgtttccaaaagagaaaggacgagcggacgccttacataaatcacccaatcggagtcgcttttctgctgataaggtaaaacttttaccaggccaattcgaacaaagcgaagtctgccgcttttgcagcgttgccaaagtgtacgaccccgccacattggctgctgcttatctgcacgatttggtggaagacaccaaaacgacgtttgaggagttggaacaacttttcgggagagaagtggcggaaattgtcagagaatgcaccgacgacaaaaacttaccgaaagatgtgcagaggaaaaaacaagtggagaaagcggccggttcatcttacaaagtaaaaagaaagtccgaaaggagaaagaaacattgtgctgattaaggcgaagttggtgaaattggcggacaaattatacaatctgagagacttacaacggacgctgcccatcggatggagcaaatcgagggccagggaatacaccaaatgggcaaaggaagtggtgacccaactcaaaggcaccaacgaagcgttggaaatggcattggacgatgtgatcaaccaattactcgacaagaa

SEQ ID NO: 46211 - DNA, 630 bp, Heterodera glycines
atgggcatggctccgccttcgctactgcaacagcagcagcaacagacgccttttacacaacaaaagccgacacccatcgctcctttggcagtgcctccggcagcgaccgctccgcaacagcagcaggtggtggacaggccgactgaatgccttcctcccgccagaattggtctttacgtatcatttaggctgttagtccgcctccgcttagccaacaagcacagcaaagcaacagcgacaatttggacgaggagcagcaggcgcaaatgcttgtgagtgttcaaatgaaagatgtccttttatatagtagtgacaaattacccctcaaacaaaaaacgatcaaaaaactcagtaatttcggttatgtgtaaacggattttattaaaaaaagcaacaaaggccaaaggaattcacacaaataggggcacaacatttggcggttgcctcttttaaatttcgcgctgttttcacatataaccgaaaagtaccaaaaactcaatcgaatctcaaaaattcaagatccgcgtgctgcaactcaccgatgagcaaattcgtatgttaccacccactgaacgtgcccaagttatcgaattgcgtaaccaacttagaagtgcggatgcaaatgcgtga

SEQ ID NO: 46212 - DNA, 1362 bp, Heterodera glycines
attgatacgaactttcgagaagagctttccagaattcgagaaaaagtagaagacatttacacatatgaaggaaacaaagtaattcttacttcctaattttaaatttaaaagaaatttcaggttggtcgcggaacttatggtcagaaaagaaaattttcaagctaatatatttttaaggccatgtgtacaaagcaattttacggaactctccatctggcatggatggcaaggcatatgcactgaaactaattgaaggtgatacgaattttcatttctaaatctaaatcaggcattgatttctggtcgtattcttacaattagaatgacgaatttaatttcttaatttgtttcctaaattccctgactatttaggtcagggcttttcgatgtctgcttgtcgagaagtggctcttctaagggaattgaagttgcgctccattccaacgattggtttcactttaacttttgttaagccatcccaacctcatcaaattgctgcgcgtctttctcaccactgaaaaaagagtttggctactctttgattacgctgaacatgatctttggcacattatcaaatatcatcgatctgcaaaacagaggcgacaacccgtgatggttattctgatatttcccattttcagcacccccagggacttatcaaatcctaccgggggcggtgccaccctcaggcggcgacctttttgacgttgtttttcaggtgcctaaagggatggtcaaaagtttgctctatcaaattctcgacggcattcattatttgcacaacaattggataatgcaccgcgaccttaaagtcctttgaattgaccaattagcaattacctttataggtttagcccgctaatattcttgtgatgggtgaggggacgggcattgaacgcggaagggttaaaattgcggacatggggtgagtggctttgtcctttgattgattttttcgctcggttttaggtttgccagagtttttcacaatccgttaaaggtaatgactgttgggctattccattattcattataataaaaccaagaaaagttacgaggaaatttgcaaataaattaatcatttgcgcatcgaatcctgaattaatatttttatgtcatttatcttttaatttctcctcttatttggccgttcagcctctgtccgagctcgaccccgtcgtcgtcaccttttggtatcgcgcgcccgagctattgctttgttctaaacactatacaacagtttaactgggtaattttttgctggtttaatttcattttccccaggcaattgatatttgggctattggttgtatttttgctgagttgctaacatccgagccaatttttgtgtgcactgaggtg

SEQ ID NO: 46213 - DNA, 898 bp, Heterodera glycines
atggatccttatgacctaatagagcctgtagacatctcatcaaagttgaacatcaatttcgaaagtcaaaagtggcaggaaagaaaagaggcattggacgcactgcaacaattgttgttgcaatcgccgcgacttgctgattcgccaaattatcgggaggtcatcgaacatctgacgaaggtcaaccatcaaaaaatgaatggattctaataatctaattatatttatttaaatatttaaggctatggcaaatgatgcaaatatcattgtcgccgcaagtgccaccaaatgcgtgatgtttttcgccaagggattgcgttccaaattcactccttacgtgtcgttggttgtcccggtgatcttcaccaagttcaaggagaagaaacagttgctcagagatgcgctcgtcgagtgcatcgatggcatcgcaacatataccgtaaaaatggataatccaatcgaaatgaatgtttaaaaaataatttgttttttatagagtttcgaccacctatgcaaggccgtgctcgaggctctgtcctccaaacagaatccgagtcagaaatcacagacggatttgttcatttaccgcgttttccgtacccttccggccaacgaaattcccaagggtttgctcaaggatttggtggcaattctgagcaaagtcacatttttcaaactttttagcctaattttcggccttttagcatggctttgatgccgattccgaagtgagggactcatcctttgctgcattgggtgccattatgaaatgcactggagaaaaggccttaggctgtttcatttcacctgaattggccaaagacacgaacaaaatgcccaaggtcgtttaaatgtttctttttcaaataattttgttatttgcagattgctgaaaacc

SEQ ID NO: 46214 - DNA, 981 bp, Heterodera glycines; identical to SEQ ID NO: 30473
  unsure (1)..(981): unsure at all n locations

SEQ ID NO: 46215 - DNA, 1350 bp, Heterodera glycines
atgcgtgcgtttcttgcttttgaaatgcgtcggaaaaacgtggacgagcagaaggcgcgcgaaaaagaattcgcagtgcttttggaagactgcaacaagtgacagtttttttgggggatccatttctgaactatttcatatgggcgagaatcacttaatagttatagtatttctaacagttggtaaccgatcagcctttttcagatggcttcagacgggtctttaccttgacaaaccgcacccgcggactggggcaacagcgcttcatgttgcagcttcaaaaggctataacaaacttattggttggttggcattgtcatagggactaaatggaatttaatgatatattctagagtagagcgggaccgggaccaaaacacggacaactgagtaccgaagtcccggttttgaccgggaccgggatcagtcccggttttcccagccaaaaattcccgggttttcaacccgaaaaggtccaggtcccggtttgcccaaaattcccccggttccgcttctctaatatattccattattatttttaggcatgctaatcagggcgggggcggacgtgaacgcgcaggacttcgaggggtggacgccgctgcatgcggcggctcattggggcgagcgggacgcatgccgaattctgatggagaatggtgccaacctggacgctttgacacatacagtgcgaaagtggcaaatattaaatggatggggaggggtgggaatagaagacagcactttccatgacccactacaatttattttcagggccatacagttttttcgctagcggacaaatctatttcggattatttggtaaacttgcaggaggttggttgcccctcggattgatgcagttttgcacaattttcgcagaatttcaaccaacttcgctccgaagcgctccaacaccaacaacagcagcaacagaatggtgccactcataatcagccttcaaatggaagtgcggtgctgcaggatatggcaaatttgacacttggaaaggacaaggaatcgtcagtggacagcgaaagagcaagcaaagtaagccgttggtggcggcacacacgtacaaggggtgtcttcgcatatttctacatgaaattgagttttttgtgtattgtcagtgtaacatccttccgatgagatcgactctttgttttccttgttacaatggctcattttccacttccgtttctttccttttcgcgtcaattttcatctttccctttagcgatcgtccagcgtctacagcagcagtgagcaggacccttcgtgtgatggacaagggggtaaatgccttgccaaccaggaaaagaaagggtttattaacgaaaaacgaat

SEQ ID NO: 46216 - DNA, 681 bp, Heterodera glycines
  unsure (1)..(681): unsure at all n locations
atgtctngaattggtaatttcgaaataagaaatgtgtctaaagtcgaacgtatcggtgcacattcccatatcactggtctcggcttaaaggcaaatttcgaaccaatttttatttccgatggaatggtcggacaatgtgcggcacggaaggcagccggattgattgttcgcatgattaaagtcgaatttataatttaaattctattttcatcagcgattgcttaaggatggacaaattgcgggcagagctttgctaattgttggcgagccggggacgggcaaaacggcggtggccatgggaatttcgaagtcaattggcggcgatacgcccttcatttccatttcggccagtgaagtgttttccatggatctgagtaaacccgaagcattgactcagtcattccgaaaggcaattggagttcgaatcaaagaggagactgaggtgacaatggcatggacgctcagacacaacctcttttttgcctttgcaggtcctttgcggtgaggtcgtacaactcgaaattgaccgtccccagtcgggtgccgggccacgagttgggaaattgactctgaaaacaacggacatggaagcaatttacgacattggaaacaaaatgactgaatccgtcatcaaagagcgaatcacggccggcgacgtcatccaaattgacaaggcaaccg

SEQ ID NO: 46217 - DNA, 2521 bp, Heterodera glycines; identical to SEQ ID NO: 6256
  unsure (1)..(2521): unsure at all n locations

SEQ ID NO: 46218 - DNA, 1511 bp, Heterodera glycines
atggtgccgggcgagtcggtgtacggcgagaagcgcatctcctcccagcagaccgaaaatgcgccgattgctgcaataacgccgaagacggaagagacaacgaatggcagcaacggtgtctcagcacccaccgccgcggctgccggcccggcaccgccagtcgagtaccgggtgtggaacccgttccgctccaaactggccgccgccgtcatggccggcattgaggacacgcacatttacccgggtcagtttccgtcaagcactcgcaattggttgataacccttttgttttcgatgaaaaacattgggtgcatgattcttgggatttcgtgtttgcattagtttggccgttttcaaatctcggaccctgactccaacaaaagtcgaaaatcaagagtttgccggaatttggtgcctaaaagcttttcatctgcgtaaatgctttggagcattagtttcgaacttccattctaattctttcgtttgtgattatgtttctaagttggctagaaaaggatgccaaatttataaatccacggggttcatgaaaaaccgtccggtacggattgaatcgggaccgatttttctactcaaatttattttcacatgcgcaatatttgcatgctttaggtgcccgtgtgctttatcttggcgccgcttccggcacttccgtttcccatgtgtccgacatcgttggacccgtatgccaaataattttttttgtcttggatttgtaaatagataccttctttctttaggaaggcatggtctatgcagttgagttttcacatcgcagtggacgtgacctgctcggcatggccaagaagcggcccaacgtggtgccaattgtggacgacgcacggcacccgcacaaatactccatgatggtcagtcaacttacaattagctatttgcatcatacctaatttcctcacaaatagggtcattcgcttaaactttcggctcttgcgagttttctaaattgaattttaatccaaatttgaaaaccatcttttttggtttacgtgtcaatttcgtcttcccaaaattgaatacaagtttttttcctaaaatcactgcgcgcacagattggcattgtggacacaattttctcggacgtggcacagccggaccaggcacggattgtggcacacaatgcgcacaaatttctgaagaacaacggccatgtggtcatctccatcaaggcgaactgtgtggacagcacggcggagccggaggcggtgtttgccggcgaagtgaacaaattgcgcgaggagcagttcaaacccattgagcaggtggattggatgttgcattggaatggattgcgttcttgtaaaattgtccaaccattaggacgcacaaaaaagcaaatcgtcacatcttggcaatggaaatccccctccacttttttaggtaacactcgagccgtacgaacgtgaccacgcggtggtggtggccgagtaccgagccgccaaaaagaaggtcaagaaggaaaaaatggaggagga

SEQ ID NO: 46219 - DNA, 2082 bp, Heterodera glycines
ctccgtgccaactcttctgccagttacataatccaattcaaaacttacaccacaattgcgcagtttgaattggtgaacgaacggactaaagaaaagctgacattgaaggcagaagatgatgatgatgtatatacacatattaattttgtgttggagcgatgccaaattgtggcggcaggacaaaaagacggacaatttgaacaatgtcgacattacaataatgtgcgtcatgtttttgctaaaacattagtgtctgttctgtgattttagtgtgacacaataatgtgcgtcatgtttttgatgactatatgataaaggtgggtgaatcggtgacgtctcatttatgaaaccaaatttgattatgtttctctctgctttctaggttgaagagaggcttggcgaagagcgggaccggtgccaaatttatttggacaacacgacaatggactcgctgatggaggcatgtgacacggcgttgatcaagcagcacctcgagctcttccacgacaaatttgaggtagcgaaatttttttgccaattttacatgattgtacatttatttctcagtcattgctcactcgccaacagaatgaccatcttggacggatggtgagacttgcagaaaccactttttctcaattttttgcataaaattctttttcagtacacactttgttcgcgtgtgccaaacgggttggccaagctcaaagagatcctggaggagtacatcgaacgggagggcaaggcgtccattcagcaaattgcgcgtgaggcgttcaacgatccgaagcaatacatcagctgtatcctcaaaatgtaagtttatgcgggttttaggaaataatgaaccgttttaaaggcacgaactctacaatcgcttggtggtggattccttcaaaactgaccatggctttgtgcaagcaatggactgcgccttccgcaagttcatcaacaacaacgaaattacggcgatggctcggaatgcgtccaaatcaccgcagctgttggtcctctactgtgatcagcttttgcgcaaaagtgcacgcaacatggaggacgagaagatggatgagaacctggagcaagtggtgggtttgtttggactttaaagtttgaaatgttccatcaatttcttttttttaaaatactaatatcccattgtcagatgaccgtcttcaaatacatcgacgacaaggacatgttccaagcgtttttccacaagtttttgtgcaagcgcctcgtctacgacacgtcagccagcgaggagcaggagcgatgcatgatcgcaaagctgaagcacatgtgcgggttcgagtacacctccaagttggagcgattgctgactgatgtcgcgctgagcagggaccactccgagcaattcaagcaggtcgctaacgaaattttaattttattgaggcagttttatcccattttagcagccgaggacatccaacgttgacttctccgtcattgtcgtcatgtcgaacgtgtggccactgcagcagccggtcaaattcgaaatcccgcgtcctctcctcgactgcattgactgtacgtttggggaaggcgggtggtggagagaactcccaaagggaagaacccattactttttagcctacactcagtactacaccaaccgtttcaatggccgtaagctgacctgggcgttgcaaatgtgccgcggtgaattggtctcgacgagcaacactttcccgtcgaaatactcatttttggtaagcaatttcgacattaaaaataaggatttcgtgataaaatcaaattcaattcaccgaaaaatcatataagttattcaaaaattgtttttttttgcagtgcaacacgcaacaaattgccgtcctcatgcagtacaacgaacgcaacacgtacacacttggcgaactgcacgtcgctcttggcaccgactttcccggcgatcagctgtgcgctgttgttcaatccttggtcaagacgaatctcctgaagctcaccagcgccgatgggaaagctttgaccgagacgaaactcaatgacaacgagcagaaattcaacggaacccaggattccacaggtgaattcgaaaat

SEQ ID NO: 46220 - DNA, 1256 bp, Heterodera glycines
atgaataatcatccggtcagattcgagacaatttggaaggatcttttgcccggccttgagtccatcttcaagacgcaggagagaatggcaccgcagcgctatatggagtattacacgttagttttaacaggtttaactgttatgaaagacttaagagggtcgcgataaaaaatgattgcagataccgaaacatggaaccaccataaaccgggtagtgaaatttgggcagcagcattcaccgcttttaaaaatttggggttgaccattcttttcgaagagaaaagcattcctaacttcttccatgtgccaacattaggattttttgtttttagtctcgtcttcaattactgcaccaaccagcagaacgacttcacgcacgaaacaacgaacaatcgggcgcgtcggggcaaccgcacgacggcgggaacggctggtgcagagtttgtcggcgaggagctctacactcgactgcgccacttcgtcgaagagtacacaaggaagttgcttcaggttttgttgttttgcacaaattggggaggtgggaaataaaattgtacaggataccgaattcaaatttgtttttgttcaggaatgccagcgtctgtccggtgaccagctgctggactactacaccgagcagtggaccaaattccagttctcctccactgtggtgaatggcattttttcctacttgaaccgacattggatcagacggaacatcgacgaggcggtgcgtcccggaattttggaagtgtacaatgtgagtggtttgacggtcatacatgaattggggatgggtttcatttttaaattctcgaatttcagttggctgtctccatctggaagtcggtgatctttgacgaactgcaccacaacatcacgtccgctgcgctggcgctggtggagaaggaccgcaacggggaacgcatcaccacgcgactgatcagcggcgtggtcgcctcatacagttaagcttttgcttacaaatttggaccccgaggcggggctggggagtcagggaatgggtctttcgttcggcgaccagattctgccgccactctttcgttcgaacacccgctaatttgcattccttgtttccagtcgaacttggcatcaacgagcacgacccagcggcggacgtcggaggaccagcaacagctgcggtcgcccaacaacagcagcagaattcggtggtgcatcgtccgagtgtcaaataccaagtggaccgcaactactttgagcagcgctttcttgag

SEQ ID NO: 46221 - DNA, 1341 bp, Heterodera glycines
accaccagcattaattatttttgggcatttcaaattcattagttccagtgaaataaaccctcgcccctcaaaaaataattatttacatttggacacaccaaattcataaataatttagtgcaaaatgcaagagactcacattgttctcgggattgcctcggtgtgctcgctgttggctatcatcgccacagttgtcactctgccatctctgtactcggagatgagccaaatgaacagcaaagtgcgcaacggagttgaggtactcagccggccgcactcaaacaatgaatgcaccaaaatttgccaattttccaggccttccgcgtcaacaccgactcggcatggactgacttgatggacgtgcaagtggtggtgacgccgccgtcgaagccccgtgcgaaccccttcaactccatcttccgtgccaagcgtcaactgcccggacactgccagtgcgctggcctccaacaaccaagctgtccccctggtccgcccggcccggctggaccgcctggacagcccggacagcctggaagcgcaggacagcccggacaggctggacagcctggccaacccggttggcattttttggctgacctcccccctgctaataatcatgcctcccattgcagctgctccttgccctccccagaacatcccctgcccacgctgccctgctggcccgcccggccgccccggaggacagggaccgcccggacagcaaggagcccctggacagcctggtacgcccgctcaaggtggaggacctggaacgcctggcgcgcccggaccccaaggacagcctgggcagcccggacgccccggagcctctggccaacccggacagcctggagcgaacggagttgtctcgtaagtacactttaaccattggttgtaaaattaaacccgattcaatttcgttcaggcgccctattcctggcccgaagggaccgcccggagcgcctggccagaatggaaaccccggaggccaaggtcagccaggacagcccggaggccaaggaccgcccggcccacctggcgcgcctggtcagcccggccagcctggaaacggtggacagcctggacagcccggagcaccgggacagcccggcaaggacagcggctactgtccgtgcccgccccgctcttccgtgctggcggtcaaaaagaagatggcggcagccaagaaagcataagcagcgacaagcgcagggagaagagaacaaccgaaagacaaaggaccgacgatgcgaaagcgaagctgaagatgatcattattgggtggaaattgttgttgtcggaatttgtgttcaccagcagcgcattttccacacgaataaa

SEQ ID NO: 46222 - DNA, 1268 bp, Heterodera glycines
  unsure (1)..(1268): unsure at all n locations
aatgacgtcacggaaaaagaagctgaatttgacggaacaaagagagtcgggcaaggctttgaacggtaattaatgccctgctaataacgagtcatctttaattttaaatcataacaaaagttctttttggccgaaataatttttaaactacagaatttaacacaattatactgagaatacaattcttatattctttacaacaactttttttttgtaattcattttgcaaaggtcgaacgagacggaagagccgacgatgccaccgccatttgtcccatgccgacaagcagcagcccatatgtctgattggcaccattttttgtgtttaacaatgcgtcatttgttcaactcttttaggactgacaatggcaccggcaattacttcctcagtgcgtacgaaaagactgcgcagagaattggcaacgattcgaagtggaagaaaagggtacatttttgggggcatcttgttgagaaaatttcttaggcttcaatttcatattttagccacttggtcagaccggtctcatcaacttgggcaacacgtgctttatcaatgccattcttcagccgcttttccatacgcctggcttttctcaactgtttcggcaaaagagtgctcagcgattcgttaatgggtaagtcgagacaattaattaaaaattataatagaatcatttgggtttttcagaaactatggaacgaagggagtcattgccggatcattctccgctctgattgatcagattttgtctggcaatttcaatgcaattcgaccccaagttttcttggtgatttctctgttttgctattttattgtattaccaattttcttgaaggaattctttgctaatgtgaatgccgaattggccaacggacagcagcacgacgcccatgaattcctaatttatttgctgaacgcgcttcatgaagacaccaacagagtggggctttttagagaaaaagcgattttgtgccatttttttacccaactttcagttagaaaagcaacagccatttgatcaaaattacgataacaccgatttgagggccaacgctttcgatttctttgagaagtcaaaactgttcttttcttcgccggtcaacgatctgttcaatgtgaaccgatcactcactgatcactccgtaatgaccgtaattttacctctttcagctcactaccatttctgagaccaaatgcatcacttgcaatgcgtcgagtgttcgttttgagtccgtcaatcaattaaggtgggttttattcgcaanaa

SEQ ID NO: 46223 - DNA, 725 bp, Heterodera glycines
atgaagacgttcatcaccgccctcatggacaagcagcatctgaagcgacgcatccaagtgttggccaagtcgggcaatgtcatggtggacagtgacgcgctttgggtggtcaaatatttggcctccaagaaggaactttcgtacgctttttttatattttttcaaaggtttttttacaagatttaaaaaaaaatagatgctttttcctctattgtcatttgggaaaataaattaaacaaattatcaaaatttttcaatttttggtaatgtttctaaaaaaattattgaggcttctaatttcgtaaaataacaatttaaacatttctatgctttaggcagtcattcgacctgtacctgaagaagatcctcgagggcttcaaccccgacctgtacccggtcgccattcgagcaaaagcgatgaaatgcttggcccaaattgtggaagcagactaccaagtacagcaataatacataatccatgaccaaactcaactaattaccgtataattagataattgctccatttctccttcaattcccaggtgctaatgatcgcggaggtcaacaaaattgtgcaagatcggctgatcgatgcgaacgcgtccgtgcgagaagcaacgttcgatctgatcggcaagtgtttggtcacccggcccgacttgttggacacgtactactccattttggtcaatcggacaaaggtcggtggcatttgcatcccatga

SEQ ID NO: 46224 - DNA, 447 bp, Heterodera glycines
atgaaaattaaattaatttttaatgacaatgagtggtaaaatgtaaaatatcctaaaattttaattcaaaattaaaaaataataataattccgctcagctttgtgggtgtccgagtcacagcggaagtgttgttggcaatcaatcgatgtgttcaaatcatttccaatcggttggccaattttctgttccaaacatggcgcacttatgtgtggctgttgctcgcctcggtgtacggcttgtacatgctgattttcacgaagccaattctgttcaccggcttgtatgtcagttggttcaacaacccccacgtgggatatgtcgacgaagcggacgaaatgacagtaagctgttttttttgggttgaagctgggatggccagccaatgtttaattggttgtgattacattttgtacagtaaacctctaaaatactgtaagacacagtaa

SEQ ID NO: 46225 - DNA, 450 bp, Heterodera glycines
atgggattggtcgctaatactgactatgctggaacaattttgcgcagtccattcaactttcaaccatttaatgtgcgcgaaatttctattagtgtaaatgggcgaccgtacccccaagcgccctatgatttggattacagaaatggaaaatatgttcgcccattcaatgacatgaatgaagcggtcgggttcgccaactcaacagagagcaacgggattacttttgctcaatacggaaaaactcattgcatttatgtgttcaatttgaccaacagcggggatgatcaagcggcactgtttgatttgataaagaatgggaccacagcggttagcatcaaattcaatcaaccagtacccgtcggaggaataatgctagtggtgatgggagaatgcgattcccttgtaatgttggacaaaaaccgatcaataagcacagataccactatttaa

SEQ ID NO: 46226 - DNA, 1203 bp, Heterodera glycines
atgtacaaaggggaggagcagcgcagttcggcggccaaatgtctgctcaaagtggcgcactacgcggccgagttggaccagtaccagaaggcgcagctcacttttgaggaggtggccatctacgaggcggacaatccgatgctgaaatacgctgccaaaacccactttttccaggtgcagttttttaataatatttttctcggcagtccaccatcaagaaaaattttgttgtttgtaaacgggtctggaaaaggaccggattttgacatttttgggccaaacttggtaatccaatccagggttgtcgaaagcgaatgcagattaatttttgttcaatttaacgaaattaacatgttacatcaattaaacaatttttatgccaaaaagttgtactagtgctaccagcagtgaaatttggaatttatattatgtttttataaacaatttttttagaccaattgattctgtcgtttgggtcctattcgggagaaatagggacggaattaattgttgttgtccaattcaggcccttctctgctccttgtgcatcgatttgctggacagtcagcgggcactgaaacgatacgaaggttggttggtcatttgatgaatgaatggtggggttcacatcaaaatcttgccaccggaatctcgccgcagaaattaaaaaaaaattttgaacatagaaacaaagtttgaaaatttttaagcattcctgcgccgagattttgtcccgcccccgtcaagtggtggttggacagggaaactcccgagggatgacggcgcgacaacatttataatttcattttcgctcataccacaaaatataaactttgaatttgtatgattttttcagaattgagcaattatttcgctgacgcgcgcgagtgccaactggggaagcagataattgaagcgatggaggtgagtgaattttatattggcacaatattcggaattttcattgtttgaagaacggggacccggacggattcaccgaggctgttcaacagttcgacaaaatcagccgtttggaccaatggcacgtcgcaatgttggtgaaggtaaggtgcaatgatcactatcgattgatcagtcagtgatcaattgattggttttttaattttccaggtaaagcgacgctgtggcgacggcggagacgtgaagaatgaggcgggggaggaggaggacgatttgcgataa

SEQ ID NO: 46227 - DNA, 897 bp, Heterodera glycines
atgggacgtcgtcccgctcgttgctatcgctacattaagaacaagccttatcccaagtctcgcttttgtcgcggtgtccctgacccgaagattcgcatttttgacttgggtaggaaacgcgcaactgttgacgagtttccatgctgtgtgcacatgatatcgaatgaaagggaacatttgtcgtctgaggttaatgttaacatttgctgtaattttaagaaacgaatgattttctattttgcctcaaaaaggtgctacaaactaatctatcaaatcctatatacaatttgattttgacaatttgatgtttaggctctcgaagctgctcgaatttgtgcgaacaaatacatggtgaagaattgcgggaaggacggcttccacatgcgcgtccgaatccacccgtaaacatctatcggttgcattccaatatcattttgctttccaggttccatgtgattcgcatcaacaaaatgttgtcctgcgctggtgctgaccgtcttcagacgggaatgcgcggcgcctttgggaaaccccaagggttggtggcgcgtgtcggcatcggtgatatgctgatgtcggttcgtgtccgtgaccaggtaaatctcttcccttggctttcagctttattttctttttagcatcaagcccacgctcttgaagcattccgtcgagcaaagttcaaattccccggccgtcaatacatcgtcatttcgcgcaaatggggcttcaccccttttgaccgcgaagtttacgagaagcaccgcaaggaagggcgagtcattccggacggagtcaactgccgattcctcaagcaacacggaccattgacggaatggctcaaaaatccaatctgatcaattgtacgacggatatattcccttttatatgctttgttga

SEQ ID NO: 46228 - DNA, 854 bp, Heterodera glycines
gaattgttggagcaacgggaaaagttggaacgggccgaacagaatttggacaccattcaccacaccactcagcacacacagcgcagtgagagtttttttaggccaaattttaaatttattttgtatattcaccatcattgacaatttatttgcccaggcctgaacagcttgaaatcgtggtttggtgggctggtcagaaacaaactttcacgagcgccaaaagggttgggcacggcaaatgccaatgccaacaatcagcagcaacaacaggaacagaccgtgcagcagcaacatcagcaggtgatcaaaaatggatagaaaagagtcacatatttcggggtgtgggaggcctaacaaatccgattaaaatatatacattttttaaaaatttcaagaaaattaaaaaaaaaaatttttttggcgacgtttcgtcccgaggcgtttcggtggtgaccttttgccctgctccctttgtccaggcatagaatttcttagaattttttgaatcaaacaaaggtttaaaaaaggacccgctgcggctaattgcgttataaaatgtttggagactgccggaaaatttaaatttgtcaaggaaattggaaagttttgcatttcggggctggggagagtgtattctgtgacaattaagtaattagcgttatttgacttctgaattaagcgtccgctgcatgcccatttggtgcagtcgtctgctgacgaatttgccggggccatcggtggcggaggcggcggtgttcagcccccgcaacagcactcgctgaactcctcgtcacgcgcgtacattcagggcactcgttgggaggcgatggacgacgaaattgacaacaatttgg

SEQ ID NO: 46229 - DNA, 776 bp, Heterodera glycines
  unsure (1)..(776): unsure at all n locations
tgaaaaccttcacaatcaatcgcccattgttccgatgttntaggcattttcctatggttcgccgggggcgttggcattacggcgggggcccaccgcctttggtcgcacaaggcgagcgaaagcgaacatttccattgactgctcccttctcatttctcagtcttacaaggctcgtttcccgcttcgtgttctgttggtcgttctgaactgtgtcgccttccaaaacgatgtgatcgaatggtcgcgcgaccaccgatgccaccacaaatggacggacaccgacgctgacccgtgggaccaattaactaattgattggttgactaattgatcagtcaatgccattcagtcacaatatcaaccggggcttcttcttctcccacatgggctggctgttggtcaaaaaggtgggtcgagcagcgaatgaatggcaaacatttgctaattgcagcacccgcaagtcaaagccaaagggtccacgttggatttgtccgatttgacttccgaccctttgttggcattccaacgaaagtcggccaaatgaatcggcaaaataattgtcaattttcagattttacctccctttggtccttctcttctgttttctgttgcccacggtattcccccctcacttttcttttttccatgcttttcgttaagctaatccccgttttgttgtggaatgaatcgtcaagcgtcgccttttacaccgccgcagtgtttcgctacactttcacacttcacgcgacttggctgatcaacagtgtggcacacatgt

SEQ ID NO: 46230 - DNA, 1520 bp, Heterodera glycines
atgccattttttcttcagtgagtctcaacagtttgccacccatttgaaagagtcggaggccgtctcaacgtttgccatggaaaaaaccattcgccagcagcgcgagtatttgcccgtcttcgctgtgcgtcagaaactgttgcaaattgtgcgcgagaattcggtggtcgttgtggtcggcgagacgggcagtggaaagacgacgcaattgacgcaatatttggtggaggacggcttgggacggccgggtgccatcgtcggctgcactcagccgagacgagtggcggcgatgagtgtggccaagcgcgtgtcggaagagatgggcatcgaacttggccaggttggcacgggggacgggtgggccaagggtatggcattggcaagaccaccaaccaattacgggttgtttggttgaatccaaatcgtagtgccaaaattggacagaaaagcgaagccatagaaagtgtgtgtttcgtcgctgacgacattttgttggaatgctgattatattgttgtttcagacggataaaaaatctaacaaaaacacactccttggtcattctctagaaaatgtggcagatgattgttgcctttatatgttcggttttcaggagtgcggttatgccattcggtttgaggactgcacatccgagaaaacgataattaaagtaacttcgatttcccatttttgcatttcactttaatttttttcagtatatgacggatggtattctgctgagagaatgtttgaggtgccatcccaaacgcattctttttttagattttataattcattttcagtgaccccgacttggactcctacgccgccatcattatggacgaggcgcacgagcgttcactgaacaccgacgttctgtttggactgctgagagatgtggtggcaagacggtaaaagaaatgaaattaaaattgcatagataaacaggctcataaccagaaaaaaattcggtggggggaggcaaccgaagagcttccagcgccgtagaaaaaaaacctagatgctgccgaggaaacgaaaatttggtcatcttttaagaaattcagttaatttaaaattcccatttttcggatagtttttcatttcgggcgtttggcaattccccacacaccccctggttacggatctgcggcggaattaagtagggacatctaattttcaacattatttgagtgctttccactttcgctgttcatttttttcggttaatcattccctgtcgttttcctttccaaattttctcttacgtttcctttttagttccgacttgaaactgattgtcacttctgcgacaatggatgcggataaattcgccaatttcttcggcggacatacgccaattttccaaattcctggccgaacatttcccgtcgagatttaccacgcccgtgttcccgtggaagaccacgtcgacgcggcggtcaaacaggcggtcaaaattcacttgggcggcatggagggcgacattttgattttcatgccgggccaagaggacatcgaa

SEQ ID NO: 46231 - DNA, 1398 bp, Heterodera glycines; identical to SEQ ID NO: 30776

SEQ ID NO: 46232 - DNA, 1334 bp, Heterodera glycines
atgacttgccctcaaaagattagtgaaaacagtcctttggcaataaacagtggtttaaacattttctcaatacctccaacaaatgtggcggtcgttcgttcattctttcgtcaagttcttcccttggcgacaatcactcaggaatcaccatatctctttaggttatacagtgataatttgtggactgatttgtcacgaatctatctctatcttgaattgtccattgaaaaaccgggagctattgacaaatggatagctatagaggacactgatgtcagcgtgtcagcaattcaaggaattgggcaaacgtttgttcagcaattaaaagtgaccgttggaaacactgaagtttacgatagcggaaatttatatccatacaaagcctacattaccaatgaattgagctttccagtaaatgcaaaaaagaactttctcggctcaacgggatattatcacacggaacgtcacgatgatccaacggatgatggatttaaagaacgttgtaaagtttttaaaggtggtaataatgcacagttcctctctcgccttgactttgacttgggaaaccaagaactctacctgttaaataatttggatttgttgttcacaatttacaaagcgaaagacgcatttcttttgcaaacacttaaagctaatgacgacacaaagtaccgtttgaccgtgcacgatgttaaaatttacgctaaaatgattgaggttcagccctcactcaacatgaatctttacaagacactagaaaagcagcctgctacttatgctgttcgtaaaaccgaaatcaaatcttcatacattagcagtgggcgctacgaatttgaatacaacgtgttcagctcgacaatacctcgtcgtgtaacaatagcgttggtcagtaactcggcttttaatggtgattacaaattgacgcccttcaagttcgatccatttgatttgcgagaaatttcagtacatgctgggggcatggtctatcccgttgtaccacataaattaaatttttcaaagaattactatgtaagagcattcgtggagatgtatgaagcgttgggcatggctaattcagaacgttcatttgacgtttcaatgaatcaattcaaaaatggatgggccttttttgtcatctctttgaattcaaccttagacgatagctgtggatttgagctgttgagaagcggtacaaccagtattagggccacatttgattcaccaattccaaagggaggagtggaaatgattgttctcggagaatttgaccaaatgattatgattgattataatcgacacattgtctccgactcgaagcttgggtaaatttataa

SEQ ID NO: 46233 - DNA, 5319 bp, Heterodera glycines
atgcaacatacaagacgttatttactagttcctgaggaaatttacgagagcctaatatcgtccccacaggatggatcaccaattggattggttcgctcaagaattaagcaaataaaaaatgataatgaaataaatgaggagcagagggcctttaaatatgaacaggaatttaaacggttcaataagctgaaaaatgacgaggaggaacgcccagttgatgttaaaatacaaaatttgcaggaagtggcagaaacttttccaaaaccttttaatctaataagaaaatctgctataccacgacgacataacctaaaacttggtaaaagaagaaaggattatgttgacgacgacgaagaagtctttgacgatgtcaagataccgaataaagatgatattttgaatttcatttacaaaaactctcaagccctgggaatctctgaacaagggcaaatacttaaggcagacggacgcccgtttataacaagtaacgttgaagatattgttgatcatttgacaaaaaaggatagaagtgccaataagaaagatcctacggcactcaaagaatttgtagcgagagcaaaacaaaacgcagtgttgagtaggcgtctcttttctgatggtcaaactggtaagggaatttataaaaagacaatgttaaaattcaaaccatcgttatggagatgaaaaaacaatgtttgttagagtttttatacaaagacctaaattcacccgtttcattcacaagcgttgaacccttgcttagagaagctaaaaaatatgaaacaaaaattagtcgttcagacattctaaaatttttattaacccagcgcacttatacacttcatagacaagctaagcgccgttttcggcgtttgccaactctcgccccaggtttacatattgaatggcaagcagatttggcaatttttgaccgtctttcaaagtataatcgtggactcaagtacttgttagtttgcattgactccttaagtagacaaatatttgttgagccaattaagtcaaagacaagtaaaaatatgattaaggcatttgaccagatattcaaaagaactaaatatattccatggaaaattttgactgatcaaggaaaagaattcacagcacgacctatacaggaatattatcgttcaaaagacgtagaacatttttgtatgctcacttctcctcaatttcatgctggcatggctgaacgtgccaacagaagtataaaagaacgattgtatcgttacttcactgagcgaaatacttacaaatggattgacgtaattcaagatatcgtaaagggtataaatcattccatgaactcaaccattggaatgagacctgtagacgtaacctttgcaaatgctgaagaattgagaaaaaaactatacaatgaagcagctaaaaaccctagaggaaatcccaaatttcatgttggagatcgggtccgaattgaaaaacacaaacacgtgttccaaaaaggttatttgccccggttcaccaatgaaatatttactattgcggaagtacattctgagagatcacctattgtttacaaaataagcgacgataataatgaaattattaagggatggttttatgcaaatgatttatgtagaatttttgaaaatgataataaattgtatgacattgaaagaattttgtcaaaaaagaaaagaaaaggtgttgaacatgcgttggtaaaatggaaggggtatagtccccaatttaatagctgggttccattaagttcaattactgtgaaaaatatataaaaactcttaaaaaactttttttttttaataaaatgccttctaattcgttttatattgtactcccatcaaatacaaatgttgaagggaacagaaccaattcttttcggacacgtataccacgaaaactacaattcaacacggaatgggaagtaggcctcgctgtaattgtttatccccattcttggccttcaatcggtactgcacaacaacaatttgttgaaattgagtggcagacaggaaaagcgttacgcattgaagttccaccatcaaatgtcacaaacccctacgaactaagcaagaatttgtacaaattattgggcgagggaagtgatcacttggcaaaacaactgagaactacgcaaaatgctttcctacttgtgataaataaggctaggcggtgggcaagagaagaatatattaaaagaaaggtgaaggagaatagaagtattcatgatgaagaaaaacttctacacgcgctgcttattgacagtgaatcatttatcgagttgaaagacgtggatcggggtcttattgctgaagagaaacatgctgaaacaagtaaagtaccgctgagaatttcgaccgatgataaagattcttatcagaagaaattgaacgaatacttttcaggtttaagtgaacgagatttgaaccttattgatgattttatcaaagcaaaagtgaaatcagagattaaaaaaatgacagaagacgaacgtatgatccttgaggcctcaaaggaagtgggaatgggagcatggcttcaagcttatcgtagaatatggcttgcctgtcaattcacctatgacaataatagaaatcgttttgatttaaattttgatacgcgttacgtaaagaaagtaaaaatcacagcgcaacttgcctatattctggggtttgacaacacagaatttttggaaccagaaaacgaggcaagattcatgccggacatgaacggaggagtttcttcatttaacgtatacgcacctaatctcattgaaccaatgatgattggagacgtaaccgctcctgttttacgaattgtaacaattcgaggaaaacccgatgaggtaattgaggaacaatttttagcgatacaataccataaaattttgctaaaagaaatttcggagatttttattgaaattcgtactaatagcggaagtctcatgccgttccaatatggaacatgtacattaactttgcattttcgaaaaaagtcctatttttaaatgaataccttagaaattaataaaattctatcaacaaattcattgaccaaaaatcatttccttggctgttttgcagctgatcaaatacccagtggggcaataataaaatttccacactgcatggtattcaatattgatccaataacctcaaaggggtcccactgggtgtgtgtttactgcacttcaccgttacacattgaatattatgattctttgggaatttggccaccaccaagtttttacatagcaaattatttaactcgctatgaacaaatacgttatagcacaatcccacttcaatctttaaattcaaatacgtgtggccgacatgttatattctttttgttcaacaggtgtttgggttcagcttttgaaaaaattgtaaatcttttacattttacaaaaacaactcctgatacaattgtgaattcttttatgaggaaattaataataatataaatagttgaaaaactttcaaattttaaaaatgcatgttgattttgatccccttcaagtggattggtccacattttctcaagaattgcacgttcaatatggtggttataacatctttcgcggagttccttatcaaagaggggcaggtgttggttcagtgtttagaagtctcatgcgatttcttttacctattggaaaacaaattggttcatcaattgcacggcagggactagaaagcggaaatcgagtgttaacaaatgtattgggaggtaaagatctaaaggagtcactcgtaaatgagggtaaaacggggcttaaaactctcctggaaaaggcagcaaataatattgaaaaacaaaaaggacaggggtttgattttaaacgttataaaaatgaaccaacacaaaaagttgggaaaaccaggcgaaaaaatataaataaactccaatctccagttgggccaccattggttgccaaaaccaaaaataaacgtatgcgtgttgactttttaggaacatattaaataaatgagttgcccgcaaaagattagtgaaagcagtcctcttgccataaacagtggtctgaatattttctcagttcctccaaccaacgtctctgtaattcgttcattttttcgtgagatacttcctcttgcgtcaataactcaagaatctccctatctttttcgtttatacagtgataatttatggactgatttatcacgaatttatctgtatcttgaaatctcaattgaaaagcacgacgctaatggtaaatggacatcaatagaagataccgacacaaatatagcacccattcaaggaattggacaaacctttgttcaacaactaaaagttacggtgggaaacactgaagtttacgatagtggaaatttgtttccctttaaatcttatataacaaatgaattgagctatccaacaagcgttaaagaacattttctcgggtccatgggatattatcatacggaagcacatgatgattcaacagataagggatttaaagaacgttgtaatgttttaaagggaggaaaacatgcgcaattcctctcacgtctcgattttgatttaggaaatcaagagctctatctgctaaataatttagatttacttttcacaatttacaaggccaaagactcgtttttacttcaaaccttaaaagcaaacgacaataacaaatatcgtttagcagttcatgatgtaaaaatttatgccaaaatgattgaggttcagccttctcttaatatgagtctttacaaaactcttgaaaaacagccggctacatattcagtacgtaaaactgaaataaaatcttcattcatcagtgttggccgttacgagtttgaatacaacgtcttcagctcaacaattcctcgacgcgtgacaatagctttagttggcaattcagctttcaatggagattacaaattaagcccatttaaattcgaaccatttgacttacgcgaaatttcagtacacactggagggatggtataccctgccgtcccttataaattagattttcccaagaattacttcgttagagcatttgtcgacatgtatgaagcattaagtatggcaaattcagagcgaacttttgatattaagatgagtcaattccaaaatgggtgggcattttttgttatcccgttgaattcgaccctggatgatagttgcgggtttgaactattgagaagtggaaccacaagcatacgtgccacgtttaattccccaatcccaaaaggaggcgttgaaatgattgtcatgggagaatttgatcaaatgatcatgattgattacaaccgtcacattgtttccgattcaaaactcgggtaa

SEQ ID NO: 46234 - DNA, 805 bp, Heterodera glycines
agtcgacccggctctatcgaatggtatataatacataccctttttccgagttacagctcggaatgttcgcttgtgagttttttatgaaaagaatctgaccaattcgtttaacttctaataatgcacccattttaggagggcgtaactttgccggatttttacccattgacaaaatccgaagagcgcgaattgaagcgaattcggcgcaaaatccgaaataaaatgtcggcacagacgagcagaagaaaaaaacaggcgaaatctgaagaagggaatcagttgaattgttttgatgtttttaggattacattgaggccctgcaggaacgcattttcatgagcgacagcgaaaacagagaattgaaaaagcaaatcgaagtgatggcggcggaaaacagacagcttgcggcacaactgcgcaacatgcaggtgctggacaaggacttgcaattagccacacttacccatggtttagtgggcgggggcgattcagtgtaaattacctaactcattaacactaattagcaaaacattcgtttgtcctttcttttcaaaggcttccattggacaatcgtcaaagcgcaatgcccagacaggcacttgcctggctgtccttttgctttccgtctgtttaattgtgacgccaaatagtcgacaccttggcatgagaggacaagcgaatggaccctttcagcagcaacaggcgctgatcgcagaacaacagcagcaaaaaaaggtgggccaatttgtccgggattgggggcttaaattttgaccacccggcctatcagcaagggattgttttt

SEQ ID NO: 46235 - DNA, 1085 bp, Heterodera glycines
  unsure (1)..(1085): unsure at all n locations
atgggcgacagaaaggcggtgattaaaaacgcggatatgaccgaagagatgcagcaggaggtcggaccaagcaaattgagaataatgaaaaatggaggattttccaaaagagtatcgcattttgtaacaaaaataaaacaaaggcccccaaaaataatcattttcagtttaaccaaaagctcaatttttcattggatttgaatttatccgttactaaatttaaattttattcatttccatttcccttttaggccattgagtgcgctacgcaggctttggagaagtgcgtttacttattttagcaattcgtttgctcttcggaaatgcttaaacttttccccaacgattcccttggaaaacaaaaattggagtgttttaagtgtttccgccttttttcttttctttcttttcgatgcgcaatttgtcctccctttgtcaggtataacattgagaaggacatcgctgcgtacatcaaaaaggagtttgacaagaagttcaacccgacatggcattgcatcgtcggacggaacttcggctcttacgtcacgtgagtttttttagaggggggggggattttgaatttaatggctttacggcgtgaaaacccaaaggctttactcgccaaacgatttttacgcgtttaatcagtgaccatccttattttcttaggccacaaacatctgaaagattaaagtttagggaatcttaaatacaagaaaaacacaatgagaatatccaaagtcagcttttcgagtatattcggcgataattttttgtttattatctttgacacaaattggttacaaaaactttgtagactttaaactttagaaaagtaccaagaatgtaggtctttatcaagaaaaagattagtgtgtggtcaacggttggacatgtaaactgcaatagaggcaaaccaaaattaaatgacacttttggactttacacgaattttggacaaatggtcggaaagtgtgaatcttttttaagtaggggagaggaaaagccgaatattnccnacaaaaacgagaaaagagctattcaaaattntatactttagacacgaaacaaacacttcatttact

SEQ ID NO: 46236 - DNA, 2480 bp, Heterodera glycines
atggcacaaaagcagcaacaacaggcgcaaattggccaccaatttgatgagggcgcactgctcgaaaaggtgcaacgaatgatcagagaggaattgcgacgatttgatgccgaccgtactggcattgttgactatgcactcgaaagttcaggttcgacatattactggcaaagagggcatattgtgtaagagaaatctgttttttgttaaaaaaggggaaaaaatttaaattccaaattttgaaaattcaccgcgtcaaacttattggcgtttcacaaccaaaaaccacaatcagtagcaattttcttcaaaaaaaaaaattgtttttaataatagaaaaattgatagataaatcgaattagaggaaaacaataacatacctattcaggtggatcagttctctccacgcgttgcactgtccaatacaatgaacggtcgcgtgtccaaaaattgtttggcttcccactgtggtacaccggttattcgccaagaactgttatacaggtgcgctatttgcacaaatctcaaataaaaacttttcaatttattaaattgaaaaatttctcacaatatgccgagtttgagatgctatagcttctttcattgctgaccaaactcaatttagtggtcccttttttagatacgtccaaaaatcggtttaaaattaaatcccaaaattccattattttatattgaatcatcgagaaaatatataaataaatacccgacataggaaaaatatataaataaattaaataccaattaccgcttaagcgaaagggctatggcgcatcaactggcgaatgctgggcattctacggaggccatggctatttgaccattgggctgtcgcaagtaaaaaattttttttttttttgattcgtcccataaatttttgtaactttattagcgcatcaatgtgaccgcagtgtcttatgaacatttgccggttgaaatgtcgccggacaagcaaattcggagcgcaccgcgcaatttcctcgtttgggttagttgtttttttagtgtcgggattagatgatgttatttttaatttcccatctgactttcacccattataaataataaaaatgctaaaaaattacgaaatcgtaaataatttttaggtgttatttcccaatttcattaaaaaatacaaaattgaaaccataaaaaaattctttaaaggataaaaaaacaaaaaatttagggcaattatgaccctagtaattagagttaaaatttagagttaccaggacttggatgagctggacacccgacttttgcttggcaattttacttatgacgctgagaggggcgaaccattgcaaatgttcccagttcaggtaatttaatcaatgacttcgaatacaataattacaattaaaaaatgaatgcacaaattaagttacgcatcagatttttgacacagatttcaataaattttactttaatgtcagcaatgggacccacatggtacacaaattgttgagctggaaacgctggcaaattggggctcgcaagtcacatgtttgtaccggttcagagtgcacggagacaaaatgagggtgagtctggctgttaatttctttcccaagtcattaaaaatcatttttacgaaataacttctatggtaaaagctttataaaaatctaaataaccctaaaaatattttataatataaataaccctaaaaattatatgttttttccaacaaaaaatttttttttttaatttatgattatttatacaaacctaaaggaaattccggaagtggcatcggcagatgatttggcggcatttgactccgctaaacgatggcccgactcatcaaaacacaaagaaattggtggcggatgaacggactgacggacggacacaacgtcttcccgtggaagaagaactcaacataacaaaactcattatcagttttattaaaggatttttctttattttatttttccccaatttgtttatttaccatttaattactctatcccatttattattgttaaccaatttgacttctgttaagtcgcaattcactggttttctttgttatcattcatacatattaacctaaacacttatttaatcactgtagcaattaaaactttgttttgtttggagaacaaattttcctttccagcaatttggattactaaacaccacactgagtatagtctgtttttcccaagataattcgttttggttttttccctcatttcttggtgcaaagtttcgttgttttgatgacgctttctgcccctgctttttttgttttagctgctgcgcagcttaagtagtgattatatttatttatttgttctattttgagtttgcttttgcatgaccataactcaacaaaagggaaaaatggtggaggttcaaatccgcctcacgccaacatttttggatcaaaaaatttaaaaaatgacgcttattgaactttttgctagtagatgacatgaatttcggtttta

SEQ ID NO: 46237 - DNA, 766 bp, Heterodera glycines
atggcccagctgttcgacaaacttggcgtcggcccgcacgacctgtccgtggataggctcgaagtcagagcggatgacacgtaaacggcaaaattttgttgtctattttacaatttcaattttcagattccaccgcttcgacttggcacggtgggccattggacacgatgtgagtgaataaatttcaaaaaatttgataagtgctaatttgtgattgatcgaaatgagatttctgatcaattggtcattcatttaatttgtttttcccaggtttggtccccaaatgcccgttggataatccaagtgccgcgtctcttcgacatttaccgtgccaatgtgagcaaataccgtagcacttttctgatcacattcacatttttccattttcagaaaattttgaaaacttttgacgactttctcgacaacctcttcactccgctgtttgaggtgttttctccaaaaagtaaataaaaaaaactggcattttcaggtcaccaatgaccccaacactcaccctgaacttcaccgattcctcaaagtgatcgaaatgcaaaaataccataaaacactcaaatttcagcatgtttccgggattgattcagtcgacgacgagtccaagccggaaaatgtggcatttacgaaggattcaccggagccggcggattacgacaacgaccaggtaaaaaggatcaaaatgatcaattcgcgttcaaaataaatcatatttcagaatccgtcctactcctattacttgtactacatgtaa

SEQ ID NO: 46238 - DNA, 1059 bp, Heterodera glycines
attgatacgattgtgcacttcgcagccgattgcaccagcaagcgatgctatgaacaaccaatggaagcgttggagaacaattcggtcgcgttcgtccaaatgttggaatgcgtgagagaatatggcaaagtgaaaaaattcgtgcacattagcacggacgaggtaataattagcagcatttgaaggccattaggaaacacttaatttgcatcggaattctccttttgaggtgtacggcgattcaaatttggggccaactgaaaaggcgaagtcggaagagtgcccaattttaccggggaatccgtacgcggccacaaaagtgcatcgttttgccattttaatcatttcgacataattcctttgcaaatcctcaggcaatctgcgagttctacgcccatctgttccaacaaaagttcgcacttccaattgtgacccttcgcatcaacaacatttacgggcccaaccaatgggacgttaaagtgacagacaaatctaaaaattataacaaacattttcaaatgttagctaatgcctcgcttcatcgaaatggcacggcagcagaagcgattccccgtccaaggcagcggggaccaattgcgctcgtggctgtacgtggacgacgcgtcggagggaatcatacgggcggccgaagttggccgagtggggcaaatttacaacttgggcacttatttggagaaaaatggtcggttggaatggtttgaatgtggccaaattccttgccgatcaaaacgctcccacaaagtgtgaattcagtgaaggaagtggcggaatgtgtccaaagcgaagtccgtactcaaatgggccttccgctcgttgctccccaattcgatcacattgccgaccgaccctacaacgaccagcgatatctgatcagtttttcaaaggccacgaaggaactcggatggaccccgaaaacaccttttgaagaaggtcagtttcaaaagaaaatttgtatgaattgttgtaccttttccaggtttgaaaagagtggtcagctcccacttggagcataaaacggagccaagccaaagactttcg

SEQ ID NO: 46239 - DNA, 3103 bp, Heterodera glycines
gactgtgccccgggctactcgcgcaccggcggtgggccctacttgggcatgtgcgaaaagtgcgagtgccacaaccatgcaagccaatgcgatgccgagtacggcgcatgcattgactgccaacacaacactgaggtaaaacacacggagaaactctgataggaattgacgattagccttagaattagcaagtttattctttgattcaaatgaatttgctaatttttggcacgggcagaaggctgccaatgagattaataaatcccaaatttggagatgaatttgtttatttttgctaattaatccactctctctctctctctttctaagttaattaattattttttcataaatatttaaaaataaaaatttaatgtcaattttccggcactttttgaagggttctttttaatttaatccccgacaaactttctaatcaccaacttacctgtctaagggtgatcgttgtgagcgttgtaagcccggctttgttggcgacgcacgtcgtggcactccctacgactgtcgtccggcaccggagatcgcggttgtacgcccgcgctgcgattgccacaaccattcgccgcgcggctgcgactcatacggacgttgtattgtgagtttttgtaaatttaattactaatctcattaaataagcaaaatcgtcagactcttcataaatttgttttgctcttcagctgtgcgaacataacactgaagggttccattgcgaattgtgcaaaaagggcttttacggcgacgcaacaaagggaacgccgtgggactgcacgcagtgcccgtgcccgtaagttcctttgaagagtgccgccacactttcggctgcaaaaagtgccattcattcatttcgttttatgtgaaggggtaccgccgaatgctttttggatgcgcgtggacaggtccaatgccgcaactgtccgccgggctttgctggccgtctttgtgatgagtgcgttttgcatacacttggcaaatttaagcgtccaattaagcaaattagcatcagcgtaattacattgccctttcgtaatttgtttgccctttttcttcccccgattctctaaatgccatttcaatttctttccatttccgccacttttttccacagatgtgcccccggttatacgcctggtcagaccgccgatgggcgcaagtgcgagcccatcggcaagcacaagccgtctgaagtggagttcgtgccgggacccgacggtgagagaggtgcttttggtgttggtgttggtgatggccggcgtgacattggcgttgtgcggcctccgaatggcgcgcagcaccggcgcgggggcggcggcataaaagtcgaacgcaccgggccgaaacgctaccgcgtgcgaggccaccgctttttcacaaactgaccaccgccgatgcgcagaacattcgccgctttacataataacgcattcactcacttccgtttatttcgcttcgcttgcatttttaggcattgtttttttgtgccgttttgctttttcatttttattttattttttaatttgttttcgcttcgttcgttttttgtgcctttcgcgtgtttttggccatttctcagctgttttttgagtgcctcctaagcaaaacacttcagaggaagaagagttccaaacccacttccgtcagcttcgaaggtctccccaattgtgctgctgaagggggaggaacactttaccactctctgaagggtttcaaatcaaaccgatttttgtctctgttacggtgtttttgtccggcatttctcatcatctctcgcctatctctctatttcctcttttctctccttctctgcacccactctctctctctctttcaccctctctattcgcccttctctctcgccctccttttgtctctgatttcatttagaattttattctccaatttaaattgctaaaatcgctgccccttcagaatttcaaaaatttctcttgctttaatgacatttgaataaattttggcacttttttctctctttttttgcacttttttggcaaaattccaacttttctttgttttttctttgcttcgctcgctttccgatgcttcgccggtgatgggccaaatgctgcaaattttcttctccgttgctcggggcctttttaattgctcgcctttgcaatcggtaagggttactgtactttcggtcgggtttctgtacctcccgaatttattttcctacggtcggtctctcttctttaaatcaattaaagtgtcctcctttctttccctttctttacgtcacatttttaattatcaattaattttaattaatgctaattaccctaatttagtcttttatcatttagtgccttttcgtgtggaaattcttcagccaaaacagctgaccattcaggaaggttctcgtgccaaatggacatgcaaaattgtttctgcagataaagtaaagaataaatttggattaaaattttatagaatttgtccaattttcccggttcagcccgacttggtggaaatccaatggagcaaaatcggagaacccgaattgcccgaacgggcacaacagtttggacatcagttggtgatcgaccaagtgcaacagcaggacacgggacactaccgatgcaccggccgattgaaaggggacatttctacggacgatgccacgctgacaatcggtaggatacagcagcagcacgggcgggagaatgtgttcaaatggggtgccattctcgtacattaagcctcgccacaagctgcgcccgcctttgtccattaccccgccactttgcccccggcattgcccgcggcacctgcccacatgccaaagccatccgtaacaccgcctcatcaactggtggacgaaggtaacgctaacgcatggcaatgacacatactaacttcatttcattgttaaaaggccaacaagcagtgttcacttgtctgaccccgggctacgccgactgcgaagtccaatggcattttcaacgcctcgggggaccgctgccgcacggatggcaacaacgcggcaatcagatcattgttcagagtgcacagcaaatccacgccggagactacatttgcagtgtaacgcacccagtttggcaca

SEQ ID NO: 46240 - DNA, 1235 bp, Heterodera glycines
atgagcaaatttactcaggtgccagaggacatggacgacgacctctttgagttggccgccggtttgccaccgaggagcaaaaacaacgaacaggagccgaagccagttgaagatgaaccattgcccgacgccgagcatgttgagctggacttttgtgagtatattatttattcagctttgttttgagctttttatggatctggaattagcaaataccattttctagtcccaggcattctggccttctaagatttcgtccaaaaaggtttccttcctctcaaatactccgtccgaagcgaccccttttcattaaaaaattttctttccttatttgaacgtaacatttcctaaatttccaaaagtatgagtgggtttttagacaactccgacttcaacatgaaggcatgtcccagcaacaaatggcttgtcgatcccgacaatagtgatggttttgcgttgatgtggggaggggtacgcgccaattggggtgttttggtgccggacgaggaaaatcagcgcgccgaaatgccaccaatagcgttccaagtgaaggcaagtggaatttcctgtactttttcagcgcatctaaataattcttatttttacagatcactgaatttctctccctcaaacatttgccgtttgacgaagctgatccgcaccaaatccgtgttggttggtctcgagctgactcttccaatttggtaacattttatattattttaaacatttccaaatttgagaggtattgtttatttaaataaagacattaatatttttagcttggcgaacaacaaaattccttcgccttttcttcgatgggcaataaagcgaccaataacattttcaccgattttgtcgacccgttctttgtcgatgaagtgatcacttcagttttggttagttttgggcaacacattcttgtactttctattaaattgttttcttaaaggatgttgggcgtgccgaaattcgctattacaaaaatggtcaaccacttggcgcggcattcaccgacattcgggtttgataaacgatttgtatatctaatatcaaaaaaattccagtaccgaaccggcgatatttatttcccccatgttgctaccaaaaattgcaaagttatggttaactttggcaccgaaattcctgaatcgattgaagcggccaaagacgagtccggtctttgcttgtggaggtttatatgggaattatctcgcaaaacgcgcatattttga

SEQ ID NO: 46241 - DNA, 754 bp, Heterodera glycines
atgttgaaaaaaagagaggatttatcaaaccgatccacacacttgaggaacagatagaatacatgaacagcgaaggtttgagaggccaaacttttgcgcttttaagcttgtttgcttttcagtttttgccgaaacttacaaaggacgtccaatttgttttatgtggaaacgtaatatgaaaggccagtggaaattgcaaccgccgcctcgacttttttgcattgaccgcaatggtaaactccgaaatgactaagaattggcatttcctgtgtctgattgcatttcccatttaaaggtcgtttcaacgttggaaatgcgtgtacggtgtgtcgtgatgagtatttgttcttcgattatagagtacgttcctcacaatgaccttcaatttccactgttttttagaatcccaaattgcttgagcatttcctttaccccggcactgatcagcccctgcccataattcaaaccggactttgtcaagaacagtacgtcaatttgcaagcccaacttctcaaggccaaagagcacggtcccttttagtttaatcgttggtcttttaaccctcaaattgttaaggtacgtttattttcaacgtgcccttccgtcacttcaattatggtcaatggtatccaaaagatgcgaatgcattaataagcagtgatttgggaggaggatcaaccgagcagagacttgacaaacgtcgaagacatttatccgaatccctcaatcgcatttgaaacacacaaccgggaca

SEQ ID NO: 46242 - DNA, 1887 bp, Heterodera glycines
atgaacccggtttattccattggcactcccgttgaccagcagcaacagcagcagggcaaaaacaatgaagcggcggacaacagtgaaaatgtgccggccaatcaaatgccacccgaccttgacgaggtgtgtttaggctacatgactcaatgctcgagcacacaaaattcgtaccaaattttcatttcgcaattttttctcggcatttgtgtcttgagtccttgaaaaccgattagtttagtgtgtctgtttaaagttaatttccattttatcttgttttgaaatatttttcaattttccacaggctgataccgcgcatcgcgtccaaacggacacttttgtcaattatgcgcccctccgactgcgttccggctttccccaccctgacgaagttgtggaaacgctctcgctcagcagtgtttcgtcgccggaaattcgctataccatggccatccccgacgaagtggtcgacggaggtacagacacaaatgggaaacatgagttttcgaaggtccacaatctcttccatttaggcattccttttccggggattgaggagaggattttaaccccttttctggtccgacaaaccaaaccccgcccccttttttcagatttcttaattaggattcgctttttaccaaattgaaaagttgcctgatttgggtgtcacttggtctattgtataattggtcaattcaaatttaactctcgttcttaggtcggatatccaatcttcagttggaagccgcactgtacgcctgccaagctcaccagcgttttttgccttccggggaaaggattggctatctgattggtcagttttgccactttttggtattttttttaaactcattcataaatttttttaaaaattcctgacccattggctccgcaagaatagatttttttccaaaaatggccgttttgaatttttttggccataaatttcgaatatttcccatttccgcttcttgccccctggtattttcatcaccctttccatccttcggcaaatgccataacctttttatcaactttgtgtttaggtgacggtgccggcgtgggcaaagggcgcacaattgcggcgattattttcgagaatttcttgcgcggccgtcgcaaagcgatttggctgagtgtgtcgtccgatctgaagtatgacgcggagcgagacctgcgcgacattggggcggacaaaattgcggtgtgtgcgctgaacaaattgcgctacggacgcattgggtcctccgagagtggcggtggcatcggtcggggcgtcatttttgccacttactcctcactaattggcgagagtcggcgcggtagcacggcaaaaggtggcaaaagtgccgacgcgatggaaatgatgaaatcgccaacgacacaaaggcagcaacgacagccgcttgtaacacgcggcttcgccagttggtccaatggtgcggccgcgagtttgacggcgtcattgtgttcgacgagtgtcaccgggccaagaatttatgcccaaccgctggctcaaagccgaccaagacgggcaaggtggtgctggagttgcagcaagcgttgcctggcgcgcgaattgtgtacgcctccgcgacgggagccaccggtaaagcgctgggtgaaaacgggagacggtcaggggaggaatattgttagctatacttttttcgatattgtcgctgagatacggcattttatgaactattttgcaactaaattttccatttttcagagcctcgcaacatggcctacatgtcccggcttggcctctggggccttgggctgaccttcaaaacattcggcgagttcatccatgcggtggagaaccgtggggttggtgccatggaaatggttgcgatggacatgaaggtatatgtgtaa

SEQ ID NO: 46243 - DNA, 1421 bp, Heterodera glycines
ttttacgaggaagtgttcaccgaactccaacgcacttatggtcggcaattctaattttttttttgatgagattacaatttttgattttctaaattttcaggtcctgttgaggaattgaacgtaagttggagatggttttttcccttaattttacaaaacatttcaattttaggtttgtgaaaacattggcgagcacatggtacaaattgacatgctcaacaaatcatttgccattgtttttcacagattggcaatgtgtacgtgaagtttgtttatgaggaggacgcagaaaaagccgtgcaaggcctggagaatcgatggttagcatttttgggggaatgaattggaatttggtcacaaaatagagcaaatgccattcatttcctcgactgattacacattttcggagtttttcgtttactacttttggggttaaaaaaaattggtattaaatgagcgcctcataccctgttttacttggagatggttttttgtgtccacgtggaggtactcgctgtgaagaatttaccaacccattttcgattttcaaagaagtttctgcctttttgagacagcgacagtccttgagtttggcttggaggttgcatcccacgcaacgacctttttttacgccgttttttacggcgtgattttcctttactatgccatttgatactagtttccttgggcccatttttctccgttttcaaccctaaggggccagcactgatagagggggggggggtgtgtatattagaggaattactatcattttttgtcacaacaacaaatggcccttctctccgcaggttcaacggccagcccatctacgccgagctgtcccccgtgtccgactttcgcgaggcgcgttgtcgccagcacgaaatttccacctgttcaaagggcggcttttgcaatttcatgcacctcaaagatgtgtcggatgaagtgtaagtctggcgatttacaaaaaaccctagggaagcaaagatttttcgaattaaatttttttttaatttttcagctacgaacgttgttacgccaatcgtggtgcacgttaccgcagcacacgtcgccacgaccgcttttacgctgatgatggctacgatcgtcgagaagggggcaacaggtgggtggacgacggacgaaaaaggaccgccgagggagatcggcgggtggtggttatgttgggcaaaaacttagagccagactcttgatgggggggggggtgctcttcggcctcgctttttcgctgcgcttacgtaaaaaatttttttagggggtaaggtccggcggcggtatcgccctgctaaatttttgtgaatatttttgtttttcttcgtagggatcgcggcgatcgaggaggaggcggcggtggtggtgggcgcgaccgtcgcagacgcgacgaccgaggcgatgac

SEQ ID NO: 46244 - DNA, 2224 bp, Heterodera glycines
atggctcttctttgggttcagcaacacatcacttccttcggaggcgacccgcgggctgtgaccatcggtcattccgtttgaaaatgccatgctcacttggcattttgtttttagttggccacgatgctggcgctgtcagtgctggcattcacatgctcagccctttctcaaaaagtacagcagcacataatgaattccgctttcacctcttttagacctcttccgcggtgtcgtggccatgtcgggtgccgaagtttcgtaccattcgatcattggaaaaccggcattgggtgccataaaaattcccaatggagttgaaaatctttttacacagcctttaacaacacaatgaaacttggccgttttctgggctgtgttcatccggtggcttcggaagtgttagtggggggagggggcaaagggaggaaaatgggggagggtaaaggcgcaagtgaagggggggggggagaggctgtgcccccatattagaattggttgggtctttcagctggagttgcatcctcacccgttccaccgatgacattgtccaggccgtttcctccaccgccgtcccttccattccggtcctttcatccttttatttccattatttgctttaagctttcagatcgaattcaaccgttacttgtttttgccatcggtgacaattatatatttttcttataaaacccattaacacacttcaattgggtttatgggtttcggttggcccttcgtttcgccgtcaggtccctttgatttttctccgcttttgaggtggatggccatgaactcacagcccacccgctttggctgcttaacaatgtgcgcaacggaattgtcaatgtcttttcggtgcccttcctcgtcggaatgaatgcacaggacgggaccgaggccattttggaagaccgcactttgggtgggacggcactctcccaatttggcactttgttcatttgcacaggcgaattcaccgactttctgcaaatcacccgccaatacatgcgttccttcatcatcgaatacgcgttcaagcacaactatacgatgaacagagaagtgccagcgaaagaccagagcagaataacgatctgatcagcgtcccttcaggcggttatcgatgccatcgaatccttctacacttattggcccgatgcttccgatgtttggcaaatccgacggtggttcatcgacttgatcactgatgcctattatactcagccgatcactcagtcggctcatctccactccgataccggctcccgtacctttctctatgtgaacaattacaatttctccatgcagcgtgaaaacactgtggcacataacggcgaagtgcccaattttccggcatgggccggtgaatccggccttttatgataggcatgacttccattatcaggcagctgtcacgactgcgatttgttccttctctttggctttcccttcatgccgcctgagttgctgccaaaggcaattcgatcggtcaattggacggacactgatcgaaatgccagtcaactgttctcctcatttgttcgccagttcaccaaatattcgtttgtcctgccgttcttccatttaattccaaaattcagtgaccccaatttgccaaatgatggcacttggttggcccatcagccacgagcccattggtacattaactttaattactctcgcgggcaaagtctgacagtgccgggcactctctcccgggactttcgctttgaacaggtcgctttttgggagaattatatccccgcagtgagtttctcaagtttttattttaattggaaaatacccattaagttggtcaattatatgaccaccactttctccccggaggagggaagtgttcgaaatgagatggtgttgttcaaagtgagtggttggacttttcaaatggcttgttgtggttatggcctaagaaactgaggaaggcattgattggatgtctaaagtgaattagagccgcgaaatatgcgtacacctccgtgctattcaatcctttcagggattgttcggtgtgtctctgttggttctcatcgctcttttggtgctgaccctttcattgggttacaatgtgtgcactcggcctttgagagagcgttgtggaagatattcggaatgggaggaagtccaagccgaagagagaggagcaaatgtggaaatggcaaggaaaagcacgagggaaagaggaggaggagaaggagctggacgg

SEQ ID NO: 46245 - DNA, 1754 bp, Heterodera glycines
agtgttgaaaagcagggaaataaaaactctaacagcagcctataaaacttttgtacgacctcaattagaatatgctactgaagtttggaaccctaatcttaaaaaagacatagataaaattgaacgtgttcaaaaaatttttacaagaaaagcacttagaaaatgtggttttgtgtacaaaaaatatggggaaagactaaaaatcacgggtttacacaaattggaagaaagaagaaaaatcaatgatttaacaacagcttttaaaataatcaaagggttcaccagcctcgatgctggaaaaagtttctttttctcagaaaggctcaggaggcctttacttttacgggtaaagcgccacacggccaaaactcaaaataattttttcaatagaatagtaaaaaactggaataatcttccagtggtagcggtgcaaattaataaggcaaaggaattcaggggtttactaaaagcaatgagttctgagtaggattttccatgttgccatatttacactatatttttatcacctgtgaatttttaacatttgattgatttatttttattcattttttattacggtattcattttgtattttttatttgaccaactttatttgttgttttctttttggcaccatataagagcactcatgtgcctttggtttgctcgataaattaaattaaattaaacaattgccttatttggccttatgtcttcgtcatgtctaaatttgtgtaactataaagttaaattcatttttccattttctcgatcccttcattaattttaaattatgtatgttttcgtttccccacacggaaaaataaaaaaaacattctcacacctataaatttgtaaaaaaaaaccttaggaaattttttatcagaaaattcaagaaaaaaaatttttagaaaattttttcagcgattttttcaaagttttatgatgaattaataatttttcttaaaaaattttctaaaattcgctgaagaaattttttaaaatttttccttgaaaattttatcaaaaatttctcaagattttttttcttgaaaattttctagatttgagaattttttaatttttttccgggcagaaacgatgcgggggaactgattggagaaacggtggggggaggaacgtagagcaccgtggcgctcacttggccagtgcatatgaaaaatttgtgaggtgagacacctcataagacgcgaaattctacgaatttcaaaaagcatcattttccctaagaaattttaaaaatatcaaaacttttaaattcgaaataaatcttagacgtttttcgagaatttggatgaacattcgctgaaaattttggatcggccccttcgtcaggtcaccgagtttataaagcaaagagagtcagatgaaggaagaccaatgcgccagatttggataaatacttacaaaaataggcgttcagcggcagacattattgtcattactagagatcggtattttgaaaaaagcctggacctggacctggattccatgttggacctggatttcctgggcaaaaatccaggtccaggaaaaatccaggctcctcgagacctggatccaggcctggacctggattttttgaaatttgttttaaaaagcaaacaaatgcttgaaaaaatcaattatttgctagaagcatctaaaaatatctaattaataataataatgtgtttttaaatttatttaatctgtttttgaaaacttgaaaaaacatcggtcacttgaaaaa

SEQ ID NO: 46246 - DNA, 510 bp, Heterodera glycines
atgaatccttcgcttggcaacgcttttgtgccgtcgggccccgtcgcgcttctgccgcttggccgtgacctgtgctcgttggtttggaccgtgtcaactgccgacgcggcacggcttctccaactgtcgcccgaacactttgtggaagagctgaatgggacacttgtaagcagtgccttttatgggtctccaaataatggggtccattttgaattcgttttatttgcacttttaaactttcgaattatctttttccatttttagcaatttgacaactcttcggctaattccctcgtcaacaattcgttggattgtcttggcaaggcactgaactttttgccgtccaaagaatcgcctgccaaatgcacaattccccgcgttttgtcgctgccttacgatgaccgtgccgtgtttcctctgtcccttggctacgcttacgactacattcggccgcgggttgcgcttattgggtacgaaaaattaaatcaatgtggcggcacagatccttag

SEQ ID NO: 46247 - DNA, 1815 bp, Heterodera glycines
atgaggataatgatgatgatgatgtatgtttgtggcacgtctcgccgtcctcaaaagtccattcacattcattttggggtgccaattctgcagatggtagccaccaccgccgccggcagtccgaaagggtttcgtcatcatcgcggtatcatcgcggcacagaaagggaatttatttcttcggctgggttggctaatccatggcttaatctcccagccgggccgcttttcggcaccgcaaagagaagcccttgggtcggcaaattgtatagcgaaatgtcgctcgccaaattattgagtggggtatcatcagtgagctgaagcaggagagaattggaacggaaattgggggggggggagcaaaatgagaatatatgtcttaattttgtgcttttaagagggtcaagaaatggtgaagaaagtgaaatgtcttcccaaaagatattttatttatttttatttctgaataattaatattttaatttacattaaaatcgagaaatattttttaaattaaattttattgaacaaatatttactttttgatatgacttcttaatttttaaaacaattatttaatttaatttatttttttgagttgagtaatatttattgttagtcttttgtttttgctgcttccttctcttttaaattttaagaattatataaatataaataaatctctataaagtggttaaattttaaattggtaatttttttttttacttttcaggtttcccgagaatcttatgaccaatgcatgcttcaaggtcagcttaatatttaatttaaaaattttgaaaaataaatccacttttttctatttcctccaaatttatttatccatttcaatcaaattattttcattaattaattagcgtaatgagtataaatttcctaattactatatttccaggcataggcacaaaacagctcggcgtttgctcgtcccctgaacgacaatcgtccattacgctggtgttccgcgatgtgtccccgctgccgtccgcgttcacttttaggccgggccaatcctacttcgttataagtgggataaatttaaaaattgattactgtattccctaaaatacagccccccccctaaattatagccccccccccccctgaaataaaagccctcttctgaggggggggggggcttgaaaaacaaaagcctccctgggctctatttaggaaaaacggtaatttaaattaaaaaattcttaatttttgaaaaataaaatttttctttaaaaacaaaataatatataataattataacattagaaataattatacatattaagttaaaatgattcaacctcaaaatatccagaaaaagctatataattgattttaaaaaattgcaataatttcaaaaaaattttaattttcttcgaatattctcaaataataaaagaggatcaatttgatgactacaaataattaaaaaataataattagatttatttatttttgactcaacatttttgttcagcaacctcaaacggcacattgatgggattgaacaacactgaaggtggactgtgtgccaccagaaatatgcggctcaaatttgacgttttgtccctggccgatgaagcggatgccaacaatggtacggtaccctaaggctatacctatcgccctggaatttaaaaattttcatgaaatttttgaaaatttcagatacaatgcttcaaattccgcagccacatcatgcacatgctcaccatcatcatcaccatcaccaacatcatcaccaacaacgctatcatcataaagcattggtgcacaagcagcaggagacgcacag

SEQ ID NO: 46248 - DNA, 1752 bp, Heterodera glycines
atttaccatcactcttctttgtcacagattgaactgtttgcggtgtgcacggaacgccaaagtgatgccgaattggaccgtattgttcgcctccaacagtccctttatgcgtcacttcagctccgttttcggtgggtgtggcacagaataaaaggccaagaaaaagggtgcactccataatctcgcctctaaaatttttttttttaattttcaaactgaaattttattgaaaaaattttcaaaaaattttttgttaaattttcttataaaaaactaacaacttttttcttgaaaatttcgaaatttgaaattttttttaaattttggcacttagattttgtcccatccaaaaaaaaatagtgacattttgccaatgtttttttgtctctcctctcaagggtaatggacatgcccagtgaagagttgggagcaccggcagcacgcaaatttgacttggaagcatggatgccgggccgaaaaagttggggcgagctgtgcagcgcgtccaactgcaccgatttccaggcacgacgactgcatttgaagtacaggtgaggagaagggggaggaggacaagcaactgatgagggaggcaacaacaaaccacgattactactgtatttatacaatacaattctatacagtatacagttttagccctgacaatgaggcggcacttcattcgtcccccccccaacccaaccccttatcgtttcctctccgaaatttaaatcttagaaatttttcgaaacaataatttttttgtttttttttaatttaagtgaaaatttaaagaaaatttcaggggggatgcctctccgctgacaccaaaatgttaaaaaaacgaaaaattttccaaattaattgaaaaggagttgctgtttaaaaagaactagttattgtcacatattcccccgcacccctcccccccccccttatttttaatgtctgtccttgatgactgtctgtctgtccatcatctctgtccgtcaccccacccccggcacttttcaggccgtctgccgacgctgccgtcaacggtaatgaaagcactcctctccgttttgtgcacacctgcaacggcaccgggctggcctcaacccgggcaatgatcgcactgctggagacccatcagacgggggtcagtcggccccccccacccacccaaccacctgtttaaacagacacagtcattagtgctgctaattaacccaattatgtgaaaatttcatatatatatttaatgtcgaccgaccgcattaaaagcgccgcctgtctagctgtgcaaatattataacataatgcatttagataattattttattcaattcacgatatctcatttaatggttttaaattaaacgggtgtacgactccccccccctcgcacaaaactttaaaaaaattcaaacttttcaacaaaaaaaaaacataatctatttttaagaaaaaaaaattttaaaatcgctagaaaaatttttcggttttttttaattccctggggggggtgatggtggtggtacggtggatgggactgatccgaagcggattttctggcctggctgagcaagtaaaatgtatttccataattaagtttaatccaattcacgatatataatcccatttaatggcactaaattaaaattatcatcatttaagcgtcaaaagggtgtcaaattgccggacgtaatcaatgaacggatgcacactgaacgaagtgttggcatttattgtatacatcagaaaaatgcc

SEQ ID NO: 46249 - DNA, 1084 bp, Heterodera glycines; identical to SEQ ID NO: 31242
  unsure (1)..(1084): unsure at all n locations

SEQ ID NO: 46250 - DNA, 878 bp, Heterodera glycines
caaaatcgtatttgtgaaaacgccccgatgctgaagggaagtgctgcgcattggactaccatctcgacgagctcactgattgtcttcggcacgactttcccagcacaacgggaccagcggcaatgatagcggagcccatccagggcatcggtggcacagtccaattccccgagggatacctaaagcgggcattcgacgagatccatgccagaggcaaataggcccgaattatttttggaaaagcgaaaacatttcaggaggacttaggatatgtgacgaagttcagacaggctttggccgccttggcactcatttttggggatttcaaagtcaaaatgccgtgcctgacattgtggcgatggcaaagggaatggccaacggatttcccatgggcgccgtaatcacaacaaaagaaatcggtgccagactgatggagggtggccgatacttcaatactttcggaggaaatccgctggcgtgcaccgtggccaaagcagtactcgaggtgaagcaatttcgaaacggaaacccattctaattgattgcaggtaatcgacgaggaaggactccagcaaaattgcttcaaaattggtaattttctgctgagtgaattgtgccgaatcgattcccgccttttgggagacattcggggaaagggtttaatgatcggaattgaactggtcgaagaggatggacaaagggtgttgggcacggaaagagttgagagaatattcgaatgcattcgacgggagggcgttttggtcggaaaggggggaaatgaagggaatgtgctgaggataaagccaccaatgtgcgtgggggaggaagacgcgtggcgatgtgccgaagcggtggcaaaagcgttgaaagaggaagag

SEQ ID NO: 46251 - DNA, 2076 bp, Heterodera glycines
atggctcaggaaatccaaatccatcaagcgctcgcccacccgcacgtcgtcaagatggaagggttcttcgaggatgatgacaatgtttacattctgttggagttgtgttcgcggcgctctctcatggaacttcacaagcgcagaaaggcagtcaccgagccggaagcgcgctatttcactttccaagttagccgagtttcgaattagcttttgccaactttagccactgattgttcagatcgtcgaagcctgcaaatatttgcatgggaagaaaatcatccaccgtgacttgaagcttggcaacctttttctgaattcggaaatgcagctgaagatcggcgactttggcctggccacggtggtggactacgacggggagcgcaagaagacgctttgcggcacgcccaattacatcgcacccgaaatgctggacaagaaagggcactcgtacgaagtggacatttgggcgatcggctgcattctctacacacttttggtggggaagccgccatttgagacggaaactttgaaggtgcttttttgtggttcataacttgtcactcaagtgtttcatttcgtttaggacacgtacaatcgcatcaaggccaaccagtacaccattccgcccaaaataggcaaagacgcggcttccctcatcactcgtctgctggcgccggacccagcgaggcgaccgcgggtcaccgaaattctcaacttccaattcttcacggacggctttttgcccaaagtgttgccgagttcatgtctgaccatggctcccaagttcaacatgcaggcggtgtcaggcggactcattcggcgacccgaagtgagtggaactggcattcccttttgctagaactaacattttctcactattagttggaccatgtccccagtcctcgtgccgccaaaggccccgctttcactggacatgcgccgctagcctccgtccccgagacgaaagtgcctccgcaggcggtggcggtaaagcaggacgtggcatcggtgctcatcactgagatggccgcgggtctgccgcatttgcgaatgtttaattgcagcgattgcttccgtttaggcgagaacaacgatgtgccggccgatttctacttgtccgatttgtacgcgcagctgtgctctctgctgaatacaaatcccgagcggttcagcgaagcggacaaaggtgatggatcagtgattgtgataaatacctgactgattctgattttctcagacgagatcgaagatccgagggcgcaacccttcttttgggtgtctcggtgggtcgactactcggacaagtacggactgggctaccagctgtgtgataacagtgtcggggtgctgttcaacgacaacaccaaagtcattttggacgcggctgggaagtgagtttggctccgttgaattagaaatgccaattccgttggccttcagtcagttgcaatacaccgagcggaacaacaccgaacacttttacggggccaacaaatacccgcaggcgctggagaagaagatcactctgctcaagttcttccggtcgtacatgaacgagcatctgatgaaggcgggcgccaacattaagatgcgggacggcgacgagttggcgcggctgccctgcctgaacacgtggttccggacaaagtcggcgattgtcttgcatctgagcaacggcactctgcagatcaacttcttccaggtgcgcattgaataaacacatgaatggtctaatattggtgatttctgcacatttattatgggatttgtcttttcaggatcactccaaattgattgtgtgtccgctgatgagtgccgccacatacatagaccagcagaagaatgtctttacctgcaaattccaatatttggagaaatacggatgtcctaaagatttgtgtcagagactcaaatacactaaggtaattcgcttgatgaaaactattgaataatcacaatttaggtccatattttttgcaaattcaggtgatggttgaacgtctgattgcgcggcatgaaaatccgaatgcgatgactgcaaaaagtggcaggcgtgccgaagttgtgccgcagtag

SEQ ID NO: 46252 - DNA, 1108 bp, Heterodera glycines
atgtgctctggcgtcccccagggctctgttctaggacctattttgtttcttatttatattaatgatttacctaagaaaattccgaaaggaatttttatcaaactttatgcagatgatgtcaaattgtattcaatacatagaactaaaactgacagagtgataatgcacgaagctctgaggcaattgtccaattggtctaatgaatggtgtatcgacatctctattaacaaaacctttgttttgtacttgggcaaaaataaccctagagaacaatataaaataaataacaacacaatttgcgaagtggacaccattcgagacctgggtattcttattgacaataaacttaaacttactgaacatataaataccgtaactagaaatgcttacggtagaatgcgatttttatttcggattattaagtcaaaaagaatttcaatatggaaaatcatttttatgtcgtatatccgtcctcttcttgaatatgctcctgaggcatggaaccctcagttaaaaattcacattaataaaattgaaaaatgccaaaagtactttactcgtatagctttaagaaaatgtaatttgccatatatcccatatggacaaaggcttgaactttttaaattaccaactcttgaaaaacgaagaaaaatttttgatattcttacaacatataaaataattcatggtctcacccacctagatccaaattccatgtttaaacgcactaatttaaatactaggaataaatcattttttgattaaattccaagtttcaatctaagaaatcatccatgtccttcgtaaatcgatcagttaaaagttggaattctcttgataaaacaatattagcaacaaattcgattaatacatttaagaaaattttaaatattataccaatgcacaaaaatttaaaagttgggagggattatccataattgacattgatctcatttatggtaatttgttttgacagtgattatttttatgatttattttcatttattgcttgttttctttattcacttgctctgtttcgctataattttgacagttacagagtaagtggtccccgcccttctgtgacttatttttcttgcttaataaa

SEQ ID NO: 46253 - DNA, 2464 bp, Heterodera glycines
aaagatgcacgtggtgggcaatgccaagccaatgaaatggcaaaagggcgctgctcttcggcggacgaaggcaagcaaaatgcgcagagggaggaggggggcgcgtacaatgtgtggaccaaaaaggcgttggaacgagcggctgcgagcgcctccattgttcgtcgtttcgttgctttttgttctaaatgaaattcatttccccgggattatatttagccaaaaagtccggtggccaaacgcgaagagaatgacaagccggtgaaacgcttttaccccctcaacccgtgggagaagcagcaaccgaacaacaacaacaggcaaaacaagggcaaggagaacggcacacgccagccccaggtcatttggcgaaaactacctgacatttgacgatttgcaacttggtgactcgacttttagagactatacacttagggattccgacatttgaggctttcggcaattgtagggattttaatttaaaaaaatatttaacaaaaatttccaaaaaattatttcttaacaaaccaatttgacaatctcgttttcactcgaatgctcttggtgaggataagcttttaataaaaatttgtcgaattttcggctgaatacttagtattttcattaaaatcccccattgtcgtgtcccaaatgtcgggtcaacaaaagtcgctttataccaaatgccgagtcccctatgtcggaatccatgtccctaaaagactggtccaaaagttacaaatacccaaattttgcgcgatgcttggcactggagtggtcgaaatagaaaagaacatttggaaagaaaagtcccaattttcgtgtcttcaggctatgcctgtcggctgggtgctcggcgttcgttccaaaaccacgtccataaatgaagatgccggaccaagccatccgtcgacctccgacgctctctcaacaacggtcaagccaccggcatcgtcgtcgtcgattgccagcgttcttcctcctcatccctctttctcattgattcaagaaaacgggttcgaacagcgggttcgtttttcaggagttattaataaatcgtcggattctatggttgccgaatgatccaatccatgttcaggtgtacactgattggaggagtcagtgcaaaaaacagcgtgaggcacttggctacgacattcccgaggtcaagcattttttaaaaattatctcaaacattcaaataaaacaggccagtagcccgaaaaaaattctggttaggggggggggtggaatccaaaggccttgccattcgggccaaaaatattttacccagtgttatttttcaaaattttcagcgccgggagaaaaacaggaatctgtactggttttgggctaacaaatgacaaattttgcccttttacgggtctattttttcaaaaataatggcaaagtggggtccgacggtgccgatgggcgcgccaggaaattctttgcaaagtttattgaaatgataagaaaataatacaatttttttaaaaattttccaattcagatgcatacgctctatcggttttggtctctggttttgcgggacaatttccacaggtcaatggacaacgagtttccgtaatttgcactggaagacgctgaccatgggtaaacgaattcaaaaaggcgtcttctaaatgctttacctcccattcattcatccatccctttagccttcggtatggcattgaatcgcttttccgtttctacagctatgggcttgagaagaagttgcgcccgaagctgtacaacgatttccaagaagccactttgcaggacgttaagcgcggacacacttttggtctcgagaaattcctcgcctttttgaaatgtctctggcgtttgatttttttatgtatttttaaacgaaaatacgcttttttcagattgtaagtacagcactcaattggaggtgatgccacaaattgccaaggaattggccaggtaccgcagcaccgatttattcgccaccgaagtgagtgaagtggaaggttttactcggaccaggccgttttctacgagcataaattgttggctataactttttttttctttaccaacaaaatccgtcagtcttgttatcattcggcagccctaagtgtgtcctctattagcctgcaaaatttcagattaaaaaaagttatggtccgaagagttaaaaaaactggttgttcgaacgaacattttttgccataacttttttgaaccttaacgaaatttctcaaaatttgcaggtgaatagaggaattttagggctatcgaatgataccaagattgttggatttggttggcaaagaaaaaaatgttatagccaacaacttgcttgtacgaacacgcccctaacccattttaatgtgtgaaaattgaaaatatctatttaagccagcgaaagccgcaaaactcgaattgcagaacgagtcgaagaatcggagtggcggccgtaatgtgatggtcg

SEQ ID NO: 46254 - DNA, 418 bp, Heterodera glycines
aaaaactattataagaatgtataagacttacgtcagacctcaattagagtatgctgttgaaatttggaaccctaacttaaaaaaaagatatagaacgaatagaaaaagtccagaaatttttcacgagaaaagcctttaaaaagtgcggacttttacatagatcatattcagaaagacttgaaatctgtcagcttatagaattagccaaacgaagaaatattgctgacttaactatcgcttttaaaattatgaagggttttacgagtcttgatgctagtaaactttttactttttctgatcgatcctctcgtaggccattacttttgagaatgcggcgcacaaccgcaaaaagcaagaataatttttttaacctataggtaagaattggaataatttaccaattgttccaattcagaca

SEQ ID NO: 46255 - DNA, 1295 bp, Heterodera glycines
atttttactttagtaatattcccatctgtctttttcaaaattacttttgttcgcaatctttcgttaaacgaatagtgtacacacaccgatcgggaagacaggtggtaaaagtaatggcattattagttattagggcaaattatggaaaaaaccaacagtgttgaatccgggatacgacttggccgaaatcaaaatattcactccagaatttattttcattttatcctttgcaggtaaaagcaaaaaaggaggcggttatgaagaaaaagatggaattgggcgacgatttcaagtccaaatacgagttgaagactccgaaaggttgccatttttaattttaatataatataattcaccgatttgtatagaaaaatatccggcccaaaattttcttgcgccataaatcataaattatgtctaaaaagttatctgtctatcgaaatttttcctttttctgtcatctcgaatggattgtattagcatgttggattttaataaaaaaatgaaatgtcaaattttttttttactaggtactcgcgattttggacccgaacaaatggctactcgtgaaaaagtcctggcaattgtcactgaaacttttaaacgacacggagcggtgacaatggagacgccggtgttcgaactgcgcgaagttttgatgggcaaatacggcgaggagggcacgaagttggtctacgaccttgccgaccagggaggcgagctttgctctttgcggtacgacctcacggtaagttaattttttggcaattttatctttccacaattctaaaaatgaagaaatgctttgcttcatacaaataaacgcattcgaatatatggacaattagcgggagttcgttcattgttttaaataaagttgtgacaatttttttaattcgtccaatttaaggttccttttgctcgttatttggctgcaaataaagtagaaaagatcaaaagatatcaaattgccaaagtgtacagaagagatcaaccagtgatgacaaaaggtcgttaccgggaattctaccaatgtgtgagtgttgaatttatcacaaaggattggaaatgtcacccaaatttaaaattaggactttgacattgctggaaatggcgaagtgatggtgcaagaggccgaatgtttgaaaataatggacgaagtgttgaccaagttggacatcggtgcattcgaaatccgagtaaaagcgaaggcgccattcactgctctttacgcccttcccctcagataaccaccggttgttgttggacggagtgttcgctgctttgcgagtccc

SEQ ID NO: 46256 - DNA, 844 bp, Heterodera glycines
atgacatgtgacacagtcaacagagtgatggccgacccggaaatacgcgaacttatccagcagcagtggcaaaaggttagtgaccacagccaagggcagagatagataaagcgatccctttgggacaggattcccaatatgagttcgtcgctcccaaacggccttttcttcggatgacttatgcggaggcaattgaatggcttcaaaagaatgaagtgatgaacgaagaggggaaacccttccaattcggcgaggatattcccgaaggccctgagcgatttatgaccgacacaattggacaggtctttgaatccctcgtttttctttcacaatcgcccgttcccttcagccaattcttctcaatcgctttccgcatggaattaaggctttttatatgtcacgttgtgcagatcaaccggaattgaccgaatctgtggatttgctaatgccgggcgttggcgagatagtcggaggatcgatgaggatttggaaggaggacgaactgcttggggccttccaaaaagccgacatcgatcccaagccatactactggtacgtggaccagcggaaatacggaggttgcccccacggaggttttggacttggtctggagcggttcgtatgctggttggccaatcagcatcatatccgtgatgtgtgtctcttccctcggtacatcgggcggtgtgcgccgtagcttttttccgtctttgaaaaggaccaaaaacgaacccatacgaatatgggtattgttcatttttggcgttaaaacaaatgtatcttctaaattgtgcattttttttgttgttattgcataaagggataaaacacatgaatgttcaca

SEQ ID NO: 46257 - DNA, 3000 bp, Heterodera glycines
  unsure (1)..(3000): unsure at all n locations
tatttntgtggtctaataattgaaaatatgtgaaacccccccagcattcatttcaatttcttgaaaatttaaatttgctttatgtgaaaattccaaatatgtaaaataatggcattttctataaaaaaaagttatttaatatacataaaggtatgcttttaagtataaagacattaaaatttcatttcataatcaaattaaaaagtaaaattttcggcaaattatcccttagaataaacttttcatttttagtcccaccacttgttcaaaatcgcgaaatatggagataaaattgcgaaaatctcaaaatggacataaaatggcaaaaatatggacataaatttttcaaaattaggggtacaatttcttaaatttcttcattttcgctgaatgtaattaaaattttcaaaaatgggaaatatggtatcaaagccattttagaataaaaaatacacgataaagccaagatttactcatttttagcgaaaaatcaaccggaatttttttgcttatttttgacatttcaaaaagcttttgattctgtccctcacaatttactattatataaattagaaaaaattggtattaggggcaaacttttaaaatggataaaagaattcttaagtaacagaatttttcgcgttaaaataggggattcattatcctctataaaaaaagttggctctggcgtcccacagggctccgtcctgggtcccttacttttcttaatttatataaatgatcttcctgatgttataccatcaggagttaatattaaattatatgctgatgatgttaaaatatatatatgctataaaacaagatctgaaattgaaattatgcataaaacattgcataatttatttgaatgggcaaataaatggcaaataaaagtttcagttcaaaaaacttttatattatatttgggtttcaaaaacccaaaagaaacatataaatttgatgggaatacaataaatgctgtggatacaattagagacttaggggtaaatatcgataataaattactgttttctgatcacattttacaaataacaaagaatgcatattcacatatacgatccttgtttagaataataaaatcaaaatcttcaaaaatttggattattttatacaaaatttttaagccatctggtcgctttaactccccctcttatagacttaacacaaaatataacaaaaaatatattccatttacgtgagggcaaccaaactgtggaatcaattagataaagaacttgcaaaaataaattcattaaaacaatttaaaacaaaaatcaaaaattctttagagtaattaaaagcaggactgaaaaaaattttttttaataaatagttacataagcgattcgataattttgataaatttgagccgctttgacttatctttattttaattgtgtgacttgtgatctctcttttaatattttattcattttttattttatccgaattacttttggacaattaatttatacatatgttgtccacaaagtaagcggattttcccttttgtggaccttttctttattgaataaataaataagtaagtgaaaaaactcagtgaaaaataatatagtagaaaaaacttatatgaaaaatatgtcaatgaaaaatacatcagtgacaatacgtcaatagaaaatgctttaatggaaaattcgtcaatagcaactttaatgctaatattaacataacaaatttttcccaggcggcacttatcggcaccgctggactccaaaattaaataaaatgccgacgctaatttaaaaaatcatttattctggtttttatataaaaacgaaaggacgcattgatttttaaatggccattgccatgcaactaatggatacggtaataatgccaaatcaaatcttaaggtatcaaaaaaattcccaaatattttcggctttgacttgaaaaatgacatactttttaatacagcttttagaccggtttaacattagtttccaaataatgctgaatcctgtcaactgagattttaccaaaatcgttaagattgaccgatattagacaaagttacgacaaaaaacactttgattataaacacatgcatcatactgtatatcagggatgggccaaatcgaatgataccgaaccgtcgcacccagtaaaaatggtgaggaaatcactccaaatggtactcttttaaaacgtagaaccaaaagattttcttgtgtaattggttttcttatatctcttacccaaaaattttacaaattctctgtcttcctcttttaactacaatgtccaaaatgctcgttgaatatcagtccataaagcaatttttggtattcgtgaacgcattaaaagccctgggagctgtggcatttcgattgggccacgaaaaagcatgtcatttaggcatttaccactcctttttttgctgagccatcataaacaatccatggctttatttcccggtgcgaagacacaatgatgagggagaaaatgttcgccaaaccattttattgaagattcttcgacaatttgctcttttaaattttctttaaatgactcttccaacgctttaagctgacttggggttactctcattttttctaacatactcattaaacgccggtatgctatggcaaaatttgttggtaattcttctttagggcttttccatgaccaacttaccatgtatctcccattttttcgttgaaccgtttctttaaacattttcaaggcaatctcatcatccttctcttccgggttatcccatactcccatagtttctaaattccaaaattgttttggttccttattctttacactgattgtggctgttatattttcaaataatgattccaatttacccgaattatttttcatttgaccgcaaataatagggccgactgatgtgtctaccttaaacaaatttcctttaatgtgttcgacccctttaaagaacttttccaaaattctgccataccaatcagtatgtcaggtctttca

SEQ ID NO: 46258 - DNA, 2971 bp, Heterodera glycines
tttccggaaatttagcacttgtgacacgtcaatatgtggcagacatgaccagagcacggttggaaggacttttgaacgcttttcccaagcttatcacttcggataaaggtaaaaatgaagtcaatttttgtcgaatttagtttttagctcagcgccaacatactttcgttgagacaaattctgtacgatatgtctatcagccgatggacaacatttacatggtaattctattgttttttgttcatttaacagttaattttcaggttttgatcaccacgaaagcatctaatattttggaggacctggagacgcttcgtctgttttcccgagtggtgggttagggttattattactaacatttgaatcagagcgcgggaaagatttgttctcccttgaagggttcgaggcataactttgaatatacacagtatgcgataaaagggccccctcaccaatttccgactgcggcttggctttttcaaactaattctcattcattcatttaagtgcacgccataagcaaaatttcttatcatttacataaacaaaacaatagctttttacactaaactgaccaaacaaaaaagcaaaacaaacatttcattttacaaatcattattcaacaatgtgctatctctaaaacatgaaagacacagtagtgtgcatctcaaaccaatacattttttaaaaaacttgacaaatttcagttctgtgtctcatggatgagaggcacaatagtgtacatctcaaacaatatattttaaaaacttggacaaaatttcacacttctgtgggtttacaaaacttttagtgtacatcgcaaaacaattcactaacaaagaattcttttgacaaaagttcacactctgtgggtttctaaaacttggtaggcacattagtgtggatctcaaaacaattctaataattacatataacaggtaatatgattgactaacataagccacacaccacactaatgaattttctaaccaataataacaaataattcatttaataaattcaacatttttctgacaaatcaacaattttaaagcgcaattacaaaatgaaaattatatccgtatttgataatgtgtgaggatcacaaatataattaaataacaataacgaacaaaatatcaaaaatcaaacataaaatacgtaatcgaaaaggtatgagtcacaaatcaaatctaagcaacggacaacaaacgaaatactacccatttttttgcgacttcttaattggctccaaagtttccgaactacgacgtttaattggtgtcgtcaaaatcgcctcaagattaacgcgcccagcaccaattttaacggatgaaatctcgcaatggagctgaaggcattcatctatgataataaaaaaaacttgaaaactcaaattaaaaccaaaggtaatgccgacacaattacaattaccttcaactttcacaaaaaaaatttgaagttcgatctgtgtgttcttaacgcatgaaccaagacgttctaccaattcttcgccattgacgtacaaatcagccctcattcctttcttgtccgcaacgactgcagcgaaatgtttcccgactggcgaaaacgatgaagcgagagcacaattcattgctttaaaaaattaaaagtcaaaaacatttatttatctctcacacaaaagtcacagaacaaaccactaatgttttatcaaaaacatgacccacattattgtgtcacacgaaagtcacacaacaaacactaatgttttatcaaaaacatgacccacattattgtgtcacacgaaagtcacacaacaaacactaatgttttatcaaaagcatgacacacattagtgtctcacacgaaagtcacacaacaaacactaatgttttatcaaaaacatgacgcacattattgtgtcacacgaaagtcacacaacaaacactaatgttttatcaaaagcatgacacacattagtgtctcacacgaaagtcacagaacaaaccactaatgttttatcaagagcatgacacacattagtgacttacacgaaagtcacagaacaaaccactaatgctttatcaaaagcatgacacacattagtgacttacacgaaagtcacagaacaaaccactaatgctttatcaaaagcatgacacacattagtgtctcacacgaaagtcacagaacaaacactaatgtttatcaaaagcacgaagagtatattattgctttataaacacttttacaaaccaagtaatatattataaattaataaaaaaaattaaaactcacaataaatgcaacccgaagtcaatttctcaaatgaatccgcagtcgcaatggcacattgaatcacctccattcttgtgaaagtcatcaccacaaattcataatccagtggcgtaacgtaaattgtctttccatcgaaacgctcttgaaagcgttgagctttcagcatgtaaaatttgacgacctgtatttagtaaggtaagcactgtaaaaagaaacagcaaacttacaattccaagggaacaaatttttgaaaatttggacgacacgctcttaaattctgtgagaacaacattctccccagaagcacacgccaacaaagccgtcaacttcttctcagacggtaaaatgcttacaatctgcccacaaaaagaccttaacaattttacttaaaacaaattactaattcaagcacttacgcaagctgagtgccacatggtgtggctttgagctcttccagagtcgtaagcatggcaacaggctggcaccagatttgaaaaagcctaaccggtagaaaaaatgagccgtagcggcagaaaaacaacgataaattgtttagtcaccagatttttgaccaaactggtagaaaaaatgagccgtatcggcagaaaaacaattctctaattgtttaacaattctaaaataaaacaaaaattaaagtaatatatgaaataatgtgtatacaacaaaaata

SEQ ID NO: 46259 - DNA, 1311 bp, Heterodera glycines
atggcatttcacaaaattgacactgactccgtgaactcaatcaccaatgctttggactttttccgcattcccccgaccaatgtgagcgtctcttcgtccaaagtgtttgagcttctgcccagcaaccctctgaccgacacaccataccacttcaaactccactcaagccaaaactacattgatctttccaaatgctatttgctcaccgagtttcgaatccataaggaaaatgctaatggacaacttgttaacctaaccattgatgatataaacattgcaccaatccaaatgattggccaaactttcatccgcaacataaaaatgagcatcaatgggcgcgaaatattcaatgccaatgcactgatggcctacaaaacatatttttcacatgagctttcctattcaacaacggcaaaggactcccatctgaatgccgcggggtactaccgagacacgggcgactcactggaaatgggagacggatgcacagcgcgacgtgatttgtttgcgaatagtaatgtagcccaattcattgccaaaattgacaccgacctgttcaatcagccgctgtatctgatcaacttttgtgagctggacattgaaatattacccaacgacaacgaatttgtgttaattgcgccgaccgggggtcggtaccgtttcgaggttgtgggactgaaattatatgtgaaaaaggtgtctctgatggacgggttggcattggacattgcacgaaaattggaggtgaagcctgcccgttatgcagtgaggaagacaatgatgaagtctgtgttcatcagtccgggtcggtatgagttcacagccaatctgttcatggaccaaattccccgtcgtgttacaatggggctggtggcgaatactgactatgtcggctcaattaggcgcagcccattcaactttcaaccatttaatgtgcgcgagatttccattgttgccaatggtcgatcttacccacaagcaccctatgacttggactacccgaacggaaagtatgttcgtccattcaatgatatgaacgaagcggtgggattcgcaaattcatctgagagcaatggcataacttttgcccaatacggtaaaacccattgcatttacgtgttcaatttgaccaacagcggggatgatcaagcggcactgtttgatttgataaagaatgggaccacagcggtgagcatcaaatttaaccatccagtgcccgagggaggaataatgttggtggtgatgggcgaatgtgactctcttgtgatgttggacaaaaaccgatcgataagcaccgatatcactatttaa

SEQ ID NO: 46260 - DNA, 799 bp, Heterodera glycines
acgacttggacattgcgcctgatttcttcgatttcttcttggccactcggcctctcctcgagtccgaccgctcccttttctgtgtttctgcttggaatgacaacggaaagaaaggactcgtcgacctctcttttggggcgtcgcttctcttccgttccgacttcttttctgggctcggatggatgatgaccaagtcattcacattcttttttgttgaccaattccaccagaatttagggatttttggaatgaattgaggccgaaatggccacgcgctttttgggacgactttcttcgtgagcctgaacagcgcaagaatcgttcgtgcattcgtcctgaaatatcgcggacggcgatgactgaatttggacgcattggagcgagcaagtcatctcgacttaaaagaccacgataacatggaaaaacccttcaggggtctgtttttcaaccgacatttgcgacgagtattcctcaatcgaatgcctgtgaattttacgcggattgatctcagcggttttattcgaagtgaatatgacgccagtttcttggagagagtttattcggcgcaaaaagtccaaatggaaaacattttggaatggagtaaaaacagcggagattgtcgaattgagtacgaatcgatggaggaatttgtgtcgattgctttgagagtgggcgtaatggcggactcaaaagccggggtgccacgaacggcgtaccggggagtggtcacgtgttttctgaatggcacgcggttgttcattgcgccaccgaaaaacggctggaacggatacgaccgaaa

SEQ ID NO: 46261 - DNA, 1626 bp, Heterodera glycines
atgatttcaaatgctgagagtcttttggtcatgtttatctcccccaaggatcgcactgtcgttgtccgggagcaggacggaacgctacgaacggcgttgccggaagaacacgatcggatgaatcggctgttttttgtgcaacccaatcggcctgtcaacgaaccgccgctgtttgcaatgaccgacgaatggttacaggtgcccaagaaaccctttttttatataaaaaaacaaaaaaattttttttattgctctggcaaattggcatccaattactgaccattcacaatttttaggccctaacttttttttcttactttgtcaatgcctaatttttggtatcaaacgaaagcttaaagtctcgggaatttataaataatttgcaaatattgacattagaaaaaaaaatgacaatcagagaacacgacaatcaactcttttttttcgagtatagccaagaataatttttgccgttgcttttagcccggaatttaggtctatcaaaaactatagactttaagtttattttgataccaagactttttaggcattaacaaagtaagaaagttaaggcctaagaaattgaggatggtcagtggttggacggtaagctgctgtatagccaaatatttcagatttcgcaatttttttgaattttaaaattttttcacatcctttaactagagtgccacgggaccgggaattttgggcaaacccgggaccttttcgggttgaaaacccgggaatttttggcaaacccgggaccgggaccttttcgggttgaaaaccttttccccttttttccagaagacgctggaccgtgatgagcatgagtttgtgctggactgggcctgtcatttttacgagccggacgctcccaaatttgttgaggtccatcattttttgtcagaaatcggtggcatttttcggggggactggacaaaatctcgccgccggaatctcgccgggacaaaatctcgccgcagaaatttcaaacaaatttttcaaggaaaaaattcctagaaaatttttaataaggaaaaattttcaaaaaaaacttaacaaatattttttttttttgaaattttcttataaaaaattttctaagaattttttccttgaaaaatttctgtttgaaaaaattttttttgaaatttctgcggcgagatttcggcggcgagattttgggatgtaccctttttcggaatttttttcgtaattcgaaaaatttatttcactcccttcttttcttttcaaaattaaacgactttgtttagctttgtaagtacatttttgaccacacattggaaaatgacaagttggacgtgctgtactccaccagacatttcggcacattggccttctatttggtgatcaacggcaaaatggacaaactattggaattctatgagcagaagaacaggtggtcaccagcgttttcatatcatcaaaaagaaaagttaccatttcccacaaatccttttgatcacatttatggccaaaaaggtggaaaatctggttttttggaaaaaatttatgtctcaaatcatgagcaattttcagaataagcataaaaattctatgataaaactcgtacgctttccatataacccgctaatggattaa

SEQ ID NO: 46262 - DNA, 1400 bp, Heterodera glycines
  unsure (1)..(1400): unsure at all n locations
atgcagcccgacctgcagcctccctattgcgatggtcggtcgccaacgctggtcaatcggctgccgcctttccattcgaccactccgatgatcacgacaatggcacagacaagcgcaaaatcagtggaaaagacaaatgaagaggaaatggcacaatcaaagaaaggaaaagcaaaagcgacgacagccgaattttcaggagatgaaaaagaaacggacgaaggcgaagaggaaaaagacaaaggaggaaaagtagaaaagaaagagaaacagcaaaaaggaagtgacaaggaaaaggagggacaaagacaacagaagatactgccccaattggagcaaattgaagaacagacggaatggcaaccggtgagagaggaggaggcaaagaaagagacagacgacgaaagagcacagcaagacggagaaaatgaaagaggaaaagaaaaggagcgtcaggaggaagagggagccaaagaaaaagagggaagggaacacgaacaacaaaagtcggcacaacgcaaaaagacaacgaacgtcccgggcaatgccattgagccggcaattatcagcagtcggaagccggccattgtgaccatccaaagcaaagagatagaggaaatgccgccggatgcatttgacgatggcagcatcaggacggcaccgacccctcgggcgcaacaaatggaagagttggagagagaaatatccggaagcattgtgccggaactgattgtgccacaagtgatcgtaggagggaaacggaaagaggaaaaaggggaggacgaagaggaaaagggagacggaaggcaaaaaggaaatggaaaacggaaagaggaaggaggaaaagggaaagaagaaaaaggggacaaagaagagcaaaaaggaaaaggaggggaaaaagaaaacggaaaagggaaagaggaagaggaagaaggaaatggcagcaaaacatcggcatttttgcaagagaaaaccgacgaacacaacgccaatggcaatgataaggtattatcgtgttagaagaatgaatctgaacagaaattggttaagggaacaacaaattccaaggcgaaaaacgaaattcgaattgagccaattgggacaaaaggacggacaaatgccaaggcaaagcctacggcaattcccgcggaggaggcagaagagggccgagaagacgagcagaggcaacagcaagccgaagaaaagccggaacagcacgagccggcgtcgtcgagtgccgtgccgccatctccgccacaaaggcaacggccgacgacccccgaggcgaagagaacggcacggccatcgacagaaatggcaacaacggaggaacagagggaaacaccaaaagggaaaattgacaaagaaaaggcaanncactcaggaacacaccagcagaa

SEQ ID NO: 46263 - DNA, 2008 bp, Heterodera glycines
atgactttgcttattataaagtcttatggagttgctcagagagtcttgactgtggatggggtccaggaatttcctggattggtgaagattgtttggtatttcaatttttataaattatatcgattgtgcaaaattaaggacgcggagtccttggaaaaattttacattgcaaaaaatgaagaggcccacgctgaattggatgccgttgaccaaatactcaatgagccgtttttattaggaagtgcacttgcagcagctgcagttgatggtggtggtggtggtggtgatgacgacgttgatgatgctcttataatagcgggagaggatgtaatcaaattttttttgaatttttactattttttcaaggcaaccgggccgccaaaaaagagtacaaaacgaggtggaaaaaagtatcgggctttgagggagaaagcccaagcactgcgtaacactgccactgaagcagcatcaacattgtcatcttcctcatccgttaatacctcgatgttcaaaaaaatgtcgatagagtatgcacgaagagttgcccagctgcgtgaacaccgaaaaaagaaattaccgggtatcagtgaggagttggtcaatgtgagaatgggttgtgggttttaaataaaataataaaagaattttaaaattaaaataatatttagtataaaattcaaaagtataaatctcctttaaagaattataaaatatgattatttagcagaaatctaaatcacaaaatttatactaaatcaaacgaatttgcagttgtttaccctaaaacattatgagtactccactgcacgccttcaacgcccggtgtccgaggggttggcatcagtggaacaaattcaaaattttacggagggcataacatttcaaggggtacacaatggctcagttactgctgtgcattttcaggcatttttaaaacaaatataattgtgtttttaattttcgtcgcttattttcagaaaaattacattttaagcggtggtgtcgacaaaacaattgcttttattagatttgatgctgatacccaacggagaacttttttggggcattcgtctaaaatttctaaagtccacctacaccaaaacttagagacatttgtctctggctcatttgattcaaaggctggttcatcttgttaaaatatttctgctaattttcaattacgtccccccccccccaaaaaaaatttttttttgtttcattcaggtcaaaatctggagcactgaacaacccaatgcacttcatacaattgctattcatggaaaagccgtcacagacgtatccctgcatccgactggcgattacgtgctctgttcctcagaagactcacactggtcgtttattgatctccacgctggacgtccactggtcaaagtcaacaatcgttcttcacctttgctaaccacattactcgaatttaaaaaaattttctcaggtcaaatctaatgatgatttgctgggcatttgctgtggtcaaattcaccccgacggactcatctttggaactggaggaaaaaatgccatcgtcaaaatttggaacatcaaagagcagaccagcttggtccagttcgagggtcacaaggaggcggtgggggccatttctttttccgaaaacggatattatttggctaccgggtcaacggacggcgaagtgaaaatttgggatttgcggaatcaaaaaactgtaacctgttttgcgccttacgatgttaaaaaatcggtgaatgacttttaaaatcaaaatttttattttttatcttcaaagattaactgcctcacgttcgaccagtccggcaaatatttggcaatcggaggagagagtgtcaaagtttatggagtcgaagaatggaagcaaattttggaaatgaaagcccatacccaggaaattacgggggttgcattttcggaagatgcaagaatggtcatttcgtcaagtcttgacggaaatatttccacctttttttaattctcattttgcaattataataaa

SEQ ID NO: 46264 - DNA, 591 bp, Heterodera glycines
  unsure (1)..(591): unsure at all n locations
aaaatgcagagacttgctaaactggccaatactggcggacttttaattcctttgtctggtgccgttcagacaatttcgacgaggggcgttcttcgtattccgcactgggagaatcacatccgtttcgacccccgatttggacgcaagcgaccgtgtcaagatgtattggaccgattcgcaaggctgaacaatggtcttcttctttttttatgcttcattttcttttaaatttacaatactttccataaaggtttgtgggtgcgatcgcgacaaggcagaaacaaacaagtttatcagaaggacgagatttttcgaaaagtcaatatgcagtgggacacgtgcaccaaaagagaatgtgcaatgcttgacaaggtccccttgtcatgacaatatttatcttttcagcgcactcacattgtttctcttaattcaatttgtgtttagcttatgactccgttttggcttcgtcccaagcattacgtcggtgatccaatggagccttatcacacgcngtatgggatcactttcgcacgtgtcgatgatcaaaaacgtcttgtgcgagaaggnnccaactcctgctttgacgattga

SEQ ID NO: 46265 - DNA, 1524 bp, Heterodera glycines
ccaccccaaatggaattgatggcacaccaccacaacgaatcgccacccgttggacgattggctccgaaattatccctttcatcgacgcccggcacaattagcggaaatggtccgggggacaatcaaacgacggcatttactggtgaattggcatttcaataaaactaattaagagaaagtttgcagcgtaacgtaatattttcaacccattcattcagaagcactctctccggaccattcacaacaaatggctgtgatgcaacaattggcagcccaacttggcctttccaacggcggaaacgcgacggaaggcgaaaggaatgcgttggagcaactgcttggcagtggcggactccatttggccgaactgatggcacacgctcaaaaccagcaacagaacactgacatgaacaggtggggaaccactgactacgcgttgtttttgctctgatcattcttggcatttctttctgcctgatcacggcctttgaccatttccttcgtcaggtgcccttccccgtcgtccgtccgttctccgcccgccactctctccggctctgacctccaccaccaatcccagcagaatgtgtcctcctccgtcccctcctcgtcgtttgcttgtgcacagtgtgccaaacactttcccagccaatccgccctcttccaacaccaattgatcgctcacatcggcggcaccgatgcgccccagcagcagcaacagtcgaccgccagcaacgacactcagtcgactgttaacgcattggcaatgttagcagctgcgggaattaacgggggaagtgggacgacgcaacagcaacagcagcaattatttggtgagaaaggaggggacaattgaaagttccaagagcatcagatgagtgggctttaaattcaggacagttgctcggctccaaccctttctcacaaggcacaacgccttcgctgatgttcaacaattcgtccgcttttggcggaattaatccgacagagtttgacggtgccgcaatgttggcgaaactgagcgcagagttcgccgcggttgcccaggcacaacacggtcaaagcggcgctatttcagccacaacggtacaatcgacgggagggccgtcgacgcagcaaaacggagcaatgggcaggggacatacgccggcgccggtaaatttctttaaagttcggaaagcaatgaatttataattgaaattcattccccctttttaatgtttgccacaatttcagtccaacaaaccgccgcctcagaaacgacaatattcctccaccagcaaaaacttttgcgacttgtgcaacaaagaggtgtgcaacaagtacttcctgaggacgcacatgctgaaaatgcacaacataatcatagacgagaacaaacagctgatagcgaacattgacacggtggacaaagaacggaagggcgaggtgaagttcaggttggagatgagcagagggaatgggtggcgaattgtcattggtttggtcccaccgttaggtgtgacatttgccataccagcatga

SEQ ID NO: 46266 - DNA, 1233 bp, Heterodera glycines
ggccgagtcgtctcgtgacgaaatgctgtcaatgtacggggttattctgttggacgaagtacacgagcggacgatgatcaccgacgtggtcatgggactggtcaaagtcagtggtcccatttcctttatcccagatgaacatttttataacccccgcttcatcagagaataatgcgacatcgtcccgaattgcgagtggttgtgatgagtgcgtcgctgcaaaccggcacatttgtgcaatatttctcagagttcgattatcttacaatgaaaatcagcggacgaacatttcccgttgaaataaaagtatttaaatatttactaattggaatttaatcattacattaaaattggcgttaattattcagcactccgattgggatttgacctttgagccgaacgaatacatttcaaaagctgtggaaaaagccattgcaattcatcgaagggaagcgcacggcgatattctgctgtttctttgtgggcaagatgtaaatgaaagtttttaaaaatggaagaaaactattaaaaataataaaatttaaaaagtataaaattacaactaaatcaaggagatcgaaagggcctgcgaaatgcttgaagaagaggcaaaaaaatgccgtgaaagtggccaattggtcggttgcatttgtgccgttaaatgccttttcaatatttcattaggacgttttgccgctttacggctcaatgcaactcgaacaacagcgcaaattgttggaagcggagcaaaaccaattgactaatggtgaacgcttaatggaaatggaaatattgattaataattaatttgccggtgctttagcaattacgggttatcgccgttgcattgtggcaacaaatgttgcggaaacatcaatggtgggttggtcatgttatgccgcagtctttcattctttttcttgggcttcttcatctttgtaaataattatccccttgaataatcctctgattaactctctctaatgctttttccctcccttccctttctttaatcctctgctttatctctccaatgcttaccctcatagaccatcgatggcgttgtgtacgttatcgacccgggcttctgcaagcgcaacatttacaaccccaactcgaagatcgagtcgctgctcgtccaacacatttcacgcgcctccgccgtccaaagggccggaagggcgggtcgaacgcggcccggcaaatgctttcgcctgtacacggagcattgct

SEQ ID NO: 46267 - DNA, 1488 bp, Heterodera glycines
atgaatgttcaatcgccgctttacgccgttccttgcaaaattgatccctctcccagcagaaggacagctactctcgacagaatgagtcccgattccgggcatcgagactctgccggagtgtcgggtgccggtgccttcgatgtgacgatagaagaactgcggacattgatggaatttcgtggaggcgaagcattggagaaaataagcaccgactacggaaacactttgggcctttgcgaaagactcgcgacagacccaaacaacggaatagcgaatacgcaggacgaactgaagaggttgcctttgctggccatagtccgacaaactcttctttctttgacttttccgattattcggccctttgttggcttttaagccccaaagtgccgatgaacatcctcgtttgattgcccatcttttaaattttaaggcctctgtgtgaattgacctttgaaattggaatttcaggcggagggatgccttcggtgccaatgaaatccctcccctcccgccaaagtctttctttacgctcgtctgggaggctctccaggtctgtccgatggcatttcttaatgagtctttttgtcggtcaatttaggacgtcactctgatcattttacttagtgccgcagtcgtttcacttgccctttcattttataaccccggatcggaactcggaggttcgcttttccatcatttccaatcgccgtctttcctcaggtggaaaagacgaaactgagcaggaagcgggttggatcgaaggtgcggccattttgatttcggttgttgttgtcgtactcgtcacggctttgaatgattacacaaaagagagacaattcagaggttggccatccccgggaaaggcggacaaaaaatgaatttaatttgaatttgaatttaaggattgcaagcgaagatcgaaacggaacacaaattcgcagtgatccgcggaggaaagcagctgcaagtggtggtcaacgagttggtggtcggagacattgcgcaagtgaaatacggtaatgatttgccggaaaaagcggacgatggcactttgacaagccgaccattggcacttttactcattgacactttcccttgcttcttcaggtgatttgctgcccaccgatggagtgctaatccaaagcaacgatttgaaaatcgacgagtcgtcgctgaccggcgaatcggaccaaatcaaaaagtcggccgagcatgacccaatgcttctttcgggaactcatggtcagtggtgcccattttgttgttcgcactttccttttagtgatggaaggcagcggtcggatggtaattactgcggtgggagtcaattcgcagacgggaattatcatgacacttctcggcgcggcaaagtcggcgatggaagacgagcggaaggagaagctgagggaggagaagcggcggacgaggcgcaggagcaaagcatcaggtcagtgggagcattggccaattgaggagaatggtattcgg

SEQ ID NO: 46268 - DNA, 961 bp, Heterodera glycines
atgccgacaaacaaatcgtcaaaattatttggaaccgctcgatgtcccttgaagaggtattcgtaagtggtttcgatgcaaaaatcaggcggaaagacttgctgaccctctccaatttggagtggttgaacgacgaaggtgctgtttatttatttaaaattgctttatattgattgttaattgttcgtaatttagtcatcaatttctttttgaacttggtggtcgaacggaacaacagcgatcccaacctcccaaaggtccatttgagccttccaaattttttaccatttatttataggtgttcacgtttaacactttcttctaccaaaatctacaaaaaaatggttttaccggtgtcaaacgatggactcgaaagatcgacattttcgcgcacgaaatgctcatcatacccatccatttgcccaatcattggtgcatggcggtaagaaagcaattgaaagttagagaatggtaaaacttcaatggtaatttagataattgacttcagacagaaaaggctggactattacgactctttgatggggaccaatgaaaaatgtctgcataatttgaggtttattgccaattttacttcttgaaaacaacaatttctagggattatctggaacaagaatcccttgacaagcgaaagaggccattcgattctgaaggatggatgatggaatgtcggaaggtcagttgtaataatataaaaatggttgaattatgggattcactccggcggaatttaaataatatccctcaaatttttttgcaggatattcccagccagtccaacttttccgactgcggcatgttcagctgtttgttcgcagaatacgcctcgcgcagagcaccgatcacttttacgcagaaacacatttcatattttcgcgagagaatgtgcttcgaaatttaccaaaagagtttactttgattgttcattttcacgggaaataaa

SEQ ID NO: 46269 - DNA, 422 bp, Heterodera glycines
atggacaatggactctttgaggaggcgtgggaacgagcggtcagaaacagcgaaatgctacgcgaaaattcagtgctggaggttggcaaacggctggtcaaccatttgatggagcaaaaggcctacgatttggctgtcaattttttgccacaggttttttgacaatcactcataaatattttaacacccaatcgtaatatatattttttaggtttgttcaacacataaggtggagtgggagttttacgtcaacgaattcgaacggcaccaccaaattctgaaactcgtgccgatcattccgacaaaggacccccaattggagcccgagtgttacgagtctgtgctgctcgccgcgctttatatgcggcccaaactgttcgatgcgattgtgtcccattggaacgcggacatttaccgagcgc

SEQ ID NO: 46270 - DNA, 1448 bp, Heterodera glycines
  unsure (1)..(1448): unsure at all n locations
agtcatgaagtggttgcgtgggttaagcgaattttgcgtgtcaaaaagactggacacagcggcacgttggacccaaagtanatatagtacaattttgtttatgaatggaaaaaatgtttattatccatagtaaacccctatttgcaatttattttttttctatgataggtttccggtgttctcgttgtgtgcgtcgaccgcaccactcgtctggcaaagtctcaacaaaatgctggcaaagaatacgtcgccattttcaaactgcacaacccagttgaatctgtgaagaccatacgccaggcattggataaggtgtctgaattacataaaaagtctaatgttttcaaatatttttgactttagctgactggtgcgctgttccaacgcccgccgctcatttccgccgtaaagcgtcagctgcgcattcgtacggtgtacgaatgcaaactcatcgagtacagtccatcccagcaaatgggcgtttattggatgagctgcgaggcgggcacttatgtgcgtactcacattgtccatctcggtctgatgctgggagtcggggcgcaaatgcaagaattgcgacgtgtacggtcgggagtgactggggaaaatgaccacatcgtcacattgcacgacattatggacgcacagtatttgtacgaccagcacaaagacgaaagttatttgcggagaataattcgtccgttggaggcacttttggttcagcacaaacgcatcgtggtgaaggacagttcggtgagtttgattgcaatcgaaagaattcaacgattgtttaaggtaaatgctatttgctatggtgccaaaatattgatacccggcatacttcgttatgagaatggaattgagataaacgaagagattgtgattgtgaccaccaaaggggaagctgtttgcatcggtgggctaattactcaaatggttgtgctactgaccaaatgaatgtttagcgattgccctgatgaccacttcgacgatagcgatcactgatcacggagtggtggcaaagattaaacgtgtcattatggaacgcgacacttatgcggtgagttaaaccggttgagacgggagtatttctaatttgtgattgcccatgatttcggtttggtggtggtactgagaaaattccccctttttgcttcgtgtgcgaaaaaaattttgcgctctataataaacaaaatttttgggaatgaaggagagggaccgtttgtgcgttaggcgttggaagagggtgcaaacagaaaaagctaaattttcaacaaaaattaaacatttaacttttaagcgcaaatggggactcggcccggtggcgtcaaagaaaaaggcgatgatcaaagatggtttgctggacaaacatgggaagccgaacgagagcactccaaagggatacgtgcccggaatgatggactattccctatcaaaagtgaaggcat

SEQ ID NO: 46271 - DNA, 245 bp, Heterodera glycines
aatcttatggggatttgtcccctttattcacattgaatttggcacaatttaattgtgttgctctcattaaggcagccaactatttggacgtgcgcgggttgctcgacgttgcgtgcaagacggtggccaacatgatcaaaggcaagtcgccggatgagattcgtcgcacattcaacatcaaaaacgatttcacgcccgaagaagaggagcagattcgtcgcgagaatgcctggtgtgaggactga

SEQ ID NO: 46272 - DNA, 2010 bp, Heterodera glycines
attaggaacgcattgctatttgctctcctcactgtccctattttgataataggaaacggcccggcgggcattgcgctgtccgcgctgctctccggctggcgccccttctacaacaaacgcgtgccgcacccggacccgcatctgcacgcgcaactcacgcgcatggcgagcagcagcagcgacgacaattgtgacctgtcactgcttgaccaggtgggtggtgtgttgctgttgtggaggagtggggtgccccagcaagtgggagcagtcagcaggacaaaacatctccgggacataacgtctcaccgggataaaacgtcgccacaaaaaaaaaaaaatttttttttttaaactttagaaaaaattcaagaaaattataaatttttagttgcctagcctatcccggcgacgtttgcgcttctgatcacttttcgaaaaattatgagggattaaatttttactaaaaatatgccttacaataatggtgtaattaaaaattcaaaaaaaaaaaaatttaaaattaagaatttcgagaaaattttaaaaccaaaaagcgttgaaatattttcatgttaattttattagctatagaaagggttaattaagttcaataaaactttaatttaaccttaaggaatacggcttcaaaaatgtgacgaaatatttttttgtttacgtaatttaatttttaaaaatttgatcatccacaactaatttgtaattgtgatcagaagttcaccaaattttgcagagatacataatggaaacagtacaaatgtttacaaattttcctataaatttttcacccgaggaaaatttgtttttaatattttttttaattgacccatgggaatgttttcaggaaatgggataaattattttaaaatagaggttgattcccttccttttagtatccccctaatttttttttttgttgccaaattcaaatttttggcattttgccacagcaggaccttgacgcgttggcggaccaacattttgagcgcgcgcaaaacgccggcggcgccggagggcacacgccgttctccgtgctctacgattgcctcgcgcggccccatttaagcgcctcattcgcctcctccgcttcccataccgctgctggccatcatgcggcggcaaacggcgacgacgacgtcgatgccgagcagttcgtcgtcgatggcaccagcgctggtggcgacgattgcggggtaaaaatgtgcctgctgccatccgaaaccggaatttcacgggacgcaagatttagcgttgtgcctccctgggatatatgtaatccacttatcatcccctccccatccactctcaattactcgagacttggttcgagacccgccccctcccccctcccaaaaaaagagctcggtcttggcgagattttattccgtccccccgatttttacggtatcgaggtattgaaaacagtttgcggttttaattgtataaactaattgatgtgtgccattctcccccccccccgcttccagcaacggcatcggtcgccctcccccgccgcttcttccccggtcccctcctcctcctgcctttgctggagacgacgcgagcgcgatgccatttcacacattgtgctcggcgatcagcagattggcggcagttggaccgaatatgacgaccatgtgagagaacaagagtggggcgcagattgaatttgagaccagtcagggctgaaatggcgggactcaatttcccccatttattttttctaaatattttccccaccgtccgatatgttccgtttctgttcatcatcaacatatcaatcatatcatccccgatcagatgctcactgtgagtgcggtcgagtggatggatttgcccggcttttccctggccgcggattttgtcggcgacgctcagctcgcgcagcagcgcccgcgggccggcctctacaaggcgtacttgaatgcctacgtggacgcaatgggactgcggcacaacttcaagctgttcacacgggtcacccacattgag

SEQ ID NO: 46273 - DNA, 735 bp, Heterodera glycines
atgccggtggttgatgcggaagggacgccgttggcacgcgacccggccagcggacgttacttggacccagcggatggcacaccaattgcggttgatgatcagggacgaccgttggaccgtagcggcaacgtactgtccaaaaacatttatgacgagtacgtgtgggtggatgtcggtcttgtgagtccggacgggcttccggcacggacggcgggcggccgaatcggtgccgaagcgaccactgccacacttcacgacgatcacgccgtggacggggctgaactcgtgccgtctgatgaaggcggtccggtggcggcacttccggatgaccgcgtgccgacgcgtgtagagaagggcgagtgccgcgtgcaggaggcggtcattgacctggtggtggcagtcaacgacgaactgctccaagcgcatggggaccgcttgcgccaggcgttggacgaccttttggaccagcatttggacctggcggcggatgccacccgcgtggcactgctccaatacggcaaaagtgtggcggttccggtcagtctgggcggttaccacgagcgtgaccaactgctcgaccaactcggccaactgcgctccactgcctccaacttgttgggactgcccgacttgtcggccgcctacgaagcgagcttacaacagttcgaaagtttcggccggggcggaaatgtaccaaaagtgttgctggtggtttccagcggggaggatatgtga

SEQ ID NO: 46274 - DNA, 711 bp, Heterodera glycines
gtgtacgattatttctccgaatttattcctaaatcatttgacgataaagaatgggttcggtacgtttttgactaacacattaagtcagtcttcttttcagaacaatggaatgttcaagtgttgtcgaacgcgttaattattgggcttttttggcactttctcagcatcgaaaagacttggacgaaatgaaacataatcaaagtgtagaacatacggatagttttttcaaagaacaggttatttgttgttcgttttttattttaaatgtccttactcctatttttctcaatatttattgaaaggatcatttttcaatgggttttattgaataaattcgcatttattcagttgcgactttataatgctggaggcatgggatacagtgaagacgcgtactgtttgtatttaaattcctatcaaggcagaaattacgcatcgagaaaatgcaagtggtctttgtcattgtcgatccttaattcaaaattttgaaaatgaaaagccttttcagatcgcacaattgaagaatcaaagaaattggcccagcaattaacacttggagaatcaccgcggattctcttcgattgtcaatttttacctcaaatgacacaacgaatttacggcaaagtagcaaaatcggcagttcatgcatattttgtatggttttggaattttacaatgatttttatttctttgatttcgcaccaaatttaa

SEQ ID NO: 46275 - DNA, 1104 bp, Heterodera glycines
tctttaaattcagcatcctcgtgttcgttacgccgtttgcaatgccattggccaggttttgtttcccacacatacacattggcaaaattcaacttttccctgtgaagatgtgcaccgacttccagcccaccatccaaaagaaatgccatgagcgtattgtgcccgttctcctcgaggccatggccgacatgtccgtcccgcgagtggctgcgcacgcggcggccgcaatggcatgagacgcattcgacggtggttttatacggccaaattttcattggtttaggtgaacttttgcgaagattgtcccaagtcaatcatcagtatttatttgccatcggttattgtgtattttgttcattgttttaacctatttgttaagataatggaacgattggagtcagtgctttcacaaactttccagcaaatgatgaccaatggcaaaaaactcgtcttggaacaggtcagttattgtctttttccctttgttggatcaatattattcaaacaatttcagataatcaccacgatcgcttcggtagctgatgccgcccaggatcacttcgccaaattttacggcaatttgatgccccctctcaaatacagttcattttaaagatgctcattgctaaccgaccctttctccatcattttcctttctccgttaagtttttgaaaacgccaaagatgacaatttgaagttgttgcgtggcaaaaccatcgaatgcatttcgctcattggaatggcagtcggcgcggaactgttcgagacggacgccgacagcgtaatgcaagtgttgctcagctcgggagtcaaattcgagaacaatgacgacccccaaatctcctacttcatcagcgcgtgggcgcgcatttgcaaaatcctcggcaagggtttcgccaagtatttggacatgattatgccggccgtgctgtccgccgccgacttcaagccgtctgttgcgcttgtggatggcaaggacacggatgacaacgaggactgggattacatgccaatcgacgagaaccgctcgctgggcgttcacacggccggactcgaggacaaagtaacggcgtgcgaaatgttgtgctgttcgcgggcttctc

SEQ ID NO: 46276 - DNA, 586 bp, Heterodera glycines
gactgatttttgtcgtggacagcaacgaccgcgagcgtgtgggcgaggcgcgtgaggaactgatgcgaatgctggcggaagacgaactgcgcgacgcggtgctgttggtatttgcgaacaaacaggtgaaaaggggggggggacattataggcacatggcatttagcgggaaggacacttccgtgttggttgcgattgagaatcatttaattattattttgcaaattttaggatttaccaaatgctatgaacgccgcagaagtgacggacagactcggactgcacactgtaagcgttggctgaatgggattttgttaggtttgagttaacgctatggcaaaacaaaacttgttgttacgtatgagtttctcttccttttgttccgtttagaaccttcgggcaaatgggtgctttctgacttccacaattaatcactgaaaaaggaacattgtttcgccattgcaatgttttggtgtttcagcttcggaaccgcaactggtacatccaggccacctgtgccacgtcgggcgacggactctacgaaggattggactggctgagcaatcagctcaagaacagaggatga

SEQ ID NO: 46277 - DNA, 3749 bp, Heterodera glycines
atgggcgccggccatcgcgctgagcaacaggcggctgctaatcgactgcaggtcattttatttattttaagtaatagactgcaggtcattctatagaaccccttaaaccaaattcgaacaaaaagtcgaatttatgaaaattctcactattgccataaaatttatttaaaaaagctaaaagtagtcatgaatcattaaaacatcaaaaatgaccattttgctcagattctaacataaaagccacttttcaaaagacccctctttttaaatagtgccggatttttgcggtaaattcgaattcattttcctctaattcatcctgtcccccccccactttcagcccaaactgtccatgagcagtgtctcttccgttggctgttgtcgtcggcgaatgtgttacctttcgcgcggctgtcgccttttggtgatgatctttctgacgtttgccttctttttcattgaagtaagcacaaaaaaattaattgtttaattaaaaattgcactttaattaacgccaaattgctttgtttcagctcgttttcggttatatttcccactcaatggcacttattgcggattctttccatatgctcagcgatgtgattgctttgtgcattgcgtttggatgtcttaaggtctgtttttgtatcattaactgaatgtaaatgttttaaagtgctttttattgaaaatgaaaaaatctttaaaagtttggctagaagaatctcttttttcttattttaaaactcctcccatatgacatctgtattaaaagatattaacctttttgaaacaaatgagaaaaaaagaatattcttgattgggtcaaaatggccaaaactgtttttaagtcgctttaatttgggtttctcgcaaagtgatggatttagctgcgatttttttgcattcaaagaaaatttctgatcacttttttccacagattgccgagcgaaggaaaagctcaaaaaatacttttggttgggttcgcgcggaagtgctcggcgcgttggtcaacggcgttttccttttggctctttgtttcactattttcatcgaggcaaatccttcaaaaaaaattaagattttctttatttttcattttcagtccatccagcggctgctgaacccggagccgatcaaaaatccgcttcatgtgttggtagtcggactgatcggattctttatcaatctgattgggatgatcatgtttcgtggccatgttggtgagtgactgtcactgaatcggtcttgcaccaccaattagggaaccaacttgcaaaaaacttgttttaattaaaattatttgtccctccttagggcacacccacgccgctcacggcgttgaggacgtccgctcggaagtgctcgaagtggcggccgaagcagcggcggctgcagccgccgcgaaggcggacgagccgctgttcggcgctgggaatgcggacggacggcgccggaaccaccgctgctgtcgggacgggacaaagcgggcgcagcagcgaggcggacacaacgaagtggacgaggaggaacagaacagggccatttccatgtccgacttggaggcagtggaggagtcgctgatgtcccgcgttccgcggcacaaacattgtaagatcggatggatggtgattgtatcgggcagagtttgcctcctccccccgctaatgtgggggaatccaaacaactcaattcttaattttcaaataaaaatccaacctgttcgtaatcatacgggggtcgggacatcgcaaaattttcggcgaaaatagaaaaacacgtaaagatgggaaaaggttatgaaaatgggaaaaaaagctaaatttttgttttccatttagccaagtcgcagagtgctggccacctgaacatgcatgccgtctttttgcacgtgctcagtgacgcggtcggctcagtgattgtcatcgcaaccgcattggtggcatggaaagtggaaggggtcgagtggctcaagctgtacatggacccgatgctcaggtgttaattttgaggaacgaaaaactcatattcaacatttaaagttagatgaattattataattatataggtatgcattttttttaaaaaattagaaagggattattttcttacatttttatgcgtgctgttttttgatcagtctcctattttatgaattgtttatcactatttttcttgattttcagcatcgttttggtttgtctgatggtttgtacaactttgccacttggtaagaaaatattactagtatgtaaattaagaaaaaaataacgatgtaatacaatactaattgtaatgggccttggcataggctttgttcggggatttcatcgcttgaatttttctgggctttatccagaaatatagggctttttttctccataaaatacaaatcacaaattaatcttttggtgcgtcattttctgctgttcagtgcatgagactgcgttgattctgctgcagactacgcccagcttcgtgaacatcgactcgttgcagtccaaactgttgcacatcgacggcattgtggcggtccacgagttccacgtgtggcgcctcgtcggcgagcgcatcatcgccacggtgcacatccgtttccgcacgctgcgccactatgtgctggcggcggagcaaatccgttcattgtttcacgacaatcacatccactcgaccaccattcagccagaatttgccgaagtgggacccgtggaggggggggggggggagccgactgggaatatccattaaggaattatgcgtaattattaatgggtcacacacattccaacatccccttacattgatgggattgctcatcgctttagagttccatttcccacccgttccgatgaactctattcgaataaatagagcaatcaaaggcccttttgactgttttttttcattgtataatttcactttggtttctctttttagatggacacctcaggcagtgtgtctgaattggagtgcgccttcgcctgtcttccgaacaattgcgcaatgctggagaacggcgacgtgacctgttgcggaaaggacaagcgaactccgccaaaggtgtggtgaaccggaacccgtcagttgggcgccagcacgttttcagctataactttttttctttgtcaatcaaatccaacattattggtatcattcaaatccctaaatgtcttctattagtctgcaaaattttgataaattttgttgaggttcaaaaaggttatggccagaagaatttaaaaaaccagattttccaagctttttggctctaacattttttaaacaatacgaaattttttggaattttgcagctaatagagcatctgaagggctctcgaatcataccaagattgatagatttggttgacaaagaaaaaagttatagtgcaaaaacatgctggcgcccaaacgcgccggcgcacaactgacgtagaccggtggtgaacagctttttgttgacaaatgcaatagaatgaattttctctctccctccctccctctctccccctctccgcctcccccctcctctctttctctctctctctctctttttgtttttgggttcatcattttaaacgtatgtttttcagaaaattgtcacttcgaccagcatcgccattgaggaggaggagcagcaacggccaaccgatgcgaccacgggcgacggcggaacggcttttttcaccgccgggagcggcagttcgagcagcagcagcactaattcctcaccggaacagagcggaagctga

SEQ ID NO: 46278 - DNA, 776 bp, Heterodera glycines
atgttgactgtatttatattgattttcaaaaagcatttgactcagtgccccatgaattacttttatacaaattggaaaaaataggtataaggggcaaacttttgatgtggataaaggactttttgagtaataggacttttcgtgttaaaattggggatgatttatcctccagtaaaaaagttggctctggcgtcccccagggctctgtccttggacctttattatttttgatttatattaacgatcttcctgatgctttgccatcaggagtaagaattaaattatatgctgatgatgttaaattgtatatttgttataaagcaagaaccgaaacagaaattatgcataaagcattgcataatttatcagaatgggcaaataaatggcaaatcagaatctaaattaaaaaaacttttgtacttcatttggggaataaaaaccccaaagaaatatataaaattgatggaaatataataaatgttgtggatacaattagggatttaggcataaatattgataataaattgcaattttccaatcatgtcacacaaataataaagaatgcatatttacgtatgcgttctttatttcgggttattaaatcaaagtcttctaggatttggattattttgtacaaaacttatgttagaccgttattggaatatgctcctgaggtttggaatccatctcttctaaaaaacattaaaaaaattgaaaaaatgtcaaaaatatttcaccaaaagaagtctttttcaatgcagccttccacccattcc

SEQ ID NO: 46279 - DNA, 190 bp, Heterodera glycines
aatagaacgaacgcaacgacaaaaaagggaaatctctccgtccgcccctcggcacgcgctgtttaattgctgggcgactccgcaattgtcacctccacgtccacgcccggctcaatggaaatgcccgtgattttcttcagcacgtcgctggagctgttcagattgatgatgcgtttgtggatgcgcatct

SEQ ID NO: 46280 - DNA, 679 bp, Heterodera glycines
atgcaaattttcgtcaaaaccttgaccggaaagaccattactttggaagtcgaggtatcaatttaacaattaagaaaacattagtactatttgacatcttaaggcgagtgacacaattgaaaatgtcaaagccaaaatccaggacaaggaaggaattcctccggaccagcaacgtttggtaaaccaagcaaatctgagaaagcggataatggaaaaaatggccctttcagattttcgctgggaaacaattggaggatggacgtaaaattctttaatcgaatgttgcgggtgtaaaaatcggacctttttccccttttcaggcactttggccgattacaacattcaggtacgccgcccaatttgaggaccacaatttttactggttcgtctcctctgttccagaaagagtcgacgctccatttggtgctccgtctgcgcggagggatcattgagccgtcgttgcgcatgttggcacaaaagtacaactgcgacaagcagatctgtcggtacgaattggcacccatttcaagcaacttttcacactttgttttgcgatacttttgcattttacatgtttttaagcaaatgttacgctcgtctgccgccccgtgccaccaattgccgcaagaagaagtgcggacactccaacgacttgcgcatcaagaagaagctgaagtag

SEQ ID NO: 46281 - DNA, 581 bp, Heterodera glycines
taggcttttccttataaggatgacaaaccgcaagaggcagcgcccgttgaggaccgaattcgcattaccctaacatcacagaacgtgaaatcgctcgaaaaaggtttaaacttttaaagtaatcccgtgaagtccattgctccaaggatatggcgttttcacctacttttggctgatatttcattttggcattaatttttacaattaaacgtccgttaacaaattggaaatacatcaattcatctcccattttgttccaattttcctccgactattcacaatatttctttgtcagtctgtgagcagcttattcgcggcgcaaaggacgagaatttggtggtcaaaggcccagtgagaatgcccacaaaaattctgcgcattaccacacgcaaaacgccgtgcggagaggggtcgaagacttgggaccgtttccaggtaaacaaaccaacggaaatcttagaatttacaataaagaatattatggcttaataatttggcaccaagaaaagcaaataaataaatatattaaaaaccagcagtggtcccagaatacggagagggaaattgggcaaaagggccac

SEQ ID NO: 46282 - DNA, 616 bp, Heterodera glycines
atggtgacaaaatcgggcaaatactgcctgggctacaaacaagcgcttaaaacacttcgttcgggcaaagcaaaattggtgatcatctccagcaacacgccgacactcaggtgcgattttgttttgaaattgttcgattttttggagaaaacttaaaatggtggaaattttttggatttttgaggggcagatcaggccgatttaaataaattttctcggcggtgtctactgatactttgaactactaatttctctgaaatttccaattttgactcaaaagttcacatagcttgacaacttttggcataaaaatgagataaatttcataaaattttttattaaatcaaaatttttggtaaggaaaaagtctttgtatttacaataaagttgccatttatttattcgattgtcacaattattgttttatttgttcatggcctttagacgcagtgaagttgaatactacgccatgctgtcaaagacgggcgtgcacgagtaccatggcaacaacatcgagctgggcaccgcttgcggcaaactgttccgagtgtccatgctgtccatcactgacccgggcgactcggacatcattcgaacaatgccaaccgaggcctga

SEQ ID NO: 46283 - DNA, 1278 bp, Heterodera glycines
atggcaagagaggagtactgcttcgatgcaacggcggcggcagcggcggagcagtctcggccttcggcaacgacttcaacacttgtgcaaggagatggcctgtcaagcagcttcgtggacgcgatcatcaggaaggtcaggcagtcgcctgtccaacgcttcacggatgaggtgggatttttttgacatgacatttcaacaattaaaaaatttcattttttccacagatcaccgacgaggagctcaaacaactctgcaaggcggccacggacatcttcagaatgcagccgacgctcgtcaggattcagccgccggtcgtcgtcgtgggcgacatccatggacaattcacggacctgcagaggatcttccacacgcacggcaaccctccagagcagcagtacgtcttcctgggcgactacgtcgaccgaggcccccagtcactggaaacaattgttcttctcttctgctacaaggtgtggtttagtgaatctttaacagaccaaattaaatccccaaaaccattgcaggtcaaatacccagcgaacttcatgctgctgcgcgggaaccacgagtgcgccaacatcaacagagtgtaaggatcgcatttttttgtgttgtttcagacttaaattccccccccccctttaaggtatggcttcttcgatgaggtcaaccgccgctaccagcgtccgggtccccgccgcctctacgacctcttcaatcagacgttcgcctggatgccctacgtcggcctgatcggcgacaaaatcctgtgtgagtcacattttttgttgttgttgtccattcatactaattcattatttttcaggtatgcacggcggcctctccgaccagatcaacagcctggagcagctcagccacctgaatcgtccgcaaatcgacccgccgcttcggacgctggagatcgatcttttgtgggcggaccctgcgcgcggagttcgtggcgtcatcccgaacaccagaggagcgggcatcgcattcggcgaggacgtggtggagcgggtgtgcgacatgctctgcctcgactacatcattcgggcgcatcaagtgagtttttttcttttttttcatttgcttctggactaaattcccacttcccctttccaggtcgtgatggacggagtggaatatttcgccggccgccggctcatcacccttttctcggcgccgcgctacactggccgcaacaacacgggagcaacgctgacaatcgcgccgaacctgagccacagcatcacccgcttcccgccggcctga

SEQ ID NO: 46284 - DNA, 1153 bp, Heterodera glycines
atgttcgtgctggagcaggaggagtacaagcgggagggcatcgcgtggactttcatcgacttcggactcaacttgcaggcgtgcattgagctgatcgagaagccccttggggtcatctccatgcttgacgaggagtgcatcgtgcccaaggcctcagacatgactttcgtgcaaaagctgatcgaccagcacttgggcaaacaccccaacttccaaaagccgaagccgcccaaaggcaaacaggcggaagcgcactttgccattgtgcactacgcgggaacggtgcgatacaacgcgaacagtttcctggagaagaacaaagacccgctgaacgattcggcggtaaacaaaaaggggcaattcgttaattaattaatgagctgctaattgatcattgacaggtgtccgtgctgaaagcagcccaagacaatgaactgttgctgaacattttcgaggattacgtgacgcaggaagaggcggccgagttggccaagacaggccaatccagcggcaagaagaagggcaagtcatcctcgttcatgaccgtgtccatgatgtaccgcgagtcgctgaacaacctgatgaacatgctttaccagacgcacccgcacttcatccgatgcattatccccaacgagaaaaagcaaagcgggctgttggactcggcgctggtgctgaaccagttaacctgcaacggcgtgttggaaggcattcgaatttgccgcaaagggtaccccaacagaatgcagtaccccgacttcaaggtggccagtcaatttaaaactattgccattaataccaaacaatctcagcaccgttacgccattttggccgcggaggaatccaaagttccagacgagaagcaggccagcaaacagatcacggacaagctggcgacggatggcgagctgaaggacgaggagttcaagctgggcaacaccaagattttcttcaaggcgggtattctggctcgtctcgaggatttgcgtgacgccaaactgtccgtcatcatgaccgggttccaatcgcgcatccgctggttcttggcccaaaccgacgtcaaacggcgcatccaacaacgcgccggactgctcattctgcagcgcaacatccgcggatggtgcacactgcgcaattgggactggttcaaact

SEQ ID NO: 46285 - DNA, 1208 bp, Heterodera glycines
atgtctcgtgtctacctgtttctggagttgtccatccaaaaggaggacgctggcggacgatgggtaccaattgaagcggcagaccaacttgtcggacctatccaatgcattggacaaacgtttgttcaacaactcaaggtcacacatacaacatccgaacactcttcacttgcagaaaattaccaatatttaggttgaagtgcaaaacacagttgtatgacagcggcacattgtacccctacaaagcgtatctgaccaacgagctgtccttcccaaacagtgcaaagggtcatttcatggccagcgcgggctaccatccctcgctgaagcatgacagcgcgacggatgccggcttcttggcacgctgtgctcgctttgagggaggacgaaaggctcgcttcctttcccgcctggactttgacctgggcaaccaggagctgtacctattaaacaacatggacgtcctgttcaccatctaccgtgcaaagaacacattcctgttgcaaaacctggcgccagcgccggcggtaggagcagcggccaggcagcagtatgccttgtatctgcacgacataaagctgtacatgaaggtggtggaggtgcaaccctcgctgaacctgtccatctacaaaacgctggagaagcagccggccacctacgcggtacggaagacggaggtgaagtccgtgttcctgaccgccggccgtaccgagatggaccacaacatattttccgccgccatcccccgtcggttgaccattgcgctggtggcaaacggggcgttcaacggacagctggcgcagtcaccgttcaacttcaagccatactccatccgtgagatcagcgtgcacgccggcggtcaaatatacccggcggtgccgcaccgcatggacttttccggcgccgcctacattcgaccctttgtcgacatgtacgaggcgctgggcatggccaactctgaacgctccatggacatcacactggaccagttccgcgacggatggacaatttttgtggtgcccatgacctcgacgctggatgacagttgcggctttgaactgctccgctccggcaccaccagcattcggctcacattcaacgaagaaattccggccggcggcgttgagatggttgtgctcggggaatttgatcagttgataatgatagactacaaccgtcacattgtatctgactcgaaaattgcataa

SEQ ID NO: 46286 - DNA, 2117 bp, Heterodera glycines
atggagggaattggggtcatttgggccgccgttgttggaagtgaagtcgacagcgattgtgcaatggaattgctgactgaaacagcattaggtaaatgccgaactaaattaagcaaattgcaccccaatttcagtcggctcacaaatgtcggcacgggggcaccgcacacgcggacaagttcaatgctggcggaagggtctttgctcttttggcccggcctcaactgaaggggaaagacgacaaattattcaaacaaattgccaagttaagcctcaaaaaataaattatcttcgtttttcaccgactatgtgcctccctcgtcgctgaccaaatattttgtgttcgaattgagcaattggaagaaattggtggttgcgcttccgatcagttcgtcctttgtgcgattgtaattgaaattgtggcacgaaattcgcaagatccattccaaagagctggggaaaaatttggacggaagcacaaagtcgcgccagcggggatttgcgttttggtgcgccacttcactgcgatagagcaaaatctgatgatagaatgaaaatattgcagaattagaaaaactaatttttactggcattcgctcgtcagtttcgctttttggcaccaattccaacacaaaataaggggcggtgagcagtccgggcgtttccaaattgtggccgacaaattggaaaactgattgtgagacaaaaactttcattttaaaagttggatgtttatttaaaaatgtcaatgtctcacgcgttccgccggcgcttccgctcgcctcctcctgctgcacggcttcggccagcaccaacgactgttggtgtagggctttttgtagtaagtgaagtgccagcggcacagcgaccggcttagaaccggcacaaagcaatgccagcagcaaaacatgcgcgtcggcgagcagtgtccgcagaagaccagactgaacatcgacggagtacctgcatttttgatttaataaataagaaattgaaaaaagaattgtaaattgcaaatcaagtggactcacaaaacaatgcgcaactgttggcatttgtccaaccgcagaagcaacgaaacccgtgcctcgaatttcgggttaatgccattccgtgtttctgtttggccaatctttgaacagcgaaacaattttaggtaggctaatcaaaaaaggaaattaaattcaaaaaaagacacctcaacaaaatttgcgtcattatccgatcgcgctgtaattaccaatcggcagccatcagaacattcaagtggcaaatttcttgtaaagttttgttttcaaatataaagtgtaaattaaataggtatttatttactcacagacaggaaaaactgaggattacagattcttcggtcattcgtaagaaaatgagaaattaatgtaaattgggtaaattaggattttgcaaaactttgaatcgaattagagcttaaacaaagcgaagggagtgaaaatgcataaaaattgaagttgtaggtttttaaataattttattaatgaagaaaatacaattgcaattgcaaattaaattattaattgttctacgtcaaataaataaattaaaagttatgtttttctttactcacaaatgctcacaagaaagttacatgttttcttaaagccttcactttcagtaattcttattgttaacataatgacgcaatttctccccgacaatttgttggctctgtttgcgcctcgtccgccgattcaattcaaaccgccgccagatgatctattcatccaccgaaaacacatgcaaatggggggcatggccgagtgtgtccatggttttgaggtttacaaaacacctttaatgaattggattttttatttgttaggatccgaaggacactcctccaaaacccaaaattgagacccgagaggagaagagagcgcgaaaagtcagttttaaacgcattttgcaacaaaaactttggatgaaactttaaaattcagcgcaaggaaaaggaggagctaatggcctacaaaattgagcaaggcattgccacttggacacctgcggacaatccgaaggcgaccgttgacccgtacaaaacactttttattggccgaattgtaaagaaaaatacatggtaa

SEQ ID NO: 46287 - DNA, 1669 bp, Heterodera glycines
aagttctcgttatggaccgcctatacagacgcgttatcgaatgttggtgactaatttgtcaacacgctgttcatggcaggttgcctttttacactttccaaacgtaaaaaaaacatgttaaaattcctcaaaaattacccaattgccttttttgtatgcatccaattcattatttaaaaaccagcttaagctgcgctggtggttgcgcaaatcaataaattattttcgaagtctaacaaaaatccaggctcttgtcggtgctctttgggtggtttcttcgatggctcttcaccactttcgcctttctctatgtttttcccattcttcgctttcggaggggaagtctcttcgagaaggaatcgaagatgaactaatgaatttatgggcaccttctccgtgtgatgagagcgttgtccccctctttctgttgggttccgaatggaagagatgagacacaaatggccccttttttgtgctcatcaatgagaagaactgatgggaagagggcataactgcagaaaaacagtggtggaagaggaggaggaagaagaagagggaggaagagtagggctgacaaatgagcaggatggtgtgttcactttccattgaaaaactaacttaaagcgtacattacaaccccaatgggtttgatgttgtagtccgcttcttcctaagattgttgttttaatgctattcattgctttccaacattcaggacctcaaggatctgatgcgaaatgccggcgaagtcacttatgcggacgcacacaaaaaagtgagaaatgaagcagttgtctgcttcgccacccatgaggatttgcgacgtgcagtcgaacgttatcagggtaagaaataaaaatgtaaaaattgataataattgtttttctttgaggcaaggatataaacgggcgcagaatcaaactcgtagatgactccgaaggctatgccgggcgcaaaaggtacgtacgttttgaccaatgccattccctcgcaaatttcttagtcgctctcgttcgccccgttcgcgttcccgctctccgcgttctcgtactcgttcaccgccttctcgttcacgctctcctcgttcgcgcagcgcttcgcctggtaataactgacccatggcattttagtgttagaaattctgatgatactgggtgattaatttcttaggattattataacatatgaataaaaataaataaaggtgcaatggtaaaaaattgtggtccctatttaacttttttttaattttgtgataaaaatcaaattcctggggtttttgagggtgctgacatttttattcatttgacattgaagcattgttttgctttaaaataaataaattttaaatgaattcgagacttttaccaaagcaaaaatgcatcttcgaaaaaaattcaactttttattcgaattcgtacccggggtccggaattgggcaagtccaagttcagattcgtaataagcaccacgcaattcatgaataattttttattttaggtcatttatggttttaattgttatatcccttctagctgaaaatggtcggtctcgttcccgatctcgttctcgctccccaactccaagtcgttcccgttctcgttcgccaaatgatgaaaagtgaaccaacgaagaagagtcgatgatggagcacctctttgttggatgg

SEQ ID NO: 46288 - DNA, 1096 bp, Heterodera glycines
tttgttggtcgtgtgatcgccaaggccatttatgacaacaaacaacttgattgctactttactcgtgccttttacaagcacatcttgaacaagcatggtaacaccggacgttgtgtttaagaacctgagaacctaattccgacctaaattttttccagttcggtaccaggacattgagagtgaggaccccgacctcttcaaatcgctggaatttttgctgaacaatgccgttgaggacctcggagccgagctgacttttactgttgaggtggaggagtttggtgtgcgatcgactcggcagttgttggaaaatgggaacaagacaacggtgaccgatgccaataaacacgaatacgtccatttgatgtgccaaatgaaaatgacaggtaatttggaggggaaagagaatttcttacacaaaaaaaacatttttaggctcaatacggcaacagttgaacgcgtttctcgagggtttctacgaggtcatccccaaaaagctcatctcgattttcaacgagcaagagttggaattgcttatctccggcctgcccgatatcgacatcgacgacctttgtgcaaacactgaatacaaaacatacacacggacgagtccgcaaattcaatggtagtgcaacaaataacatattgaacaaattaaatatctattgccatacatttaaaggttctggcgcgctcttaaagctttcgatgccgaggacaaggccaaatttcttcaatttgtcacagggacttcgaaggttccgctgcagggtttcgcgcatctcgatggaatgaacggtgtacagaaattcacgtaagcattagcacacaaattcattcctctctaacaaacacgcacttaagtatacaaaaggacacgcgttccaacagtcggctcccatccgcccacacgtgcttcaaccagctggacttgcccgaataccctgattacgaaactcttcacaaaatgctgcttttggccagtcgcgaatgttcagaggggtttgcttttgcgtagaagcgatgctagattgaattatttatcaaattagaacatcattcattgttcattattattcggctcaattgtaataaa

SEQ ID NO: 46289 - DNA, 781 bp, Heterodera glycines
atggactgcaaccgctaccgggacgtcatctgcgccgagcagggccgcgtgcgactcgacaacggacgatacatccacgccaactggatcacggcccttggcgaacagcgcttcatctgcacacaaggcccgctcgagacgacctgcgctgacttctggacaatgatcgtgcaggagaacatcgaaggcattgtgatgctctgcgacaccgtcgaacaaaacaagaccaagtgccaccagtactggccgacaccggacaaaaaggtgggggttttttttttgctcaattttataatcatttccctcccccctcttttcccctttcagcaattgcacttcgccaacaagacgatcaccgtgcacttcatcgaagagactgcgctggagccggacctctacaggacaaagctgtcggtgctctcgcgcaacggctccatgtacgtccaccacttccactggcgccggtggcccgaccgcggtgtaccccagagcgacttggcgcctcttcgtttgcttttccaagtgcaacagcttcggcgctcggtggtccactgttcagcgggtgagtttgtgtcatgttggaaagtaaaaattcaataaatttcccatttttaggaatcggacggactggaacactggtggcgctgcacattgcctacgatactctgcagcgtggacatcgactcaacatcctctcgttggcgcgcaacctccgtcagcatcgggcccaaagtgtgcagacgccggaccaatacctctacatatacttcgtgattttgcg

SEQ ID NO: 46290 - DNA, 898 bp, Heterodera glycines
tattccatgcgtacaaaaaagtggcggaaactgtgcccgactcggccctgcttattgtgcttggctttgcacttggccaactgctgcgcctgttccgtgttgaacgtcacatttatatgtttgaggcgaacactttcttcctttaccttctcccaccaatcatttttgaagcgggtaaattcgtaattacaattcggattaagtcatttttttttaatttcctaaaaattcgtctattttttaattttcttgttctagggaatctccgatttgagattgtcgccaaagcttgaccataagaattttcgataaaattcatatttatgcaaaagaaaaactattcaaatcagttggatggaaaaaaatctaggaaaatgtttgtttgtttgttttttatttttatttttttgtttagatttggatccgaaattttcaaaattagtcgaaatgttcagaaaatcgttcttttctgaataataaatccgattttttctcagaaatttcggtccgtttttttaaactcttttcttttttaattataaagttcttttattgtatttacaggattttacatgccgacaaatttattgtgggaaaattatgactcaattttattgttcgcatttgttggcaccatttggaatacggttgcaattggtactataaaaattgttttcttatagaaatttcttctttttttttaggtttcactctgtattggctgggcacttttggcattttttcaatgccattttcaatatgccaagcattgacttttgccgccagtatcagttcggtggacccggtggcggtgattggcgtttttgagcaaattaatgtgaacaaatttttgttcatcaacgtgttcggtgaagcattgtttaacgatgcggcggca

SEQ ID NO: 46291 - DNA, 3767 bp, Heterodera glycines
atggacaaaggacggagcaaaagcccaaatgataacaaagaggaggaggaaactcaaagcgccaaagaggataagactgatcataaagttgggttaatttcgcttcattttatttaaatgctttttgaataattgcagacaaatgagcaaatgttgctggtgaggaccggactgaaactgaagcgtggcactctcttcaagaagaagcgaaatgttgacccgaaaacaatagatctgaccataaagaaggaacaagagggcccgcggaagacgaaggccgaattggcatttctcaaacggcaggaggagacggcgttcgaccgtttgtcaaagagggcccaaatcagtcaccgggagaaagtggagaagttcaacaagcaaatggaggaactgacggaattcaacgacatcccaaaggttggttggccgaaaaacccattaatttttaatgaggcatatcaatctttaggtgtcttggaccaaatgagaaggaaggaaaaatactactgtatcatatattacatttgcgatcacaatcagaaaaactaaagcaaatgcattcatttttagtaaacgaagttccattcgttttgtatctttccgtttgttttgcattatatttttattttattctcgtttggtaatcaaaaaagaaatgccagctattccccgcgcggatcgcctgaaaaccatttattcctcagcgaaggcactgaattttgcttttcgactgtcggccacaaatccaatcgcaccagcattcaatggggtgtccgcctaccaaccgcaactgcaacggattacaataaagtgggggacgaacacccatcccaagggatgtttgacttgcaatttccgtttcttttgccacagattttgcaagcaaagcgaaacaagtgttggcatgcgcaattacatcgaacattcgttgactaaatttgcgacggagaacccatactgtgccatttacgttgtgccgggaaggaacgcgacgccagtgctaagggcggaatattcaaatgggcgactagtccacgtgaacgcaaaggctttcaggtgaataattatgaacagagaccaaaaatgagtaaattttttggaaattcaagttattcaaacattttttggatttgtatagaatgaccgttttattttgaaatctttgtgccttatctttgctctacctagaaaatcggaattaatggcaatttattccaaaagccacttatttcagttaccccatatttgcggacaaattcactccagacatttgcgcctatgtccaaacgggtttttagttttttcaatcctagaggtcataagcagaattagagataagaaaaactatgttttttctagttttttagcagcattaattttttgtaattgttttattttcaaaaatttactgacaatcaaactatcgaatacagtcactttctatcacttctttaatgctgtttatgacctcttggattgaaaaaatgaaaaaattcaaatttatccgaggcgaaaatgtctggacacgcatatatctgtgttctctcttcataaagaagttactatttttattatatgaaaatctttattttgtaattacttttttaaagcatggagcgagtttgtttgcatatgaacaaccttaggacgcgcagtggaattccaatttataaatgtaagaacaacacattttgtaactaacaataagctccccaaattcagttgaaaactcccatttttctcacaataaatctgtgcaagggatgtggacaccgtcaaaatggagagacactcgtcagaatttgcacatacttcccaagccggaattttcgccgttgttgacaaatgctacatctgccactaaatttctgtgggagaactctgttccgccgacagcggaggaagtgaaagacgaaacaaaatgattttgtttatttatttcgatcttttggtttatgaggacagatcacacatttatcccttttcgcgcttctgataataaaaagcgatgtaaaacttacattgtgctgcaaaaattcaaaacagaatgccaagattgcgaaaatattggcatatgcatacatacatatgtttgtatctctaacaatgtatacacagcaaattaactgaagaaaaatcaaattttaggttcaatttcttattctagcaatacaaaatgggtgcagatggaggaactattccaaagcgatgcgaactcgtcaagaagaaacgaaagaaagaaaaaatcgagaaatcgtatgaggctgctacaaaatggcgcacttgccagctgtcacagcaacctctgaaaaagccgattgtatgttgcaagcttggaaggtgaagcgcctctcatttcttattcactgtattttcagctgaaattgcaatttttagactttacaacaaagaggcggtgcttgaggcaaagctggacaaaaccttggcaaaaaacaaagcgactgaacacattcacgcgttttccgatgttaaggagttgatgttgaccgacaacaaagcgtggaaggacaatggaccggagaaaggagacatttacatcggtgaagcattcactataatccccaatcttttaaataggtttaatcataagaaagattccaatctcgggtatttgtatgttggccagtgttgggtccttgaaatttcagaaaaaaatgaaaataaaaatgcaaaattttgagtaatttaattagtacgatccctagcctgttttctagaattaagatcgtttaatttgctcatcaaatgcttgttctactttgtttttcccatttacatttgtactttaagacatgaatgagacgccatgggtttgcccaatcactgccttgccaatgaacggagtaaacaatttttttgtcaattggaagtgtggttgcgtgttctccgagaaagcgcacaacgaactaaagacggactcatgttacggatgcggaggaccaatgcaggagcaacagttcatcaagctgtacccggacgaagaactctttctgctgtacgaacaacgaattgttgatgaaattgcgcagagaaaactaaaggcgggggaaaagaagcgcaaaacgaccggcgattcaaagggcgcggagcatcagcaaaagaagagcaaagtcgaagaagagactaagttcagcagcattcaggacaatccgaacgtgccgaaggcggtcaagtcgatgttcacaaccagtgaagaggccaaaaagcagccaacagcccattgggtgacacacaatcccctttattattaatggcgatgtgagctgtttttttcatacatgtatttgtaaaataaaaaaatgaattataatttaaaaaccttagttagtgatttgttctcttctcatgtgaaatactccgacattatttatttaatgcattatttttattttataatgagcaaattgaaaaataaaagggagagattcataagaatttccatatttatgaggctgagaagtcctcttgattctatgaatataaaagacattgcattacagaaaatcatttgcatttgttggtttgcgtctgactattcattagaacaaatggatggattgactgagccaatgctttcgacacggccaagcccttcgattggagccgagggaaaagagcgttttgcgcgtgaaaatcacagtgaaattgaacggcgaagacggaacaaaatgacacattacatcaacgaacttgcggacatggtactgaaagtcgctgttgccatcgctattaaacatttcatgtga

SEQ ID NO: 46292 - DNA, 1114 bp, Heterodera glycines
atgaacaagcccgacttggtgttgtttgttggcgaagcttgggtcggaaacgaggcggttgaccagctggtcaagttcaaccaggcgttggccgacaattccgccgtcggggagcaggcacggctgatcgacggcattgtgctgaccaaattcgacaccattgacgacaaagtgggcaagaatattcaattgaggaatcaaatgtaaaaaccaaaggttggcgccgccatttcgatgacttacatcacgggacagcccatcgtttttgttggcaccggtcaaacttaccacgacttgcgcactctgaacgcgaacgctgtcgtgaacattctgttgaagtgaccgatttgttttgaagcgctttcttttcggactgtcatgaacaaacccattttaccgttgaaaattgtggtgacgtgttaaattccatttattattagtttattattaaacattttacaattagcaggaaatgattcctaaaattggtgttaaattgatgttattcactgttctgatttggttgcttcttatttttccggcatttgtaattcgcttgaaggcatttttctcattgtaccataaataccatctcatggtgtgtgattattgcttcgatttgttataaaagacaaaaaccgattatattaatgcgtcaattttcgaaatttttgtagtaattttaacacattgacttggttttgaggaggcatgccactgttttcccggggcaatatttgggccgtggcgttggcgctcggtacgttcatgttgattagtatgatgctttatctgtcggtggaatcgaacgcgcggcggaggacggcactttacggggacgacgaggggggcaaatttgaggtggaaaagggactcagtaaactcatttactaatgtcgaaacaaaggaacgccaaaatgccattcggagacgcatcgaaacgcttaaaagcgaagtggtggaaaaccgaaaattattggagaaattgggcaaaaagttggagggcattgggaacaatgcgatgaacgacggtggcgaagaacgacggaacggaggagaaaacgcggacagaaaccaaaacggagcgcaaaaggaagaggcggaggaaattgag

SEQ ID NO: 46293 - DNA, 385 bp, Heterodera glycines
ttgcaagccaatgaatacacaaatcaatggtcattccatccccgcaggacattgacaagaaagtgcgtcaggaggtggacgaggcggtcaaagtcgcactttcagacgaaggcatggcgcttcattgtttccaccttattttgttgttttttcagttttacctccggaagcgctcttctccgatttgtatgccaacactccgccgcttgcggtgcgcgggacgactgccgacgcaaccgtcacacagccatttgtgagcacggcggaagtgttgagaaaaatggggagggagccgaagaattattgagagaacgaacggacagatagccaaagacgcattgataattaggagaagcacggaataattaattgttagtcaattatt

SEQ ID NO: 46294 - DNA, 703 bp, Heterodera glycines; identical to SEQ ID NO: 32283

SEQ ID NO: 46295 - DNA, 1830 bp, Heterodera glycines
tgcttctaatcctgctgagatgttcgaactgcgcgcggaattgaacgcacacgaaaaattggcggaagaaaaaatcacagaatgccaacatttgcgcgccaatttggaactggcacggaaggaggtcagagaagcggaggagcacgagacagtgctgcgcgcagacatcgacaaattggagagagagttggcggaccagagacgcacgacaatgccaatgcaaacgcaccaattaacggtggacaaattggagagcacagaacggaaggtagagagagagagagaaagagaaagagaagggagagagagagcgggaggaaaagaagagagagaaagataagggggagagagagaagaaagttggcataatggcattggtgccattttgttttttttaattttctgagttttatttttggaaattcagtgaatttttgattttttataatttcttggcgtcagcccaacccttagcttgttagcgctataatttttccataaaattaaactaaatttgagttaaaagtgccaattgaaaattaaaggaaatttcagcaaaaagtgccagtttttaatttcggaattttttgccacaatttttaaattgtttttcttgaaatttataggctaaaaaaggaaaaaattataaaatggagtcattaaaattaatttttaaaaattatttttagagccaacaattggagcaacgtttcaccgctcagttggacacgttacagcgcgaaaagtttgaagcggaagcgcaactccaaactcaggtccaattatttgtgaatgcttcacgtcatgtgacacattttcggttcagaaaagacagcagcgtgactgtcgcgcggagatggacgcgctgcgcgagcgcgccggatgcgacgctgaccaatgggagcggcagcggaaggcactcgaatcagaacgaaatgcgctgcgtgcacggctcgaccttgaggaggcaaatgcacgtgagctccatgctgcaaaatgtgaagcggaaagcgctgcacgcaacgcggccgagtacgagcgtcaagtgcacgaaagagaggagcgcatgcgcaaattggagacagaattggcacaacaacggcagcaggtggccatgagttttttgtaaaagattttcaacaaagatattaatatccatttttgcaagtgctatccttgaaaatcatcatcttgattcttaaaaaccgtggcaattaaacatttttgggcaaaatttaaaaaataaaaatgaatttttactcatttatcatttaaacattttaatttaattaattaattagttaattatcaattaatataattaaattatttaattaatcattaattaattatcaattaataaaattaaattcattaattagtcataattaattacctcaattaatataattaaattaattatcaattaatattattaattaaattaatcattaatttattaaattgatcagcaataaacaataaaacacttcaagactgatgccgaaaagaaaaagtcgcagctctaccgagaggaactgatcacagagcaaaatcggcttagcgatttgcttggtcgcctccgttctggttaacactgtaatctgctttttgtactcacagtaatttgttttacagtatgccttatggcgctgcgttccggcgctgacgaagcggcagacacttcctgttgtttggagccgacctgcatgcaggacgacctgcagctgattgcaatcattgatgatctgctgatgaaggcgttgacggacgcacgccgggaggcggacgcactgcgcgtgcagcaacagaaacaaatccgcgagcttg

SEQ ID NO: 46296 - DNA, 1257 bp, Heterodera glycines
tttttgttgacccaccagcaacggaaaatgggcaacgaacacagcggcggtcgctttggtggcaacggcacaaacaaagaaaagggggacgacgatggcggtcaaacatctccgagcacttccactggaattcccgcctcattttcttttctcgctaagaaacgtatgttaattaggtattaaatttaaaatgtttttctcatatttatttgcatttttgcaaagtatttatatatttttttattttttcgctaataataaatgatgtctaggaaattcggcaaaaagtgcggtgatgggcagcattgtcgtggtcatcgagggggccagctgttcgtcgtccgctgtccctggcaaagacgtggaccttcggaggataaaggcacggattttccgtcgtgtggttatctttaacgcctttttaggaaattcctcgttttttgcctttactccgcggagttttgcccggtcacagagacatccccgaagtgcagcagaaaatcgacagcaaaagcattcttagttttatgcatcgccttcagcaacattttaaaagctgtgctcaaacggtggcgactgagcagggccgaatgttcgcccgaattgtcgaagtcagcgggggggggggatgatgtggaaatgacaagtcaagaaatcctgttttcccgaaatatccattttctggtgtaatgaatgtactaatttctttaaacatcaatttaatatacaaaagtttacatctccccgttctgacttccatcataagtctcatgattatgacaaataatcccccccccccttgttttcttttatgggtcgttattctgtacaattaattgccttttattacttttgtcagattgaccaattaatttcgtcgctgttcaaaaagacttcgacggccacaaaaagattggacgcactgaacaacgaattgagaagggtcggcactttttccagccaattggaggaaattcaggcacaatttatccgcaaattgacaatttctccaattcctcccccatttaggcttctcttctcgatttgtcctcctccgccaattcgctaaaccaacttttgtccttcgacgaccgtttgccgcctcttcaattcgcatttactccaattttaacgcgaaaaaagttgtcagaaaatgccgggacaatgttgcctcaaaacagtgacaatattaattcgggtgacagaacggcgattgaaagggatttgaggaaagtgagcgaattgcgagtggtggac

SEQ ID NO: 46297 - DNA, 1038 bp, Heterodera glycines
tttcttacgccgatggatgggccgccgcccccgccgatggccaaaccggggcgtattcggatgttccgctcgcttaagcaattcgtgccgacgaaggcaataaatttgttgcgatgttcggaatggaattgtttggctttatttaggctggtgagttaaaattgtacggggaggacattgtctatgtgaaggaagcgccggaggggacgaaaagttgcgaagcgaaaagttccacggggcacaccgaaggaattctgccaaagcaattcggtgaaaatcacgagaaatgagtcaatggcaattcgtacaataataaatttacgaaataaagcctgatcctatcgtaggcccaagaagcttgagactaagcccatatttgagttgcctttgttcgaattgtcatggcacccgagaaagtgggacgaatcggcaaaaacatttgtcagttgaacaacacatggaactcatcgaatttccattacacgaggcggcgagggccggagatttgagctttttgagggagtgtttggacaacaaagtgcgcttttccttgtgttgcatgacgggtggcaccacagtccacgcgtggcatttcacccccccccccctccgtagtcattttccccaattgtcagatgtccgtcaatgggttggacaggtccggctccaccgcgttgcactgggcggcgtatgccgggcacacgcccattctgaagcatttgctgtccgtgccgaatgtcacacttttggcccaagtcattccttcccttgcccccttttctctcacattctctgtactttaatcagaataaattgggcgattcgcctctccacgcggccagtgcaaagggtcggttggactgtgttcatttgctggtcgaggcgggggcaaatgcgcacgtgaggaacagaagaggacagagaccggtcgatgtgacaggcgacccgcaagtgggagcactgctgaagacgacgatgacgacgacgggggatgacatgacggagggagacgaggactatttggaggaggaggacgac

SEQ ID NO: 46298 - DNA, 1121 bp, Heterodera glycines; identical to SEQ ID NO: 32322

SEQ ID NO: 46299 - DNA, 894 bp, Heterodera glycines
attatgcaatgccaacgaatggcacaaaaaaaaggccgagggccaaaatcattgattgccactgctgctgtcctttccatctgctaaaactcaattcgtccttttcagtttattaatttaattaatgcaccaattccaacgttatgacccggcccagccgaggacagtcacttctttcaaaggcaccgtttgataacactcagaatgccatggctaatttgcttaaatattcaggcaatcagaagctgatctttgagggttaccgttacaacattcaccacgtaataccgtataatgtatcacgagatatcgtacacatttccactcgcttcgtcagattgtgccggcaaagggcgtaaaaacgtggcgatgtgtttgtgccaagaaattgacctgctcgcgctcgtggtgcaaaggcagggcggagacatgggacgacgatggacagggcatttccaaaggcgaacacaatcacccggcggaacacgaagtgagactaactgaaactactacttaattagttaagaaagcgctagactaactggaactattaattaattatattggaatcggtaattgaataattacggagttcctttacaggtggccgaattggaatacttcaaggtaaaaataaaaaaataaaagaataattaatttaattaaagtagccaaaaagtgacttttttcatttttttttgtttttttttattttttaatataatttttctttaataacttttttaaagaatataaaaatccattctcggctcagagtcagctcattttggccgcaattgccagtccgaatgccaatctgaacgaattgatcgacgaggccatcggattcatgagcgaaggcgtcagtttcggcagtcgagaatctttaaaaaa

SEQ ID NO: 46300 - DNA, 854 bp, Heterodera glycines
cttttcgaggtgttcgtcaacgtcgatgagttcaccgactttcctcggcctctttttcccaatttcattttcatcggcggattggaactcgaaggaacacccgagctcaaagccctgcaggtcctttcttctttcgctcatcactgtcctcatttgcctgcatttaatctgacccccgaaggagccgtacaaaagtgagctgctgaaggggcgaaagggcgtcgttttcttttccatgggttccgccgtcaaaacggacgttttgccggcgccgtttatgaaaaatgtgatcggagcatttgcggaactgccggattggcatttcatcgtcaaaatcgagccggacgacgaacaaagccggaggatggctgagaacgtgcccaacattcgccttacttcgtgggcgcctcagcccgccattctctgtgagctcttttccaattaagtcgatgtgttggcaaaagaaaccaaaaaatttggcacttttcaaagtcttacacttcatgttgtccttcgcaaagagtgtttggcttttcctatgcttttcctttttcctatgcttttccttttggttttccctttgctttttcccattttccaattgcctccccctcctcagcccatccccgcctccgtctgttcattacccacggcggttacaactctttgctggagggtgcacaaagcggcactcccgtgctcagcatcggattcttcgcggatcagcgaaggaatgcattggttgcgcagagaaacggatggggaagggcatttgaaaattggaaactgttggaaggaatgaacgaattcagagagacggtcagggagatgttggaagaggacaacgagcagtt

SEQ ID NO: 46301 - DNA, 2269 bp, Heterodera glycines
atggctgggattgactttgggaatttgacttgttacatggctgtggcgcggaacaaaggaatcggtgggaaaatatacaaaacatttctgacaattcttaaatgttttagaaattgttgagaatgattactctttgcatgccacgccgtaagttccgtctcccattttccatttttgcatttgtccgaatgtcttttgttttcagttcgtgcgtttcctttggacaattcgctcggatgatgggtttcggggccaagcagcagctgaacgtcaattacgggaacagtgtcgtgaatttcaagcacatcctcggacgcactttcaatgacaaagtcgtgcagacatttcgtcagcacattccctgcggacttatggggaagttcaccgatgaccaaattgagataaaagtgtgccaaaacgtcacaaatcattttgtaattaggaaatgtgttttcttaggtcactcatttgggcacgacgcgagtgctttccccggaacaggtggtcgcctgtctgttgacacatttgcgggttcagctcagccgttctctcgggacggatgccactgaatgcgtcattaatgtgagatctttcttttcggtaccaaaaaggatgggcggataggaatagttttgggtgttaaaaatgctcttcaataacccaacagtttgttctccttcaggtcccgtttttctacgaggaaaaccaacgccgcgctttgctgaatgcgggtcgaattgctggcctttcacttcgcctgatcacggacccggccgcgttggcctattgttacggcatgtataacggggcaaagtgagtgagggacaggcccatcaccaaaaaagttggagtgggacctggcaactttttttatcggcattaattcttttttggctttgataaacataagaaaatgaaatttaaaacttaccttgtattatataaatttgattatttttccaacttttccaattgtaaaaccctctttttaacacgcatttttcattctcctctttcagtcttcctccacctgaacagcccgctcggcttgttgcgtttgtcgatgtcggccattcgtctgttcaagccagtcttattgcattcagcgccggcaaagcggaggtcagcaggcgaatgttgtaaactccttaattatttccattttaggtgctcgccgcctctttcgatttgaccgttgggggcgtccatttcgatgcgttgttgcgcgactatttcaatgaggactttggcaaacgcttcaaaatcgacgcgaggaaaaccccgcgggcgtggctccgtttgttggatgaatgcgaaaaggcattgacaatgaaaggcacaaacgaattagaactttcagatcaaaaagcaaatgtcggcaaacagtcagcccattccctttgcaatcgaatgctttgtgaaagacaccgacgtcaacggagtgatgcaaaggtgggtggtgggacagtacctgagttgttttaggatgtatgaaagtccatgggacgcgtaagcgttttccccctctgctgaattttgaaacaaaaatagtcatcaaataattacaaattagggaccaattcgaacaattggcggagaaactcttccaaaaagtgcaggcactgctccaacagctcattagtgacgcgaatgtgaaggtaaacaaaaacagtcaattaaaaataacaagtttttaggtcggcgatattttcgacgtcgaattggtcggggggtcgtcgcgaattccgcgcatcaaacaaattgtggcaggtagtaaatttggaaaatcattaaaaggatgaataaaagtcggctattttaagagtttttcaagaaggtgccaaaaacgacaatgaatcaggacgatgctttggtgagtggccttggactcaaaaaacgaacggaacttctcttaggcccgcggatgtgctcttcgttcggccatgctttacccggcttatcaggtgaagaaattcattgtgatcgatcgctacgaaatgccaatcgacccatcggcactttcggacgaagagaagttaaaagaggagatcagagccgaagtgagtccaattttttttttgtctcgtgcatttggctgttcagcaagaaatgcagacggccgacctacgcgacaaacaacgatcggatgcgaagaacgctttcgaggagtactgctttaaaacccagcacacaatggagggtgaacagctagccaagggcaaagagagcgacgaggagcggcacaaatgtatcgaaaagtgcaaaggaa

SEQ ID NO: 46302 - DNA, 469 bp, Heterodera glycines
atgactgctagtcgaagattgactcgcgcggaagtggcggaacacaataacagtagcgatgcatggataattattggcaacaaagttagatttgtaaacgaaaaaaaagcacttatctttgactacaattttactgttttgtgggcgtaaaatgcgagctaattgtcaatttctcaaacggatttattccttcaaaggatgagaaaaaacaatacaaattcataagtttatccccataaaattatgccatattttatttaggtttacgatgtgaccaaatttctggacgaacaccccggcggaatggaagttttaatggaaaaagcgggcgaagatcgaaccgaggcattcgaagacatcggtaaatgacaatgttttaataaaatataatggaattattcaaaatttaggccattctacggacgccaggcaaatgaaagaagattttctagtgggagaaattgtcgag

SEQ ID NO: 46303 - DNA, 1044 bp, Heterodera glycines
atggtggaccaatgcttttcgaagccaaaacgtgaaattttgggcattggtgatgtttccaaatggctgaactcagaggctcatcacaaatatatgggattcttacgccgtcttaattctgccgttaaaactgtgccgactacttcatcagatattataatcggagaaactgcccgtaaaataatttccattttggacttacttgaggtgaacacataagctttttttcatttcatataattagaaagtgtcctgtacttgtatttgtatcccgaaaatccaggtccaaataaataggtccaggcttttcagtttgtcgaattctacatttttttttgctaaggcctggataaacgaattccctcctgaagatatgggattgcaacgctttggcaacaaatctttcaagaaatgtttcgagcgcctcatgtcggtttgtttttcttttcttttgacgtcccaaaaatatattaaatgccgatcaatgtaatttaatttttaatctttttaaggatggacaaagtttgctgagcgatttgtttcccgaaaatttaaagtcagctgttcttgaaatctggccttatttgatggattcgtttggaaattccactcggattgattatggatcaggtttgtcagtgaaattgacaattaatccttgaaatattaggtcacgaaacttcttttctcattttcctcttctgtctgtacgaaattggcgtgctccattcgcccgacgatgaccgagcttccatcttaagggttttccatcggttattttttgcccaaataacaaataaaaatttgtgatttcgattcgtatatatcacatctttccggttcactgtttttaaccgttaaatttgtttagatatctgaaattagctagacgacttcagtgtgagtatcgaatggaacccgctggttccagaggagttcatgccattgatgactttcagtttttgccttttttgtttgggagcgctcagttaattggtaggattctatgtataatatatttttaaatgaatttcaaatcagaca

SEQ ID NO: 46304 - DNA, 819 bp, Heterodera glycines
atgtcctttttgcaacgacctccttcgtccgtgaaagaccatcgacggacttgggacaggacggaatatgaagtcaaggcgcaggagagactgactaccgaaagggaggcgttggaaatcaaaaaaggaaacatacggccaccgccgaagggtccgaagattaaacgggaaatgctgaagccgagggaattcaaagtgggtgctttcgcggcactataatttttgctttctccatcggcgtaataaatcaatttattgctcaggtagacctcgagtcgaaagtgggcaggcaagtggtgatcaacaaaaccacgccttcctccgagacaggcggttattactgcaatatttgtgactgtgtggtgaaggactcaatcaactttttggatcacattaatggtcagagagcgactcactcattagacaaattatccctgaatttgtaggtaaaaatcaccaaaggaatttggggttttcaatgaaagtgaagaaaagcactgtcgaggaggtccgagagcgtttttcaatgaaaaaggcacaaagtgagcagaaaaaaccgaataaaagattaaaattttgtaatgtccttaagaggaaacactgcgcaatgaggacgtagaggagaaacaacgcgatttgaaggaggaagaggccaaaatggcggatctgaaacggatgcaaagggaacggcaaaaggagaccagtcggaagaggacggcagcggcggtgacggcaccgcccacggacgaagaggcggacgcggaactgatgaaagtgatggggatcggcacatttggcagtaataaacggaagaaatga

SEQ ID NO: 46305 - DNA, 421 bp, Heterodera glycines
aacaccaacactttcaacaatccgcaattatttgaactcgaacaagcggccgccctcggcgttagtcgtgcgaaagacgtcgccaaaatattctctctgatgctttccggcgaactgatctcgccgaaatcgctgacgcggctgttaaaacctcaatttgttgaccggattgattacgtcatgatgatccccgtcagtcgtggcttcggctttatgtatgaaaagcacccgagaaaatcggtaaggaaaaaggagagggcatacgattggaagagaattttatattggacgctttctgtttatgcttaagggcaaatggctgtttggacacccgggatttggaggatcgacgctaatggtggacccggaggaggaattagtcatcgcttatgtgtgcaacgggatgaagacaggcaaatga

SEQ ID NO: 46306 - DNA, 1357 bp, Heterodera glycines
atgaccgaacaaactgagcgcgcataccaaagacagccgaccgtgttcttgaacgacaagttcagaactcaaggaattggaaagaaggcggccaacaaagaccgttattggaagaatgttgggcttggctttaaaactccccgtgaggtttgaattttcatttgcttggtttggggtactgatttgcctaaagaacagtttttgttccaattcttattaaagtacatattttaagaatgtttttaggctattgagggcatatacattgacaagaaatgccctttcactggaaatgtttcaatccgaggccgaattctcaccggagtagtcatcaaaaacaaaatgcagcgaacgattgttatccgtcgcgactatctccatttcgtgccaaagtaccgtcgttatgaaaagcgccacaagaacatgtctgtgcattgttctccgtgtttccggcaagaattaactaaagagttgtcttaaggtttgacctattttccagggatgtgtccattggtgacatcgtcacaattggcgaatgtcgtccgctgagtaagacggtccggttcaatgtgctcaaggtgatcaaagcatcgggggcgaagaaggcgttcgacaagttttgagagacccttatttgaccaccctattcattgttgctgtttgttatgacaaaattttggttgaaaaactgttggatgtcagacagtcgtacactaatcattcgtatatgagcatgtagttcggtaatactgccgaatgtcagattcgtgatcagcggccctaaaaaccccatgaaacatgtggtcacgactttttagaacagaaaaaacttttttcaaaaagggtgaagtttagagggaatcgaaattcacctcgaaaataattctcaaaacttcttaaatataaaactttaaaagtaccatcgttcgaataatgcaaattattgaaacggaattttcacagtaaatgagaaaatggtggtcgccgatatccggttgcctaataatgcgtaacacgtattattaaatcaaatgaacgaccaactcgataagccgacataacaaataatcatttaatggatattagctatgttagaacctaatatgtaaaccataatttatcattgaaatgtttgaaaatacatttctatttttctccttttcatttgcgacttctctttcctactggcgtttcagtcgattcctttttgacctttgtttcttcactgcgttttctcttgctttttcttttgcgattagtcctctcctcctctgaactgctttcagttgaggacgaagaagctgcgtcaattccaagtgctgaacgccttttatccctactgtctgcaaagaataaa

SEQ ID NO: 46307 - DNA, 2946 bp, Heterodera glycines
atgggatccaacgaaattcgcaatgcgcttttggacgtcgcggcaccggatgaacagaatggccaacaagcagttcgaaatgaagcgggacgaggcggaggaaatttcgagcaacagcatgttgatggaggtttgcgaattcgattgcaaaacgttgggagaaataacggacaacaatggcaaattagaaacgaaaattcgaatgatggccatcgcattttacatcccgcgccgcaaaatgttagacctaggacttcaaccccatacgaaaatatgtttgaagagttgcgcgtagagcacaccgtagaatgcagaccgcacaatcaaaatttacaagcaaattttcaaaacatgttgaataatggtgtagctatgcagaaccaaagagttaccgcacccaccggtcttcagtcgcatcctcagcaaattcatccgcacccaattcaacaaacgcaaccacaacagccatcccaacccatgccagcccaaccagtttttcaacaaggatttcctgggtttatctggggttatccgggacaatttccttacggtccttatccaactgcttttggctaccctccacagcaaaattttggctatgtaaacccaaacctccaacaaccgccgatttttaatcagcaatttccgccaccagttttgcagcatgcaaattatgcaatgggtgtacctagccaacagcagccaattgtacaagcaaatcagcagagagaagttcttcaacctgttgcccagcagcaaaaccctccgattacaaaccgtccaaacaattttggtactcaaaatgcgggtgctgaaattcgtcaaactgaaaatgaaatccgtggtcccgggatggaccaagtcgcatatgctctgattatgagtcaaataccttatttaaagggaaatgaaggcgctgaaaaaattaaggagtttttcaagcgttttgacgctaataccgctgaatggtccaatgcaaaacgcattacctcattagaatcaaaactctttggtcgggctgagagagcttttaagtctgcgtgttccaccgaaccgtaccgatatgagtccataaaaagagaaatgtttcggcagttggaagaaacggatgcccgtgaatggagtgcttttgatcagataatgaccggtattcgacgaaaaaacgacgaggatttggacagtttggctgaacgtgtcatcaccctggtacgacgcgcatacccaggtttgactgatcacctggtcgatgattatgctatcaagcatttgattcgaacattcgacaattcggaattggcactcagtttggaattgggaaggacacccggaatgacatttgatcattttgtcgggatggcggcgagagcagaagcgactcaaagggcaacccgtcggatggcatcgcaaaatgctatacaaagagggaggcaaaatgaagcgaattcaacgggaggatttttcaacaattcgcaaacacagcaaacgaacgacaaccgcccaaaatgctacaattgtggaaaattgggccatgttgccagaaattgcttcaggcgtcaagccgaacaaaatggccaaatgcgaaacttcgaacatatcccaacgactggtgcaaactgtaccccaatgccgagtaacccaaatacgaattttatgagcaaacccgaacaaaatgctaatcagcaccgtcctcaacattttcaatcaagaaattttttgaaacaaaatttccttattgaaagaaaagaagtgaaagacaatgaggacgcggtcaaatgcacaggtgttctgaacaatgaacccgagatggaggaatttttcaaaagtttttgggaggagcacgaagacaattttgaagctgctggcaaaaaggaactgtgcctaatcggcaaaataatgacaacgaatgttacaatttttgatcagcccgctatttcgatgatggatggcggtgcacaagtttcacttattaaggcggagtttcttaaaaatattttggaaagtcagaaattggaaggcacaaatctcaaaatttggccgaaaacccggaatgtcgttgacattaatggaaagcgtgtcgagtgttatggaattattttgttgccagttgtgagaagaggttgtgaagcagttgaaattatgttccacattacggatgcgcctattggacatccaattttgtttggaacaaatgcacttgggctccttgggttcaaaatttttgatgctcccaacggcgaattagtggaatttgagtgtgtggacaacaagtctgattctatgcgtgtaatttacagtactttggttgaaccatattcaacaaaatttgttgaactttcaatttcgccggattttgacgacaaaaatgttttgatcactccaaaagaagagaatgacagaattagggttgagtcttctgtagataaaggcagaaagggaaaagtgattacggcaatcacaaatttttcacacaaagcagtaattttgaaacaaaacgaagaaattgctgcagttgaagagttgaagcaaattgccaatgctgacgattgcttgggacgcattgtgcgcaacagacccggaccaatgacctccaagaaacgcgtgttggggttgtgcgccgaatgcgacaaaccgatcactgccggcgctcgtcagatgcacatgttctaccaccttggcaaagacatgaatacttatcgtttccgttgcaaacatgcgggatgcaaagtgcaagactatcggaaggatcagatggaaaaccatcagtcgaaagcgcacggaaaagttgacgccgaaatgatggaagacagaagcatggaattgtacaacatggtccaagaaatgtcaatgcaattgctgggcaccaaaggaaacactcccggaccaactgcagtgaaagcgcaacagatttatgagcagcaaatgcgcgaaatggaggccaatttgggg

SEQ ID NO: 46308 - DNA, 1256 bp, Heterodera glycines
  unsure (1)..(1256): unsure at all n locations
atgtccagttttttttgttacggcgtaattgcgatnttcnccctaaaatcggctccttgtgtttcaggtgactcgggcgtcggaaagacatcgctgatgaaccaatatgtgaacaaacggttcagcaatcagtacaaagccacggttagtgcctttttcctgtttttgtccatttttcatttgtttcccttcagattggtgctgattttcttacaaaagacgtgatgatcgatgaccgacttgtcaccatgcaggtcaaaaattggattgtaactttttgttccgtgtgttttccccgaattgctggtcacgaatttgacacccattcgactgattccgaatcgctaacccaaattttaacaaaaattttgcattccaaaagggcccctcatattgtttttaaaattggtgacttaaaccgaatgcgtaccgtctttactttgctctttattcgtacaaatgccattttcgatttgtttgtacggcacttttccacagatttgggacactgccggccaagagcgtttccaatcgctcggcgtcgccttttaccgtggtgctgactgttgtgtgctggtgcggacggccaaacattgggccacccaattgaaccgttgccccccccccttttaaggtttacgatgtcactcacgcgccgtccttcaaatcgttggagagttggcgcgacgaattccttgtgcaggcgaggtgacccattggaattggcactttcaattagcagacaaatgccgagcaccgaaagcattttaaaaaagtgtctaaaaagcagtccaaatacgaattttaagtcctcgtgatcccgaacactttccgttcgttttgctcggcaacaaaattgacaatgacgcggcgcgtgcagtgaatgcaaagagagcgcagagttggtgccagtccaagaatgggatgccgtactttgaggtgaattccacgcaaaacatttaaaaattgctacacaaactcaaatcccgttccgattagttgaatttaaactttttttggcattttctccatttttcaggtctctgcccgggacggagtgaacgtcgaagagggtaaaccatccctttcgcttttccattctctcccatccaacttttgcagctttccaagcgattgcccgtgctgcgcttgcacgcgactcgcaggaaacgcacgacttcccgggtcggtttgcgggataaaattgggggaaaatgttgccaatcatttttttttggatgaaaaaggcactcgta

SEQ ID NO: 46309 - DNA, 1071 bp, Heterodera glycines
agttcactaaaatttgatggtcgactcgcattgtcacgtgggagagagttggcgaacacggaaatgctgaagcagcatgttgaggacgtcctgaaggcggagcagtacgcggcttggcacgtcaacgagtaaatgcagcggtgagaaattggtgcaatatgaaagacgggaatgcgtttgtgcattttacactaaatttagaaaaaatttgtcggtacgctgaagggcgatttgcccggattggatgaaggagagcagcaaattggggacagcgaagagtcggagagcgacagcgaaaatgaccacggggaaaggtgctttaaaactaaaatttgtatgtcagccttaaaattcagcggagcgaaaccgaagggcatttcggcttccggcggttggttttcggcattcaaatcgctggtgggcaccaaacagcttgcccgaggcgacattgagccggcgatggagaaaatgaaggaaatgctgatcagtaagcattatttctttctttaaaaaattgtttaatataatcaaaaagtaaaattccaatttaagcaaaaaatgtcgcgtcggaacctgctgaacgcatttgtgagtcggttgctgccaaattggagggcaaagtgatcggaacgttcaaccgagttgcgtcgactgtgcgcgaggccatgcgcgaagcacttgtccaggcaattaattatagcgaaaaaagggaagggtaggtgtaaaggagggaaatacggagagagcaaaatttaaaaaattgttgtttggttgttatgtccttggacattatctttcgttaagatcatttgatatcgtttttttcagttactcactccaaagcgccgcgtggacattctccgcgacattttggacgccaaagcgcaaaaacgtccctatgtgattgtgttctgtggcgtcaatggcgttggcaaatcgaccaatttggccaaggtgaactcagaggaggaagtgttccctttatctgttttctctgccaacagatcactttttggctcaatgagaatggccatcgcgtgctcattgccgccggcgatacgttcagggcgg

SEQ ID NO: 46310 - DNA, 2017 bp, Heterodera glycines
atggtgcagtttattgggttaaaaattgcgggggtcagaagcattggagacaaaccgcagtgtatcaattttttgtcgcctctgacaattattcagggaccaaatgggacagggaaaacggtgccgtaatttacactaaatctaacaattcaattttaaagaatttgcatccaattacagacaattatcgaggcattgaattacgtcacgacgggtgcgctgccggcgggcaaaatgcaaacattcattcacaatgcacaggtcgaaagacacacccaaccaaactcattttgttttatttctaaaaaaaattacatgaattttagagttatgaataaaaattatttttttggatgaaaaatgatgaaaagcctaacggtttttggcatagtaattcattttatttctgtttcagattgccaacaaagctcgtgtcgatgcgctggcgcagctcaacttcagagacatcaaagggaacaaatgcaccgcgacgaaacgaatgaatgcgagcgcaactcacagcgtactgaggggggggggggacggcacggggacaattcgtgaaaatttaaaccgaaatgaattattttttagggcaaattgtcaacaaaatcggacgaatttacgctgagaattgaagacaaatttggcaatttgaagagtgtttcctccaaaatctcggacttcaacaaggagtcagtgatgattctgctcacattttgtactaagtttctttcccaatttaagatgctcaatttgttgggcgtcccaaaggccgtgttggagcatgttttgttctgtcaccaggaggaggccaattggtgggccaaaaaactcaaaagtttaattaaactcactgaagtcgggggggggggggatactcattggaaaaaccataaataaaataattggttacatggtgcaaattttagcaattttgaaattaatgtccaaagtggggctcttgaattttctgcattttgcttgtgtattggcattccgtcgtctcttcgtttttaggcctttgtccgagccaaaagaattgaaattgcgtttcgatgcgatttttgaggtgacaaaatacgtcaaagcattggaccacatcaagaaaaacatcaaagaattggtgggttggcttcttttaaattggaaatgctgaaaaaaaagatttcagggcatgcaaattcagctgatcgacaaggaattgccccatttggagaacaacatgagggcacgtgccgatgttcgtccattttgagggcggagtaatgccaatggcacacttacctcctaaaattcgggttttctggcaaccgtaccctcgtcaaacccccgattttcaatttctctcccaattcgttgtactttttcagctccgtcttcgctttgatgaaacgctgaccgcactgaagcacaatcggaagagcattgagcaccaattgaagacggaaagagaggcggtggacggcgaactgcgcaacattcgcaaacatttggaaatggccaccaaatgcaaccatgagtttggtcagttgaccatctctgggcattttgagattttctgaattgttcgtgtcgtaaaatgcgaaaattcgatccgtaactttggtttgtcgctcttccaaatttttccatttttcagagattatccaaggccaaatcaatgcgcaaaagcgctttctcgagggaatgccgccgttgacgcacaaaggcacgcgggaacaactccaacaacaaattgacgaggtcagtgggggaatgacggagaaataaacaaataaaatcggacgaattggcaccgaattcagtgccatttttaaccccaattgcttttggtttaaatttttgttgtccgttcgttgttcagctgaagcgttccgccactgcacgcgaagcggacgaacaccgcgcgtcggttgtgcggcaagtgaaaagcatcgcttttgagatggaccaatgcaaaaagttggaggaggcgtaccggacaaaactgatgcagcacgagtcgagacgaatg

SEQ ID NO: 46311 - DNA, 869 bp, Heterodera glycines
atggcattgtgccgtgtccaacagtcgctggaggcaatggcctacatttacttcatgcaccaagtgttggaggtgttcaacacggactggtacactcgcttggacaaagcagcggtaaaaaaattaaaaaaaattttttttcagctaaatttggcgccttcagtttttaagtgccataacttttttcttgggcaactaaattcaacaaccttagtatcattcgataggtctaaatgttctctaaatggggggaggagggaacgatacggggacttcaaaaattgagactttatggcagaatttttcagttttttttttgccatggtgccacttttttcatgtaaattttttccaaattttataaagcctccccgaatctgcgaaaaaatgaaaaaaaatttcccttgtgttttttaattaaccccaccacaattcgcccacattttcagaaagaaatgggcatgtcggtgaacaagcgcaaggagggcatggcattgcacgccatttacatcagcacgttgcacgactatgacgaggtgtggtggtaacaactcaatcaatcatcaattaaattactcacccctaatcagttgtaattaccctaattaattgaagaattctctccctctcgaaaaattaaaaaagtatattgaaaatttttactttttttttaaattttttaacggggatgggggcggtataatgcacccaatcaattagtgatggtttgcgttaaatgactaaaattgcagggatttttcggagatgaccgcgtgttggccgccgccgtgtggcgctcatttttccttcagctgccggacgtgtgcccggcacaaatcaaccgggtggtccgttacatgagggcaacg

SEQ ID NO: 46312 - DNA, 2993 bp, Heterodera glycines
atgaccggtattcggcgaaaaaacgacgaggatttggacagtttggctgaacgtgtcatcaccctagtacgacgcgcatacccaggtttgactgatcacctggtcgacgattatgctatcaagcatttgatacgaacattcgacaattcggaattggcactcagtttggaaatgggaaggacacctggaatgacatttgatcattttgtcgggatggcggcgagagcagaagcgactcaaagggcaacccgtcggatggcatcgcaaaatgctatacaaagagggaggcaaaatgaagcgaattcaacgggaggatttttcaacaattcgcaaacacagcaaacgaacgacaaccgcccaaaatgctacaattgtggaaaattgggccatgttgccagaaattgcttcaggcgtcaagccgaacaaaatggccaaatgcgaaacttcgaacatatcccaacgaccggtgcaaactgtaccccaattccgagtaacccaaatacgaattttatgagcaaacccgaacaaaatgctaatcagcaccgtcctcaacattttcaatcaagaaattttttgaaacaaaattttcttattgaaagaaaagaagtgaaagacaaggaggacgcggtcaaatgcacaggtgttctgaacaatgaacccgagatggaggaatttttcaaaagtttttgggaggagcacgaagacaattttgaagctgctggcaaaaaggaactgtgcctaatcggcaaaataatgacaacgaatgttacaatttttgatcagcccgctatttcgatgatggatggcggtgcacaagtttcacttattaaggcggagtttcttaaaaatattttggaaagtcagaaattggaaggcacaaatctcaaaatttggccgaaaacccggaatgtcgttgacattaatggaaagcgtgtcgagtgttatggaattattttgttgccagttgtgagaagaggttgtgaagcagttgaaattatgttccacattacggatgcgcctgttggacatccaattttgtttggaacaaatgcacttgggctccttgggttcaaaatttttgatgctcccaacggtgaattagtggaatttgagtgtgtggacaacaagtctgattctgtgcgtgtgatttacagtactttggttgaaccatattcaacaaaatttgttgaactttcaatttcgccggattttgacgacaaaaatgttttgatcactccaaaagaagagaatgacagaattagggttgagtcttctgtagataaaggcagaaagggaaaagtgattaatgcaatcacaaatttttcacacaaagcagtaattttgaaacaaaacgaagaaattgctgcagttgaagaggtgaagcaaattgccaatgctgacgattgctttggacgcattgtgcacaacagacccggaccaatgacctccaaaaaatgcgtgttagggttgtgcgccgaatgcgacaaaccgatcactgccggcgctcgtcagatgcacatgttctaccaccttggcaaagacatgaatacttatcgtttccgttgcaaacatgcgggatgcaaagtgcaacactatcggaaggatcagatggaaaaccatcagtcgaaagcgcacggaaaagttgacgccgaaatgatggaagacagaagcatggaattgtacaacatggtccaagaaatgtcaatgcaattgctgggcaccaaaggaaacactcccggaccaactgcagtgaaagcgcaacagatttatgagcagcaaatgcgcgaaatggagggcaatttgggagtgagaaagcggcggaggcctgaatattttggctgcaatcttctatccgccaacatcaacaacaacgtcatctcccgctcttccggtctaccaatttacgactccgccaaccgccgagtggaggatttggaatgtcgtctgtgcaacaaattcatccttaatcgcatcaaaggcttccacatcctttggcatctgaacaccgacctcaacatcgtccgttacggctgcaaacactgcaacttcaagcatgaccgtcctcaatcggtcgttgcgcatggcattcgagagcacggcgacgaagcatcgtgtgaagatttgctgtacaacttcgaggacgagctcaagcaaatgtccaaggcgtgctttggcgtggagcgtttattcgaaaaggaaatacgccgacgcaatcgcttagaacgttttgcgcgatgttcgactgaaaattcctcggcgggccgtgccgaggacgacgacaattaccagcacggaaacaacgagtccaaactgtcacagcaaattgttcgccgccgttctcaacagcatatcatgaatctgagagtctcgttgaagtctgaaaatgttggtcgcgactggacgcccaaagagccggtgaggaaacgacgaagcgggggccgtcgtttcttcggatcgaggggtaggaagcctcgcgtaaggcgcgggatgtgatgatcaaactgcgcgaggtcagcatgcgacttggcggtgctcagtatttcaagaagcgcagcaacgaagccatttcttgtgagaaatgtggcaaactcgtcatcaatcgtctgtctgatcacgcttactctcacttggaggggtgcgacctgttcaagtgccaacaatgcaacttgggtcacttttcgcgtgagacgattgttcgtcatttgaaggactttcacaattcacacgaggctccgatggacaatcgccttcgttttgcacaagaaatcaaagattccattcgcgattgttacccacaactttttatcgatgcaccgatcccgacgaaagaggacatagaaaaactgagagacagtctgaatctgagcgaccaagtgttggtctgtgacaaagacgaagaaggggaggagggcgagcgcgaggaggacggcgaagaagcggcgatggacaaagaccacgcgaatgaggaggaagaagaggcggaaacgagatga

SEQ ID NO: 46313 - DNA, 2244 bp, Heterodera glycines
atgccattcgtcagcgactccagcaaggcgaggtgccgagtgaatcagccgcaaaatttgaacccggcaaaccttgcagtgagccattagctgaattcgttttcctgaggttttctatttgtttttttattttcagatttccaatgagcacgtgccaacgcccggccctggcggagtccacggcggcgcaatttcgctggaagacgccgaagcggcggcggaagaggaagtggcggagacgccggcagtccacgggggaggagttgcaacgggcagaatgaaagaggaggcggatgaagaattggaagaggaggaggtggaggaggacggcgaagaagaagcggacggagaagaagcggagggagatggaggtgaagagtacaacagcaacggagagacacggagacggaagagaaacgcaagaaggaagacggcgacgagacagcgcagcgacagagaggaaagcggcgtggcatccgcggcggtgcggcgcaacctgcgccagcagcggcaaatgctgcgcgaggcggtggagcaggcgaaggaggcgggcacggccacggaataccacggagtgttgggcagaaagacactggtgggcgagagacgggcagagagacagactgatcagtggcgaaaggacaaacgaacattttaaggaggagggggggggagagcgatttttggagaaacaaagtgtttggggagacgcaaaaaggggcagacatattgggcgattggaagaccaatttagcatttcggtgatcagagattttaacaattagaattgcgcggcactgaactgcacacacatcgaatgcgacatcgaccgattggaagagaatgaatttgttctcgtcgaaatcttctcccgggtgttcatttgatttcccctctttctcattttcctcttttatccctttagctttgggttaacactctgatcgacgaggatttgcttgaggccgatctctcctcgttagcttttgctcgcatttcggcacttccgttcgccccaaagtacagcccaccgccgctggtgatcgctgtgaacaccgaagtgaacccgacagaccccgaggcgggcacttgggaattgccggtaaattctgccgatcatcaggaagaattcatcgaatttctgctcatttaaagtggtggctgtggctgctggccattctgatcgctttgcttctgttggcagtgatcattttctgctgctggaaggtgaacccaagggaatgccattgcgaaagagtgcccttccctttcttttttgcccttccgtttttaaatttaattttgatcagtcaaaagggtcccttgcccattgcaatcgctgcgcctatccttccaattgcttagcaatccctcccattgcttctgatcactttcagtgcggcttcttcaaacgaaatcgtccgccgcgagaaaaggcgcgcctttcgcgtgggcctgccgctgcggcgacaaatggcggcgaacatttcggagaggaaaatggccgcgggcgagggggatattacgcggataaccaagcgagatacgcacagccacaaatgtaaggggggcgggaggggggatttcaatttttatttaaatttattaaatttaattgaaatgtttaaggtattcccccgaaagacacggcgcgcgagtgtgagaagaaaggctaatgaagaagactaattggttgactaaccaacagccaatagatgagattctaaaacccacacttttacttgttattttttcattggttttgccgttgccattttttttgtcgatttttcccttttccgtgtgcctttctttttcttttgtccctcccaccgaccaaaagccaaattcccagagccttaaaatcattgtttttttctttttgtttcttttacccttccattttctgctttaaatttccttcaccacggcgttttcttgccaaattaaccatttaattaagcacagaatttcccccaaattgaaaatgttctgtttttttcacatattttgtcattctcattcagctagtcaatcccttctttcatttcttaatatttcgtggtatttgtaattatttttataaatcctttgaaaattttctggaaaaattttcggcgctaaaacccaaaagaataattgacagactttcgttttcaacgacaaggctaatccagaaaaatatttgatattttcaaagggtcttaaaatcaacaatttccatttctttcccccaatatttca

SEQ ID NO: 46314 - DNA, 1276 bp, Heterodera glycines
gtcgactccaaaacggtgaaagcgcaaatttgggacacggcgggccaggagcgctaccgggccatcacttccgcgtactaccggggcgccgtcggtgcactgctcgtctacgacattgccaagcatgtgacctacgagaatgtggagcggtggctgaaaggtgtttgtgtgtgccggacggaaaaaaatggggaaatttacggcggaaatttttggtttaccagaaattttctgtgtgccaaaatccgacattttgaaaaacttggacatggattttctgggtaaaaatcccattccttgtagagacctggacccaggaaaaaaaccaggcctggatcggggtcgatccaatattttttcaaaaattatttctactttttcattttctggcatttttttttcttggcggggacaattttgtaggcctcttcagcctcttcaccggtgtggggaacagcctcagattaattggacaaaatagcgaaatgacgtattttcactataatcgttttttaaaatttaattttgcggcaaaaatggaaaatttaattttttaattgaattttttccgggacatgcgctggggacagcagcctcagattaaattgctttcttaactttaataccccgttttttgtccaatgtatttttttttaatttggtgacattggaaaaaaaaggaattttttttttagaattttttgctaaatttagcccattgagataacatttgcaaaaaaaacattgaattattgagagccggcgactgttttctcgctttttttataatgtgtctgtcacattttttagagttgcgcgaccattccgaccaaaacattgtgatcatgctggtgggcaacaagagcgacctgcgccatctgcgggcagtgccggtgaattttagtgaaaaattccaaagaaaaaatttggcagtcgtcagttttttttgaaatttacgaggccaaaaattgggtatactttgtctcctctcgaaaaatttttaatttataaaattttcaaaaaattaaaaaaaaatttttttttgaaaacttggaaatcatcataaaagtgaaaaattttttaaatcttttttaaaaaaaactccaaaattgtatttcaagattaaatttttactttccccaaagactgacgaggccaaggcgtacgcggagcgcaaccagctgtcattcattgagaccagcgcgttggacgccaccaatgtggaggacgcgttcaccaacattctgaccgaaatttatcgctctgtcagcacacg

SEQ ID NO: 46315 - DNA, 365 bp, Heterodera glycines
atgaaattattgagattgcgctcttatcttcatttttcatgtaatttgcatgttcgcaatttgacgaagtcagttcgttagttttcaagtatatgcaacaatttattatttctatttaatatttagtttatccaaatttggtacctacaatgagaaagccattcagcttatccagcagcactatgatgaagcgacgtcatcttcacatcaatttgtcgattctccatcccaagaagtcttccgaatggttttgccacctccgaatgtgacaggcaacttgcacattggccatgccatcactgtcgccctcgaagacgcaatatgtcgctaccagcgattactcgggaaaaaagttgtggaagaaa

SEQ ID NO: 46316 - DNA, 279 bp, Heterodera glycines
atgtgctcctggacccagcagatgggctttccgctggtcagcgttgagcagcgcgtgttggagggcgaccggcgcgagttgcgcctcagtcagacgcgctttttggcggacggcggccgggacgaggcgaacaacagcccaatttggcaggtgccgttcagtgtcgccaccgcggcggacccaacgcaggcgaaggccaagtttttgctggtcaaagtggaggacaaattcatactggacggcgttaaggcggacgaatgggtcaaggtgaatgaataa

SEQ ID NO: 46317 - DNA, 195 bp, Heterodera glycines
atggcgtcgcacaccgccggcatccaacaacttcttgcagccgaaaaacgagctgctgaaaaggtttgacttgatgttgatttttcaaatatatttatttttattttgcagattaatgacgcccggaagcgaaaagcacagcggctcaaacaagccaaacaagaagcacaggcggagatcgaccaataccgacat

SEQ ID NO: 46318 - DNA, 885 bp, Heterodera glycines
atgggttagaaatttcaactgaaaaatgttttgttctttatttagggaaaaataatatgaaaaaagaatattttattaactcaaaaaagatttcagaatcggataatgttcgtgacttgggaattataattgactcgaaacttaatttttcagaacatattagcaaaattatacgaaacgcatatattagaattttccaaattttgagagtgttgaaaagcagggaaataaaaactctaacagcagcctataaaacttttgtacgacctcaattagaatacgctaccgaagtttggaaccctaatttaaaaaaagatatagataaaattgagcgtgttcaaaaatttttcacaagaaaagcacttagaaaatgtggttttgtgtacaaaaaatatggggaaagactaaaaatcacgggtttacacaaattggaagaaagaagaaaaatcaacgatttaacaacagcttttaaaataatcaaagggttcaccagcctcgatgctgggaaaagtttctttttctcagaaaggcccaggaggcctttacttttacgggtaaagcgccacacggccaaaactcaaaataattttttcaatagaatagtaaaaagctggaataatcttccagtggtagcggtgcaaattaataaggcaaaggaattcaggggtttactaaaagcaatgagttctgagtaggattttccatgttgccatatttacactatatttttatcacctgtgaatttttaacatttgattgaattatttttattcatttttattacggtattcattttgtatttttattttgatcaaatttatttgttgttttctttttggcaccataaagagcactcatgtgcctttggtttgctcgataaattaa

SEQ ID NO: 46319 - DNA, 729 bp, Heterodera glycines
atggttgccgacgtgattcgcacaagtttgggacctcgggcgatgctcaaaatgctgatggacccgatgggcggcattgtgttgaccaacgacggcaatgccatccttcgcgaaatcaccgtcaaacacccggccgcaaagacaatgattgaaattgcgcgcacccaagacgaggagaccggggacggcaccacctcggtgatcatcttggccggtgaatttttggcacaggcggaacagtttttggagcagagcattcacccgaccgtgatcatccatgtcagtacaaccgtacaatcaaatgaaaaaatacaatcggcgagtgggtcacccatccaaattcattacaaaaatgcttgattcagatttttatgtttataaattattgctttttgtagggctatcgcatggctctcgaggatatcattgagtggacagaggagaaattcaggttttattttggcgttgatgagtctaacactttttcatcgtcccctttcagcaaaccagtcgatttggcctccgagtcggaactgaccaccgtggtgaagtcatgtttgggcaccaaaatgttggccaagtacatggacctggcggtgaacatcgccctctccgcggtgcgcaccatcgacgtgaccaacaacgactttcgtgagatcgacatcaagcggtattgccgaattgagaaaatccccggcgctgccattgaggacagcaatgtcgtgaagg

SEQ ID NO: 46320 - DNA, 141 bp, Heterodera glycines
gttgacattggctccatcgacttggcactgctcaacttcacttcctttgagggggccaccaaacggaaccgaccgaacgtcaaagtgggcgacctcatctacggcctggtcattctgacatccaaacaacttgagcctgag

SEQ ID NO: 46321 - DNA, 1367 bp, Heterodera glycines
atgtacgtggccatccaggccgtgctgtccctgtacgcctccggccgtaccaccggtctcgtgttggactccggcgatggtatgcagccaaatcgttggcataatatcatagctatcaatctccatgcacaggtgtcacccacaccgtgcccatctacgagggttacgccctgccccacgccatcctccgtttggacttggccggccgtgacctcactgactacctgatgaagatcctcactgagcgtggttactccttcgtgaccacggccgagcgtgagatcgtccgtgacatcaaagagaagttgtgctacgtggcactcgacttcgagcaggtcggacatttggccaatttgatgccaaaattacccttcctcccgtcttggttcaggaaatggccactgccgcctcctcctcctcgctggagaagagctacgaactgcccgacggccaagtgatcaccgtcggcaacgagcgcttccgttgccccgaggcgctgttccaggtgagtgcccggcggagggcgcgtgcctatggcaacggcacaatttgatttggctctgttcagccgtccttcatcggcatggagtcggccggcatccacgagtccacctacaactcgatcatgaagtgcgacatcgacatccgtaaggacctgtacgccaacaatgtgctgtccggcggcaccaccatgtacccgggcattgctgaccgcatgcagaaggagatgaccgcgctggccccgtccaccatgaagatcaaaatcatcgctcccccggagcgcaagtactccgtctggatcggcggctccatcctcgcctccctgtccaccttccaacagatgtgagttgtggttgcattgggctgatctgacccaccaatgcttttccccctctgatcagttgcccaattagctgatcattgtccgttgttttccccctctgagcactcttttgccctttctcaggtggatcagcaagcaggagtacgacgagtcgggcccgtccattgtccaccgcaagtgcttctgagcagcagctgcacgaccgcacggaggaggagagcagaaaatgcctttcatcaagagcatcggagtgcggggattggcacgaacaccaaaaagagcaatggcatccaatcacatttttttttgtttttatggcttttcttttcattttctcatctcacttcccgccccatcaaatttcattttccaatttttcatcaaatttgctagtttttcttcgtccctttgcttcttctgttgatgtgttaaaagtgttgccaatcctaggccaatgccactaggactgcacttttgccgtcgtcactccccgaaaaatagtttcattttttgcgagaataaa

SEQ ID NO: 46322 - DNA, 672 bp, Heterodera glycines
tttccttccgtcacaagaagaccaatacgtatttaaaagtatcaagtctgttccttccgagaaagaatatgcgcacgttgctcgttggtacaagcacattcaaagcttcgatgatgttgaacgtttgaagtaaaatttttggtgtcttttgagtccctaaattaaatgaaataaaattctttctacagctattcccttttttgccatttccaaaatttttccatttaccatgtgacaataatagtgatgggttttgcaaaaatttgggaccgtgcttttaagttggtcaaagaaagctggacaaacaacacagactgtcgcttccaaagagactccggcaaagaaagttgaagccgaggtttggagagagtcattttacttttggttctcatctcatctttttaggaggacttcgacctcttcggagatgaggaaagcgacgacgaggaaaaaaagcgcatcactaaggagcgcctgaaggcttatgcggagaaaaaggcgaagaagcccgggccggtcgccaaatccaacgttatttacgacgtgaagccatgggacgacacaattgacatcaaagagattgaggcgaaagttcgttccgtccaatgcgacggcctcgtttggggcgcttcaaagattttacctgttgcatttggcgtgcagaagcttcag

SEQ ID NO: 46323 - DNA, 2466 bp, Heterodera glycines
  unsure (1)..(2466): unsure at all n locations
atggaagtttccccgaaaagcgattcgaatgcatttgatccgaaacatcggaaaaagacgtgcacaatttcaaaacaaaggtcaatcgttgttaatctctcacaataagtgttaatcttttgccgaaatgtgatgattttagacagcccgaaaaagggattcgccaaaattatgagctgaacaaattcgaacggaggaatgattcgctttttgggttttacaaaaagcaacgcatcgttcccgactcggaatgggaccgtttctgtgagattttggccacggagttgccctcgtcgtttcgcattcaacgaagtcttccggagagggattgccttgccaatttccttgagcaacactttttcaagcaaatcgcttccattgcggcgacttcggagagtgacggcgttggcattcatccgccaaaatctgtcccttttgtgccctatgcctaccagactaaaatgccgcgctcaatgcttagacggcacccaattctaaaggaattccacgagtttttggtcaatgaaactgaattggtgcgtattaatgggcattacaatggtaaaaacgtccaaaaaatttaggggaacatgagcagacaggagacgtgcagcatggtcccaccacttttgttggatgttcagccccaccacaggtgaacaggaaggggcctttgcaattggatgcttgggaaagggcaacggactgattgtgaaggagtcaatggcaagtcgtacaaaagccagtgcattcaatgtccaacacgtacacatcctttaatttatttatttttaattagaaagaaaattcattttgattttttttttgttaaatttctaattgtaagtccccccccccccacccttcccaagtcggtccctctgtttttgtacattttgttcgcctcttcgtttgcttcagagtgctggacgcctgcgctgccccgggcagcaaaaccatgcaaataattgagctgatgcacgagcactgtcccaacccagccagaagggttccctttcccacttaaatttttcgctgtctgttcagaagggtttgtgctggccaatgactccgattacaaacggtgctatttgttggttcggcaaacgttgaagcgaatgccaaccgcaaatgtggcggtggtaagtcacgacgcctcccaactgccggcccttttggacgccaatggccgaccgatgcttttccatcgggttctatgcgatttgatttgcaggtacttcccctgtccacagcagtagcaattggaatttttttaatttagcggtgacggcactctgcgcaaaaaccccgaactttggcggagttgggacccactgaaaagtgaacacccgcaatttacaactgaaacaaagctttaaaaggtgtaaatttgcacaaacttcaattacaaattgcgcggcgttgcttggaactattggccaacgacggtttgatgtaaatttgtgcattttaagtgaataattttgaattttgaactcccttagggtctattcgacttgttcattgaacccggtggaactgaaaagcatggaaaagtaatcaaattaactgcattaagctagaagatgaagctgttattgctcaacttttacgtaaatccaacggaacagtggaattggtggacatttccgaccgattgaaagagttgaaaagaatgccgggcatttccgaatggaaagtcgggatttaagagcatgagtggcatttttcaccgcgttgcctttcaggtgtttgacaaggagatgaacgaagttcgggcagttgacgatgttcgtgcggaatcgaaacgccttttcaaaccgtcgatgtttcccccgactttggaggaagcttcgcaaatgcatttggaacgctgttttcgaattttgccccatttgcacgactcaggaggctttttcgttgctcttttgcgaaaaaagggaccaaaatcggagaatgatttgcaacgacaaatcgaaggaacgaatgctcaaatgaaaagtgggccaccatcatttaggtagttgttgagaatcttcgacagaaattaaagtcattgttcaagaaaatcgactgcaaagcgagcgcgactttcgaataaggaggaccccttcattttcctggaggaaaatggccaacgcgacgatcgcttcgtctccgaattggacacgcactttggcatttcccccagcgaactcccccactccaaccttctcctccgttcccataacaccgaacgaaaaaaggaaatttactttgtgaacgatgccatccgcgactttcttcgctttaatgcgaaacgctttcgaattgtgagttttatttgtttattttggatttcgattcgaatggcttttctcctttttcgcaggtcaatgcgggcgtgggagtgctcaagcgaattgtgtctgacaaagtcgcccaatgtccataccgactgaaacaagacgtaatgggcggngatgg

SEQ ID NO: 46324 - DNA, 983 bp, Heterodera glycines; identical to SEQ ID NO: 33105

SEQ ID NO: 46325 - DNA, 517 bp, Heterodera glycines
atgacgtatgacctcgagaccgctgaaagggctgcctatgcgccattctttggctacattggtgctgcatcggcacaaattttcaccgtgttcggcgcggcttatggcaccgcaaagtcggcggtcggcatttgttccatgggcgtgatgcgtcccgaattgatcatgaaatccgtgatcccggtcatcatggctggtattttttaacataacattcgaaaaattattaaaaattcaaccgaatgtggggtttctataaaatccagggccaaaattttcgaaaatgagtgttttacaatctcatttaccaagattgttacactgtcttattccccattttaaaggtatcatcggcatttacggcctcgtggtggcgatggtgctcaagggtaaagtgacctccgcttcaaatggttacacgttgaacaacggttttgcgcatcttgctgccgggctgacctgtggcctgtgcggtttgggtgccggctatgccattggcattgttggtgacgcgggc

SEQ ID NO: 46326 - DNA, 1326 bp, Heterodera glycines
atgataaatatcgtcgattaccgagattcttgtgcttcaacagatgaagaagatgatttattttttcaccgcgtttcttcaaatcaagcacaggaaaataacgatgatgattctgagtccgaatttatcaagtaattatcccagtcactgatgttattttcaataaaatttacatttagaatcttggaaatgtgtcgaaagcatcgtgaattttctgctgctaaaatgggagaagacagtcaaaataagccgcgttctttaaataagcgtgataaggtctttgattccgagtattattctttacctgcgatcgaccaacttaatatacaagtcaaagaggagactgaattcaaaagatttggtgttgttgattcgcacataaattttttaggtgagttttcatttcaaaagtactttttcatataaagaatttaagcgaagataaagcctgacaaggatacgccacatcttggatatgagacaattctattcaatcacgacaaaaagccaattggagagatttttgaaatattcgggacagttactgatactttatatgcattgcgattcaatgacgaaagtgacgctgtagcgaaactccctgttggtgaagtaatttattatgcaaattcggacaatgccatgacaaagcccgtcttcccaaaggaattggcaaagtatttgttagtgattgcaagctgttgacttgcatatttatttacaggctaaagaattgggaccgagttcggccatcgggtggcggctcatccagttccgaagagtttttcagtgacgacgaagaggagaagcgtcatttggcatgcaaaggacaaaaaactcgaggagaccgaaaagcaacagaatcacctacaagtttttgtataatttttcttaggtatctcattttggtattttatgtttagctaatgtcataccttcgaagcggtcgaggaatggaaagaatcggcctgagaagatatgcaatttcagtcacacaaatttccaacgtcaattatttgccagaccatacacaacattcgctcagcatcactatatgcacatgtatccacagttttcgccttaccatcaaccatttggtgttcaattgcctcctcatccatgggttcgtccacctcctcctccgccagtttatccactcagtgccgcttctacatcccaatacttttcgcaagcacaacctacttttccaaattttaacaatcctttcaatcaaggttatattccccaaataactcattccaatgctcaacaaaatggcaaacacaaatagaggagttattgttatttgttttttttcctttgtta

SEQ ID NO: 46327 - DNA, 3622 bp, Heterodera glycines
atgaccgaggaggaaatggagcggtacttccaggaaagacatgcagcacaagtggcgacacaccagggcgacatggacgaggacgcatatgacgacatcactcagaacggactgttgccaagcacgaaagacccgaatttgtggattgtaaagtgtcgactgggcgaggaaaagacgacctgtcttcgtttaatgcgcaaatacttgacttttgtcaacaccgacgaggtaagttattgtaaaaaaagcacaggtttcctgttcatttgtttattggatattttggcaaatacgactgatttataaattgtatttaagcctctccaaattaaatctgtcattgtcaaagagggcctcaaggggatgatctacattgaagcgtttaaaatggcccacgtggccaaagcaattgaagggatttcggcgctgaaccaattcaaaatcacggtaatatcggcttattattaccttttttcattcccttcatttcaaagatggtcccaataaaagaaatgtccgatactctccgcgttgtcaagaatattccaactttaaagcccggtgcatatgtccgtttggtatgacactcttaattgtatttaattaatattctcatcaatgatttgcagagcaagactctttacaaagacgacctcgcgcaagttgattgggtggatatatcacaaaatcgagtcaacctcaaactcatcccccgcattgattacacgcgcttaaggggggctcttcggtcacaagttagtttttgacgagaaacacgttaaaatcgacattataatttaaatttaggacgacagaattatgaagaaaaaacgccgtccattgcctgctccattcgatttggaccgtataaagttagcatattcggaattagttctttgttcaatgtattccttgggttttagatcaatcggtggtgaagtgacaaacgatggcgacttttacattttcgaaggtggccattatcgcagaggctttctttacaaatcttttccaatgaatgctattgtaagttagtgattttgattggtaaaacgatctatgtttaggaagtcgacattactcatccaacccttacggagttggagcggttccaagattccaccgacgacttaaaaaaagaacgtcagccagttttggaatttcaatatatttggggaagagaaaataattcattttcccattttagtggagaacactcacctaagggagaagcgccatagttttgctcctggtgataacgtcgaagttatggacggtgaactggtgaatctccgtggcaaaattcaaagcattgatgggcagaaagttgtcatccttcccgagcatgaggatttaaatgtaagcgattctaattttcagaattggaattacttttcctttaaggaacccttgactttgaatgcgagtgaattgcggaagtattttaaacctggtgaccatgttcgagtgattgccggtcgttacgagggtgacacgggtctgattgtacgagttgaggacaacgtagtcatcatgttgtctgatcttaccatgggagaggtaattagctcagttgcgattaccatttgtctttatatgctattcgcagatgaaaattttgcccaaagatgtacaactttgtgctgaggttgcgactggtgttgaacggatgggccaatatcagtaccaagacctggtgatgctggataaagaaacagttggagtaatcgttcgtttggaacgcgaaaatgtggaagttttgagtatgcatggcaaaatacttcgtgttaaccctcaaacgattgaatgcaaaaagaattcgcggttcgtcaaggcacttgattctcaaaagaatacaatccaagcgggagatacggtcaaagttgttgagggcttcctggcggttagtgctgtctttttgaacctaaaaactttaaataatagttattttttagcgaaagaaggaaactgaagaagaacgtcagggcgagatcaagcatcttttcagaaattgggccttcgttttttcacgtaaatatccacaaaacgggggaatgtttgtttgcaaagcgcggaatttggcattgattggtggaagcaaagcgtcggagtcacaaatcaacactactattttggataacagtcaacttatgagtcctcgtcctaatccgctcgaaagtcctcgcaccattcacggcggaatgactccccattccgggtcaagtgttgttggtgcacaatctgtccgtggcgatcatggttttaaaggtctttttctagatggtcatctgttcttgttaattcagatttttttagcaccaagtgtggtcgggagcatcgcaacatcagcaaccggagttggtcggcaacatgtacgtcggaacatggaaataatgggcaaaactgtgcgcgttctggctggtccaatgaagggttacattggaattgtgaaagatgcaacggaatcgactgtcaaggtggaactgcacaccatgccaaaagtgaagccctaattgtttcagtttggatcgataaatctttaactttagacggtcaattttgacatcaacaaagtgatggaggttggtggtgccgtcccgagggaattgatggacactgctggcgcaatgactccgggaacggccaccattggcgggcgaactccgatgtacggaggagcgcagacgccaatgtacggtggagcagcaacgcctatgcacgactcatgtaatcaatatctttactattctaattcggaattcgcagagttgtttcaaagattctgatcttttaatttagtcggtgctcgtactcctcattacggctctatgaccccggcttacgacggcagtcgaacgccttcgcaccaaccatcttcgtcttgggaccctggtcatacttattttgtttgatcttaaaactcaattttcgttcactttagctttggccaatacgccggctcattcaactgctcattttgacaatgaatttgacacaatgggatttggcggaggagcatcaacgccggcaggttctgtgagaagccgacttgggggagcgaatactccaatgggtgcgtgaggatttaaggtcttctgaatattgtttgtttttatcaggccaaatgacaccgcgagatatgttcggcgattattcttcaagcccttaccccaacccaagcacaaatggcaatatcattttttggtatttataacagatatcctttaagcttcactgcatccgtcgaaaacgcccattggtcagtcaccggcacttcaggaaataatgcgtaagaccactaaaactatccgcgaatattattgcatgcaatgcttcagccgattccgaaattcccactggttcatggtgtatggtcgacctgtgcgtcaatgttcttccgacgtgtggaaaggaccaacttctcggtttagaaggctcaatacggtcaattagagtaagtgtatttaattagtaatgattcggttgattcttcgtaggagggcgaatgttgtttgtatttcgaggagcttgacgatgacttcactattgagcacgaacatgtggtgcccattcgaccggcaagtggagaccaggtcagttgttgacaaaaccaaatacaaaa

SEQ ID NO: 46328 - DNA, 534 bp, Heterodera glycines
atggatgtccctagacagcaattgacaacatatcgctgctacaataaggaagaattgctgatgattcgagaaagcaattattgtcggacacgacctgtctttttattgaaagattttgacaagtaaattttctattaagaggggtttaatattgtctaaatataagagtaaaaacaaacagcaattgaaaattcaagcattcatttcagtgatgatgggttattctcgccggacaaatggctgcagcacaaatggaaatgtgagggagtggagaatcgtgtgaggcggaaagcggccagtcagacttccgctgggagcggtggaggaggcggaagcgtttcaggaaattcaacagcaacagtgatcacgccgcagcaggaaactgacaaacaacaggcgaacatcaaggcggctcgactgcggagaggcgcttcgactactagcaatgggatggacttcaaaccggactttgtgggtgcatttggaatgggggagcggtcagaactgagcgagtgggccggggatgataattag

SEQ ID NO: 46329 - DNA, 782 bp, Heterodera glycines
atggctgtcggaaagaacaagaagatggggaaaaagggagcaaagaagaaggccgtcgacccatttacgcgcaaggaatggtacgacatcaaagcgcccgcaatgttcacacaccgaaacgttggcaaaactttagtgaaccgcacccagggaacacgtaaatgagcgtttaggctttctcaaaaattttttggtttaggcatttcaagtgactttctgaaaggtcgggtctacgaagtttcgttgggcgatctcaacagcacggacgccgactttaggaagttccgattgatctgcgaagaagtgcaaggcaaaatttgtttgaccaatttccacgggatgacattcaccagggacaaactgtgctccattgtcaaaaagtggcatgtaggcgtatcttatttatacaaagtgcccggaatggaattaaactcctattttagacactcattgaggccaatgtggcagtgaagaccaccgacggtttcttactccgactcttttgcattggctttaccaaacgaaatgccaatcaaatcaagaagacgagctatgcaaagacatctcaagtaagacttatccgcatgcgaaaattttaatctgttccttagaaaattatttctaacttctcattatacatggaatttaatattctaaaattgctttaggtacggatgattcgtgccaaaatggtggaaataatgcaaaaagaggtttggtcgtcgaatttattcccatgttatgttgtgtcaatgtcttctttgctttgttaggtctcttcc

SEQ ID NO: 46330 - DNA, 402 bp, Heterodera glycines
atgaacccgccgaacggagtgctcggcccaaaggagtccgtcaacgtggccgtctcctgcgacgccttcgaccccggcagcgaggacaccaagggcgaccgtgtgaccgtggagtggaccaacacgccggacccagccgccaccgcgttcaagctcgagtggttccagggagacgggatggtgcgccgcaagaacttgccgatcgagtacaacgtctgatggaaggatgcttcgtcacctcaacatggacatgataggatcccacccacccaccgtcccaaaattgtcattttgtcccccatcatgtaaattgttgtatctgtatgtaaatttctgtgatcatcacttcaaatgaatgtatatttaattgttgcctatgtaattgtattgttgttgtgctta

SEQ ID NO: 46331 - DNA, 3147 bp, Heterodera glycines
atgcttctccacaaccaacggcttgttattattgatgtttctcagtccgtcgaacatgatcacccccactcgttggagtttctcaggatggacattggaaacgtcacccgttttttcaagagcaaagacgccgctgtactcggaatgaaacgtctttttgaggtgttgtttacaaattaactatttttgtgaatgattatgtatccaggacctttacacttcaggcgattgttgacccgctgatcgatgatttggcatttgaacaaattctccaaaatgaacgaatggatgggccacttcctgacgatatgcttttcatgaaggcttatattccacacaaactcgacaacattactcattacgaacgcgactatgaaatggagaaaagagggattgaactgaacaatccgtttcaaaagactattggacgaacgatggatgtcaaaaaatcggaagaggaggatttctgtggtattatacatatacacgttttgataaacaaaagcattcagggaatgatgaacatttggatgggttggattctgatacgaacaacgaagaaccatttgagtcgagcgaagaacagagtgatgtttcggatgagggagaaaacgacgacaaacagctcaaaaagaataagaagactgtttatcaaaaatatgttcgggttaggggcgagtcgtcgagtgcgcggaaggcgaggaaagaaaccgttaaggatgaaaagagagaaaagagggcagagaaagtgcccaaaaaggttaaaaaacggaaggataaactgcgaaaaacgggcaggaagtgaccggcattgtgattaattgttgatatttgttgcttttcccgaattttatccccaacaaagaaagtgcatattttcttgattgttatttttaattggttcattccatacatcattttacctttcaattaatataaaatcgaaattaattcatctcttgtacagtcataattatggacgggggcgtgaccagaagtctttatattggacgagacaaaacattggaggtgcttaagcggaaggaggccgttgaaagggaacttcgagccaagtgggttgaatttggttgtagttaaattgtaagttttagggcgatagtcaaaatttgattttagcgtagacatattcatattgttatgtttaggcgtgaagtaaaaatccgtgagcaacatgagcgaatggaacgtgcggctcagttgaaagaagccgagttgagggaccgggcgagaatgaaacaacagcgtgagttggagagacagaaggcggtgttggaccggcgttgtgcacaaatggaacagctgaatgcaaggaaaatggtgcgttttcacaagggaaaaacaaaaattttaatctttattttcttcaggaacttctcaaacgtacccatcatggctcttcgcgtattgtcacgttgaatcaggcgaagaaacctgtttatgcgttcggtagcagcactccacgcaagttggcctttttggagaacattcaacagcagcaacgagacagcggtggctcgagaaactctcccatgggcatgcgtggttcgaccccatcacttgcacaggtcaaaacacagtgattcaccattcacatgaaaaaaggggggggggggtaagcggccaaacgacgggatatttcagtcatgtaaatcaactatttggagcttcaaaaaggacccatcaaagtttcagcactttttgagcctctactgtttagggaccatcgaataccgcaccgacaacttcgcgttttcaaaacccattatcgctggacggaagagctggaggatcgtctataatgactcgcagcgttgttggagctttgggaaacggaatagggacaacacccaacagaaagaacaatttcaacaagccaccggctcaaccgacaaagcaaacgccgaattccatcaaaaaacagcgaaaaatggccaaccaaggaatgattcaaaccaacgaaggaatgttgactgctggccaaaatatcacaaaagaagtgcagcaggagaagcagaattctccgactctaactgccaccaataaaaccaacgagggaatgttgactacggaacaaaatatcataaatgaagtgcaatccaacgagggaatgttgactgctgaccaaaatatcataaatgaagtgcaatccaacgagggaatgttgactgctgaccaaaatatcataaatgaagtgcaacaggagaagcagaattctccgactctaactgccaccaacacatccttttacactgcccatgagagttcctccattggcgaagttttaataaattccattcatttggaaaaaattcatttaaactactcaaggtttcgatgtatgagcacgttccattgacggaaaatgagcccataataacgcctccgaagtcgaccacaccgcccgtgctcatcgtcatcccgaaccaggaagaaaaggaggaacgccgtcgacacatcaaagaacttctcgcccgcactcgccaagaagctaatggcccgccaaatgcgcagaataatggaatgacaaatgttagggaagtgaaaattgattttattcaacaaaaacaaatgtttgaggtgaacggggaaagttctgttgtcccttcgacaactccgtctttgccgatttcagcttctaatccgcttctcccccaaagggacgcctcggctttggttcaggtgagcgaaatgcaaaaagcatttgaaaacaactgttgtaattttaaggacattaacgcgaaatacctgcataagttccaaaagcaacaacagaaagacggtgaaatgacagcaaattctcaggcgaacccgcgtaattcgacgaacctctcgaaagaactcgacgaaagtggcagtgccgacaaagaagggaccttttgcctccctggacaggcaattacagcttttcattccatatcttttaatacaaatcttctcttgaaggttatttctgccaacgatcaattttcccatatggcatcgctgactatcttctcgaaaaatgaggaagaacgcgatgaacgcatccttttgaagcagcatccgagtccgccggacgacccacagatcaatgggaacgaaatcaacgggaaggaattccaccctcccgagccaacaaatgcccag

SEQ ID NO: 46332 - DNA, 965 bp, Heterodera glycines
  unsure (1)..(965): unsure at all n locations
tcgtccgtcatgttttatcacgacttgcacgacaacgaaaatagtcatgataaagagttaaaacagttggtacaaatggacgaccttgcaattcccaaatttgtaatgcctccgctcggcattaaggtaaataattcttaacatttataaatccctcgggctctttcttatatttgtttatttagccaaaaaaatttgtgcgcaaacattttgggccgaacagtcggcttccaatggcgcagtttctgaagggcactaccacactgtcctttgtgtacaagccgaagacaccgcaagacaaaggcggcgttattgtggcggtcgattcgcgtgcaacgggcggaacttacatcagtttgttttgttgtttttataaaatggcatcggcatgggcttcataatgtcaaaatttttccttaaagaccacataatttagttatttttggacgaaatagtaagccctcattaaatttgatggatttattatgaaatcagccaggatttttcacaaattttcctctcctttcgctacgccccccctgctgtcttaatcgtccgtctttggtctgagactctccttttgtatgtataattattgactccaaaaaattcaggctccaaaacggtagagaaaatcattccgatcaacgaccaattggtcgcgacgatggcaggcggtgcagcggactgtcagtattggacgcgggtggtgagcaaatattgcaagtgcgtccgtttctgtggccattttgccagttcgccccatccaattattttttgtcatattttatttctgaccctttggcacttcagtcttttcgaacttcgcgagggtacgcaaatttcggtggctgcggccagtaaatattttgccaatgttatgtacgactatcgtggccaagagctgngcgttgtgagttttgttgctgttcactttgatgttgttcaatggcattttaagcact

SEQ ID NO: 46333 - DNA, 2042 bp, Heterodera glycines
atggacaaggacgacgccaaacaatttgaagaatatcgggcgaggaaagtcgcaatgataactggcatttctggtcaggtaattgaccgtaaatgaattaataccaagtacaagatacatacctacttattttttctccctaggatgggtcgtaccttgccgaatttctcctcgccaaggggtaccaagtgcacggggtcatccgtcgttcctcctccttcaacactggtcgaattgagcatttgtactccaatccgatgacacacgctgtcggctccagcttcaacttgcactacggcgacatgaccgactcgtcctgtttgatcaaactgatcagcaccattcgtcccaccgaactgtaccatttggccgcacagagtcacgtcaaggcaggagatttgcttcctctcttttcttttatatttgcaactttctcaggtgtctttcgacttgcccgagtacaccgccgaagtggacgccgtcggcactttgcgcctcctcgacgcgatccacgcgtgcggactcacccgattggtccgcttctaccaagcatcaacatcggaactgtacggaaaagtgcaggaagtgccgcagcgggtgagagggtcaaattaattgcatttaaaaactcggaatgaatttaggaaaccacgccattctacccgcgttctccttacggtgagagactgactttcatttccatttttgtatgagaatcaaaggcatttgtttttttctaatttttacattggatcatttttgtacatttttcagcggttgccaagttgtattcctattggattgtggtcaattaccgcgaggcctaccaaatgtacgcctgcaatggcattctgttcaaccatgagagtccgcgaagaggtgaagcaaaagtgtaaagacaaaagcaatttcaattgtttaggcgaaacctttgtgacgcgtaagatttcgcgtggagtggccaaaatttcacttggccaacaggaattggtcgagttgggcaatttgaacgctttgcgcgactggggacacgcgcgggaatatgtcgaggtgacactcaaattcaaaacggaccaaaaattaaaaacaaattgtgcggtgtatttccctgcattccattttttgacacaaatcatgtcttgaatcatggttataatatttacgaggtttatgactctctgagttttcatttcctgctggcggtacggactgattacacaagaaattggggttttgtgtctgatcaaaatcgactatttttagaaatttacagggattttattatttctaatttgtgtcggatgaatgactgactcccttctgtttaaggccatgtggatgattttgcaacaggattcgcctgacgattttgtgattgccaccggaaggaattacacagtccgacattttgtcgaattggcctttaaagagatcggcgaaacgattatgtacagcattaaataattcactaaaacatcggacatttccccgagattgcctttttcagttgggagggcgaaggcgtcgacgaagtcggccgcgagaaagagaagggcactttgcgcgtccgcgtcaacccgaagttttaccgcccgacggaagtcgaacttttaattggggacccgagcaaagcgaagaaacaattgggctgggaaccgaaagtcgagattgaggtggaaaatacaacgactttaatttttaaaaatatttaaatgacaggaattggtaaaggaaatggtggccagcgacatcgaactgatgaagaagaatccgatggcatagacgcgggaccaatggattaatttaattatttttgactctgagccattttcacataattgcataactgtgattggctgggctcagattttcagtctcaaaaccccaaaaattaatttttgacaatttaccaaaatccgagccctagtaactgtacctcctcgcctctttctttttaattttaggccgtgatagttgcacttttctgttattttatcttttactgtgactcgcatagctttacgtaccataatggagcttta

SEQ ID NO: 46334 - DNA, 1582 bp, Heterodera glycines
ctcttagggatgctcagttctttccccttattattgtccttggtcggcctcatcgccgtccacgccgaagtcttcttcaaggaggagttttctgatgacagttggactgatcgatgggtcacgtcgaaggtgattctgggcattagtgcttcgttttggtttttagtttggaacattcagagcaaggatgactacgggaagttcgagctgtccgccgggaagttcttcggggacaaagtgcgggaccagggcctgaagaccagccaggacgcccggttctacgccatctcggccaagttcccgaagaagttcagcaacaagggaaagccattggttgtgcagtttaccgtcaaacacgagcagaacatcgactgtggcggcggctatatgaaggcaattaattcaaaaatattggaacgaatttccagttcttagctcatggcttctgacatcagccaagagaacttccacggggagacgccgtaccatctgatgttcggcccggacatttgcgggcccggcactaaaaaagtgcacgtgatcctcggctacaaaggcaaaaaccagctaatcaaaaaggacattcgctgcaaggtgggcacttttgttgttcattttccagtgattcactcattcgttgcttaggacgacgaactcagccacctgtacacactgatcttgagcccggacaacacttacgaagtgcaaattgacggcgaaaaggtcgagagcggcgaattggaggccgattgggaccttttgcccgcaaagaaaatcaaggaccccgacgcgaagaagcccgaggactgggacgacaagtgaaccaatgggactttgacataaacaaacgatgccatccatattcagggaatacatcgacgacccggacgacaaaaagcccgacgattgggaaaagccggaacacatcccggacccaggttggacagtaacgagcggtctttgctagttgtcatatgtctgctttgagatgccaagaagcctgatgactgggacgatgaaatggacggcgattgggagccgccgatgatcgacaacccggaatacaaaggcacctggaagccgaagcagatcaagaaccccaactacaagggcaagtggatccaccccgagatcgacaaccccgagtaccagccggacgacgacctctacttgcgagaagattggggcgccatcggaatagacatttggtgactgacgctggaccgggtgggactggcgctttaatcaaccgaagttcaggcaggtcaagtcgggcaccatcttcgacaacattttggtagcggactctgtggaggacgcgaagaaacacgcggcggacactttcgaccagctgaaggaggcggagaagaagcagaaggaagcgcatgacgaggaggagcgcaagaagttcgagtgagttttgttggattgggtgatgggagcaattgtgggagatgaacacgggaaattcagggaggaagagaagaagcggaaggaagaagaggagaagaagccgaagaaggacgaagaggaggttgaagaggacgaggaggagaagaaggaggaggagcacgacgagctt

SEQ ID NO: 46335 - DNA, 915 bp, Heterodera glycines
  unsure (1)..(915): unsure at all n locations
gacggaatntggcaaatgcgtgtacaaagaccaccaagtgttctccatncaggtcgaagcatttaccatctaagtgtcgctttgagcattttccacctttaggagttgcccgaagcggcgcctcccggacatttgccacggaatatcgatgtcattggtggcacttttaacatttatcttttgcctttttggtgcaattaaatttttctttaagctgacgatgacttggccgactgttgtaagcctggagatcgtattcgagtcattgctctcttccgcgttttgcccaacaaacaagctggcatgtccactggcaatttcaggtccgtcttttcctttttttgtgcgttttctatactaatgacatttttccttattttgtctattaatgcaaataaatgcttttctaactgctaattaaggtccgttctgattgccaataacatccaattgttgagcaaagagatggagccgagttttgagcccgaagacatcaaagaaatgcgtaaaatgagtcggcacaaaaacatttttgaacttctcgcccgctcattggccccgtccatttacggccatgaagaagtgaaaaaggcgattctctgtcttctgttgggcggctgtgaaaaaatattggaaaatgggacgcgacttcggggcgacataaacgttttgctaattggcgacccatcggtggccaaaagtcaaatgttgaggtgtctctgacagtcattagataattgttttatactccccctttaacagatacgtaattcacactgccccacgggtaattgccaccactggccgtggctcctcgggggttggactgactgctgccgttgtccacgactccgacacgggggaacgccgctaaaaggccggggcaatggttttggctgaccgagggattgtttg

SEQ ID NO: 46336 - DNA, 2492 bp, Heterodera glycines
atgaagccatccgtgaaggatctactggaccgggtgttggacgagtacaaccatttgcagcagcaattgcacaatgttcgggttgagctggagaagagccaacaggagagggacacgctgcaccgatactcactgatggtgggtcagggaagagaggccgacccaaaattgtcattctttacccctccccccaccaaaattggcattatttacctctcccccaccaaaatgtaaaattgcccttctttaccccccaccaaaattggcattctatcccccccccccctcttatgccatggattcattgttttttgttccctttacattttcttcactttttagtactccgaaacgtttttcactctcaacttcgaaatgctaaaacatggtgaaattgttaaacgtctcagcggcatcctttcggtactttcccggcattccgcttaaaatgtgccctcccatttgagcatgtcatccctctccttccccaagaacaccaagcaccggcagttcaggcgattgagcgtgccaagaccatcaaccaacaagtcgtttttgacttcattttctcaatttgggcacttcgtttaggatgttacttcgattgtcaacggccaagtacagcagcagcagcaatttgcttcgattctgcccgggcttggttccatgatgaatccgacggcatttgggaatccgatgggggcgatgatgtgagcgaaatgcgaaggcaaaagcattacattcgaataataatgaactgcaggggcatcaaaccggaggacgcgatacaggcggcggctatgttcaacaatttgttaaaaaacccaatgcttggtgccaccgcggctggacttcctcccccggttggactaaacggacccggcacaagcgttgcctcaaatgtcgggccaatggtcgctccgaattcgacatctttgccaccaaatggggatgacggccccacgccaacaactcaacctggacgcagttcgtccgcacttaacagcagtagcggggccgggattggacataatcggccgcggtccggcagtcggacgagtacgcccaactcaatggctgctaagaggaccaagttggagccggaggaaggcgatggcgaattggaaattgacgttagttggtgcaacgtccggactgaagaattattggagtttcaggtccaaaacgatgatgcgagttcatccgctgctccttctcatcatacgaacgggcggacgagtcaacctcctcgtcaaaatcacagcgtcaaagacgcggaaagggattccgcgtcggcttcatcttcccgcgactcgaccacccctcggtccggcaagcaacaggcactgactgtacttccgtgccattcgtttcaactttccccttgtcagttgtcctccacccccggctcttccgctgccggcttcgcttccataatgccgactgctgatgccaacatggcgcatatgtttctgaacacggcctttggtggacattttcctggcaatctgaacagacaaatgtttcttgggttgggtgctggcaatgcgccattgggtgctgctgctggaatgccaaccgcaaatgggaagccagcttatgcgtttaaagtttctcagggggagccgaatttgatgccagtgcaattcccctcggatgcttctcaagggccggaagttccaaagtgattttcgtaaaaatgataatttttgtctatctttattctttaggggtttgaagagaattggtgatttgccacacggagacgtcgtttgtgcggttacaatggcgcggaatggtcgccacgtgttcaccggagggaaaggcgccgtcaaaatgtgggacatcggagagcgtattggccttgcttcgtctgccggtggttccatttccccctcctcgtcgaccatcgccgatggaaccaatggccgagtgggcagtgccgagccgtggacacccgtgaacacttttccatgtctgaaggacagttacgtccgctcttgcaaactttttccggatgcatcaacgcttattgtgggtggagagacgaggaccatttgtgtgtgggatttaaacagtgaaaaggtgagcgtcggaataagaacggtatgccatgaggagggaccaaacttggcaacttaactttgtttggccatgtcactgaaacccctcttggatttccattgcccgcttataccgctcattaacaggtgaaagccatgctcgactgcgatgctgaggcgtgctacgctttggccatttcggccgactgtcgcttgtgcttcgcctgctgttcgagcggttccattgtcatttgggacttacaaagtgaacaaaaagttgcccaactcgatggacacactgacggggcgagttgtgtggatttgaatggcgatgggttgcgactttggactggcgggttggacaacacagtccgatgttgggacatcagagaacgcagtgagctgagcaagaacgttcttgagagtcag

SEQ ID NO: 46337 - DNA, 1582 bp, Heterodera glycines
atgtatgccgatgatgttaaattatattatgcccacgaaaatgatgaccattcgaatcagttggataaagcaattgaggctttggaaaaatggtcaaaaataaatgggttagaaatttcaactgaaaaatgttttgttttatatttagggaaaaagaatatgaaaaaagaatattttattaactcaaaaaagatttcagaatcggataatgttcgtgacttgggaattataattgactcgaaacttaatttttcagaacacataagcaaaattatacgaaacgcatatcttagaagctttcagattttgagagtgttgaaaagcagggaaataaagactctaacagcagcttataaaacttttgtacgacctcaattagaatacgctaccgaagtttggaaccctaatttaaaaaaagatatagacaaaattgagcgggtacaaaaatttttcacaagaaaagcacttagaaaatgtggttttgtgtacaaaaaatatggggaaagactaaaaatcgcgggtttacataaattagaagaaagaagaaaaattaatgatttgacaacagcttttaaaattattaaaggattcaccagcctagaggctgagcaaaatttctttttctcagaaaggcccaggaggcctttacttttacgagtaaagcgccacacggccaaaacacaaaataatttttttcataggatagtaagaaactggaataaccttccagtggtagcggtgcaaattaataaggcaaaggaattcaggggtttactaacagcaatgagttctgagtaggaaattttctgtgccacatatacactatattttaatcacctgtgaatttttaacatttgatttatttttattcatttttattacggtattcattttgtattttttatttgatcatttttatttgtttgtttttggcaccatataagagcactaatgtgcctttggtttgctcgataaaattaaattaaattaaattttctgaaaattatttaatttattgttattttttatattaatattttgcgattctatatgaattatgtaaaaattttaaaattttgaaattttttcattaatttttttgttaattaccccatcagatatcattaatgatcacagcttagctgagacatatgctaatattttgtcaagagacgaaacaacacggcataatgctgaacatttgttggccattcgaatttgttccgcacgaatttggcaaatttttcagcaaattcatttggcactcaaacagaagcataatgccagattgaaggatgtcaaaacaaatgaaattttggcacaaattcaatcaaattggcgtcgcttttggaaaacacggcacgcaacttacaaatatatgccaaatgatttgtatgaacattgggcagcagtgcaaggtcaatggcaagatttgacatttttggcgcgccaattagtccaacaattagtgaccgataaatataatgttgctaaatattttcaacacataaagcaattgttgccagagcggaatctgttttatcagttggctgaggagcatgccaaaaacataaccaggtga

SEQ ID NO: 46338 - DNA, 2914 bp, Heterodera glycines
acaacaacaacaacaatagccacaacaataacaatgccgccaataaacgtttccgcactcatttgacgccgatgcaagtgtttgtaagtacagtatgaacataaattaagggcgtaatatgggagcagcattggtatactgtggcgcataaaaatggtgatactgtggacgactgtaccatatccccttcaaatggccactctttatcgtattcttttcagacagcatatcgtatccattattttacataggatactacagtatattagttgtatcgtaccccttatgatcgacaatttcgattcatctagcgataccatattcccttcctacgctaccgtatacctgctggatttaataaatttttcattttttaatctcgatgtttaaaagccaaacataataattccgggacagatcatgaaatcactgttcaacgacttcaaaacgccatcgatggccgagtgcgacgcgttgggccaaaagattgggctgcacaagcgcgtggtgcaagtgtggttccaaaatgctcgggccaaggagcgcaagtgcgcgggcggtagctgcaccggcagcggcgcaggttggtgccaggccgccaatggcacaaattgggtgggattagtgccagcgcctccgatggcagaaatgggtgaattaatgccagccgttcggcattttgaatttaatgctgataaaaaagaattggagagcgggatgacagtcactaaggacacaaattgattggaatactgccagccaaacggggcatttttagttgctagctaaaaggaacttgtctggggcttaccggtaatcacaaaaattgaataatttgtgacagctggttacggtatttacgggataataccgactgatcaggaacaattttacagtatgttgtcctttggacgaaataattgttttaagcttttgtttaggacatccaccataattgcctgtaggttttttgatactataattgtgatttctgatactctaactgtctatgggtttcacatactgtatttgtcttggggatcttgcatacagtttttgacttggatactgtaattatcatttttttaaatgtgtatcctttgtacagaatcctctgatgatactgctgttacggtgccgcactgcgacttggctggccagcgctgccacctgtgcggcgtggagtttgacgcgcgactgtcgctgcaggaacatatcttcggcatcgaacatgtggagcgagtgcgcgagcagggcgtccaaatgcgcggaatttgcaccggcgtcgctgcggcaccgacggcacagccgctgacagacaatgccggcagcggcggtggcgacaaggagaagcggcagcgagtagcgagcggtgacgcggcagcgattgaagcggcggcggcggcgacgaccgctgcgacaacaacggcacaccaaattgacgccgccgcggcgatggcagcagcgcaacagttcccctatgagctgatgtacgcggcggctgccgccagcggtctgtcacctggtcagtgagtgcggttgatcagaggggctaattaccatgccccaaggaatttgggtacaaatttgttcggcactggttttcccggcatgggatttgacggcacaaattactaattggggttcactccatttttcaccattttttactccccaggcctttcgccctaccttggaaaatttttttaaaaattcaagtttctttctaaaaaattcaaaaaactttccttttttaagaaagttcaataaaaatttaagaaaattatgttattttttaaaattctgtcattttttaattttgtgagttttgcaaatttttattttggttttttttttctaaaattttatagttttcataaaaaaatttattttgttaatttttttttcgatctatagaacagttttcaaattcatttggccgcgccgaactgtctcattggcccaaattttcaaaattgagcatttttctttttttaaaatgaaaatttttggattttggctgtttgtagggctcttgctgggccccattttgaaaatgtgacgccaagacttgatcagcatagtgatcaaaatattcaaggacagcccaatcattttgcaggcactctcccatctctgctctatgatccgacggtgttcggcacgccggtgcccgcgctcaaaatccccaaatgcgtcatgcaacaaatccttgccgacatggcacagcgccgggagcacacgctgttcacacaggacgggctggagctgggtgaacttgcagcaaaggttgacgccgatgactttgccgccgcgggcaccaccgatttggaggtggggtgaaatggcactttaatgaactgtgtagcattttgttggcatacatttatggcattttccattggatttagcacaatccatttgacattcggacattttctctcattggcgccctctcccgtgacaaaattttgaaaaaacaaaatttttttctaaattgcttaaaggtttttttcaaaaaaaaaaaatttaagtaggtagaaaagatttaatattttctttcaaaaatgaaagcaaattaagcggggatttgcccatcatagggtgccattcgatttccggaaaatctttgacatcgtagtcccgatttccggaaaatttttggacctcggaatgccaaccttggatgattagacagtgatttaccaattatttttggggccattaaattagaccatggattatgccaatgtgccaatttcagttgggatttgtgccaacattttgaatggatttaggtgggctggggctgcacccaatgcggcaacgtgttccaacagtccgagcagttgcagaaccaccagaagctgatctgcgtgggcgcggacggcgtgttccggctggtccaaaccca

SEQ ID NO: 46339 - DNA, 1135 bp, Heterodera glycines
tttgacttttctaatttgaataaggtattcaagcgagcattggagcccaaattgccaagcaccgacatccggccaatcccggatgaacgctgcgttaacacagctcatctcggcgaggcagagaaagagcgcttggaacaaatcggtaaaaaacaaaacaaacaaagatatgtaataccactcggtggtgagggtctcctttttcagaaaaaaaaaaaattatttttttggtaattgcacgaaaatttacgtttttttggtgcataaatgttaattttgtgcttgttcattttcggtttttggttcgaatgaatccaaatgaatgtaaaatcgcaaatagatgtttatttacactaaatttttcgtaattaaggcttgaaagccattgcggaaggtcgcgtggcggccgttgtgttggccggcgggcaggccagccgtctgggctctgcccagccgaagggcgttcttcgcctgggcaccggacttggccaggacgacgtcgactcacttttgttcattcaggttttaaatggaaaaacaagggtacaaattgggttttttgggtaaaatttttcagtttttgtaccataaatgaaaaaaaatgtccgatccttttgatcaattccatcgttggggggcgcctgaataatttagttaagagcaaaattttgacgcctttccattaacctccaagtgattttgaaaaaaaaacgaaaaaaattgaatttttttttaccaaaaatgggatatagaggtgtacatactcaattaataccaaaacaagtgttaatttgaccaaacttggactcaatttctgaaataggctgaacaaattgtacgccttcaacgcatggcggccgagctgttcccggccttctaccgcacgatcgaccgcacttgggtgacacttgagcgtatccaattcgtcggggcatgcaatccaccaactgatccgggcagaaacccattgtctgcacgttttcttcgccatgtgccagtcatttacgttgactaccctggacgtacatcgctcaaccaaatttacggcacttttgctcgagcaatgcttggtcaacaatgcaaatacgaggaatggctaaaccgctcactgaagagatgactgatttttacctgc

SEQ ID NO: 46340 - DNA, 938 bp, Heterodera glycines
  unsure (1)..(938): unsure at all n locations
atggccgtcgatgccaatttcaaagcttactcctgcattctttcactgctgctccgacttcgtcaggcgtgtgttcacctgtctctgaccaggaatgtgagtactctttacacaatttcagtatataaaacagtgagcaaacttaattgactctgattttttaggcaattgacattgacgcatttaaacaagacgagggtgagacggacagcgatgcggagaatttagttgcgaaagccctcgaaatgtcaatggctcaaatgagtctcgaagaagaagccctcgagagaaatgaggagcgggaaaaggacgaagggcagcaaatcgaacgcctttttgagaaggaacaccaaagcaccaaagtattcaagagagtcttgtccatttttcttttggtttttaggtgaacgctttgatgaaccgtttggatggagtcgttcagaacggtgataaatggtaaaatggggacgaggacggcaatggaaacttacggaataaaatttttgctttcatcgccctctcatttttagcgttatcgtaagccaatggacttcgatgttggctctcattgaatttcacttgcgacaaaaggccatctcttttactagcataacgggagaagtgcgcacggaagaacggtttgtgtttctttcgaaaaggcgagtgcattttctggtttgcttcagtcagtcaagggtggatgctttcaacagaaccaacacgggacccaaagtgatgcttttatcattgaccgccggcggcgttggattggtatttgcttttgggtttaaatgttaccaatactattattaattttagaatctgattgggggaaatcatttgtttatgattgatttgcattggaaccccgcgttggagttgcaggcgtccgacagaatccaccgtttgngccagaagaagaatgtgttcatccacaa

SEQ ID NO: 46341 - DNA, 1103 bp, Heterodera glycines
atgtcgtctggtgtaatggtgaattccgaatgtcaaaacgctttccaacaactttcggaagggaaacgctatcgttacatcatctacaaaatagtggacaaggaagtgattgttgaggtggcagtttcttcggaagacgtaataagagaaggggaattaatttgaccatctgacagcaaaatattttcagattggctccactggaactgaaagttatgatgacaattcaaaggccgcgtatgaaacatttgtgaaagacctcaaggagcgaactgagggttttgtggactgtcgctacgcagtgttcgacttcaaattccagacacagcgccccggcgcaggcacttccaagatggataagattgtcttcattcaggttttaccaaatttgttttttcggtattcactgttttagctttgcccggacggtgcgtcaatcaaaaagaaaatgctttatgcttcatctgcgtcggccatcaaggcgtctctcggaaccgctaaaattctgcaatttcaggtgaatagaagccgcaaaaaactgtgaaagactaaggaacaaggcgtaataatatctggtagtcctcccccccccccctctttctacaaaatttttgtccgtaaaaagtcatgaaaatgttttatggggttttcgagatccctccgtacgaaaattacatctattttcgaatcaatagctttgaattttggtccaaaaatggactcatgatcattgaaagttattttctttgtattttcttagggcaattgttttttttattttcattatcttttttttaataattgaggtgtctgatgagtcggaaattgcccacaaggaattgctgagcaagctgaacgacaaataccgcgacaattgaatgattggttgggatatgatgtcctacacattcctctcaatttttgtcatttatacccaaatttaatgacgcttttatgttaaaatcaaatcatgtcacttgatcgccacaatatgtttattttaatatcgggtggataaaaaagacattaattcattcatatccgagaaaatttttgttttcataattcccgttatttactatttcaaaaaagaattgtcataa

SEQ ID NO: 46342 - DNA, 1257 bp, Heterodera glycines
attatgtccgaagatgagttggacaaactcaaaggcgaggtggacgcgctgcagacttttgtcaacaaacggctcgagaaggcacttcagctccaagcggagagcaaacggtgccacggcatattttattaatttcaaatttcgtttcagaatctttgagaccattcgcccgtccatcaatagtttcaatgaagactacctccactttttgcgtgttgacttggacagccaatccaccgtgttatcgtctgactttctgaagaagatggaaaaattgaatgaaagagtgagtttaaagaagggcgatcgaacgaagtgcttaacgatctctgtttgcttatgcccctaaaaatttagctgaaagaccatcacgacttgtgggctaaacaggtcgtcttccgctatgacgagctgctcgttaaattagacgagttgtccgcaaaatgtttccaaccttctacggagtttccagcaaagccaaatttgagtaagtgacaattgtcaaaataaaagtcattaaatccttgggaatttcaaaccgcttatttatttgcgtgattaatcttattttatatgtaatatttcagaaaatctgagtgagaaggaactgctaaaattggaggaggaagttcgaatccgtcagcaaatgtacgagcgagcgaagcccgtatttgacaaactgaacgaatggatggccaattggaagcagaagttggacatcgaacggcgtgtgtgtcgtgcgtctttctacaagaacagggcggggtgtctggacacaaaactgaaggtcctttaatcgaatcataattttacatgaataaataatttagcaacaaaaaatcgtggaacaaaaacttccgaaattgctgaacgagctttgtgagttatgcaacgactacgtcaaaaacttccaattaaacgacattatcatcgacggattgcgagctgacaaatacgccgaatcgaagatgcaaaattatcaccaagacaaaggagtgcaaaaggctcagaaggtcattcgttatcatccatcctttgattgtttttgttctaattacagcagttttcgaatcctcctttgaaacggtcaacgtcgaaccgtcccgcgacttcgtccacttctcgacgcaatgtattcgtacccagaaattcgtgtggtcgtgctgctcctcgcgcactgaacccaatcggggaaaagcagcagacgccgacgacttcccgcaaagaaggcgagacgaagcacgccactcgtaaacg

SEQ ID NO: 46343 - DNA, 118 bp, Heterodera glycines
atggaaggtcacggattcctctattcgctggaaatcgaaaattttaaatccttcaaaggcaagcattacatcgggccttttaaacgattttccgctattatcggaccgaatgggtcgg

SEQ ID NO: 46344 - DNA, 540 bp, Heterodera glycines
gaaactcgacgtggacgcctttgaccccgacaaatttattgacggcgatgaggctgagacgccggtcggacaagggccggacgagggacaagtccgtcaatttcttcaagccaaccaaaacgtcgaagcgttgaaggcggctctttccaatgccccactgagaacgaagaatcaggtccgaaaagggcatcacgagacagccgaatggacagattggcaaatgaaatcccaagaaatggcagggaatgccgaatttgttggtcattgattgtgcctttgccttttattacttttcatttgtcaattcgttagattttctttgagacttccgtcattctttttacattttaggcgctcaaagacaaaacgacttcacttgttgtccgtgtgttgaccagcttcaaaagtgcggatattgaagcggcattaaaatcgttgtcagccgaagaaatggatttgctgatgaagtacatttacaaaggcatggaactgctgccggacggacagaattgcgcttcactgctcgcatggcactcacaa

SEQ ID NO: 46345 - DNA, 729 bp, Heterodera glycines
cttcaatttaatgcagaaaatgatgaaagtaaacagcagaaattgggttcaattggcaaaacaataccgacaaagcaacaaagacaaagtgcacaccttaaaaaaggtgttggtaaagaaagtggggaaacggcggacaatgcttccatcggtgggaaaaagaaagagggggacaaggagcccgagccagagcgaccgatggaacagttttacaacaaattgaaggcagtttttgcggcgaatgtttgttttttttctcaaagtttatgccgtaaatacaaaatttgttgttttttccagagagtgccgaaagaatgtttgaatgacagaaaacggtggcccaacgaagtgctcaaaatcgtactcaaagagctcggagatgaaacaccaaaagacattttggccaagtctgatgatttaaaataaaaaaagtattagtagtgaatgaaattaccaaggataattaagagaactatggatttatgcggccacttctgatgattggtggatgaacacacaaaattttgccaggacggccgccgttagttctatgctcggtgcgttaattgggctcggagatcgccatttggatgtaagttttagtggataaggggggagggaagtgtttgttttaagaatgttctggtggacctccattctggtcaaattgtgcacgtcgactacaacatttgcttcgggaagggccgaactcttcgcgttcccgaaacg

SEQ ID NO: 46346 - DNA, 896 bp, Heterodera glycines
tagggatcgaatcgtgtttgagggtatcatgatttggtagaggagttggcctttttcaatgaggtcgaagatggttccgttctgagaaaagaagaaattccgcaagaataccgcgaagaggcaaagatactccgccaagaacttctcggtaaagctttggtcatgtattaactgaacttgccctttacagaaaacctcgcaaattgtgacgatgttattgccgagtgttaccttaacgaagtgacgccgtccgtcaaagagataaaagaggcaattcggagggcaaccatcaaacggtcctttgtccccgtgctcgtgggcagtgctctgaagaacaagggggtccaacaaatgatcggtgcctttttacttggacattaatcactccaacggaccccctcccccttagatgctattgtacattatttgccaaacccttctgaagttgacaattttgtgaatttatatgagtaagtgcaatatttattctttttttaataattctttccttaagcaaaaatgacaatgcagaacgcgtgctgatggaccctttgaggaccgcaaactccgaaaaacaaaagccatttataggacttgcgtttaaattggaagtaggattttgtattcgttttgttaaatgcattcagtgatctaaggcaggaaattttggacaattgacgtattttcggatttatcaaggacgtctggtcaaaggcgacactatttatgcgacaagggacggacgcaaagttaatacaatatgtataatagtacggattgttcaacatgaactttttttaaatataattttgtaaatttcttaaatttaaatgcatttgaatttaaggtaagaattaagcgtttggtccgaatgcatgcgaatacaatggaagacg

SEQ ID NO: 46347 - DNA, 329 bp, Heterodera glycines
tgtgcgtatgtcaagtccgacgtggtggaagcccttgattactttgctggaccattggagctgggacccaacggcgtggtttgttgtcccattttattaaattatgactactttttcagaatggggttttttcttaagtttttgctaccacagctataattaatatccgttatgtggaatgctttaaccacgtaatccaaaatcgtttattttaaggaaaaaatactgccattgggtgacctgaccgcttacgaaaaggagctgatcagcaaagcggtgcccgaactgaagaaggaaattgcgaagggtgtcaactttatcaagcaagg

SEQ ID NO: 46348 - DNA, 5033 bp, Heterodera glycines
  unsure (1)..(5033): unsure at all n locations
agcgcgtgcacaagtgcgaccagtgccaaaaggcgttccgcttcaagtccaacctgttcgagcacaaatcgctgcatttgggcagcagcagtcggaaccctttcgtgtgccctttctgctccaaaacgtgccgtctgaagggcaatctgaagaagcatttgcaagtgcacgtcaccagcgcggaggacttggaatgcttgtggaaacgctctttctcacggtccgtccgtccgtttcgttacgcattatttgtgtctattttctaacgaccaatttgaatttcagcagttccggtcgtccgagtaaaaatgcaccgcccgctccgttgccaaagcccggcgacgacctcggcatggtgccggtgctcgtctctcagcaggcaccgtttttgccattttggctctgttagctttgctaacccttccctccctgttcaggatgcttcttcctcctctccatttggctcctcccccaccatcaaatggactttgccccaaaatcgaagtgccgcttcatcgcctggccaaagcggcgccgcagaaagtgtcccccggcaacagaagagaagctttgagttgtcacggcaaagtgaggcgaacgggcggaaaagcggacgacggacagagcgaaaggcatcggcgaatggccaaagtgtgctgcgatcactgctcggagacgacgacgcgatgggcaccacggcatgagaatattggcaaatccatcaaatccctcccccaatttgtgatacgaatttattccgtccctccgctcaattttctctgtcttcccttttttcatttcattttgcttttctctttttgttggattattctgaggaacaaataaatttaattgctttaaaaactgaatgaaatttggaatttacaataaattcggctcgaaatgttcaaaaggcaaagtaaaagcatcaaataaaagcgcaaaagcatcactgaactttnttcgggtctttttttgtcgcttttctctccaatagtgcccccccccccctttcatttcgttttgtctgtgccattatgtgatgggtttctttggcacggattcccccggggctagccgagaattgccttcttttgtccccttttcctcttcccaaattggctgttcttctcccacttggtttcccctgctccattatcattaattaatattaattaattaattaatggtccgtttaacaccaaatgagtgtcattgttatcgctttaaaacaaagacactaacccaaatgccaaaaggatgttgcgaagaatattttgcggaaaatcaaagaaacattcgcattttgacactttggcgaagcgaaaagagaacaaataaaaaagaataattaatgaagcaataaaaagtaattagtccaattcacaaacatttgtatgttttgttaagcatttgcaataattatgcactgattaatgaaagtaatgctcgagaatggaatgaaaaaggaaattcccgagttgggctcggaatccccgagcattttcaattaatgaacgcttaattgaattgtcggtctctgccgttatcagactgattattctcaacaatttgtcaacttatctttcgcttttctctctctctcttcataactttagctgtctctctcaccgtctctctctcaccgtctctctctctctctctctttcttttgtttgtttgtctgtctgtccattcatttactgtctcataccctctttttttttgtttttaattctgctgattgacctcgctttaattacgtcacttagctgcccaattagtgatgggtctccgccgtcaccgctttgctttgacgtcacttttcgcttgtgtttccccgtgcgccctcaatttctcgtaaaatgttacaaattccaattaggaaaataaaatgcgatggttattttgatttnaaatgtttttttttaattattatatgctaaaaaccaaaaatgaaagaagtgccaaaatgtgtattaaaattgccataaaaattcaattgttttttaatgagttaaccatttgactttaatttcgacagcctaacctctttctttcttatgggctggattttctggattgaatggtgctatgaagttagtcaaaaaaccatcaaatgaaaatattttctgatataactttacacaaaagtaaccaatttttaattttgatataattcgatagccctaagtattttttattatcctgcaaaatttcaaaaagtttcataaataattaaatctcatttctctcctcctgaatttgtcgaaaagttcgatttaatttaattattctttaattattcagtgaatcagtgggttttcagttcccattaacacttagggctatcaaatgataccatggatgcttaatttagatgcttgtaaaaaagttgggttgcattaaattgtcaaattatttgatggtctcgtttttttgaagggtcgtgtatactaaaatagagccaaatatatttattattaaaagattgttattcaattataaatgaattaattaatttaattatttaaattaattttctgtactgaaatgacccgcctctttcgatcacccatcatccatacttttgactcttcgactcaccacgagaaaaactttgtttagaagaaagcggacaatgttatttcataatgtacatttacgtagttaaacttttacgatttttgacaattaccatgattttatttatagtctgttcaaaacctgagaaatatccaattaattatttttaattgaattcatttcgaaattattactaaatttggtcacttaaattatatttcccgatcattcagtaaatttcgtaagtgtttttcccatttctaatttttgtgcctctggcggtgcctaccgatcaaaacccatcactctgtgccctctcatttgctcatctctccctctccccttcccctctctctcgcccccttactattctctctctccatcccctttctctctctctctctctgccgctgattgcccctaattaatctctgatctcgtcccatctttgcaatttcttctctaaactggttgtgctgtgctgttcagcattttaatgcatttgaagaatcgaataactacacaaaaaatgctgaggttgggttgttgttgagtagttgattttcagttacttataaatttgggagaacggacggagggatcgattcgatcattcattggccaagggaaagacaattcgaaagaaaagaccttttcgaaaaaggcagtgccaccaaaacgaaccaaaatcggccacagaatgctaaaaacgtgaacagcagattgaatggattcggcaaaagtttaaatgacccaaaaatggcaataccaaaaaaaaaatgaaaggaagggccacattaaacgagttccctttttctttaccttttcccattctctgctcatccgtcgtccttttccatttcccctcaaaaaatgttcgattctttcgtcctcatttgtcagtccgccggagtttaaaggtgggaaaattacagttaaaatgcgtttgttttcagcagatggccctctttctcttctctctgtcctttctttggttcaattcgtttttctccatttttttttcgtttagtattaattaattaattttcttaataattaattaattttcttaataattaattaattgaactctcatcttggcacttatcatttatcaaattatgatttagacggtaataaatgttccgtatattccaaatttccactcgcatttttctgcgtttttttcgccaatgcccaaaatccgtcgtttgccagcgattttttcccttcttcgccgggtttgctgctgcccccagtgccgggggatgaacagaaagcaaagaatactccgacggaagaagaactgatcggaaaattgctaaagtcgggcgcgggattgcccccggggccaccggcggatttgccgagcgacggggaggaaaaagcagcgaagacgacggacggagcagcggagggacagccccaacaaccgcagcaacaacaacagggccaacagcaacagcagcagacggacacggaacagcccattcagccgatgcctccggtgagtgccatcgccgacgattccttccgccattcatcgcttttactttcccgccccccccccaggcagtcgttgccgaatcgccctcaatgcctcagggcaccgatggcggcgcgcccgcggcaccgccaaattacgtgcaatgtttacttaaaatcgcgccaaaagtgtgcgacccgggaaacattctgaacgcacaacaaaagcaagagattgaccaaacacttgcagaattgaaaatggccacgagaaaggcaaaagggggaaaatgaagcgaaatgagcgaaatgaaacaattagcaattaattaggaggacgcgaaagacgaatgtgccaagagtgggctggaggcgatgttcatcatcatcaaacactcgaaccttctcgacgaacagacgagcgtaagaaaagaaaagcggcgaatttcaaaacaaaatgccaacacttaatgaaggaagtccaaagaacgctgaaccaggcgatggacttttgggttcgggaccatccatgtgaaaagcccgtggtcattatgttgagcacggacccgtcaatttacaaacgaaaggtgtggacgggacggcattgggacgtgccggtcgacccggggcaactcgtcaaacttttcatggatcaggtgatcattgggagagagtcattcagcagaatgtcccggcaaagcaaaataacagttttttgtaatttggttttgataacactaatttgcgttctgctgaattgaattggcaaaacgaatcgaacttttggccttggggacggacgaactgtgcccgtggaaagggctgacccatccttaccatttcacacattatgccaactttatgactttggtgtgaatctgctgatgccattttcgacgcgggaacgacaaaaaaaccagaagagaagccattttcaggttgagtccattcggcaacaaaaa

SEQ ID NO: 46349 - DNA, 146 bp, Heterodera glycines
atggtgctagaagatgtgaaggaaatgtggacggaactgccgaagaaaggaaagggcaaaaagaagtcgaaacccgtggcgcgcgaccgtttcatccccaaactttttttgcgcggcgacagtgttattctcgtgctgaaaaaccc

SEQ ID NO: 46350 - DNA, 388 bp, Heterodera glycines
atggcgtcgcacaccgccggcatccaacaacttcttgcagccgaaaaacgagctgctgaaaaggtttgacttgatgttgatttttcaaatatatttatttttattttgcagattaatgacgctcggaagcgaaaagcacagcggctcaaacaagccaaacaagaagcacaggcggagatcgaccaataccgacatgtgagtgtaaaaacagaaaaggaaagtcttgaattgttaattgtaagcagttgtaatggatctattacagttaatgagtccaatcgctttttattttatgaatccaatcaaataacaaaatgctttctttctcggaacataactttctcataaattttaatttcattcgaaatattacctagtcaacaagcaa

SEQ ID NO: 46351 - DNA, 428 bp, Heterodera glycines
atggacctaccattaattaaactttgcatgcttaaggtgattgaattggatgccaaactgaacgaaaatgaacgcaaattgttgggcgtcgcgtacagaaagtcagtcactgggcaacgcttcgcttggcgtgtcattgcgtccgtcttggcacgagggaaaggcacgaagagacagctggagatggtcaagcagttgctgaacaagctggagcgcgaggtggaagagaggtgccgtgaaatattggtcagtggtgggtgggcgcattcttgtgccgcgaaattcggcactaatttgcgtaacttttcaggatttgttggaccgggttctgatcaaggaggctgcagatgatgaagcgaaagtgttctacttgaaactgaaggctgaccacttccgctatttggctgagacacgggcggtgaaaaacg

SEQ ID NO: 46352 - DNA, 2733 bp, Heterodera glycines
atgtgcgaagatgcttcaatgaaaatgttggagaaggaatgcttgagcttggagtattaccctcatttggcaaacttatgcaaaaacagtgagcagaatgttcgtgtcgttgcgcttcgtattttgacaaaatttgcccttgtctaccctgaagagtatgtaatagagaatggaaaaaattcatgtcattataatgtgcccgaataatattttatgccttctatcataattaaaatattttgagtcgcataataccgacaaaaacaaaaaaatccatttctatttatttaggaaagtcatggcatcgaagggtttcaaaattcgtcttcatgacgatgctttctcaatcgtttgcgatgcaatgaatgatttggaagtaaaagttcgcgctcaagctgccaatctcttggggttttttgaaaacgtctctgagtcgttcctcgaccaaacattggacaagaaattgatgcggaatatgactgtaacgtacagtcatttataaattgttattttccaatcacagatgttgaacactaatgtcagaaatacgaaaaatgcgttatctgctggtgttggttatatcggaggatggagcactggcaaaaaaatgggtgaggacatgccgatcgaaaagctggaggacgaaagccaatctttgatccctaccggctcttgtggcgccttcgttaccgcactcgaagacgaatttatgggtatttttaactgaaaagagacctgtccatcctaccaaatgttctttagcggttcgtcaggcagctgtttactcactgggaaaacttgctaggaaccgacctgtttttgcgagtgcgtgcatcgatcatttggccgatatgttcaacgatgaaatccaacaggtgaaattttttctgagtggttaattttcggttttataatgttagaatttaagtgttcaataatacgactgggacttttttttactttagtaggcccggtttgaaccctgaacccaagcctggacaaaaatcaaaataactttttctttgcaaattatcgtgtaaaggaatttagatccgtctcgacgccattcgcgcactgactccgctcgtttcccatggccttctctaccgcgatcaattggacactattctgaccgttctcgatgtaacagaatttatttttcttttttgcaagatccctttgcttttcatcttttgcatttttaggatgcaactgctgacaatcgaatggcacttcacactttgttggcaaagtccaatttggcagattccaactgtgtatcccaatgtcttaagaaattgctgcattctctgcgtcgttttcccatggacaaattttctatttttgggttaattggtaggcactaattatgccaaaaatgaaaatgtttaagttgtctcagtggtatcgggcagaaccattcttcattagttcagcctttggtgaatgatttgttggatgttcatcccatttttgacacccctgaacaaagtatcgacgatgacttttgtaaggattgtaaattaaagaacgattcctataatttttatgcattggagtgacattgtcatttcagccttctctcgtccgtgccatttgcttttgccattattaaataaacttaagatttggcccgactcatcctcgtccttaacgctgcatcccatcggtcagtgctctgttcgcttattccctcttatgcactgaaacattaccgttatttgcgtcgttcttggcctgagattgttcccaaaattctcgtaagagctcttgatatttttcgagtatatttttttaaaggaatttgatcatgaaaagttacaccaatgcgattcctcgccgtttttatgcccttttttggctgttgggccggaggataaaacaattgagaaggaaaatgatgctaaaactgctagagtatttcctattcattgtgaattagcaacaattaaatcttaaggtactcgagcctagcagagaatttagaaacaatgaaactattcgattcgttgctggcttaccaacggggatatttatccgaattttgctttgcaatgtaacggacgaggagttaaatcggttccgaattcaggtcccttaaaatattcgaagctattcccatttagactggttatactacataggtaaaacaagaatcagattcaaaaaaccactacgaaaacccacacaaaaaaaactgaagaggaacacaaaattttacaattagcgttaaaaagggaaagatgaaaatacttaaaacacccaaaagtttctttttgttttatataatgtgaacaagtttaaggtttctttcagtcaataaaatttttaataaatcgaggttttgatgggttttttttaaatgtataacgccctttttcatggcttttatataacgacatagcaccaattctctttttttagattgaatatcccgaccagactttcgaccttcatcgaccaaggcgcggggactttctaagactggacagttcaacagttcatttgcagactaatgttgtcgtttcggctcaaagatgggcgacttcggcatcagtcattttcacccctggcattatttcaacgaaaagtgatgaaagtgtggcacaaagaatcgttggaaagggacaaaaggattctttaaaccaacacataatgccttttgcaagcgcagaaaatatcgcgagaaaatgcagaatctccttcaacattcatccgatgcagcaagcctaa

SEQ ID NO: 46353 - DNA, 2472 bp, Heterodera glycines
ctcagcccgggttcgcctctttccccgacggacatttcgcgtgccttcgatcgtcgaacttcggcgcccgtccaaattcgcatgaatgtcggcggacgaagtgcgcaactgaccctggagaaggtcagcacttcggaccttaaaagaaaggaatgaatggtgccatggctaaagattatccccacaaaacaccgcaaaattcagtcccataaactttttggctttccaaattttaaactctccaattcccatcccaatcaatggtcggatgacctcaaaaagcactttccccacagatccgtcagcgtgccgaccgcagtcgattgtcccaattcgcggaaaaggaccacgcccagcgcgtgttggagtgcgacgcgtttctcaacggcgaatattacttcgagcgttccgccacagttttcgagaatattttggattattacgtgaccggcaaattgcaccggcccatggaagtgaacattttcactttttattcttccgtccggaccattaatcaatctgttcaaaagatatgcccaattcggtggcgtgatgaattggaattttggcgaattccgttgacggcactggcggagtgctgccggtcggatgccttcctgtccaaacggtcgctggcatcgccggcgcttttatctatggacaatgttggtgaacaccaaacgaatggttttgatcagtcagccgattttacccgatcggcttgctgatcagctgctgaacccatccaatgatgtgctgatcagtctgcccatctgatttgtgctgatcaattaccagacgattccgtcctgcttttgctcattcatccctcccccttttgaaggtgtacgtcgagtccacttgccctcccgcagaattcgaggcaattcttcccggcattcgtcctccccccccccctcatcttcatctttcccaatttgccagggcgtcgctttttcccgcgtccgtttaattctgtggactttcctggagaatccgcgctcttccgctgctgcgaaggttctttccgtggtgtccgcttcgttcgtgcttctttcattggccggtctcattctctcttcgatgaaagaatttcaaataaacgatggaatgatgagccctgttttacctcttcaattggccgagatttggtgaatttttatagttttttgatctgatcagtctcctccctttctctcctcttttcatccgatcattttccacttttcgtctgatcacttcccctcttcattgatcactcttccacttttgtttgatcactgtcccaccacgctctcttccctctctcctctttttatcagatcattatcccatttttcgtctgatcaattcccgttcagttgcatgcttttcttcactctcgaataccttctccgcttcgctgttatcccccacaaatggaggttcgttcttcgatcactttggattttctcttttcaatttcttttagtttcgttaaacagcctctgaatataattgaccttctcaccattgtcccttttcttctcgaagcttgccttccccttctcggggttaatgacatcgaattgcgcaactttcgaggctttcttcttttcttctataatttgcttaattaactttttaattgatcatttaggtgctcttattgtcattcgagtgcttaggtgggttaattaactcattgaatgatcaattagcaagcatttaacactaattgccctaaggttggcccgagttgcacgcatattcaagcttgcccggtacagcattggcctgagggcgtttggcgaaacaatgcgaaagtcggttcctttttccctcgtaaaatcaccttaccgtaccaccaaggtcggctgctgagttgtcaatgcttggcatgttcctccttacggtaccttttgtcctactgtcacttttggcatttcccctcagggcataatgcttttctccaccgccatttacttcttcgaacgcgacgaacccaactcaaaattttactctatcccttctgcttggtggtggtgtgttgctacagtaagaaaaggcgaattcgatgagtaatccctccgttccctttcagatgactactgtcgggtcagtcaattttttattcaaaagttttttggccccaatgccattcaattcaaagttacggcgatttggtgccggtgactacgggcgggaaggtcagtcccattgtgccaaaatgtgtttttgggtccgtgccaatgcttttgccattgaaaggtcgtcgctgccattgcctcagtgtgtggcatcatcgttttggcctttcccatttcaatgatcatcgacaaatttgccgagtccacaggccatggccaacgcgtttttgacgaaacggtggcacagggcgaagttccgttggaggccaacaaaagcaatgttttgttggggtcgccgacggggcgaggaatgagcaggaggaggaccaaatcgaggcgatat

SEQ ID NO: 46354 - DNA, 797 bp, Heterodera glycines
atgtccgagaaatttgtcggcaaatggaatttggagtcgtcggagaactttgacgacttcatgaaggaggtgtgctgactggcttccgggattctccccaaaaatttcgtcatattcatttcccacactttttctttttcacaggtcggcgtcaactttctcacccgcaaggccgccggctgtgtcaaaccggtgctggaattcgaagtgtccaacgccggcgagcactggaagatgacgtccacgtcgacgttcaccacctggaactgcgagttcgacctgaacaaggagttcgaggtgaagacggccgatggacgcacggtgaaggtgtgtgtggtggtggtgattgttgagactgttggctaaacattctgtccctttttcagaccatcttcgcctacgaaaacggcaagctgaccgagaagcagtccaagctcaaggtgggtgtggcggtggtgtgcacagtttggattgcacatcttctaatttcacccccttttcaggacgacgagaaggacagctactacgagcgctacatcgatgaaagcggcaaactcgtcattgtacgtgatcaacttggggaccccttttttccattgatgatttcgtcttttccagacgatggaagccggctcggtgaaggccaagcgcgtgtacacgaaggcggcctgagaaccgaagaagatgacgccgatctccgaagacgacggacgcttctgacccgttttcgtcattcttgaggccttttgatccgcaattcttaatttccatctaatttatttaatgcgatcaataaa

SEQ ID NO: 46355 - DNA, 945 bp, Heterodera glycines
  unsure (1)..(945): unsure at all n locations
aaacgactacgacctatgttggatacacattaagtggcgataaaatcaaaaaagatgccattaaaactgacgaaattgacgcgtttttacaaaaagaggaagactcggactattggtaagccaatttaacaaaattatagaagacaacctttgaaaactggtgtggaggcaataggacagccaaaaacaattgatgtctcaaaccctataaataaaacctatggaagagggggtgaattgtgacgcccaatgcaagcaaacactgtgatttgtcgaacgcagttgtgagggcgtttctgaaaatgttactaatgctgaccccaccttcttctgagcgcaattcaataacaatatagtgctatcattatcgcttaactttaaaaaaaagagttttcaatattaaggcgtaaggttttcgaccgtcagtcgggtcagcaaatggcactcactgaccaacaggtggagaaactgaatgccattgcggacaaccggttcccggaaataggtatcaaagagtgctcattgtggggcgacgaagaatgccttttttgaggttacaatccctaccctcctttcttggacattttctcctccgttcgcgagattcacccaatttccaatcgaccccccgacaaacgctctttcgttccgagtgccgatgaacgtcgaattgtcggccgaatggtccacgccattaaaatgggatggctaaaaaggaaagagccccccaaaggctcagaagaagaggaggagccgaggctttacgacctttgggacgacgagggggacgagcagcggaagagcaaatcgcaaatggcacgcgtccgaatgcatttgccggcaccgaaggtcagtcgtacataaaacaaattaagagcaaaacgagaaagtcaccattaatttgcaggtgaaccaccgnagcacgncgagtcgtacaatccccca

SEQ ID NO: 46356 - DNA, 993 bp, Heterodera glycines
  unsure (1)..(993): unsure at all n locations
atcaaacccgaactgatcagagacagtgggagatatattcactgaaattcnaccttcatgagcgatttctcaggacgatgtgggagaagagcgtggacaaagggcggggaaatggtcatttatggggatacgatttttaggtgctaaaaactgcaaaaataggtgctaaaaatgggaaaataggtaaaaacctaaaaataatttcattccctcgccccctctcgctgcttttctcccccgcgtccttttttaaacgcaattcatttttcgaatgaatgtttggataaaattgttcgggggtaggcccacttcccatttacgcttaactcgtccaaaggaccggcctctcattggacgggcgaatggtcgttgcgcagttggcatggcctactgaatgggtggttctggtcggctccttcctttctaccttcggtgctgctcttcagtgtctttgcagtatgaaactttgttttttgttctcacctttttcatcgcaaataggcgcgcctcgacttttgcagagcattgccaaagacaacgtaattcccttcctcaaacgtttcgccaaagtgaccaaaagcaatgaggtattgttttgataacagtttgtgattttgttgattcgttcgacaatttcagcccttcttcggcttgctgctcactactctcatcgccgaacttggcattttgatgggcgcaatggacactattgcggctgtgcttgactttttctttctgatgtgttacgccttcgttaacatcatttgtgctttgcattccattttgggtgctcccaattggcgtcctcgtttcgtttactatcactggtcccatattagccaaaatcggcgaaacattctttttttaggtcgttatccgtcctcggggccgctctttgcttattcattatgttcagcacacattggcaatatgccgttttctctattatgttttgctttgccatttacaaatatgtagaatggaaagggtaat

SEQ ID NO: 46357 - DNA, 1240 bp, Heterodera glycines
caattgttgccaacagctaccaatctccagcacgatgatggaactgattttccgcgtgaacgaatcgtcagtttttttctttatataatgtgctgacttctttttgcttccaggaagcttttagtaacgttgccattgttatcggtgatctgatttccgatgcagttctgcaaattcagaacttttctgagcatccggagtttgaaaatttttttttgtttgaatcattcaactttttagcggtcaccagccgattctgaacatgttgaccagttgcgagcaaataataaatacgagcaatagtttttatggacaatgttgtgatttttttcgattcacaacccgttttgctcatcgctcccgcagtcttgaataatcaatgtttccattgttcatttgttttgttgtagcagataaaaaataaaaaggtggtacattgaagtggtatacaccaaaaagggtacgacatggaatgtttgcttaggactgagaatggaatactgtggcattgaaaaattaggacggggccttacaaatcggccatttcaaaaatccgaaatcggaattgaaagttggggaaaaaatctgacgttttgccattaagtaaaaatcttatttttggttttggaattcaatttgccccttacaaattttgtcgtttcccgtgattagcttaaacaaattgtatgttcaacatttagttgtgcatacacatcgttggcggtgtcaattttggcgatttcatgctcaacttgcacccgcgcgatccaaccgttgccgacaaaacgtacgacgagcgcgtgatcgaagtgcgccgtgaccccaaccgaacgccgtacatggcgctggttacaggtgtcaaggtttcctcctttttaagtgtagtttgggtgcggacagcaaagctagtgattgggtttgggtggggaatgatgatgaacggtatggtgatgatactagcagtggtgggttagtgcaaagttcaatatttttgcttcacttaaaatttagtgccatttcgatgttctttgaactcgagcgcaaagacttggcgttcgtcaagggcgaaagccaagctgacattgagcaggtcgatgggaagagccaaaaatacaacggtttcttgatcaatctgatcgactcgcctggccacgtggacttctccagcgaagttactgctgctttgcgtgtcactgacggcgcattggtggtggtcgactgtgtgtcaggttttatttga

SEQ ID NO: 46358 - DNA, 426 bp, Heterodera glycines
tacaatgaaccaccggaagccaaacttcccaaactccgctggcgcttatatccgttcaaggtaaaaacaatgcgttttcattttgaaattcagccagtttttttttcaaaaataaattcaatgccatggattggcacaattttacatttctcaaaaaaaaaataaattgtttttcactgatttttcctgccttcctaaatttgtgggtccggtgacaatcggtgctctgtcacttattcattcacttctccccagggtgacgatactttaccggtgttttacatacatcgtcagtccgcttatctgattggtcgtgatcgcaaaattgccgactttcccgtcgaccatcccagctgctccaagcagcacgccgcgctgcagtaccgctcattgcaatacgagcgctcggacgggtccatcggacgg

SEQ ID NO: 46359 - DNA, 973 bp, Heterodera glycines
atgcaacaattgtctaaaaagtcggcttgggtttccaaagtttcgggcgagttgctgttggccaaagtgaagcaaatcaccaccatcggactgcagagggacacctgtgtcaaagtcaaaatctccaaaaacaagtgggttctggggggtactacatggcaaattttcattgattttcggaatatgtaaatcgggcaatttgaaaaatgtggccagcaaatggttcaaattatgagtctcttaattgaaactgaatacatggcaattcatcgcttgacctctctgttgtcaccttaagtgtttttagggatgtagctgattttcagcaattttgctattgccccaccccccgaaaaatactagaattttattggtttttgacagaataaaacataggggttttcgtggtcactgattatgctcttacactcatttttaccaatccttcgccaaaaatcttaaattcaatttttttagttgcaatttttgttcaagcttgggttaggatttgaaattggttaaaattatgtcatattcgtgatcaacgtcctgaaaacttgtaaacgagtttcactattctgaaaaaagtaaaccaaaaactccctggctttggtttttaataaaattccaaaacctttcggggctccgtcaacaaaagtgcctgattttctccgttcattctccctcacttctttctattttcattttttcattcatttagtttctacgaatacaaccgaatgttcttcatgagttctgcctatgaatggtcgctcgaccccgagtccaaatgcaggtggaaaagaccactaaattatttgttttaattttgattttggcttttagggtgggcgacgttgtgttgatcagacgcctctcagagatccacagaccatcaaaaactgtccagtacgctgtggaaaaggcaaggaattcatcattttgtcgtcacgcaattaacaaatggcattag

SEQ ID NO: 46360 - DNA, 618 bp, Heterodera glycines
ttggtcgagctgtccaaagcgcaggacattgaggcgggcgatgggaccacaactgttgtggtgttggccgggtccttgttggacgctgcagaaaaacttcttgccaaaggtcacttagactcgtttatacgccaaattttagcacttttgtttttaaaggaattcatccgaccaccatttccgactcattccaacgggcggccacattttctgaaaaagttctcgaggaaatggccacacccattgacattaacgatgacgacgagttggtgaagctcgccatgacgagtttgaactcgaaggtcctcagttcactttctttcgtttgcccattgtttccttcgattttccttttttcaggtcgtttcgcaacattcccatcttttggccccaatggcggtgcaggcagtgaagaaactgatgagttcaccggaggactcaagtgtcaatctgaagctgatcaaagtcgtgaaaaagttgggcgaaacggtggaggagtcgcagctcattgagggagcgctgatcgatcagaagtcgatgggccacggaggcccggcgcgggtggagaaggcgaagattggcctcatccaattccaaatctcaccaccaaagcccaac

SEQ ID NO: 46361 - DNA, 1013 bp, Heterodera glycines
atgcggaggaaatttacgagggtatgaaagcgttccggggtgtcgatgatcggattcgactttttcggccggaaatgaatatggcacgaatgaaaaagtctgctgctcgtgctgcaatgccggtttgaaaatgattttcaccaaaaatgccaatttttgcgattttaagccaaataatttgtaaataaaatttaattcatctatcaaataatattatttatatttattaattttttttttgaatgccagattgcttcttgggtggatatttatcatttcatttatattataaaggattttgatgcggatgagttgctgaaagtgatcattgagctggtccgccttgatcgcgattgggtgcccgccaagtcacccgcttcactgtacattcgtccgacactgatcggcaccgacccagtcagcccggtggacccgccacgatcagtcaaaatgttcgttttaacaggtaatttgaaaaaaatatattgaaaggtcccgttcccaagaactgagaccaataccgaaagagtcatctagttaaacttgtaaattcataagtacaatatctttatttttaattaaaaaaattggaaattttttggagtttttaaaacaaaattttaaataaacgactatcgcgaccgatactctcgagcatctattactcaaattcatacctgtctactatattcaggtcacggtaaataaaaaagaagtgaaacttttttagaaaaaaatttgcctaattaattttttgactgtttttaacactttaattattgttcatggagtaaacatgaaatttaattaatttttggcccggtcggcatgtactttgccgtcacacagcccgtgtcactgtatgcggacccaagtgttgtccgggcattccctggcggagtcggtggctttaaaatgggatggttagttgaaagtttcaaattttaattaatgcgaaattttcggggtctgtgcattgtcggggaatggaaatttacatcagaaaaaatgca

SEQ ID NO: 46362 - DNA, 1707 bp, Heterodera glycines; identical to SEQ ID NO: 7082

SEQ ID NO: 46363 - DNA, 1356 bp, Heterodera glycines
ttgaccaaagcgagtccatttccaggggttttctaaattgtctaattgcctcaaatagtgccaactgttgtgcacacaatgttcggaccggtcaaaggcttcaccgacattgacggggccaactcgagtctcgtcgacgttttcctcggaattccgttcgcccaaccgcccgttggccatttgcgatttgaggcaaatgctaacgaattttgacaaactttattaattgcaatttcactgttatgccaaagaaatgaaaaaatctgctcagaagccgcgtcccctcgtgacgcattgggacggcattttggacggcacggagcacagaaaaagctgtgtgccgcacgcacggcccgattggcaaaacgaattgctgggccagtacagcttcagcgaagactgcctctatatgaacatttttgcaccacacggagcagtaaataaaataattaaaatatatttaaattaaatataataattattatttaaaaaaggaaaaaaatgaaaataattaatgacaaaatgccgcagaacaaaggcagtgaggagcagctgctgcccgtgctggtgcttatccacggcggtgccttttccattggcagtgtccgccaatttagcgaccacagagacatcggtgctaaattcgtcagccacggcattgtcgtggtggccatccaataccggcttggggtttttggtaagccgagagaaaatttaaaaaacggcacaaatgaatcggttatttagcaagtctcattaaggtaaataatgatgattaattggatagtctcaatttaccaaaggcttcgcctcctccggtgatccccaaatgccgggaaactttggcctttgggaccaactcgccgcgctgcaattcatccgacagaacatccgacgttttggaggaaacccggaggacattacgctttttggccattcggcgggtgccgcgagtgtcagcgcattgggcatttcgccacacagccgacgtaaaagcaaaggcatcccgaaaagccaatgagaatgtaaattgggagttcagatttgttccaacgagcaattcaaatggccggctccgtgttcagctcctttctgctcggtgcccacgtgcaccgtttgacccttggccttgtcgagactctcgactgcgaagagccgccaaaggaatgcctaaagcgcaaaagtgtggacgaaatccacgccgctgttgaacggatggtgagggaatatttcgagaattaacaatgccaaaattgttgtattgagggccctgccaaagtgcgacttgggccgcgcatcgacggcgactttttcccccgcgacattccctccctcgtggacacatcgcccaaaaag

SEQ ID NO: 46364 - DNA, 527 bp, Heterodera glycines
aggctttctcatttaccgcgtgcgcattcgccgcgggggtcgaaagcgtcaagtgaccaaagggcaaacgtacggaaagccgaaaacgcatggcgtcaaccagctgaagaacacgcgcagtttgcaggccgttgcggaggtttgtttcaattagatgggcctaacaaattgtgcggttttcccaaaaaatggtcaaaacttggggattttagagcaaagcgcattgaaaaccaatgaaaaaaaaaatgcgtcaaattttacctggcggtaacaagaaaaaaggaaggtatgggagctgccacaatttcacccgccccttgtcatcccaggctaagtagcccggcccatcttttatttcaacccttaaagtttcacaaattttctgactgattttccccccttcccttttcccataggcccgtgccggccgccgtttgggcgaacttcgtgtgctcaattcgtactgggtgggccaggactcgacctacaaattcttcgaagtcattctcgtcgacccatcgcacaaa

SEQ ID NO: 46365 - DNA, 472 bp, Heterodera glycines
atggccggtatcgcagcaggaagactgacggaggagcggaaagcctggcgcaaagaccatccattcggtttcatcgcacgacagtgcaaaaaggaggacggcacattggacctgtaatttttttgttttgaattaatgttcgaactagccctaatctcatatatttggatattatacagtttgtaatccacttttcatctaaatttcaggtacaattggatctgtgccattcccgggcccaagtcgaccatttgggaaggtggtctgtacaaattgcgcatgatcttcaaggacgacttcccatccacgccgccaaaatgccgttttgagccgcctctcttccacccgaatgtttatccgtccgggacggtctgcttgagtctgttagacgagaacaaagactggtgcgcaacacatcgcggtttttaatccttggcttttgtttgcagaaatcgaaacgatttttcgggca

SEQ ID NO: 46366 - DNA, 1116 bp, Heterodera glycines
  unsure (1)..(1116): unsure at all n locations
aataataaatggaaaaaaaagttggactgtatttatattgattttcaaaaagcatttgactcagtgccgcatgaattacttttatacaaattggaaaaaataggtataaggggcaaacttntgatgtggataaaggactttttgagtaataggacttttcgtgttaaaattggggatgatttatcctccagtaaaaaagttggctctggcgtcccccagggctctgtccttggacctttattatttttgatttatattaacgatcttcctgatgctttgccatcaggagtgaaaataaaattatatgctgatgatgttaaattgtatatatgctataaagcaatagcagatacagaaattatgcataaagcattgcataatttatcagaatgggcaaataaatggcaaatcagaatatcaattaaaaaaacttttgtacttcatttggggaataaaaaccccaaagaaatatataaaattgatggaaatataataaatgttgtggatacaattagggatttaggcataaatattgataataaattgcaattttccaatcatgtcacacaaataataaagaatgcatatttacgtatgcgttctttatttcgggttattaaatcaaaatctactaggatttggattattttgtacaaaacttatgttagaccgttattggaatatgctcctgaggtttggaatccatctcttctaaaaaatattaaaaaaattgaaaaatgtcaaaaatatttcaccaaaagagttcttttcaaatgcagccttccacccattccataccaacaaagattagaataccttcaactgccgacacttgaaagcaggcgaaagctgtctgatctgttcatggctcataaaataatttatggccgaacagatcttaatccctttgaaatattcaaaccttctgaacactttaacattcccttttatagacttaactcgaaatataaattaggcaaaaaatttataccttttgcggggcgggtaactaaaatttggaagccactctataaaaggatcattgaaataaactcattaaatcaatttaaaaataaaattaaaactatctctattcccgtaaaatagaccgaaaaa

SEQ ID NO: 46367 - DNA, 2382 bp, Heterodera glycines
atgcgtccggatgagcaccgcttcaccgccgctgactcgccctacttccgcagcaacagctcatttcttggcatcggaatggacaaaagtgtccgaattgttgaaagtgggtttaaaacaaaaattcgaaccgtacgtcgcaattaaaaaaattttttttttttcgcagacggcttgaagcaaggcgatgtcgctggagcaaaagctgcgatggtcgtccaagtgcaaaaagtgaggattttaattcgaattttatctccttcattggtatttttcggaattagtatcccggcggaaaataatttttttttttttgagtcttactaaaattccaaaggattaattacgcattcattaaagactctttctcattgtcatcacaagaacaaaacgctccttcactttcagacgccgtttcacttggtcgaatcgatgctcgaaaagttcgaaaaagtggtccctcgatggaatggcggactgttggaaaacggtgaattggcccatgtcagtcgcatgttgagaggtaaagtaggacgggatgggcacaacatcatcttaaaattcgttaaaaattgcttttatccttatgcatctccccctccctcgcaaaaatttttttattttttcaataaaacattaatttttataagacaatctcacaaattttttattagcgttttgcgattttattttaaaaaatttccaaaaaatttgattgtaagaaaatttttcaattttttttttcttaaagtttttataaaaaaaacaaaaaatttaagtttgaatatattttaaaaaaaacaattctgaggaagtgaaacggggcggaaacgagctgattgtgagcccttttcctcccctgtcacataccatttttacaggcctgtatgtgcacaccacttataaccagcaagcaattcaacgctttccgatctccgctttttcgccaaccaatgccaaaacagaaattatgatggttgaagacgggcaaatcacggttgagcaatattatgcccgccgatacgacatcaaattgaggtcccccattttttccgggtgcaccccaaaattccgccgccgaaaaatttttttttatatgagaatttcaataaaacaattagttgaaaattttttatcgatttattggaaaaatttcgaaaaaacttaggtttggaaaaatttttttatggaatttaaaatttttcagtgcgccttgtgcacctttggtgatccgtcgagagcgtggcaaatccacgcattatccgatggaactgctgaagatttgcgactaccaacgtgtccgctccgctcagatgacaccagagacccaccaggtgcacacaatttgtcccgtataatacaaaagaaaaaaacgaataaaaaggcaaatgtttcatttttaaataagtttttcaaaaaaatattaattttctttacaagaacaaagtaaaaaaaaattagaaatttttttacaagaacttagtttaaaaaaaattagaaaacttttttggcgattttttttttcgtgaaacggcggggggggggggggtggataaaattttgcacccctttcatacacattttttttggaaattttggttcctattttcaggaaatgatcaaagcttgtgccatccctccatttttgctgcgaaggcagacggatcagctgacaaatgtgcttgcgctgaaccaaagtgaccatcttgcgagggcgtccatccgatttgctgaacgaccaatggaagtgccggcgcgcattctgaacccaatgaaactgaaatatgccgacgacaaactggaaatgccgaacgacacctgtcggtggcgtgccggcagatacctgttgccggcacagatcaacagctggtgtgccatcgcgttggtggacaacagccgcgacaacaatgtgaggggacattatttagaatccgttttttaggattttcaacaaatttttttttgtggctttaaaaattctgggaaatttgggtgcagtagttcttttgagtgagtaccaataaatcgaaaatattcagcacaaaatatttatttttatccctaaaaaaatttcgactgtgaatgggtccatggcggggcggagtacgaaccccgtgtcgatttttccaaaaatttttttaggaaatttaaaaaatatatttttttttcatacatgatccattgccgacctctttcagatcagtttggccaactggagagactttgttgatcgttacaggcaaatgatgcaaatgaagggaatgaaagtccttgcgccttccgtcactgaagtgtacaatgttggaaacttcgatttgcgcgaccgcttcacgcgaatgcaaaacagtggtgttgaatttgtgctggtcggccatccaaaag

SEQ ID NO: 46368 - DNA, 1033 bp, Heterodera glycines
atgaacaaaactgacgatcaattagctgaatgtcgcgaaatcttttgctacttcgattccaaaggcgacgagaaaatcaatgtgaaacaggtcgagaaggggcagtgggaaagtttaatgctatcaaatggattgattgttttttccgaatggtcacttttaataatagacttcctctgatgtattttatttaattttaggttctttttaactttaattaacattaattaggcgaaatatctcaatacatttactgttttttgtaatttggtttaggttggcgatgttttgcgggcactcggccaaagtccgacggagtccgaagtgcgaaaatgttgtgagcactggaccgaaccaggtgaaactgcgaggttcagcattttcggggcaaaatgcgccaatcctgaatgggttccctaattttaattattttaaatttggggctcaaacccattttaaggggtttctagggtgttgattacccgtcttaactagggttgccaattctggacgccgggcccgaattcgaacaaaacaatgggattccaaggaatttttctggggtaaactattgcgcccaaaataaaatagttaaattgggctttccttttttcagatacgcgcatttcatttgaggaatttgtgccaattttccaaacggttagcaaatcgcgcgctcagtacacaaaggaccaatttgtggagggattgtctcatttcgaccgcgagggcaatggcacaattgccgttgcggaactcaaacatttgctgaccaatttgggtgagtcggatgggagccgaatgtccaacagttcgaactttaattaccgttgaaaactcaaaaacattttaaagggttttctcttttacgtaacgtgtgaaatctttgtttaacatttccgagagcattaaaataaccattttttaaggtgaacgtctctccgaggaagaggtggagcaactgctcgccggccacgacgtggccaatggttttgtcagcatcgattcgttcattgaaacagtgcttcggtaa

SEQ ID NO: 46369 - DNA, 1210 bp, Heterodera glycines
atgacggaggaggaaaggcgcaattacttacgaatgaacccaaaaatcatcaccaaccaacagaacaagggcaaatacaaattcctgcagaagtattaccatcgtggtgcctattttctggacaaagaggacgatgtgctgaggcgtaactttgccgaggcaacgggcgaagacgtttttgacaagtcggtgttgccgaaagtgatgcaggtgaggcgagaaggaagagggagtggagggaaatggacgagggatagactaaaaagatgagaaagagagagaggcagtggaagaaaagcggacaaaaaaatgagaaaaagagagagagagggggggggggggtgagagagtggcaagagaaaaaggggaactccgttcagttagaaaatcattgtttgggtgcctttggccctgtccacctctgatccattcgatttttaggtgaaaaatttcggcaaagcgagtcgctccaaatggacccatttgacggcggaggacacaacggaccaccagggagtgtgggcaacgccgaccccactgagtgctaaatttgtggcaaaacacgcggcggggatgaaaaatgtattcgaaaagccatcagcaaaaaaacgaaagattggtggggattgaatgactctgtgcttaattaaatgataaatttggcatttaaacggatggataaaatttgaaaaaaaagtttttttaatcgacaaaatcttttacatgaagctgtaaaaataataagtgcaatttgcgcttgacttcgtttgttcgtttgcttgtcttttgaaaagttcggtcattattttgtttttaaattaaaaacatttttgaatacaaagacgaactccggttaattcaactgtttcgtgcaaattataaaatttcagtgatcttatgaaaagatggccattgattgggccgattggtcagcccggggctgcgacgaggggacccattttgggtgtccccgagcccaacagaccccagaccagggcattgtcaagtgactattcgaaaaatttagatagtttccctctctattggaatagtttaatgagtgtaaattaaattcaacgaaatcccctgctgatttaactgattatgagtcactttccctcccccctccccctccctttccatttgtctcatccgtcgtcgattttttggaccattttactgacaatccttcaaatatttgtgactgtta

SEQ ID NO: 46370 - DNA, 988 bp, Heterodera glycines
atggacaaggaatacatgagcaaaattgtgaccaacgcatggacatttgtcaacgattcgctcggcacaacactgtgccttttgtgggagcccgaggtttatcagaaaatcagtgaaatgtgacagcaaaaaaataataaagatttgtccgtatcagtcatttcttttttgatagtttaatccaatttctcggggaaatctcaaaaatgaaaaattattaaaaagtattttttcctgtgaccgaattcgacgttaaaatgacattttcaaatttttaacaaataattagattttcttggagactttgtttatataaaatatttatttgccattttttggagtgccccaaaatgccaattttatacgcttttaagaattagtttgaattttgcttctctttttttgtttgtttcttcgcttccctctcattgtcaggtcattgccattgcccttttgtacatgtccttcaaaatggagcgcatggaggagcagcaaatcggacggacattccattttgacgcgagcacagagtggtggaatttggtaagaatatttgttgaaaataatagaaatgcaactacgtccccccccctcacatttttaaaattttcaaacttaattttcaagaaaaaatcagaacctttttataagaaattttattaaaattactgaaaatttttttgtttttttcaaaattttcccaaaaaaatcgctgagaaattttaaaaaatttcaattattacaaaaaaatgtctagcaataagtttttttagtgaattctaacaataaatattaaaatttaaaaaaattcggggagcgggaaacgtgctgcttccaaagtaattaaccccaattttaaatacttttttcacagtatgtgcaaaatttgaccgtgcccatgatggacgacatttgtcacaaagtgttggattccatcgcaccagcgaacggagaggacgcgccaatggcaaacggaacaaaaaattga

SEQ ID NO: 46371 - DNA, 851 bp, Heterodera glycines; identical to SEQ ID NO: 33982

SEQ ID NO: 46372 - DNA, 606 bp, Heterodera glycines
atgttggaaatgaacggtgttggaaattccaaagactatgacaccaaagtgaaggttcgttcactttgtcaatgatttgtttgtttatcatttgtaatattttaggcaattctcgaacaatgccgaatatcacagaagctcttgaactatactgagcattttaactatccctatgtcagcgaagtgacatattacgagcagttgttgaagattggacaaggaacatttgggtgcttaagacggagcgaattttttaatatagtgaactttctagcgaggttttcaaggcgcgttgcaagcgaactggcaaattggtggcactgaaaaaaattttgatggaaaatgaaaaggaaggggtgaattggcaccggaggaacccatttgcatattcattttcagtttccaataactgcacttcgcgaaataaaaatgctacaaaggcttcgacatcagcacataactgaactggtggaagtgtgcacaagcaaacgtaaaaaaaagcaaagcaaaagccacgaatccactaaaaagttgttttagaaaagagtgggaaggagaaattctgcttttacttggtgttcaccttttgcgagcacgatcttgccg

SEQ ID NO: 46373 - DNA, 370 bp, Heterodera glycines
atggggctgtccaacttccagtccagcttacaacagtttgaaaaggccatgaaaatagcgaatgcgaacgcggacaaactgctggagctgcagctgagcctcgggctgggcaacctgttcacactgatcaggtggctaaacatagtcagctaaattattcggaaattctaccctaagctgtcaattcctttgacggcattaaaaatgacgaaatttcagggacctgaacaaagctcttgtgttcctgcagaacgcactcggcattttgcagggaattgaggcgaatcatgtgcatgccaagtacaagtcggccattctctaccaattgtccgtcattttacgcctcaagggacgctattcaggcgattaa

SEQ ID NO: 46374 - DNA, 890 bp, Heterodera glycines
ataaaaaaggcgagaaaaattgaaaaaatggcaaaatttagagttaaaaggttatttttcaattatattttcatattttctccgcttttcagcttctcttaaaagacctgtgctcctattacgactacaacgaatttttgatggaaaaattcatggagcttttccccaccggggctgaagttggttttataaggaaaacccaaaatgaaatttattccaatttttagttactcgaatttttggacagcaatgaacagccgcggcctgtgacaattcgctcaaatccgctgaaaacgcggcgcggagagttggcaaaggcattggtttgtgagaaaggacgaccgattttaatcatttttgcgaaataagctgaaaattacccttttaattttggcattccctcgccctgatctgattttgggcttttaataaacaattatcccatgcgaatgttccttcagatttcgcgtggaatgaatgtcgacccggccgcaaaatggaccaaagttggcctcgtggtgtacgactcgcaggtgccggtgggtaagtggcgtaaagcggccataattgggcacttccttttatcatttctaattcttttttgagtcgttagctaaccaattgtagctgcttaactttttattgatgcgctttcaggcgccactcccgaatatttggcgggccattactccatccaaggcctttcctcatttttgcccgttatggcattggcaccacagccgaacgaacgcattttggtgcgtcgttaaaaggagggggcggctgggaatctatcaatttggcttaaattttgacgtcccgttgaaaaatggtgaattcttgcaacaacaaatgacttttggcggttattttgcaaaattctttttttt

SEQ ID NO: 46375 - DNA, 2087 bp, Heterodera glycines; identical to SEQ ID NO: 7132

SEQ ID NO: 46376 - DNA, 631 bp, Heterodera glycines
atgtgcaacgaagacgatggcatcgacttgaaggtgtgaaaaatggaatttaacgaaaagtttaaaaaaaaattcagagtgtcgctttggacgaggcatttgtggcccgtcagctgaacgagaccaattggattgtggccaactgcacaacaccggccaacttcttccatctgttgcgtcggcaaattcattcgccattccgcaagccgttgattgtgttcacgcccaaagtgcgtgtgcataaaaagaaatttaaaaaaaaacattttttgtttaattaaaatccatttatttgagtgatttttgttatttctaacgcttttttgaaattgattaattaaaatttccagtctctgctccgccatccgttggccaaatcgccggtggacgactttttgcccggcacatcgtttcgccgtgccatccccgaggagggcagtgccagcaacaacccggcggccgtggagcgactcgtcttctgttccggtaagaaagcgttgattgatcaatcaagagtaaaattgttattaatataaaactttttggcgtgttattacgcaaatgtttttttccagggaaagtttactacgacatttttgacgagcgcagaaaacaaggcctggaggataag

SEQ ID NO: 46377 - DNA, 1257 bp, Heterodera glycines; identical to SEQ ID NO: 34082
  unsure (1)..(1257): unsure at all n locations

SEQ ID NO: 46378 - DNA, 1349 bp, Heterodera glycines
  unsure (1)..(1349): unsure at all n locations
atggttcacattgttcagacattgcggaacaccaaacagtccgacaacggcggcaaaacgcaacaaatggtagaagcgacagtagcggaaaacgggcagcaacaaactcaaaaaaagcactccgactccgctggaagcagcagtatgttgtgaattgtttgcttgcttttacccacacggaaatccgtctctgttggcattgccattctcaatgggtttatacgattaatattccgatgtccttttgaagcatcttcggttgtgccctgtcccgctgagttggcattgtgccgtcaggcggtgttggtcaattcggatcagcagcaacaacaacagttgcacgactatgagcagcgtccggtcatcgttggctatgatttcaacgccggcattcaatgggaggcgttgttggattcctttttgaccaccggcttccaggccagccacatgggcatcgccatccaggtacattttcagcaacaatcatctccataaaacatattgctgtggcaaagagagccgtggattcaattccatgccaggagcaatgtatcaattctatcactaatccaccgcagccgacactgtagcgccggctcaaacagtgcgcagcccaacaacagtcacgaagcaatctccagaatggacgtggtttgtgcacaagggaccaaccatttttgagggtggaaaaatgatggaaatggtgccatcctccgacgctcttttaaaatgcctaaataaaatggtttaagcaacaattcatttggcttttaattcagttaagtgagcggatccgtgacttccattacaacgaggaccaaacgcacgcacagctcaatcgaaaattgcaattacgcgaccaactttattacgcaatttcaccgattttcccaagtacaatcgaattatttttgataaatgatgcgccaaatgctccgttctgttgttcagtgtgcggactttacattgtcggctcgtcactgaacggattcgggacgaagcggtcggacttggacctttgtctgatgataaccaatcgcgatgtgagtttaggcatgaataaagggcagaaaagcaaaggaaatgtccagagaaattgggccccaattctcttttaaattcattttgtcgtccgcagattgaccaacgctctgatgcggttgttgtcctgtcgtcggtgatgcggacattggagagcaatcaaattgtggccgagcagaatctgatcctggccaaagtgccgattctacgcatcaaatttatcggcactttccacgacataacggttgacctgaacgcaacaactcggtggncattcggacacgcatttgatgtgtactacagtcctt

SEQ ID NO: 46379 - DNA, 2058 bp, Heterodera glycines
acaattcagaatttggtagctttggctgctgaccaatttgatgacggtggttccaccgcttctgctaaaaaagccctgccgcgtgttcggtcgtccaccgaagttctgaatccgttagttgcctctccccccaaatgctttttataaatcattacagacagagggtcatacgtcgccgtgattccatttgtacttcgacaagtgcacccaaccaaatcgaccagactgaagaaacccattggatcacgcaatgtgagcaaaaggagggcaacaccgaacagataggagggcaaagagcagcggacgacgcaaagggtaaagaggggctgaccgacggattctgattttgacaacagatcgccagcaaagcgttcaaagtgatcgaacacgacaaaagtgtccaactttggggggtttggcgctgccgtgccgtgacatttcccagctgcgaatcgcaatccctcttctgatcagtcatgccattcagatcagcgaagaaagagtggcaaaactcatttcggcacgatacaaagtgggctgaaaataaacccaaatattcctgttattcttccgctttcaaaggacaccgtgttgaaacattgccgacccaagcatttccacaaaatatgccaattggccaccgatgccgtagagcgttggaataaaattgcagccgaaggcaaagatggtgggtcattctcggcggacggtaacggcactcaccgatcgcccgtttttgcgactattcatcaacaagtgagggacggggaaaggctcaatgatacgaagcgacgcattcggtccattcagacggccaaattcatcagcaaattctcagaggcaaaacggcgtttcttcaagtgacttcgcacacacatttttaatcaatccaaccttttttgcaccgttaagtgaacgaattgacactgagccgtggcagccgaatcgaattccctacgtttaccagagaattgtcgacaaattccgactaagcggtgcattgagtgacgtggaggaaaatgtggaggatgagcacgaggacgatgatgacgagagagaagggaaccgcgactatttggtccttggcggcagcaaacgcttcatcgttgtcgggtccgttttaatcccacccttgtcgatctgttgtcttttttgtgtccattttctcgtgccatcactttcccccccccccttttaagctctgcgacttcgcttctccgcgtgttggcccagtacagcgacttgctttttctgttcccccaatgttccatggaactgactatggacattgtccaaattttgaaggcgtttaacagtcgcacttgccaattgattttgggcgcgggtgcgcgtcaattggtcggactgaaaatgatcagtgtgaagcatttgggtgagtgaattgggagaaatcggtcttacgctcaaaatggaacatccgaagcattggcattgcgttcgctgcaattcatcgcccaattcatcccagcacttcgccaaacatttctgaatcaattgccatccgacagacacacactcctacgatactttgaccaaacacaacgcgattttgaagaccacgagggcgaaataaagggcaaaatgttgggactgatggacagagaactgataggggcattggaggaggttattttcgagaaaaaaaacagaaacaattacaatgtttcagtggaaattggaaggcaaagtgcccacggcggcatttcaacaaattgtcatgcaaattggcaaattttacagcagttactccgccgttatgccagccgaactgacgacggtatcttctaaagaatactactgtatgaggcgacatattttcaggatatcttgctaaaaatccacgagaatttcaagctgtatctcagacagcatctgaactcccgaggcatttcaccccacgattcgattgcctatggaatggctggtcaagactttgcttattacatcgagaatgtccgtgcattgcccgactgcaagtcattcccagtcgacacaattggcgatgttatccaacacaaatactcactccctccctaa

SEQ ID NO: 46380 - DNA, 1611 bp, Heterodera glycines
atggagctgactcggctgggcgatgagccgaccacccggtggacccttctgaacatccgaattctcgtggaaagtgccgaagtcggagagggacagcaaatggtccatccgctgcaagtaaagaaagcagcgagaaaataaggcaatttacaacattttaaagatcaatttcctccatcaaatggtgcaggaaaaactcgacacagcaaacgaagtaaattatgggccaatatgtaattaattagacctaattaaagtgggtgtttggatttggcaatgcattcattcattctttcccacaatcattccattcttctagcccattatggcggcttacattgttttgcattggttctgtcgctctctccatttggacattcttttttgtcaggtcgtgttttttcaaatttccataattttttccgttttaggctctccaaattgcgaaaataaaccgaagcggcaaagggagtgagggctcctcgcagcaatacatccgagtggacgagtacaatgagaaggagtgccgtttggcgatcagttattggctgaggagagaggacggcaccattcacggaaggtcggagagtgaatttggtttataaaaacgaacatttaggcattaattggggtgagttgtcgggggggggggggatgcccaaaaaagatatgggctggaaaatgccaaaggatcgaggcaaagtcaaaatgcttaactttttagttggagaggattcatccccaattaaatttctaaaaaattccaggctgtcgtctcattaccgaatgctcatttttggagacaaaaacaattcccatgtcggactgaaaattcgtcaccatccgcccagcacggaattgcccacaattgaccatgaacagaggtgttttctccctcgtttatccattcctcctccccacccttcttcaaattgtttgtttcagtccctccctccaacgattgctcaacgaaactgtccttttccggtgccgagaacgtctcctggcggtcaaacaactgcttgaagcagcttttaggttaattttaagttaataccacagaaatccgttccgttttgtttgaattttcgtttcatttttccatttttatctctcagaactctctcctcccaacccaacacaaaatgtccgtcgtccgcctcgccttcgtccaccaattcggaggacacagcccaacagtttgtccaccaatctggtcactctctgctcacattgagctgtcccctcgtgctaatcggcgactgccatcccgacgaatgtctcaccgtggcagtgaacactttcagcggtgcggtcattgcccgggtggaagtgctcggtcagttggtcacttccttgggacggcctttcctttttctatccctgcctttttcataaacttcaggtcaacgagaggagatccacaagttggagcatcagctgaacacgtgcccaactgtgctcctccactcctccgcctcgtctctgtcggccttttctgtcagttcgattggccgtctgctggcacggctccgcgttctcgtcattggcgaaagactgaacagggcgttggtcggaatgcaggcaacaaaagcactttcaactgactga

SEQ ID NO: 46381 - DNA, 2655 bp, Heterodera glycines
atgtggcaatctgaacaaatcaccgagattggcacaattgtcgaaatcaatgaacgctttacaccaaccgaggtcattccaaaatatgtgatgactacttcgggatcagcgtcttgcccaacaaaggtcatacgacgtcaagcaaattttccgcttgaacacttcagaagagatcatcaagtcaatgttgttctcaaaagtgttcagctctcatctggaattaaaattcacccatcctttattttgcccggaaattcacctttccgatggcaccctgacatcattcgtcccaatggttcatttgttatttctcgcatttatatttgatattttaaaataagctctgcggagctactctacatatatattcacacaaatttgtctaagctctgcggagctgatttaattaaataaacacaaaaaacaaaaacacaacaagtgagaaatgataattaaagggaaaagttcaatacataaattttaaaaaataataataataataatattaaaataaaataaatgaatggagtattggtatatgaatcccgtgggatttaagttcttggatcagggacgatccttagatatgaaggggaggtatagtcatacagtcacaccgggctatatcaaaaatctaaattttagtcgattggaaataaaataaaataattattaaatttatataattttaaaagttaaaaatttcgtcagattttctcttggcttataatttgaaaagcaatgccaatttaattcaaatccaattgaatcagaatttcaaaaaaaaattaatttaaaaaaaaaaaaaaacgcggatttattttggtagttcattggcagagcttctgtggattggttgaaggaatgagttcattcccatcgaggctcggaattttccatttttattttgagtaattaaataaatatttaaattattttattttcagttttggcttaaaatcaaaacaaatttctcatcgtaaaacaaatgaaaagaaagaaaaagtctgaggacttcattcaaattttggaaattatttaaattttaacgaccagggacggtcttttggagggccggaggtgtaaggccgggaccggaaatggcctttacccttcccccccccccattttatctctccgatagggctcctcccatcccgaggggcgcttaaaaggcaacggataaccagccaaaggggacagtcggatcagtcgggagccatcagtggaacggccaatcgatccccacctgggaggtacccccaggcatccatcaacatcccttcccttccaagccctgcggggcctaattacggacgcgtaagagggctcctctggactatttccctcataagcactgggtatgggacttcacggctttactattagttaaaataatttgtccgtaacttcgtttttcataaaaaataataatgtatgaaaaaataagggtacaatccgaaattcctgaaattctggtttaaattatttaaaaaatttttgattttgccagacgactaattttctaattttagcattttacaaaatcgtgccaacaatttgaagatgtccggtgacaattcggcacttattgcagcggagcaagcggcgtatggccctttttttggctcgcttggcgttactgcggcgatgattttcaccgctgctgggtcggcctacggcacggcaaaatccggcaagtttgttttgttttgaggggtcttggaattttgaaaatttgggaacgtttgaagcaggccttataacctgaaaaaatctgggatttttctccgaaattttcccttcgaaaaaggggttgttttcagaggatttttgttgaacaaattgaatttatgaaatttttgttaggccgctgatttatgcgctttagcgaaaatttacccagccctctcaaaatttaaatgtatcatgaaatttaggatttacgaaatttcattccaaaatgcctaattttgagcctttcctttttttcaggtactggcattgcctgtatggctgtagcaaggcctgacctcgtgatgaaggcgatcattcctggtactctatgcaatttttttatactaataagaggccgaacgagaggatcggtcgaagggtttcggttaaaacccaaaaaaaaaaccaaacctaaaaaaatttctcggtcagtttttttcggtcaaaacccgaaaaaaaccgaccggtctgactctactaaaaatggcaatttaaattaatcttttgcctttttttaaactttctgggttttttttgtgcgttatgacaccggaagagtgaattcgttttttacattttccaagtgaaattcaaaaaaaaattgctattttgaaatttgttaaacaccaaccgaggaaccctatcgttttttcgaatccttaactcaaacaacaaaatataatttcgactttttggttcatgttttagaattagcgcttttttatcattttttaaaattaattttttccattttccaccccctccctaaaaaaaccgaaaattcagtggtcatggccggcattgtggccatctacgggctggtggtggcggtgatcatttccggccggttggaagcggctgggcccggctacaccatcgaccgcgggttcagccagttcgctgccggcctcgtgtgcg

SEQ ID NO: 46382 - DNA, 435 bp, Heterodera glycines
ttcgaatccttaactcaaacaacaaaatataatttcgactttttggttcaagttttagaattagcgcttttttatcattttttaaaattaattttttccattttccaccccctccctaaaaaaaccgaaaattcagtggtcatggccggcattgtggccatctacgggctggtggtggcggtgataatttccggccggctggaggcggccgggcccggctacaccatcgaccgcgggttcagccagttcgctgccggcctcgtgtgcggtctgtgtggactgggcgccggctacgccatcggcgtggtgggcgacgcgggcgtgcgcggcctgtcgcagcagccgcgcttgtttgtcggcatgattctgatgctgatattctcggaggtgcggcgcagggacggtcccaggattttggcttggggggggggagta

SEQ ID NO: 46383 - DNA, 228 bp, Heterodera glycines
gtcagtcgggcactcggctgtctctcccagctgatctgggcgcgtgcatgggccttccgttggagcggcccaaatcgcacagcacggacggactgataaaattggcggcggcggcgacagcagcgaaataaatattttagaccaaaacaaaaagagaatagaaccaaaccccaattattattattattagatgtattatggttgttaaagtgtgtgtgacttgtgagc

SEQ ID NO: 46384 - DNA, 3221 bp, Heterodera glycines
atgcgatcgaataaactgtggactgaaattattcttgtcgtgaatactgtaagtcgtcatgtttgtcatcgcttgactttgctctctaaggtggctgaaccgttgacgcagctttacgcgcgtatgctccagtttctgcccgacccggccaaccaaaacacgcaacttggaccttctgatcggctgtcttggctgcaaattgtgttggaactcacacgcatttatcactcactgatttcgcaagatctgcccgagtatttcgaagtaagttcgcctgagtattactccgtatttatagcattttaaggacaatcttacaccttggatggagggctttttgcaattgttggagttaaaactgcccgagcttgaggcgaagtcggtcgacttggaacctaatgagcatgacaaacttcgctgtgaaatttgcgagatcgccactcttttctcgcagcgttttgaagagtgctttattccctataccgagcgattcattgcctcggtttggaatctccttgtcatgacggacagccgaattcggtagtgcagcaaattacttcgttttctgtcgtataaaattgggaaaattaagaaaattgccccctccccattttcgtaaatctctccatttcatacttcgatttattctgtccctttttcaaagtttcgattcgttggtcagtgctgcgctcagttttctcgccgccatttgtcagcgtcctcattatgcgtcgcatttccgaagtgaaggcgttttgaaggcaatttgcgaaaatgtcgtcgtgaaaaatttgatgttgcgttctgaagatgtggaaatttacgagaacgaaccgttcgagtttctcaagcgggacattgaaggtggttacgaattcgttttactttattcggttcgtctcattaaggctccgacctcgaaacgcgccgtcgtggcgccgccgattttgtgcgggccctttgcaagcagttcgagtcggaagtgtgtgctctcctttcctcggcaattcagagctttctttcggaataccacaaaaatcccgccctgaatttcgccaaaaaggacgtcgtctattacttggtcagtgctctcgcttcgaagagcacaaccgcccgacacggaaccaccgacgccagccaactggtgagacctgtaaaaagaatgctcttactgcttttcagataaatgtcgccgatttctaccaagaacacgtccgttcggatttactcttgggtcccgtcaatgatttgcccattttgagaggcgacgcattgaaatttttggtgcttttccgtaaacaattgaagcccgaacagctgattgagtgtctccgcggccaaaatggtttattggagtgctcaatcatccgctttttgtcctctgcccatgttctgattcaccattacgttgcttacgctgtggaacgcttattcttgatgaaaaatccaactaatcctcaggtaatcgtcgtctcattttgggtaccaattttgatttctgttcaggaaactcttttcaatgcatccaatgtgccaattgaccttttaatcgatgctctttttgattgttttcaagtcccccaggcgtgtgaaacgcattatgtgatgaaggcgctgatgcgggcattttcattaattgacgtacccaattatcaattaattaatcgcaatatttattttatttcgatttctatttcttaggatcgcatggcagcaaattcccatcactatgtgaacaaacttttccagatgatcacagaagcagtccgcgtgccgaaaaatcctctttttgtgcattatatttttgagtcgctttgcgttttgatcagaagggttcgtttgagtattccccatctatttttgttttattctcctcctttaggcttattccaaagtttctggtggtttggatcagcatgttattccgatcatcgaactgattttgggaaacgacctttctgattttgtcccctatgttttgcagattatcggttgagttgcatggcaatttctctctgatttcttcgtttttagctttgatgttggaccaaagtcaatcggagaagcaacgcggcatcgaaatgtctcaagaggcttacgtccgcttcttccccactttgttacggcccgactattggttgcgttctgccaatgttcccgctttggtcctcgtcttcgagtcgtttattcgctgcgttccccaattggtcttcagtgcacaatattctgatcaaatcctcggaatttttcaacgtctgattgggtccaaagcctacgaccagcatgggttccgtttggccaacactttcatctctcatttggatttaaatgttcatttgtggcctttttggtttgactttacatcgctttaaaggcttacgaacgcccactgaacagcaatgttgttttgctaacgatgctcaacagaatgcagcaaaataaaacttccaaattttcacgacaattcacaatttttgtgtttcgctatgcggcgatcaaaggcggcgcgactttagccaatgtgagaagagagaggggagaaccaatcgaattcacttcatttcccttccgccccccgggggtcatttccccgagaaatttttaaaaaatgttcacaatgtaagatataaaaatatctgacttcgaaatattaagtcactggaggcgatccaatccgggatttacgggatgatgttggacaaaattctgcttaacgaaatgcaagcgatgccccaaacgacgacttacgaagagaaacgaatcgtcacaattggggcggcaaaactcataacggaaacgaccgcttttctcgggttgtctcttttttcgttgtgcgatttgacttttaacttgcaatttagcccccgttacgctcaaatcattgaattggcagtgaatattttggaagcattcgaacacaaaacttccgccgtggtggacactgccgttcaggaaagagaggaaaccgccgaagtgagcgaactcgaatacagcgacccgtactgcaaactgtcctatgctcaacaccccgaaccatttgcgcccgaaatcggaaacataaaaagtgggtgccaattggactattaatttcgcatttttcgtttttagtgcactttgcccaagccgttcttttcactgtccgtgaaactaaccctgaaaatttcgattgtctgaatgcgagggttcagaattgtctaagggcttattcttcaacaatctga

SEQ ID NO: 46385 - DNA, 2200 bp, Heterodera glycines
tccgcccatttggggctgggcgaccgcctcggcaatctgacggccgaagcattccgtgcttatggcgcattcgttggccgaaaccccggcaaagttttggtaggcaaaaggggggcaaatgaaaaagcgaaggcattgaccgatcaatgaatggcttttgcgttgcgattgatctccgatcggtccgtttgaggtgtttatggccattttcacgttggccactcttcccggactgttcttcctcaaaatcaatttggacctttacaaagtttgccctttcctttcctttttccctttgcttccccctttttcagcttttcgtccctttggatgcgcccgttcggttcgaatttgaaagccaaaaattgtacaaccaaatcccccctggcaaattggactttcccctcgggccgcccccttcgctgatcgccaccgaccctccgcccgcttcttctcaaatgaatgaagcgccccccgccgaatcggccgccaacgaacttaaagacattccgaagaagaggaactcgcgaaacccaaccaaaaaagtgcacgaaggtaaaaaagaacagtggaaagagaaagtcgaaatttgaagggaaactgttaggcctcgggtgggcattgaacccacgccccgcccccattccgtggaaagttcgaccattgaacgaccgcggcaaatgtttacttgctttttaatgaacctttccaatcccactcttcttcttcttctttccctctctctctacagacccctccgtcccccaacacaatgatattttgcgattttacgttgtccatcgtgattatgaggtaaaaagagaaattgtgaaaatgcaatttcgaatttctaagaatttgctgcacagcgacactcttggcaaattgtttatgtacaccaacgaaatgatgaaagtggcgatggaatatgacggggaaacggtcagaggaaaagccattccaaagagcaaaaacaaaacagaaatgaccaatcaattgcttttcagtgggtttttgaggacttttgcaagcgggggccagcacaggagcagtgcagcaatgagtgagtaggggagaggggaaaaagggaaatgagggagaaggggagacggagaaagcgtaagacagagagagagagagagagagagagacatgcgttaagtgccgggccatcccaactttgataattttgcagactgaacatttggctaaaacacgcggagaatcttttccggagcaatggcacccgtcacaacccaaacttgcaactttcttaccccgtcatgtatttgttcaaccgaccaaaagtgaaacagcttttgccttctcatttcattcgctttcttaggacattggcaacataatttatggagtcaatgtgacgggtcaaaagcacgaaattgtgggggcgcgagttttgacgattcattgggtgaggggggggggggcatttggtcatgaccaaatgaattgcaatttaatttatcgctaattgacagttcgtcgcctttccgctggcaggcaacaatttggccgcctttttaaagtaccgcgaaggactcaaccgattttgggatgagaaaactgccgagtcgcagatcaatttcattcctcataagtcggtgaaagtgaacggaattggcatgcttttcctgtcaaaacggcatttgttcagtgacaaggcaatggacgacgaacttcggttgattatcgaaacggccgttcccttcgccgtgcccgccaccctccaactgatgctgtcctgtcaatctttttgcttctcccccccccccctcacttccctttttgttcagcttcgtctatctcaccaatttggccagcgacgtgcgcaagtgatttcatcccgattttataaaacgataattagtccatatcaaaaggtcaaagccaattgaggccttttttggtgtgatcagcgtttgtctgagtttggtcgctactttcgggtgagtttgacttcctcgccatatttctctgaatttgattgggtgatttctccacccgatcactttcccctttcttctgatcattccgatcactttctttcatctgttcgtccccatcctttggtcacttttctactctttcctaggatcactttctttgctggccttcatttcagccccgtgtgcagcacgatgcttttcttaattctcgccgtccggagttgacgatgcct

SEQ ID NO: 46386 - DNA, 1888 bp, Heterodera glycines
  unsure (1)..(1888): unsure at all n locations
cgacgctgcgttttgcggccgtccgaacgtgannacngnaatttccatggactaccctcaggcgngtgatttcgtgcaacgtggacctggagcagttgatcacggatagcaatcgtatggcgcactcaatcaactttttttttgtcgatttttgcataaaatattttgacaggttccattgccactttggccatcaccacgctgttgaagacgggtgccgaggcgagcgtggaacggctgatgaagcagattggcacttttgtcagcgagatcagcgacgaattcaaggtgtaaaatttttcaaaagaaaaagggcataattctttttaattctaacaatatgcacttttctaaataagcattaaaatttctaaaacccgattaaccatatttttgaaacttgatctcaaaatagcataattattcatttttggtgataaacagctataaattcctatttttaagaaaaaaattaggaatttttttctagagtttttctaaattttttctatcattttttaaaattttctaaaaaatcgaagaaaacttcgtgggtggagcgccctgcttcgcataatttatccctataaaaacattgaaaaatcgcgaaaaaccaattttttcttctaatttttcgagggaaaacgatgcgggggaaaggacctatcctcaaatattaattaacccatgccaaatctgttcttaaaatcttatatattttttttaatatcccaaatctttgtcagattgtcgtcatcgaggctatccgttcgctgtgccatcgctacccgcgcaaacacgccacactgatgaactttttggcctcaatgctgcgcgacgagggcggtttcgactacaaaaaggccattgtggacaccatcatcaccatcgtggaggacaaccccagtgccaaggacttgggcctgtcccatctgtgagcacttttcatgggcattgattcccctaatattactgatatttttgagtagtttcatccacctgtttcccaaattatattttatttggcattggaatgttatatttttgtcgacaaagccaaaaaatttctgattttttttttttttttttggtattttccggtttgatttactaagtaattgctttttctgccctttcagttgcgagtttattgaggactgtgaacacgccgcattggccacccgtgtgctgcatttgctcggccgtgaaggaccgaccacggcgaacccgtcccgctacattcggttcatctacaaccgcgtcattttggagagcactcaggtgaggctctaacacctagaaaaatctggctattcgatacggcgtgacaattcgttttattgttagcaaataaaaaaagtcctaattcagagacggaatttgatgttatatcataagagtttgcctgcaatttttttaaaattcatctttaaaaaggtatccaaaaaaaataaataaaacttaggttccgtaaagttttggcattttttgaaactcaacctttgaaattctataggctaatagcaacattaaatgattgtcgaatgctttcaaatttatgcaattcaaaaattaagtaccgtcaggatatagtcatttttgggatttaatcgtttgaggttcaatcgcgttttttcttggtcaatgatgaaattaaaaggccgctgaaagacagcattttttttaaaattgttcgattctttgacgataaattatattgagaagcaacaaaaaaaattctgagaccaaccaacactaggaaaacagtcccaattttgaaattttcctcaaattttcaaacgtctttattttattaaccccataaaaaaggtccgtgccgccgctgtcactgcgctggccaaattcggcgcggagtgtggcgcagctg

SEQ ID NO: 46387 - DNA, 1772 bp, Heterodera glycines
atggctaacattttgtatttttttccgtccgttcgtccattatttcactttgttccccaggaatccgactttgttgagcaacagatgcgctctcaggaagtgtttctgcttcgggcgcgggaccggcaccgggagaagctgtgcctgctggagaagcagttcctggagcagaagcaccagctggagcgcagcatggagacggcgctgtgggagttggaggaggcgcaattggcggagaaacacgcgctgctcacccaacagtttcgagtgagttgagtcaagcagataccaagagttgttcaacaaggagacaacgagacaagcatcgggaacagtcccctcttacatgaaaaaagaggcgatgggtcaaattatgcgaatggtgtcaatttgttttttatcaggtactcactcggcttcttttcaaaagatcctttttccttttggaacaggcgccgctgggaaaaatttgaaattttttactatttttagcagattcaccaaaaattaatcaaattttgcgattttgagccaattttttttaatagaaataagaattttaaggccggcgctgccaacaggcgccggccgctaggaaaatttttcagtttttaaaaacaaaaaatttataataacaataactacagcagattataaatacaagaaatgcggttacatgaatttatgtttttttttggattttatcaaaaaatttctccaacttttcatttttaaaaatcatttctccccgcaggacgtgttccacttacagcggacgcacatgttggcccggcatgccaaggaacaggagcacgtgcgccgcatcaaccagtccaaggaggaacagctgttgcgcgcgctcaccgccgaccgcaaggcgttgcccaaagtgttgcgcaacgaggcgaagacgcggacgatgatgttccgcaagagtttggaggtggatttgcccgtaagtgattggtgcacagttccatcagatctcaacacaatttttcataataattcagatttaaaattaatattttatgcacatacgaaaaatattaattttgagtgcattttaacagagagtggtgtcatatttttttgagagaattaaaaatttccttactccgggatttaacattttatcgcaaacacctaaactcaataaatttccccgccgggttcctccatttgtcaaacaaacaaaaaaatgggaaaaaatcgaaaaaaaattttaattcggcatttgattggcaagacgaggacttcaatgcaatatttttcagggcgaaagtgacacatggacagcaaaagtgcgcatgtttgaggagcgggagaagcaacggatgcgcctgaaaatggaggagtacgaccagaagtgcaagcggaaattggcacagctggtggagcgaaaccaagaagtgatgcgcgagttggaggaaatccatgttggaaaagcatttaaaaatgccacaaaaaattgccaatgtttcctttttgtcgtacagaacgagaagcggaacatgctgttggagaacgagcggaccaaactggccgagtatgagcaggaataccagcagttgttggccgagtggaaggcgtcgctacccgcacgaaaagcggtgagggacaggccaattttgcctttatttaggccgatcgtacgaaaatgcgcacccccccccccctcacttttttaataagaaaataccaagaaaaaattgaaagtttttagctattttttccaggcaccaaacattcatcatatattcaatgattga

SEQ ID NO: 46388 - DNA, 1442 bp, Heterodera glycines
atgaatgcaggcagcatcgacaatgatcatgatcattaccataattccatcaaaaattcttccccgaaattatcatatgactccgtgaattgttggagtatggaaagcgaagggagctctgtcaacaacgatgagaatgtgagattcatcttactttaagtttaaaaaagaacaggaattacaattgtccttttcaaaatcactcgaattcaaggactgataaggacaaaaacaataattgtctaatttgatgatccattggacaaaaaaccaatgcattttcttaattgcacttaatttagccgaatccggaaatggatgatgaaatgatggaagaagaggcagcgcatcatgaggacgatcaggttgcgaatattttggatctcaaaacgactataatttcctttaatcccatcgcagctggtgttaggcagtgatgaggacgaacaggaggtacggatttgttgacactttaccaatgtaatatttcctattaaggaccccaaggactacagaaaaggtggctaccaccctgtgcagatcggcgatgtgttcaaaaatggccgataccacgtcatccgcaaattgggatggggtcatttctccaccgtttggcttaggtttgttttgcttgggttttataatttttgatatttttctaatctgattttatgtaattgagaatctagaaccctaccattttatttcagtgtgtaaaaacaagtcgctaatttgctagcgttccttcaaacattttcttatattttagttgggacatcgaaataaagcgattcgtggcaatgaaaatagtcaaatcggctgagcattacacagaagcggcattggacgaaataaaagtgctctaatttgatctttcatttttttattcattttcagctgctcgaatgtgtgcgggactcggacccaaccgacgaatcacttcaggtttcgacttgcaaataataaaatggcattccatacacttaccagagagtggtccaacttctcgacagttttaccatcagtggggtcaatggagtccatgtatgtatggtttttgaggtaattatttatttgcatttcgcgacttgcattcgtttctttaggttctcggatgtaatctgttgaagcttatcattcgaagcagttacgctggtttgccgataatgctggtcaaaaggatcgtaaaacaggtcactcttatccatctgttttaacccatcataaattggttttaggttctcgaaggccttcgttatttgcacgataaatgccatataattcacacagacattaagccgtattttcttttctgttaacaattttcattttgaaattttagcgaaaatgttttgattacgatgagccacgaagaaatcaaaaaattggccgaagatgcaattttagcagggaagacgggacgggacatgtccggctcagcg

SEQ ID NO: 46389 - DNA, 2058 bp, Heterodera glycines
tatctaatttaggtaatggaaggtcacggattcctctattcgctggaaatcgaaaattttaaatccttcaaaggcaagcattacatcgggccttttaaacgattttccgctattatcggaccgaatgggtcgggtatgtccaatgcataacatttaaaatcgctacatacataataatggattaaggaaaatcaaatttgatggatgccatttcttttgtgcttggtgaaagaacgaatcatctgcgagtgagaaaacttggggtgagtcaactgttttcacattcccctttttaaacaactaattatcgcttaggatttggtccatggcgcgtccatttcgatgccggcgagtaagacttgttgtgttcggatgatttatcgaaaccctgatgggactgaacggacttttcaacgaacgacttcggaattacgtgttgatgataatgtggtgaatctttcacaatatcacaaagcattggaagaaatcaacattttcagcaaggttttgcactctttgtcaacattatttcttaattgccactgtaatttcaggccagaaatttcctcgtttatcaaggcgctgtcgaacaaatcgcaatgcaaaaccccaaagaaatgacacagctttttgaagaattatcgaagttaggaaattttttaataagaaaaattaatctttgactttgacaacatcacatgttgtaagatctgcagaattcaaggacgaatatgaaaaactgaaggaggaaatgcaccaagcagaagcacgtgctcaaaaaaacctaaataaaaagagagacattacgaaagagttgcgcgaggttatgatggagaagaacgaggcacggcgtttccaaacactaaaggaggaattggtcacacaaatggatggggtggcaaattaaaacaattttaaaaatgattcaggtcatccaaaatcggacgctctttttggttcaattattctttgcggagaaaagcaaacaatttgttgaggagggactcgagcagttgcgcttggatttggaaaagaaaaagagcgaccgaagcgaatttgaaagtgatttgcatgagaagcaacgggcagcgaaggacgtgcaccgggagaagcagcgaattgaaattcgattgcagagagaagtggacacttttgatggtttaatcggtcaaaaatgaattaacaacactcaaaggaacgaaaagtgctgaacagacgaccgaatgttaccaaaagcaaacaacagttggaccactgctgcctcaaattggactcagtgcgaaaagcgtacgaaacggcgaagagagcgatggattctcaggagaagacggtgaaagaggccgaagaacggattaagtcggtcatgggatggactttatcagtaaacacagcctcatttcatcaaggaaaacgcaaaaggaaaaggccgttttggaggaagaactcaacaaggagtcgcaggcactgcaacttaacctaagcaaggaacaagtgagccgatttttgccgcaacgaattcacacggccaatgctttttggtggtcgccggaggtgttgccgccaacgaacactttcggacgcgcgtcaaagaaatcgctgcccaacgaaattttgccgaagtgattgtgttgccgcgggaattgtgcccggacaacggagtgatggtggcatggacaggcgcagaaatattggcaccccgaagggaaaagggagaagaaatcgactttttgagttgggcccccccccccccgaaacgaaggtcctggctacgcccttggggtggaatgttctcgaagggtgaaaatggacccgtactctcacgtccctaaatgccactgaagacgtacctcgtctttcgttgcagcgtcgttctgctcactgcccattccctccgcctccccttcttcgataaattcgatattttccggatcgaattcgtcctcctcgtcaaaaaccttgaaagaaatgctgtattatttacaaattttccattaccattgctggcacattcggctccccatcttcgtccgggaattcaaaaaagatggaatttggctc

SEQ ID NO: 46390 - DNA, 1111 bp, Heterodera glycines
  unsure (1)..(1111): unsure at all n locations
atgacccatcctcaatcggtcgctgcgcatggcattcgagagcacggcgacgaagcatcgtgtgaagatttgctgtacaacttcgaggacgagctcaagcaaatgtccaaggcgtgctttgaaaaggagcgtttattcgaaaaggaaatacgccgacgcaatcgcttagttcgtaatcattaagtatttttatatatctttttaaaacgagggatacatctcatttgttttggattaacaaaattttaaggaacgttttgcgcgatgttcgactgaaaattcctcggcgggccgtgccgaggacgacgacaattcccagcacggaaacaacgagtccaaactgtcacagcaaattgttcgccgccgttctcaacagcatatcatgaatctgagagtctcgttgaagtctgaaaatgttgatcgcgactggacgcccaaagagccggtgaggaaacgacgaagcgggggccgtcgtttcttcggatcgaggtgagcattgggcgtgggatatttgcttatcgtaggtcattatgggatcgctcggcttcaccttattncaggggtaggaagccaatgtcgcgtaaggcgcgggatgtgatgatcaaactgcgcgaggtcagcatgcgacttggcggtgctcagtatttcaagaagcgcagcaacgaagccatttcttgtgaggtaaaatgtggtggtaattgctgggcaatacgaaatgatttactgatcggaggctgtcttttaccccatttatcatatgacagctaaaatatacaataaaaatcactatgctcccttgtcgcctttcctcattgtttttcgtatttatttcccctttttcagaaatgtggcaaactcgtcatcaatcgtctgtctgatcacgcttactctcacttggaggggtgcgacctgttcaagtgccaacagtgcaacttggtattgtggaattcacttggtctcccactgtgttcacatttatgttgtcttttagggtcacttttcgcgtgagacgattgttcgtcatttgaaggactttcacaattcgcacgaggctccgatggacaatcgccttcgttttgcacaagtgaccatcgttttgacttggttttaa

SEQ ID NO: 46391 - DNA, 1044 bp, Heterodera glycines
atgtcgctgatcggacgtggcctgtttgatctgctgagcgcggcgggcgacgtgttcagccctgggacggcaattggcgtttcgcttcaactgctcgatgcgctagaggctcttcacaaaattgactaccttcatctggatgtcaaactggagaatgccgcgatcggacgcgcggagaccaatgagagccgacgcatttttttgatcgactttggacttgcgcgccgttacatcagccaatccgtgagcagagattatccgcccattcctctcgcataattaattttttccaatttttcacagggtcgagcacgaaaacaaagatcaaagacgcacttccgcggaacgccaatgtacgcatcgatctcagcacacgcgcgagccgactactgccgagcggacgacatcgagtcttggttctacacactggtggacatgtacaccggcaagctgccatggacccatgtgacgagcgaacgccgcgtgagttttgtgggtcggaggggatttggcgcgggatttcaaatatccatttcccccttcattttcagacaggcaaaatgaaacgactccgtctaagccacaagcctaaggaagtgcaacaacgggccctgcatgcactgttgaagaaatgcccgccaatattctacgacatcttgttacacattgtgcgttttatgcgacattttgtgccgctttaattatactaattaccccccccccctcttcccacaggacgacctggagttttaccagcggcccaaatacgaatggatagacagggttctgcgcgactacctcaacacgaatggcatccacgagttcccttacgactgggagaaagaagcgaatcgacgaacaaggagtgcaacctgattgattgattgtcgtgccccgcgtgtttcattcataattccgtgttgttcggacctatattcattattccgtgttgtcagccctatgtatatattatatgtatgtatattctatattgtatattatgtgtacttgttcgacctatactatgtatttgtgtataataaa

SEQ ID NO: 46392 - DNA, 452 bp, Heterodera glycines
atggcaagagaggagtactgcttcgatgcaacggcggcggcagcggcggagcagtctcggccttcggcaacgacttcaacacttgtgcaaggagatggcctgtcaagcagcttcgtggacgcgatcatcaggaaggtcaggcagtcgcctgtccaacgcttcacggatgaggtgggatttttttgacatgacatttcaacaattaaaaaatttcattttttccacagatcaccgacgaggagctcaaacaactctgcaaggcggccacggacatcttcagaatgcagccgacgctcgtcaggattcagccgccggtcgtcgtcgtgggcgacatccatggacaattcacggacctgcagaggatcttccacacgcacggcaaccctccagagcagcagtacgtcttcctgggcgactacgtcgaccgaggcccccagtcactggaaaccatt

SEQ ID NO: 46393 - DNA, 829 bp, Heterodera glycines
  unsure (1)..(829): unsure at all n locations
actgaggaagcagcgaacagtgcaaatgcaaaagtgaacgngatgcttttggatgggaagaaagtgtaagatgatttcatcaatttgtttttgtggtatcatttaactactatccgtttttttaggtttgttggaaaatttttgccacgttccgctcgtgacaagcaaattggtgatccgtccagtcgtttcaccaatgtttatgtgaagaattttggtgatgcaatgaattcggagaagctgagcgaagtgttttcacagtttggcgaaatcatcagtgcaaaggtgatggaggatgacagcggcaagtccaaggggttcggcttcgtcgcctacaaggaccatgaaagtgctgcgagggcggtggagaagatgaacgaggtttcggtgcccggcagtgagaaggtcgagcaaaagtttacggtgtgccgtgcgcagaagaagagcgagcgccaggctgagctgaagcgtcgttacgagcagtacaaagctgagcgcatccagcgttatcagggagtcaatctgtacggattttgtttggttggggggaatttttctcaaattttaggattttgttggtttgggggggagtttttctcaaattttccatggataacttttgtttattatattaatgtgccattttttgtgtaaaactgttcggaaagctctccactaattaaaaaaataatgcaatccataaaggcatactacgaaattgtttactgaactggagattttaaggtacgtcaagaacctgcacgataccatcaatgatgagacacttcgaagcaattttgaatcctacggaaacatcacaagtgcaaag

SEQ ID NO: 46394 - DNA, 354 bp, Heterodera glycines
caagtgatccccggagagaatggaccaccgggtgagcaaatgcctttctgagtttggcacgtcgaaagtttaggcgagcccggcccggtcggaccgcccgggccaccagggaaagtcggacagccgggcaaagacggggccatcggaccaaaaggtggcaaagaacaaataagaattccggaacgtaaaatgacattctcaggccgtaacggacccgaaggcatccctggacccaacggattctcaggcccgccggggccaaatggcccccccgggaagtccggcgagaaaggcatttgcccaaaatattgtgccatggatggcggagtgttttttgaggatggaacgcgcaga

SEQ ID NO: 46395 - DNA, 1130 bp, Heterodera glycines
atggcaaaagaagaagcaatcgtttgtggcgcactcgaggcgcttgttcctctccttgctcctcaaactgcaattccccaatcgggaccaaacccaaaacttcaagcaatggttaagtcaagtactcattcatcctataaatgtgttgtttgaggttgctgattcactttattttctgctgctggacaatcttcaatgcaaactcacattcctatccctccaaggtccacgatatctcgtcgaaatcctcaaatcgaatcccggatatgtaaagttgttttacgccgttgtccgttgtattcgttcaataagcacttgcgccgaaaacaaagcttcactaattgccataggtataattttgattttttttttgttgctgagtcgtaatttgtttaggtggccttgaacttttgcatcgggctttcaattttatagatgatgacaaacgaaaattgacgacattaagtgcgattagaaatttgtctgacgtggccactaatcttgaaacgcttgcgccacttgtggctgagttggtttctttgattgccgaccacaatgacgaggaattggtcagttgcgcctgcggaatcttgtcaaatttgacttgcaacaacattctcaacaaaactacagtttagtttcaaaaatcatattttagtttggttttgctaatgttaggtttgcactaatggcggagtctccatcctcgcacgggctctctcaaaattctccaacattgaggatgtcacagaacccgctctgtgtacgcttagacattgcactgttcgtcatccgcttgcgtaccaagcacaaaacgaacttcgttttgcctatgcaactattttggttattttgcatttattaagatcgaccaaatgtttttttagtcccttttatccacgcaacgaccgcccattgtaaaagctgcgttgggccttgtgaggaattgttcgctttctaacgagaatttgaagctaattctctcggttagtggctaaatctttaaatattggaaatccactcattgtttcaaggaaaaaaatgccgacggcgaaactgtactatcactgtcagtcgcattgcttgaacagtcgggcaaacagttggcccacgaattggagcggtctctg

SEQ ID NO: 46396 - DNA, 595 bp, Heterodera glycines
atgtccggatgtggaaaaggaggaaagggactgggaaagggcggcgcaaaacgccatcgtaaagtgagtacaaatagaataatttacaaaaaatagaaaataaaagcgggaaaatacatccctaagaaatgacccgaaaaatttcagaaatacaacgctgagacttgaaaaatttttctcaaaaattgatcgccaaaatttgatctttttgcttcataaaaattttcttattcgaaaaaatctataaattattttattaatcatttaaatgcccaaaagtgaattttttgattactttttacgtcttttcataaaacttaaatgcctttttttatgtcttcttagggatttttgtgccttttaatgccgttcttcaatttttggtgtctattatagtgttttttgcgatttttttggtgctttttcgagacccctaatacttatgataaataaattatgtaattaaatgtgaaatgatgttttcggttttgtttttctcagaataactgctacctattcctattttcaggggactcgttacaacatccaaggcatcaccaaaccggtcatccgccgattggcacgttgcggaggg

SEQ ID NO: 46397 - DNA, 682 bp, Heterodera glycines
atggcactcattcatttgatggcattgaacagaaaattgaaattgctggagaacactgatggcaatttgtgccgcgcaacggacgaacggacgtacaaattgacgacgaaactttgcccaccgccggaggaccccaacttcacactgtgctcgacattcaccaaaagtgtgtggcaaaaggactattggcagaagcaaggcgcaattgacgtgtggatgaaggtgaagcggaagaagcaaaaagacggggaaaagcgggggaaatgcttcgaattgcttcaacattttgccaaaaaaaatttcagttttttgaacgggcgcccaaccgagcggagatggaaaaagagttcttctcgcagttggacaatcctttgctgggcaaagccttcaaattggccatcatcggcgaatggttggccgccaacagtttggacgtgcgtaaaatgggaaagttgcgtaaaatgccgcagttgtgctgcattttcagcagggaagttacacgccgaccaactcggaattgttggagttttgggtgtcgaagagagcgcctgaccgattgttggcctgcgagcacggcgtggtcgactacgaaattgagggctccaaagtgaaaacgaatgttttgttcgaagcggcaacgaccgcgggaaatgtaaaaggacaaaacgacggaagcaactga

SEQ ID NO: 46398 - DNA, 1449 bp, Heterodera glycines
taaggatgagacgcgcgtcgttcttcgtttcccttcctttggcgacgacccttccgcagattcattcatccacgccaattacgttcgttcgccggtgctcttcaacgatttcatcgtcacccaagcaccgatgagcaatacaatcagcgatttttggcgggtaataaaggctaaaaaagggaaaaaatagctatttaatatggagaggcgaaaattcattgaagacagactgaattgaatttcttcaacaaccgtaaactgtacaaaatatactttaatttcacagatggtttggcaagaaaaagtgtgttatattttcatgttgatcagtcgcaaagaatcaaaacgttgtgccccttattggccaaaaaagtttgcttaaattttgggcatataagatatttgtttatttttgtctcttgtaagtctcagttcaaaaccgttggcattgcatggactgaccattcaaaatgagggcatcgaaacgtcttctcgtgacccttttttccgagtcacaaaaattcgtatcatcggaccagacaacaccgaagtatatgttgtgaatgcttatcaccgctaataagaaaaacatctcaattactctttcagcttcgcttggaacattggcaggcggacatgaataactcggagaatgtcgaggcgccccttcgtctgctgcgcctgtcgcgcagttgcacagcgcccactatcattcacgaccatttagggatcagtcgcgcggcatgtctcgtcgcagccgaaatttgcatttgccagttgattcgcggcgggccaatgtgcaaagtcagtcctaattatcttattttgtattttccatttttacatataacatttaattctaaatgaagagcatcacaattgcccgaaaatattgtgtgaacagaacataaaagatatataatttgttttcagtatatcgttcaaaatgccgttcattatttgcgttctttccgcccattttccgttgaaacgccaatgcaatacattgttagtcttatttaatctaccaatgtggttggtcaaatgatttttaattttcttcaatttatgcaccttttcgtttaatttaaattttttttgagtttattcaccgtgtcgttcaacatttcattcgccctttcgttggcattccatctggttttgaacaagattacattcgatggctcgacgaacgttctcaacgtcttttcgtcgatgatttcgacagggaagtgagtaattatcttttttcctttgttcccgtttaaatattttgtttcggatccccgctttccgcctgctttctcctcgcgttgatcccgacatgctaccgctggtacgtcgccgtgaaaggcccgaactccgccgagaaatgcatgcgcccgtgggggaactgcccctcccggctgagatggaatgcgcaccctcaggcggtatgccatacaatca

SEQ ID NO: 46399 - DNA, 908 bp, Heterodera glycines
  unsure (1)..(908): unsure at all n locations
ttaagagggatgtgatggaaattgttcctcagaatgggtgtttttcattcttcggctcactttctaactaaattcagacgaagcgtcgattttatctgtcgggtgaaatatggaaatactttgccggatttgccttttgaaccgaagtttctgcaaagtccgttcatctcgttaaacaggttgttattattattgttggttatttttattatatatagtgcgtttgtttaggttcattggctataagccgtccagtctcgagaagtgtttcaaatacgagttgttgacggaacccgatctaaatgtgaagattgatctgatcgatccgatgacatattattgcgaacctgacgaaaaaactacgctcgatcccattgatgaacagcttcttgaggatgaaaacacctcccaattaaacacgcgacggtatttctgatcagattttgctgtttggaattttctttagttctattcaacatcgaaaggtcgttccatggatgagaaaaacggagtacatcagcacggagttcagtcgttacggaattgggcaaaccggagctgagcggccggacaccaaaatcggatatggaatgaaaaatcgcatcaaggacgaggtaaatgatacgcaaatacaaaaagagaatatttgaaagtctcttccactaagtcattcgaatataaagaccgggattcacaaattgcggcaatccaacgaactttctctgaagtccaaaagccggtccgtcaccattacagcaaaaaaggagtcacggcggtcgaggaaatgccgatatttcctgactttgaggcgagtactttatacaattacagcaataattgaattnttgcatttagttatggagatacccattcgctccagtcatttttgatgctgacccgctgccata

SEQ ID NO: 46400 - DNA, 928 bp, Heterodera glycines
atggcggacgacgacgctgaaacattcaaactttggcgcgtacgtaagactgttatgcaggtagttaatgtgaaggatcttggtaaagtgtttgacttacgtgtctttctgaccaaagaggcgattcgtttgttacataaatttgtctgcagatgtgccacgaccgagggtatttggttacgcaagacgagttggaccaaacgctggaccaattcaaggaccaattcggcgatagacccagcgaacggaggcccggcaggggcgagctgaccattttggtggcacataatgacgaccctaccggtgaatcctacagagaaggagctttactaaaatgccgttttctagaccaaatgtacgtgttcttcccagatgacccgaaaataggcatcaaaactatcaaacagatctgtcaacaaatgcaagaacagaacatcactcgagcgatcattgtggttcaaagtgggatgacaccgagcgcaaaacaggtggagaaatttgattgggagaagtgttggctgatgaaccactcatttatcatttaatttgtaaggcgattgtggacatggcgcccaaatacattctcgagcactttttggaggcggaactgatgataaacatcactgaacatgagcttgttccggaacacgtggtgatgagcagcgaagaaaaagcggaactgttagcgcgatagtcagtcccttttgctgggccgactcattttcaactttttaatctgatttagcaagctcagagataatcaactgccgcgcattcaagtcagtgacccagttgctcgttacttcgggttgaaacgcggccaagtggtcaaaatcattcgtccatcagaaacggcgggccgttacattacttaccgactttgcaattgatgtttaattcagaggatttgttgcaaattgtcacttga

SEQ ID NO: 46401 - DNA, 1020 bp, Heterodera glycines
tcgaaagctttacatgtttagaagcttccaagctattgcttagcgattagacaattaccaaaaaagttataacatgaaaattgcaaaaaagacgaaatttttgagttttttcttaataacttttttataagctaatttttttttgtttttttgtaaggctaatagagcttgtgaagggctttcggatgataccaagattgttagatttggtcaacaatgaaaactagtaattaattaatttttttataattgtgctgaaaatggttcatcttatgaaaatttaaaaattttggcaaatgttggcaatggcatttttaatggtaaatcaaatgcaaatattccaacaaaaaaaaaactctctgcacttgttcttaatttcaatgccctaattaccccttgcggtaaaatcaggcattgtccattgactccgctcgcggcgtatctatcaacgcgcacaacgccagcggacagaacaccgccagcctgaacctgcaggcggacgggcgtgccaatgtgatgtgcgaacggtttgaagttgtcgaccggcaaatgaacgtgctgttctcggtggactcacaagaaatcggattgaacctggaaaacttgcgcattttgggtagagacgacttttcatttgggatcagttcatttccccactttttttcaacgatttctaaaaatttttctaaattataatttttttcggggaaacattccacgggggaaaacgtgatgtcatcccttttattgtgattttttgattaaaagaaaaaatctcaaaaagtttggctatagagaaacttaaaaaaagaaatagtagcgggaaactaaaatctgaattttcagtttttaaagacataaattaatataaaatggaattatctaaatcactttctaccgtatatatttatatttcttaaacactgttttttcagatgatggaggtagcatttttgaaggtgccattcaaacatcaattgttcgtccggaaccggacagtccattaaggtgggggggggg

SEQ ID NO: 46402 - DNA, 373 bp, Heterodera glycines
agtcacagaacaatgcttttgcaaacgatgggctttcagtctgaagaaaagcatggaaagcgagaatgtaagttcgcctcagttgtttggccaattgtttgtttccctattcaaaaaatcattttttcagttcgaaaggcatttccgtttggccgttcaatcggtcactgcggaagactatgaaaagatgcgtcagtatcggcaccgggaggactctctcgcgactttggccggtcgtctcttcctccgtaaggctgtccaatgcctttgcggcgtccgttgggccgacattgaaatttcacgaacggaacggggaaagcctttcattgttcgacccgagaacatttccataggactgaacgtttctcaccaa

SEQ ID NO: 46403 - DNA, 770 bp, Heterodera glycines
gcattttcaattacacttcgccatgggtcacttattatgtgaccgaagatgccaaacaagcgacgttcgggtacagcacagcgccaggcgaaggtcatcagagacattcaaaactaacaaaaaaaacttgtttcattttgcattttagggaacatttaccggctaaaggattatgagcgccgattcagttccaaaatcggtatttggctcgtctttttgctgttagctttacccacgaccttgttgcctttcttcctctggtcagttttagttctttctaaagcaatttttccatttctcgcattcattcatggttttatagcctattgtaaaacaggcaaaacatagaataagaaaatggcaaccaatgagtgcgtaaaagcacggagtcatttggtgatataaaggtaccaagtgttaacttcgaatattttaaaagaggacgtaaaactcgaaaatattaatacaaccgcagctaaaaatctttttcgtatccatagtagctcattaaaaatgaatatagtctaaaaatcaaggccctaaataatttaaaaattttaaggtacaaattccaacagaaatatgcgacaaaaagcgggacatccggtcaacaaaattctaaaaaggctcaatgaaaactaaaggcaattatggagtgcgcaaatccatgccacctttatatttattaccattttgtttccatgcaaacttgtatttgttgtgttaaaccatttcattccttatgctgttgacgtaaacgtgtggaaaac

SEQ ID NO: 46404 - DNA, 565 bp, Heterodera glycines
atggacggccccgagccgtacagcacccggtccgacgtgtactccttcggcatatgcgtgtacgaactgctcacctccagattgccatacgaggaaatcaagaatcgggaccaggtgtgccaaaaaaacaaatattttttcgaaaatttcatttttttaatttttcagtgaattaattttcaggcctttgaattttccctttaaagaaattatttttttctttgaaattcgattcaaaaattgcatttatttgtttcataaaatgattttgcctttaataacaagttgcttaaataattttttaatattgtttttttgggtgtaaaaaaataatttcaaaatttaaaaaaaattgttttttttttttgaatttttctcggaaaattctctctaaatttcaattgggaaatatattggattaattttatgactgaaattggaaatttcatgccacttcgtttatacaatggaatttgtacaagttaattttatataatttttttttattattttccaattttctaacaaaaaaaaattcacttgaaatttcaaaaaaaaaaataaa

SEQ ID NO: 46405 - DNA, 847 bp, Heterodera glycines
tgttcgcttatccattttaatacgttttccacatttcccatttaggggttttctctgttcttccattttgccgagaatccgtacttcaccaacgcggtgttgaccaaacattacgaggttaacctcgacgtggacccgcaaaaaccgtaaattgttttttccttcatttacagcttttatcaaacctttaaggttctcttacgacgggccgacaatcgtgaagagtcaggggtaatgacactgaaatggcgataaaacttttttcatcaaactttagctgcgatatcgattggaaggatggaaaaaatgtgacgcaaaagattgtgaagaaaaaacagaagaaaggggcgcaggcgggcaaatacgtcaccaaaacggtgaaattttaaaaagggaaaattttattgataaattttgtctcatcaataggtgaccaacgaaagcttcttcaactttttcgatcctaaagtgacgaccatcacagaggaaatggtaagtggaaaaaaatgacaaattgggagggattggcgaaaagccataattaaattagcatttggttgttctcaaaaatgctgatttgtgaatgctatttttaatcacttaggacgacatcgaggaacagaaaaccaatgatgacttcgaggttggacagatcattcgtgaacaggtaattttcattatttttgcgctttgtctcgattttccattggttttttagctgattccccgtgcggtgcttttcttcactggtgaggcggctgaggaagacgaatatgacgagttcgatgacgaggaggaaatgggggacgaacagtcggaagaggaggacaatgccatgcactgaagg

SEQ ID NO: 46406 - DNA, 1161 bp, Heterodera glycines
atgccaccggcacgaggaagccgcaccgttaccgtccaggtacagtaacactgcactcatcatctgctgaccccaaatgctcactaatcccatctctccccatatttaggcaccgttgcccgtcgcgagattcgccgttaccagagcaccactgaacttctgctgcgcaagttgccgttccagcgtttggtgcgcgaaattgcacaggacaacaacttggagatgcgctttcaggcggtggcctttgcagctctgcaggcaagcaaaagcttgttgtttaatcattttactaatttggcatccatttcaggaggcttccgaagcttatttggttcgacttttggagaacaccaatttggctgccgcgaacgcaaaccgtgtgaccatcatgccgtccgacattcaaatgtcccgtcacatccgcggagagaccctctgaagagccgaagcgagaaaacggagatgcgcaagaactattgggaaatcgaatgtgatcatgatcatatcctataattattgaatgtttgtaaatatacatataatcattcgtatgtgaatttattgtatgattaaagaatgtgctattattttgagtctatggcaattcaaacaaagtttacagacccgggattttgttattccttggttttactggattcctacaaaagaaaaaaaggcaagaagggggttgagcggttttttggagtttttgagggcgctgatcacgaatatatgacactaattcaatcaatttcgagcccctaattcgaacaattaacattgactgttgctggagggtgttggccatttgaatgctacatcatcgacccaatcacccacagaagattctgaccacccgatctccattttttaaattagctttttttcaattcgcggtcactgaccagcgcctccgaaagcacaaagatcacaaaccctccccttttttgcctcttttgtcggactaaaatcgatgattaccaatttttgactttcacaggggagtgagtagccttccgattagcaaaaagtggtccatccccaatttctttccctggtggaatgaccatgtacagcagcagaagtgaactgcctccagcagacatttattaatcgcgagcatcagaatggacaattacaatacaataacataggccaaca

SEQ ID NO: 46407 - DNA, 1189 bp, Heterodera glycines
atggcgttcagcatcaaacagttgttcagcttcaaccgaaccgacgtgctggacgacgacccgctgaaggacaaagtgaagcgggcgatgctgcaccgaaagtacggcgaatgggcggcggctgttcaggtggccaaaaaagggggaggaggaaaggggacgtataaattaaaagggaatgggaggaaagggatgtataaatttatgggtaaaaatctactaaatccagggagggtcccgatggaaagggggagggacgagtttcatttcgggggccctacgaattctctttgaaaaatttttaacaataaatttaaattttttttaaatttccgggggagacgggcaatggagggggggggggggaaccggcagggggaaacgagctgctcccttcatgtcatccatcttctaaactttttaaatgaaaagtgggatttcaggtttgttgcatgacgtaaaataatctaaatgcttcataattttcaaagagcaacctctacctggttacttttttgaattttaaaattcaattttttatttttactttatttcaaaacaaaattccaaggcgtcgtccgccaaccgacagaaacattcattaaagcaaacagtttttttaaatttaattttaaaaagcttttaggtgctcaacgaggcgttgaacgaggcggtcgagttgggcaatgaaattttcgtgtcacggatgtattacgaattggccaccaccttttgggagtcgggccaattggagaacgcggagcatttactgaaactgctgcacggaaggtgaaagaagagaaacattcctatcgaaaatttaaaatttttatcaaaaaaaaatttttatttttaactgacgaaatgaattatacgatttgaacagtaaattaattggtccttccctctccagatacctcactttgcaccgttcgtccggcctttccccggaagttatcgaaaattcgttgcgtttggccgacgtttacacgcgaatgggcaaattggtcggttttaagtatttgtttcatagtaaaaattgaattttcggactccgttttatttaatttttattgtttaggacgttgccgaagatgcgtacaaatattgtttgaccacccaaatggaagtgatggagaagcatttggcggaataccatgtggccaggggcgccatggtggaaatcgat

SEQ ID NO: 46408 - DNA, 6902 bp, Heterodera glycines; identical to SEQ ID NO: 7362
  unsure (1)..(6902): unsure at all n locations

SEQ ID NO: 46409 - DNA, 1276 bp, Heterodera glycines
atgacccatcgcaaaatgacgatgaacatggcggagaagacgaacaaagcgcagaaggtcaaagtgttggcgcaagttggcgacaaccccgaggcagaacgaagggtgggccaaatatggaaacattggcatttttcaatgccaaaactcaccaaagtttgcatattatgtctaggaactcatccggacggaggaggaaaagctgcgggccgcggcgcgtcgcgaggcgcagcagcgacggatcagagaacggccgcgcatggccggactgacgccgggcttcctggagggatacgagtcgggtaaacagtttgggaagagacatttgttagtggacaatcattgattattctgctttttctatggttgataattgtgtgaaaattgtcagtgacaaatgaggcaaaaactaattgccttttttaaaaagcgcccaccattatgcctatgagtttattaagtcgcaaagttttgaactttggattttgtagtttcgctatgattggttttgttttgttttcccaccccctccttttagacgagggcggcgagtcgttggcggccataaaacggcgttaccaacacgcgccgtacagtgcggggggtgcccacgacggcggtgccgccggccgtcgttcgtcgatggcgggcggccgcggcggctcctcggacgaatcagcggaagaagaggagcgcgatcgacgggcgcgcaaggcgataaacgaggcgaagatttacagcgacgacgaggaggaggtgggcggcgcgagcggcacagggccgataaatggcgacggcgcgggcgacgactcggacgcggtgagcagagttgacagacatggcccccaatgggcaaaaacactcccatttattttttccaaaaaattgccgaaaagaatcaaatatttgtaaaaaaataggagccaacacacaacacaaacagcagcagacatcagcctcaacagaagaagaaaattgtcatcgatgaggacgacgaatgacaatggcacagaacagcgaagggagtgacaatcggcgatttccccaaatgggggagggttttttggcagaagtcgaaaaaatgtcaaaatatggttttttgtgctcaaaactttatgattaaaaaacgcggccagactgtatgttcaaattgccttctcagttccaaaaaatcctgaacaacgccccatttttagtgcattttgtctttggttcaaagggtttgactgatttgacaacgacaggttcggaagcagtacctccgatcaccgtataa

SEQ ID NO: 46410 - DNA, 1402 bp, Heterodera glycines
  unsure (1)..(1402): unsure at all n locations
atgacatttcacaaaattgacgcgagtagcatcgattcgattaccaacgccgtggacttttttagtatacctccgacaaatgtcaccgtgtcatcttcaaaggttttcgagattttgctgagtaatccactcaccgacacaccttaccattttaaaatacactcgagccaaaattacattgatctgtcaaaatgttacattttgaccgaatttcgaatgcgaaaattgacatcaccaaatggtgaatggggatatttggatgctactgatcaggttgtaccgatacaactgatcggacacacgttcatacgagacatgaaaattgcaataaatggtcgtgaaattttcaactctaattcactgatggcatacaaaacttatctttctcatgagctttcgcaatcacttgaagctaaagtttcgcatttaactgctgctggatatgaccgtgaagatgctaacaatttacaaaacgcaaattccgaagggttcaaaagtagaagacaacggtatttgggaggtcgaacagcacaatacattgcaaaaatcgatgccgatctgttcaatgtgccccaatatttgattaatcattgcgaaattgacataacgatacaaccccatgacgacaattttttgttaattgacacattagaccccccgggtcaaccatatagcattgagcttgttggattgaaactctactgcaaaaaagtcagtcttatggatggcttggctcttgagttggcgaaaaaattggaaatgaaaccagcacggtatgctgtacgaaaaacaatgatgaaagcactgttcataagcccagggcgctatgaatttaatgcaaacttgttcatggaccaagttccacgccgcgtaacaatgggtcttgtggcaaactcagattatgtggggaacatcaaaaggagtccattcaactttcagcactttaatgtacgtgagttgagtgttgtggccaatggtcgctcctatccccaggccccgtatgacattgactatgaaaattggaaatttgtccgcccctacaatgacacgcaagaggcgcttggttttgccaactctacatatggaaatggaattgattatttttcttttttgcacactcattgtatttatgtgtttaacatgactaatagtggagatgatcatggcggtttgttcgacctgatcaaaaagggatgtacagcagtgaacataaaattcaaaaagccagtgcccgatgggggaattacactgatagttatgggagaagcagactccatctactttttagataaaaacagaacgattgcaactgatancaccatttgatttcaaaaaanatgtttcatttattctttattgtcttgttttttcaccaattgtttgtttgattgttgaagaagga

SEQ ID NO: 46411 - DNA, 869 bp, Heterodera glycines
atggatggccgtaaccataaccatgcccatcatcacgaatcccacgttcaaatttcgaccacttcactgccgccggccaacccaatcgacggaattgtaaattctcttccggatttgaatggtaaaatttgtcttgcgatagtcatgaaaaagatataagcgctttgcactatgttttttgctcttttgtggtacattaaagtcataatcactctacttgaattcgtattgttttaatttacagcgttcatttcagtccattctcatggccatcaccaccacgaccatggccacgccatgaaaatgtttttccacggaggctttcgggaagtgattcttttcgacttttggagaaccgaaacattttatggtatgcttaagggggaaataaatattgccaccttctattggtacatttatttttccttttagggctgtttttctcgctgattttggtgtttatgatggccgttctgtacgaaggtgccaaatggttccgcgtttatttccaactttgggtatctttcgactccatttgtctcccttttctttatccattaaaatcatttaagacttctgttagtcaaaaatcgtccggttgcatatcaatggacgccgttcgtggcaaattccggcggagtcagcatggcgtggaagcggcactcattgaaaaggcgacggccgccgtcacaaattcgtccgccagcggttgcaacgcgtgcgatggcactgccgacgattcactgaaaaacacaattggcagtcagcagcaagtttatgcgccaactgttgtccgaccggcgccgatcagtcccaacatgacgatcaaccgttggacgtaccgcacacttttgcttatttgttcgtaa

SEQ ID NO: 46412 - DNA, 731 bp, Heterodera glycines
ggagggcattcccgctaatgaccagcgtttgatctttgccggcaaacagctcgaggacggacgaacgttagccgactacggcgtgcagaaggaggcaaaaattcatttggtcagaaaacataattaaaatatttaactaatttttacaagaatttttatattatttatttacaaaaaataaaaataatttttttttctaagtaaataattaatctttaaaatatgtttctttttttctcaaatattttacgcaaaattaaaaaaaaattaattctagaaaaagaaatatatattatttttttcgctccttcaaagctttaacttttaactcctctaccgggtgtttgatataaaataataattctttttattattgtatttaaattgtattgcctaattccactcaacaatttttcatcgaataaaattcacctaaaataaggggggttttaaattttttttttttaaaatttgaataggtcctccgtcttcggggcggaatgcaaattttcatcaaaactttgaccggcaaagtcatcacgctggaggtggacagcatggacagtgtcgagaatgtgaagcggaagatcactgacaaggagggcattcccgctgatcatcagcgattggtttttgccggcaaacagctcgaggacggccgaacgttggctgactacggtgtgcagaaggaggccactgtacaccttgtgctgcgcctacggggcggcgga

SEQ ID NO: 46413 - DNA, 510 bp, Heterodera glycines
atgaaagtcaaagtgatctccagacatccggatgaataccaacgcgagacaaaacatgacatattcaagggttaggagctttatgaagatatttttggtgatttttcgcatccgaaattagtgcctcggaattacgccgccccgcccgacccatttcagcagcaggtggagtacacgcgagcactgaacgcggcaaagttggagcgcatgttcgcgaagccatttctggctgcctttgatgggcacaatgaggcggtcagttggtgttggcatttcattttttattggcatttcgtatccccatttacctacatttcttcgtatattttcaaattgtttaatccatacgttcgcaggtcaatttgttggtcaaacatcccactcgtctgtccaccgttctgtccggtgcgcgtgatggccaagtccgagtgtggcatttggccactcgccgctgtttgcacgtcctccaggcacattccggccccatcaacggtctctctgttgatgcat

SEQ ID NO: 46414 - DNA, 1079 bp, Heterodera glycines
tgtacagatgtacgcgtgaattgctcggatgtgatttggagcgtctttggggtacatggacatttttgcggtcggacatttcctcggctgggcaatgaaagcactgctcattcggcacagcatcatctgtgaacatttgcacatattttgctttcagttaatcattgtttaaggttggtacattagcatttggtgggaattgactgaggttggtttttgcattgccatcaaatgaaacggagtccctcagattgtcttctcccatttgttgcccaatttccaagaatgttggtgggatgccatcattttggatgttttgctgtgcaacggattgggtatttgttgcggtctttggatttgtcgttgtttggagatgcagcagtttcattgggagagcatcaagtgccttttgaatttctttgcattctaacaaaaatccattaaattgtgcactcactttttagaaatattcgaactttgcgtggcaaattgaagcgggtcgttcttcaattcacacccgaatcttggataaccgtcaattggctgcagggcagcgatttgatggtagacaagccaaacaccgaccacaaaaacggtccggggaaggcgcatatggtaacaaactgactcgttgaaattggcggcaaaattcatttcagacactcgtgggccttaagaggtgcattgccatttacgccttcataatggtctggttggccaccgagctgaacgtgtttttcctgaaacacgttttagccatcgacacttcccatcctatcgtcttttggcacattattttcatcggactgatcgctgcccccacaattcggtaatttaattatatttgacttttagtttatttgttgttgaatcttttagacaatattatttgtacgtgactgatccgaaaattaagcgaatgggaatgcaatgttggtcagtcaattcactttagttttgggctttcaataaattgtcatttggttttcaaggctttacttggcaatttgcgctctcgaagcatctatttgtgtaaagttcggccgtgagcaacttccagcaattaaactttggctgat

SEQ ID NO: 46415 - DNA, 1621 bp, Heterodera glycines
  unsure (1)..(1621): unsure at all n locations
atgcgtntnaaggcatatatgatgactgaatggggatttcagaaagatgtcaaaaagggtctttgtgaagcgtcctgctattatgtcgacgatgtcgaccaggatgattacacaaatagcggcttaaaaacagagcgtcacgttttgctgatgggcccaatgtgagaccatggtgaaacttaattttaatctcggccgttagcccaatcttttgcttaataactctgatgtaatttttagcatacatcgtaataccgatgattttctaattattgcaccgtcatatgtttccggaaatgcagtcatagcgaacccgcacacatatcatattaacatacacgatattagaatttatataaaaacagtagatgttacccaagcattaaataacgtaataagcaatcagctacaaaccaccccggccaaatatccgatgagaaaaattgagatcagaagtcttttcatcccacggggcacttctgatctctcgcacaatgtttttacaagcattgttccgagacgtttaatcgccgggtttgtttcaaccggtgcgtataccggaaatcctaaagagtcacccttcgtctttgaacatgcaaaaatacgctctatcagtgtcgaagcgaatggaaacatattccccgggtcaccctattctcttaattttgatcgaaacaaatacattcgagcatttgttgacatgtatacgggactcgggatggacgacggttaatgaacaatgtcgatcaatatacaaaaatttgtaaacggttggtgcttattttatcccgatgacctctactctagaggacacccccggttttgaattgattcgaaacggaacgaccagcatcaaggtgcaatttaatgagcctataaaggatggcgggtatgagataatcgttctgggggaatttgattcgattttatctattaatgctaatcgtgtgctcagtagcgacggaagcatatgatgaattctcatgagattgaaatatttctatccaaacatccgacaacccgaaaatattttatcggcgtttttgcttccgacaagatgcctaaatagaaggaacaggcattttccatactgttttgtggcgaataccgaccgggcgggcacgatacttgaacactggattgctgttttgccgacagaaattgaatattttgattcattgggcgattatcccaatgaagatttaagttcataccttaacttattttaacgaattctcattaacgatcgtattgttcaacatcaattctcattaattattttttatttataagaattaatagctaataggaatcacatattaatagctcaatagggcaaatcgcatattaaattgattttgtattttcattaaatctcttatttttaattaattataattaaatttaagattaaagattgttaaaaattataagttaaaaaaaattaattttctcaaagtgcaattgaatagtgcttaattctattaacttaattttgtcgagtgatataatcgactagacttttaattgttaaagctttcattttatttgctataatcagaaatttattagtttatttatcttaaattattcatttcatttttaagttatttttaataaa

SEQ ID NO: 46416 - DNA, 1353 bp, Heterodera glycines
atgacaactctcaagaaaatcgacacggcgagtgaggacggtctcgaggggggcctttcacttttcgatatccccccgacgaacgttgcaattaataaatccagtattcgggaattgctgccactttcagcaataaatcaatctggaccgtatatatttagacttttttcagataatcagttttgtgacctcaataaaacttttctctatttgtcaacttcaatagagagaaaagacaaaagcaattggattccaattaccaaggacagtgaagctgaccaacacgtcggtgtcattcaaaattttgggcacagctttgtcaaaacattaaaggtgtcaatttccggtgtcgaatcttatgattccggtatttactatgcgtttagggcatatatgatgactgaattgggattttcagaagatgtcaaaaagggtctatgtgaagcgtcctgctattatgtcgatgatgtcgaccagaatgattacacaaacagtggctttaaaaacagagcgtcacgttttgctgatggggccaaatgtgagaccatggtgaaacttaattttgatctcggccgtcagcccaatcttttgcttaataactctgacgtgatttttagcatacatcgtaataccgatgattttctaattatggcaccgccatatgtttccggaaatgcagtcatagcgaacccgcacacatatcgtattaacatacatgatattagaatttatgtaaaaacagtagatgttacccagtcattaaataatgtaataagcaatcagctacaaaccacctcggccaaatatcctatgagaaaaattgagatcaggagtcttttcatcccgcgtggcacttctgatctttcacacaatgtttttaccagcattgttccgagacgtttaatcgtcgggtttgtttcaaccggtgcgtataccggaaatcctaaagagtcacccttcgtctttgaacatgccaaaatacgctctatcagtgtcgaagcgaatggaaacatattccccgggtcaccctattctcttaattttgatagaaacaaatacattcgcgcttttgtggacatgtatacgggactcgggatggacgacggtgaaagaacaatgtcgatcaatatacaaaaatttgtaaacggttggtgtttcttcgtcatcccgatgacctctactctagaggacacccccggttttgaattgattcgaaacggaacgaccagcatcaaggtgcagtttaatgagcctataaaggacggcgggtatgagatgatagttctgggggaatttgattcgattttatctattaatgctaatcgggtgctcagtagcgacggaagcatatga

SEQ ID NO: 46417 - DNA, 646 bp, Heterodera glycines
atgagcagcagcgatttgttggcccacaacagcagcaccagtggctccagcagtggcgcaaccgacaaattggcggtgttcggcggctgcgagggccccgacgcgtgctatgtgatgctggtgagcagtgacggacatgaatttgtcatccgcaaagtgagtgggaccgccaccggagttgagtacgtacaatggaaagtgttggtggggcggaggctcatggcatttcgagatttagaaatacctaaaaaaccaaaaaatttaaagaaatttgaaaaaatttgaaaaaaatccaacgaaaattacttttgtgtttattttaaagtatctttaaaaaaatgccatcagataagctcaaattgcttcaaaaaaaattgaattttctcagagatttttgacatcagcggacggacattctttacaaatttttcctaatattgcgcaaaaaatcaaaaattttattgtaaaaatatttttaatgcaaatttatggtcgctgctcagtgaatataaaacaataaaatgacaccaatccattcattcattcattcattgtcctccttttgcaggagcatgccctgatttcgaagaccatccgagcaatgctttccggccccggccaatacgcggagagcgaaaccaacgaa

SEQ ID NO: 46418 - DNA, 2746 bp, Heterodera glycines
atgatgattaattcgtttgtagagctgttcaatacatcgccgcctccaccacaaactctcccttctctgccggtccctccattggcacagacaacagaaaaatttctcaaatttgctgaacccctcctatccgaagcggagtttagcacaaccgtcaatgtgagcaagaccaaagccaaataaccaattaaatgaaaataattgcgtattgtacataaagtagggctgtgaaatttgattttccggaatcctggaaaaaattatagaaaagttgtcttacaattagaccggacaatccgtaaaaaacccttcccttttaagcttgtcaattgttttctggagagcaaagaagccaatgaattgcaacgcttacttgaacaaagagggcgcaaattggttaattgggtgagtttatttacaatttgattaaatacctctgttttaacatttttaacaaattcgaggttattagtcgcaattatcgctatcggcgttgttcccgatgggattccagtcccattttaattcaaattagggtaaaaatttgtccttttttggtgaaaggcggttacgatttcctgtttttgctctccggcgtcgacagttttaaaattacacgggagaaaaaattttggctcaaagagcaaaaaaaattgtccctcccgaaattttttttggttacgggcctggggggtactcatgcagtttactggatacttttaatatacattttcagatgccaataaacgtgttttagagattaatgaaaataagttttaaggggtttttgaggtcgctgatcacgaatacagcacccatttttgccaatttcgaacccctgttccgaactcgaacaaaaataaaattaaaaaatttgtatggataatatcctcattggcatcttgcccatgaggatattattggtacaggaaaaataaattcgaaaattgtacggatgatatcctcattgcatgagtaccgcctggggttccagcaaacatcttaatacagtctatgtgtccatattctgtgacttgtcagttcgtttagctcactccgtggtggctgaacgttgcttatttggcggcacggactccgctgccaattgtgaccagtccgggcatcacttttcccaaattcgacttcgccgtgcccggcactgaggcgcaattgcaatgcgcggccaaaatggtccaagcggcgctcaaataccaccacaaaatcatcaagtttgattatacttttctcacagattatgtaaaatggagcaaatgtcttgctttttctgcgattttataaattctcaaaatattcggtggcattttaacttttaattttttgcttttaaattttttcattcgttcagcgatcagttaccggtggacaaaggcccgggcggcgtgcccttcgacatgagtcagtacagactaatgttcggcaccactcggatcccgggccatggcacggacacaattcggtatggcaaggaccggccgagttgggcacggcacattttggtcacccgagacggacgtgtgagtgggcgggcggaggacgaaaaatccatggggtggcggggtctcacgggcactttatgggtccgataaatgactaattttcaatttaattggccatagtttttttcttgagcaatgtctacattcatgttcatggtatcaaatgaaaacttaaaagtcatagaattatacttggtttttttcaaaaattttatgggttttatattacaataaaacaaaaagtcgacctttctaattggttttggtgatggtgttatggtactactagtaatatagtttaggtccaaaatgtttctttttttcacatttttattgttaaaattactttcataaataccattgaatcgacctgacgtacggtcacaaattgcctgaattatatccaataaacacataataaggtgttttgccttgaagcaatattaacaatgaaaaatttaaaaaaaaatttgttttccaaccaaaaaaggacctatcggtaaactatcccacaaatggtataatttccattgtaattttgcttccttttttctcatagactttccatgtgccggtgtacgacggggctggcaatccgttgaccattggccaattggtggcacagttgggccatgtgatggcactcgctgaccaacagcaggggaagaaggcacgggccatcaacattgtgtcaagcgatggccgggaaatgtgggccacggtttatgcacgaattcgtggaaagttttttgtttattgggacggtccccgggattgagggctttttatttttgctgaaaattttcgattttctttgttggtaccacctccaagatctacctcactaaaattttcctaaaaatttgtataaatttttccgaaaatccttcaaaattatccggcacggcaccattcagagagggatccgacggaacttggcctggtggaggacgcgctgttcgtcatgtcgttggaccgtcactttgagcatgccgaggacggtggttctgcctcggcgtcgttgcagttcgaccccgacgaccggaacatggcccaggcgttgcacggcggcggcacgcgacagaatgccaacaaccgctggtttgacaagacgttgcagttccatttgaacgagtgtggctacggtggcataacgtatgagcacacgccggcggagggcccaccgctggccatgctgttggacttcatctgcgagcagttgtgaggaa

SEQ ID NO: 46419 - DNA, 489 bp, Heterodera glycines
gatgcgattaaaaacccagacaattatgtgctgaaaccgagcgaagaaggcggtggaaacaatttttggggcaaaaaaatcacggaaaaactgcaaacctttacaaagcaacaactttcggcatatattttaatgcaacgattgaagccgcttaaaatcaaggtcaacacattgcaattattgcttatacaaattgcaaaaatattaaataaaattaaaaaagccaccgaacaaagacaaaaatgataaaatcgatttatcgattatgcgaatatattgtcattattattttgtatttttcttaaattattttttttatttcagaattatttggtccgtccgcataagcggccggttaagctggtggaagcagtgagtgagctgagcacatttggctaccttattgcagatggtgatactgtatataaaaatgtctccgatgggcatatggtaaacgacggaggaatatttaaaaaagttcaatattga

SEQ ID NO: 46420 - DNA, 1450 bp, Heterodera glycines
tttgcagatgatgtgaaactatatgtttcatacaaaaaaagaaatgagcgcattaagctaaacacagctttacaaaacattgaaaattgggccagtttaaatggtttaaaaatctcacccgataaaacatttattatattttttggcaaaaacaactctaaacaacaatacaaattatgcaacaaaattatcaatgaggttgaatcgattaatgatttgggtgttttaattgataataagttaaagttttctgatcactatcttaaaattactaaggctgcttatttaaggatcagatatatagccaagtttctaaaatcccgctcaattcgggtatggactactgtttacaagacgtacattcgccccctccttgaatacgcacctgaaatttggaatcctaagttaaaaaaggatatcattaaaattgaaagatgtcaaaaatattttacaaaaattgctctcttcaaatgtagattaattaccttatattccctaccaacaacgtctcagttttttcaagatacaatctttagaggaaagaagaaaagttatagacctagtccaagcatttaaaatagggttgagcggtaccggtaccggtaccggtactggccggtaattaccggtttttttggtaccggtaccggtaccggtaccggttttttcaaaaatgaaattaccgttaccggtttgtctagtaccggtaccgccggtaaaaatttgcactggtaagaatgggggtctggtcgagaaaagagtaggaaattggtgaagaaggagaaatttttgagaaaaaattaaattttatttcatttagtcatgggattacacacatgcacatgtggtgtagtggttaaactttctacctttcataatttttcgcctgggttcaatttcccccacttggatggaaatatccctcccgttttctttaccattattttaattaaaaattttaattttaaaaaatattccaactttttttctttcgatgttaagcaccctaaaaacccaaaacttaatcgaattggtcattttttttacaaattctgttaacaaatcgcgttaaaaattacaaaatttttcccggcggcgcctatcggcaccgccggccctccttgtcccccaaaagtcttggaaaaaacgtgccgcgtaaaaagcggtgttgaaagcgaaaaaaggtcgttgatttacgattaatttacgtggccggagaccccttcacgaaattggaaaattggctgctgaccccttgttttgcgataatctgaattttgaggtctacgtctgaattttagtgttctttatcctgaatttgaaaaaaaaacttggtcaccctcaatatacgtatacttctgaacaattctaatctaaaaaacaggtactcgcgcgaaaactgaataaaaattttgtatttggaaaatttttcctaaaaatttttatgact

SEQ ID NO: 46421 - DNA, 1252 bp, Heterodera glycines
atgacgcaaatatcttttgtcgccgcaagtgccaccaaatgtgtgatgcttttcgccaagggattgggtgccaaatttactcctcacgtgtcgtttgttgtcccggtgatcttcgacaagttcaaagggaagaaacagttgctcagagatgctctcgtcgagtgcatcgatgtcatcgcagcaaatacagtaaaaatgcataaacaaaattgaatattttacgactttttttagagtttcggtaaactcagcaaggccttactcaatgctctgacatcaaaacagaatctgagtcagaaatcacagacggatttgttcatctaccgcctgttccgttctcttccggccaaagacgttcccaagggtttgctgaaggatttggtggccattctgagcaaagtaacattttatttgattttctacctaattttcagccctttagcatggctttgatgccgcttccgaagtgagggactcttcttttgctgcgttgggtgccattatgaaatgcattggggaaagggacttgtgctgtttcatttcgctcgaattggccaaagatgcgaacaaaatggccaagattgctgaaaaacgtgacactgcttaggtattttttttatttgtttagaaattttcccatatttttgttaaattttagaccatttattttctattttttttacccctttttccatgtatttgataaatgagacactcttcggattcggtatttttggtcatgatgtgttccactttagtgttcacaatatacctatatgttaatattttggtccacggacgctaattgaccattggtgtaacggtaaatcggttccattctcacgggataattccccaattgcttgcaaattatttgcagaatggcactcacactttccatgtgctaatgtgaaaatttacaaactctcccaattcaaagccatcgcagccgctgaacttcaaaagtccactcccgtgcaaaattcgccggctgatttatgggcacctttccagtcattaaataatttcgctgaccatctttttaatttggttttcagctttttgatgcccggttatctgtccactcgtgccgttttccaatgcggcacattttggcatgtcgaaatgcacgcgccacggagcagcagtgcaaagtgacgaactgaacaaattgggggaagggaatttgtttatttgcaggatggagaacaaacacttcaactgctccatcgccaatgccttccctttgtga

SEQ ID NO: 46422 - DNA, 781 bp, Heterodera glycines
atggagcgtttattgcgattgggaggccttagtggtttgggagcaggttcattgaacgcaacaccacacgattcgaaccaagttgacacttcggaaactgtttacatcagttcattggctttattaaaaatgctaaaacatggacgagctggcgtcccgatggaggtaactaaaaactaatattttttatatttacacaccaaaaaaagtattaatcaaatccgctgaccgcaaatatcagagacacacacgtgtacgaatttgaaatggttaaatgaatgatattagtgatcagcggatgatttatgtcaaatttaaatgttccttttaggttatgggtttaatgctaggtgaatttgttgatgattatacggttaacgtgattgatgtctttgcaatgccgcagtctgggacggttaatttgtttttttttgtctgctttatttgccgataataattgaattttaagggagtttctgttgaggccgtcgatccagtctttcaggctaaaatgttggatatgcttaaacaaactggaaggcctgagatggttgttggttggtaccattctcacccgggatttggttgttggctttctggggtcgatataaacactcagcagagttttgaggcgttgtctgacagagcagttgctgttgtagttgacccaattcaatctgtgaagggaaaggttgcctttcttattagtttaccggtcaaattacattttaggttgtcatcgatgcttttcgcactattaacccacaggcaattgcactaa

SEQ ID NO: 46423 - DNA, 645 bp, Heterodera glycines
tcgttgttcaccccaaacgctccgagttcttccttaacagtcacgtggcgatcaagggcactgcttgtacgccacattacactgttctgcgggacgagaacaatatgtcgatggacacacttcaaacaatggtccattacctctgctttgggcatcaaattgtcacgaagccgacctcattgccctcgccggtgtacatcgccaatgaatatgtgagtcaattcgaataacaataaaaaactacataaataattgaaatcatttaggcgaaacgtggtcgagacatctactcatactacgccaagaacggtattgacaatttggagctcttcgcaaagaggaaaggggtggaatggccgctgcgcactcatgatgacatgaccaaagtcctttctttcctcaacaccaaagacctgagggagctgcgcatcaacgcctgataagttagtgatggatggattatgatgctggtttttgctttccatttgattgttcaactcccctcacctttgcctcttcaattcgtgcatttgctttcgtttcttttggtctttctttgtgcattctcttcttttttggaatgattttttccttctccgtttcattgtaccaatccttttgttgtttattatattctgagcttta

SEQ ID NO: 46424 - DNA, 595 bp, Heterodera glycines
  unsure (1)..(595): unsure at all n locations
atgaaagccttgattttggttggaggttatggcactcggcttagaccgctaaccatcacacaacccaaaccgcttgttgagttcgccaacaaaccgatggtaaatgtagcgcagaaaacaattgctgaatgattttaaccatttgtctttttcgggtggtccaccaaatcgaggcattggccgccgtcggcgtggacaccgtcgttttggcagtcaccgctcgcattgaggaccttttggccggagaaatgcgaaaggaggagcaacgcattggcatcagggtgaaaaactgatttcaaaatttcattttgcaatttatgtttaattttagattgttttttctgtagaggatgagccgatgggcaccgccggtcctttggctttggccagcgatttgttgggcgatacggagcccttttttgtgcttaactcggacgtcatctgcacatttccgttcgccgaaatgatgcactatcacagaaaacatgggcgacagggcacaattgcagtcacaaaagttagttatttctacgtttgtgggggatgcaaaaagttgaaatttttggatttgcataaattaactcactgngactaa

SEQ ID NO: 46425 - DNA, 614 bp, Heterodera glycines
tgtccatgagaaaaatgtgacgtcggtgggcttccaagtggacggtgcgtggatgtacacgggaggggaggattgcatggccaaagttggacacaaaatccgcaaaatttaaattcggcaatgttttttcagatttgggatatgcgcaacaatcagctgaattgccagaggatattccaagtaagatgttgactaaatttgggtgacgagcagtagatgtacgaactttttgaccactatctcaccaaaaaaaaaattcctaaaaaatttcaaacagaaatctttcaagaaaaaaatctgaaactttttcaagtgaaaatttcctgacaataagtttgaattttttttttaaatttttcgcggggaaaatgaaatgcacacaaatttttgtgctttgcatgtttggacccgtttttttgttactatgcgagacaaaattttgctgcgcaatttgctgtcttctgtttcaggtgaacacgccggtgcactccgttgtgctgcatcccaaccaagtggagctgatcgttgccgactccaccggcgccatttatttgtgggatttgcgctccgatcgggacgattcgctgatcaccgaagtggacatgtccgaattt

SEQ ID NO: 46426 - DNA, 2754 bp, Heterodera glycines
atgcggtataaagtctcctacggaagtgattagcgaaaatctgtaattttttttgaatttactaaaaatgcattttttttcagtgatcccaaagatagttcttgtcgctgtttcacatttagcaataacggcgtctacttcgcttattgtaattcgaataggtaatttacgctgttaaatttccttgttgagtgtatttttttttgttaagcactacaatcgtcgaatcatccactggccgaaaatgtttttccgcagatttgggcaaaactcaatgcattattttttctcctaaagacagttttatggtcacttatgaaccgtaagtcatggctgttaataggttaccctatttgaataaaggtacgtgatctacgggtctcgtaagaattccgatgggtccctcaaaactccgaaccccaacctccgtttctggtcagtgccaaatggcgagctgttggccacagttgttgcagacaaacaggtgcagtttgaaaatactgaattccaatttcaagacaaaaacttaaatttattaaggcagtttggaagccttacttttccgctgatgagtccttaatgttgcgggtgcttggttcggaagttcatttcttcaaaaatggaaattttggttcgttgaatatcaattattaaatcggtcgtggtttagcaaaggctgcacacaaagttgtggtcaaagacatcgcttccttttcgattagcccgggcacggcaatgccgcacttcgcctgtttcattccatcaaaggtagcgcaactgttgcaaatacttttggttacttttggaatatcaaaggattgtcatttggtccatcaattctgtctgtggttattgtgtgaaaaaaaagttaaagggaacccaaaaaactacatttttgttgtactttgaaacttggggaaaagcatatagagatagcaaacgatacgaagaatctcgtattttattccaaaaaaagtcattaaatttgttttatccttacttttcatggttctgtaaatttttttaggatagggtaaatgcaatggagcatggttttcagtgattttctcgcatcgtccccattgtatgcactgttttccatttcttagaatcaaccggcgatgattcagcttcgaagtctttccgactcgttggaggttctcttctccaaggcgtcgttcacttgcgaccgttgcattatgaattggaactcgaagggtctgtggtcattctgtcactgcttcaattccttcccttttaagggaatgctctgctggtgaccgcttctgttgacgtggacaaatccaacaaagtttccaatgtcttttttacctcattttcaattctttctgtcaagtcgtattacggggtcagccatttgtactgtcttcttaccaaatcgtatggcgattgtttcaatgtactgtgactttggtgtagtgccaatcaaacgaaattaatttaggtcactttgaataagcaagggccggtgcattgtgttcaatgggccccaaattcaaaagagttttgtgtttgctatggttttatgccttcaaaggtttgcaaatatcgacaaactttgtttcctcctacgctttttaggtttcaattttcaacacccgtggcgacaccgtttgggagctcagcgaagggcaccgcaacgaagtgtacttcaacccacagagcacaattctggtcacttgtggcttcggaaacattgcttctggcaagatggagttttggaatttggaaacccgaagcgaaatctgtgcattttgtgctcctcacacgactcactttgaatgggcaccggacggacagcacatttggtgattttttggttttgtccgtttcgcgtttattttttcttaatatttatatcctgatacagtaattagtgttaatgaaatacgtaaaatcgactagaatcttttttttctgataagcctttataattaaatcgttttttttgaagcacgtcgaccacagcgccaagactcaggacagacaacggatttaaactttggacatatcggggcgattttgtttatgaacaaaaatacgatcgagaggaactttgggaggttcgctttatgtccaaaaaaaagaaaatgaaatcgcatgttcatttaatagcccccccccccccaccaccgaaaactaaaagattaaagtttaaatgaaattttgttatttggaaacgatgaggtccaaactcatctttttcaagaacctgaataccattcaacctccaatcacagttaaaagcattacccattttgttcgctttcagatcaaatggcgaccgtgcgcagcgtataacaaattcaaaattgaggagcccaacagagagcaaagtacatcaaattccagccgaataaacgacggaaatgccaaaacgcccttcgacaatttgccgaagggatcgctgacgcaaacggcgcgttacgtcccaccgcatctgagaggtgtctcgagaaaagtgaaacggtggaaatttacaaattcaggaaaaccgcagaaaaaggaagaaaaagggaagaacgagacaaattcggaagagacggacgtggggaagaaaattcggacattgcagaagaaattggacgatatttcgaagctgaagacgaaaagggccgcgggccatcagttggagttgaaccaaatggacaaaatacgcaacgaagaacgattgctggaggaaatggaacgactgacggccacggccaactgctgaaagaattagcatttaat

SEQ ID NO: 46427 - DNA, 1027 bp, Heterodera glycines
  unsure (1)..(1027): unsure at all n locations
aaggaatcagttattttccctcttttcaaaaaaggggattaaatttaatcctaaaaattataggcctatttctataccctgctcactttgcagggtatgaaagaaaattctangcaggaatattacaaatnttctactaaaaaacaacaaaatttcggaatatcaattggtttttgttaggaataggtctacaacgagtcaactaataacagttgtggaagattgtacgatgcaattattaatggaaaaaatgttgactgtatttacattgattttcagaaagcttttgactcagtgccccataatttactgttatacaaattggaaaaaattggtatacggggcaaacttttaatgtggcaaacttttaatgtggataaaaagctttttgagtaataggacttttcgtgttaaaattggggattctttatcctcaagtaaaaaagttggctctggcgtcccccagggctctgtccttggacctttattatttttgatttatattaacgatcttcctgatgccttaccatcaggagtgaatattaaattatatgctgatgatgttaaaatgtatatatcctataaagcaagatccgacttataaattatgcacaaagcattgcataatttattcgaatggaaataaatggcaaataaaagtttcagttcaaaaaacttttttattatatttgggttcaaaaacatataaatttgatgggaatacaataaatgctgtggatacaattagggatttatgagtaaacattgattacaaattacaattttccgatcatattaaccaaataacaaggaatgcgtatttacgtatgcgttccttgtttcgaataattaaatccaaatcgtctaaaatttggattacgttatataaaacttatattaggcctttattggaatacgctcaggaggtttggaatccgtctcttcaaaaaaacattaaaaaaattgaaaagtgtcaaaaatatttcaccaaaagggtattttaaatgcaaccttccaccaattccat

SEQ ID NO: 46428 - DNA, 713 bp, Heterodera glycines
atggttgaacgatttttcccaaaccctgaagaagcgccattaattaaagccatccgagatacgtttgcaaaaatgtggagaattgaagggaatgagaacaatcaggcattttctgagcttattgaagtaaaagaataaattaaaatgcattataaatgtgattaaagtttcattaattgttttcattttagagagtcaaaaaacagccaaataattttgtaatgaaattaactgaatatgcattatcggacgcattgaataacaatgaagtgaagaaaatttattttggcgaagaaattctcgaagctttggcaagtttcgatgctgacaaacgctcggcatacattttgatggaaaaattacggccgatgtctgtgaaggtaaagtcgggaaaatgcatcaattgtgagcttaattttaaaagtcagtttcaattttcaaattcttaaaataattttataaattcatttatgcaaattcagaatcacattatttgggcagaggacggagaagaaagcagcggagaagactttttagaagacgtgaccccggaattgggaatttttggcactttgctcggcaacattgtcaacggtgaagtattgtacaatgcgcaatttggccatcagctgaagaccaaattggccagcgaaaatgcgcgtggcataacaactggaaattgtgcttttgatacggcatatttggtggactga

SEQ ID NO: 46429 - DNA, 977 bp, Heterodera glycines
atgaccaagctgaacacccttcgagacggagacgagaagcacttctgccgctgcttggacctcgggcgcgatgagcaaaaggaccaacaatcgggacaaatgaagaagttcaactacatcgtcatgtcactcgtcggtcgtggcctggacggagtcgtcaaggatgccggtggccgcctcagccttggaagcgcagtcggcgtctcgatccagatgctcgccgctctcagaggactccacaccgtcggctacctccaccgcgacatcaagccgggcaactcgaccatcggacgtccggaatcaaacgaaatccgcctgctctacctgatcgacttcggaatggcgcgcaaatacaccaaggacgacgtgagtttgagtgaagcgctttgaaaaaaacaaaattaatttccctttaccctttttcagggcgcccaccgccgcccgcgcgctgcaaccatcttccgtggaagcccccgctatgcatcgattgccgctcatctcggactcgaatacagccgcaaggacgacatcgaatcgtggttctactgcatgatcgagctcttcaaaggcgcacttccatgggccaacgtgggggaaacgaaagaggtgagcgaatgggggggagggataatcagaattctgatttcattgtttttttcagatcggcgaggcaaagatcaaacgccagaagaaacaaccggaagccgttcgacaccaggcaatcgccgacttgctctccggatgcccgaacgagttcggccaggtcctcaaatacatcgtgagttcgttcgttttttcaaaattaaaaactaacaaattaaattttgcaggacatgaagtacaacgacaagcccgactacgactggatcatcgcgacattgcgcaacagcctcagcaacgccggcgtccaggaattcccctacgactgggagacgacggacaaaaccacgccgcaggtttcgagttacttcacctga

SEQ ID NO: 46430 - DNA, 841 bp, Heterodera glycines
  unsure (1)..(841): unsure at all n locations
accaacgaagcaggaaattggtgtttgattgaaagtgaccctggccttttcacagaattggtaatgttatcagacacgcttttctgaaactatttttttcaattctcgagaatttaactttcggttaataccaaaaatgcaggcatttttccggaaaaaaggtttaaattttccattttccccttttagataagtgggttgggtgtcaaaggaacacaagttgaggagctgtactccattgacgatgagcagcatctgtccagcttaaggtcagtctccctccctttttcccgccatttttcttttatttatctttttcatttttagacccatttacggtctcattttcctcttcaaatggcgtcccggcgaagaattggagggcactccgatgcccgacgcccccgtgtactttgcccagcaggtgggcgctttttcaaagcattttttccaatttaaaacaaatgtatcagaaaagaattttggagaaaccaattcacataaaaaattatttaaataatttatactaaaatattcggtgttttcccgttttggagcgcacgccaaaaatttaaaaaaaaattaacaaaaatgcgtgccaattttcgtgcctttctgtggttttttttgtgtgtgaaccccaaaacaggaaaattgtgtaccaaccattctactatgcatttcttatacatacttcctgggaccacaattaatttttattaattcctccatttttccccaattccatcgtcgcattgttttcttcaggtgatcacaaatgcgtgtgcctcccaagcactgatncaccttttgctgaacattttcgtcgtccgatgttcaa

SEQ ID NO: 46431 - DNA, 1637 bp, Heterodera glycines
atggccttccacaaaatcgacaatgattcagtgaattcaatcaccaatgctttggactttttccgtattccgcccacaaatgtgagcgtctcgtcatccaaagtgtttgaactgctccctagcaaccctctgaccgacacaccgtatcacttcaaacttcactccagccaaaattatattgatctttcaaaatgctatttgctcaccgagttcagaatccggaaggaaaacgttaatggccagctcattgacatgaaagctgacgacctacacattgcaccgatccaaatgataggccaaactttcattcgtaatattaaaatgagcatcaatgggcgtgaaatttttaattcaaatgctcttatggcctataagacatatttctcgcacgaactctcctattccactacggcaaaggactcccatctgaatgctgcgggctattatcgggacacaggtgatgcacttgagacaggagacgggtgcatcgcgcggcgtaatttgtttgctaacagcaacgtggctcaattcattgccaaaattgacaccgacttatttaaccaaccgttgtatctgattaatttttgtgaattggacattgaaattttgcctcatgacaacgactttgtgctaattgctccgacagcgggtgcaccccgctatcattttgaggttttgggtttgaaaatgtatgtgaagaaagtttctctaatggatggcttagcattggacattgcgcgaaagcttgaactgaagcctgcccgttatgcagtgaggaaaacaatgatgaaatcaatgttcatcagtccgggtcgatatgagtttacagccaatttgttcatggaccaaattccccgtcgtgtaacaatgggattggtggctaatactgactatgtcggtacaattagacgcagcccattcaattttcaacctttcaatgtgcgcgaaatttccattgttgccagcggacgctcttatccacaagcgccctacgacctggactacccaaacggaaagtatattcgccctttcaatgacatgaatgaagcagtggggtttgcaaactcatccgagagcaacggtataacttttgcccaatacggtaaaacacactgcatttacgtgttcaatttgaccaacagcggagacgatcaagcgacattgtttgattttgatcaagaatgggactaccgctgtgagcataaaatttaaccagccagtgccagaaggtggaataatgctggtggtgatgggagaatgtgattcacttgtgatgttagacaaaaatagatcaataagcacagacactactatttaaacggtttgtcatttcatttgtgcacaaataaaaatgttttcaaaaaaagtgagttttattttgttcattctccgagtttctcttcccgttgtctgtttatatccagagcagccgccgcaaaaacaacctgacttttattatgcagagtacctaaaaagtttatcattatcaagactttctactactgcaacaacaacaacaaatccaagaatattcgctcgatcaactaaaccatcagctgtcaccaccacctccatcacaacctttaccccaactacctttagctcttccacaacgactccaaaaagtgaaaaattaa

SEQ ID NO: 46432 - DNA, 589 bp, Heterodera glycines
atgaaatttgcttatccgcaactcgacgcaaaagtcactgctgggtgagtcagttaaagacaaattaaaatggaaaaaatttaaaagcatcttcggagcattccgaatcccgaacctgaattcgaacaaagagttgaaattttcgatcttttctttaatgatggcggttgatgcaattctaatacatttagtttgaattcgaaagtaaatcttttctaacaataagcataaatttaaatttacaaatttgaattatccattgtatttagttcaaatccagtttaggggttcgtaattgcacgaaaagaatgcccattcgagatgagagacccttaaaaaaatttttcaaaaaaattccaggctcaaccatttgctgaaatcgcccttctctgttcatccagaaaatggaaatgttgccgttccgttgagtgccaaagaaatccgtgcctttgatccgaatgtggtgccacgaattgataaattgttggcacaacttgcctcattgcaatccagccaagaaaacaaggagaatcagcgttcaattggtaaaaagttttaccggcaaataaccagagattgcttttattag

SEQ ID NO: 46433 - DNA, 757 bp, Heterodera glycines
atgttttatcaaacggtgtgccttcttttgctgttgagcgcatcgaatgatgttgcggtttttggacaggaagaaacaaccacaacatcgactagtagtacaagtacgagcacaactagttcaaccagtacatcgaccacaccaactacaacatcttcaaccagtacatcaactacaccgagcacaacaacttcttcaaccagcacatctacatcaactacgccaactacaacttcgtcgactagtacatcaactaccccgacaacaacttcttcaaccagtacatcgacgactcccactacaacatcttcaaccagtacatcaactacaccgagcacaacaacttcttcaaccagcacatctacatcaactacgccaactacaacttcgtcgactagtacatcaactaccccgacaacaacttcttcaaccagtacatcgaccactcccactacaacttcttcaaccagtacttcaaccacacccactacaacttcttcaactagtacatcgaccacgcccactactacttcttcaaccagtacatcgaccactcccactactacttcatcaaccagtacatcgaccactcccactactacttcttcaaccagtacatcaaccacacccactacaacttcgtcgactagtacttcaactacatcgagtacgacttcgtcaaccagtacatcgtctacatccagtacaacttcatctaccagtacatcaactactccgagtacaacttcttcagcaa

SEQ ID NO: 46434 - DNA, 1112 bp, Heterodera glycines
atggacgagctgggcgaacaatgtgccaccttttccgacccaatgcccgccgatccgcccaaactttgggtggcgtggctttacaccgatttttacgggtcgggacgaaagatcaggtgaacggacacggaaaaattcatttaattatttagcttttgggttaatacttaagatggtgcgggttcccttttgaaaaaatccagttttgtgataaaacattcgttcccttttttgaaaaatatccagttttttttcgtgataagacattctaagttttcggggttgaataaccgaatccagcatctatttcgtatcgaaccctgattattcggataaaaaattgaattcaagtttttcgagtttcaatttaaatcatatttgactacacggaaacgaactgaaattcttcaaaaagataatttaaactttcaaaatagttgaattttcatgttttgttcgagtccgggtccggtgttcaatataggccgaaatagaacagatgtcgggttcggattatctgacccagaaaactcttattatgtttttatcactaaaaatcaaaaaagggatccccaccatctaaagttttaccattttttgttttagggaccaggtgacaaagcttttcggcaaagacgcgaaaccgggcgaaatgcaagtgttcaaaaacacactgtcgaccaacaaacagttatggaagataaagcatctgctcgaaatacggccggtaacatttccaaacggagagccggggcaggaagatgcgacacatttggaggtgaaaagcaaattggaaagcgaaattggcaaatgtcttttaagaaattttagcaacaaataatggcaactgtaaacaatgtaaatgtttagataatggcagatggacgctgtgtaatcagccggcaaagtttgcctaatgtcgacgactttcaactgattgactacagcaagcagttcaggttgaattacgacaactgattcgtacggcttttacgccaacccacaaatttagcccgcgttatttggcttctcgactgatgtcaaaggacgtgaccaagcaggacgtgtacgaggacaccgtctacaacccagaaaatatcagcattggatga

SEQ ID NO: 46435 - DNA, 320 bp, Heterodera glycines
tttcagcaatttttttcctaattggtactcaactgagagtaaattaaatggttcacgaaaacatccattggtcccggccacgcaaatttgggcctggctcgcgctcgtgtcgcgtatgtttcagtcatcatggactcattcgaaaatattcactgaacatttgccgtcgctgcttccgcgaatacgcctccgacattggattcaagaaactcgattgaattgatggagaaagcccgagtatttttcattgttttcccggaagcattgttatcaatcacaaattattgttgaattttttgttttgataaatcaaaaagtta

SEQ ID NO: 46436 - DNA, 1357 bp, Heterodera glycines
gctctacggaagtttgtctgaatgggttttgcatgaacgaccagaacggcagtcattgccaatgccaaacggggtggaaaggacaaaggtgccaagaggacattgacgagtgccaactgagcgaaaaattgtgccaaaatggcgggaaatgcgtgaacaccgtaatcacccattatcattattttgtttttataattttaaacccaacagattggcggcttttactgcgagtgtccatcggactttgtcggctatctctgtgaagtgccgcaccgtcccactgacccatgcctggccaaccattttccctgcttaaatggtgcccaatgccacgagaacattgtggccacaactgcagtttgggcattggacgcgcattttgactggcgctgggaatgcgaatgtttgcccggctttgagggtactttgaaaattgaaaaatttaattcaaaattaatattttgccattatggattctcaccttttaaattgccattcaggcaaacattgtgagcgtgccgttgacgagtgcgacatgggcatgatgacatgtttgaacggcggcaaatgtgcacacgcgtgggccgaagacgtgcgcgatgggaatggcattgtggtggagaggaattggcacgcgtcgcagtgcaaatgcatgcacggctttgaaggtgggtgaggaagggcatgggggagggggacagataaaattggggggggggggtaattagggcaaaatttatattataaaaaataattataatttaaagaaattgaattttattgcaggtgatttttgtgagcaggacatcaacgaatgtgaacggtttggcgccactttgtgcaaaaacgggggcacttgtgtgaatcggcacggctcctacatgtgcatttgcgttggcggattcgttggtgaatttgcactgattttaaattttattgtgttttttttaatttaatttcaggcaaattttgtgagatcaacattgacgactgtgtggataatttgtgttacgccggctcaacatgcgtggatggcattgctcggtacgattgccgttgtgcgccggaccgaattggtacaaaatgccagaaatttacaaaagcaattaactaccaaacaattaggtgctttgtgcgaatttcaaaacatttgcaatatccacgaaaatctgtgcgaacatggccattgttttacgaatccgttcaacggaagctacacatgcttatgcgatgagggatggaaggtggaaaaacagaaaattatgatttcaaattgcaatttcaaatgaatttttaagggccaaaattgcacggatgacgtggacgaatgttcggatgagatgacgcgttgtttcaa

SEQ ID NO: 46437 - DNA, 569 bp, Heterodera glycines
aaactcttggaaaagatggggtcgaaaaggataaactctgaatgaggcccatttccttaataaaaagcaaataagtgcttttgataagccaaaaaaaaaaatctcagtcatagcgaaggaccaaatttctctttgttttctctttttctgcactgacaatccactgaacagctttaactttttaattacagcaaaactcgagcgaaatgtggaaccggacgacttggctatgatcatgtacacgagtggcagcaccggaaagccgaaaggagtgctcttgtcgcaccgcaacatcatcacggcggcatcgggacagagcgctgtcatttcagtcaggtgaataagcaggaaacaattagtccagactgcagacaattcagtaccagcgacacaattatcggctatttgccgttggcacatattcttgaagtgtgtgccgaaatcgtttgcctgtccaaagggtgccgagtcggttactcatcgcccagcactttgcacgaccgtgccgtgaagattaagaggggaaccactggcgattgcgtcgaactgaagccgactttgattgcttg

SEQ ID NO: 46438 - DNA, 596 bp, Heterodera glycines
aataacatggacccccagcgatgtaagtcggctatcgcctcttcatttgatcggcggaggattaagtcggatttgaccatcccttcccatttcatatgacatgtttgccgtttcgcctgccaacaaattctcgaggttcacaaattgtcgctgtttcttttgtcagttcgttcttttcgtttcagttacggcgttcgctacgacttctccagcgttatgcattacgacagcaaaattgcggcacgtcaatttgggatgaaaacgatgacggcaaaagtgaacccggaagagaacgacgcaaagatgggacagcgcgagggactgtccccgtcggacgcggaggcactgagcaaaatgtactgcaggccgaagggtgcgttgcttaatcagccaatcaatgcggaaacaatggatgaatcgatcggattcatcgattgataaaaatacaaatcaaatgattgatcagtcaatgcctttgagaatgtgtcgacgccaacgtttactgcgggacatgggcgactcagaacagatgctaccaaaacggaagtgcgaatgtttggatggcgaataattgtcaaaaatcgtgtgctttctgc

SEQ ID NO: 46439 - DNA, 4323 bp, Heterodera glycines
ggaattcttcttgttccagctgtttcgagacttgtttcctttgggttagcaagcccaaagcattcgtgtggcttcgcgattcttgttctcgaacgccctatgttgggaaatgctttttcaatgtcagcaaggatgtcttttttccatgcgtctgaaccgaaggagaatgccgatcaggtctttcaaaagtagcgggcctgtgtgcaggcattcgttgagtgtggggggggggggggagaaggaataaacaaaaggaccttggtttggagagagggaccacttacattgacaacaatgacactttttctcacaagcaatttaattttcttcctatttttttgaatgatccgacagtaggccgatatgccggatttttttttgaatatttaggtaaatagagttaatcctgaagtaaaacatgcatttggagttagatggtgcagaagaacaaacacgttacagtatattttcgtactcgttcaaatgctcaattttgtttctttctgtgctgcgttctttagacgcgcaacagaaaatgagaactgagggggggggggggaagagatgggaagagggcgatagaagaaagtgagtgaagcagtcaatgaaaatgagcaaagtaaattatttaaatggaatcaatcaaaatcttatgcattttagcgtggatttaccaaacaaacaaaaagagaggggaaaaggaggaaaaggggggaccacccacacaaaaaaacaagggaaaagtgaatgcatttgagggcgttaaatttgtgtgtgcaaagggtacggtcgaggcgagggagggaggcccgcccaaaaaacacgacggacgcttcattcatttgcaaagggtgccaacattcaaaatgcgattggttggcttattttcactcctactaaaacacattttccggaaattattgaattttgttgtgatttgttaaatatttcacaaatttttggttaagaaattggcaaattctttcgttcccccttccctcatttataatcgtctcttcttccttctccgctgttgatgatggcacgcaatgtttaaaagcagcagcaacagcagtgtgccaaaatgcggtcaacttttactcagatgacccgaaagcggcgatggcaatcgaaaaatggatgaaacatctgctgtcgttgctgctgcgccgttcgttgcattgaggggattgttaattgtaagtttacaaaaatattcttctcctcatcaacagatgcctccaggcccccggggattttaaaggaaaggaaagaatttttattaattttaaatgggtgacgattggatgactaacgatttaacttaaacaacgttgaataagggacataaggcgttaatataagcagccaccgtgacattagtgacaaacaaccaatcaatcgttaatacgaatgtgatgtggtgtggtggggttccttccattcggagcaagccaatgattccaacgcctccaacttttccaccacctctcgctttatcaataataaaaattaaattgtcctctgtgacattgttaatttcggattatccgtatataaattgtacgccatgaacaattggatgtcatagaattgctttagattggcaaaaatgagtctcaaaagcttggtgggataactcaaagcaccaaaccggccggaacaaaccgaagcaaaaacacttaagtgccaccctcactcattcagtttccaatacacaaaactccccccccccccaacacaaagccccttaatttggtaaaatggatagaagggggattgtccaaacaaacaaacaaaaattattccccttttcagttgacataagaaaatgcaaagacacctaccgtcatcctcatcagcatcctgctgcactaccacctgctgttgaacatcgacaacagcttcagcagcagcaacaacatcatccgaaccaccatcgccaccaccgttgtccatgtccaccatcggttgctgttgttggtcgcccatttccacctcctcttcctcctccaccgcttcgtccgcattgtccatgtgcggcggcgatgtgcgcggctcgtcacaaccgccggtggtgaccagttcgtccaagtcgcgctcatcaaaagcaagcggcgacacactctccgaacttttgacacgctccactgctgcgcgacgatcagcactcaatggcggcggcgtttgctggccatcggctgcagatgcaacgggagaagaagcggcacccggaacagcaacggtagcaacaccatcatcaccagaagtagagggatcttccggcggttgttgttgctcctcttcctcctgctccccaactccgtgcatttgaaccgtttccggtgtcagctgacggtgaccatgcgcaagtcgttgttgttgttgatgttccttcttcgtttccatggcacttaaaatggcaaaatttagttgtgagtggaaaaacgcgcacaaattgtgtgcctcaatgtatacagtaaaccccgggacagtagtaagtttgccatttgccaatgaaaaatatgttttctatgcggtgcgatgaatcacaccgaccgagaaagggaggataacaaaaaactttttgcttcactggacctaacgtgggaaaaacattaccattactatcacccaccacccatccgttccccctgccctcacgacgcatttatgtcatcatgccaactaaaggtggatgttcacaggtgagaaggaaatgacgctgaaacagtaactcagtcgatccctctagcagacatatttgcgtatgggagtggtcaagccgcccaccccccctcgaaccgcacatgcacagccgtattcttctgaacactccgtacggaggtcgacttgtgctggcgcttgaatgtagggctcacttctttttgtgcatctcaaagacaaacgtttgatccgacacaaaaagcgttggtcgcaagtgatgtacatgtactttttgctcgggcatcgaattatggactcacatttgagcgtataagacaaacaattgcaggtcttttgagcctaaattttgccctcgtggaatctgtgcaataattcaatgttcgcaccgatgcttaggctgacaacacatatattctcgccattgatggcgattccaaattcgaaccagcggcagtgattcgtcttttacatctgatgaacttgaaaagcgacgttggctgtgcgtgcggaagaatccatccgattggagaaggtgtgctatccttcccattaatggtgaatttcttaccattccccaggggtcatggtttggtaccaaaagttcgagtacgcaatcgcccattggttccaaaaggctgctgagcatgtgttcggctgtgttttgtgtgcccccggttgcttctctctgtttcgtgcttctgctctcatggatgacaatgtgatgcacaaatacaccaaaactgcctccgaaccacgacattttgttcaatacgaccaaggggaagaccgttggctttccactttgcttcttaagcaggtccaattgcctttcttttttcggaataataaccattttaagggttatcgggttgaatacgccgctgcttctgacgccgagacttatgcgcctgaagggtttgaggaatttttcaaccagagacggaggtggacgccttcttccatcgcaaatacgctcgatcttttagcggattacaaagttttggatgccattgactttttcatcattatttttagcttgcatcaagcaacaatgccagcatctctcggctgtacattctctatcaaatggtcgtcatcgttttctctttgcttggacctgccatcattttcactatgcttgtctatgcacaggttattatatgacaaattctatttaattgctacaaattaatgctcgagcgtatgaccggtggtttttcaggtggcggcctttgccgttgattcgacgagagtgctcttctacaatgcagttccggtgtgcggcttcatcttctgctgcttcaccatggattcgtccgtacagcttacctacgccaaaattgcttccgtcatttacgccttcataatgctggccgtccttatcgccaccacaaaccaaatcgtattggagacagtcttttcgcccacctccatgttcgtgttgggcatggtgctgatcttctcctttgcctcctgcatccacccgaaggaattcgccaacattatttatggttcgatcttcttcctgatgatcccttccacttatgtcttcctctcgctgtactcattgatcaatttgaacgtgattaattggggcactcgtgaagccgtagcaaaagcgacagggcaggcgac

SEQ ID NO: 46440 - DNA, 1728 bp, Heterodera glycines
atgccatgccgtccgcaattccccttggcaatgtggccgcagcggaggcacagcgaaaatacacaggcaaaaataataaataaataatatttaaattaaaaaatagagttgaaagcgtagtttttcagatttccaagatgtgcacggcactttgatcatcggatttgggtttttggtcgcttttttgcgccgctacggcttcgcatcgttcaccatctcaatgatgctgacttcgttcacattggaattatcggtagaataaataaacattaaaaaaattattattttgttttaaaagaaaaacaatattttaattaaaaatttgatttttacatataaactaaaaaatttaattaaaacattttaattaaaatttattataatatttattattaaacacattcactaaaatatttaaaattaaaatagattattatacaacttgtttcaaatcaaaaattttaataagtgtattttataattttaaaaaagtttaaattaataaattctctagaattaaaacctttttacagctccttgtccgcggcttcctcaccgacgaatttgccaccaatggcaaattttacgtcaatttgcagaagtaattaatattatttcccatccaaataattgaattgcttttaattgaaaaacactcaatttacagtatgataaatgctgattatacggctgcggttgtgctgatttcatacggtgccctgtgcggcaaattgtcgccaatgcaatatttgttgatggcactgattgaagcgccattttcggtgaattttaaataataaaaatgataatttgaaaatatcattaaaatcgaattaagattttcaacgagtacatccttgtgaagatgttgggagtccaggacattggagggtatttaaaattaatttgttggaaaattttaaataatttcaaaaatctcacttttttgaaattgtatttttaaataatttacttttatatttttaattattaaagctcaatggtgattcatgtgttcggtgctgttttcggccttgttgctggacgcattctgtacaacaagaattggcgtgaaagtgaacattttggcagtgtttaccactctgacattttgacatttattggtgagttgagttagctaatcaacaagttaattaaggggcaattagcacattttattataagccggtttcagtaccaagaatgtcagactcgacctcttatactagttgaattagcacacattatcggttgtttgatttagcaaccggctttttgtgggtgttttggccatcattcaatgccacaaatgcctttggcgtggatgcgcgaaaccgtgccattgtcaacacttacaccgcactgatcggaagcacaattactgccttcattctctcctcatttttcagtaaaaatgaggtgtggttttaaataaataaattgaattattgtataaatatttttgtttgtttttatctcatggacaatgggcaatcactttatttatcaaacaattgccaaatgattcgacaaattttgaaatgatcgatatcgaaaaaaccgaaaaagggaaattactcgatcgattttttttgacaaaatgtcaattgtgccgtctcttatttttaaaataaaattatgcacttaattaaaacaaaaatttaatagtaaaaaaaatttcttaaaaatattcattttcagaaattcaacattcgtcatcttaccaac

SEQ ID NO: 46441 - DNA, 1186 bp, Heterodera glycines
atgggagaaagtgaagatggcaaagccgacgacgaacagagcattttgagcgcaggggaggaatcggaaatggacgcggggaacgatgacgacgacggcacggacgaagcggcacgcgaacgcttccgtcagcaacgagaaaatttgcaatggccggacgaggtggagacaccgcgggatatctccgcgagggagcgattccaacgctaccgaggcctgaaaagttttaggcaagttacaacaccaacagcaaaaaggaactaattgtaggatttttcaaccatcaggacgagtccttgggaccccaaggaaaatttgccgcatgactatgctcgcatttacaaatttgtcgatttcaaacggacccgaaaattagcttttgccgaggctcaagaagcatttaaaacaaacacaacgggtgaatttgcacatcctggcacatacgttacgctgcacattgcaaatatgccgcgacgaattctcggtgaactttcaattgattcttgttggttttaagccttttctgcagattttatgggtccctcgtcgcctccgctggtcatctacggtttgctcaggcatgagcatcgcatgaccgttctaaacgtcgtcctccaaaagcaccaattcggctcaaacgcggtcatcaaaagcaaagaccgactcattttccaagtcggctgtcgtcgctttgccgcctcacctttattttcacagaacacaaacggccaaaaattcaaggttctcgttttaagaagcgattggcacttgcaaattaacatttccattctttttcagttggaacgctttatgccttcccagggcgctttttgtgccactctttttgcccccgtcacttacccaccgacgaatgtcaccgttttccttgctcacaattcacaacccgcggaactcgtggcgtatggaattttactcaatgtcaaccccgaccgcatagttctgaaacggactgttttgtctgggcacccgtacaaagtgaacaagaggacagctgtggtacggtatatgttctacaacagaggtcggtgatggtcatttatccctttaaatgctttccttttcagaagacatcgaatggttcaaaccagtggagctttacacgcacgaaggcaggcgaggccgaatcaaacaggcaaattggacgacatgccaaccattggtttaa

SEQ ID NO: 46442 - DNA, 256 bp, Heterodera glycines
ttccgggcggtgatcctgcacaatgatcaaacaccgaccgcggttgcgcaacccattgccattgcggtggattctgatcggggcctgctgttttggcttgaccaaggcaagggcggtgtggccacaaaggtggcacgtgccgacatggacggcggcaacccattggtgttggtgaacatcgacctggccgagctggaccacctggcgctggacacggtcaaccaccgggtgtacttcacggaggccaaagctggaa

SEQ ID NO: 46443 - DNA, 714 bp, Heterodera glycines
atgcatagtcgtggtgaatatgtaaaaggaacgacatttcagtaccataaaacgaaacttgctgcaactgcagttgggctcatcggtcgcgaaaaagcatatacattgtgagccggtatgtatggtggagcgttcgagcacagtttatatgaacgggtttttgttcgagttcgagtccggcgttcggaatttaccaaaatgggtaccgtgcatataatagaccagcgacttgacttttatgaacaaaaatatttttaaaaatgggggaggggaactttgacaagacattttttaattccctacagctgcagctacaattattttttaaccactgaactaatgagataaatttactaacatgctttaagatatttattctaatataaactgaaagtaatgattattcttgagcaaaacaatagggtaattgcggaacttttggaaatgaaatttaccaatgcccgaacaaagtaaagttgctaatctgtggttcaaaaataatagataaattccagcagtaaatttgataccgtcgatgttgtgttcgccgattttgatggcattttataccatgcatcaaatccggatggaggcgacaaatcaaagcttatggtaaattaattatacattaagacgtaaatttctcaaattattttacagctgagcatttcattgaaattttacaaagagcttcaagaacatggtgcagatgaa

SEQ ID NO: 46444 - DNA, 1117 bp, Heterodera glycines
atgaaagcggacaaagtgactgcaattcacaaaacattcaccggattgtatggcttagatgacccggataatgagaacaccaagcgtgtgattcaggtaattatcataagcatcatgatggttttcaaattcagaacaaatgtctgaaattaaatttttatttgaaaaattttgggacgttttttaatatttttacccaaaaattgggtaatattgttgatgcttgggcctgacttttaacagaatttccatttgatttcttaatagattttgaatcaaaataagaaatgtataggcggaattttagaaaattaaaggaatttttggattggacagaatgttcatttaattgctgtgaaatttattatttttcaatgacttacctcctttaaaaacttgggagtctggattaggaatgtgaaagtctcgaaaactaggcaaaatccaacaaaaacccgaaaatcctaaatacgggatctaattttctttaggatgccattgctcatcctgataattacgtgatgaagccaagccgtgagggcggtggaaacaatttttggggcgatgaaattccaaaaaagttgcgcgaaatgagccgtgccgagctcagtggccatattctaatgcaaaaagttcacgcattctctgctccggtaatttttggcataaatcaattggcatgttcaggaattacattttaattgttcgagttttggataggaatacatggatctggagagtaaaaaatcggatccgggtgttgccgggcccagaaaagccgagtccagatacaagtttttaaaccaagccagagtctgggaccacaatggtcatataatgaggagaaaatttaagtaatagctaacaaaaattagaggtgttgctaaaaataacaatttttcctcagaattacatggtccggccaaatgagcgcgtgcagcacggaaatgtcgtcaccgagctgagcactttcggcactctgctgggccatgtgaagacaaaggcggtgctgcacaacgcgcagcagggacattacgcacgctcaaaaccggaaggggcaacggagggcggcgtttacgggggcggaggcgttgtcgactcgccattcttattttag

SEQ ID NO: 46445 - DNA, 665 bp, Heterodera glycines
atgactgaagccaaaaaattgccggaagtgccggagacgctgctgaagcgacgcaaaatcagagccgcacaacgggctgccagggcgaagaacagcttgaacaccatcaaagtatttcttacacaatcaaatattggttttccatggtttactgacttcaaaaataagacctcagttaatgattcgataaattagaaaacaaaatgcaaagtcacaaaacgcacattattattttggatacaaatgcgcataatttggtaacatcatcaaattgatttgctcgagaaaatgagttgtgtcgattttcgcaatttttgttaattttaaaaatggtgtttgactcaaaaacagaaaagtaccaataattgtcttgtctagtaatttggttgatctccgttgcacacgcaaatttttgtgtcgaattggtacttgcacatggacaatatcattaactgaaattcaaatctcaaatcatttctcaattgcagaaagcgaaggccaaaaagacggaaatcttcaaacgggcggaacattacttggttgagtaccgccagaagcagcgccaattggtcgcgttgaaacgggaagcgaagaaagtgggcaattactacgtgccggatgagcccaaactcgcatttgttgtccggatcaagggaatcaacaag

SEQ ID NO: 46446 - DNA, 1263 bp, Heterodera glycines
  unsure (1)..(1263): unsure at all n locations
ttcaaccagtatttcaacaccaagctcaagttcaactggtactgaatcaagcacgagttcgagcagtacttcaacaccaagctcaactatttctactagtactgaatcaagcacaagttcgaccagtatttcaacaccaagttcaagttcaactataacgagttcgaccagtagttcaacaccaagttcaagttcgaccagtacttcgacacttagctttagttcgaccacaagtgcttcaactactaatactgagtcaagcgcaagttcaacgggttcgacacctagctctagttcgactataagtgcttcctctcccagtaccgaatcaagcacaatttcgaccagtacctcgacaccaagttcaagttcaactcccagtacagaatcaagcacaagttcggtgacatcaagttcaccgacatgcatcgaatcaacaagtacaatattcacgtcagcagagagttcaactacacgtgcatcatcaccgattacagaatcaagcacagtttcaagcagtagctattcaacaccaagtactgcttcaacttcttcaatggcgcaacacgatcaaagccattatatgatacaagaatactntaaattagtagaaagttaccaaaagctggtgacaaaaacaataacaactatgcaaatgtatgaaacgaagacaaatgaatacaacgaagtgaagaaacagaacgaacaattggaagagtcgaacaagcaaatgaatgaacaaaatagtcaaatgaaggaagaaaaaaagcaaatggaacagaaacaaatagagatggaaaaaagcatgtcagagacggaacagatcaaagcggaaacggagaaaagctatagccaattgcaatcggactacgaacagatgcaatcgcagtgcaccaaaaaggaagacggacaagtagtggtgccgaagccgaacttcccgacacgtatccatgcctttttcttttggtgtactgattgccattttcagcatgttcggacaatctgatgaacggaaactgtaccgatcccagctacatgaaaacgtgtcttgacccggtcagcaagcagtacactaactcattagcaatcataagtttccatcgcagaattacaacgccctgtccatgtccaaatgctgcatcacttgcacaaaagtgcgcaccgcagtcactgccagcctcaacatttccatctcgttcagtagcagcaacaccagcagtagcagcagcagttcgcaaactcagaatggaaagtgattgctga

SEQ ID NO: 46447 - DNA, 510 bp, Heterodera glycines
aaaaaaataggtataaggggcaaacttttgatgtggataaaggacattttgagtaataggacttttcgtgttaaaattggggatgatttatcatccagtaaaaaagttggctctggcgtcccccagggctctgtccttggacctttattatttttgatttatattaacgatcttcctgatgctttgccatcaggagtaagaattaaattatatgctgatgatgttaaattgtatatttgttataaagcaagaaccgaaacagaaattatgcataaagcattgcataatttatcagaatgggcaaataaatggcagatcagaatctcaattaaaaaaaattttgtacttcatttggggaataaaaaccccaaagaaatatataaaattgatggaaatataataaatgttgtggatacaattagggatttaggcataaatattgataataaattgcaattttccaatcatgtcacacaaataataaagaatgcatatttacgtatgcgttct

SEQ ID NO: 46448 - DNA, 847 bp, Heterodera glycines
tgatgctttgccatcaggagtaagaattaaattatatgctgatgatgttaaattgtatatttgttataaagcaagaaccgaaacagaaattatgcataaagcattgcataatttatcagaatgggcaaataaatggcagatcagaatctcaattaaaaaaaattttgtacttcatttggggaataaaaaccccaaagaaatatataaaattgatggaaatataataaatgttgtggatacaattagggatttaggcataaatattgataataaattgcaattttccaatcatgtcacacaaataataaagaatgcatatttacgtatgcgttctttatttcgggttattaaatcaaagtcttctaggatttggattattttgtacaaaacttatgttagaccgttattggaatatgctcctgaggtttggaatccatctcttctaaaaaacattaaaaaaattgaaaaaatgtcaaaaatatttcaccaaaagagttcttttcaaatgcagccttccacccattccataccaacaaagattagaataccttcaattgccgacacttgaaagcaggcgaaagctgtctgatctgttcatggctcataaaataatttatggccgaacagatctgaatccctttgaaatacttaaaccttctgaacgctttaacattcccttttatagacttaactcgaaatataaattaggcaaaaaatttatacttttgcggggcgggtaacaaaaatttggaaccaactcgataaaaagcttattgaaataaactcattaaatcaatttaaaaataaaattaaaactatttcattttccttaaatttattttattca

SEQ ID NO: 46449 - DNA, 706 bp, Heterodera glycines
atgctgcgatcgattgcatccttctacgagaaaaatgttaaatccctcgacatttcagtggtatacgaaagcgttcaacaggtattttcggttgtttaatattgctaacttttctttgccctttcagtcgagattaaacgaaatcgatgactcacatttgtcaagtgatattcaaaatcccccctcgcgactcgagtttcagcgtacccccgaaaagtcgacgcgtagcgaaccttcggcgacttcggcagaaattagcactcacaatcagagccctttatccgaaattgtgccaactcaacagatggtacgataatttgtttactcattatctttccattgacttcagcaaccccaacctcatccaccctcgaaggaataccgtgtcaaattaatccgccccgaatattattgtaaaccatcggccgaagagttggaggagtgtttccgtgaggatggaagccttcgaattgagtgtggcctcacagttgggcgtgtggggtatggaagtgtgttttggaagggcccaattcaattggatggaccgatcgactttgatgagattgttcatttccgcaacaaagaagtggtggtttaccccgacgagaccaaacggcctgaagtcggcacgggtctgaacacagcagcggaagtgagcctggagcgagtttggcctatcgacccgaaaacaaagcagccgatcaaa

SEQ ID NO: 46450 - DNA, 553 bp, Heterodera glycines
cataccagcgagcgcgatctcaaacagttgtttggccgttggggtgaggtggaatctgtgcagattgtttatgatcgctattcgggccgttcccgtgggtttggcttcgtctacttcaccaacaccaaggaggccgcacgtgtaagaaaatttaaatatcaaaatttatttaatacaaatttatttatccctctaattgagcccccccccccctccttttcaaatgaattacgttaatttttcaaaaagtagggaaggacctttatttacatatttccggattttcttcatattttggtccggaagccgctctgcgatttctattttttgaccttccccaaattttccgttttatattaggccaaaaattcaaaaaaatttattttttcccgaattaggaataaatattttaaaacaaatttgttcctcgagttatttgaaaatgaacaatttgatcatcaattttccaggccaaagataacatggccgatgtggtgattgatggaatgaaggtccgtatagattattcggtcacgcgaggcggcggcccata

SEQ ID NO: 46451 - DNA, 903 bp, Heterodera glycines
ttcgacttttccctcttcgacgactccgactttgccaaccgttcgtgggtcgacatcattgacgaggaggagagggagcggagcaagagcacggcactgtccaccactccgtccgttgtctcatcgtccgcgcccaacaaacgccgtcatattttgccaactccacaaaaaggatgggcggagccgaacaaggtcagtttggcgcttcttttaccatagacaaaccccgaaagagaaacaaaatcaaattttcggcacttttccagggttggtgcacggacgaagcgacgttggaacggcgggacaaggaactgcagaagatgaaggagaagccgacctacaagcgttacttgtcccaaattcccaaatttgcgcgcaaaaaaggccctcacccgcgcacacccaacaaatacatcaaccacacgcgtcgttcgtgggacaaacaggtgggcgagaggggaacgggtgctgttgcccatcttttcccagggagggggaccgagttagttctttatgaatatttatgggattgttttggatcccgcattttttaaatgttgaactgtgccttttttgacgtttcccacaggtccgtctgtggaagttggccatttacgagtgggcgggcgagacgcccacctcgagcgtgtgcggctcgcgctgtccgtcggagtgcagcgaaagcggcggcgacgagtcaccagcgccgttgcagaaaaaagcacgcacattgagcatcggaagcggcggaaacaacaacgaagcggacaacgtggcctcaattatgggtcagttaaatgcagcgaaaggggacagggaattgaaatgaatctccgaatttttgactccggtgccaaaagtgatcagatttggacactgacagttcggtatgcttccttgtaa

SEQ ID NO: 46452 - DNA, 171 bp, Heterodera glycines
atgggcgcctataaatacatgcaggaattgtggcgcaagaagcagtcggaggtgatgcgctatttgctgcgcatccgctgctggcaatacgccaaatggaggccatccatcgctgcacgcggcccacgcggccggagaaggcgcgccgcttgggctacaaggcgaagcaag

SEQ ID NO: 46453 - DNA, 1472 bp, Heterodera glycines
attggacaatatgtgtatatgaattttggtgaaaattatttttcgcttttgttcgatttcgggtccgggatttgaaatgggtggaaaaatgaatgtcatattcgtgatcagcgcccatgaaaaccccagaaaaaaacaaaaaaaattattatttttttatgtggcgtaaagtgaaaaagtacctagttttgcgtgaaaaatggcgacatggaaattttatgaaaattgagtgaatttatttccaaaaatgtaactgcatttgagcttcccgtcctaaaataaaaccctttgggctctcctctttatttttatagaacaaaccagtcatttaaactataagcatggctggacagtattttttttaaagtcaattttggtagtgactgaatgtttcggaaaaaggggggaaccgccaattcgtcgcggccaactcgccgcaaccattgcggcgagaaactcacgccgagatgacggcgttgaattggccgctacgaaatggtcctttttcttcgaaaaatcgtggcgcaaagtttcgatttttttttacaatttgccatttttaaggctttctcatttaccgcgtgcgcattcgccgcgggggtcgaaagcgccaagtgaccaaagggcaaacgtacggaaagccgaaaacgcacggcgtcaaccagctgaagaacacgcgcagtttgcaagccgttgcggaagtttgtttttaatttgatgggcctaaggaaatggtgtgtgttttacatttaaaaagttgggaattttaggcgaaatgcgctgagaaccaatcaaaatttatatagattcttcgaatttaggatttgttaggacgaagcgcaattcattaaccgaaaatagtatgaaaggatgccactttccagcccgcaccattaaatttgtttataaatttcagtttcttttttttccaattttatcccgccgggtcggttattatgagcccattaattttttaaaatattttagactaaagactaaaataaatcttgagtttttttttggtaatatgccgatgttccccccctccccccctttgtcgaaaattcaaaattcttacttctgttcctaattttgaattttcgactttttgtcgagttcgggtccgggattccaatttgaccaaaatgaatcttagattcgtgatcagcgacctcgaaaacccatgaaacttgtttttatgacattaaaattttagatttttttccaaaacggggggggcatcggcagtatgacctttttatttatgtttaaaattattgttgttcttttttattacaaaattttacgagttttccaactcattttcccttttcccataggcccgtgccggccgccgtttgggcgaacttcgtgtgctcaattcgtactgggtgggccaggactcgacctacaaattctttgaggtcatcctcgtcgacccgtcgcacaaagtgcgttttgtttcttgtttg

SEQ ID NO: 46454 - DNA, 411 bp, Heterodera glycines
atggaaggcgaagagaacggcgaagtccgagtcatccgagaagactcattttacgtcggagatgtgagaaaagggggaaacccattaacaaaatcactagtcatgtcataagaaacactttaggctgctggtcgccttaaatcatcggtttttcgtttttttcatttttccgaaaaattcgccgttttattttctcagatccgtcccaaaaacgaccattcgtgcgccgaccgactcttcgccctcaatctttcgctgacctttcaaacgcccgaacagtttttctccaaagtctctgccgaagagccgttccgtctgcccgagttcaatccgtcccaattccttcgcgaacattccgcccaatccgtcccaagtcccttcccccgccccccaatttccaactctaattag

SEQ ID NO: 46455 - DNA, 1364 bp, Heterodera glycines
ttttattaaaaacgtctctaatctatgggtttattcagccaaaaaatgagccaaggtagccaaattatgctgtaaattctatttaaacctctaactttaaaaattcccccctcagatttggtcccggcccagcctcggctgtgtgcaaacattgagcgggcacaccggctccgtgctgtgcctgcagtacgacaaccagatgatcgccagtggcagcagtgacgcgacagtcaggtggaggatgaaactcaattttcaatggcatgccaaaatgggaccaaaagggaagccgaggggccatgtgattccaaagaaaggatttttctaggaaaatctgaccgcgaaaatccgagttttgggagcaaatgcatttaccgaacacagtttttacgccattaattaacaaatttcgcccaaaatgctaaattttgggggctggcgaaaaaacgctttgtttattttaaaaaaaaccaaatattatttttattttccaatttttccagaatatgggacgtgaacacgggtgagcaactgaagacgctggtccaccattgtgaagctgttctccacctgagatttcaggacggcatgctggtcacatggtgccgccatttcacatatttatttattttccatcacaaatttaaaaaatatattttcaaacttaaaaattaaaattttcaagttttttcttgtaattttctcgtaaaatttttagctgaagggtacgtacccccgttctcacaaattaaatttgaaataatttttgtctttttaaaataaatttattactggcgaatttagctccaaggaccggtccatcgcggtttgggacatggcatcgcctcgtgacattgaagtgcgtcgggtgctcgttggccaccgggcggcggtcaacgtggtggactttgatcacaaatacattgtgtcggccagcggtgatcggacaataaaggtgaccgaccggtcgaatgtttgtcaatcattttaaacagggctcccgagtgtccttttttctaagattgtcctttattttaggcttccccaaactttttaaattttttgtgcttaatgatttatttcgctgatataaatgctaacaaaactcccaatttcaaaattttttctttttcttggcggcgcctatcggcaccaccagagctccattttctttaaaaaagggtctttgggtcgggtatcgtttgtcctttttttgaaaaaaaacttaggagccctgattttaaatggtttttttttttgctttttaaaccacttttttcgcggatactttttccaaaaaatgatttggcgaaacgtttgggaactatgggttatggatgttttggagtggtgtgccgacaaga

SEQ ID NO: 46456 - DNA, 512 bp, Heterodera glycines
atgcctgagttacttttcaagaccatcacgcagcaatcgttcacaattgaagttgaggaaactgcaacggtgagatgtttagacatccttttcttgtgcctaaatacctaacgatccattccttttcagatcggcgaagtcaaacgaaagatccaacaggtcaaaggcgcagaatacccagcggagaaccaaaagctgatcttcaacgggagagtgctcgaggatgccatgttggtctctgagctgaactttgcggcgccgaaattcattgtcatcatggtcatgcgagtgcgtttttgcccttcgtccgagtcaaattcggtacctaaattgcgtttgggtccacatttttggtcaaaatttttatcaatattttttttgaattaaaaactcctgaaaacaagtagtatgatataaactctccctttcagatattaaaatcattatttttggtaattttcaaacttaatgagatgcgctttctcccgacgccttcggtacagtcagtataa

SEQ ID NO: 46457 - DNA, 785 bp, Heterodera glycines
atgtccccttctctttccgttgccaactcaaatgtctctcgaccgcttggccaaccaaaagtagcgggcttcaaagataaggataagccggaaagtgttcgtactagcaacattgtggcagcaaaggctgttgcggatgcggtgcggacgagtcttgggcctcggggaatggacaaaatgatccaatcgggcaacggagaagtgacaattaccaacgatggggcgactattctcaaccaaatgtcggttgtgcatcccaccgcaaaaatggcaagatttgtgttgtttgcttttatcaattgcactgttcagttggtcgagctgtccaaggcgcaggacattgaggcgggcgatggtaccaccactgttgtggtgttggccgggtctttgttggacgctgcagaaaaacttcttgccaaaggttgattaagctcgcttatacgccaaattttagcacttttgtttttaaaggaattcatccgaccaccatttccgactcattccaacgggcggccacattttctgaaaaagttctcgaggaaatggccacacccattgacattaacgatgacgacgagttggtgaagctcgccatgacgagtttgaactcgaaggtcctcagttcactttctgcactttctttcgtttgcccattgtttccttcgattttccttttttcaggtcgtcccgcaatattcccatctcttggcaccaatggcggtgcaggcagtgaagaaactgatgagttcaccggaggactcaagtgtcaatctgaagttgattaa

SEQ ID NO: 46458 - DNA, 522 bp, Heterodera glycines
atgcgggtgcgtttggcgtggtgcacgtggcatgtggaataacccccccccccctttttcaggtgatcaaccctgggacgaagcgcatcggctacgccttcaagaccaccaaaccgaagcgcatcaacatgaacccgccgaacggagtgctcggcccaaaggagtccgtcaacgtggccgtctcctgcgacgccttcgaccccggcagcgaggacaccaagggcgaccgtgtgaccgtggagtggaccaacacgccggacccagccgccaccgcgttcaagctcgagtggttccagggagacgggatggtgcgccgcaagaacttgccgatcgagtacaacgtctgatggaaggatgcttcgtcacctcaacatggacatgataggatcccaccgtcccaaaattgtcattttgtcccccatcatgtaaattgttgtatctgtatgtaaatttctgtgatcatcacttcaaatgaatgtatatttaattgttgcctatgtaattgtatagttgttgtgctta

SEQ ID NO: 46459 - DNA, 386 bp, Heterodera glycines
ttaagtggactcctcaaacggttggaagaggattgtattgggtcagccccagcagtaatggacaaggacgacgccaaacaatttgaagaatatcgggcgaggaaagtcgcaatgataactggcatttctggtcaggtaattgaccgtaaatgaattaataccaagtacaagatacatacctattttttctccctaggatgggtcgtaccttgccgaatttctcctcgccaaggggtaccaagtgcacggggtcatccgtcgttcctcctccttcaacactggtcgaattgagcatttgtactccaatccgatgacacacgctgtcggttccagcttcaacttgcactacggcgacatgaccgactcgtcctgtttgatcaaactga

SEQ ID NO: 46460 - DNA, 3815 bp, Heterodera glycines
atgcaaaatgggattcaaaaaattttaaatgaggccaaaaagattgacccggaaattacgaccgatgacgttaataaattcctagaaaagcagagaacatacacgattcacaagcccatcaggaaaaaattcccgagactaaagacggtaccgagcggcttccataccgattggcagtgcgatttgtgcatatttgaccagttgaaaaagcataacgacggttacaaatatctgttggtatgcatcgacgtgctgagtcgaatgatcttcagtgcaccggccaagtcaaagaagagtgaggacatggttgaggcttttgatcgggtgttcgaaaagtcgaaaattatcccgatgaaaatatatagtgacagcggactcgagtttcaggctggaaaaatgaaaaaatattttgaggaaaaatttattatcaaaaatgtgatgtatagtcctgacctttgggggccaagccagtatccgttacttttgaaaatgcccgttcgctctgggaaaaattatataaggagaaggaattcaaaatttcgaaaaagaaaaaatttaaaatcggtgatatcgttcgtattaccaaggaaaagggaaaattttcaaaggaataccgcccaaactttaccgaagaattgtttaaaatcgttgttgccaattcgacgacacccgattcatacaggattgaagatttggaaggaaatttaataaaaggcatattttataaccaagaattagtgaaaacggatggatgatttttacattgtactaccctcgaacacaccggggcaggagaacactacgtcaaaattcacagtacgtctccccgagactttggaattgggcacaaattggtcagtagctctctcatcaattatttacccctactcattcaccgctctcggtataaatggtcaagagtttattaaagtatgggaaaatgacagcagtgtccccattcaagtttatttaccggacatgaattttaaaaccgccgggggattaggaaataaaattaacgaggcattcacacatcattacaaaatcaaaaaacaacgtgggaagagagaagccaaggctgaagaaaccaaagactcaaaaattgatgtcgcaaagagggctgcagaacgcgccgggagagacgtagtaagacattttaatcagatcaacaatatctcgaattccatccaaacccaactaaacacactacgagaaacaaatcctcaaattttagaagagcctgatataaaaatttggtttgacaaaatggttgagatgggaaccgaaattcaaacatcccgaaatgaacttaaatcttttcaagaagaagtagataaagccaaaaacacaacattagagcatgtggaaaagaatgacatgaaagaagcaaagaaatcagccgacgtcgcaaagggaatcgccagacaggcaaagaccaaatatacatcaactctcgagggatataatgataaatcggaaaagggttttaacgggatggtggttagacttaacgaggcgctcggtgagcattttaaacgtaaggaaattgaaaataaagaagttttagaagctgaaaaagggccgcaaaaaagagagagattagccaatgaggatgttcaatttaactacgacagtattgatcaaaaatttattgtctatctttcctctgccgtcacccacatagatttgtcaaaacacctcgcatatgttctggggtttaagaacacaaggctatttcacgcggaagaggcgacttatatgccagatttgacgggaggcgtaaggcagctatacatttatgcaccaaatttaatcgaaaacacaattatcggcaaccagatggccccactcttaagaatagttaacgtcgtcgatgacccaggatcaattagtgaagttatatatagcaccgagtattttcatcgtctacagtcgaaaagaatttcagaaattacaattgaaattcacacaccgtttggcgaattcgttaaatttcactggggaagttgtattctcacattacattttaagaaaagtatattttaaaaatgacacacgtatttttcgatcccgagtcggtcgattggtcatcttttatcactcctcaacatgggaggggacagaaacaatattttgtcggaagcaagtatcaacggggattcggtttcctcggtaatgtggcacgtttcttgacccctattgcgaggaatattgcctcgagtgcaggacatgaggggcttgccgctgggcagagagttctgagtgacatcgcccagggtcgtgatttaagggatgccgtcagggaacattcaagacaggggttgactaaccttactgataagttacaacaatgtgggaaaggaaaaaggtctctgatcactaataagaaccggaaacaagtatatgatcagttaagtttcatctaaaggtataaatggaataaataatacaaatagttaaaaatgacaactctcaagaaaatcgacacggcgagtgaggacggtctcgaggggggcctttcacttttcgacatccctccgacgaacgttgcaattaataaatccagtattcgggaattgctgccactttcagcaataaatcaatctggaccgtatatctttagacttttttcagataatcagttttgtgacctcaataaaacttttctctatttgtcaacttcaatagagagaaaagacaaaagcaattggattccaattaccaaggacagtgaagctgatcaacacgtcggtgtcattcaaaattttgggcacagctttgtcaaaacattaaaggtgtcaatttcaggtgtcgaatcttatgattccggtatttactatgcggttagggcatatatgatgactgaattgggattttcagaagatgtcaaaaagggtctatgtgaagcgtcctgctattacgtagatgatgtcgaccagaatgattatacaaacagtggctttaaaaacagagcgtcacgttttgctgatggggccaaatgtgaaacaatggtgaaacttaattttgatctcggccgtcagcccaatcttttgcttaataactctgacgtgatttttagcatacatcgtaataccgatgattttctaattatggcaccgccatatgtttccggaaatgcagtcatagcgaacccgcacacatatcgtattaacatacacgatattagaatttatgtaaaaacagtagatgttacccagtcattaaataacgtaataagcaatcagctacaaaccaccccggccaaatatcctatgagaaaaattgagatcaggagtcttttcatcccgcgtggcacttctgacctttcacacaatgtttttacaagcattgttccgagacgtttaatcgtcgggtttgtttcaaccggtgcgtataccggaaatcctaaagagtcacccttcgtctttgaacatgcaaaaatacgctctatcggtgtcgaagcgaatggaaacatattccccgggtcaccctattctcttaattttgatagaaacaaatacattcgagcatttgttgacatgtatacgggactcgggatggacgatggtgaaagaacaatgtcgatcaatatacaaaaatttgtaaacggttggtgcttctttgttatcccgatgacctctactctagaggacacccccggttttgaattgattcgaaacggaacgaccagcatcaaggtgcaatttaatgagcctataaaggacggcgggtatgagatgatcgttctgggggaatttgattcgattttatctattaatgctaatcgtgtgctcagtagcgacggaagcatatga

SEQ ID NO: 46461 - DNA, 1250 bp, Heterodera glycines
agtttggttcttatatttacaatgagcgtagagacaagtatagtttcgttttcttttatgcccattttcattgtttttagaacacacatgagacggcgcgtgccatcaaacatatgccgttgaagcgtgccatccgctttctggagaatgtacgggagaagaaggagattgtgccgttccgccacttcaacggcggcgtgggacgcaaagcgcaggcgcaagcgtggggtaaaccgtaggggggggggggtgtattgcgcgttaggcgtccgatcaatgactatccttaggccataacttctttctaactagggtcaaactttacattctcggtaccggtagaatatgtgaaatcagtatttgctgtttttctttgtgtttgtaaattcccgagactaagcttttgtttgataccaagaatgtatgctttgaccaattaagaaaaaattatagtcaatgaaactgaggatggtcattgattggacgcctaaagtggtaaaaatccgggatgggatgggttttgacatagctctttagactaatgatgttcctttacacttttgtttattgttaggcacaacacagggacgttggccgaaaaagtccgccgagttccttctccaacttctcaggtaaaaggccgttctgtttgggaccctaaaaacattttatttggaattccattttggtttccgtatatcctagcctacccacaagaaaattcataataaacaaacttgaccaaatgttaagtgtttgcattttgtatcgtcatttttgcacagaaatgcggagagtaatgccgaggtgaagggcctggacgtcgaccatttggtcattgaccacatcgtcgtgcaagcggccgccaaaatgcgtcggcgcacttaccgcgcgcacgggcgcatcaatccgtacatgagttcggtgcgttttcttcagagttggaaacattttttcacaatttagcggattttccaaacccatcatccatgtccaaattgtcttggattactttaacttttgcggcttgaaatttcaaaattcgccaaattttgttcaaagcattcctaatttctgactgattgtgcactatcccattaccattaacattcccattcatttagccgtgtcacatcgaagtgattctgaccgagaaaaaggacgtcgttgcgaagccggccggcgcattggtcaaagtgaagaaagagtcgaagaagaagcagcgacggcaattggcacgtggcgaattc

SEQ ID NO: 46462 - DNA, 5573 bp, Heterodera glycines
  unsure (1)..(5573): unsure at all n locations
aatcgcaaattgacaatttttcccgtcctgtccttaacacatttacaaaaccgagttttaaaaattttgcccataagtgttacggactttttgaaaaatggcgtggtcaaattcgcagcgggattatacctcgccggaaaaccaaaaattttttcaatttctaacgagtttttttaacaatttgtaaatattttcatgagtttcttattttctaaagaaaaaggattttttaaaattttttccaacgacttaaaacgattctgcaaaaactctttaaaaattaaaaatttctttgtttcaattatcactcacaatcaggacacctttgtgatcatccgaaataatcagttgctgtgcggttcgcttgacaaagcattgctcggctctgaaagcaaatgttcaattttctaccgtttgttgtgcgattggggcgagggccatgccatcgaggcgatgtggcggttggcacgcatttccgccgtctatttttccaaccggggcttctcaatcggtcagttttcagcttgagcctgacttccatccccacccttccagacataaattttacaaaaaaaaacttagaatacttttttgaaaatgtcgttaaaaaaaagcgtagtgagacatttgcggaccgactttttcggccgctattctcagttgaactgtgtaataaagaaaaaaaaattaaaaaaaaattgctttggttagcctagagcttaaatttttatcaggcatgacaaacaattaaatttaaaaaaaaactcaaaatagttctaccttttccctaacattgtccgtaatttgctgttataaaactatgaatccgaaattaagaacgagcaactatatactatatttatcaatggaaacttaacttcttaaaaataaaattgttttattactttcgatgtttattgcttaaggtgatcagtagggatgtcaaaaatatgcttataaaatcgcaaaatatgggcataaatgccaaaatatatgaaataaatcgcgaaaatggataaatatggatatagaaatccatcctagaagcttgaaaccaagctataaacattttttatacgtttcaggcctccaacactccaggaaaaaaatatatggattttcatataaatgacagccctattgatcagaacatctttaagcgcgatgttcaagttggaaaaatcaaaattaaaaataattaggtaacgcaatttttggaaataattattttttgtttttttagacagttcaaccctgaaatagtggtccgcaaaagtcggctaaccaaaaaaagatgttgaaaattgatacttttgctggcctaaattacgccgggacaaaattttaccgccaaaattttgaaaaaaaaattggaattttttaacgattttttttaatttacaggggaaattttggagtgcacccaaaaattcttattttgccacgacgcctgccatactcccagaataattttgtttttttttctccatcttcaggcattggcgatgtgaagcccaatgtcaacctgttgcaagagaaaagtgtgctgctgaacaccggctacaaaatttgtgaccatctgaacaaaagcatgcgcttggagcgccagaaggacaagccggacttgggcctggtggaggagttggagtccaaaattttgaaggagctgtccagcatccgtgaccaggcgggcaaggcgtgcaagcagtacctgaggtgggtgtgccgtaaaaaacaggcccaaggacccaattaatcgaggcccaattattgtaaaatcatataaaacttccgaaaaaggccgtctaaaactgcccaaattttacgcaattttttagtcgaaagaaggcgccgttgacgatggcccagtgcggttccaagggatccttcatcaacattgcgcagatgatcgccctggtcggccaacagtccatctccggcaaacggccttctgacggatttgaggtcggttggtttttggtagttccgttgtattggatcaaaaattaaatcgtctccttccatcttaattaaaaacagacgacatcaaccatgcccaaattttgccattttggggtctaattttcaaaaaataatggtacaatacagttcggcgttgccaatggcgccgctgggaaattttttcttggaaatttttaatttttgattcgcagaaccgctccctgccgcactttgagcgcaaaaatttctgcccctgggttgagcggatttttttattgcttgaaagtactgtattttttactactccatttgttttatggcttttttggaggggataataaatttcgggggaattaaaaatttgtttagcaatttttgattaatttaaaaattgatataatttttttttacaaaggccttcaacccttgaattttaaaccaaaatttttttccccaaaaaattattttctaacattaaaaatgatttacaattagcctatcgtattattatttctactcgcttcaattgtgccaggatttggctgtcaactatggcaacacggtgcgcacctccaccaacgaggtggtccagttcacgtttggcgacgacggcctcgacccggcgtacatggaggcgaaggacggccgcccgttggacttccaacacatgttggcccaagtgcggaacaccaacaacaccaggtgggcggcgaaagggtgatgtactgcctcgcaaaaaaaaaattattttttttcatgaaaaattcggtacattttggcactgtcaattttcaagtgtcataaatttttttttaatgaatcaattaaaaaaaagagcctacgtaaacaatttaaatttgcagtcattaaaacagtttatacatcaaacataaaaaaagagttctctgtaaaataattgaattttgggtcattggttcttgaaaaactcaattcatccatttttatgcttgaacattttcttctctaaaatgtttcttccattcgaaaatgttctttcgattaattttcaatatttttgcaatttttccatcactcattttggattttcatttttcatttgccaataaatttttattttttctatcttttcttttccgttatttttcctttcattccaaattgtttcttccatttgttaattcttctttcgttaattccaattttcttataaatttctgcaaatttttcttccattctttttttgaatattttcttcctttttgtttatactcatttttcattgaattaaatttttgaataatttcaattttttgttcatccgtttttgatttgtggcatttatatttttgaagatttaattctttgatccatttgtaaatgtattggcgatttgtccccaattttttccctattttctgttcaattttattccattcttttctggtatatattttttcgttttgtttaattttttctttaattttgtaaaatttctcaataatttctcgttttttctgatcattttcattttggttattttcttcttctaaattttcttcttctttttcttcccatttttctccaaatatttcttcaaatgattgttccaattttttcttttctgctccaatttcaattagcacaattaaaaatgcaattaaaacggataaaaataagcataatttcatttttgacaattttattgtgttaaattataaaataattatttaaatattctcaaaaagcgcttagattttggcaaaagaggcattcattcaaaaattatcatcaatttgtatatataatttctctctactgattctcaaatcttttcaattatacagaaagataaaaccattttatgaaattttaattccaattctactgatcataaaaacagatattgaccaatgaaaatttatttgcttgaatcgaatcaatcagaaatggtccggtttttgattagacagatttttcgacccgtccggtccccgatttctaanaaaaaaataaaatttggattacatttttatcaaaaaacgctttctttttgccatttttccctaattttttaaaggttttacagaaatttgtaatgcattttagtaattttaaacattttttagtctttcaaaagatttttttgattagttattgatttccactgttaaaatttgtcaaaaggccttccgaattttttaataggcccatggatcccaccggcaccgccgatggcgtcgtgtacgacctgcttggcaccaccagtgacgccactgcatccgccgccaaccttgcggaggccatccgtgccgaaattgtgcaacgcatggacgttgtggtcatcgagcgggagggcatcggcacggaatggtcggcggcacggaaaaagtggcaacaaagtgtcggagagggcgaaggagtacaacagcaacaacaacggaatgagcacactggtggtgttgcggcggacaatgagcagagaaaaccgcggcaaaaacaactgcaacatctcccacggatcacggcccaattcggagacgaattgttgaagtgggaacatatataaaaagtattaaactgtataaatgggtatgaaaatatagcgctatgacatcggacaaacgtgtcaatgttcggccgatattttttcgaacaaaaatggggcctaaaaaccggttttcgggcgccgaatggaagcgaaagtcattgtccttgaaagacttgcaaataattcaattcacccgcctctccgtctgtttttctgtccgaaaatattttgttttttacaattgtaaagctttataaaactgtttaattaacaataagactcgaactgtttgcgtttttgtttggtatacaaaaaattatttcgaatttttctttgtttaattaaatcttaaaaaatttgagattttcagtgccattccatttaaatttaaatctcctgaatgacttaaatttttctattccaattttccttcacagattcttcgctgatctgttcaaagccaatttgcgtcttctgcactctgtgccgggccaatgccaacggcacattggcattgggtcaccgacgtgagcaaaaaaacagaaacaactttaatttattaattttgcattttggtgacagaactcgttccagaggcggccattccacgcgttgccgcgactgcgagccgatcgccgcccggcgaagggcccttttgaatgccacggggttcaggtggtgttggtggtgccattttgttaggggtgaatttcatttgccctctccccgcattttttttaaatcccagaaactgaaaaattggtttaattttttttttgaaatcagacatttaaaaatttttttttgaattacatataaaaatttttttatttcaaaaaaacgaaaaatacgtttttaaatttcagtcttggccaaatgcgccaatttttggacatttgtgcaatgcgaatatgtcgagcaacggcggagccgggtaaacaaaaaacaaaaaataaataaattgctgtttatataattaaaaacaatttgtgactcatttgataataataatttttgttttccttttctctaaggcactgctgtcggtgcaattgcagccacgtcaattggtaattacaat

SEQ ID NO: 46463 - DNA, 1585 bp, Heterodera glycines
atgtccctttttcctgaaggtttcaatcggaccggctttctcatctcggcctatctgtacgaaaagtgcgacatgagtatcgaaatggcagtcagagaatttgcggagtgtcgtccgaatggcatttacaagcagtactacttggacgaccttcgcaagagatacggcgatgaggacgaagacgagatgacagtttgaatatacaatagatcggcaaaacactgtgatttccttttagttccccggaaggcctttgtgggagaacggaccgatcagtgacgacgaattcaccaacaacggagcatttgtcatggaggcgacttccaacaattctgacgttggcattgcttcgaatgggccttcgtcttcctcgaacaacggcacacaaatggcaaaaaacagtttggaaaagactcaattgggaaaatctgccaatcattaagtaacaaaactgtcgggaaaaggcgcgccaaagtttatggacggaaaagttgtgaatgtaagttacgtggaagaaccgaataagcgacgacaagtgcaggacaaagtgattaacaaggtaattgcctaattaacagcaatcgctttttagacaaggcttttttgtggttacggctccaaagtttttccgggaagtcagccggtttcattggaaggaccgcaggggaacaataacattgagtttctggcccaagagccttatatggtctcgtggaaagccgacggtgtcaggtggcgaatttgcgaggagaagagcatttcgaacgaactatttagatatttggtgttgattgacgggaaataccaagtgtacgcatttgacagggacaacaaccccttcttgatacggagcatggcctttattcgacacccaagacaaaaaccgctagaagacgatgattttgtccacgacacgcttgttgatgctgaaatggttatcgaccagaatgaaggccaacagatacctcgtctcctaatttacgacctcgtccgatttcaagtggaagatcgactcacaaaaattggaaaaataattaattgttataagggagaagatttacgtcaaaagcctttcaatgtgcggtttgagatgatcgaaaatgagctgattcgaccacgaacggaggccttcaaagctggacttttaaaacgggaggaagagccaatcggagtgcggaggaaaggcttttggaacattgagtccacgcggagactcctcgaaccgggctttttgagttgtcacgaagttgacggattagtttttcagccagtgaacggagttcgtaattagcaaataactaatccttgaacaacaaattccagggttatgtgtctgggagatgtgacaaattattgaaatggaaaccgccagaattatcatcgattgacttccgacttgacataaaaaaggtggactttttcttttgtttctatttgttttgtttttcaggtaatacgccccggggaattgcccgaattcgtcggaaatttgcatgttctccacgcggataaacctttcgctacaatcaaagcgacaagacagcttttaccatacaacaacaaaattattgaatgcaaattctcg

SEQ ID NO: 46464 - DNA, 2348 bp, Heterodera glycines
atggacatcgatgcggacggtgttgaaatgaagaaaaagcgaatgccggccggcgaagacataggaccaaaattggtgaacatgatcaaaaagttggacgaccaattgcacggtgcgtccattgagtcggcaattgaatcgttggccaacgttttggaggacaatttggacccgtacgagggacagatcatccacattctctacgaatggtcagtgtttgttgcatttgcatcagtcgaggcaccgaaaaacgctcggaagtcgattttatttagaaatcgagtctatgtctattgtatgattcattcaactgaatgtcagactaactgtgtgacatggttgaattccgtttgaaaaaaacgaaaatgccgatgtaaatgaaaattgacgaatttagaaaattagatgggtgctttggtttgtaaaatttttagccataaaagacgagaaaatctgctctaatgggttttcgggggttacgctgatcgcatactgacaccaatttttaccaactaagaattcccaacttaaacttatatactatagaagccgaaatatcgacttaaattatcctaaaaaatgtctccgtcacgctttgattttaatatattttttttcaaaactggcctaaaagataactaactgactcttattgcaactttccacaaaaaaactataccctccgaaattagattacctatatcagtatgtgaagaaattttttttgtaaattttttttcaaatttagtgccgcttatttgcccgagaagatcacaattttctccacactcgtcggtcttctgaatgttcggtccgccgattttggtgagcgattgttgaagaaattcatggacgaatttcatcacacattcaccagcggagaatacgacatttcaattcgaatcgtaattattttttgaaaatttacaataaattatttcatttttactaatttaaggccaccttcctttgcgatctttgcaatgcgcgagttgtgacgccggaatccattgtttcattcatggagaattttgttgacttggccacggaagaaaatgtagtatttttggtcttgaaaaatttcaacaaaaaaattggaagaaaaaaaacctaactttaacacccaatagcattatttttcttctagaatcatttttccgttttcagattaagtccaacttcttcgtgtacctcgtcctgcacacattgccatgggttggcactgaactgtacgccaaattgcccgccaaattgaatgacatcatggcgcgcatttcactctacattggcaagcggacgaagccacactttgatgtgagaattgaaatttcaaaatttttcatgccatttttttggtcgtaaaaattcaaaattggctaattttcgatgcttttggcattttcagatgttgaaaatttggtctgccactgactatcccaagcaggaagactacctggacagtctgtggtcccagctccaaaatttgtgccaaaacgattggatggagcggcacattttgcgtacttatgccttttttgaggacgttctcgtcgcctcgggggcccatcaattgcccgagtaaaaaatggcccatcatttgaaggtaaatttttgaaaaaaaaaattcaggttagaccaacacgttttgatgacaagcaaaaagcatccaatgccgcacattgttttccgtctcttcggcaaagatgacgtcatggaaagcgtaagaacattttttatttggagaaaaagcttcggaattgagtatttaaagctaataaattcactttttaaatctcatttttcgaaaaaaaatttcccttgttcgcttttcatcacaatgtttgaaaaactttcatatgaatagccaaattccagaaaatttttgttattgaatttaaaattttaggatacttcgaaaatttcctttttttcggtttttctttaaaaaaaaaatttttttttttgaggttttaaaaaaaagtttttcaaattaggcgttggagagtgcgctctcggcaacaatgcgtatttgatttttggggcttttacggggtttccacgcccttttgctttgaattttcattttttttaaattttacgattttttaaaattgcccccttcccaccgctttcctgttcaggacgttgtgttgccaattccaaacgccattgaacgctttctggttgaggaggacctgcactggatcatcgacaacaattatttggactggaaattgtgtgcccattcgctgctgcaataccaccgcaaggacactgtgccgttgaattatgtgatcatcgagacggtgttcaaccaactgttccgacttcctgccgcctcgcaccac

SEQ ID NO: 46465 - DNA, 239 bp, Heterodera glycines
ataaaacatgaacaaattttcactttattgagtccgctaacttccaacaaaatccaaacaattcaataacaaaagatcggtaaacaacaatttccgatgatcgcaaaaagaatcatttgagtgggatgaaacgcgaactgtgcgttgcgccgattccgggacgaccgtgtttgacaggcttgtacgtaatagaaaattcgcccaagtaatatccaatcatctcagctcgaatttcaacc

SEQ ID NO: 46466 - DNA, 690 bp, Heterodera glycines
atggctgagatttgtttggcggttaatcgttgcatggaaattgcttctcctaaaatggcacgttttctattcgaaggaaaacgcattttcatttggatggttagtttaaatattatttatcattttaattaatttagaaaggaaacgggcgatgcgattgccaaaatgcaaaaaaacgggcacatgaattcaaaaatggacagttttttaaaggcttggcaaaatgcacggttttaagggccttctcgcaaagctggaagaaaccgggatttgcttacctataccagttttttctaacactgaccgcatatcgctacttacctaaagattaaattctaaaattaaatcttacgactaatgcctgcacatttttttgcccgatggaaaataaattgctgaaatgtaaatttaataaaagcttttgctcaaaactataaataaaaatcatgaagaaaagacttaaaaaattgaaaatatattgaaaataaaatattttatttatattttatggaatttgaaaatatattgaaaataataatatttaatttccttatttttatttttcagttgtttcctgctgcgtatggcctgtatttgtccatcttcaccaagtcgccatgtttcagtagcatttacatcgcttggttctcgaacccgcacattggttatatcagtggttccgaggaaaac

SEQ ID NO: 46467 - DNA, 2165 bp, Heterodera glycines
atggctttccacaaaattgacaatgacagtgtgaactccatcaccaatgccttggactttttccgcatcccaccaactaacgtcagcgtctcatcctccaaagtgtttgaactgctcccaagtaaccctctgacggacaccccctatcacttcaagcttcactccagtcaaaattatattgatctctccaaatgctatttgttatccgagtttcgaattcgcaaagaaaatgcaaatggtcaactggttgaccttgcagctgatgaggttgctccgattcaactgattggacacacattcatccgtaacatcaaaatgagcatcaatggccgtgaagtgttcaacgcaaattctctgatggcctacaaatcgtatttttcacacgaactctcctattcaacagcggccaaggactcgcatttgaatgctgccggttactaccgtgacactggtggtgtgcttgaggtgggagacggatgcactgcacgacgcaacctgtttgtaggcagcagaacagcacaattcatggccaaaattgacgccgatttgtttaaccagcctctctacttgatcaacttttgtgagttggacattgaaattttgcccaacgacaacgactttgtcctaatcacaccacccggtgttgctgcagccactcgctaccatttcgaagttgtcggtctgaaaatgtatgtgaagaaggtgtccctgatggacggattggcgttggacattgcacgaaaacttgagttgaaaccggcacgatatgcagtgaggaaaacgctgatgaagtcgctgttcatcagtcatgggcgttttgaatttacgtctaatttgttcatggatcaaattccccggcgtatcacaatgggattggtggccaatgctgactatgttggcaccgtttcacgcagccccttcaactttcagccatttaatgtgcgtgaaatttccataattgccaatgggcgctcctaccctcaagcagcctacgacttggactacccaaacggaaagtatgtgcgccccttcaacgacatgaacgaagcggtgggattcgccaactcatcggaaagcaacgggattacactagcacaattcggcactacgcattgcatttacgtgttcaacttgacgagcagtggagacgaccaagcggcgctttttgatctgataaggaacgggaccacagcagtgagcatcaaatttaatcaggcggtgcccgctggaggaataatgttggtggtgatgggcgagtgcgactcgctggtgatgttggataagaatcgatcgatcagcactgacatcactatttaaggcacacttattttcattttttccataacgataaacatgtattccaaaaaagttggcgtcattttattccttcttcggatttctcttcccgtagtgtcatgccgagaggaaattcctgagtattctgaatatataagaagaaaggcaatgcttacatccacaaccacaacaacgattccgtctacaacaagcacatcaacaaccaccacctcctctcccccaaaaagtgacaagttaattgaagagcaagtgtcagctggtctcacgccactcatccaattgtgcaaagaccgaccagaagaggggaatttattccaacaagtcgtttgctgggcggtgtttgcattgtatttgatgcttattgtcagcctggttctccatcaactttgctctattttttggctgaagaatggacagcgtgcaaatcacatcaatcttgaacgaaaaccgggggaccgcgcgagtctttcggggctgcttcgccagtgatcaattaccgcctccggtcactctacagtatcccgcagcgctaattgttaaccgggacccacattacaagggagggtctcattggtgcgccatatatgcgaagggaatggaagaaccagtgatttattatgacagtctagcccaaaaaattccatctgtcattgtgtcatcattcctgaataagtttccgatgggcctaagaaaaaatattcgttcctatcaatcccaattagtgtcaacttgtgccccacactgtatagtttttgtgtatcatatgtcacaaggtcattcatttgaaaattttattgagaaattggaaaaatcgacaaattctgatctgtatgtaataataatgatga

SEQ ID NO: 46468 - DNA, 3063 bp, Heterodera glycines
gaatgccagcgtctgtccggtgaccagctgctggactactacaccgagcagtggaccaaattccagttctcctccactgtggtgaatggcattttttcctacttgaaccgacattggatcagacggaacatcgacgaggcggtgcgtcccggaattttggaagtgtacaatgtgagtggtttgacggtcatacatgaattggggatgggtttcatttttaaattctcgaatttcagttggctgtttccatctggaagtcggtgatctttgacgaactgcaccacaacatcacgtccgctgcgctggcgctggtggagaaggaccgcaacggggaacgcatcaccacgcgactgatcagcggcgtggtcgcctcatacagttaagcttttacaaatttggaccccgaggcggggctggggagtcagggaatgggtctttcgttcggcgaccagattctgccgccactctttcgttcgaacacccgctaatttgcattccttgtttccagtcgaacttggcatcaacgagcacgacccggcggcggacgtcggaggaccagcaacagctgcggtcgcccaacaacagcagcagaattcggtggtgcatcgtccgagtgtcaaataccaagtgtaccgcaactactttgagcagcgctttcttgaggtacgcttggatgggttttgtgcattttgaaatttttacattttattttttcactccacgcaaacaggacactcgcaacttctacacaacggagtcgaacaagtttctgcagtcgaacagtgccaatgtgccggactatatgaaaaaggtgggtggtgaacaggggggagtctcgtttacgagcgcaactttcgtcatgtttttctctttttttcaggttgaacaacggcttagcgaagagcgggaccggtgccaaatttacctggacaacacaacaatggactcgctgatggaggcatgtgacacggcgttgatcaagcatcacctcgagctcttccacgacaaatttgaggtagcagaaagagaattgtccattttattatattacacttttttcagtcattgctcactcgtcaacagaatgaccatcttggacggatggtgagatttgcagaatgtcaccacttttctcacaatttttgcataatcgtttttttcagtacacactttgttcgcgtgtgcccaacgggttggccaagctcaaggagatcctgaaggcgtacatcgaacaggagggcaaggcggccattcagcaaattgcgcgtgaagcgtccaacaatccgaagcagtacatcgactgtatcctcaaaaagtgagtagcgggtgggtttttggaaatactgaaccattttaaaggcacaaactctacaatcgcttggtggtggactccttcaaaactgaccatggctttgtgcaatcaatggactgcgccttccgcaagttcatcaacaacaacgcagttacggagatggctcggaatgcgtccaaatcgtcgcagctgttggtcctctactgtgatcagcttttgcgcaaaagtgcacgcaacaaggaggacgagaagatggatgagtacctggaccaagtggtgggtttgtttggttctttaaagtttgaaattttccatagtttctgttttcttaaaaatgctaatataatattcgcattgtcacagatgaccgttttcaaatacatcgacgacaaggacatgttccacgcgtttttccacaagtttttgtgcaagcgcctcgtctacgacacgtcggccagcgaggagcaggagcggtgcatgatcgcaaagctgaagcacatgtgcgggttcgagtacacctcaaagttggagcgtctgctgactgatgtcgcgctgagcagggaccattccgagcagtacaagcaggtggctaacgaaatttaaattttcattgagacagttttaccccatttttagcagccgagaacatccaacgttgacttctccgtcattgtcgtcatgtcgaacgtgtggccactggggcagccggtccaattcgacatcccgcgtcctctcctcgactgcattgactgtacgtttggggaagacgggtggtggagagaggtacaccctgggaaagtgtcattacttttcagcatacacccagtactacaccaaccgcttcaatgggcgtaagctgacttgggcgttgcaaatgtgccgcggtgaattggtctcgacgagcaacactttcaaggacaaatactcatttttggtaagcaattccgacattaaaaattgggtttcctcgtaaaaataaataaatgtttttcttttccagtgcaacacgcaacaaattgccatcctcatgcagtacaacgaacgcaacacgtacacacttgacgagctgcacgtcgctcttggcaccgactttcccgctgatcagctgtgcgccgttgttcaatccttggtcaagacgaatctgctgaagctcaccagcgccgatgggacagctttgaccgagacgaaactcgatgacaaggagcagaaattcacctttaactcggaattcaagaggtgaatttgaaaatgaacgggggtaattaaattttaaaaaatttaaaaatgaatgtaaaataccgttaattctaattatttttcaatttcccgtcttttcagccgcaagctcaaagtcgacttggtccgtgccatgtcatccgccagggagacaaagaaggagagtgaggacgtgcagaagacggtggacgaggacaggaagttggtcatccaggtgagacaaattgacaaatcaattttaatgacccctttcttctccctcattaaggctgccattgtccgtattatgaaaatgcgcaaatcgttgaagcatcagctgttggtggccgaggtgctcaaccaattgacaacgcgtttccagccaaaggtgggggagaatgattttgggtgcaaatgaatgcctttcctttccttttaaggtgccgatcatcaagaagtgcatcgactcgctgattgagaaagaatatttgaagcgctcggaggaggatagcgatttgtatgaatatttggcatga

SEQ ID NO: 46469 - DNA, 575 bp, Heterodera glycines
tttttactttaaaaacagtgtgctgaatgtgggaaaacatttgcgcattgtcaaactctgcacaatcatcgccgtacgcacaccggtgaaaagccatacggggtgagtgatttgggatttgattttcaaattcttttttatggattttggatgtttgaattttaaattattttcctttttcaaaaaacagtgtgagttttgtgacaaggcctttgctcaacagaatcatcttgactgtcatcggcgtattcatacgggcgaccggccctatgaggtgagttgaaaattgaaattttgaatttaaaatttggttgtgcttcgaccttaaaaatttaggcaatttttgggtgtatatggattagcatttggttgtaaaaggtggaacttttttccgtctttccccttattttcaatcattttcattcattttatttttattttaaaattaatttttatttcatttatttaaaaaaaaacagtgcgacttttgtggacagcgatttgcgcattcgaacactttggtcaatcatcggcgtgtgcacactggggaaaagccgtatgaggtgaattaccgg

SEQ ID NO: 46470 - DNA, 1358 bp, Heterodera glycines
  unsure (1)..(1358): unsure at all n locations
tcagaatccaaacaacaaatcgctcgctgatctctctgtttgctaagggatttcatgagcagcgcgactgtttcgccgaactcggtgggctcgagaatgtcactctcgagattgnggaggcacagtgcgggatgagcagtgccgagtctgtgcgtaaatttgccaagatcagtcaaacatttctcccaattgttgtcagatttcccctacgggcctcaatctttcggtggttctcatcttcgccgcacgtcgttcgctggtcagtctttgctttatccgctttttccaccgctttatcccccggcattttttttgctaattaagccgttgatcccacactttcagcggctgtctcccatcgagcattccttcctcctccaatgctttctcccctcttccccgcgctctttcgtcctcaacaccgatttggacacaaatgttcctcctcagcccatttcccacacaatttcattggaaatggcacctccaaaatgtaattactctttgcgcaggtcaaactccatgttatttattggcattttgtccaaatttgtagggattcgcccaatgggccaatggtggacaaagcgcacatcggacagacaatttaccaccgctgggaatgccaagggggcaaaggttgtccgaccttgttgtttatgccattgatcacggtatttcgtccatttggttgataatattacagagatcagtgaagtgttcggcatgcgtatttcggactgttcggtggccaatcattcgatacccaattcggccaattcaactgatcagcttccgatcgcttccggtactcaaatggccatcgtcgacagtgacgggtgggcgcattgccttcttttgcattcttttcccatttgaatgtctgtcttcctcagttgtactgctgactctgatctgctctctgacctacagtacgccgatgaccgtttgctggccgttgcccgtgctaccgtattctccctgcgagagtccgattctctgcgtttctcttgcaaattgacactttgcgttcgccgggaagcccattgtgaagggatcattgtccgttcgcaattagcttaatgggtctgtttaattgcttgtctgtcgccaattcaccctcctcgctgttctgccgctgctccgcactttttctcgcggcgactccaaaatgaatttgacgcttctgccatggaagcactgagcacggaagttcgtaatttgttggcacagtcgagggtctcgagtccatcaatgataagtgggccctctctctttacaggtgttgtcttcaaaggtcacccgttcttcctccgttcttcccccaatcaccggccccttaaccatcgctcttcttc

SEQ ID NO: 46471 - DNA, 1313 bp, Heterodera glycines; identical to SEQ ID NO: 36639

SEQ ID NO: 46472 - DNA, 934 bp, Heterodera glycines
atgcttttcttctcctttttcaagtcgatggtcggcagagaagtgatcgtcgagctgaaaaacgacctcaggtggaattaaaaaacagtgatttcattccaaattcttttcagtatttgtggcactttacattctgtagaccaatatttgaacatgaaaatcaacgacatttcggtgacggacgttgacaggtaaaaagggaccagcaaattgaatattataaaaagtcaatttttgcctcaaactccgaaaacgagttggggctgggaaaacgccattaccccagaatatgtgcagatgattttcaatttttacgtttaacaaattacatttcataaaattcctttttttgtgcaaaatccgttcaaatttacaaatttaaatgaaaagccataagcacttaaaggaattacctatgggaattaaacaacttcccccgcaggcatccccacatgatttcggtgaaaaattgcttcgtccgtggctccgtcattcgctatgttcaccttccgacggatggcattgacacggcactgcttcaggtgggccaataagcgccaaacttggcacctttcccatggtttaattcaattcccattaaaatgattcatactttaagggaggagaaaagaggtccaggcgatggcgaaaaataaaatttggattaaccaattctttgtcgcgacaccctctctctcctcttttagaccccccccccccatcatttagggacatttgcaaatgagtgggggggggtgccttttgtatgaaatgactaattgtgagtaattccctattaattccactctattttaccgcgccaattcaaaaggaaagggcggcgctattttcgctttttcatttcacttttaattaaagttttttctgttgcccataggaagcatcgcggaaagaaattttgcaaagtcggcaa

SEQ ID NO: 46473 - DNA, 152 bp, Heterodera glycines
ttttccggtcgccaaaatttcgttcattgcccgcgacacttcgacggatgcgcgcgcctttggcttcgttttcggcacggcggacggcaaacacaaattttacggggtgaaaacggcacggacggcggaccacgcggtgctctccattcggg

SEQ ID NO: 46474 - DNA, 398 bp, Heterodera glycines
atggcgcacagaagaccagtgaagaaaatggagcccaacgcgcgcgtccccgtcaaatggctgtcgcctgaagcgttcgccgagcgctgcttcaccgcgaagagcgacacgtgggcctgcggagtgatgtgctgggagatcttcgccaacggagaagcgccgtacggacaaacgggcggaacagacgtggcggtatcggtgggtaaacacactttttttttgcttgcttttttcaacttttccttccttttcaggtgatcaacggaacgaggctcagcttcccgaaagatgcgccgtcaaaattggtcgagttcatcttgcagcacatttgggatgcggagacgagcggcagatactcaatggcagcggtccacgactggctgaagcgacacacgtaa

SEQ ID NO: 46475 - DNA, 508 bp, Heterodera glycines
atgcggcagtcgaccaaccaaacgccggtcactcgcacaacgacgacgacaatcactgaacaacagagggaaggcggaggagaccaagtgattgttttatcaatttttcaaatacagccgataagtccgatcctttttctaatttagcagaccaattctgaacaatttgtgcttaggctggaagcaccgcccgacacgcggccgaggttagccaattccaagcaaaaaaaaggactttgttttgtttttaaagggtccaatggagcaccggaacagtggacaatgaaaacatgggcaaaaagaagtcgaaatgttgttgtatttacaagaaaaagcgcagttgggacgacccaaacgcatcgagcgaagacgacgacggagttggtttaattaattaattaattggcaaaagtaaataattaaacagcaaacagacccagattctcttgacttatacgatgtttttttctcttggaccaatctcgacgaatatggtaccaatcgatag

SEQ ID NO: 46476 - DNA, 1544 bp, Heterodera glycines
tttgctccgttcagattccctctctgttgctgcttcggctgaccgttccctgtgcttctcagcattggtcaaagcccatctccgcactccatgccttcatggcaccgctccttttctgtgccgcgttccaatgtgtgccattcattctgctccctgagagagtgataatttgtcgaaatgccaagttcaggtctcaaaactccgctcccatttgtgccgccttttgtcctcggtgagttggcactgctcctttccgtccttctcgcactgtttgttctctgcttcaccaaactccaaaaagagcccagctgttacagggtgaggccatttcaatgggttcaaaaatggacaaacaatggcctatctgatcaaatgcccacactttctaaatgctcactgatcacagatggagtctcctctctgatcagatgattagaattaattaccttttttgctaatgtgagggaccttctgctgatgatcattcacatttattgctaaaacactgcatctgttttattccgaactcatcagcagagtgagcttccgccggcacttccggtctgaccaaattgccatttctggtcgaattctccgaaatattgggctgccggaccatttaattgaaatattataaacaatgtagcaccaagtctcttttttaataatgacgtaataatgcatatattttttttgcagagatgcgccgcttactttggctttgccatttccatcgcttggatttatgccacagcttcggaagtccgtccattttttgcttttttcccccgttctttccccctttgtctgttttctcttttgaggtgatgaatgttgttctgatgttcggcacaatatccggcatccctcaccaaattttgggccttacggccattgcgtggtaagcaaaaaaagggagggggagaggagaaagcgtaaagacaaaaggaggaaaaacaatcaaaagcagactccgatcacttttgagaccccacttaagccacaatggccaaaacgtatgaaagtgtgagacatttccaaaatcaagggccaattcgatcggtgatctgattgcggacgtgaccgttgctcgccagggcacgccgcggatggcattttcggcggccattggcgcgccgttattcagttggttttggcactgtacgaaagtcagtgagcaattctcagtttgattacagatttgatggttggctttggcaccacttttttgattgcggaattgcaggggaaagtgatcattgtgagtgattttgggcgagtggcaattaattttccgcgagggaggggactccctcgtaaatttatgaaatcacaatgaaaatgccattctggctgagtttccggcacagtattccaagtacagtaggcttctttttgaagttttacttcgtttttcaaatgtttgtcaataattgatccaaaatgtcccctccccgtgccgtcgtcagattgagcccgaccccgtggccctggtgatgttcgtgttcctggccctgtctctgctgtgcactttgctgctcctc

SEQ ID NO: 46477 - DNA, 1491 bp, Heterodera glycines
atggattttggttttttaaatgactcgactaacaaatgggggaaaaaccaacgcaattattatgggacatcatatgttgacaaggactttggtggagttaatgattcggaggaggaagagatgcttcaattggaagaagaggacgcgatttcccggcagaagaaaattgagacgggaaattcgttggtcgattttgattgtctaattgcaaattcaacgataaagaacaaaggaaggagcaaactcttcgaagtccttcacatttcagttgcaaaagaaacgcctgaaaaggaaactgcgcaaggaaaaccgctagaaaatgtaattcaaatttactttaccagtaataatgttgcgcagattggcagaacttttgaacaaaacgtgtgcgatctgcagtcagaaacatcaaccgatggagggaatttcgacgatggaggaccgtgcgtttcaaaagaaatgcggcgaaaaataaattacgaggtgccaattttaatttttacagtgctataattggccgcttattatgacgaggacttttcagattcggaagaacaaaggcattcgaaaggacaaagggcgaaggaaagctaaacagcggcattcgcgggtgatgaagcgaacgcaatacgaaaaagcactgatcaagcgcaaatcgcaggtatttgttgggagcagtaaaaattttgttgtggtatttacctttaaagccataaattacttttctcaggtcccaaacatgcgtcgggaaatggagagatatgatggtgaaaagcgtggaattcgtatttctacaatccgttccacaaaattttaatttttgattaaattctttcttgcttttttgcgcacaatgccacagttaaatacaataaaattatcgtttttacttccatcaactaattatttgtagaaggttaatgacttcgcgaattttaagactttggcaggtaaaaatgaatttcattgattaatctgcttggagttttcagcccggagctccccgtcctagggtatttttgcctgatttctggataaaattggttgagcaaccgagcaagggttacaaccgtcttccaaaaaatgccgctgcgtttgagatcgacctcaaaatgtcgcgaatggatgtccgcgaatatttggaaaaaatttacaaatatccggttcgggatgtgcggattcgtgtcactatgggggatatcacatgggaccaccccaaagaccgggacaagagaagagcactttggaaggaagaggaccgaaagattgctatcgtcttttttaaagtatgcgaatactaatgacgcactggaatatccatgttcatttcagaagggtttcattgctgaagtcccggatctgttccccggccgtggcaccgatgctgaaattgatcagatgaagaagttccaagagcaggacgcaaatactttcaacagtcgctttgtcaataggggaagggcagggataggagaaatgctacctatttaa

SEQ ID NO: 46478 - DNA, 4003 bp, Heterodera glycines
aaattttcttgccttggccgagaagctgctgacaatcgcaaaagacgagaatttgcactggcggcagatcgactttgccgaaacgcttctctcattgctgcttcggaaggactgcgacttgccggagggtaaaattagtgaaataccagtagaagcgaaggaggaattaaacccaatttacgtgcggttttatcatgcacccaataaatgtcatcattagaccaacaaattggcctgtatgtgttttttaattgttggtagagcctcccaacttatagttcgtcgttctgttgaacgctcatcattcctcttattactgtttcaggtgttgtgctgcacttcttcaagctgctcacttctgacatcataaacactcgcaaaattgcgtccgtttgtcccattcacattgtcaaacaattaatttattgttgctatttagcattggcttctgtagttcatggttgaaaatacacaggcaaaaggcggttaaggaggacgtcgttattccggtcggttggtgggaaagtttccttctttacgacgcagcaaatgcaccctccgatgccgacaaatgggacagtgccaaattccactcgaatgtccacccgggcttttacacttggccaagcaaattccgtgtgtatgcgccaccgagtgaacaaaaatgggtgagttttcgttaatcagccaatttttatgattttctaaatttactcccttttcaggcaaatcgcaacttttccgaactaacgccaattgtaaataaaaatccaattaaatttatttatatgaacaaattttaaggagcaagcgattgttacgatgttcaaagacaacaaattcatggaaagatttttgacctttttctctctggaggaaaaagtgagtggactttttccaattcaaagtgtttatccctttttcttttccctttacagaaaggaagcgaaaaagtgagtaataatggagaaattggaatgttttaattgttaattttatttatttttgcagttcgatcctgtcaacatgtcattgttttatgtgagtatgatgagtgattaattgctctctaaattaaaagcttttccttatctagcgcattttccgcagcttcaatgacattctcctcccggaattcctcgaaatgctcgacaaattgctggacatcggacacgtaaatagcaaaattgtttatttagaaatattttctgattaatttaatttgcattaatttgtattgtataaaaggaatcgcatcaccgtttggcttccgaattggtcaccggaatggtcagcgggtcgaagctgtggcagtacgcaaaagtcaagaaggtgcaggagcggctggagcaacgattgaccgacacttttttgggccttacggaagaagtcgaaaagaattggggcacggcgttggccaccattgttcgtcatcattttgtcagtttaatcattagtaattatttcatcgtttagttcggtgcgtgtgagccgcgcgtcactaattggcttatccaaatgcttttcggactcgcaaagcgacccacagaaataagcacccaaataaaaacgtaatttgtttgctttcctcacaaattcgttcctttttttaatatttatttaccgtttaggcgtttatatttgctacaatcgggccttaaccaggtgcggtaaaagacgacattctttcattttttaatgccatttgtcttacattgtttagtatgaatggcgaattccgaacgaatggcgccgattgtttgaactttgcatggatcatgtcaacggattgggctgttcctatcaaaatgtccgcttgcgtatcggaaggtgaacaaaatgatcaatgaaatttgggataaatggtgggcccataaaaatagaatgggaaatcggtggctctttttttcggcaatttgcggacaacggagtaccaaattcattctactaaataattaatcaattactcttaaacaaatcaatcataattaaattttaaaaaacgtaatttggcattccattgaccgaaaatggacccttaagaaactgaccacaaatttccgattttcagcaggccgcaaatttcatataacagtttaatttcctttcttcagctgtcttgccaccatttcatcgtccgatttcaagaaagcacttgtcgaggcgaatggaggagaagcgaacgccgacgacgacagccaattgaaacatgtcaccgttgaggaagtgatctcgcgcataaatgccatggtaacgtttgttgattgaatttggtggcgagaataccgcgtgggaaattattcaaattttatcattatccaatcagtgtgattctttttcaacatttttggggggattaattggttttcctataaatgatgcttttcgcttttctagcttactccactgtggagtgaagcactccgttcgtccgttggtgtgtccgccgatgttcctcacaccgaatcggcactttccttggatggcattgtcgtcactcccgccgatgaacacaaacgagaaaagctggcgctaattacactgcttaactacttcagcagtttgagcacgcattgggcacagttactgcgcccatttgcaacgtccatcttccaactgatcccattgttttcacactattccaatgaaaatacgtaagttttcctttttgtgccatatgaagggttgcacagggtgcttcacctccccctccgggtgcaccccaaaatctcgccgccgaaatcaaatcttagaaacttttttaagaaaatttcaagaacaaaccttattagttaaccgaaaaaattggtccaaaaattgtcctgttctcaaatggctaaaagacaattctcctgcgggtacttccccctcccccccccctcccctttcgagaattctaaatcattgatcgcctctatttttacggttaatgctatctctatgtacacttttaatttctggaatttgtttaagtcaattaattaaccactgtttcagtgatgaagaattgagagggtgttgtaatgcgcaattggtgcgttacatgggcctttcaactgtggcctcggcagcggacttggaagaactgttcgccacttgcacaacattgcgcgagcgggcgtcttggtggaagagcaaagtgtggtaaggaaatgatctctttaaaataacaattaagccgaaaaataactacatatttaccattaagccagataatcatggccccaaattggggtcctccaagaaatggttttgtattttggtgtttattttttggctgctttttctttaaccatcgtgttccaagtttacttttttgtaattttagcctgttgcgctttctccaagtgttcgcgttcaccaatcagttcttcatcagtgcccatccaaatggcttttcggcactcgagcaactgatcatcgactttttgtgtgacccccgctttgatgttcgcgtagcggcagcagaaacactcgggggactcatccgagccgccatcattgcagtggaccaacaattcctggccaaggcacgagacatggcgaattcgactgatccaatcacacgtcactcgggcgtcctcgcactttccgtatgtttcacatggaggggaacattttatgccagttaattaatattttattctttcaggccatcgttcgtgctttcccatactcagtgcccgactttttgcccgacgtattgatggcattggcgaggcattcgaaggaaccgcatccaatttatgtgggttccgatcaattgatttactgaaatgttggcaagagtcatgatttttccagggaaagggataaaattttagggagatttgataaaagctaatctcctttattattttatcattttaaggacactgtgaagcgcgccctcaacgaattcaagcggacgcatcaagacgaatggcacacgcataagcttacattcactgaagatcagctgctggtccttacaaatgtgatgatttcgccttcatattatgtt

SEQ ID NO: 46479 - DNA, 2003 bp, Heterodera glycines
tcttcggcaaatgctccccaaaatttgccaacgttgaaaaagcattcaggtggaagagggaaagggccgaccaacggcactggagggagaagggcactgatcggacactttaacattgccattgcctcccctcaggcgacactttgcggacggatgggagcgggagggggcgtcgttggccatttactggaagggccaattggtggtggatttgtgcgggggatacgccgacaaagcgtcgctgaagcggtggggcgaggagacgcggacggttctgttctcagtgacgaaggtgaaacgcgcatcggatttcaattcgtcatttgttttggcccaggcagtcgctgccctcgcggttcaaatgctcatcgaccgtggccacatcgcttattccgacaaaatcagcgtgttctggcccgagttcgcccgcaacggcaaggagaacatcacgctggaggacgtccttctgcaccgggctgggctcgccgctttggatgagacggtgacgatgaaagcggcacgggaccacgtccgaatggcacaaatccttgaagcgcaaacgccaaattggccactcggtgcagaaaatggcgagacaaaggcacaaactaagggtgtttaaggcacaactcggagtgggtaccatgccgtcacttttggctggctgatcgatcagatcatccgtcgggtggacccgcagaagcgcggcattagtcaatttgtgcgcgaagaaatcactgacaaacacagtgggcttaagcgccttccgttgatcggatggattaagcattgcttctcccctctcagacattgactttcacctcggcctccctctgtccctctctcacaccgtttctcgtctcacatttccttccttttggtaccaattgcgtgaatttgtttatgatccacgagtgatcgtcgttcaaggagttcttcatttgcgcacgagaaattctttacgaacgcgaattgcagagaatgcaacatggattcggatagacggagtgggactttgataaaattcaaacgaaataataaaattagatattcagaacaccaacactttcaacaatccgcaattatttgaactcgaacaagcggccgccctcggcgttagtcgtgcgaaagacgtcgccaaaatcttctctctgatgctttccggcgaactgatctcacgcaaatcgctgattcggctgtccaaacctcaaatcataaaccaaattgattacgtgatgaaggtgccattcagcaaagggcacggctttatgtttgaaaagcaccctaggaaagaagtgagaaaattgcaaccaattttctttgtgaattatctatcatatggttaagtttattgtgacaatgagaaacaacaattccaaaaactcgaaaacaggttgcgatatcgaaggcccaaaaaaaggggggcgcgagctaaaaaacaacaatttttcgcattttttgggtggatttgcagtacgtattcgataggtattgttgataaagctccaaatgctaaactattatagcaataagacgaagacaagtcaaacgaatggaaactttggcaaatactactgaaatttaagataacatttatgtttgatatgtacctaaatgatttttataccttttgctcactcaatgggtttcccttcccactcattgccaatataaaccgcggcatttctcacacgtattaaaccgtgttctgttcgtttagggaaaatggctgttcggacacccggggttcggcggatcatcggtgatgatggacccggaggaggaattggtcattgcttatgtgtccaatgggatgaagtccggtaaaaaagagcatccgctgattttgacattttcgagttcgataagcttcgcttaaggcatgggtgagctgacacgaacattcagacgattgaaattggcggcatttgactctatcaaagcaatttccgatggacgaactgatggcaaaaatcagacgcaatataataaatttaacagca

SEQ ID NO: 46480 - DNA, 1466 bp, Heterodera glycines
atgattggaaaccccacggcaatgtctgtggccctttttctgtttgccctcagtctgtccaacattgccaatggcattgtccattttgtccaggtcttttaacattactatgcccttctgctggtccattccctcacatttgaccttgttcagttcgacatgggccacgaacggtccctgcgctttccgcgccagcactccgccggtgcgtccgccgcgccttcgtccgatgccgcaaaatcggcaccgctctttcagccgataagcaatgacttgccaactcaggtgaagtgaggaaaaaacagctgactgagcatggtgattgttcagcttcaactcaccgacaaggacaaagaaaacgtggagaaggccacttcgttcaccaattctctgctggaacggctcggattggccggacagaacgacgctcagcagcaaaagggcgacatccgccggcagccgcccgtctcctcctatcagacggacgaactcgccgcgttgggtgcggatttggcagcgaatcgaatcgacttgcatgtgaggcagtcacagacggaatgccaccatttttgttctgttcaggggttggccagtggtcagattcccgggttggcacccattccggttcccggcttcgctgggccacaggacgcaccgacggtgccgggcgtgaacactatccccggcctcagcaacttcaattacatcgttggtcaacttgtgccccaaatgatccctcccaccaacactttgctcggctcgtccatttcgcggcttttgccaaaagatgcgaccaaaaatttggcaaaaaatgtgttccgcgctgttcaccccgcagcagagaatgttgacgttgcgcgaatgatgggcagatggtttcaggtgaagggttttctatctttgccattcctttctctttttaacctcttttggtattcttttccgcttttcctcctccgttggcactttttcctccctttttggcactctttggcactttttcctcccgttttggcactctccgcttttcaggtgatcaacagtccgcatgtcatccgtgaggcgtgcaccgtttcccatttcggcgctctgaccaacaacacttactcggccactttcaccattctgaagttttaccgtgagggcaattcgaatggtccgcctcgcttttcgcttggctacggcttcaaagcgggcgacacgggccaatttctgctgcactcgagcaattcaccagacgcagagccattttgggtgatcaaactgggcccactgaacgaatacaatcaggtgaaatggatgaaatgccaaatgatggtcttaaaaagccaaaattttgctaactcttacagtacgattacgcggtggtgtccaactgggtacggtaccccgtgttcgtcatcgcgcgggacccggaacggttccatcggcagcacatgaaaaaggttggcccaaaaggcgattga

SEQ ID NO: 46481 - DNA, 1048 bp, Heterodera glycines
  unsure (1)..(1048): unsure at all n locations
atgtcatctgccccttcgattgcttctccaactttgcaggctcctgcttcgtctcaacaaactccgaaaaaatctctgacgcctacgaaagcttcaaaatcgaaatcgctgaagacggccaagccgaaggcaatgaaggcctctaagccaaagttgccaaaagcttccaagcccaagtctccgaaggtttccaaatcgaaagctccgaaggtcaaaactgctaaggctccgtcaaaccacccgtcttacagctcagtaagagatgattccgataagaaataggcaaatattggtcaccttttcagatgatcaagaaagcgatcgctgagttgaaagagaagaaaggcagcagtcgtacagcgatgtaaagcatcattcgatatttaaaaaccaatctnaattntagtctgaaatatctcatgtcccactaccaattgggcgaaaatgcgacgaaggtggttttgcttgagaaaacgtaaattatttttgcttcgttactttttagatcaattccagcctcaaattgggccttaagcgcggcgttgtttcgggtgaattgaagcaagtcaaaggcattggtgcttctggttctttccgtctcggcggaagtggcacgccaaaaacatcggatgtgaaaaagagcccaaagaaaagaattgctgcgaagaagccatcggtgatgaaagcgacgccgaagaaagccaaaaaggccgtcccgaagaagtcgccggctgcgaagaaggcgaagcccaccgctgctgcaaaacccgaagttcctctgcccgtttcgccggcagtgacaaagtctaagaccgcgaaggcactgaagaaagacgtcccgaaaaagtctaagatggccaagagatctcctaaggtacttttttctctgttttattgcacatttataactttgcttctttcgcagatcgctaagaagtcgaagactccgaaaaaggcgacggggggtgcgaaaacttcgcggaaggtcaagaatgtggtggcgtcaaaatctgccaagaaggatgtcggtgttgatgctgcttcgtga

SEQ ID NO: 46482 - DNA, 249 bp, Heterodera glycines
gcgtaccgcttgctgcacagcttacaccgtcccgagtccgccttgcgccgcgctttcgccaacaaatcggcagtgacgagcccacggaccatgaccaaatgccgttccaaacctaataatgtgtagatgatgtacaattgtaatcaagggagtaggacatgatggacaattatagatttaaatcgcggagcaagtcgtttaccgccctatttttttaaatttttaaaacagaaaattgaaagaaaagga

SEQ ID NO: 46483 - DNA, 907 bp, Heterodera glycines
  unsure (1)..(907): unsure at all n locations
tttgcatccaaataaaaaaggaaaaaaaaagttgcggattcgtatcacatcncagactcatatcctaccaacactgaattacgggcccattcgatatnttatgttatttgtatgctatgcatgtcaaccccaannttacaattatttctgaatgtaattaatgccattaaaaaattgtaattcattttagctaaaggcaacatccgccgcncgccgccgctgcgcactcggccgccaccgccgttggtgngtggtggtggtgctgctgctccgaccagccacccgcaccaacaccattatgtgtgcgaaatttgcgacttggcacagttgaccgaccgcgagcagtaccgggtgcatttgcaggccgcacatcgtcaactgttggggaagaacaacgcggaaatggccagcggtgcaccgttggcgtgctcacgctgcagagaccgtttctggacatacgaaggtgctgctgctgaaggatgaacttctttttctccctgtcgtttctccccaaaaattaaaaaataataaaaaattttatcgttttagaatatgctggaaattttaaaaaaatccttttctttcaattttctgttttaaaaatttaaaaaaatagggcggtaaacgacttgctccgcgatttaaatctataattgtccatcatgtcctactcccttgattacaattgtacatcatctacacattattaggtttggaacggcatttggtcatggtccgtgggctcgtcactgccgatttgttggcgaaagcgcggcgcaaggcggactcgggacggtgtaagctgtgcagcaagcggtacgccttcaacattttgcaacgtttggtctccgatcaccggattaaagtatgctaattacatgtttataattgcaaataatttaattta

SEQ ID NO: 46484 - DNA, 547 bp, Heterodera glycines
atgagttcagaatcggacgaacagagtgccgatgttaacggactctgttcgcaatcgcttcgatcagatgaaaaagtgtgtcccgacccggacacaattaaaatgtttattggccaaattccgaaggtccgacgaaatttatgaaatgtttaaataataaatgcgttcttttgaggcgtgggacgagttgcaactgaaggaatactttgaggagttcggtccgatttatcagctgagtgtgctgcgggacaaagagacggcctccagccgtggtgactcacccccccccccttaattaattaattataataatcaccccaattaattcattttggagccaatttccaatttaggctgttgcttcgtcacttattatcaccggaaggatgcgatcagtgcccaaaatgagcttcacaatgtgcgcactttccccggactcagtcacccgattcaaatgaaaccggcggatgtcgaaaacaaaaacggtaaggaaaaggcaaacttcacgaaattagtgacaattaatttaccagtgacagttccgtaa

SEQ ID NO: 46485 - DNA, 1082 bp, Heterodera glycines
  unsure (1)..(1082): unsure at all n locations
tgaacgagtccaagggtaaaatactggacgatgactccgtgatcgcgacgctgggaaaactgagaaatgaagcacagaagtagcaagaaatctgcgaaaactgaccaagtcatgaaagaggtatagacgttttttaatgatcgtttcgaatcgattcttctaaattctaccgccaatttcccataggtcgaaattgtctcacaaaaatactacaagttggctaatgcgtgttcactcatctatctcatgttgcatcgtttggacgagattcatttgctctacaattattctctggactttttgctggacattttcacaactgttctcaagtcaccacaacttgggaatgtgaaagactacgatgctcgcctgtcaatcattcttcaaaatctcttttcggtctttttttactttactgctacaatagttcctcttgcttaaggtgatgtactctcgtgtttccataggaatgcttcacaatgatcaaattctgctcgcttctcttttgctccggatctattctcgctgttgcggtgcagagaatgcctacgaacaggaattggagcagctcacagcccttcctcctgagcaggtgctttcctcggcacacatgcttatgacgaaggcgtttggttcggaattcatgcaacaggacaaagtggttaacctccgtgaaataattttgaatgaggtcagacaaaatgtaagataccacttgcttataaaacatctcttattaaaggttcaatgcaaagtgcccgttttgttgtgttcagcgacaggctatgacgtctctaatcgcgtggaggaccttgcatttgagctgaaaatggacattttgtcaattgcacttgggtcagccgaaggatttgaacaagcggacaaagcgttgcaatcgacaagccgatcaggaagatggattctgctgaaaaatgtgcatttggcaaccgaatggttgactcaacttgagaagaaatttcgccttcacaatccacacccacattttcgtctgattttgacagctgaaattggctccgctctgccaanttctatganntcagtgtataaattaaaaatttact

SEQ ID NO: 46486 - DNA, 1208 bp, Heterodera glycines
atttgccgagaggagacttatgttcgggtgcaagactcaggggatggccgaacggaagaagcgacacgtccgctgacaggacagagcaaaccgcgcacagattttgctaagaaagcggtggtacaaccgatgcgccaagagaagctaagcgtgacagaacagaagacccttttggcaccggacgaacaaaagattcgtgaagaggaagaaaggaagagaaaagtggaggaagaaacgaagaggaaggaggaagaaaggaagagaaaagaggaggaagaaaggaagagaaaagtggaggaagaaacgaagaggaaggaggaagaaaagaagaggaaagaggaggaagaaaggaagagaaaagaggaggatgaaaagaagaggaaggaggaagaaaggaagagaaaagaggaggaagaaaggaagagaaaagtggaagaggaagagcgtaagcaaaaattgaagcaagacgaggaggagagaaaggcaaaaaagaaagcagaggaggaggagcggaagaggaagctgaaagaggaagagcaacggaaaaaggcactttcggaagacaaatcggcacagcgcaaatcaacgctgaacatgcgagaagaggagcgtatcaaagccgaacaagcggagaaggtgagtcttcccgggatattaagcactttttcgccgcttttcaggagtcagctcggcaaaaagcgcgcgcgacgggagcagtcgaagagaagagcaagcagtacacgacgacaaaaacggaagattcattcgcttacaaacgatcaaaagcattggaaccgaaaacggtggacgaacagaaaaagcgcacttttcaaccaattcaaaaacctgatccaaaggctgaagaagcattcgaaaaacaggtgaagaaagaatggcaatggcagaatgccgtacctaaacccattcagatggccgaacttcgtgaacagatgcggcagggatcgcgcaaattacagagcgaattccgagacgtaagccaaggactgaagtcggcatcggatgaggcaaaactgaagacgaaggaggaacggcaccgaactgtcatggacaaagcatcatcagcatttggaaaagcggagcaggagagacgcagacagcgagagcagcaagagagtgaggcggagagagcgaagcgagaaaaggaggaaagagagagcaaagaacgtgaaaagagggagaaagaaaag

SEQ ID NO: 46487 - DNA, 865 bp, Heterodera glycines
ttttcaggagtgccccagggaagtgtcttagggccatcactctttttaattttttataaatgatctgccgtcctttattacaaatgaagcggcatcagttggcataaaaatgtatgcctatgatgttatattatattatgcccatgaaaatgatgaccattcgaatcagttggataaagcaattgaggctttggaaaaatggtcaaaaataaataggttagaaatttcaactgaaaaatgttttgttttatattaagggaaaaataatatgaaaaaagaatattttattaactcacaaaggatttcagaatcggataatgttcgtgacttgggaattataattgacacgaaactgaatttttcagaacatattagaaaaattgtacgaaatgcatatcttagaattttccaaatttcgagagtgttgaaaagcagggaaataaaaactctaacagcagcctataaaacttttgtacgacctcaattagaatatgctactgaagtttggaaccctaatcttaaaaaagacatagataaaattgaacgtgttcaaaaattttttacaagaaaagcacttagaaaatgtggttttgtgtacaaaaaatatggggaaagactaaaaatcacgagtttacataaattggaagaaagaagaaaaattaatgatttaacaacagcttttaaaataatcaaagggttcaccagcctcgatgctgggaaaagtttctttttctcagaaaggctcaggaggcctttacttttacgggtaaagcgccacacggccaaaactcaaaataattttttccataggatagtaagaaactggaataaccttccagttttagcggtgcaaattaataaggca

SEQ ID NO: 46488 - DNA, 1047 bp, Heterodera glycines; identical to SEQ ID NO: 37050
  unsure (1)..(1047): unsure at all n locations

SEQ ID NO: 46489 - DNA, 454 bp, Heterodera glycines
gccatgctctatcgatgcgctcgtcttcggctgtttggctccgctgctgcgcacccctctgcccaatgatcggcttcagcttcacctctcggccaccccaaacctcgtccgattcgtcgattccattttgagtattgtaagtttaggtaattttgtaatagcatttgttttgccatttcagtatttgccactgcccgaaaaagtgatcaaggaacaggcgatggcgagaaaaaagtggcaaaagctgaaaatggacgcccaacagacaatggaagagggccgaattgagagggaactgcgcaaggcggagaagaaggagcgcaactccatgcaccacattctgttcttcgccatcagttcaattaccatctcacttctgttcgcccttcacacgggcattatcgtagtggacacagtggaccacaaagggaagaaaaaggcgaaggggggatga

SEQ ID NO: 46490 - DNA, 3446 bp, Heterodera glycines
  unsure (1)..(3446): unsure at all n locations
ccgttcacttcccccgttttgcttcttcttccccgttttnggntcacacaaaattacgngctctcttcgcggtnttgtccattctctgcgcgactccgccgaattttgtcgatgtttttttgggcgttccttacgccgagccgcccgtcggtgcgcttcgttttgaagtgacatgcgcagattaagcaaatgggggggggggggaaagnacggcaacnttgccnggcattaggaaggggtttgggacctttagtggcccagaacgccttaatttaaaatatttaatattgaagaagccgattccgcctcaaaagtgggacggtgtgcgctccgcggtccgttccgcttccgcttgtgtgccccacgcgcggccctccgaaagggaagcgaacgacgacgcccaactgagcttttccgaggattgcctttatttgaatgtgattactccacacaaggcaaccagaaaacgaagcccatattccctttttgcttatcaattgttaaatttgggtttaggaagcgaacgcttcaaaattgagccaaattttggtgataatccatggcggaggctttgaaattggctcggcacatcggtacgacttctcggacatcggcgagaagttcgtccggcgcggcattatgtcggtggttgtgcagcaccgccttggcattctcggctttgcctccagcggagacaagacaatgccgggtgggttaaatgctggtgacattcgctcaatatttgaaagcacttctcgttttaggtaatctcggcttgtgggatcttttggcaatgctccgatgggtccgttccgaggcaaaagcatttgggggcgacccgcgacggatcactttgctggggttcagtgccggctcagccgcagtttcggcactcggaatgtgcccattcgcaagaggcaaatgggcagcgaatggacaattgccaaacatggcacttggtgtttagacctttttcaccaggcaattcaaattagtggcacaattttggcacaaacaaaaacaggagcaccggtcgctaatgagacgaaagtgttggcacagcagctgaactgcccgaccggtaaagagacgaaccaattttaatttaatgagcaaaaatttaattaaaaagtatttaattaaataattttagacgattcgttggaattaaaagaatgtctccgagagaaaagcgtcgaagaattgcacaatgcgatcgaaaaaatagtctcttctgctgctgaaaagaattgaatttgtttttcaatttttcgtttcacagggaccgactcgatcggacgtgaacttttgcaaatttggcccccgtttcgatggccatttcttcccccgcgacttccccgaactcatccacgaatccccgcccaaacggactctcctcggcttttcccaattggaatcgctcatttacagtaagcaaattggcaaagtattcaaatgccaatttctttgttttttcagcacttattcagcgccaaaatgattctttgactcaatatgtcgtgcccagtgaaaagattggcacttatggggccaccgattttgaggcattcgtccgcgaagttgtggccaaagagcaatactttggacagaacgccaaacaagtccaagcgaaaattgtcaaattttttggcgatgaatacgaaatgccaaaagaaaaagacaatgcattttggttggaacggtacagtatggtaatttagcgaagttttggagttggcctcgaaaatgtgaacaattccaaaggtgctcaccgatttgcactacataatgccatgtgtttgggagtcgcggctcaaaatcaatttgggatggccaatttggctgtacgaaaatgcctattttgagccttcacacattgcggagcaaatcccagtgaaaagcaagcgaaaagccatcaaattaaagcgaacattggcatttcataagcattttaggggccttccacggctcagatcacaatttgatgttcacaaaaccggcacagaaacacgcgaatattacggagaaaagcaaacggacggtggaaatgctcgtcgacgcatacgcaaatttcattttgaaagggtaaaaataggcaaaatgaattaataaaattcaaaaatggacaaaggcagccccaaagtgagctgatgatggccaattggagaatggccaaccaagaagaaccgatgagacatttgctggtggacggaccgaagccgaaaatgaaagaacgggcggacattcggagactgaagttttggcacgcactgaccgagacgtacggcgaatacaatctaatcagaggcacatttggacacccaaaggcggaggaacacgaggaattgtgaaaaacggaggaaaacccgaaatgaaactttcaaaattgattgatatttaatgatatgattaaacaaatgccattaattgacaattaaaatcaattaaaattggcaattaaaatcaattaaaattggctttgtgtgacttccctcccatccaatcggagttttaatgctgcgatggtccgcttggctgtggcaattaaacccaatgaatcggacggagtttctctcatccgtctgttcagcggcgaacactccgaacgaacaattgttccgccgcttttcccagctgctgatcaatcgatttgcaatgggaaacgaaccgaaacttttgactcttttcgccatttccacgaaaattaaaaagttaaactgatcaatttatttatttattgtgtatttcttttgaatgtttgttttctaacagttatttttgatcgtttttaccactgatctgtgcttttggtcggcgatggacggaataaatcggtcagttgagctgaaccgctccttccgcctcacccggtcgcagtccctctgcggcattcgttccacttcggccggcaattaccccgtcatcccggtccgattggcactcactcattcgccaattttggcattctttcactccgtgccatcccattcagcgcacttattccatctgcgacttcgatgactaccggcgcgaagtgatcgcccatccgatcacttggccccgtgtgcccgtctttcggcccattcgctccgcttatgtgtgccgcccccattggacttaccgctcctattggccatacaacgcgtcccgctttgagagccctccaattaaatagtaattaaatcaaatggaagaaaattaattatcggaaattaaatagggcaattattcagcgaatacggcgccgaccctttccattggtcgtatcccttcacagtttggacaaaatatcggaccgattggtaccaaccaaacgatcaatgcaatttaaacgcactttttaaatttttaggtacaaattcgacaacaaattgaatcatccgatttcgcttgcatggaaccacgggaatgtgctgaaacggggcattgtcagctgagcaaaagca

SEQ ID NO: 46491 - DNA, 522 bp, Heterodera glycines
atggctcgtacgaaacaaacggcacgcaagtcgactggtgggaaggcgccgcgtaaacaattggcaacgaaagcggcgcgcaagtcggccccgtccacggggggcgtgaagaaaccgcaccgataccgtccaggttgtcaccaggaacattttgaattactcggtcctatagaagcgggctttacttggcaacaatccaattttggccattttgacccaaacttgaaaatagagatttatggacattataaaaacggcatatgattatgttacaaaccaatacaattgcatgaaacccttttctttgtagggaccgtcgcactgcgtgaaatccgccgctaccaaaaaagcaccgaactgctcatccgcaaattgcccttccaacgattggtgcgcgaaattgcccaggacttcaaaacggacttgcgctttcaatcggctgccatcggcgctttgcaggtgaaacagtttatagctaaagaatcacgccaaaatgagtcaattccagtccaatacttttga

SEQ ID NO: 46492 - DNA, 324 bp, Heterodera glycines
gaccatcttgatcgtgaatattctcgtactgatttttcgctggacgatggtgaacagatgttgcgacagcttgactctgtccgtgaatacatccaacaattgcatgcgcgactcctttcactgaccgacaggtgagcaaaagcctaacattttttggcactttttttgccatggcatgtcattccaatttttttttaattaattttttttcaaggtgtgcccaaatttcaccgctttggcaacgtggcgaacgcatttcaaaaccgctgccggtgatggcactttgcgagtacaagagcaaggacaaaattcacatcagacaag

SEQ ID NO: 46493 - DNA, 336 bp, Heterodera glycines
atgccaacgccgaacctccaggcgggcatgggcaatggcacgcaccaccaggcggagaagggcgagcaccaggcggagaagggcgagcaccaggcggagaagggcgagcgcaacgaggatatgaagaagtcggaggcgaccattccctcccaggccggctggaacgagggcgactcgcagaagctgatgatgaccaactttggcacgccgcgtgacgtgaagggcaaacatttgaagcgcatttgggagttggagttcccggaggaggcggccgactctcagcaaccgacggcaccggtcaatgcggcgccacagcaacagcaacaggcgacacag

SEQ ID NO: 46494 - DNA, 4418 bp, Heterodera glycines
  unsure (1)..(4418): unsure at all n locations
atgccaccagtgaaaaccaaagtggaggaactgtcgctgaaggaggaggagcagtcgaccagccaaaccatcatgaccatgacgcggactcggcgcaagcagaagcaggagatggtgcgcaaggccatccgacgggcggaggagagacagcgcgagttgcgcgagcagtacccactccgagcgacggcggtggtgcaacaggtgatcataggagcgggcaaacagcaactgctacctgggaatgatcaattagcgggagggcattgcccgggggagggaagtggcggtgaaacagccgcatgaaagtgtgactcgatacccttactttttacgattccccgagacagagactctcgatatgcctaccggttaacccccggcactatctgtccgttaaacattaattcttgcatttttgcaggtggcctatgaaccggcgttgttccagcaccaattgaccgctgccgactcttcccaagctgatgaccccgcactgcttgagcccgttcaccaggcgcgacaagttgtgcctgtcgcgcagccattgttcccttctgcgattctcagcgttgtgccgaccatcgtcgaactgctagacgatgcgcaagtggacggaagcggagtctcaggtaattttgcccggagcaaagaaaggcatttgtaccccgggacttatgcatttttaaaaatagttggcgaaacgtgccgacgtgtgatttggagttgctttgtggaggacacggcactttttcttcggcatttcttcgaaaaactcaccaaccgagcaaaacaggtgaagcaaaactggaactgcatttaaattttcaatccgttttccctttggcatttcattccccgtccctttttctctccgttttcaatctttgcccccccccgtcttcaaggagtatctgttggctctgctccgtcgccttgtgctttccttccaccctttgccctctcaaactgcgcacacgcttttgaacgcgttgttcggcttggccatgttttacgtgcgaacccccggcgaaggcagcgaccgttcgttggcattggcactgagtttgtgttggttggtggtgccgttcgtccacggactgtacttcaaggacctaaagcagacgctgaagaaggagcagtgcgaccaggccattatggtcactgccaatgtgccaagcgcaaagaaagtgagatgactcagggaatgcttaaaaagaaaggcagcatcggcaaattgtgctgctttcaggtgattgtgcatggacccgactcgcaacagggcggcatcccgacccaattcccggtgttggaggacacccaattccaacatttgctcgcggattccatcgaattctacaacatacaggcacacgaggcgcaccatttctttctgtacgatccgaagacgtttgtactgcacaacccaagcgcttttgttcggtccgtccctcccaatgacaaatgaatgcttttatgtgcccttcttttccagcgacttttacttcttccaccgctccttttatccccaattgcaattggtccgtttggacattggccaagcgcagcagcgcatccgcgagcatgccctccagcagaagctgatcgaaacgggcaaagtgctgctgacgcacaacgccctgcgccactcgcccgaggcggtcattccgcagcgcattttcttcctccacgacgaattcacgcatttgccctccttcccacgccgcgcggtggagacgtgtttcggcatgtaccaaaacacgagcggagcggaactgcaaacgacggacgcactgcacaaattcgcatggagcaagctgatcgcgaacatgttcgagaagatggagaatgcgttcatgttcggcgacttgcatctgttcatcaacgtgatcaatggcattatggtcggttagccttcgtttggggtgccaatgccaatgccaacgaatgtcagatcattcactgcgaggatgtgctgatcctacgccgatgcatggccgcctatttgggcatgagcatccatttcaactcgctgttcgcctcccagggattttccctgattatgcccaccattctccgctgctacagccagcgacagcccaaccgaatgttcactcaggtgccctccgtgggggggggggggggtacgccatgtacgactccctcccccaattcatgagaaaaatactaagccgaaaagagccggttaatttttacatcatggaattttattgcataatctagggacagcagcagatagaccggcttataaaaagtgccacccttttggttcattcctaaatcctggtcctgtttttcaaaattaaccttccccgcccctctttgttaggtggtggagttcgtctgcaagcagttctacgtgttgcatcggaagccttttctgctgcaaatgttcggctcttgcgcggaccttttggaccaaagcgacagcattttcgaggctaatccgatgcgggtgaaggcccaagtatttattcgcttngctgttggccatggagcgaatgaacgaaccgttggaccaattggacattttggccatgttgccccacccaaagccgctacaggcgctcgacttgtgctaccgcgacgagccgaacactttcaacattctgaccgatgccatggccagctgcgtgtgagtgagccgaatctggggttcccaaccgaaacaggcattcgaattcaatcatttgaaatgggtattgcctctgccgttctttccgttccccggcatttttttttgctcgttagggccattaaacatttaagccgaattgaatttgttgcagcacaatttgtgcgtttgcgcccgaaagtcggcgtgcccatcagatgcttttgtgcatgcaatcgatgcttccccatttggtccggcatatggaagaggagacaaatcagcgacaacagcaggcggccaacgcgctcgctgcgcttaaattggagctgtccgcttatgccacgctgagcgtggaacttcgtgctttggtcaacagttgcgacgtgctcgcgcgtgggccgacccggtcctttgatttggccgcgagcggcggaggcggtggaacggccggtggcgcttcgctggcgccatcctccgcaaatcgtccgcacgcgactgacccgcgtcgcggtcgttcgcttggcggtggtggggccgactctccgcaattctttgatccgccgacaattgtggaggacgaagtgagtcgccagcagcagtcgaccgcctcagcgaagactgagaagaaactgaccgtttccggatccgctgacggaacaacgacagccgcgacggacaacgaagcgatgaaggaacagttcagagggccgcgagacgggcgagtggcacaaaatgccatcattgtttcagtttgtgtgctttagattgctcacgttgtgttcaatgttcgttcagctcggctccgagcgtctgaaggaactcggtcgactctcggtcggtctcgactacagtcgtggtgtaatgcccgagctgttggaccacaaatgccacatcaaactcagcgaagttgccgttgctctattgaagttggccccgtacgactcgaactcgttgggctgtgctgggctacgccattacttcacgcaagtgatgcccgtggtcgactggtccgtggagacaaaccgatccgccattaacatcattctccgtcggttggacaaaaccatcgccaaaatcgccaaaaggccgtccacgcgacgccgtgccaattggggcgtcatcagtttttggctggtcggactgcaccaaacgctgctcaactcgccgtacattgcacatttgcactctctgaaggtaattagggttaaaagccaaaattaatgaaaagccgtcacatcggcttgtgcccaagtcaaagggatgggcgatgcatttggcattcattcagaccatcactttgctctgcttgcggctgaccctcggcgacccctttggcattttggacgaccaaaccgtgccgcctttcactctgtccgcccagcacagtgccggtgccctggccggcgcttacctgtcttctgtccacgccccacagactgtgctcagtgcccactctccgccagcttcgttttgtaacgtcgtgctccgattgacctcttttctgatgaccaatttgggacaggtaaaatctcaaagcaattaattgagtttaaaattgggttttttcaattattttcagctcgttttttcgctcgagatgatttgcggtgtggaaaacattggcccattggcggaacgtcccgaggcaattctgtgccaatttcttatcccaatgtttttgcgtgccgcaattcccggcaaaggtggtggcagtgttttaacatcattaacaaattcacaaacccaaattaagaagcgccacagttccggcccaaagacttga

SEQ ID NO: 46495 - DNA, 519 bp, Heterodera glycines
atgagcggaggagttgattttcccgacccaagtgatccacaggcgaatgagatcttcttcttcagtcagatcactcttggagaggagaaaatgcagactggtttttatttatcgccagtccaataattacgttatattaaaggccacattgaggaggggattacgcatctgtcgaatgcaattgtgacttgctcgaagcctgacgaattgctcagaattttccaacagaccatcccaccggagtgtttcagtttgcttgtgcaggcaattcctggcgccaaaatggtaaattatcacgatttatggaagatgaaaatgaaaccattttttagcgtcggaatgcctcttcatcgtatcgccatgggcgagagccgattgatttagactgtgcaaagattgacgatattggtgacaatgcggtcgacaagaaaatgtttgttttgcaagatgacgagcttgaatgaaatggaatacgacaggaaagcaggccactccaaattatattttgttttgtttcga

SEQ ID NO: 46496 - DNA, 679 bp, Heterodera glycines
atggcttcacgaaaaggaaaggtcaaggaagagcagccggctgtttctctgggtcctcaggttcaagaaggtaagaatcaagcacctatttattttaacaaaatgtacttttccctaatgatggcttccacatacgttttacattatttttttcatatattctccgtttaggcgaaaatgtctttggtgtggcgcacatttttgcgtctttcaatgacacttttgttcatgtgaccgatttgtctggacgtgaaaccattgtcaaaatcaccggtggaatgcgtgttaaggccgaccgagacgaggcaagtccgtacgctgctatgctcgccgcgcaggatgttgcggaacgttgtaagcaggtccgcattttttatttagtttttctatttaagcctatcaaaacagtcccattgtgtttaaggttggcattaatgctcttcatgtcaaattgcgtgcaaccggtgggaccaaaaccaaaacgccggggcctggtgctcaggcagcgctgcgtgccctcgctcgttcgggtatgaagattggtcgaattgaagatgtcacgcctattccttccgactcgactcgccaaaaaggaggccgtcgtggacgtcgtctttgagttgattcaaatgcgtcccgatttttgttgttgtttgagttctctatcgcttttcttcaa

SEQ ID NO: 46497 - DNA, 907 bp, Heterodera glycines
gtggaggatttgttcgatttgaactcgccactacccgccattggccaattggagcccgagtgttctgaccccgccttggaccccgtacttcgcgaacttgacagtctccccgcttttcagtacagacatcagctgaccaaattctacaaaccggagaaggccctgagaaatgtttcgaatttgtcgttgttttgccatttacaattctcagactctccgatcactcggctcctccggcaaagtcgaacagattgaacacgtggtggcccgtctttattttgccatgaaatgtgtgcattctcacaatcagtgtgtgttttgatcgctttccgtttagctgacgaagtgcactgggctctgagcactctttcggcgttgtattggcgggtgaagggcgacccggtgaatgtccgtcttttgtttttggctttctttggccaaatggaaagagtcaaattcaggccattaaatgccttcggcactctctgcacaaatcgccaaatatattcaaagtgccatttccaaattttgttcgcaccattttgccttatctaaggacgtccctttgatttcgctggccaacatttaccatcaagctggcttccttcacagtgccctaatcgtcggacgaaaaggtgccgaaacatttcctttggcgatggctctctctctttgacagcattggaagcgggcgtcgacgtggtcgctttgcacttcactttggccaacatttacgcctctttggtcgtccctttgcctctgcgttaatccctccgtccctttagtccgattttccccacgccctccaattttaccactccacactcgcacttcagtccaattttgagccggccaatttgaggattttggtctgtccttttgcatttgtttgcccctattccaccga

SEQ ID NO: 46498 - DNA, 2702 bp, Heterodera glycines
  unsure (1)..(2702): unsure at all n locations
atgggctttttggttgtttttctgatcgcttctctgttcgcttggctttccgcttggatcagtcggaagttcttgcgcatctctcagttggtcaatcgaatcccgggcccttccactttgcctttggtcggaaatctccatcaaatccggcttaagcccgatggttagtcagattagggccccgttctgtgtggactgtttgttcagaattcttcgagcaagtccagggcctcgcttatatgttcggggagaagaacggacgcatcgcgcgggcgtggctcggccccattccgcttgcgatcatttttggcgccgaggaagtggagccggtgctgggcagcaaaaaactgctgacgaaggtcctcccacacccctccctctgcttctaattgcgggtccccccttcccatggctaacacttaaaaaaagtaaataagccggtgattcccactgtggcactgccattgccaaacccctgcttgtcaagatgttccactactcctttctgtccgcttggatcggcgacggccttttgctcagtaagccgaacaaatggcgcccccgtcgcaagttgctcacccccaccgttggttatttattccgtccgattgcttccgcttactcactctttttgctcagtttcactacgacattctgaaggactttgtgccggtctgtccgtcgcctcccaaaaaattctcttttcacccctcaaaaaggtgtataatcggcatggcaccacattagtgcaaaagatggagaaaattgcggaaagtggagaatttgtggacattttccacaccatcactctgtgcactttggacatcatttgcgaggcggcactcggcgtgaacattgacgcgcaacggaccattcactcggactatttggacgcggtgttcgccatcaaaaatatcattttccaacggatagtcaaaccgcaggtaaaagaacaaccgacggaggggacgacgattaatgggcgaactgttggatgggtagccagttaattaacagttggcatggaattgcttaattgcctattaaggttaattggtgttttcagttttatcccgaatttctgttcaacatttttggggctggcaaagagcagaagcgatgtgtccaaattctacacgattttactaataaggtgaaggccctgcagaatcatttgtcattcaagccataagccaaattaaggcgattttggcacgtaaaaaagcgatggaagaagcgggaggcattgagaaattagtggcgaagaaagtgacggagggaggcaaaggggtgaggtaatcggagaagaaagggcccaagggaaggcaatggcatataaaaatggacaaaagggacaaaggcaaatgcaattttagacaatataaattgccagtagaaaatgcctaaatccgttccgcaaatctcgaaactaagcagagattctttttggagtgttgaaacccgtataaaatacatcttcttcttccgattggcattgttggatttgatgttggacatggagcagcacggccagttggacttggccggcattcaggaggaagtggacaccttcacttttgaggtgtttttctgattgggaaccaatgcccccccccgcccaatttcccgtagggccacgatacgacttcgacagcattgaattggtttttgcatttgatgggtgccaatcccgaggtgacaacggcattcgcgcaattggaatttctcatgcacaaatcgcagatccaatcgcgcgttcagcgtgaaattgaccaattgctggggcccgaccctgaggccgaacttcgctacgagcaattgggcgagttgcgctacttggaagcgtgtctgaaggaaaccctccggtctttcgctgcatgccaattgctttatccgtccccttatctgctttagcctttacccaagtgtaccactcatcgctcgacaggtccaaccgaatcttatctaaagattttcttatcacttaattggtcctttcctttttaaaggtaactgaggacacgcaaatcagtgagtggtgggaagtgtttggctgagatttgcttctcatttcagaggattttttgctgcctgcggngaccggcattatcattgtggcgtcgatgatccaccgcgaccgcaattattgngaaaaccccgagggttcgtttcgtcttctttctgccgatttgcttcttttgttctgcccctttcagtttttgatcccgagcgctttttgaaggtcgactatctgaagcatccctactgctatatccctttcagtgcgggctctcgcaattgcatcggttggcattttgaggggggggggggggaagaaagtgccgacggttatggcaaatgctcaaatcccccaaggccaacgatttgctcttatggaagagaagtgcctaatcacaaagatacttcgttcttttcgagtcacttcaaaattacgcactgatgaggtgagaagggaaagaatcgtttattggacacaacatcttcagatgcgtgtttccgctgaactgatcattcggccaatgtttggtgagtgagagagagacacacacatagagagagagagagaaatggacagagagggaggggggggagagagagagtacaaagaaaactcccctccccaaggcaattggatacgactgcaaaaacgcgaaattggggaactaaaaaaagaacgccaa

SEQ ID NO: 46499 - DNA, 3715 bp, Heterodera glycines
  unsure (1)..(3715): unsure at all n locations
atgggaggattcgtaagtcccttttcccttcaaaataaatttcaattttccctctcagaatgaaggctttcttaaattatcacgccagaatgtgcaattcaagaataaaggcactgggaaagtgttgacaattactgaatcggacattgaccatttgggatggcaaaaactggggaataagcccggcctgaaagtggtgaccaattcaggggtgcaccatcgttttggcggtctcaaagaaaacgtttgtaattattttaagcgtttgaatacattgaatttaggactatgaaagggtttccgcttttacgaatgcgaaatggcaaaagactctaaagaagaacgaattgtctctgaaaggatggaattacggtgacgcggaatttgaaggttatttttttcattatctaatcggtgatatttggcagtttattcccaattgatgtgctaatttaatacaaacacttaacaaaggtcactcgcatttgattaaggtcaaaatctggttttcaatgtggctgaaaaagtggcgtttgaaattcctctttcaaatgtcatgcgctgtcaaaccgcaaaatcggaagcgatcgtcgaatttcatcctaacgaggaatgccctgtccaattgactgaaatgcgctttcacattccttacgatcctgagaatgaggaccaagatgtagttgaggtaaaaaaaagctatgaaagatgagaggaaatcggaggggaatgaatcggagacgggagatgcgtataccctaattcctcccctcactcaagcataaattcaaggataaaaaagcttttaactttttcaaatattttatacctaatcctggctgaattttcttaacgccgccaaatccgcttaattctaaatatttctaactcaacaaaatcactttttatgtggtaaaaattctgttacttgtaagctacaccttatgcgccgggctttttctttagctccaaaacccatcgtctcccgggaatggttttcccaagccgagttcctgaaatgattggtgtttttttcgtttaggagtttcgcaaagaagtgctgcgttttgcagaggtggaaagcgaagccggccaagcgattgccactttgtctgacattcttctcgccactccccgcggtcgttacgaaatcaaagtgtttcagaaccatttatcctttcacggaaagtcttacgattacaaagtgccgcttaaaacgataacacgaatgtttttgctaccgcacaaagacggacgccacatgtattttgtattgcacgtaagtggagcaaaatcatggaggaaaaaaaggaaaaaaccacaaaaataaaccctttttatggcataagggcacaatccttgtgcagaaacaaatggtttgaactttaggagactttaatacctgtttagagactcgatataaatattcatttgtttatgaagtttgtcgttatttcgtctttgtttcaggtgaacccagcggtacggcagggccaaactcgatacccttttcttgtgctcgagtgctcaaaagaggactacattgagctcgaattaggctgcactgagtgagtgacagattgtgaacacaattataattataactagggaaccactcgaaaataagtcggttaaagtgggaatcaatttgatactattggcagagcatggtctatcactttttaaatatttaatattacgcccctaaagcaataaatcaaaaaaatatgaggcccaaaaaatcatttatttgctggaaggaaatcacagcctaaatttcgacttttgaggcctcataactttttgatttcttgataagggcttattaaaagttacaaagaaatcgaccaaactttatcaaatggtataaagtttataccattttccgtcttacatttcggatgattcccttgtaagttttacaatggttttcgccagggaacaactcgctcagcaatacaacaacaaattggacatgcacatgaagggttatctgtttgaaataatggctaaaatattccgtgtgattgttaattcgcgcattatcgtccctggcaacttcacggggtcggcttttcagtcattcctttgtgtaattgtgtgcctttttagtgcctcgggcactcccgccaatttcgtgcgccgttcgccagtcgatgggttttctttatccgctggagaagggctttgtgtacgtacacaaaccggcgcntttacatgcgttttgaagaagttgacaatgttcacttcgcgcggtcggacgtttctttgcgctctttcgactttgaaattgtgcagaagagtggacagtcgatcatattcagtaacatcggaaagtaagcgcaaaaagaaaggggaagttttaaaatgcaattttagggaagagtataacagtctcttcgactacgtacagacaaagggactgaaaatacgaaatgcgcagagattgggcgagaaagcgtacaaagaggcggacaaatttgctggcagcagtgacgaagagttggacccgtacaaagagaagcttaaggtaatgttttcgaaatttgaattgggctaatttgttaattgaccaaaggacgacgcacgagagagagcggccgggtcggaaagcgactcggaggacgaggacttcaacgtggagaaagagatgaagaagcgcaaggcggacaaggactcgtcggaggggtcgggctcagaaccggacgaggaatattcggacgatgggacggatgtatccgacgatttgatggggacagataagggaaaggaaaaagagaaagaaggagccaaaaagaggaagaaggacagggaggagggaaaggaagagaagggaaaaaaggaaaagaggaaggaaaaggagggaaagaagggcgagaagaagaaggacccgaacgcaccgaaacgaaatcaggtgggaacagagaagagaaggagagaaagggagaaaacggaactcaaaaacgggtcggagtcgtacccaagtttgttagaattgctccgcaaagtaaaaattatacaggaggggggtaacgaccgacttaggagaaaatcgccggatgagtttttggaccataacatcaaattaaacattaaagccatcaaacaaaaccaagaatatgcttattgttagatgagagaagcaataataaccttagaaccaattaaaaaccattcaattcagtccgcctttttcatctggcaaatcgaaaccgaccgcagatcaaaagccgggggacagtgtgacggaaacggcggcaagggccgggcaaatgtggaaggctttgagcgctgaggagaaacaggtgggcaaccgtactttttaaaatggaaacagagtcttgggaattttaacacgtttccataaataaattgtgaaagtgatgtccgttattagctgactaattaattactcctttctttttagccttacgagcaaaaggcgaaggaggacaaagagcgatacgaacgggagatgagcgaataccaaagcaagaaaaaggaagcaggcgaagggccatcgtccgcgggacagaccagttcccaaaatcagccgaagaagagccaaagcagccccagcaaaaagcccatctcgaaggaatttgtggacagcagcaattcatccgattccgattaattatttttgcattttatttatttacattttcattattattttgtgaatgtattaacccgaaaaaggatgacaaataaa

SEQ ID NO: 46500 - DNA, 1308 bp, Heterodera glycines
atgtccggacgaggaaagggcggaaaagcgaagacggaggacggaaagaacaaatcgcgctcatcccgggctggacttcaattccccgtcggacgtctccaccggttgctgcgcaaaggtgcattttttggatatttgaattttcgactatttgttcgaaatcgggtccgggcttcggaatttatcgaaatggatgccctgattcgtgatcagtttttaattgggttcgaatttgcatttttcaaaatcacaggtcactacgcggagcgcgtgggtgtcggcgcgcctgtctatctggcagcggtgttggagtatctgacggcggaagtgctcgagttggccggcaacgcatcgcgggacaacagaaagacgcggatcaacccacgccatttgcagttggctgtgcgcaacgacgaggagttgaacaaggtcggacagcagccgatttttgttttttggatcgggcttgtttcgttgtgattaattgaacatgtccatctcgaccagggatggcaaggattccgacatttctgggcctcgaaattccgattccatccctaatctcgacgcatgtttcacacctcaattagtccgccgcaccttgcgagttggcccgcgttgagatggccaagacgaattgggcgctggttctattgcacactttacgagtccaatgccattttatgaattcaatacaattatcgatcctgtttttttgggccttatggtttgaggtcccaaaatcaaaattgctcttgtgactttaaaccgatatttaccacaaaaatataggatttggtacaaaaaaaatgattattaatttaattgattgatttctaaaaaaaagccattggacacataaactgtgtaatagaagccttgggcggttcactatttttgaaatctgtgatttttcagcttctctcgggcgtcaccatctcggagggcggtgtgttgccgaacatcaacccggttcttctgcccaaaaagtcgcagcacagcgaagtcagtgaatgagcggagatggacgagggacaatagacgaaagaaaaaccatcccaaacggtgtcctttttagggccacaatgactcaacctttattgaatttgactaatgcgtttttttgtattttaatgacataaatttttattccatattctaattgaatttatgtatgcaatatggcgctacttgcaaagagcactattttgaaaattttttcaccttttttttggtcaaaatttttttttgtttttttacacataatgatggatattaagtattaacagcacaattatggtgaataaa

SEQ ID NO: 46501 - DNA, 2413 bp, Heterodera glycines
atggacttgccaacccgggaatgccgcgtggaacaagcctgcgaatttatgaccaatctcctacaggacatcagaaaatcagaagagaaagtaagtaaatataattaagatcttttctaggtcaaacccaaatccattccacacttggtttcaagacattaaatcccaaatccataactgttgtttcagtctggttttcccactccctattttaacgactatatggagctattaaaatatttattttagcttcattgaccttgtttacctacctatattcgcaattttagatggtccgtgatattgtttctgacttggaaatccgccgaaaagcagtgaccattctgagggattttttggggttgccttccttcgacgagtcgcttctcccgcccaaatcgatcgcattggtacctcaaattttttctaacattttcactgatttttttaagctgaaagtccttgattcggaaaaaaaccgattggaagcgaaaagggaggaaattgtggggagccaagcgaggctgacgggaaaatacaaagcattgtgcgatagggtgggaacaacggcgcgacaaatcgaaggagtgcacgacagagtgagagagcgattggggagacaacactaaaatgatttgttacagattatgtccgaagatgagttggacaaactcaaaggcgaggtggacgcgctgcagacttttgtaaacaaacggctcgagaaggcacttcagctccaagcggagagcaaacggtgcttggcatattttattaatttcaaatttcgtttcagaatctttgagaccattcgcccgtccatcaatagtttcaatgaagacgacctccattttttgcgtgttgacttgtacaaccaatccaccgtgttatcgtctgactttctgaagaagatggaaaaattcaatgaaagagtgagttcaaagaagggcgatcgaacgaagggcttaacgatctctgtttgcttatgcccctacaaatttagctgaaagaccatcacgacttgtgggctgaacaggtcgtcttccgctatgacgagctgctcgttaaattagacgagttatccgcaaaatgtttccaaccttctacggagtttccagcaaagccaaatttgagtaagtgacaattgtcaaagtaaaagtcattgaaatccttgtaaatttcaaaacgcttatttgcgtgattaatcttatatgtaatctttcagaaaatctgagcgagaaggaactgctaaatttggaggaggaagttcgaatccgtcagcaaatgtacgagcgagcgaagcccgtatttgacaaactgaacgaatggatggccagttggaagcagaaattggacaccgaacggcgtgtgtgtcgtgcgtctttctacaagaacagggctgggagtctgaacacaaaactgaaggtcctttttgtgtagaatggggaaatagggataaaagaaacggagatggagttcggcggtttgaaaacaaccaaaaattgtttttcctctgctaatgggagagtatgtcccttttgttaatcggattcataattttgagcaaatgaaacttttagcaaagaaaaatcgtggaacaaaaagtcccgaaattgctgaacgagctttgtgagttatgcaacgactacgtcaaaaatttccaattaaacgacattattgtcgagggattgcgagctgacaaatacgccgaatctgtgatgcaaagttatcaccaagaccgagaagtgcaaaaggctcagaaggttcttcgttaccatacatccattgattgtttttgaacctctaattacagcagttttcgactcctttgaaaccgtcaacgccgaatcgtcccgcgacttcgtccgcttctcgacgcaatgtattcgtaaccacaaattcgtgtggtcgtactgctcctcgcgcactgaatccaatcggaggaaagcagccgacgccttcccgcaaagatggcgaaatgaagcgcgccactcgtaaacgatccttttcgtgcagtcaattgtccgccatttaccctcttgcacagatggtcagttcgcttttgctagtttacagtcacatctttcatgtaatattcttttattattaagatggaaccgcgcacttcttccccaaaacccgaggaaaatttctaaagaagaaattgggctataaacgataattttattagtggtcgttgtattgtttattctgccgacttgttctttaactcatgtttaaaaatgacacgtacaaatgtatttttttgaatcgcataaattaaagtaaaaataagccgtagatatcaatgacgtgtcatattcgtgattaatagggcttccttttttagggacaaaaaattgcgaaatagttgtaaatgaaattgttaaatagtttaaagttttttccaaataaa

SEQ ID NO: 46502 - DNA, 1165 bp, Heterodera glycines; identical to SEQ ID NO: 37247

SEQ ID NO: 46503 - DNA, 825 bp, Heterodera glycines; identical to SEQ ID NO: 37250

SEQ ID NO: 46504 - DNA, 2234 bp, Heterodera glycines
gaggtaatttacgcaattctacctctttttgggttgctttttcttctttgtttgctattcaaatttcttcgcgcaatttggcgttgtgtttacccctattttattgcacgtccaaaagatttgcgccgtttggtcggtgccaaatgggccgtggtcaccggcgccagcgatggaattggcaaagaatatgcaaaacagttggccaacaagtacaatttttgaatataataattagagttcgacctggacatggatccaggccattcttcggcaatttgaattttcatggctttttccagaaatacgggtgcaggcaaaatatgaaaaaatcctgctccaggtccagcttaggcaaaaaaaaacctggatttctgggtaaactttagaatttttcctgggtttgtccagaaaatgagttcatgaaatcaggaccagatttttttttcaaaatgacgaattctaaaatgttatttaatttttacattttcctataaatttttttcgtttgataatattttattgtttttttacaatttaatttatgcgacatctgctgaattaaaattattagttggtcaaatttcttggtttttacaagtaaaaaagaaatagaaataaatgtaattgaaatttgaccatatattaatcctaataccccaatatcgaataattgacttaaatataaaaaattagatattattaaattttagaaaacaatttattaatttcatttaaattcagaggatttaacttaatgctaatttcgcgctccgctgacaaattaaaagcagtgaaagaagaaattcagccaaaacaatttttgcagcccgaagtcaaatggatttcattcgatttgaccaacgcaaacattgaggactatgaaaaatggcttttccccgagctttcaaaaatggacattggcatgctgggtaattgaaaaatataattgaattagaaaaaaataatgttcgatatggggtcggatctcgggaattttttagcagaaatccggatttttttgatgaatagaccaaaatcggagaattttactttttcagaaaaggtgcctcaaatgtgaaaaatgaaaataataccatgctttttgtctccccaattgtgatgccgccaaattttttttttacaattctctcaaaaaaaacaaaaattaataaaaaaaaaatttcttggctccttacgatcgaaatcatttggaggaaaatttttgggaatttttaaaaaaagcacagcaaaaatttattgttattgttgatatgtttagttaataatgtcggaagttttccgccattaatgcgttttcacgagctccccggtggacatcgaagtattgcgaaagatttggtaaatttaaatgttttttttcaattaattcataaatttccttaatttttgtttatacgaaaaatttatttttatttactttaaaaaaattatatataaagataaaataatttttttgaatacctatatcaaacaaaatatcaaatgccatatcatccaacaactacaaaaaaaaacattgacaaattaaaaacggacaaatttaaatttagcttttgaacacaatgccacacaccattcttaccgcttttgttttaaaacaaatgactgaacgcaataaaggcattattgtcaatattgcttcggtggctgctgttttcccactttttcatacagctctgtattcttcagttaaagtacgaaaataatttaaaatatatttttaaataattttttttaaataaattcagaaatatctcacttggttctcgtcaatcttgcgcaaagattatgctgatactggcattatcattcagagtgtaaagatttaacgtttataccattttttataagaaaataaattaaaaattgaaaaatgttcaatttataataaataaaatcgaatttgtataaaattaataataaattaataattgtttataaattattttgaacaattgaattttaaagtgttcttaataattaaacaaaatttattaaaaagcctttaaattaataatagaaaaacatatattttcagattcttccgggcattgttctcactaaaatgtcacaggaagtcacacacttagaaaaaccgggcttttttagtccgacacccgaaaagtttgtcaattcggcacttcgtacagtaggacatgccgacgaaactaccggatgctttgcccatcaaattcaggcaattttattgtgtc

SEQ ID NO: 46505 - DNA, 1421 bp, Heterodera glycines
atgattgaaataattattctttatgtattattttattcaatcatcatgcggctttgccaccgaataactgcaaagaaaactactttcatccaaatcttcgtcaagactcttgggggaatgacgctgactatttttgcccattccttggacaccatcgagaatgtgaaggcgaagatccaggacaaggaaggcatcccaccggaccaacagcgtctcatcttctctggtaattcttccgtttgttaaacttttcttaaaagaattacggttcaggaaagcaactggagaatggtcgaaccctcgcggactacaacatccagaacgagtcgacgcttcacctgtctctgactttgattggaggagcacgcacacgacgtcagcaatcgcaagaggtggcttaatggggtttttctctttttgctcaccggaaggcgggcgttttgctcgcgggaaggcgggcgttttgctcgccgaaaggcgggcgcattgctcgccggaaggcgggcgttttgctcgccgaaaggcgggcgcattgctcgccggaaggcgggcgttttgctcgccggaaggcgggcgcattgctcgccagaaggcgggcgcatttctcgccgaaaggcgggcgcattgctcgccggaaggcgggcgttttgctcgccggaaggcgggcgcattgctcgccagaaggcgggcgttttcctcgccggaaggcgggcgttttgctcgccgaaaggcgggcgcattgctcgccggaaggcgggcgttttgctcgccgaaaggcgggcgcattgctcgccggaaggcgggcgcatttctcgccgaaaggcgggcgcattgctcgccggaaggcgggcgttttgctcgccggaaggcgggcgttttgctcgccgaaaggcgggcgcatttctcgccggaaggcgggcgttagctcaccggaaggcaggcgttttgctcgccggaaggcgggcgttttgctcgccagaaggcgggcgttagctcgccggaaggcgggcgcattgctcgccagaaggcgggcgttttcctcgccggaaggcgggcgttttgctcgccgaaaggcgggcgctttgctcgccggaaggcgggcgttagctcgccggaaggcgggcgtttgctcgccggaaggcgggcgttttgctcgccgaaaggcgggcgcatttctcgccggaaggcgggcgttagctcgccggaaggcgggcgtttgctcgccggaaggcgggcgttttgctcgccggaaggcgggcgttttgctcttgggaaggcaggcgttttgctcgccggaaggcgggcgttttgctcgccggaaggcggccgtttgctcgccggaaggcgggcgtttgctaaccagaaggcgggcgtttgctcgccggaaggtgggcgtttgctcgcctgaacttcgaaataaa

SEQ ID NO: 46506 - DNA, 689 bp, Heterodera glycines
tttctctatttgtcaacttcaatagagagaaaagacaaaagcaattgggattccaattaccaaggacagtgaagctgatcaacacgtcggtgtcattcaaaattttgggcacagctttgtcaaaacattaaaggtgtcaatttccggtgtcgaatcttatgattccggtatttactatgcggttagggcatatatgatgactgaattgggattttcagaagatgtcaaaaaagggtctatgtgaagcgtcctgctattagatcgatgatgtcgaccagaatgattatacaaacagcggctttaaaaacagagcgtcacgttttgctgatggggccaaatgtgagaccatggtgaaacttaattttgatctcggccgtcagcccaatcttttgcttaataactctgacgtgatttttagcatacatcgtaataccgatgattttctaattatggcaccgccatatgtttccggaaatgcagtcatagcgaacccgcacacatatcgtattaacatacacgatattagaatttatgtaaaaacagtagatgttacccagtcattaaataatgtaataagcaatcagctacaaaccacaccggccaaatatcctatgagaaaaattgagatcagaagtcttttcatcccgcgtggcacttctgatctttcacacaatgtttttacaagcatt

SEQ ID NO: 46507 - DNA, 1297 bp, Heterodera glycines
atggagaaggagcagaagtcggctgacgacattgctgcgttcaagaagaagatccaggcctgggttgtctcattgctggccaaggaccgtttcaagaatctcgcattctttatcggttggccttttgtacactagtatgactttttcgtttcgtaaaacccgtttgttcaggcgaaaacatggccgagggcaagggcgaaggacaggtggccattgttgagtaccgtcaggagaatggtgaggaagtgcccactctgatgctgatcaaggaggcgctcattgtggagaagtgctgacgacgacgacaagcgatatacgagaaatgcgcgcgatattattattataacttttttgttttaatatgatatggtgacacaatgtccagttactattacatattgttgttgttgttttgttggctggccttcgtttgacacggaactctcaattggttgattatattgatggtagataagatcgcggttcgcaactgttatacaaaaacataaaatttatgacattcaaggcgagactatagtcatcgatcacattccgcaaaaaaataatgtaacatttctccttgtacacaaaagactccttccttgtcgtggtggtgtttttatgagctacacagacacagaggacgacggacaaatgatctgctgatgagtcatggttatttttgatgtcggcctcgccccaacgacgatggaatttgcgacgacgaaatttcgtgtgctgctgctgctgctgctgattgtttagtttggtattgtcgtctgtttgcattgggccatcgccaacaacaaacggacggacggaggaaaagtgaggcatgccccccgtcaaaataggggtggggggatgcttatgcaagcgaaaggacaaacaaaacgatcaaattgctttagggggaaggaagggcatttgcttgatgcctcttttttgattgcacaattccctcctcggcgcccgtcggtcaccattttcacttaacatgctttgcttttgcgattagcggctaacacgcgcggcgcattgaagcggagttttgaggcttttttttttacaaataatgaatggaattttcgaaatgttttcccaaaaaattttttttttcgctttcccatttttgtcgaaaaacacgagaaaaaaagcgaattctcatgtttggcgtaagttccaaaatttacttagccggctttcatgtcattgaaaaaaatttttttttttgttttgcatttcttatttttggggtttccttttccgaagttatccaaaaaaaaatgccaataaa

SEQ ID NO: 46508 - DNA, 1380 bp, Heterodera glycines
gccgtcgttgtcagtgcgttggtccttgttggctatttggacgaaaagtctcgagacaccgtaaaaactcgaaaaatttttttacaaattttttttttttttgattttcaggtgtacagtccccaaaatatttcccaaactttcctctgcattttcaacattctctccagcgcctcgcccgtcgatgatgtgctaatgaccactcatattgcagccgatttgctccatcggctggtgatcggtcagccaaaaacggtaataattcaatatgaaatatttgtcttttttaaattaaaaaaccatttcttatttgatactttaattgtttttattttactaattcatctgttcgtttagtttagattgcttctcaaaaaattttaataaaatttaaaatattctctttttactaaaaaatcttcttttttttgaaaattgctttgtttgatttttagagggatggttaactttagtttatttattagtttaacaaattttcagttggatgtctcgataaatttttttttttttttgaatatttttttcccccgatttcagcccaatgatctccctctgttaaatgcgaccgcacggaatttgaccacctacgatttctttgacaaatccgttcaaaaaacggctgctcttctcaacatgttagacccgcggtctgaagaaagtcgcaaggtgtttttctcatttttttcaccttaaattgtaggggaaaatttgaaaattcaacatttaaaatgaaataataggtgattttgatgaaatttactaacatttttgctaataagaattactgattgtgcatgggcctttagtttggcgtcttttgccggctggcgattgtggtgctaaacgagtcatcccgtggtaaattgacacgctgtttataacaaacccttttccaatggccgcaaattggaagtgtaaaaaagcagcaacaatacttttttcccttcacattacctaaatttttattgaaaagggggatttaaaaaatgggcattgacagatttttataacggtgcttattggacaaccctaatttcagacgatgagctcgcctctgactcgttcccgatgaagttggtcgacgacctgatctacgagttcaagggtcgccatgtcgtgcgaaaggagggcgaaattacgatgagcggggcaaatccgtcagcggaggaaattgacgagggcactgaagaggcggtggaacgcggcattgactttgtgctcaaccatcgactacaggagatgaattgttacgaggtttgatgggactattgcttaaattttgcgtgtgacatcagttatatttttaccgtttagaaccaggcaacatttaaaggctacgtcaaggacttcatgaaaaag

SEQ ID NO: 46509 - DNA, 945 bp, Heterodera glycines
atggtccaagtggatgccaaattggacaaaaatgagcgcacattccttgcacgggcttacaaaaaattgatcgatgttcgtcgggaaacctggcgttttttctgtaacatggacgagaatccgcaggatgccgacacggaggagcaaaagcaggtggaaggcgtgatgtcagcggacaatactttttaatgttttttccccttttacaggccaggaccgatctccgtttgaaaacgcatgagggattgctgcaactttaccgcgaatttttggttagttttggatttttgttggtttctatcactttgtttcatttacaatttgaggatgtcattaatgaaaagctcctgccaaacgccaacgacgaagaggcgagtgtgttctaccacaacatgaagggcgatttctaccgagaccaggtcgatttgttggaggaggatgaacgtgccggtaagggtttttgtttcgtttgtttcccgcaaaaattttcattcactttcagaaagtttgatcatttcggaaaagtcctacgaagaaggctttaccattgccaccacaaagttgaaacggtccaatccggttcgcctgggcttggcgctcaagtacgctgtgttccaatttgaagtgttaaagttggaggaggaggcgcgtcagctgatgcagaaagtcaactttttgttttccttttttttgttggaattaatttgtaaattattgtaaatttaggctcttgaggatgccaatgatgaactttgcgaaaaagaagcggcaggggacacggaagctgctcttctgctgatccagaagcaattgaccgcgtggaagccgaagaatttcgctgaagatgccgctcaatgaaaaacggatgatattttgttgctgtattgtcatcgatcattaattaaatgtagaaatgggagtttaaaattgatgttaacttgttga

SEQ ID NO: 46510 - DNA, 787 bp, Heterodera glycines
cggaacgaggctaaagttgaggtcgccgttgagccaccaacggcgatagaccaacgggtggacgacataatgcaaacgggcagatttggagacggccgattggtgaagatggaagtggactatagcgctcaagtggacagtcagttgatagtggcagacaatttggccaaggtatttgcaatggccaagcaaattcagtgaggaaacaaagttttttcaggaggggaagactgccgaggcaattgagtccttggaaaagctggaaaaggacagtcgcataaattgcgacatgcgttccaaccagcgcctgttgtgccacatggtcaaattggcatttgacgcgaataattggcaattgctctgcgaaactgcgaagacattgtgcaagaagcgtctgctgatcaagtcgagcatcaagaaaatggtcaagagtcacgcaattctttcatctgaaccgcaatgacaccaaattaaggtccaagaatgctgcgaaatggtgccaaaagcgccagacgcgtcgtccaaatcgacgctcatcgacacactccgcgcagtgactgcgggaaaggttatgaaaaagcaaaacaccacggaaggaaataaggcattttattttcagatttacctagaggtcgaaagagcgcggctgaccaaacaagtggccgaaaagttggaagccgagggaaaattggacgaagcgcgcgaaatgatgatggaactgcaagtggagacgtacggcacgatgcaaagaaaaaaaggtgccattgggcaattcaacgaacaatgg

SEQ ID NO: 46511 - DNA, 1521 bp, Heterodera glycines
tcaagtgtgtcgtgttttacttgctgctttcggctcatgacaacgaaaaatgggaacttttgcatcgagtgaatgcgatgagagaattggaacaaatacccaaacacaaagtaaagaaatacctaaatatcaagtcacaaaaaggcaacatcatcacgttttaggaactgctggaactgttcatccaccaggaattgatcttttggagcaaaaccattgagtccgaattcgccccaattttattcgctgctcaaccgccggtcgaagtcatttcggattcgtttctcccgtccacccacgttgtttttcgcacatttagcatttattgttagtttttttaggtgtttccgatgaccaaagaggatggtcaaaagcgcagagaacgccttcatgactgtgtgggggaacatgtgagtgattggaaacccaaaaaacggtggcaccgaagcgttgccattaaaaaaagttgtcgagataaaacccgcctgaaaattatctaatagcctataattcttaaattttcgttttaaattttatcggcgacgttttgtcccggcaacatttcgatggcgaatttgcattttattatctttgaggactccccttagcttttgttagaatgtgcgaatggtggccaaatattactcgcggatcactttccaacgaatggccaaacttctcgaattcggaattgaggtatttattttgcattttgtttatcacaaaaattatcattatccaggaaactgagctgttttctttaaatttgttctaaaatgcaaacaaaattttaagaaatcaattagttgtctaattgtaagtacatctagaaatatttaattgacaataataatgctttaaaaccactttaatcatttttttgataacttgaactaaaacatggtcactcagaataacaaattctgaaatgttatccagaaaattcatcttaacttggatttcttggacaaaaagccaggttgccgaaaaatggactggacctggatccaggaaaaatccagcccaagtcgaactctgtttattatatttcagcaaatggaagcctttgtgtgcaaaatgattgtcgacggagtaatccccgaagtgaaaattcaccgcccttcgcaaattatttatttgagcccgaaaaagaacggcgcagaagtgctggacgaagttagaccattttatttactcattttgaaacattttctgtttagtgggtttttaacgttcgcaaattgaccgacacaatgaacaaagtcagtcagctgatcgcaaaggaggaaatggttcacggattgcaaatttctcagcggatttgaccgatgatatcgatacaaagaatcaattgattgttttattattgttttcccaaaaaaataaacgaattttccgtatttcatttttttaaacttttaattttgttagtttaatattgttagttttttttcttcattattttattttttgttcgtttgggtgatgaaaaacgttgacctcaaagattctcccgatgag

SEQ ID NO: 46512 - DNA, 797 bp, Heterodera glycines
atggcgcaccctgccggagatgtggtgagcgattggtgcttttcattttctttttctatgtcatttcattttttcaatttttcagaccgacgcccaagtgctggagatgtcttccgaccaaattgacgaacgcgtacgacagctcgacgaagaaattcgcgtcatgagggacgaaatgcgcaaaattgcgtacaacatcaaaacaatgggaacgaagacgaaggagaacaacaaacagatgcagaaagtgagcaaacaaacaaaaggaggaacgacaaatttatgacgaaaagcattttcagtacatgaaaatgccgtggctggtggccaatgtcgtggaaattctggacctcgcggatgaccaagcggaaggagaagaaggctcgagcagcgacttggacgcgcgtcagaagaaaggcgcagtcatcaaaatatcgaagggactcgtcatgtttttgcctcgcattggtctcgtcggcccagacgagctgaagccgggggacctggtcggcatcgacaacgacacttatcacatcatcgcaaaattgccgccccattttgaccgacgcgtcaaggccatggaagtggtggaaagaccgacggagacgtacagcgaaattggcggatgcgagacgcaaatcaaagagttgcaagaggccattgtacgtgtcaaaaaacaattttggatcaaaacttcccattttctcattttcaggtgcttccaatgaccaaaaaggagctgttcataaagattggcattcatccaccgaagggcgtgctcatgtatgggcctccag

SEQ ID NO: 46513 - DNA, 892 bp, Heterodera glycines
ctattaacagagataaagaaatagtacgccaaaaagcgacccttccgccacttctctttccccgtgcatttgacgggtaaaagctgcgactttagaacaattaattaattgccaaacaaaatttaaatttttctttccctttaaaacattcgcattttatggttaaaagagatgaaaaataagagcatgttttttgtgaaaaacacataaaaggaaaagaaaagttacaatgcaatcatttttcataattttaatgcattctgctgatggttcaatttcctaattctcattttaagatccgaataaaatccgatgtcgccttcgtccatttctattcttttgggggcccagtggggcgacgaaggcaaaggcaaagtgttggattttctcatcggacatcacaaggtcggttacggtgggcttctggaaatccttcgttattgatgttccgaagggctttctgcatatcttttgttgttttgtttgttaaaccctctcactttctcagattgacattgtcgcgcgatgccaaggcggtaacaatgcgggccataccgttctggcaaatggccgcgagtatcatttccaccttttgccttccggattggcctcagaaaaggtgacccaaaaaacaaaacaaaaactaatgttgctgttgcaggtgttgaacattgtcgggaacggagtcgtcgtcaatttggacgcccttttcgaggaattggagagcaacaaaattgaggattcggcagaccgactgttcgtcagtgacagtgcccatttggtgttgcctgtgcacatcgcaacggatatcatgcgggaaaatgcgttgggacaaaactcgtaacaaacggaacattaaacatcgatcaaattatttacatttttcagaaaa

SEQ ID NO: 46514 - DNA, 930 bp, Heterodera glycines
atgcaaaagcagcaccagcaaaatgcgttaccgaaggaatttgtcgcggagcattttccgttttccaaattcttcgaaaatcgacgacatcaatccaatttactcccattgaaatttgaagtgagagaaatttactatagagggaaggaaatcgcaaaatctttcacacttttagttacgtgactttgaagaagatttgacgattgcgttggacggatgggagcggataaaagacattttcaagaagttggaagagttcagagcattcgaattgcttcgcaatgggagggaccgcgcgagttatttgcttgtaattgtttggcagggaactcttacaactaacgacttctccgctttaacccattgtcaggtgaaagaagcgaaaatcatcgcgatgacttgtacccacgcggcactgagacggcgcgagttggtcgacctcggatttcgctacgacaatattttgatggaggaggctgcacagattttggaggtggagacattcattcctctgctgctccaggacccccaggacggacggtcgcggctgaagcgatgggttatggtcagtttagagaaacaatgggtttggagatgacaaatgtcttgcagattggcgaccatcatcagcttccccctgtcgttcaaaacgttgcctaccaaaaattcgccaacatggagcagtcccttttcgcccgtctcattcgtttgggcgtgccatccgttcagctcgacgctcaagggcgtgctcgtgctgaattggcctctctttacaattggaattataaaaatttgggcaatttgccacacgtcctcgaacaacgcgaattccaatgtgccaaccccggtttcctgcacaactttcagttcatcgacgtgcccgattttaacggtgtcggggagagcactcccagtgcctatttttaccag

SEQ ID NO: 46515 - DNA, 1583 bp, Heterodera glycines; identical to SEQ ID NO: 7967

SEQ ID NO: 46516 - DNA, 255 bp, Heterodera glycines
atgtccggacgcggaaagggaggaaaaggacttggaaagggaggcgcgaagcgccatcgtaaagtgagttcattttttttaacaataaaattcctctaaaattttggaaattctttttcaacaaaaggttaaaagtggttgaattttcccaaaaaatgcaaaaataaatataccaatcattcagttgtttcgaatttctcatttctcaggtgctccgtgacaacatccaaggcatcaccaagccggccatccgcc

SEQ ID NO: 46517 - DNA, 642 bp, Heterodera glycines
atgcctccaaaaccatccggcaaaggagcgaagaaggcggttaagtcgaccaaggcggtgcgcacgggagacaaaaagcggagaaaggcccgcaaggagtcttactcggtaggtttttctgaattttttagggttttctgttttagttttccaatggcttaacaaaatgaaattataaatttaacccggctttccaggtgtacatctagctgtgctcaagcaggtccaccgggacaccggcatttcctccaaagcgatgtccatcatgaactcgtaaggcccaatttggcgtttttccgtcccaagattctcaattttcccatttttaaggtttgtcaatgacgtgttcgagcgcattgcggcggaagcctcgcgattggcccactacaacaagcggtccaccatctcatcgcgcgaaattcagacggccgtccgaatgattctgcccggcgagttggccaagcatgccgtgtccgaggggaccaaggcggtgacgaagtacacctcgtcaaaatgagcaggagatgatgaaagcggtggtgatcggacggaaaaaactatcccaaacggccctctttagggccacaatcactcaaatggacgcgaatgacactttttttcctgttttgtatttgaacgcaa

SEQ ID NO: 46518 - DNA, 747 bp, Heterodera glycines
atggggcaacatccagaagacatcgcaacaattccagcacatgagctgcacctcaacgcgccattcaacatccggaccatctacaacttccgcgtacgtttgtcggtttgggaggctttctctgctaagtgatcaatcattgtgcaatttcagctgatcaacacgggctcaaagcgcattgggttcgccttcaagacgacgaagccgaagcgcatcttcctgaacccgccgtgcggcaccgtgggcgtcggcgacaccgtgaacgtgatcatcaccgtggcaaccttcgacccgaataacgaggacatcaagaacgaccgcgtgatcgtggaatggtgcaacacgcccggcccgtctgacaccgtgttcaagctggagtggttcggcgaggatggaatggtgcgccgcaagaatctgccggtcatctacaacctgtagacgtgtgcttctcacaacggacgagccctgacgacaatgatacattttgtgtgctctgtatatattgtatatttatgcgcctcccccgttttgcacatcgaattgtagctacccaatgttgtgtgtatgtacccatgtgtatatttgtgtcatcaccgttttgcacatcgaattgttgctaccaaatcgttgtatgtatatatatacccttcaccgatgtatatgcttattcactgtgtcttgtattgcatgtgtaattgtagctaaaaatatatgtgcatggtgcattttatgccgttgaccattaaa

SEQ ID NO: 46519 - DNA, 815 bp, Heterodera glycines
gtgactttggtgaggcgattgaactcggaaattctgctgaatcgcattctcaacaatccgaatgcgcgccgtccgctggagaagaccaaacagataattgtccgacgcctcaacggggacgaggatgacgtgcaaatggactcgttgaaaatctcactgatggatccggtgaatagaaaattgaaatataaaaataaaattgctgtttcttttcttctttaattagggcttgggttttagggcatttaacctcctccctcccccaaaaaattttaaaaaaattgaaatcataattttacgcaaattttagttgatgcgcactcgcatcaaaataccatcacgagcagccgagtgcacgcacttgcagtgcttcgacctgaacagctacctgatgatgtcggagaagcgaccaacttggaagtgtccggtgtgtgaccggaatgccatctactccaagctgatcattgacgcgtgcgtatttattaattcatttaccatgaaaatacgcttgcttcttcagctacttcgagcaagtgctgtccgccgtcgcttccggcgatgacgagattgaactgctccgtgacggctcgtggcgcttgccgctgccacccgacacaatgggcgtggactcggacgaccaaaatgttggagtcgctgcggctgcggcggttggtgactatggcggtgctggcactgctgaagccagtgctggtggagatgacgatgatgacatcatggtggtgacaatgcctgtggctaagaagcagcggcctccgggcggtgcgggtggtgccagcgacgctgtgtcttctgac

SEQ ID NO: 46520 - DNA, 1115 bp, Heterodera glycines
atggcccaattgtgcaaaaagctggcggagaaacgcgtgttcggctcccgacttatggccaagacaacgtttgccatgccaaatcactcaagctacagcaatttgccacttccgggcatcatctacatttactgtacattcattttttacaaacatttcattttgattgagacgattaggcatgcaaattcgaaacatggactgttaatttattttgcagatgtatgccaaaaggtgctgtttgaccgggtcgggaaggagaacgagttcaaggagtactttcgcgaggcaatgcgcaaattggcggcgcggtaaatctctgtttgaatttggattttggaaatttttttaaattcagctgccgtcgtgtgcgtcatgctcgcaagttccaccacaagcagccccaaggggtagagttggctccatcggtgggtgtcgtcgtcggtcagtcgcccttccaacagttcgccggccgtcccgtcgttggcccaaatgccattgtcgcgttgggccaccagcagcagcagcaacactccatgaccaccagcggtgccgctgctgggccatcagcggcgatgagcggcagcggcattggtcagtcgcaggacacagcgcagacaatggcggcggtgaacgcggcactcgccgaattggcacaccggcgccagcaacagcagcaaatggcactgcaatcttcgcttggggttgggagttcggagaataaaacgaatgaataagtgaatcacacccatatccagaaagtggcacttttcctcataatcaaaggaagggcaacttttaatttgttgttgattttttaattaattctacaaatatctaattttgcggcaatttgggtcaaaaaaaatgagaaaaacttaggctaattcgggtcaatttgtacaggatgggaaatttaaaatatatgcgtataataatgtttattgtagaaagagctgaacgagttgcccccgtgttcgtccggcagcggcggatcgctgttggcatcgatggtggagaacggaggtggcataagcggcggcggtctgctgaacgtggcggcggcacgcgaagcggtcgaacggatggaggtacagaaaaagcggaaaaataaa

SEQ ID NO: 46521 - DNA, 1316 bp, Heterodera glycines
atggtgcgcacattgaaattccatgagaaaaagttgctgaagaaagtggacttcatcaattggccggccgagttggacaacagtcttcatgagaacaaaatcatgcgccgttaccatgtggagaagcgcgagcactacacactgtacaacaaactgtccagagaggtacgacgaataatgaaatttgaacttgtgggcatggttttcatggtaaaacgacgaaaatatttccaaacttttgaaaattacaactgcttaggctgggcctcccaggcttaaattaacaaaattctgtacgttttgcaattgatgcgttgcttttagcgggttgggcaattcgggttgtccgcaaattcaggctgatggccagggggttgggggtggtagaacccgggaatttcgaaatttgctgacctcggtgcgctgcatgattgaaacccaaaaaagggttgcgattttgatcgaaaaattcgacttttgcagggttttttttgggggggggggaggggaggggtccgtgccggattattgagttttttgacgggtttactgggtttacaaccagagtttttccttcctcataaaaaaaaccttttttttgcagatccgagaaatggccaaacgcatccgcgagttggacgacaaaaacccgaacaagttggtgttggcacggatgctgctcggcaagctgttcgacatgggcgtgattccgaccgcggacacgctcgagcgatgtgacaaagtgacggcatcgtccttttgccgccgtcgcctccctgtcgtttgccacaaaatgcaaatggcaccgacggtaaacgcagaccaaaacaagcaattgcaacatgcattttcatatgcttgctttgagtgatggaaattagggtccatttttatacggaaaaattttcaaaaatgggggaaaagtatttttgtgaaattcaaatcttgttgggtaaaagccttccggtccacaaaattttaaggcaccgcctgaaaatttagggtcaatttgtttgaaaattgagtaaaataaaataaaaaatatccatttttcctggattttatagggtaaaacctttgtacgcctacaatattttctgtttatggacacttttcagttatttcgttttcaggttaggaagtccagccaactggtggagcagggccatgtccgtgttggtgtcgaaatggtcactgatccggcctttttggtcacgcgaaaccaatcggatcacatcacatggacgcgggaatcgaaggtccgaagacatctcagcacttacaacaacgaattggatgactttgaggggtgttga

SEQ ID NO: 46522 - DNA, 111 bp, Heterodera glycines
atgggcatttcccaagacagatggcacaagcggcgaaagactggggggaagcgaaaccccattcacaaaaaacgaaagttcgaaatgggacggccggcagcaaatactaag

SEQ ID NO: 46523 - DNA, 856 bp, Heterodera glycines
agttgggaggagactgcgttcgaacgttttgaggggctcaaggaaatgtttccgacaccggtgcgctctgcgttgtccaccactgtgcaattgacatgggtggtagcgcagaattcggttggattttggggtttttttaatttcagggtaccgatttcgcgaaaaaagagtgaagcttccatcccccaataatttttttttgaaattttcaaattttccatgactgcaaagattcacgcttatttcaatgtatgccataatttattcttgggaacattcaatagcctagcctagctttattctctactatgttagcctttacaatctaaacaaaaaaaaattcatttaaaaatgacaacaacagaatttttcaactcttgaaaatttttttaaatttttactctgtaaatttttggaccgcgcaaatttcaataaatccaaaaaaccgactttttcgatagaatttttttttttgccagttctcttttgcacgcagtgctgcttgggtgttgtcgaccagcgcgctgctcatggtgatgccgtacattgtggacaaggagttgcaagatgtggagaaggcacagttgaaacaacagcaacagttgctgctcggtggacggcccagctgaaatgattgattttgatcaaattggtcgatcagagagcgcaattttcttgatcagcactgattgatttcgatcactttttgttgcttttttccattttttgattgtttcgtttgttgtgttcacaacaattagagcgcctttgccccgtttaccctcaaatcgtcgccattatccgccgtttttctttgtttgaccaatttcttcaagctattgatacataaaatttt

SEQ ID NO: 46524 - DNA, 2022 bp, Heterodera glycines
atggtggaacgcttctttcccaacgatccgaaacgtgtggcactgatccgcagcacattcaccggactgtggggccttgaggttgaagacgaggcgacccgagaagtgattgaggtagtgaaatgtgccaaaaacaaataaatcttcatttaattttcgtaatttaatttttttgtaccgtacctacgtgttgggtcgtttcgtaaaatccgcaattttagcagccttttttcgacaaaaaatggcatgacaatgcttaaaagcaatctatttgcattcttggtagcgttgatagcccagattttctctgtattagcatacgaaatttgagaaaaatttggtcatcttttgaaataaaaaaattttcattttaaggatgctattcgttcgcatggcaattatgtgctcaaatcgcaaatggaggccggacttggcaacttttttgacgatcagctggccgaaatgctgcaacagatgagcacagaggaccgaggagcatacattcttcaacagagaatcaaaccgttagtggtcaaggtgaacaaaagatataaatttgtgatttttaaattgaaaataattttaaaaaatcggaatctgttaaataattttaagaaaaaaaattaagttaaataaagctattattagtttatctcataattatttgcatcctaaaaaacggtgattatgtcaatctttggttttattatttctttggcaataacttttttaaattttaactatttgagttaaaattagcttcatttgattcaaattcggtattctgcaccgaatgataccaaatacaaataatttgtttttacttttaaaatttggcatactttttataggttgaaaaataattatgaaacgacccattattagtttatttttattttaaagaattatttgatgcgagaagcaaagccggctgagttggaggatgttgtgagcgaaatgggcatttacggctcactgatcggtgaccagtcgaacggccgaattttgcacaacgcattcgatgggcacacaattcgaagcaaagtcagttgaatagagttatattattattagggctccaatttttaggcaaaaggctattttttcctgagctccccgtggcctgaaacgtacgaaaaacatgcttttttgggctgttgttaagctacttttcgagttattagtgcctattttctaggcttttatttttagcgcctaaaaagcctaaaaaattttgaaaaagcctatttttgcctattttggcgttttgccgaaaatttgttaacaaaaatgcaataaaaacaaaaaaatacacccctaagaatcgattttttggaatttaaaaatacacccctaagcagagattcaaaaatttctgaaaataaatcgcctaagcaatgaaaattttctcaaaaatcgtctttaaaaaattttttggacaattttttgaatttaaaaaaaataatgcaacgcaatactgatttgacttatttttttaccatttgaataaatttccattttacacacctaaatttgagactttttagagcctaaacactacctattttagcggtttttagtgcctataaattggagccctaattattatatattataaatcaattcgttaattgtaattataaaaatgaaaaatatttttatataaaaaatttaaaaaattatattaacaaaattaaaaatatcttttaacaaataaattaatgcttctaaaactaatctttaaaaattaagcaacctaactttaaatatgcttaaaacaaaatgcgaactattctttcaattttaagcgttcggatttgaaccttggcggagtgtgctgtggcggtggagcaattgactcgcctttactgttcccaatgtcacaaatgttggaccaaccaaatgggcattgatagttgatgaccgaaaattaatcagatttaaaatgaaatatcccattaaataataccactttttgaccatgaatatctccgattatccaattttgtctttttaaataaa

SEQ ID NO: 46525 - DNA, 767 bp, Heterodera glycines
atggcgtctcaacaacagtcacttggcactgatcagcacccatcctcgttggcatttcgccaaggtcaactctttttccgccaaactgcccctggtaatcccttcctcgcttctgctccaatcgcttctgaactacaaatcctccgagtccgacctctctgctcacagagactttcctcccccgaggaattgctcaaatcgacgccgttcagtgcggtgatggccatagacatggccaaggagagtggaaggaggacggagcagccattgcgatttgttattcagtggagacgaaaagtgagagggactcaaacatccgtagaagcagaggaggaagagcaacagacgaaagagtccaaatggatcaccgcatcggtgggtttggccattactttttaggggatgggggagaccaaaagtggcattttatgggcaaagggatcttaaataattatctcccaacctgtatggcatgatcatcatttcagatcgagttcgaccataccttccacgttacgggcatccgtgccggtcacttccaccaattctccgtccaattggtgtcccccttggggcctgtcggcccgaccgttcgctcccattggctcaacttcgacgcgatcattgagcagttcgaaccggatggcccaatgaggcgagattcgctgcagttcttcgctcgctacaacatggacaacggcgtggccgcgttggttcggtggcggagggaccgcgacggacaaagcaaagcgaaggggacaaagtga

SEQ ID NO: 46526 - DNA, 736 bp, Heterodera glycines
  unsure (1)..(736): unsure at all n locations
agtcaactaatancagttgtgaagattggtacgaggcattattatgggaaaaatgtggactgtatttatattgattttcagaaagcttttgactcagtgccccataatttacttttatacaaattggaaaaaattggtatcagaggcaaacttttattgtggataaagggctttttgagtaataggacttttcgtattaaaattggggatgctttatcctccagtaaaaaagttggctctggcgtcccccagggttcggtccttggacctttattatttttgatttatattaacgatcttcctgatgctttgccatcaggagtgaaaataaaattatatgctgatgatgttaaattgtatatatgctataaagcaagagccgacaccgaaagtatgcgtaaagcattgcataatttattcgaatgggcaaataaatggcaaataaaagtttcaattcaaaaaacttttatattatatttggtttccaaaaacccaaaagaaacatataaatttgatggaaatacaataaatgctgtggagacaattagggatttaggagtaaacattgataacaaattacaattttccgatcatgttaatcatataacaaggaatgcatatttacgtatgcgttccttgttccgaataattaaatccaaatcatctaagatttggattacgttatataaaacttatattaggcctttattggaatacgctccggaggtttgaaatc

SEQ ID NO: 46527 - DNA, 6201 bp, Heterodera glycines
  unsure (1)..(6201): unsure at all n locations
tgttctgtatgctgatcagccgacgactttcgatgttgacttgcccatgatttgctcctatttgacctattggtggcaacatggcctcgagggcccttcgcgctcactcgtcctaattacccaagtgaccgccgagcacattaaccgtttgttctgctccttgctgaccatgatgaaggaccacgtgggccgtgaaaatgccccgtggctgtgccgtgcccatttctcagccgtgccgctgattcaatacgtaacttgcgacccggtcagggaacaaatgctgccggtggcggaacacttacgccaaatggccgagaaggcatttgccgacgaggagcgcatgagaacgcatccggacgaggcggacgacgcaacagttgcggaggtgggtgccatgccaatgaggcgacacacgccgaaagtttaaaagggcggcaaaaaaggagctaaaatggggacaaaagcatcaaaaggggtaaaagaaagaacttttcttaaggacaatgcgcgactcgtccgcgacgtttacgcgttctttccaattttgatgaaattcaccgatttgcaccgcgccaaatggttgaaaatgccctcttgggagagtgacggcatttacgagaatgtggcggtgattttccgcatttggtcgcttagccagcacttcaagcgggaggagttgaattacatggctcagtttgaggacggagagggcactttgagcgcaatgggcgcggaaatgaaaacgggcaaagcggcaattgcggagcggaaaaagcgccgcagggagggacaggtcggaaagatgggcgagtggggagagaggacggggcaattggcaatgtgcagggggcacgggagggaggagacgagacggcggagtgaaaattcgggaattttggagggtcgaatggtccatagtcaaggaagaagtcgggaatggggaagcaccccaggaagaggaagaagtcgggaatggagaagggaggagagagtcgggaatggggaaggggacacgaagaagttgatcaataacctatcccaaatgaacccatctctctctgctgatcacaggtccgacgtgataaacacgcgaatagcattgtgatcgcctgtctgaagcggcttttgcctgtgggactaaacgttttcgggggccgagagttggacattgtccagcaaagcaaagagcgctttttggccaaagagaatgaggaaaaagtgtgcaaattcatccgatcgcggctcaccgtccccgtggtaattaattcatccgctaaacactaaacacccaatcaaaatgactgattaatcttttcggttttcaattagcgcaccgatccgacggataaaaacgcgtggcaattgagtctctaccggaagatcggtaaatcgcaaatgcgaggcaaagaggagatgagtcaggaagcggtggtggacaaaatcgccaacatggccaaagtggtggccattttgcacacggtgagagggcaaaataaaataaaaaagggtgtggggagaagggagggacggacaattggccaatggcacgcgacaattggtcaatcggcggggtttgctttgcttccatttgtggccactttctccgtcgtccgactttttctcttcgttgtttttcccatttgttgctgtgctattttcactcacttttttctcttcccttttcatttaggctttctttatcttttggcattttccaaaaattttttccattttttggcaaagtaattaaattcaaaatttgcctgagggcatttccgctctctgccctccctttgccttgcaattttctgtgtctgtctgtgtttgtctaacactctgtcctttcatttcccttcagaccgaacacccccaggcatataaaccgtctgagtggaaaaagatggtcagcagccaacggaagcgagcagtagtcgcgtgtttccggatgatccccgtgtacagtatccccaggtacgcactgctaatacagtacactcggcacgccatttccgcactaaccaaacacagcacatgcacagtttgaactttgtttctgccgtgtgcttattgacagtaattaacgttatgccaagggaaggatacggtattacagtaggaatagtttttttcgaaaagcgatcgatcggcggtcattccaccgaatgtctgtctttgagcactaatcggccctctcccaaaggtaacaagccgactggagaaggaagaccgatggaagaaagtactaacactgcagcgaaagcgcatggccatttcactgatcaccgcgagtcatttgtacaggctggaaaagtatgtgaggagcacagagtgctgatctgatccgatcatttggtgctgtgcttttccgatttgctgttcaaaatcaacaaaaaacgcaaaaggcttcccatttaaggcatcgtggcatcaactattttttgcccgtgttcagtcaacattggctgaacgatgaagacattgacgaggatcggcttgtctccgacatttgcgtaaatttatttttgagaagcaaaatttggactctcactaaagaacgatgccattggagacgctgttgtggagcaacaaaattcaactcaaattgtccgcgtggtggaggacgaaagtggggggctgaagatcgaagaagggccaaacgcagggcaccaggaaaagtacaattagcaagcacataatgatgatgatcataatgaggatgagcagggtgtcataatggggtagtaaaatgggacaaacccattccatcgaactgtgcgaagagtgaaagggtatgtgtctgtatgggcaaagaaaagccctgttttcagggactaataaaaaaacgctttctaccgaaaataggctgaaaggaattgcttctcagcgtttgttctctcctcaaggccctaaaacccaaacaaaaatactgatcattttattaccattggtctatgattactgtgatctgaccatttctgattgacctttgcctttgacagaattgtgccggacgcacttcgccagctgatcctttgcttccaaagggcggccaccagcgaagagagtggccaatcgaacagcacgacggaggacaagtggggcagggcaaaggccaaaaggggtacaaaagccgctgatcggacagattgttcattcgctacgcggacgtaatgtgccgatcagtgcacattgggcaggacggagacgaaggcggcgcaatggacgacgaaaatgaggtggaccaagcggagaaggaggaaatggcacagacactgcgggcggaacagggcgtattggcaaaccgaggagcagcgataatgtgagaggacaaacggaattttgggaagaggggggggggggtaattagtgggagaaaaaaacagaggaaccgttgcagggtgttgatgtatttgagtgcggcaagcggagagccgaccgaaatggtggcacaaacacttcagctgggcatccatctgctgaacggaggcaacaaaaccattcagaaggtccttgccattcattttggctttttcttccgctgattttcacttttccttttcttagtcaatgctcaattatttgcaactgaaaaaggacgtgcgcttcttcacctccctctccggactgatgaacaaatgcagcgtgctcaacttagaaatgttcgagcgacagatcaaagcggaagggttgngaatgggcgcggcattggcagcggggtaattagcctaatgaatgattaatgaacgaaccttggaaagtgccgagcctttgccaactccgtttttagggagcatcagaatctgaacgacgcgccgttcacctgctcactgttccgctttatgcaattgacttgcgaaggacacaatttggactttcaaaattatttggtcattaaagcaaaatgccattgtcgaaatgccattttagcgtacccaacctggccacaccaccagcgtcaatttgatcaattcaacggtcgattatttgcttcgtttgcaggaatctgtgatggacttttactggcattattcctccaaggaagtgagtggtaaatggcgggaaaaaggcatgagaattgatcgctggaagattttgtgtgattgatcagttagtatgagagattgatcagtaaagaacactggtcaggaaggacttatacaatcaaaaattaattttgtgcaacaactgattaatcagtaaaggcattccattgaataataagttgagttatgtgagactgatcaatgacgaatgattaaaagagactttctcacttggcatttgtcagatgatcgatgagaacggcaaagaatactttctgcgtgccatccaagtgtgcagccaagtgttcaacactttgaccgaaagcatccaggcatttatttgttttttgatttgtttatttcatcactttccctgaagggcccctgcgtcggcaaccaaatgactttggccaattcccgcctttgggatgccatcaacggctttttctttctgtttgctcacatgatggagaagctgtacaagaacagcacgcagttggaactgctcagagagtttctgaaccttcagaaggacatggtggtgctgatgctttcaatgttggaaggtgaccaatggcaccgatgattaagccataatcttggcaaatgttaaggcaatgtgctaaacggaccgatcggaaagcaaatggtggacgcattggtggagagtcagcagtgcgtggagatgatcctcaagttttcggatatgttcctcaaactgaaggtccatccgccgaatgggccactactttcggcacatttaacgtttttggcattcctttgaaggatttgaccacttcgcaagcattccaagactttgacaccaatcgcgacggatggatttcgccgaaggaattccaacgggcgatggaagcgcagaaaatgtactcggtggaggagatcacctacctgatgatgtgcacggacgtgaacaatgacggcaaaatcgactacatggagttcacggaacgatttcacaacccagcgagagacatcggtaggggagggaatggccagggaataggccaacgcggcacttaaaaagggccaatttggcattccattgtcttccagggtttaacttagccgttctgctgaccaacctcaaggagcacatcaccaacgacccccggctcgaaaagatcgtcgagaaggctggctcactgttggactattttgacccctttttgggccgaattgaaataatggggtgagcgatggcgaaaggaataataactctctcggcaaactccgaccaatgaagttttgggacggagttggccggactgagtggggggggggggattcactgctctgatcaatcgcactcattgtcagatcctcgaaaaaggtggagaagatttacttcgagatccaagagagttggttggaacagtggggcaagcagcaaatccgcgactcgaagaacgcttttctgttcaatgtgctgcaggacgacggtggcgaccagggcaagctggaggcgttcatcaatttttgtgaagacacaatttttgaggtattgcaaaatatgctttctgctggcataagcaatgcgataaataatcattggcattttatgccatttttcaaatgccaaatgttcgtcaatcattggcattttatgatgttattccatttcgatcgtccattttgaccatttgtccacctttgcgctttcctctggcagatgcaacacgcggctgagatcagttcgggcgattcgaccagcgagtcgaaagtcgagcgtgcgatgcgccaaagggactatttcctgcagcaaacgtacgccggcgagcaaatctccaaaacgcttcgggcggggtacaaatgcgggatggacgcggcggcggcactgcgcccggaaaacatacaaaaggaactgaaaagggcggcaaagaaattcagcaggtaaagcaaaattggaagcgcaattaattacccataattaattgggtgtgaaaaacaaagcattgaaagtcgacgaatgttttgcctttcgttgggtccgtcccgcgccattccgttaatccgcgtccattcccgcttctcagcatgagttgggctgagctgttcaccgcgttggcattgctttgcttccgcgccggtcgtgccttcttcttcttccacctgtttttgctttcgaccgcttttcgtt

SEQ ID NO: 46528 - DNA, 1099 bp, Heterodera glycines
ccgagagactcgcaaacaaaattgtcctattatttacgtaatattcatttttcaaattaaattccatggttgctttagtctctgcaaggaacagctttcgaaccaatgtcattacgactttggattgcgtgctttgaaatatgtgcttgtttcggccgggaatatcaaacgcgatgcgattcaacgttcttacgatgaaccaagccaaagcggggatggagctggagaacaggcagtggcaagccaaatgtctgaacaacaaatgctcttccaatccgtgtacgacactttgacaccgaagcttgtctctgaggatatctctttttaaatcacctttgcatcaatttttccctgacaacagcccaaaacaagtggaaaggtgcagatttctgggtttttagaaaaaaaaattgtttgttttattttcagcctcaagaacgaagttttgacatctgcaaaaccgaacacttctcatgttcacctatcactggggagaagggaaatctttggctggagaaagttcttcaggtttaccaaatcaccaatcgcaatcatggcctaatgcttgtcggtgcgagtggatcggtcaaaaccactgcgtggaagacacttttgaaggcgttggaaaatcatgagcgcgttgaaggcgtgtctcatgtcattgatgccaaatcgatcagcaaagacactctctacggcactctcgacccgaacacacgcgaatggactgatggattatttacgcatattattcgaaagtcaatttactattaatttttaatatgttgacaatgacacattgtttagaatcattggcaatgttcgtggagagttggataagcggcaatggatcatctttgatggagatgttgatccggaatgggttgaaaatctgaattccgtacttgatgactacaaattgcttactcttccaaacggggaacggctgtctattccaccaaatgtgaggcaatattaatttcaaacttatttttttatattaggttcggatcattttcgaagttgctgatctcaaatttgccacgatggcaacagtttcgcgttgtggcatggtctggttcagcgaggattttgtcac

SEQ ID NO: 46529 - DNA, 618 bp, Heterodera glycines; identical to SEQ ID NO: 37730

SEQ ID NO: 46530 - DNA, 990 bp, Heterodera glycines
atgtacaattgcaatatgtacaatgttgaagacattccattggcggatcgtcaatccatcccacttggcctgatgttcctcacgttgggattgatttgtgaggtaaaaaatacttagcgaaaaattgagactgcgaaattgttgaaaaaccccggattaagatcgaaatttgggattgaacgaagacagaaaaatccatttatcccctgaactttgactgggtacctttttacattatctgatgatacaagtcctatgttaaatttgaggtcggatatacagcaacaataattataatgtttttattcagctcgaggtcattatatgaagaatatttaaagctctgacagggccggaccctgccaggatttttccgggctcctgatcctgatcgggtatattttgaaaaattgggagccctgaaaaacagggttttgaatgcggaatcccggtccgggtcggtcaaattatttaatcctgattccgaatttttcaaagttacgagctcgaaaacacacatacatacaatgtacaaaaaaaattattatatatatatatattttttatatatataatagatatatattacatggttataggttctctacctcccgtgtatgcttgcgattcgcaaacatatggacagcacatgctttaaagtatgtacaaattatttattataatttaatttttgtaaattaattatttataaaaatggtaataaaatttccatatttttttccaagttcatgttttacattgctgtggctgacatgcttgcgctgtttatcagcggtgtactcactggatatttggcattggttggtgctgtctattgctcctacccaaaactcatttacaccatgggcgcatgggcaatttgtatgttaatttttttgttgctcccgtgtaattagggtaattaattgggttaataattgatttaatttttattctcataacaataactgtttgattgcttttaaagca

SEQ ID NO: 46531 - DNA, 798 bp, Heterodera glycines
  unsure (1)..(798): unsure at all n locations
caatttggccgttccgatgacaccgctcccttttgctgagtcggnccaccgcacgccgaagcagcaccaccagccgcactccgccgcggcacagccgcccccgtctaacatgccagcgtttgtgccagcaacgcctttctcaaacgcatccgtggaaatcccatcgccgacgctgcaaaatattgtgtcgactgtcaatttgggtgattttccgtgctgtacaacaacaaaaatgccttctttcactttaggcgttcaattggacctcaaacaaatcgccctcagagcgcgtaatgccgaatacaacccaaagtcggcgtttggcggtgtttaattaccgatcccctttttaaggcgttttgcagctgttattatgcgtattagggaaccaagaacaacggcactgattttctcttctggcaagatggtgtgcaccggggcaaagtaagtgccaaagtttaatttattaacacgtaaattgcttgcttgccgccgcttatcattccgatcaaaattaagatccgaagagacgagtcgactggcggctcggaaatatgcacgaattgtgcaaaaaattggattcaatgccaagttcacggagttcaaagtgcagaacatggtcggctcttgcgatgtaaaatttcccatccaattggaaggtacggattgggcaaagcgacgtttaaattgttttgattgactaattaaatctaaatttcaggcctttgcataacgcatgcccaattcagcacttatgagccggaactgttccccgggttaatctatcggatggtcaag

SEQ ID NO: 46532 - DNA, 1754 bp, Heterodera glycines
atggctttccataaaatcgacaacgactccgtgaactcaatcaccaatgcattggactttttccgtataccccctacaaatgtgagcgtttcatcttcaaaggtattcgagcttctgcccagcaatccgcttacagacacaccttaccatttcaaacttcattccagccaaaattatattgatctgtccaaatgttatttgctcaccgagtttcgaatccgtaaggaaaacgctaatggtcaactcattaacctagacattgatgacataaatattgcaccaattcaaatgatcggacaaaccttcatccgtaacataaaaatgagtatcaatgggcgcaaaatttttaatgccaatgccctaatggcctacaaatcatatttctcacatgaactctcttattcaacgacagcaaaagactctcatttgaatgctgctgggtattatagggacacgggcgatactttggagatgggaggcggatgcacagcgcgacgtgatttgtttgcgggtagtaacgtagctcaattcatcgccaaaattgacaccgacctattcaaccaaccgctatacctgatcaatttctgtgaattggacattgaaattctacccaacgacaatgactttgtgttaattgcgccgaccgggggtcggtaccgtttcgaggttgtgggactgaaaatgtatgtgaaaaaagtgtccctgatggatgggttggcgctagacattgcgcgaaagctggaggtgaaacctgtccgttatgctgtgcggaagacaatgatgaaatcgatgttcatcagtcagggccgatatgagtttactgccaatatgttcatggcccaaattcctcgtcgtgtgacaatgggtctggtggctaatactgactatgttgggacaattttgcgcagtccattcaattttcaaccatttaatgtgcgcgaaatttccattcttgcaaatggacgatcgtatccgcaagcaccctatgatttggtttacccaaacggaaaatatgttcggcccttcaatgacatgaacgaagcggtgggcttcgccaattcatcggagagcaatgggataacttttgcccaatacggtaaaacgcattgcatttacgtgttcaatctgacaaacagcggggatgaccaagcggcactgtttgacctgataaagaatgggaccacagcggtgagtatcaaattcaatcaaccagtacctgtcggaggaataatgctggtggtgatgggagaatgtgactctttggtgatgttagacaaaaatcgatcgattagcagtgacaccactatttaaaccgtttgtcatttcatttttcataaaaataaaagatgttttcaagaaaattgggtcttattttgttctttctccgaatttctcttcccctcgtttcatcaacactgcgagaacaacaacaacaacaacaacaaagacaaccggaaaatacctactctgcttatctaaaaaatctgactttcactcgacaacaatacgagcctgaatattcctacactgaatatttgagaagattgtctttatcgaaacgtactacaaacattccgtttactacaacacctaaagtccctccaaaaagcgacaagttaattgatgagcatgtctcggctgttctcccaccgcttattcaaatgtgcaaggacagaccagaggaaagcagcttttttcatcaagctgtttgctgggccctctttgctctctatttaatgttcatcatcagcctg

SEQ ID NO: 46533 - DNA, 637 bp, Heterodera glycines
gaaaaatgaaatgacaaacggtttaaatagtggtgtcactgctaatcgatcgatttttgtctaacatcaccaaagagtcacattctcccatcaccaccagcattattcctccgacaggtactggttgattgaatttgatactcaccgctgtggtcccattctttatcaggtcaaacagtgccgcttggtcatccccgctgtttgtcagattgaacacgtaaatgcaatgcgttttaccgtattgggcaaaagttatcccattgctctccgatgaattggcgaagcccaccgcttcgttcatgtcattgaagggccgaacatattttccgtttgggtaaaccaaatcatagggtgcttgcggatacgatcgtccatttgcaagaatggaaatttcgcgcacattaaatggttgaaaattgaatggactgcgcaaaattgtcccaacatagtcagtattagccaccagacccattgtcacacgacgaggaatttgggccatgaacatattggcagtaaactcatatcggccctgactgatgaacatcgatttcatcattgtcttccgcacagcataacggacaggtttcacctccagctttcgcgcaatgtctagcgccaacccatccatcagggacac

SEQ ID NO: 46534 - DNA, 1665 bp, Heterodera glycines
cctccgtcctccagggcatcggtgacttgttcgtggacaccaacgacgagttttgccaattgggtcacattttgcaacggcttcttcattggctggccgtcgacccgtcctcttttgaacaggcctatgttcctctttgtctacccaaactgcttggcccttttgtgcgtcttcaacttgtcgactggcgaccgctgaaggtatttttttatttcataataatattgggttaatctcaaattattgtcgaataaattgaaaaaatctcaatgagtattgctttatcttattttaatagtctcatctgtcctaacaaaatggcaccacaaattttaatgaagaaatgatttggaatgggacttttgctttaaagataaattacgttaggctattagatgactttataaaacctgatgtgagattcctaggcctaaaccaatttaaaatgaaaactttttctcaggccaaactttttgagattttttcgtaattatgagacaactgaatagcagaataagttaatattttctctattagggacacaccaataattagtacgactgtttacttttgccccttttctttgccaggaatcaccaacccaacggcctttgtatcgcatgccctggtaccgtgcgctgctgatggccggcctggacaactcgggactggaggaccttgaacatccgtcgctcgtgtctctgatcccgtccgttgtggaaaagattgtttttccaaaaattgcaagtatacttttaggactatccaattttagacgcccctctttttgtctgttgaccatttcccaaatgtggtcaaaaaaaaccattggaaaacccatgcataaatattatgccaaaaaatcaaaattttcgcaactcatttcttgttcgccatgccattctcaatatttagaaattgtccgcgagcaatgggacccgttgtcgctgcatgagtcttccaacttagctcaattgctgcgttcactggtcgaggaatacccagtaaatttctgtcggcttatttgcaagatcataaccttggaatcgagtcccccgagatgtttccttattacgatttttttggttttagaattttggcttttcaattagtggtctgatggtttcatcaacgacatcgtgcaaaatcttttaatggattaaaaaatcctttttttcaaaggtggccaacgcaagctcgaaacgaatgcaagaactgcttgagggtgtttatgctcggttacgtgacactattgaccgcgacacttttgtgccgttgtacagcaaagagttacatcacattaaaaaccaattttttttatttttaccgatttttaagagccattgaatccactgagacggggtgtggcgcttttttggatcggcaattttggaagtctatcaaagtgagttgaatattttggatcaacttttcataaatcaatggggcggtggagagcgagctgcttcccaaatctgtgctacctttatatggcagttatttgttttagttgatgcgctccatcctctgcttccgctccattctctccgacgcgtgtctggaggaattggtcgtcgaaggactgcttaaccgtttcactgtgttggcactgcaattctcagtgttgggccaccagtcgacgctgaccaaatgtcgggcagtgat

SEQ ID NO: 46535 - DNA, 706 bp, Heterodera glycines
atggtcaaggcatcgttccatggtcatgttggcgttgtgtccgatgtctgttggcactcaaccgaccagcatttgtttgtttcggccagctttgacaacacagttaaaatgtgggacgtccggtgagtttctggcacaagcgtcgagtaggtatttagcgaatgattaaaacaaatttatatttagaatgtcattattagtactaaatattgtcttcataaatttttgactgtgaagggggggggtgtatttcgaggatttgaattttaagaaattctttttttctgttgctctaatgttttttgtgtccaatttcagcagccccagggcggctctatatgatttgatgggccattcggaccgcgtgctgtgcgttgattggacagtgccgagccgtatttgcagcggttcggtggactcgacggtgaaagtgttctcacatgggaccgaagaaaatatctaattgtttatcgtgatatcattgttgttttgttatagttaaaatttctgtacaaactgagaacaaacaaactatacatggcccaaaaacacttctgattgtaagcctattttaatggaagtttaatgaaattgaaacttttggtagaaagcttttgtttccctttgccagaagggatatattgaatttgaatcaggaaagcaactttttaaatggtgaagtcattaagcatttatagccattaaa

SEQ ID NO: 46536 - DNA, 1694 bp, Heterodera glycines
  unsure (1)..(1694): unsure at all n locations
agtacttcaaatccgtcgctttttggtggatgtttcttgaggtcgtttctccttcctctctttcccatttcattaatacttttcctccccattttcagggcctttacctacataatcttctcgtttttgcctttttcaacaaaacgccaaaactttggccctatctgatcacagcatacggtaggttctttccacagtaactcttaatgtgactcttactcgtttctatgatggacaaatccttctgctgattgtcagcagggcagtaaaatcttccacaaatgttcccacttattctctaattgttctctaaattgtcttttctcggcatgccggctcaattcagtccccgtggaaaagtgtttcagtccattctgaggagagtgtctgttttctgcgcttttcatatgactcggatttcctttttcccaatttatcttgccgagagtttctttgccaatttgctccaattcctttgctttttccgtatttttctccccattcaaattcccttttttggcatttcgtctcatgtgaaaatgtccataaaattgaattggccatcgttctctcttctcgctttgtcttctcacttttggcctttcccttctcctaaggtgttcccttggcccacactttctgttggctaattgtgcttctggtgaagaaacacggacagttggagagatgtcttggctcatattatttggagacggaattttggattttggacggaccccggctgcttcaacttgtggtgggacttacacttactgtgcttatcgttacagtatcacttaaaaaatactgtatactcaaataagaacatacggtactcttcagctgaacgcctttttcattttcaacgttatacgggttctttggctgaaagtgcgcgactcgcaacagtcgagcagcgaaattggccgaatgaagtgagtaatgggcaggacagaattagaagggcttaaatattctttgaatgtgccttttccttagtctttcgctttcattttcaaattttccaatttaattaattttcttcgcttttccattccgccacttaagaaagtccgtgaaggctgctctgatgctgatccctctgctgggcatccccaacattatgcagaccatccctttctcgcccactcaagagaacattacagtacccacccccctcccacactcaccgctaagattactctcttttacagtactttgccatttggacttactgtgcctcgctgtcctacatgtaccagggttttatgatcggtacgaaggctttttgagtttccggatcggatcaccttccttttcagccatcatctactgcttcaccaatcgtgaggtgcagtccgtgctgcacaactgctacactcgccaccgcctctcccactcgcggatggcccaccgaagttcgcgctacgcgccgatggcctcgccgtacactcagatcaaaaacaacagtggatcactaggagcaaacgtagcagtgatcgtcggagagatcaaagtgatcgaagggaatggcactgttgccaatgcgggcgattgtttgttgctgccttcacattcgaacggaacgtcgccatgcataagtgaaatgggagcggagagctgcggcacggaatcgctgagcaacgccaacgacagcggacgaactcttccgggggntagcgaccacggcggga

SEQ ID NO: 46537 - DNA, 1156 bp, Heterodera glycines
gaaggtcatcgaaattatatcggaacaacttccactttcctttgacattgccacttcctacgcaaatggaactaacgaagaccaaaaatttgtgtcaaatttcgcccaattgcttagcactttcttcaaagaacattctgcattggtcgaaataacctttcctcatccggacgaagaacaaaaagctgtcaagcaagcacatttgatggcgttgaagtatttgttgaagatcagcagcgaagtcgaagacatcgaagtgttcaaagtctcttttctttacggaacccttattacactctctccaattactcagatttgtttggattattggaattggctttgcatggaactgtttcgagaatctccatttgaacaatctgaacattcgatcatcgacgctctgaagcgctataaccggcaagaatcgcccaagcggaagctgtacatcgaagtgctctcagaacttcgcctgctgatgattagcagaatggccaaacccgaagaagtcattgtcgttgtcaacgagaacaatgaggcagtcagggaacttgtgaaggacacggactccgttgtgctctacaaaacgatgcgggaaacacttggtttcttggcgatttatttaggcaaatttcacagtttgtgattttagtgttgctgacccatttggactaccgagacactgagttgaaaatgacggaaaaacttcaaaatcaagttaatggcagtgagtggtcctggaagaatttgaacacggtttgttggagtttcttccctgtctttcaaaagtgatttaagctgtgctgggcaatcggctcaattagcggtgcgatgcatgaagacgacgagaagcgatttttggtcacagtcattcgcggtgagtgaaagggtcgggcaccaaataaatatatatttttttgtagatttgcttggtttgtgtgaacaaaagcgtggcaaagacaacaaagcggtgattgcctccaacataatgtacgtcgtgggccaatacccgcgtttccttcgctgtcattggaagttcctgaaaactgtgatcaacaaactgtttgaattcatgcacgagtcgcacgaaggtgtccaggacatggcctgtgacacattcatcaagattgtcatcaagtgcaaatcgcattttatctcg

SEQ ID NO: 46538 - DNA, 806 bp, Heterodera glycines
  unsure (1)..(806): unsure at all n locations
ggaccgttgaggagcttcgcctgaagagcaactccgacctgcacaagctgtggtacgtgctgctgaaggagcgcaacatgctgttgaccatggaccacgcgtacaaagtgcgccttcgcaacatgccgaaccccgagcgaattgaccgggtggccgaggtgtgcggtgtgctgcttgctgatcataggatcatagctgtgcaaagggggtgggggggttgtgaagccgaacgcaaagggtcggcaggcatcgatcacatgagaacggggagggtggtcgagatgaatgaaggagaaagggaaaaaagcgagaaagggagcgtcgagatcaaggagagggtcgcgcattgcgttcgactaacccttaatgagggatttatcgaacgcaaaagaggagggagaaaactcaaattaagacaaattttctcgctttaaactcccgcatttttatgcacacatacncgtattttttgattattacaaaatcgaaaaatacggttggcttttcacacacattttctactgataatgacaattagtaataattgtcaatttgattccattccaagagcatggaacgccttgaggcggtggtgcacgaacggaacgacgcctttttgcagttggagacgggcgacagcgcgtcgcccccgaaaaggacggtcacttccttcatgggattcacctacgagtgagaaaatgttaaaaaacaaattaatattatggcattttttcctcaaaaacctttaaatttgttaaatattatattttggaggtttcctgtttttgaaggcgtgcaactgcatt

SEQ ID NO: 46539 - DNA, 1859 bp, Heterodera glycines
gccggcagatgggcaccattttttgcgcattccaatcaaagactcgtacagtgccaaactgttgccccattttgatgccgcctttgaattcatcggttttggaattttgggaattttattaaaaaaaaaaattctcctattggtattggaatttaaaaaaaattttttttgtttcttactgacttacgaattttgtacttttttgtaacattttcttcagcattcattttatttattgggtaaatggcaatttgtacacaaaaaaaaatgcaatttaaattttcttgtaaaaaatttcctaccggtttaaaatttttagaaacaatttaatttctcatagtaaaaatatacaaaaaaaaaatttcccaggacacctctatctctgcaatttacaaaatttcaagcccccaaaaaaattttttgtgaatttccaccttttacacacaatttttcaatttctcagaggccgctcgcgcctcggggcacaaagtgctggtccattgtttggccggcatttcacgttcgcccaccctggtcattgcttatgtgatgcgcgcaaagcaagtggtcagtgacgaggcgtacaaatttgtcaaggtgagagacggacgacattcgctgacatattttttatgcctggacctctgatgagacatgggtctggaatttctgtggacaaaaaatttccaagaaaaacgaggcctaggaaagtaccgggaaaaccaatggaaattgaggtccaggaaaaactaagtgaaaaaatccaggccaaggaacatcccagggaaatccaggcccagcaaaaaaaaatcagtgaaaacccaagggaaattgaggcccaggaaaaattaagggaaaaatctaagttgccaaaaattgcctctgacctggacccaggaaaaccccaggctgccaggatccaagtccgagtcgaacttttcatctaaattttttttaatttgaatttcacacagaatcttcggccgaccatttcgccgaatttcaattttttgggccaactgatggagtatgagaagctgttgcgtgaccaaaaggtgtggtagtacaataataatatgtagatacaccgcgatttaaattttttttttttttgcatattaaaatttatcattttttaactgccaggtgttacccaaacaacaccaaccattattgtcctctcccattttgatgaccaacaacaaccaccaaaatggtgtggcattttttcaaacaaatttggcattcgtcttcaattcggaatccagcgggattaaagatggaatcattgttggattaattctggggggggggggggggggttccgactccgggatccatcccgagctttttttaaattcattgggggttgatcgggatcggggatttggacggaatcccgattcgagaatccctcccgattttggtgcttattttaggatttttcggaaaattgttatcaacaaaaatgcaataagaaattgaacatttttattcgttccctcagatttaatttttttttttcctcgaaaaaatatttgattttaaaaattttcctccttcaaaaatgagacagtatcgaaaattttttagagccccagcatttacatattgggattttaaattttttttttttttgtgccatcaaacaatgatggtatttggaattggaaacactgacatacatacatagaaaatggtcgtttaaatttttttaaaaattttggaaaaaatttttcttatttgatccagcaaatgccgtcacccaatcgtcgtcgtcgttggttctcgttgaaaagaagccgccgcccatcgctgctgatagttgggccagcgtcgttgttggcactgatgccgag

SEQ ID NO: 46540 - DNA, 3104 bp, Heterodera glycines
tttctttctaactctgctaatcacttttccctcacatcacttttcctgatcactttcctctgatccttttccctctgatctcttttctctctgatcacccctcccccctccctcctttccccttattgtttggcttttcctttagctttggcaccgcctctcttctcgcccccgttcgtgcccttctcccttggccctccctgctcctcctcttcctcctcctccgatttgctttgtgtccgtccaatgccaaacttcgacatgaaaccaaattgcgcttcaccacagacgacgcaacagaacgaagaggacgattgggaggcgatgatggaaataagcaacacggacgaggtgaatgaacgaaaataaattatgcaaatgaatttcaatttcaattcagcaagagaaaattcgcgagttggccggcgaaaacgcattgccaacgacggacccaaatcaatgcgtaagaaggggggggggagagagtgatcggaatggcatttgatcattgcgggattgattagaggacacttttgttagagggggagaggaaatttggtaggaacggcattttgaaggggggaaggtcgactgaaatgacacggaagggatagaggatttatcggaatgtggcattttggtcgattagaaaagggcaaataaattccgttttagattatctgtcggagggtattgagctgcaaaagcgcattgcaaatgcattaccggactcatacaggtcaaaaatcaaacacgagagaatctgtcagccaatgagtttctgcttcaggcgaaagaccgttcaaatgccgaatttgtcagagggcattcaccacaaaggtgccaaaacaaatgatggcacatcaatttaaatgccaaataaatgccgtcaatttgcaattttgcagggcaatttgaaaacgcacatgggcgtgcaccgttccaaagcgccgctgcgtcatcagatgcaccatttgctgaacaacggcatgccgaaggcggaaaatgccggcggaggggtgcccaacgtcgtaaacggcggcgcattgtacgctcatcgcccggggggttcgccctcagcgcctggcactgccgacattccatgcccaatgggctgtggtcacaaaagtggagacccgggccaattgcagcagcacatggcggacattcacggcatgcaaaggttggcagtgacggcatccaaaatagaaattccgctaacttttctcttgggtgtcctttctgtctttgctttagcttatattccttttccaggctccccttctgtatgccaccaaacggtgtgctccccgcggtgcctccgccgcctttcggccgccctttgaacgcctttcatccgtcgccccaggcgccgttccccggggcgatgttcgcccctctccctccccacggaatgcctccggcgccgttccctccgatgattgtcccccctcacccccttttgtttctgcttgcccaacaacagcgaacacaactgcagcagaacacttctccgcgggaacaacattttggagcagtgtcagaagggaatggggaaggacagaggcggggggagacggagacggacaaagttgaccacggcgcggcattggcaaatatgtttatgcctaaggcggatgacggaggaggcgacgagcgacaccggagagaggaaacagcgccggcaccgttggtgggattggcaccgttgccggcatttttcatacaacagctcgcgaccaaaaagtacaaatcatttggcataaatttgctatcaatcaaagccactaattactgtaattaagcgaaagcttaaacgacacagagccaaatgagcccccgttgttggtgaaggaggagacggagatgcaaaggcacgcggagggaacggacggcggagagagtgccgttgaggaaaagtaagtgaagcgggagaagggaaaaagcacaaaaaacattatcccctgacagcagtagcagcagtgaaatgcagcagagaaattgcgtttccaaatcgccgccgcggggcacaaaaaacggcacggcaattgtggcgtcacgcacttccgatttgatcgttgccgacccaacgacggcgcacggcgcagaagaaaacggcgatggggagaacccattggaaaaggtggggaaagagacaattttgaaaaaccatcaacccatcattgatcagtgctgattgatcaaattactgatcggacccatccgtttgggcattttaaatcattttggaagggtcggatcagaccaatctgaaaagcttggtctttccgggggttttcaagtaaaattccgtcaaaacaatgccaaatgaatgtcctcccgttttccgcttgattggccattccttccggcagatccaacgcattttctctgccgccgattcgccgccgcccgccttccccaacgatcccttcggcgcctcgtcctcctccgccgctttctctgttaatggtggccgtgttccgctggccaagcatcagtgtcgctggtgcatgaagccgttcagcagcagttccgcgttggtcattcactcgcgcacgcatactggtgagaaacgggcggggaaaggaggggggaggatgatcaaaactgaccagatcagtgaggagagagggggaagactgatcagaatggaatgactgaaacaattagaataagagaaacgatcagaacagagagcattaatcaaaatgatcagagtcagtgattccttcaattagtatccatttgatccctaattgcttcttctctgtgtccatgctgatcactccttgccaatttgtcaggtgatcgtcccttcaaatgcgaggagtgcgggcgcgcgttcacaacccgaggcaacttaaaagtgcacatgggtgggtcacttgtcccgattaatttctcggccgttcctttcatctcagccatcaaactcaatcattgattatccatcttaattactcgatatcattgtcactctcattagccgttaattgatcattgcccccttctttagggactcattcggcccctcagaacccttcgaggcgtggccgtcgcattttcgacatggaggaggtgttgctgcccgccttccgctc

SEQ ID NO: 46541 - DNA, 1434 bp, Heterodera glycines
gcatttgtttcaccaacaacgtcaaaatgccccaggcaacattaaggttggtgatgatgccttgattggcagaagggaaaatttgtctaggtatacgatcatcatcatccttatgaaaccgatttggagtcgggtttgacaagtgactttgatgtgcagcttgaacttgccgatgggtttgctatttctttggttggcattgtggacgaggaaggggaaagtaaaggactgaagcaggaggaattgtgctatggccgattgagcggcatcaaattgaatgttggcaagttcaaagcaacatatcgcatcaattgccatatcgactcaattcaggtggtcatattctaattactaattttttaaattattatgtccctaatttaaattattcgcattattattgtcccgtacaattgcagatggacaaccaaatcattggggccgaccgttggcattttttgttctgtgatcccggtgcattgaaggacgaaccgatggtcggactgccagcattggcattcgaaatgagttacactcccagcgagtttttcgatgtttacgaggcatgcccatgtcctacattatttatatgcagtgaattaaagtgtgatactgtactttcagtgttttcggctcaaactgagcaatgcgtgcattctgttggatgagcaactgttgtggcgcctcgtgcacttttggcggtgtgttttgaaacgttggcaagaccaaagcgaccaacagcagcgagagaatgtaacaacaccaacagcagatgaaacgaaatgcggcacggaatcgccttcctttctgcacaacaactgctactttggcactttgcaattggaattcggcaacatttctttgtctggtagtcactttgttttgtttctgtttgtacttttgtccaaaattttctagttttaactgttgacaaaagtgtgctctgtcgttgtcaattcgtcaactgaaagattctttcagcaagcaactcactttgttcagttttgagaatgcccttgtcacattggcaccgttctgttggctccgttacttttgctcattgagccgtttgcttgaaacgcttggaaatttttatcttagtcagtttgctggcattttgtgaataaaacagagaattctattatttcatagacaaattgaagcgacaaaaattgaacatcatttttgcgatggatgcttttggcaatccaatggcacttggcaatgagctgaaggagggtctccaaggactgatctttgagggcgacttggccggctttgcctttggcattggatatggtgctgcgaacagcttgtcaaaggtggatgatttttggcttctacaaatgctcagcagaacaaaattttgtattttaggtcacgtcttcaatggcacaaggtaaaatttttattattaaacaaaaaattatttga

SEQ ID NO: 46542 - DNA, 1508 bp, Heterodera glycines
atgctcgtaagtcatttataaaagaaagaattagagacagagagtaagaattaattgaaaaggtttaaatttctcaaataattatattgaaatttggccaaaaagaaatccccaaatatggacattatcattatacactgcatattttagccaaaaaatttattttttaccatttgccaattttttaaataaaaagttatttttgaatttttcaaaaacaaaaattttaaagaaccccaagcccgatcttttctattctgctgtcggagtttcagttttttttttatttaaacaaatttttctgttaggcaaaagctgctgcaaaagaatggtctacaaaattgttcagcattccttcctcagtgattatctcaaaaaaggacgaagaatcagttgattttatcaaagtgctttttcaaatggccaaaaatgctcaaccttccatcattttcatcggtttattatagcaaatggattaagcattttaccatttatttgttcagacgaaattgacgcatttttacgcagcgggacggttcaacgcggaaaggcacaatttttggttgaaatggacaaactgtcatcaaactcggcgtatcatgtgttggtaattggggccacagatcagccaaaggaactggacaaagaggcgagcagacgattcgccaagcgaatttttgttgaaaatccaagccaacagacacgagagaaaatgatacggaaaattgtggaagaaaatcaacatgcttttgagttaagagacgaagaaatcaagtgagtggcggcacgtttgactaataataataataatcattagttccttaattactgatttaaaattaacaatgataatttattaattctctcccttaattcttattttaaattaaggcaattagcatcgaggaccgaaaactattgctttgatgatttgttggatctttgtcaaacagtgaaccttggcgttttgcacgatgctagtgagagaaatgagtttggccagtgggagacggttgcccaattgcgtcacatcaaaatgaatgatttggaaaatgccattgaaaaggttggtttcatggcaactcgtacaacgtacagtgttatacacaaaagcaattcatacaatgttgtataaaggcaactcgtacaatcgcttaggttaggcctatgcttaggcttaagcgtaagctttacgctaggcctagccttagtgcttgggccaggcttaggcttaagcctgctttaggctaggccaaggcctagccttagtgcttgggcctaggattaggctttattttgtaaatacgagttggttgcattttgtgcgagttgccattgacccgaaaacgttaagtcacaattgaacaaagaggaaagcgaactgaaaaagcagccgaagtcgaagaataacaaacgcaatggaaaggaggaagaagaatcacaaaatgaatgagatgagatggacacattggcatttcagctgagagcaacaaaacggaaaaaataaa

SEQ ID NO: 46543 - DNA, 1020 bp, Heterodera glycines
atgggcggtacggggccgtgtgggccttgttctgagattcattatgaccgagtcggtggaagaaatgccgctcatttggtgaacactggcgacccaatggtggtagaaatttggaatttagtctttattcagtactacaggtaaaccgattcttctttttttaaatatcattattatcctattatttagggaagaaaatgcgaagttaaggccactgtccagcaaatacgtcgattgtggaatgggactcgaacgattggtgtcagtggtgcagcaaaaaatatccaactatgacactgatttgtttgttccaatatttgatgtcattcaaaaggttctttaaacaaagatacaaattttgttatgaattaacttattgcatttcccttagatttctttaaaataatataggcaattgacaatttctgggcctaaatttaatgtttattcattgccattgcgaaaaggtaatttataaaatttagttttttggttaagtgtactgctcaaaaacacaaataccaagggcgatttggggactctgacaaagaaagtattgacgttgcttatcgaatcgtttccgatcatatgcgagctgtgaccgttgcattggcagatggaattggttttactaatcaacaacagaaaaagagctcgtgaggaaatcattccaatcagtcagtttttaaattttcaggcgtaaaattaaggaattgtttaaacgcgccacgatttatggttctcaaatgctcggaatggaacggatgagcatgcatttgatggtgccggtcattgttgaacaattggtaatttaaaaatgcagaaactcataaaaaatgtttatagggtgaaacatttcctgaaatggcgcagaacaagcacaaaatcgccgatgctgtcagaatagaagaagaacgactttggaagcagagagacgatggaatgcgtcatttggaagaattgtttcgtaaccatccgccgacgagcaaagtttttccgggtgaactaatcgaaagttaa

SEQ ID NO: 46544 - DNA, 3926 bp, Heterodera glycines
atgacattccgccaactcgacataaaatgtttaaaatcatttttcattggcctcagtttcttcgccactttcttcgtttccacgaacatcattaagcccctacaaagccttgtatgtatcacaagtccgaacaactgcaaagaatttgtcaatccttcgtccgatccaaatttgacctcgtcaaagatcgcaccaattttttacttgatgatataccgttggcgacttaatgctttactggaggtgttctgctcgtccgatttccagcttgcggtgccttttggcttttgtatttcgcgaacagttggcaattcttattataattttatgtttacaggacattttgaaaaatttatgttatcattttcgggtttttaatgaaaatttctgatccaacaactgtctggggtaatccgttgacataaaagacttgttttctacaagtcacaaaaattatggattccataaaataaaaagttttggccaaattcttgaagccagaaccgagtttggcatttttggcacctgaaattcggattttggtaccaaaaaactgacccggcaattcaacgctggcaatttctgccagcattttccaaccataatctcagctcacagaggacaacactttggttaattccggcaaaaacagaaaatggcaaaatatgactgaaaaatgccaacatgaatttaaacttactcaattttctattcatttccttacggaaatgaaatgaaattgataaaaaaattcacgtgaatttattttgtttttatgtttttcatattataataaagaacggaagttgaattagtctgatgtaatttaaacaaatttctgtatgaattttgcatataaatttgacaaattttctcaaataaattcattaaatattttgatttatatatttttttaatttttagtgtttgaaaaaatgaatttttttctattcattactattatttttacattcgcaaaaagtgggtaaaatccattaaatatgcatttaaattaaataaataattattgatcacaattatttttattaaattattttatttttcatattttaatttgtaaatattaaaataataatatttaggcaacgcggtactaaattatgtggaagaagcatttagtagcagatacgaagttcaaaagttggccaattatgcaattgattgggcttttaacaacggaatgattcttcgttatgacatcagacagtaaaataaataaataattataaaaattaaatggttatttttgccttatttagcaatttcatagcccaattctcacccgtttcgcttcttccgtccccatttccgagagaagcatttgagaaagccatcgctgttcaggaggttaaaaataaacagacaaaacattcgttttataataaaaccatttaattaattaaggtcttaattattatttgctatttattttggcaggccatgcaattgctttacttccgtgtcgcttgcgatttagactttttgttagacgcttacaaagacgtagagaaaacagacaaacacataagacagctggtggacattctgcgggaagtgaaaaaacaaggcataaaacagccaaagacactgatgataatgagatcggcaagcaaataaactaattaatgaattagctaattagtgaattaatgatcattgtatttatgtgtgtgtttttaggattatatgctgaacacggtgaagagcagcaaagaggatggaatggatcgatacgagatcaaacaggtaaaaaataataatgaataagtaaaatttcaaatgattttttagatcgaagcgaacaccggcgccatcaccgggttgcgaattgatcgacggaccaccgaattgcatcagcgacttttaaaacgcattggcagggacccgacaaacgcaccacaaaatgagggcgatacgaatctgatcaactcactgttcatggcatggtaaaaatgaagaaaggatggataaaaacgatttaaaaatcatttttgagggcacatttttgggttttttaattgaataattgggaaaaaccaaagccaaatgatagtttattttcatttttctaaaaaaattattattgctctttgaatattttaagtgatttccaaatttcgcagtttcattttgagaatttaagggaatcctttggcaattccgacgctttgttcgtaattttgtcggcaaaatggaacaaatacaaatacgaattgcgcaacattgaggatgaattggagcgattgtctggtgggaaattgcgcgttgaatatgttccgctgttggaaggatatgagaagtaaaataaattttaaaaaataaacgaatatttttgaggttttaaaatctgcaaaaaatataaaaatcaacattaattaaatatatttattcaatttaaatgctaaattagagaaaaacaaattctagcgctattgattttttataaacaaattttttgtttaacaataatttttttagcttttcattggccgatgataattcgcttttgctaaatggcaaaatcgttggcgttgtgtattcagggctttccgcacttggctatcaagcaaatgaaaaggaaatgcacacgcggaaaatagtggaactgtcgacagcaattgtaaaataaaaaaatataaaattaatcaatcaaaaaatagtcaaaaaaaaaaattatttaaaaagcggcaagagagagattaatgagatttttgtaatatgatttaaataaaaatgcaattagcatgaaaataataataatttaaataattttttgacaaaaattcaaaatttttaacgaaaattgttcttttgtcggaaaaatatcataaatttttttaataaatattaaaaaacattactttgtggatttataagcagaataattttgaagctttatgtttaaacacttttcaaaaatggcttgaatattctttttgacctttttcgtttcctatttttagcacataatcaaatctcttccatggctattcgttttcttttaaaacacaaaaattgtttaatttgcagaaggcgccatcattggcaattggaattagcagctcgaagaaaatccaacaggtggcagcaataaaattgaaattctttgttaattgcataattattattaactgttcagcttctcgcctcgcctggcattttggagagatttttccctgaccccgcagaagcggacaaagtgaaggcaatccgtgaaacttttaccggcttatggggcctcgaaaaggatgacaagcaaaccgaacagctcattgcggtagggatgaacggcaattaacattaattgatgaattatttggttagaatgccatcgaacatccgtcaaattatgtgctgaagccaaacggcgaatgtggcggaaataattattacgacaacaaattgcgtgaaaaactactcaccatgacccgagaagaacgttctgctcacattttaatgcaaaagttacacccaatgacaacaaaggtgagactccaaacggaggcatactgtaagagaatgaatcattagaaaagtaatacggtatcgcaacattgagatacattggttatttttttaaatattttttgttaaaatttagaactattttcttcgtccattctatgcgccaaagtttggcctcgttgtcagtgaattgggcgtgtacggtaccctaatgggagacatgctcacccgtaacgtgtcgtccaatgtgcagcgtgggcatgtgctgcgtacaaagtcggcaggggtaagcaaacgacaaatgcgtaaacaaatccacttttttaaaaatataaaataattttaaatattttttatggttttcgcgtttttctttgcaggtcaacgaaggcggcatcagtgttggcaccgccgtgggcgattccccttaccttttttag

SEQ ID NO: 46545 - DNA, 911 bp, Heterodera glycines
aggacaatcaaccaacgatttgctctgctgtttgacataaacaattaattcaacatgcaaaagtgttctccatgtttttttttgaggataaaacatttgtgaagaaattttatgtgccaattttaacacaaaaaatgctctgatggatgatgtgtcatgatattatatctgtcaaaatttatgtaaaatttaaaaaaatagcgttttttgcgcgcgttataaaatgagtgcaccaacgacattggcgaccaacagcagacgacaaacgcccagcgaatttttgaagaaaattgtcggcaaaccggtggtggtgaagctcaattcgggtgccgattatcggggtccgttttggatttcgtgggcatttggaggggactattcatcagagattgtcgaaagagttttgagtttggaatagtcagtgtttttgggtctcgggacgagtcgtcaatattcggtcttgttgctttcatgattcaatatttggtacggcaaaaaaaaatttcacccgtaaaaattgataagttgccaattaattccgagtccctaatccaaaaaaatggaatccaaaaatttaattttaatcccgcaactttgctttttcacgcctttgtcccaattcgaacacttggaatggtattcgactgaagaaaaaaaaaactgagagtgcctcattttgcctcgggccaataaaatatgccttttgatcaattaggcacttctttacctagctgatttttcactcaatgtacaactttgcaggcattctctcctgcctggacggcttcatgaacattgcgctggaacagacggaggagtaccatggcggacagctgaaggccaagtacggggacgcgttcatccggggcaacaacgtgctgtacatcagcacgcagaagcaatgacggatg

SEQ ID NO: 46546 - DNA, 267 bp, Heterodera glycines
atgtttctgacccgcagcgaatacgacaggggagtgaacactttttccccggagggccgtctgttccaagtggaatatgccatcgaaactgtcaaggtgagttggaagaattcaattcagattcaccataattttcatagcttggttccacaagcatcggaattcacaccaaagaaggcgttcttttggctgcggaaaggcgttcaatgagcaaattggtggtggacgactcaatgagcaaaatttcggaagttgagaagcacattg

SEQ ID NO: 46547 - DNA, 486 bp, Heterodera glycines
atcagtctcggccgtccgtttggagtttctatgctttttgccggcattgatcacacgggtgcgcatctcttccatttggacccgtccgggacgtacattaaatgtttggccaaggccatcggtgccggctccgatgcagcggaacaaacgctgcaagagcactgtaaaaactgcgacaaagtgaggaaaatgcactcattgcttttcacattttatcattatcattcgcagaaaatggaaatggccgaggcaaaacaagtcgcactgaacacactcaaacagctgatggaagagaaaatcaattccaaaaatgtggaaattgttatgattaagccgcagacggacaaggaaggcaaaacggtagcaattggaagaaaatgcatattttgttatttattcccattttcagttgggcaaaattgtgtggttagaggaatcggagttgcaagaaatcatttcgcgattgtagtcgaaggggacggatga

SEQ ID NO: 46548 - DNA, 3464 bp, Heterodera glycines
acaaaatgacgtgcacgacttggacagccgcaccaatacgttgccgtcgtcctgcaaaaattccgaccgtgagcacattctgctccagcttttgctaaagctcgttgttggtcagcgaccggaaatacaaaaggtgtggcattttttcaaattaatgactccatttccacggcattacttcttttggtgtagcaaattcccctcccaacatttcagggcaacctatttctccgtcataaacaagtgcgtttcgtccgtggcttttggcgacactgcgcttgaccaggacaccgaaaagcaaaacgttttcaccggcggcgatttgggtgtgtttttatgaattcgtaatcgaagagtttatcgtaaaaatacatccattttagatgacgagtttgacaagatggagcgggacgacggcatcaaacggctgaacaaacgtctcgattccgcggtggaggagaagcaggaagcggtgtcactgcaaatcaaatattacgagaagctcaaggagttgcaacacgagtgttcggaattgcgaaaagttgtgcgttttaattccatcgaaagagagtaattttatagggcaaacattttcatggcttttgtgccatgagatttaagtcaatgtgcccaaaatgtttaaaattttccaatttttattaaacaaaattgcaggcgccctccggacgcgcattgcccccggccaccgttttggacttgcccctgccgaaagaattgggcaaaattgtcaacgggacacaaaagcatggaatagcagcaggcgcagcatttcccacggggccaggctgtcctcctccgccgcctccaccaccgccacctccggcactgcttatgccggaccataaacggaacaaattggtaacggcggctggtggttctgtcccaccgcctcctccgccgccgcctccaccgtcggcgctgaggccgggcgggggcggccctccgatgccaccgccgcctccgcctgggtttggtacgcctccaaccgcatttctgcatgccgcctcgccggagctgcccgactacttgaagaagaagtccggcaaccagccggaggtgccaatgaagaagcttccgtggaatgcggcaattgttgggccaaaatttataaattcatttcgtatttttcgcaaacaaattaattactctttcactgccaacagattcgaccaaacgcgctgaacaagaactcgctgtgggcacagattgacgagaaggaagtggcatcggaggatgtgttcgactttttgaaggccaaattctcagccaccgggtcggttgaatggaagtggatggcattttataattctttttgcagacgaatgaattgccttccaatgaatttggccaaaagaccgccgtcgaaggcaaaaactccgttggtcattcaggacgcgaaaatgttgcaagctttgggttcgttcgttcatatcgcaaaatacaataatttttggaataaaacccgcaatttttggtatattttataaatttctttgacttcccaaaaaacttgtttcagcaattctgcaaggctcttgcaaactgagtttcaaacggtggcgaaatgcaattttggaggtggacgagaaagcgctcaatgccgaacttgtggacaaattgaagagcgcactgcccccgttggaaatgatcaatcggctgaaaaagtgcacggatgacgaaatgcagaggatgccagaaggggaacaggtgaacaaattggacactaaaacagcgatttttttgaaaaaactgtaattcgccaaaaatttcattctaaattttctttcctcgtcgtcagtttgtcgccaccctttcgtccatcagtggtttgccgctgcgtctggaggccatccatctcaaattgtgttggtccgaagcctttggagaacttaaatcgggcataacgacggtgaccgaggcgtgcgaagtcggcacaaatttcatttttatttatccaaaaaattttttaaggaattgctcaaatcccaagggctcaaacacttcatcaacttggtccttttggttggaaatttcatgggacgcacaaaaaactcaaaggacgccttcgcatttgaactaagcgtactcaacaaagtgcggttgttatatgtgtggcactttctcttatttttggatagtttctgttccaatttgagtttttgcttcatatttatccccattttgggtttattttctttcggttttttctaaattttaattccattctttagctggtcgacacgcgtgactgtgacaattccgaaacccttctccacggactcatccgtcttctgcaccggaaattcagcggaaaattcaccacttttgcactggacgactttcaccacgtttccaaggcgtgccgagtggacgtgtccgagttgagcaaaaacaaaattgaccaagtcaggaattccattgagaaggcatgtttttggattttatttattttttctttattttatttcattttctacttttaggtggccacgtatttaagcggctacaaaatgcaggcggaaaacgaccgatttaatgagagaatcggtgcatttgtcaaacaagcgaaggaagatttggtcactgttgacagtctatgggaaaatatgcagcgaaaatggagcgccgtccaagcgtatttgtgctttgacccgaaaaagtacgccatggaccgactgtttgcggacgtacacacattcaaggggcattaccaggtgatttgatgggattgttatgcatttttacattgccgggatccatgcctaatgaatttataaagttttactggaattactaaattagacaaagtttaaaaaattatttttttcgttataacattttgaatttttttattgttattctttatttttgaagttttttaaaataaaatttgatttaaaaaatagaaaagaaattagtttcaaaattttaatatatttattttttgaaaactcagcgacaaattaaaaaaaaattttaaaataaacgagagaaaagacggcttttctgggacatcttagtgcacacgacaaagtcattgaccgtttccacccttttcagaatgccagggcagaagtgttgaaggatcagctgaaaggggcggtcgacggaagagagggggcgaaagcgtcgtcgaggaaaccgttcaaaccgatccaaccgatcgcaagcgaagcggcgaagagagcgcaacagcggaacagcaccagcagccgcagggagttgctgttgtcgaacgaaggcggcggcggtggttcaacagcgacaacgcccgcccgaccacaggcaaccaaaattggtacaacgccaaacacggtgccatttggcgcgaaggatgctgccggcggcggcgacggaggcgtcattgacaaaattgagcagatgttggaggagggcatgtaccgaatcgagtgccaaaagaggcctttccgtgttcggcgaag

SEQ ID NO: 46549 - DNA, 791 bp, Heterodera glycines
atggaagaactcgtggcgctctcccctggaatccgcgtcggccgctggacgatcacaaagaagctgggcgccggagcattcggagccgtctacctgtgcgtgaacgaccaaggagagcaggccgcgctgaagacggagccggtcaacacgccacatccgctgctcgtcatggaggtaggcgggggaggaggggcgaaaaattggcaattcaaagtaaaaattttttttcaccacccaggctcacgtgatgaccaagctggacacccttcgagacggagacgggaagcacttctgccgctgcttggacctcgggcgcgatgagcaacaggaccaacaatcgggacaaatgaagaagttcaactacatcgtcatgtcactcgtcggtcgtggcctggacggagtcgtcaaggatgccggtggccgcctcagccttggaagcgcagtcggcgtctcgatccagatgctcgccgctctcagaggactccacaccgtcggctacctccaccgtgacatcaagccgggcaactcgaccatcggacgtccggaatcaaacgagatccgcctgctctatctgatcgacttcggaatggcgcgcaaatacaccagggacgacgtgagtttgagtgaagcgctttgaaaaaaacaaaaataatttgttccctttccccccttttcaggggagccaacaccgcccgcgcgttgccaccaacttccgcggaagcccccgttacgctgcgatcagcgctcatctcggacgcgaatacagccgcaaggacgacatcgaatcttag

SEQ ID NO: 46550 - DNA, 1191 bp, Heterodera glycines
gtttccgacggctcaagtccaacccgttcattcagttcagttttccattcacttgcatccggcgcaattgcaggtcctctctttctcacttttttcattaatatgctaataatggtgtgtgtttaggagcatttgctaaaacggcgatcgcccctttggataggacaaaaattaatttccaaggtgggtccaacaacaaatttttccaaaattccacatttctttcaataatgtttcgtctgtgtttcagtgtcgccttctcgtcgttattctttcaaagcggcacttcgatttgtgattttgacctaccgggaacaaggatttgtagccctttttcgcggcaattccgcttctctcgcgcgtgttgtgccgtacgccgccgttcaattcgcggcacatgaggaattcaaacacatgctgaatgtggataaaaataggtgggtgtgcttttttaaatccaattttttttagcagaaatttggctgataattgtacttttttggatactttactgttttgggtcacaatttaaaatataaaaaagccaacaaaaggcccgtgcaaaaataaaaaattttcgacaaattaaaaaagacaattttaatcttggttcatttttggcatttttgcctccaaattattattgtttctgcgcggtcttttgttggtttttttattttttaaattttggtttcccagaacaggaaaccccctttttgtgtccaccaatgttttgccatttccatttttctttgttagttcagcccaactccctaccggcgctttttggctgggactttggccggtgtcactgccgttgtatttacttacccattggacactgccaaagttgtctttcctttttcaatttaatttttttttttgcactttaaaggcgcgtctctccgtgtccaccaaagaagagtaccaaaatttacgtgccgttttcctcaaggagtgccgtgcccatggcttcctcactttttaccgtggcattttccccactctgctcggtgtgatgccttatgctggcctttctttcttcacttacgagtcctgtaaactcttctacacaagtcagactcatttgaagcctgatataactcataatgagaatgcaaaattcctattattttttattcctttttatttttttttagaggaaaccggtaaccccctgaacccgttgtt

SEQ ID NO: 46551 - DNA, 680 bp, Heterodera glycines
atcaagtacccatcgaacttcatgctgctgcgcgggaaccacgaatgctccaacatcaacaaagcgtaagtattgtttttttttcattttaatcttcaatcttttttcccctttcagttatggcttctacgaggagatcgaccgccgttacccgcgaccgggcgctcgtcgactcttcgacctcttcaatcaagtcttcgcctggatgccattcatcggactgatcggcgagaagatcctctgtaagtttttttcccaccatttttcgataaatcactgatccacttttttcaggcatgcacggcggcatctccgacaagatgcgcagcctggatcaactcagcaccctgcgtcgaccacacacaaggccaccactccgttcgctcgaaattgatctactttgggccgatccagcgcaaggcatacgaggcgtcgtcccgagtaccagaggagcgggcatcctgttcggcgaggacctggtcgcccaaatacgcactcggcttggcatcgactacatcattcgggcgcatcaagtaagtttgtgttttcaatttccttttccataatttcttcactttcagcttgtccttgacggagtggaatatttcgccagtcgccgcctgatcaccgtgttttcggcacagcgctattctgggcggacaacacgggagcaacgctga

SEQ ID NO: 46552 - DNA, 3203 bp, Heterodera glycines
atgaatcgttttagaaatcaacactttgtcttcggaaatcgaatgtttgagaagaacagcgttttgcagctgcagggcatcccgctcatttgcaaggagggcatgcagaagaatgtgcgcttcgtcggcgacagtccccagcagagcactgccgtcattcagttggacggtacgctatgcgccattcactcaaaatgtcgttgtttcagccaagaaatcggctttctttccggccattggactcgtcgatttcgtcggttacttcatcaattccgatcctcaccgtctcgaaagtgacgttcagcagaaggctcgcgttgttaacaagcaaatcaaaggtaacatttcgaaaacctcagaattactcaaatttcatcaaactcaggccttgccgtccaaacaatccatttgcctgaaaatcaggtcgtttcttcggactgttccttttgtgttccttttcattgcatccctttcagatgactttctctgcttcgggtttgactgaccgcggagccaacgaaataacttttacgatcgacaaccatcagacgaatttggtgcagtattacgaccaaaagtacaacaggcggctgcgctacccgtgccttgcgtgtgtcatccatcgcaggggcaatcaggaatcgtacttcccgatggaagtgctgaacattgtgtgagtccaactttattcgggtttgccattttagggatacaatatcccgtgggcgattacagaaatccctggacagatttcgtttaacattgtgtatttttgtatttttttttacttcgtttagcgatggacaacgtgtgtcattggacaaacagacgcccaaactcgccgaacaaatgatcaaaaaatgccaggttctgcccgtcgatttgccgcgtggcattgagacacagcgtgacaaagggatgatccaaaatgccaacccattctttcgtgcgcacgaaattcgtgtcgagaccaatatgatgcaagcggaagcgcaactcctttacccgccggcaatttgcttctcggcgccgattgagaaaatcgaaccgaacaatcgtggtggtcagttgcgtctttcgaatttagcattgattttgttcggcttttttttagtgttggacttccgtttggctgaccgtggacagccattgcctcttcgttattctgtcccctgtaaatttccgaaggtttgggcggttgttatcgtgcaaaactccgttcaaagggaccagtgcaggtgggtcaacggagtcagagcgaattcaatggccccattgttgtcagaatgttctgtgagtgtttgattcgatgtgcccatgcgcgcggggttcagatggaaatgccaccacgagtcgacaattttgaggacacatcgatgtgagttggacaaaaaatcagttttggttttatttgggatgggatgaacggacagacaaatagccatcctttaaattcttttagtgagcatgttagtgaacaattcgcctattatgcaaacaatcgctgtaaatttgtgcttttcttcgcgcctgggaaggagtcggctcacgctggtgatattcaccacgtttttaaacttcaggaaattgaacatggcaagcgctctctccctcttctcccctctctctctcccctctccctttccctatctctctctctctcttctcccctctctctctcccctctctctctcccctctctttcctctctctctctcccctctctctttccctatctttccctctcttctcccctctctctctttccctcttgtctatccatctctctctctttccctcttgtccatccatctctctctcccccctctctcttctcccctctctttctcccctctctctttccctatctttccctctcttctcccctctctctctccctatctctctctctttccctcttgtccatccatttctctctcccctctctctttccctctcttctcccctctctctctccctatctctctctctttccctcttgtccatccatctctttcttcttaaggtgttctgactcaacatgtcgcgcctaaaaccgtggacaaggcccttggtcgccagggtgccatcatggtccttgacaacatcatgctgaagacgaacctgaaaatgggcggtgccaattatgaaatttgtgctgcacaggcattcaaagaggctaataggattcgctatgacattctgtaagtgcttggtcgtgagaatttgaaccagtttcattatcagttccgaacaatggttgggtagaaaacggatgtttttcggcttggacatgtcccacgcgccgccacagactttattcgaacgacgtacgggaaaagcgccggccattccgacgattgttggcgtaagtgggcttgacggtcgctgctgcttctgtcccagagtttgattttgccgtttcccagatggcctacacgatctccgagcacttgctgcagatgaatggcacctattggatgcagcagccgcgtgttgccaccgtacaaatggcttctccgatggtcaacgcggtcaaggaggcactgatgactttcaatgccaaaaacgggttcttccctgaacacatcttcgtgttcagagctggtgcttcggaaggcgaatacaaaaaggtgggcgagacggaagagttgcaaaaaggagaccaattgaaggtggcatattgggagggcggggcattcgccactgctttcgctgaactgacgaaggaacgcaaaatgtcgaagaagcctgcgttgacactgattgtgtgtcaacgtaactcaaactatcgcatcattccgaacaacgttcgcccgggcggtcgcgcacctgagcagaattgtcagccgggcactgtgctggacaaaagggtcgaatgcactttcaaattggatgttggacaattatgttgaatttcaggcaatgcattcctcactgacggaatttcttttggtcggccatcggactatccaagtgagtttttattgacaaattgacaccccgctctcactaccttttccattttttacagggaaccgcccagcctttgcgctgcactgtcgttatcgacactgccgaacctcggatcaaactcagcgaattggaacagatcagctacgcgttgtgctaccagcatgggatttgttgcagttcgacagctgttccgggcgttctctattcagccggggacttggcgaagc

SEQ ID NO: 46553 - DNA, 163 bp, Heterodera glycines
attgtaccacccaacaaaaaatggcgcatttccaatgaatttgtgtcgctgttccattccattttgtccggcatttgggcacttgccattctcacacgctttgatttccaccaaattgacgacctggtcaacaaggattcgctcgacgcgcgttatttggttg

SEQ ID NO: 46554 - DNA, 883 bp, Heterodera glycines
atggacttctttttctatcatttacaaattaatttaatatttttatttgttattattattccaaaattcagccaatccgaatctgatcgactcagggcagagcagttgctcaatgagcacaaacgtgactttgaccgtcaatatgaggagaacaaggcgcgcttagaggacatcagcaacacggtgcgtataattaatggatatttcattttaaaaacatttttttaatttgccagatttcttccatcgatggtgcgctgcccgcattgaatttggaagtttgcggtgccgactctgctccatgcgatgccgtgtgtggtggacctggtccaacctgttcacgttgtggcggttcatcgtgtccaggcacattaaatttgaaaaatattaaatattaacgcaacaattaaaaattgattttaatttcccattatttaaattgtattttttacattattatattaggctccgtatataaagctgaacaagccaaacattttgcacacgaagctctcgaaaaggtggagacaaagcaaaaagaagctgaagaggtgaattatttttatttatttaaatttttgtttttcattaaatatttaaaatgcgtttattaattaatcaaataataattgtttatataaagcttctgaaaaaagtgcgagatgttctgcccaaaacgcaggaggcacgcaaatcaacagaaaaagcattggaaaactccaaaagagaggcaaaattataacaaaaaaaaaagacgggaaaatgccaaattttaaaatttagtccgaacgtatcaacaaaacgcatgatgcattggtggcacaaattgagcaaatcaaaaatttccttgaatccgaaaggcataggtcaaatttacaataaa

SEQ ID NO: 46555 - DNA, 546 bp, Heterodera glycines
taccttttaacttaaacccccttttgccaaaacgcaccggtctcgttgctctttgaactgtgggtcaacggtgttgtaacgcacatgctcgtgcagtttgtctgcaggaatgcgttcgtttgtcagcggcgaaattatgtacttctccgtggaggcagccgcagttttggacaccggaccaccacgcgctgaaaacaaataaaacaaagaattaaactcatcggaaatcaaaaatattaacagttaaagttattgagttgacaagtcctcgtaaaattaccagaagtcaagcattaaatattgtaaaatacccacattttttagggtcgtagtcgcggatgattacgctgccggcggtcggcgccgcgggtgccggttgcgtcagcgttgagccggtgtgttgcttctccgccccgatgttcaagcgttggtgcagttcgccagccgcatcctccgccgcttcgattgcggctcgttctttggccgtttcctcgtcacccgactcggcgccgccctcctcgtccgactcgaccttagcgtgggggg

SEQ ID NO: 46556 - DNA, 3081 bp, Heterodera glycines
gctgaactacgcgtgtccaatcgggaggaggacgcgcagaacatcgaaccgtcaatgagtggcaaacaaatagtcgggttgatcattccaccgcccgacattcgaagttcgacttttttcattttagtgaatttgccattttcgccttcgcaattgctccatattattgtaactaacgcctttttcttctctttgcagcaattgtggacaaaacggcgcttttcgtggctcgcaacggattggaatttgagatgaaaatcaaagagcgcgaggcttccaacatgcgtttcaactttctcaaccctaccgacccatactttgcctactatcgcaacaaggtttttaagcaaatgtcaatttatatgggtactttctcattttcaggtcaatgaatttgagacgggcgttgcatcggcggacactcagtccaaagtgaagttgccggaggctgtccgtgagcatgtgcagcgggccgaatttattccgcggctgccgcccaaaccgttcgaattctgtgccgatcctttgacgctaaacgcattcgatttgtaagtggcgcattgaactttttacccaagttctctttttttttttgtcttactgtgtgtttaattttccatcgttttgaatcaaaacccctcctttttcagggatctcatccatttgaccgctttgtttgtggcgcggaacggccgtcaatttctcactcagctgatgaaccgtgaggtgcgaaacttccagtttgatttcttaaagcctcaacactccaacttccaatacttcaccaagctggtcgagcagtatacgaaggtttatttatggcaattcaaaaagaatctacattgacttgactgctaagattaataattattgcccgtttaaaatccttatttacaggtgctgatcccgccaaaaacgattgtggatgatttacgtgcttcggtcactcaacacaaaatcttggaggacgtgcgttaccgcgtcggttgggaccgccaccaaaaagcgctgaaggaccgcgaggaccaagcggtggagaaggagcgcattgcgtacaatcaaatcgactggcacgaatttgtcgttgtccaaacggtggactttcagcccagcgaaacacgtgagccttacatttttcgggttgaatttcgattaaattaggtccactcttaagttaaatcaatgattttgcaagatttggtgtagccattatcatctcattttaccctgattcattgcaaagaaatctttaggggtttcttatttcaaatgttgttttcaaactatttgtcagttatttttatggttcggttttttatttttttagtaaatttgccgcccctgtgcacgccaaaggatgtcggggcacgaattctgttgcaacaacgtacggaagcggccaaagcggcggctgagagtgtggcgatggatgtaatgggaacaatgatctagtttttttttaaagatattccggcataggtcatggggtgggaagggggtaaatttcgcacggggattcgaggcaatcgcaaactgtttgtagaaaacaattgaagccttaaaaatatgtttattgtaaaaatccccaccccccacgctaaggtcgagtcggacgaggagggcggcgccgagtcgggtgacgaggaaacggccaaagaacgagccgcaatcgaagcggcggaggatgcggctggcgaactgcaccaacgcttgaacatcggggcggagaagcaacacaccggctcaacgctgacgcaaccggcacccgcggcgccgaccgccggcagcgtaatcatccgcgactacgaccctaaaaaatgtgggtattttacaatatttaatgcttgacttctggtaattttacgaggacttgtcaactcaataactttaactgttaatatttttgatttccgatgagtttaattctttgttttatttgttttcagcgcgtggtggtccggtgtccaaaactgcggctgcctccacggagaagtacataatttcgccgctgacaaacgaacgcattcctgcagacaaactgcacgagcatgtgcgttacaacaccgttgacccacagttcaaagagcaacgagaccggtgcgttttggcaaaagggggtttaagttaaaaggtacttcgcctgaaaaaatggggttaaaagctggagttctttaagaccttttttatttagtgaacaaatggatcgccaggacgaagacttagtgatggcgcccggggcagaaattagtcgaaatattgccaaattggccgaacgtcgaacagacattttcggtattggtgaaaagggagccgaacaaacaatcatcggcaaaaagttgggggaggaggaacggcaaatgccgcgttcggacccgaagaccatttgggacggacaattgtcgacgattgatgctaccactcgcgcagcgcaacagagtgtttcgttagagcagcaaatcagcgaaatccaggttagaggacggaattaaacgaaatataaataggcaaaatggagggggtggaaagatttacacttgaatttcagcgacagcatgggtatttgccgaacccagccgcagaacgaatggtgccgtcgatgccgcccccgacttcgacaccctcacaacaattcggcggtggacaaccgccgacttcacattcaatggctccacctgtaaatagttgtattaatttttcttctcgataatatacaatatcaagatagattttttaaaacgttgcttcgttgataacatggtttttttgttgccaaaattttgtgtttccagcagcgccctccgcctcatcagtccaccggtggcattgcgtccaatgtgcagaaaattgtgccggttccccaacagccgccgcaaatgtctattccaccacagcaccagcaacaacaacaaatgcgtcctccgcagcaaatgccaccgcaatttatgcagccgccgggcggtcgtccgcatatgccacctccgcctcatatgggcatgccaccgcacggcgttatgggcgcaatgccaccgcacatgcaaccgggtaaacaaacacatatatggggatcatacatgaacaagg

SEQ ID NO: 46557 - DNA, 1815 bp, Heterodera glycines
atggatttgttaaaatcttacgacggctcttcatcatcggacaatgaacaagaattggcagatataccttcttcgtccaatcacaacaaattgctcgctttgaaaatcccatccatcaacttaacacccaacgtgattgaacaacgcgccattcaacaggttgcggttgtggatccaaaaaccaaagagttgtatcacaatccgcgcttcgacgaattgtttagaccagaggtagtgccttatgtcttattgtgtagggttagttatatcttttaatatttgtgatccaccggatttcgaacccttaaatgttttccttttgtgatagtgtaataaataaatttttccctcttcagagcggcccacaaaatccgtttaaaagtgaacatcaacgagcagaaaagaacacactgaccggctatgtggagccagcgcatttcaacgccttccattttgagcgttcacttcgctcctacgatacgcttggctatgcggataatccaacggcagacacaaccagcgcaaagttcgttggtgacgttggacaagcgcaagaaaaggccggcgagtcgctttttgaatcagtaaaaactggcggacagaagcgaaagagagtgataaattacgacgcatcaaacgttgacggatatacgggtaaaaacgataggaaatactaattgtaagataataacttcatttgtaaaggaccgtgggcaaggtttgaggacgagaagacaattgctcgaccggacccagaattgcagaaggaaatggacgaaattgtgcggaaacggaaactgaaaagtcgtgctggccgaagagcggccatcgcggaattgcatttggcagaagagagcaccaaattgcacagtgaacatttatcttttttcaattccataataaaacaattagactttggtttcatattgcactttatcacaccaaatttaattgcagtaaaagatgacactgactatttgggccgttcctttatggaaccgccgaaatacacgggcaccaatctgcgcgaggactttgtgcccgaccgctgtttcccgcccacaaaacaagcacacacctacagcagtcacaccaaaccggtgaccgccatccgatggtttcctcgtagtgcgcacatgtttatctcttgttccatggacggaaaagtaagacggatacaccggaattgggaaaataaacgtacggcttcaggtcaaattgtgggaagtgtacggcaaccgtaagttgatccgcacatacactggacacaaagtgcccgtgaaggacatttattttaacaacaccggcactgaatttctaagtgccgcttatgacaattacatcaaattgtgggacactgaaaccggtgaattcttcaatttaatgttcaaatatttattttgtcatctaaaggtcaggtgaaaaaccgctacacaattggaggccatcgggcgtatgtggtcaaattcaacccggacgatgataaacaaaacattttcatggccggaatgtccaacaaaaagatcatccaatgggacacgcgaactggcgaaatcgaacaagtggaaaaataattcaatttttgaactaattaatgtaattttttaaggaatacgaccgtcatttgggtccagtgaactcgatcacctttttcgacaaaaaccgtcgtttcgtttctacttcggacgataaatctcttcgcatttgggaatttggcattcccgtggatacaaaactgattcaacatgctggactacattccattccttcaatgactagggcaccaaatggtgttagaagaatatgcaattttaa

SEQ ID NO: 46558 - DNA, 491 bp, Heterodera glycines
gaaattcttgttctttgatcgtgtccaaatgtatgaacagtaccagcagcagttaccgcattggacctcaatggtggaaaaagccgtaagtgttttaaattattattttggattggtcttaatgtcttatttagtatttatcaaagtcccgtggtcaatccattggagcgtgggccggatttcagttttgtggatggtcgtaggcttcctttcaccactgagtcggaatttaatcggagagtgaagcaagtggaattgggtgtatgttttactaatttactttttgggttagttagacaaaatgggttttttagaggaaagttgtgcaatatttggcagaaatacgccacgcggaggagctttacaaagaaaacaacttacaaagggaaattgtgcaacagaaaattgagcagaacatgccgaaacagaaggggacagaagaattattctgagttgccattagttcattttttaatagaaaatttattttt

SEQ ID NO: 46559 - DNA, 1027 bp, Heterodera glycines
  unsure (1)..(1027): unsure at all n locations
attgctttcagctggtggtcggccgaatccgcagttgtcccgattggtcgggtggggaggacgaggacgtgctcagtttgggccttttcccgggcacttacctcgaattctccatggacgacaggtggatttttaatcatattaaatagattaggtaattaattacaatttcctttttctttcgcagggttttcttccaatttgaggccgcttgggactcttcgctgcacaattcgccgcttctcaaccgcgtctcgggctacggcgaaaacgtttacatgacaatttcggtaccgaattcaattcaatttaataattcaattaatttattcattttattaattgtttaggcgtatatggaaattgaaaattgtgcgcagtcggcaattatcaccaaagatttgggtctgattgtgtacgcacgggactcgaagatcagtgcggccagcagattttgccggtcactgatcggcggaatctcaaaaagcgcgggtaaatgggcgacaaaaatggcaacaattggcctaccaagcatttgaaatttttgggttttttgacgtgccgtcatcgccccctttttttgtcggactttccaatgccaaaaatgcctatttttaacattttgccttcttctgcttgcaatgcaccgcttttcgatgccttcagaaatgaaccgtgtgcccggtgtttaccttctcaccgtaatggaggacagtgaggcgaacaacagtcccggcacggcacggagaaagcggcgaattttggacacatcgtcaacatgtgggaagacagctaacaaaaaagagccatcggttcattctttcattttccacagatgtgcgaggcgaagagaatcttggcacttggaggttggcggaggaaaagcgaaaatgccaattanaaataataattaaattaaaattatttaggccccgaggggactcaatcattttggagcaccaattggagttggagaagctgagcaaacttcagcaagtggagcgaatgcgactgttccttatggtca

SEQ ID NO: 46560 - DNA, 720 bp, Heterodera glycines
atggctgtcgctaggcctgacctcgtgatgaaggcgatcattcccggtaagacagaaaattaaaaaaaatttttttttaaattttatgggttttttcaaaatggcatttctttaattttttaaaatttttttttaatgagatgcctgcagcgaaggatggaaatttcatttgacatttttcaaagaaattcaaaaaaaaacatattgaaaattgttttgaacaaaaggggagaccttatcggctgtaaaaaaaattgtttttttgtcatattcttgaaaagtcttcccgggggctttcggtgtcgctgataacgaatctgacacaacccgataaactgactaaatttttgaaaattacaatttgtcaaaaaaaaattttctgtttttttttggccggcggttgggaaatcaattttttttagcgtttttccattctcccttccccccttatacaaaaatccaaattcagtggtcatggccggcattgtggccatctacgggctggtggtggcggtgataatttccggccggctggaggcggccgggcccggctacaccatcgaccgcgggttcagccagttcgctgcaggcctcgtgtgcggtctgtgtgggttgggcgccggctatgccatcggcgtggtgggcgacgcgggcgtgcgcgacctgtcgcagcagccgcgcctgtttgtcggcatgaatctgatgctgatcttctctgag

SEQ ID NO: 46561 - DNA, 1004 bp, Heterodera glycines
tgtaaccagcactgtctgtagagtttttgaacgaattttgagtagtaaaattttagaatttctgaacagtacaagattctttgataaagaacaatttggattcttaaaaaatagatcgactacaactcaaatattaaaaacgatggacgatatatataattctatacaatagaatcaacaaattgacataatctatattgattttgtcaaggcgtttgattctgttccaattgatttattacttcaaaaaatcaaaaagattggaattgaaggaaaaatttataattttttaactaactttttaaaaaatcggagttttaaggttaaaatcggcgatgaattgtcagaaagtttcaaaatattttcgggagtgccccagggaagtgtcttagggccattactctttttaatttttataaatgatctgccgtcctttatttcaaataaagcatcatcagttggcataaaaatgtatgccgacgatgttaaattatattatgcccatgaaaacgatgaccattcaaatcagttggataaagcgattgaggctttggaaaaatggtcaaaaataaatgggttagaaatttcaactgaaaaatgttttgttctttatttagggaaaaataacaagaaaaaagaatattttattaactcaaaaaagatttcagaatcggaaagtgtacgtgacttgggaattataattgactcgaaacttaatttttcagaacatattagcaaaattatacgaaacgcatatcttagaattttccaaattttgagagtgttgaaaagcagggaaataaaaactctaacagcagcctataaaacttttgtacgacctcaagtagaatatgccaccaaagtttggaaccctaatttaaaaaaagatatagataaaattgagcgtgttcaaaaatttttcacaagaaaagcacttagaaaatgtgggtttgtgtacaagggggtgtggggaaagactaaaaatcacgggtttacataaatta

SEQ ID NO: 46562 - DNA, 787 bp, Heterodera glycines
atggacattgccactgactttgacgggttggggccaatagcgacggggaatggcaaatcgacggtcagcgaaagtgacgaaggtgagctgattggtaacaaagtgtcacaaaacaattcaaaaaaagcagaagaggacgaaggggaagaggaatcgaccacttatacgaacattttgggcgaagaaaaggacgtgacgaagggcgtgggagcgatgttgaaattggccggccaaaagggctatttggagtcgggcgagcggaagctggaggaaggcaaactgaagcacctggagagcaaacgcttctccaaagttgagcagggacgatagtaagtgttttaattgatgccagtcatgcttggattacgaatccgttttcttaatttcggaaaaataatattcggcatcagacggggagaggggtctctggccccgtttagaacggattctctcgcgttttctattcgaagaagcgttttattttttggtatgctcctttttggagcaggtcgtttcacccgaacaatttaagagtacttcatgaggaaatttcaaattttgtaattaacggatattttttgaggagctaagaggtggaaaggaaagttaattaggagaaatacgctcgttctttttccctatgctccctttttcaaattcggatattcagcacattttactctttagtgacattgaggacaaaacgatgcgaaagttggaacgtatgggcacaacggggacagggccaactcgtccattccccgagaaagcggagtacgaaccgaag

SEQ ID NO: 46563 - DNA, 1423 bp, Heterodera glycines
atggcaaatgatgcaaatatcattgtcgccgcaagtgccaccaaatgcgtgatgtttttcgccaagggattgcgttccaaattcactccttacgtgtcgttggttgtcccggtgatcttcaccaagttcaaggagaagaaacagttgctcagagatgcgctcgtcgagtgcatcgatggcatcgcaacatataccgtaaaaatggataatccaatcgaaatgaatgtttaaaaaataatttgttttttatagagtttcgaccacctatgcaaggccgtgctcgaggctctgtcctccaaacagaatccgagtcagaaatcacagacggatttgttcatttaccgcgttttccgtacccttccggccaacgaaattcccaagggtttgctcaaggatttggtggcaattctgagcaaagtcacattttttcaaactttttagcctaattttcggccttttagcatggctttgatgccgattccgaagtgagggactcatcctttgctgcattgggtgccattatgaaatgcactggagaaaaggccttaggctgtttcatttcgcctgaattggccaaagacacgaacaaaatggccaaggtcgtttaatgtttctttttcaaataattttgttatttgcagattgctgaaaaccgtgagaaggcaatggctgactttccaaatgcaccgaatttattgttttcgccaaaaaagtgtttttcatcgttaaagttttcaaaattctattcaggatcggattgagctccttgccaatgcgaatccctcttcacgactctttgctgactcggcaaaaaagcgagatgagcccaagtctcggcataacctaacattcaactcaactccggatgatccaattgcaacaaaaaaggatgctgatcaaacatcggtaaataaactttgtacgcgtcatttatgattttgtctacaatttaaaaaattgtttttgaaatttatattagttttgttaattctgttctcattatctccaaaatctccggaaatttatatatttttttagaatggccgaagtattggctaaaataagaatattttttgtccaaaaaagcattgtaaatttggtgttttttgccacaagtataatagttatgcaatttgttatcagattcggtcattcggtttcctcctcccccaaaacctccgggatttatttttaatggccggggcattttgattaaataatagtaattttcccataatttcagaattgggccggtgcccatgacactgcttttctgtctggcactttgtcctccaatcagcgaattgagtgcggcactcaacaaatcggttatgaaaaaggtgttcgtactgctctgtccttttctcgtggtaaagcaatgcctccgtcaccgatgcttttctgtgccaggaaaattcgttga

SEQ ID NO: 46564 - DNA, 1491 bp, Heterodera glycines
  unsure (1)..(1491): unsure at all n locations
tctanngagtctgaactgggcttactgaggacatcaaanagggcccggctcatcttttgagctccccccgtactctctcccaacccatccaacaactcattgcgcttggccgcaccgtttacgcggttgaactttatttgcggtgccgaagtgtcgcgctgagggcggctgctcgagagttgaccatcagtgaggagccgttgtcgtacgttcgccaagtgtccggcctttttgtcaacgacattttggaggcattctccgccaccgtcgctttttattttgccgcttctcctcttatttaggtttgccaggagctttctccgcaccgcgaccaactttgccaagtgctgacttggagttcgcgtgagttgagtgtcctcctctcgctcatccgtcgccatgtcatcgaagttgctcccacaatggccgttctcacgtattacccccgcgaccctttgcgacaaatgccatcatttgtcacttcattaggcacacttggcgtattttgatgagcaaatgtgcccaactcgtcccgatcggcctggacttgagcttcgaagtcaatagattggcggcgccctcactcaaaaatgccttggaagctaatttcggcaatattctcgactcaattcgactcagaaattcggtcggagagacatcgaaattaattcacattttgttgtcaaataatgcaggaagaacgttggacgcccttttcactcggaactgatcaaaatctgataagattcctcgaagaaatgtccgacataggtctgcaaattgagtgggtgcgttccaattgttcttttgctattaattaatcacctctgcttattggtagcaccatgtctatttgtcccttatttgctcattggtcctccctttgagccattttccacctttaggccatttgtcgtccctcttccccctcctcgtctgcttcccccctctctcccggtgcctaccgatgcgcgttgaatttggcccaaagtggctgtctttttgcccgcaccgccctccaactcagtgcgtttcgcttcttcttggcactttaaaatgctcactttggacaggccgtgacctcgcccttctgaacacttctccccacctccaccaattgtccgattcgctgatgcattcaatttggacggaacaattggcacatctcactgccggcatgcacaaatcggtggtgcaccactgcacaagtcgattcatcgtttcccaggcactcttttcttttgtgccattctttgctctttcctcactttggccttttctaattatttcttcaccattcgttttgtcttattcttgccgctgcaggtgctgcctttatgcgaaaaagtctacgaactcagcgaaaatggcactggcattttgcaccaactcttaagcacgaaattcccccatttgctgcactttcagcgcaagccaaccaacacttttttgagcagcaaaagtgactcttctgaagaggtggccaatgtg

SEQ ID NO: 46565 - DNA, 658 bp, Heterodera glycines
atgtgctccaaaccgacgaatgttttcctcttcaaacgccttgtcagccccgtccaaatttgctgccgttcaataaaaggcggtggtttggtccatccggtgaccggcaaagagccgccaacgcttgaggaattcgacccgtaaaaacactcaattttaattgctataattgaaagcgatttgttttttcagtttgaaccccggcgagtggcagttgggggtgagttttctcacttaacaattttcgagtgggggaatacaaaaagcactcgtattttacaaaaacaaagcctagcctaaagcttgggccgaagcctctgggccaaacctaagaaatttttacgagttgtcttttaatgagttgccatggcatcatttgacaaaaaaaaaaaaaaaaatttccaccatttcaaaactattctaaacgacaaagccataattagtgaggaataattcatgtttcttgatgtttgagcccttaaaagtctttaacagtgttgtatactgtactgtgtcattaccacaaattttttctaccgtgtttttattttatcattttttctttctacaggcctatggtaaaattttgcctcgtctcccggagggcacgcgttgtggcggtttggtgatgggcaaatacggcctgtacaatccgaag

SEQ ID NO: 46566 - DNA, 1854 bp, Heterodera glycines
ttttccaggtcgaccaccgcgccagtgggcattccattcggtgagttcaaaaattggttatatatgtatttacattgtacaacaaataaaacaaattccattttttagtggtggacaatgacgggaaaacaggttgttgtgggaatacaatgctgaaaatgtaaaaatacagaattgagcatttttgattccattactgtgagaatttctatttttttaaccttttctaaatcgaaaattcgccgaaattggacgggattgaattcaatcccaatgagaatttatccgtcaaaattggttctcaaaaagggttcgcttaaactacagacaaaataatatcccgatccattaacaattcgttgtaaatttgattttcgcatatttagaacgcgtctacgacatttattcgcggctgctcaaagatcgcatcgtttgcgtcatgaacccggcaagtcattgtgaaattccattttataaaatgaaaaaaagaagaaattttggcatatttggatgagtgattgaaatttgttcagattgatgacttttttgctgcctctgtgatcgctcagctgctttttctgcaaagcgaaagtggcaaaacggcgattaacatgtgagttggggggggggaacattggacgagcaaagttgccaaggaatttccattttaaggtacatcaattgtccaggtttgtcatgacctggcattggattggatttgtggaattatgaattgtcaatgggacaaatttttacgctgaaaagtgcaattttcaaaagaaagaacaaaaaattttaaattggttcggatgggaaacgacgcggggggtaacgagctgctccgatttttgagtgtggtccgtgggtttggtggccattttcttccttttcaggtggcagtgtgacggctggcctcggcatttacgacacaatgcagcacatttcggcccctgtcgccacttggtgttaggcatttttaatttggagtggtggaattcagaaaaaagggatttatttcaccccaggcattggccaggcgagttcaatgggcagtcttttgttgacggccggtgccaagggaatgcgcacttcgctggtacttttttttagcaatagcacttgctaaagttgtgacacaaaaaggggatacttcaccccccccccccccatagaaatgttttcttttaaaattagcaaaacctataaattttttagaaaaatagacttacaattagccattttagaaactttttttctaacaataagcaaaaaataaatactagtaataagaatgacgaaaaacgaaggaaaattgttctaaaaattcttaaaaatcagcatattcttgaagatctgcgaaatttaccatttaaattttttgctagataaaaaaacgcggaataaattctagggttttccccaaatttcttaggtttcagttaaaagaaatgaaccttcaaaattttattggtctatgacttttggaaatgcacaaaaacttttaaattttgtcccattttgttttcctttaaaccaaatttccttggcacggatttgactcatccgcccattccaactatttttccatgctctaaaatttgcttttgcccttcttttttcagcccaatgctcgcattatggtccatcagccgagcggtggcgcttacggcacggcggcggacattgtgatcagagcggaggagatcaaccgaatgcgaaaacggctcaacgaaatctatgccatgcacacgggccaaacggtggaaactattgaccaggcattggacaggtgggacagatcggacggctcggggaagatttttaacattttattagaaagtttcagaaaattct

SEQ ID NO: 46567 - DNA, 280 bp, Heterodera glycines
acttttctggcaatcattttctgtgtggcactctccgagtacgacatggtgttggcggaggatgacgaaatggtagcaaatttttggaaaaattttttttttaatatttttttgtccaaccaagaaacggatgattgaaagcatgaagttgttcgactccatctgtaacaacaaatggtttctgaacacgtccatcattttgtttctgaacaagaaggacctttttgaggagaaaattcgcaggtcagcgccaaaaatggttttaaaaaattatagcccg

SEQ ID NO: 46568 - DNA, 577 bp, Heterodera glycines
tctggccaggctctgaacgacccgtccactcaatacattgagggtcggctggccaaccgacgtgtttggtggtgcccttccggttatggtaaatgtcaattaaaattgaaatataaattcagcaaaattatcgtttatggtcccataaaaaaggcgaaatattactttgggtagttttgcgttgttctcggggttttcgaggtaactcacgaaatctgacacaaattcgaccaattcgaacctatcaattttgtcacttatgcttccaaatatgcataataactacaaagtttggtcaagaaactccacggacacctgctgaccatccattattctaaaataagaaagaacaaattttgtttttttttcctgggtttttcgtaatcagtaattaataattatatatccttaattacccttaaacgattttaacttcaagcgatgccccccccccttttctcaggttacttggcgtactgtccccagcccaccgattgggacaattacaattggtgctgcactttcccttacttcggctcctggaagccctcctgctgcccttttgccattcccacgg

SEQ ID NO: 46569 - DNA, 1612 bp, Heterodera glycines
atggatgttggtgttgaaaatgagtcggtggtactcaaaatcggatttgtaagtgctcattcaccgccacaacttttcatcccttttcttcgattagctcaactttgattccgacaatttgctcgaacggtatttggacgactatgacattgtgcttgttgatgaccaaactatggacgttccattattcattttggaacacatcaaacataaatcagcccattgaatttatcaacaaaacaatagccattttgttgttttcacagtctttggttttgactattagcacggattatttgccaaaatttctgtctatagtgaatgtttcttctgtttatcctttttattgtaaaatataaaatacattttatgtccttttgtctctttgcattttgtgttatttccatttgctaatttactcttaaaaatttttatcaaatttttatcgctcgcttttaatcattttgtgtagtaattatttgtaggcctttgcgatgaaagtcatcaacgagtttggctatcgtcaagatgcccgaacacccagccaaatccgcaacattgtctatcaaatgggagtttactcacacgcggacggctccgcttacattgagcaaggcgagacgaaggtgggcggtcaaagttttttttaagtttgtatgaattttctgtcgattggccattttttaatgttttgctttttccttcattcgctacatttcccctctgctgaaggtcctttgtgcggtttacggtccgcacgaatgtcgcttccgatcacgagccaaagaagacgaggccattgtcatttgccagtacagtcaggcaactttttcggttcctgacagaagaaacaggccgcgtggcgatcgtcgaggcaattccttttcccaccttttggagagggctttcgaatcagtcattttcacacatttatatcctcgaagtcaaattgatatattcttcgaactccttgaggcaataatttgctttttacattttgatgctttattttttaattttaggctgacggtgccaatttggccgcctgtgttaatgtcgccagtttggcactggctgatgccggcattcccctgcggggactgctgtccgccgtcgaatgtggtagtgctgatgggttgccttgtgcggatttgagttctcgtgaacatagtgaattggtaccacgcctcacaatggccaccgttggtgagtaaatcaggagactttataatgagaagttggggggggggggacatggcgaggggagggaaaagaggaaaattaagcgaatgactaattgtaagcactgaaatcatgtcatatgtttaggaggtaaagacgaaattgttcttatggacatgaaaaacctactccacaaaaatcatttgccgtctttgttacaaatgggcgtcaatgcgtgtgcccaagtacacatttgtctggagacagctgtttttagagtaaattataagcacatttgagggttgtttatccattttaattgcagcatgtcgaagcatcgcatcggaaaaacacagaaagtggaaaacaaaattcgcttttgaacagaattgttgaaggtcgctaatcacagatttaatttgttggatta

SEQ ID NO: 46570 - DNA, 1444 bp, Heterodera glycines
ctgctcaacttgtgcgcgagctgaagaaggtggacgacaaggatttgctggtcgatgtgcaattggaggagagcattgtgcgtttttgtgcccttccgttggttaatccttcgccctgaaatttagacaatcctaaataaaagttccatttccgagtccaccggtgaagcaccacctgagtaaatttttgaaaaaatttcactaattccaatgaatttggtgttaatgtctccaaatttttaatgatttacccaatttcttgtcccaatgccatggggatgactgtgaaatcgctttctttcaaattcatttatttgttggcttttcagggcttttaccatctgtccaactacacaaaggcacgtgccgagttggtcaggtggacaatgcaattcgttttttttttgcatcacaattttcagcgcacggactatcgccaacaccaaatacactccgcccgccatgcaggtactgaactgactgacaaagggcgaacggagtcaaccgcctgtttttttttgctcaaaatcatattcccaatgaacatttaggggtcaaatttttaaaaataatagtggatttatttcttccgttgttgtctattggctacaacttcaaaaaatgccattttctctgcgcttttaaatttttcattctcacagtgcctaaacaggtcaaccgcaatctcttgacacaataatttcaatgagtaatttaattggtaaattttttccaaagattcatttatgttggtcagacgattgaatgttcgagtccgtaaattgcgggacacaaccccccccccccggtcaaaattaatattttggtcccccttttcatttcgctcgttccttgtcctaatgtttgttccacttcattcgtccttccccccccccctccctctcccattttttgttggtcttttaaattacaattccccaaaaggcccgtctcgacctccaatcgggcattttgcacgcggccgacgaccgcgacttcaagacggcctactcctacttcttcgaggcgttccaggcgttcgactcggtcaatgagtcggcgctcgcgcagcaggcgctgaagtacatgttgctgagcaaggcaagcgaaggcggcagcaaagaaatgattcaaaaagaaattcccaaaaagtttaggttttaaattcacaaatcgattttctttaatcgaataaattcgggcgagcggagagcgaattttcaataataatggggaagggtactacttttttttaaactattttgaattgcaggtgatgttggaccagtcggacgaagtgcactccatcatgacgggcaaaacggcacaaaaatatgccaaaacggagacggaggcaatgcacgccatcgcagaggcggccaaaaagcggtcactggccgagttcaacgaagtgtgcaatggggcgggggaaaaggcaatttag

SEQ ID NO: 46571 - DNA, 99 bp, Heterodera glycines
atggagcattatgatcgtgcaattacgattttttctccggatggcagactttttcaagttgactatgcgcaagaagcagtgaagaagggctcaacagcg

SEQ ID NO: 46572 - DNA, 592 bp, Heterodera glycines
atgtcggacgaaagtgaaatttcgtcgctgaacgaagcggacgttaccgatttgagggaacgttacgaaaatgtgtgtttcgtgtggtacgttttaaaatttcatccacactattacagacacaaagacaagaagtacccaaagaagtgatggtacagcgcgaaatgcaaatccgcgagttggagtcaatccttcggttggaggaggccaagctgatgatgttgaagaagttgcagcagagtcagcagaaggctgcgcagaaaacggtgagttaaagccgaacaacgaaaaaattcggcggagtcgggggcatggactaattgcaacaattgtttcaccgacttccgccgcttaatgcgctttttatgaccgagtcattttcattaattaagaaacatttacatttagcagcaacaacagaatcagcagcaacaacaacaacaggaaaatgtgcgaaggttagccccaggcgttgtgcagaattcaacgggacaagcgtataagccgaaagtggccgtggtaaacccatcgcaacatcagacgggaaacaccagcaaaacgaacggcacgacgccgcagcacgggaagaagg

SEQ ID NO: 46573 - DNA, 691 bp, Heterodera glycines
tctgcgagaccaaaggtttttttcgatgttatggttggcggaaaatcgacaggttataaactcggacaacaaatcgccctcattctctgttcaaaataggtttaggtcgaattgtgatggaattgtttagtgacatcgttccgaagactgccgaaaattttagggctctgtgtactggcgagaaagggatgggcaaaagtggtaattaaaaagtcttgaccgtgaccgttatggattttactttaggcaaaccgttgcactacaaagggtcgaagttccaccgcgtcattccgagtttcatgcttcaggtataaagttgtggcacttccgcgaaaaggaatccattaacggactccgttttcacattttagggtggcgattttactcgaggcaatgggaccggcggcgagtcgatctatggcaattgtttccccgacgagaatttcaaagagaagcataccgtcccgggactattggtaacgtttctggcaatttaaggaatggaacactcgtagcccatgggccaaaaaagcgtcatttttcaacttatttttaaattcagtcgatggccaatgtcggacccaacactcacggctcgcagtttttcatcagcacagtgaaaacagaggatgtacgacaggcgtatttagccattttcgagattcatgattaacacaaattaatctagcga

SEQ ID NO: 46574 - DNA, 989 bp, Heterodera glycines
  unsure (1)..(989): unsure at all n locations
gcaaatcgccaagtgtccgcccncaacggacgcatcacttgcacgcgttgcccagctgacggacgacgtgttggtcaacttctgcttcaacacggccacgcgccgatttgttcgcggaaaggtgattgagcttaataaacgattgtcatattacattgcaaattcgcttgttaatttcgttttggtggctcagttggttatttgctgtccattcgcttattatggcgttggatcgcttcccgccacgtcccgtgtttttaaaaatttaaccggaaatgatgataaatgcagacctgtacggaaatgcaccatgtcgaattaaacctctaagaagttctgatccggttaatcatttttaaattagccattgtttttttaatgttccctgttcagttgaactatcgtaagccgtcccgtggtcgtccgcccgctgttgcggcccagtatgaattcggttccaaatcgttgaactcctccttctccaacttgtcgatgatgtacggcggtttcgttggtgtgccccattttcgtgtggtggccaaattggttggctatcaggtgtttaaaacataaaaactaagaaaataaataaaatattaacgaaggccaatgaatttaacatttagtttattacaatttccagggcatttctgccattctgttcgatttgttgggcctggcccaacggctattgaacgatcagataaagacgcactttcggtcactgctcggacttatgcccaaaatgtgcaaattgcaacgcttcgaatacggcgttgaaggtgaacaagaaggaaattgggtggcactaaattgttattttttccacttgccataatccgcgcattcatttggcattccggtgcgcttgtcggattcccaaattaaattattacttaaaatttgcgtttcaatcttgaaaatcccgttttgaattaggcaatctccaaagatttcatccaccaattgcgcgacttttccgcctacgg

SEQ ID NO: 46575 - DNA, 2918 bp, Heterodera glycines
cgaaaatatcaaaatatgatgtgtttgcccttttcaacattattttttcctttagagcgaaggggccggtcttatcgctgctgctttaattggtcagttgtttcactaccctttgcactgtttggcctttctcttttcagcaattgtccccggttacatttcgcgttctgtcgccggttcatacgacaacgaagttgtttttttttcgggatttaaacattacggcaagttttgtttgattttctattctatttcagggcattgccatcttttgcatgctgctcacctattatttttggatcaaatccgtcaaatcgggctccattttcaattctgtgctttgtgcgctctcttatttttacatggtgtccaggtccaaaccataaaatgactcacaaacaacaaccaatatttttcattttcttactcagttggggtggctacgtctttctgatcaatctgatccctctccatgtgttggtaattgcttttaattatttgatttttcccttttaaccctttctttttttgactttaatttgcaccgggcgcttctctcatcgaatttacgtcgcttattcgacggtataaaaaattaaaaatgttccaaaatgttttttcaatttgcaaggtttactctttgggcacaattttgtccatgcaaattccgtttgtcggctttcaacccgtctcaacttctgaacacatgggggttggtttgggcattcattcttttccatttccatcaaatttgcttggatttgtaggcctttggtgtgtttggactttgccaaatcgtcgcacttgcccaatggatgcgttccaaaatgactgccgaccgttttcagctgctcctccgctccgttctgctcgtttttggcggtgccgcctttttagcactcattttggcgacgtttcttcacagtgaatttccatgtcttttccatgtgctttcatttgtccattcttccagagattgcgccatggacgggccgtttctattcccttttggacccatcctatgccaagaataacattccgatcattgcttccgtctcggagcatcagcccaccgcgtggagttccttttattttgaccttcaatttttggtcttcacttttcctggtacaatattagtacttattttcccagcagtttccattttaattcccttttcagctggcctttatttttgcttcaaaaaactcacagatcaaaatattttcatcattctctatggattgacttccatttattttgctggggttatggtccgtttgatgctcgttctcgctccaatcatgtgagctttaactgtcatgtcggataatttaatactccacaagtttgtcttttttcaggtgtattctcggcggcatcgctgtctcttcaacacttgggaattacgttgtgaatgtcgatttgttcggcgctgaaaagtcaaaggggaagtcggcaggcactgaaaatgcggcggagaaaggaggaaaagcgggcggaggagggaaaagcggcgggagcggggcggcacggtaccatcggggggatgagaattacccctacaaacaggaggtgaagcggagggaacaaagactcagccgatgcttttttttacattagatttcattggcggttacgctggccatgtcaatttgtctgatcagttttgtgtaccacagcacttgggttgcaaatttgcctgtttctgcaatttttgtcccctttttaggtcacttctgaggcgtacagcagtccttccattgtcctttccgcgcgttcgggcgatggcggacgcataattttcgacgatttccgcgaggcttattactggttacgtaaaaacacgcccgatgtaagacaaccaaatatttcttttaccttaaaagcgccaccgtttatttgctcaggatgcgaaagtgatgtcctggtgggattatggctaccaaatttcggcaatggccaaccgaacggtttagtgatgctcatcagctgtttaattgcttgttgttttcacaatcagacaatcgtggacaacaatacgtggaacaacacacacatttcgcgtgtaggacaagcgatggcatcgaatgaatcgcatgcatacgaaataatgcacgaattggacgtcgactatgtgctggtcatttttggaggagtcaccggctattcatctgacggttagtgagcgtacaagtacatattagagatcgacgcgggaacgattccacgcggaatcccgcaaattagtatttgggatttgtttccctgcttttatatataatcacaaatcccccctttttcgacatcaacaaattcctgtggatggtccgaatcggcggttcgacgccggaggggcgacacattcacgaaaatgattactacacaaagaatggagagtttcgcattgacaaggaggggttagccaatgctaaaacttatgaattaaggcgacctttttaatagttcctctacaatgctcaactgtttaatgtacaaattgtgctatcatcgcttcggcactgtgtacactgaacatgtacgttctttacagccttcaataatacttaattaactgagccgtatattttttataactaaaaagtatgctacgaaaaatgcaatatttatagtttttgttttaatttttaggaatatttggggttttttgatttattgacaacttttagtaaagcattagaatttaagcttagtaaagcattagaatttaagcaactaaaaattggttctcttaattacttaaaagggccgtgccaccggttacgatcgcgtccggcatgcagaaattggcaacaaaaacttcaatttgctccatttggaagaggcgtacaccagcgaacattggatcgtccgcatttaccggtcgcaaaaatgggttaaaaaatgtttaaagggcttt

SEQ ID NO: 46576 - DNA, 1062 bp, Heterodera glycines
  unsure (1)..(1062): unsure at all n locations
ttcgctttattttagtcccaaaatgccttttagggcaacgaacatttggcggatttgtccgcacttcgatttttggttgttgatgaaattgatcggatgttggagcaaggccattttgagaatttcaagaaaaagaaatttaaaatttatttattttaattgttaaaaatcttctcattttattcattattagcgatctgataattatatgcattttgttttggcattttaaaccaattcaatttgattaatttgtttggtctctcttttgaggtgcgtcggattgccctttcgatgtcaatgcgaaagggcgctgcgaatctttcagtgattgatctgacgccaccgcagaaaacgccacagactcggaccgaatgtcgcatgaattgtgccgatttactccaaaaggcacaaaaacatttatatttcccaatctcattacaaaaagttcattttgcttatattttcaggatttgaatttgatgtatttgcttaagcggcacggcgggcgcactttggtatttgccaattcgatttcggccattcgacgaatgcattcgctgctgaaaaaattggcatttccgaacacggcactgctgcacggacggatgaaggaaaaggaacggttgaagagtgtggacaaattcaaaggcaaacaaacacgggacagagggaaagacgaattaaaaaacaaagagacaaaaccatttcgaaactaacaaatcattcagaaaagggcgtcgtatttcctatatatattttcccttaaatttccatgcctttcagcatcggatgattccgttctcctcgccaccgatgtcgccgcccggggcctggacttttatggagtgcaaaatatcgttcattaccaatgcccgaaaacgacggaagtgagaaagagttggatgtgttgttcttccgggttcatttccttttctgttagagttacatccatcgcagcgggcgaacggcgcgagcgtcgagtgccggactgtccgtgctttttgtcgacnccgttggatttgcatcagtatttgaaaatttgccgaaactgaacaaagg

SEQ ID NO: 46577 - DNA, 810 bp, Heterodera glycines
  unsure (1)..(810): unsure at all n locations
atggacaaaggacggagcaaaagcccaaatcataacaatgaggcggaggaaactcaaagcgccaaagaggacaagactgatcataaagttgggttaatttcgcttcattttatttaaatgctttttgaataattgcagacaaatgagcaaatgttgctggtgaggaccggactgaaactgaagcgtggcactctcttcaagaagaagcgaaatgttgacccgaaaacaatagatctgaccataaagaaggaacaagagggcccgcggaagacgaaggccgaattggcatttctcaaacggcaggaggagacggcgttcgaccgtttgtcaaagagggcccaaatcagtcaccgggagaaagtggagaagttcaacaagcaaatggaggaactgacggaattcaacgacatcccaaaggttggttggccgaaaaacccattaatttttaatgaggcatatcaatctttaggtgtcttggaccaaatgagaaggaaggaaaaatactactgtatcatatattacatttgcgatcacaatcagaaaaactaaagcaaatgcattcatttttagtaaacgaagttccattcgttttgtatctttccgtttgttttgcattatatttttattttattctcgtttggtaatcaaaaaagaaatgccagctattcnccgcgcggatcgcctgaaaaccatttattcctcagcgaaggcactgaattttgcttttcgactgtcggccacaaatccaatcgcaccagcattcaatggggtgtccgcctaccaaccgcaactgcaacggattacaataaa

SEQ ID NO: 46578 - DNA, 1148 bp, Heterodera glycines
  unsure (1)..(1148): unsure at all n locations
cgatggaaaaccggaagaatttggcgaagacgcaaaactttttgtggaattgcgactgcttcagagagatgttaaagttgtgctggaaacaacggcaaatcaggcactcacagggaactgagaatgaaatcaatttgctggctttagaatttcatcggcactgttctgcacccgcggggaaacatcgccgagtttttgcttaaagaggggttggccaagtgcgtcgactggtcaatggccgttgaaggggcggcgccgaaaaactgagagaagccgaacggtcggtgaaattgcttagggattatattcnatacctaaaaagccattataaactttttaagcatcgcaaaagaaaagcgactccgattatggaagtcgttcaccgggtcctcctcaaccgtaaaaaatgcatttactgccaaaggttgtgcaaattcatttctacacattttaaagccgttaaaaccatcagagtctctctcattttcagtggttgaaattggtctggtcgattctctttctgtgcttaaagacaatggagaggagatgaaagtgtacttctcatctttgcgtgcaccgaggtaacaaattatttcaattatttctcaaagttaattcattttaaagacgcgaaggcaccgatggaacttctggcggcgttcagcgccaattcaggcctctctatgacattccgtttatgtttgaagcccgcgagtttcttcgtcgtcgtcttatcggcaaatcggtccaagtgattttcgactacgtacagccaaagcaggaccaattcccggagaaaacgtgctgtacagtgatgttcaacaaccaaaacgtggccgtcatgctcattgagcgaggctttgcacgagcagtgcgtcacggccgtgacgacgacaatcgatcgccacaatacgacgcattgttcgctgcggaggcacaggcagagaaagacaaaaaaggtcagtgtatggatgggccgaagggaaaagcgattattcccaacccaacctctaacaaatggcaaaaacctcaacaaaaatgaatcgagaaaaagccgatcaagatttgtttccctcaatgcttaggttttacttccagccaattagtaaggaccgttttaggaatttgggctgaaaagtgcacagaaa

SEQ ID NO: 46579 - DNA, 1448 bp, Heterodera glycines
atggaagtgaacacaaaaaacattctgatcgcatccggctctgaagtcacaccatttcctggcattgacattgacgaggaacaggttcattgatgaattttttttaatatttttattttccacctcaaattgattttgaggtcccaaatttccgggtgcgctaataaattttacaaaaaatgttttcagattgtctcctcaaccggagcattggcgttgaaaaaagtgccacaaaaaatggttgtgatcggcgccggtgtcattgggcttgaactggtaaatggcaacattattttcaaatttggcccctcaaaaagatattaaaaaaagttttcttcgttttagggcagtgtttggcaaaggttgggcgccgaagtgaccgccgtcgagtttatgagtgccatcggtggcgtgggcattgacggcgaagtgtccaaacaattccaacgttcattgaccaagcaggtaaatgcctttttaacggaatttcatccaaagcatattggaattttttggtacatttttgcttgaaaatttaaaaaaatggacaaacatgagatttttaactaattttttacactttgtttagggcatcaaatttttgatgaacaccaaagtgttgggtgcgcagcgaacgtccgatggacaggtcaaagtgcaggtggagacggtgaaggacggcaaaaagcaggaggttgggtggggttttttaatgacattttagggccaatttttctattctctactcttggctaaatgtgtattttttgaccaatacatccggatgtactacttcattctccctctcccaccagaatttttttaaaaaaatattctaacagaattattcaagaaaaaagttcttttaaaaaaattttctgcacttttttggaaaaattaattatttacataaaatttaaaaatcgtaaaattttcctcaatttttttccttgaaattttcctttgaaaaatgggtgaaacgacttgctcagattaaatccattgtctctatacgccattctaacattgcccagttgaactgtgacgtgctgctggtgtccattggacggcgaccgtacaccgatgggcttgggctgaacaatgtgcagctgaacacggacgagaagggccgtgtgccggtcaatgaacgcttccaaaccgcggtgccgtctatctatgccatcggcgatgtgatccaaggcccaatgttggcccacaaggcggaggtgagagaggggggggatgactctttttaaatataaaaaattcactcaattttaaaggacgaaggcattttggcggtggagggcattgcgggtgggccggtgcacattgactacaactgtgtgccgtccgttgtgtacacgcatcccgaggtggcatgggtgggccgagcggaggagcagatcaaacaggaggtgaacaaaatgatgggttggagtcggggg

SEQ ID NO: 46580 - DNA, 874 bp, Heterodera glycines
atggaagcgctgaaggaaaagagtgagaagctgtacaacaaagcggtaatttaaagttggatggacaagtggggggggggaggatttctctgattttgaaattcgcttgggaatgaaaatggcgggggggggtgacggaatgatcttcccaacaaaataattggaaaaaggaaacagggaccgatcattggtgatcagtggcccagaaaaggaaggggtggcggattttaaaataaaatggttgttctacccgcacaatttaaggtcgaactgcgcacccttgtcaaggtcagccacaccaacaactcagcttttgactagcgaaaggacaaaaataaattccccaaaacttacagggaaaaattgaccaattggtgcccgacgcgaaggcattcgttatcggggtaagcaatgggcagcggaactgatcagacagaagccgctatttggtcacagaatcggaaacatttaacgctttgctttcagatgatcgaaaaggcaaagggaatgcgcccgaaggccggcgagaagccgaagcttgaggagctgcgcacggcggccaacgagctgatcgagaagtgagtggggaagggaaggacggaaatgacaattagcggtgcctttgaccggtggacaaaatgccgcttttccctcccaggtacaaagcattgaatgacgaagccaaagagtcgctgaagtccaacttccccaagattacgagcgtcatccaaagtcagttgtgtcaattaaattttcaaagtgcatgggctaatcacttttaattactttcccatataactttccctacgtttcagacgagaaattccaaaccttggccaagagtttgctgaaacaggaggcaccggccgcctaa

SEQ ID NO: 46581 - DNA, 961 bp, Heterodera glycines; identical to SEQ ID NO: 38794

SEQ ID NO: 46582 - DNA, 517 bp, Heterodera glycines
atgtcattttgccaggttctgtataaaactctgacctccggctccgtgctgccctcctccgcctctgccaatgcttctgcttctgccgaccccctcaacgccacttcggccctcggccttccctttcctccgtccgtctctttgccgcctgttttggccgctttgttccccgacctgaacacttccaccccaatcactctgaccgccgctcaacaggaggcgatcggggagaatttggagatgatccaaaatttgattgtgcagccgtccagtccgttgtgcagcccaaagcccgtggcggtggccgagttcaatttggacgcatttatgggacaatggtaccaggtcagtagtcagcatggcatgtgccatgaagaagggatttgaatgttgcttatgtttgtttcaggtgatgtacagtcctccgctcgtccaaagtgcgtgcagtgtcgtgtcctatcgcaaattggccgacattaacagcggcggaattggctccatttttgaagtgtttgag

SEQ ID NO: 46583 - DNA, 1265 bp, Heterodera glycines
acgaggttactacaacagagactcgttgcatggttttttgattatcattttctctttagtgctttaatttaggcagcctattctgaccgctaaaacggtcattccgttggttttcagtataagcattttgttcatcccaattggaattgttcttcttcgcataagtcaatctggtgagacggtactgtgcaattttatgtgcttcttttaagtccaggaatatgtcgttcaatatgtaaacgatgccaacgagtgcaaagactaccatgcgaatggccaatgcgcagtgaacttcactctgaatgaggacttcaaagtcgttttatgattttaattactacagaatttgaatttcagggcgatgtttacttttattatgctctcgagaatttcttccaaaatcatcgtcgttatatgaaaagcagaaatgatcagcaattatcgggcattgattttttagtaatacataatacggtttctctcataatagcctaaattgttctacagaataccaaagattgtactcctttcgagaaagctccggacggtcgtccgatcgccccttgtggcgcaatagcaaattcgttattcaatggttcagttttcattatttatttgatgctaaacaatttaacgcagattcattccaactcaattatcttgggcgtaatggcaatggttatgcaaatatttcatggagtcacgaagggctcgtctggccggtcgatttggagtcgaagttcagaaaccccacttgtgatggccagccatgcaaaacaatcgctgaattgtgtcacaaattttccgtataactttctatttttaactggttattttccgccgaatctttctagacaccaaataaattcaggacgggaatattacatgtttataatcctatcttaaaaagcatacaaaaattgttagaaaacaaatcaattgaactgattgtttgtcaaaccgtttgtagaatttgttctaaaagttcacttttgcgacagttaaccgtccgaccgcccaactggcaaaaggacctctgccttttggacatcacaaatgtgacaaacagcgggtttcaaaatgccgattttgtcatttggatgcgtaccgctgcactgcctgattttcggaagccctgccgaaaattgaccaggactcaaatgttcgctgatggtttgccatccggcacataccaactgttagttcacaacaattacaatgtgaacacatttggaggcaaaaagtcgtttgtcatcagcacgacg

SEQ ID NO: 46584 - DNA, 444 bp, Heterodera glycines
atgacatcttcggacgaagaatttaaaaaaggtaatggtaaaataaacgaacaacaatcagtgaatttattcaatttatatacgtgttcctttcagaatgcacttttgcctcacttccgcgcactgtgcgtggaatgcctttggttgtttcgtcgaattcggatggaaccaaattcctttactgcaatggaaatagcgtgttcatcagagacgaggaagtatgtgattcggattggttggcggttcattttcaatgttttaaattccattttccagaatattgccgattgtgatgtgtatacggagcacgcgactttgacaaccgtggcaaaatattccccctctgagttttacattgccagtggagaccaatcgggcaaaatccgtttttgggaaccacacaatcagtccgtttcggttgacattaatttgcatttggcgtaa

SEQ ID NO: 46585 - DNA, 1858 bp, Heterodera glycines
atgagtcccgattccgggcatcgagactctgccggagtgtcgggtgccggtgccttcgatatgacgatagaaggactgcggacattgatggaatttcgtggaggcgaagcattggagaaaataagcaccgactacggaaacactttgggcctttgcgaaagactcgcgacagacccaaacaacggaatagcgaatacgcaggacgaactgaagaggttgcctttgctgaccatagtccgacaaactcttctttctttgacttttccgattattcggccctttgttggcttttaagccccaaagtgccgctgaaaatcctcgtttgattgcccaatcttttaaattttaaggcctctgtgtgaattgacctttgaaattggaatttcaggcggagggatgccttcggtgccaatgaaatccctcccctcccgccaaagtctttctttacgctcgtctgggaggctctccaggtctgtccgatggcatttcttaatgagtctttttgtcggtcaatttaggacgtcactctgatcattttacttattgccgcagtcgtttcacttgccctttcattttataaccccggatcggaactcggaggttcgcttttccatcatttacaagcgtcgtctttcctcaggtggaaaagacgaaactgagcaggaagcgggttggatcgaaggtgcggccattttgatttcggttgttgttgtcgtactcgtcacggctttgaatgattacacaaaagagagacaattcagaggttggccatccccgggaaaggcggacaaaaaatgaatttaatttgaatttgaatttaaggattgcaagcgaagatcgaaacggaacacaaattcgcagtgatccgcggaggaaagcagctgcaagtggtggtcaacgagttggtggtcggagacattgcgcaagtgaaatacggtaatgatttgccggaaaaagcggacgatggcactttgacaagccgaccattggcacttttactcattgacactttcccttgcttcttcaggtgatttgctgcccaccgatggagtgctaatccaaagcaacgatttgaaaatcgacgagtcgtcgctgaccggcgaatcggaccaaatcaaaaagtcggccgagcatgacccaatgcttctctcgggaactcgtggtcagttgtgcccattttgttgttcgcactttccttttagtgatggaaggcagcggtcggatggtaattactgcggtgggagtcaattcgcagatgggaattatcatgaaacttctcggcgcggcaaagtcggcgatggaagacgagcggaaggagaagctgagggaggagaagcggacgaggcgcaggagcaaagcatcaggtcagtgggagcattggccaattgaggagaatggtattcgggtggggcaccgtaaccgattacggtgggactttggcattatttccaccatttccttctttcgtgccgagtcttttcataaattggacaattgggcattcttcaacaaataatttatcataatttatgctcgaaagcaaaaaaattatcatcgatagtaaaagtgttatccattagtctgcaaaaaaaggttaatagaggagaaccaatgggtaggctatcaagctactatcatttgttgtgctttcattgtgtcctttcgcttattggatagtatgtaccaaaaacctaaaaaagaacactttcagacatcaaacttgacggttacaatggcgcaatccctccggggtcggcaggaagggccaaagatgactcggaagttcagccggccaagaaggaacggtcggtgcttcaaaccaagctgactcggcttgccattcagattggttatgccg

SEQ ID NO: 46586 - DNA, 1639 bp, Heterodera glycines
  unsure (1)..(1639): unsure at all n locations
catttgatatttgctaaattggatcgcattttggtcagttgcaacaatttgatgaaagggtccaccggctcatggcgagcccacgaggcgtatttgaatggcattgcagtgttgcgaaatttggtcagcaccaaggatttgctgtccaactttgtgccattgctcaagcaggaagtgctaaccgcggtaattgccaaataaattatttattaattgagtacccaattaaatcgtttttttcaataagaaatacaaaaataattactcgtgcttaaaaaaatttatcattaaaaatgtcttaattaacaaattattttttaattttatttcttcatatctttataaaatttaaagaaatataaatccttttttccaaaaagaaatatttcgactttttttaaatagaatatatatttttttaaataatttacgatatttttttcagcgtgccttaccttgtcgaattgctgctgcccaaacattgttgttgatgatgcgcgagttcgcgacaagtcgcgcccggcaaaccatcgtcgactttttcgtccatgacattggccaccattcgagttgctatcgccggcgccttttgttggacattgtaccgttgcttctacagtacttcagccgtgaattttttatcgacaaatttttgcccgcggtgctcaaactgtccgctgacccaatctcaaacatacggttggtatactgtacatttacagcacacaaataaaaaaaattaaaaaaactaaaaatgttagattctgttagaattaatactataattgattcttttcaaattttatgcttgttcccttttttattagtttaaaaatgcaaattgctaaaaaatattcagtgaaaatcccccccccctccatcattcgtattttgtctttattacaccttttttgtaattttttactaattttaatttcaataattttaaggctccaactgtgccggacactgccgaagatcaagcagtatttgatgttcccgaacaatgacgagtcgttgtccaacttggagcgtgttgtgcgcgaattgctggcatccgaacagaacgcactttcacgacaactcatccaacaggtgggctaaaattgactcttttttttaatcatttcggtgggaaaattcatgataacctccgatccaaaaatgcttatcatattcaattccattttcgtcctatttcagttcgcttgtgaactgtcgaggacagaaatggacaagaaggagtgccgtgcaaaccgtgccaaattggccgaggaaaagcgactgtggaccgagcatgaggactccacggacgaaactgatgaggctgaggcgggccagcagtacagtactgagcatacagtaaccgggagcgatgcgataggctcgcccgaaagcggcatcttcttcgaggaggactgttggcttggcactgnggtcggaaacagtgccagacctaacaaccaccagcagatgggcggtcgcctgtgccgttcggctaccaccacaagcatatcgcaacacatggagacggaggtggacaaaacatttcaataaaaaaatattggcaaaatgataccattaaatttttaaaaaaactgaaaagaagcgaanaaacagacccaaatcaaaaaataaa

SEQ ID NO: 46587 - DNA, 2098 bp, Heterodera glycines
atgggcgagaaatttgttggcaaatggaatttggagtcgtccgaaaactttgacgacttccttaaagaggtgagcgtgtacttgcgcgcgggcggggcaaggacggcccaggattatgacttggttgggagcggatatattccttcatccacgtttttctcgaaccaagaccgagactcttgagcatgggacaatcattttgggccaacgtcccgcagtccgcggaggactttccctacttgtggccaaatcgggtttagtccatgatcaaagggctaaattttgcacttttttgaaattttctgaagaggggctctgaacttataaccatcgtccatgattagagtgccaaattgccaaaaaaaaacaatttgccatacatttgccggcaatttttcttctttgcccacagattggtgtcagttatttgacgcgaaaggctggcgcatgcatcaagccggtgctcgagtttgaagtgaacgggaacaagtggaagatgacgtccacttccacattcatcaccatctcatgggagttcgagttgggccaggagaaggaggtgaagacggccgacggacgcattgtaaaggtgagggggagagagagaaagagagagagagagagaaggggggggggggagagagaaagtgaggcgcaacacaacgccaagcaaacggagatgcgcaattgggcaccaaggattgtcaaaattccgattcccgattgacatacagtagccacgggtaggctcgagattgggtggcttaattctcgatagccatcggcaacgaaagcaaatcgaggggagagactgaagctctcgagattggatttagttcaaaaattcggtctcgagcattttgaagctcttgcatttggagtaattccttgaaaaatgacaaatatcgcttaaatatgtgccaagttcgaaaaagtgataaaattcttgagttcggtgtcaagactttatggggggaggcatgtttgtcattcattgataagttttggggctctgtgccattaatttggaaaagtttgccgaagtctccatttttgtgcttttcagacaaccttcacctttgtggacggcaaactcattgagaaccagaagaagaccaaggtgaaaaattggaaaattgaaaacaaaattttgtcattttaattgggataattaggcccaaatgtaaaagtatgtctcgcacggaatttttaacggccagaaatttttaaatttcttaccctttttttggttgaagtaattttaattgtttatcattcgagagctcttcacagattgttttttggtttcaaaaatttaaaaatttttttttccaattaaaaggttgaagataaaatttcctaaaattttatggcctttttttaatgttttctgcttgaaatttttaaatttttcaatcgctcaaaacggcttttaattttaaatatgcaaagctttccggtggtaatgctatttacctaattttataattttccaaacaaatttaaaagaaaacattttgataatttctttaattaatcatcaacccaaaaaattgtaaacgaaaaactctggggacaaatttatgacccaaaatttattttgttcaaaaatcaacgaccacttttttaaaacttccttctcccattaaaaccataattggacattgattttgggtttttgatcactttttaaatttccctttcgcgcacgtcaattaaattttgaaatgcaattttgccccttccaaaaaataaaaatggacaaatttgtgcgattttttcgataaaaaaaatttcctcgttaattttttgctctaaattttttttcaggcggaggaaaaggacagttactatgagcgttatgtggacgcggatggaaagctcatgatcgtacgatgaatttaattttttaattgaatttttggccccgataattacccccaaaattattacaatttttaaagaccatggactgcgacggagtgaaggccaaacgagtgtacatcaaggcatgattaaaaactaattgatgaggaggaagaatggacgaaaacggagggactgagagggacacaatgccaaacaaattgcgccaaaa

SEQ ID NO: 46588 - DNA, 1683 bp, Heterodera glycines
atgggcaaaataacgaaaatcgggaagcagcggaaggacaagttctacttcttggccaaagaagcgggtccgtttctgtgaaggagtgcatctgtttttgacaaaatttacgtctttttatgcccccgaaaatttaggcttccgctcacgtgccgcttttaaattgctgcagcttaacaaacgcttcgaattccttcagcgctgtcgtgccctcgtcgacttatgcgctgcgcctggcggttggctgcaagtggccgagcagcaaatgccagtctcttccctgaggattggtgggagagagcgaatgttttgtcttaagtcgtttcgtttgcaggagttgatcttgtgcgcatgaatccgatctaaaaattgcatcactttgcagggagtcattatcgaagaaaaggtgggacacgagcagcattcatttcgaatcaaaatgttatcatttttccgccctttttcaaaaattgatttttttaaattccttattttgtgactcggcatgcggtgcgcagaagagttgggcactcgggaggcggattgtgtgttgcacgacggcgcacggaatattggatccaattgggcgcaggatgcattgcagcagaattgtttgtcactttacgcgcttcgtttggccacccaagtcttgcgcaagggcggatttttcgtgagtaaagtaattataattaggaatacttttcgtttcttaattgtttgttttgtattgtttagatttttcgatcagccgactcgcaatgtttgattggtgtctttgaaaaattgttcagaaaagtatttaaatttcgctatttacaaaagtaatttcctttttttaattttgggtccatgtttggaaaccgtccgcttctcggctcgaatctgctgaaatttttgttgtttgtgaacaatactcgaagcctgacaaagttccatcggaattgttggattctaaaaaagtgttctctgaccaaacggatggaggcggtgacgaaagcgaaaagaatttgtaatggataaattattattttttttttgaattattgcatccttttcttattccaaagacaacgactccttttgcatccgggccgtaaagagcgcaaggctaaagcacttggctacggaaacgacgcgttgcttggccaacacagcggactgggcgcaaccgaatttgtaacgtccaaaaatgcgcttcaattgcttagccgggcctcggaattggtcggtggatgctggacaaatcattagaagcgtattgttttacatttcatatttaaaaggtgctcgactcagaaagagtgctgaacagtgaacacacgacgaatgaaatcaaagaatgtttgaaagacattaaagtgagttagtgacagagacaagctggacaatgagaaatatagtgaatactaacagaaaaaaacccgtttaggtttgtggacctgccgaactgagaagcattttaaaatggcgtaagaaattggttgacgaacagaaaaaggaggaaaaagcgtctaaagaaagtgtaaaatcggctgaagaaatggtggagggtgatactggcgaggagttggaggaaatactgaattcaaagagttggaagagatcgacgatctgatcagaacagcaaaagccgaaggaaaagcaacgctgaaaaagtgatgagtcaatttcgaatatcataaa

SEQ ID NO: 46589 - DNA, 1195 bp, Heterodera glycines; identical to SEQ ID NO: 8360

SEQ ID NO: 46590 - DNA, 591 bp, Heterodera glycines
attcggtcacaaacacaattcgctactccaaggacaaaacggcggatgacgacgatgacaaagatgtttgtgaatgaagaagcattttgagttgttatttaaatcctttttagcgcgtggacataactgtgaaggagaaggtgaacctcaacttctccatcaagtacctgaccaacttcaccaaggccacttcactttcggtactttgtatttgaatatattaaatagttttgtaagcattatgaagcaagcccatctcgcaaattcaaatcttttggtaactctaacaaattttcaaaaaaaagtcaaaagcatggccaaatgaatgtatttttttctccataaatttaattgtcaaatgctatgacgaattttgtcaaaaaaaaaaccttaggtggctgtcgtccattaacttttaaattgtgaaaattaaaatttcagtgttatttgtgccctttttaggaccgcgtgcgtttgtccatgtgcgacaatgttccgttggtggtcgaatatgacatcgaaggcaatggatttttgcgtttctttttggccccaaaaattgacgaggacaaagagacaatggacgactga

SEQ ID NO: 46591 - DNA, 4017 bp, Heterodera glycines
atggaaaaaacggtcaaaggcgttaaggacgacggggaagaggccaattatatggaacggattaagtaatgaataaatatcagagaagtacttggccaaccccaatttcagagagcatcggtcactccaagaattggccaaattgaagggcgacacttttgacgaccccaatgacttccaaacactgtccaatgactgccgcatttcaaattccgtttggaacagactttacaggtcataaaaggaatgaaagtcgtcaataattgtctcttttgcttaaaagcgatgataaatatttttaagataccaaaaaaggggcgtccgatggctctacgaattgcattttcaatatgtcggagggtaatggatgagcaattgcgtttgcctttcccattggcacttttcagcattttggccgatgaaatgggactcggaaagaccatccaactttgcgtcttccttcgctctctctcggagagtcaaacaatttccaacattttcaggtgtgctttttgcatgcgttttcaatccctgtttttcctgtaggtataaaggccttggtccttctctgatcgtttgtcccgctacacttctccaccaatgggtcaaagagttgaatgcctggtttccgttatgcaaagtcgccgttttgcactcaagcggtgccttttccgggcccaaggccacgcttataaagcgaattggcgaacatcgggggttggtttttgtttgttttacattcgatgcgagcattttttattttggttttaggaatggatcaattctggtcacttcgtattcaacttttatgctgagctacgaacagatttctgcagtcaattggcactattttattctcgacgaaggccataaaattcgcaatcccgaggcaaaggtgttgtctttgtttctgctgcacttttcgatagcgtttctggcactttccagatcactttggcgttgaaagagcttcggacgccgcaccgtctgattttgagtgggtcgccgatgcaaaacaatttccgggagctttggtcgctcatcgacttcatttacccaggccgtctcggctcgctcaaagaattcatggagaagttttctgtgcccatcactcagggagggtacgcaaatgcgagcgctgtccaagtcagaaccgcgttcaaaaccgcgtgtgtgctgcgggacgcgatcagtccgtatttgttgcgacggatgaagaaggatgttcaaatggtgcttcagctgccagacaagtcggagcaggtcagttactcttaaactttttaatgttgttgctcgttttttccggggagagagggtattttaacacgagaaaacaaatgttgtggattaatcaaacattaccttcaattactttccattatggtaaaattcgtctgtgtttcgggtaatttcttttttctcctcccactaaaaaaagtctaccattttggctcctttcgcgatttttcttacaatatttcttgtacagattcttttctgtgacatcacaagtgaacagcgtcaactttatcttcagtacatcgagtccaaggcctgtgatgacattgtcaccggcaagcaaatgccattcgcgggtttaatgtttctgcgcaaattgtgtaaccatcccgacttggtgtccggaggacccaaccgatttggtaccaataataatttaaaaatattagcgattttaaatcgtcatttattcgttttgctttatttagccgactttaatgtcgaagatcggcaggacatggaatttggattttaccagcgcagtggcaaaatggttgttctccgtgagcttttgcgtctatggcgagaacagaatcacaaagtgttactgttttcacagagtcggcaaatgctttcgatcattgaaagttttgttatcattgaagggttggtaaatataacgcccaaaaaacctttaatttatttatattaccgtattattacagttattccttccttcgaatggacggcacaactccaattggcagtcgacaaactcttgtcgaacagttcaacaaagttagttattgctgcttttcctacaatcctcactttaattctaaggatcccgatctttttgtgtttttattgacgacaaaagtcggtggacttggcataaatttgaccggagcgaatcgcgttttgatttttgaccccgattggaacccgtccacagatgctcaggtcgatttggtccatatttttataaattaatttttccttttttttttgttttaggcccgtgagaggtcctggcgaattggacagcatagggcggtcacaatttacagattgtgcgtggcaaaactatcgcctaattaaacagtaattaaggttgacaagcggaacaattgaagagaaaatttaccaacggtgttgtttttcatcggttttcgttaattaatataaatttattcgtttaattattacctttaaggcaaatattcaaacactttttggccaatcgcattttggacaacccaaaacagcaacggttcttcaaaaccaacgaattgcacgaattgtttactttgggctcgtcaaaaagcgaccggaagtatggcacaggtaaaacaatctgtaaaaatctcatcaatttcactcccaaattttagaaacggcggttatttttgccgccaacggaagcgaagtgagcagaaaaaagttgaagaataacatggataaaagaagggatgaaaaggaggcggagaacaaagcgaaagcggcggaacggacggacgacggcggaaaaatgccctcggctgattttaatgacagtgcactttcggacgaggcccgggaaaggcttaaaatggtcgccaaacgattagcggcgtaaaataaataacaaaaaatgcttaaattaacaataatttttagaaattttggaaaaacggagacggacaaagcggaaaatgggcggcggaagagggacaaagtgttgtttgagggcaaatacaaagttccattgctgcggaaacaagtggaagtgatggaaaagaaagaggaagacaacgaagagacggcgccggaggggcattcgttgagcaacaaagaacaggtgaaggaggagcacacccagtggaagggaaaggcccaagcaaatgcccaatttttgttattttgttggaaaatacccaattggacgaggtactggaggtactttcccaatgttccgcctcccctggaacagtccatgccatggtttttaaaggggaaaatattacgacccaaaacaaacaaacaaaaataagcattgcgaatggatttggccaacaaattaattttatgagtgaattgtgttgatgattttatccctgtttcaggatgattatgtgttgagcaagttgctcagcaaaaaggtcggtgttcactctgcgcttcagcatgaccaaatcatcaaagagagttccgccgccgacattcagctgatcgaagacgaagcgaacgcagtggcaaaaagggcagccgatgtgttgaaacgatcgcgacggttggccaatttcttgtggaactttcattgtttcattcttctcaaggcgacacctcgaattcctgtcgaatgcgtccgaatttggcccaatacaaacaaaaaagtcattgttcggtcgcaaaagagtggccgggttcacaataataagcaatggaattgaaaagactgatggaaatgggggcagagacggagcgccaaaagaacggacagaaaaggaagaggacgacgaggaggaggaaggtgaaataagggaagaaacacgagtgggaaagggagttgtttgttcagggtgttcaaagcctttcgatgggagcgaaatgttagggcggaaaaagcgcggaaaatgcgatgcgagcggcgccgaattgctcaagtcgataagacagcgaaaggagcgccaattggacattgacggggagggcgaacttgcggaaggggaagaggacgaagttggtggacaaattcaaatatttctaaatttttgctttccatcgttgcaataa

SEQ ID NO: 46592 - DNA, 3522 bp, Heterodera glycines
  unsure (1)..(3522): unsure at all n locations
caaatgatgtcccattaattggagtaccaccgggcgggtgtcatgtgttcgagtgtccaaaaaattaaccagcttatttccagacagtggcatgtcaagggtggccttcctcctccctgtcatctgaagcggcgaaggcaccctgccgactcgcgccggacacccatgnacgcgagaaaagcgacgaccacgcgggcatttccacgcgtttcggcacaccgcccgaacaatttgctcaaggtatggtcaaaaataagcgactatatatgatgtacaatgattattttgcattcccccaggttactgtactactactgtcgtgcacttacgaacacggcgtgtgctgtcgttgtgatgatgattctcacaggtaccatatacatgctgtaaatacagtatccacatgctgtacatacagtatccatccgcttatttccaagcataggtattcaaaaaatggttttaagctaatattaaaaaaactaaaaataaaaacaattaatattgaaattaatatactcttttgcataaatcatatacatcgtgtcagtcaatgcccaaaattacggtagtaaacgcaactttctccgtttttcattatttgctatgctgtattttttaaacacagacccaatcttaacacacacacacacacacggtcgtttatactgtagattgtggagaccttactgtattttatactataaagtaagaacaactttccatatagcctacttgtacgtctccatctttggcctactgaacatccgtgctgagttgcggcctgagcagctgtttttgcgctcctctgacgtcattgagctgttgcatctgcgcaacgagttgccaataaattttgaaaattttgcgccaaatttaaattaaatttttttctcacccagatacatcatgccattctatgcagtgtgcatggtttttgtgaacaaaccaggcaatttctccgacccggttcagcgtcagagatggcattcgctggtgcgcgcgataattagcaaaaaaaatctcaaaattttttgtcttaaaattttcaggtttccgattttgaggggttgcccagctctgttggccgcttctccaccaaattttggctacgcgactatgagcaatttgtggagcaggacccggaggcaagaataaagtttttgaaaatttggattgatatgaaattaaattttttatttaaagcgcagggctagtttttagaaaattagaattttcaatgtttttaaaaaataaggagccagggtttgtttttgttttttttttgtttatttaggagactcgggatttttttgaaaatttcatttttttcctcccttaaaacatccttgggttcaaagcaaaatttaggatgcagcacctccattgaacgacctagcagcctttgaaggtaggaggggttaggattttttttttaaattttttttttgaatttttcatccgttacaaattaggcatccccttaactgaacgaaagcgcaacgaactggccgaatttcttcaatggcccgaatttcaagtgatcatttatttattttccttaatttcgatcaacgcacatatgtaaaaaacaattttgtttgaatatttgatttttcatatcccaattgttagcgctaaattttttgggacccagttactaggttacgaaatacaaaatttttttagttttggaatggttttctgaggctagaatcatccagcaacacaacaaacagctctgccaattcgtcggagctggtgctgagccgcttcttcttcacaacggcttcttatgggacagagttgcgcgaatggtccaagcgcgagctgttgcttggtcaatgggcgcagggttgccgattcggtgaggagttttgtttttctttttacaaaaatttttacagtatcccgagctggaggtcagcgtgtacgtaagtgatttgtaattttaacttaattccgctgagttggcctaagatttatgcaatattttaaatctgctcgcgtatttgcttaattggtctggttaggaaaatttattaagaattgaattgcctaatagctctccattttcctcattacgcttaatttgcacacatcattaagtccaattatgttcaggaagatgacgccaaatttttggatctgatcccgacaatggtatgtaaaacgtctcaaataaatttaaagcttgccattttgatcggttttttttgtgtcatttcgttttcttcccccatagattccgcagacaattcagtcctctgcctgcactttgttatgtatgtttctcgtctgtctgctgttcatgaccaacccaggcgctctattggtctcaaattttgccattttctccacttgcattggtgcgttcaaattttgaacattttttcctaaattttggcgaaatgttttccaggcgtttttggcatccaatcgttactcggcactctgcttgatcccatttttatgaggtagtggtgtaaatatttatcacatatgtacattgcaaaatgaaaagcaaattactggagtctatttgtgattcgtccttaaatccaagggcagtccttgatttagtagcctgcttgatgtattgtaatggatctaatttttatgaaaaattgctggtttgaaaataatgaattaattttttttttgacaaagttaaaagctgaaaatcctaatgcaccatacatattacagtattaacttaaaaaaaccgtatcactggcaataattttttgaaatttatcagtgctgccatcatgtcaattggattctctgtggacattccggcacacattgcctatcatttctacaagacgagcgttggcgaaaaggcaggcaccagcttagatgtggaacaacgactgatggactgcttggctaccattggtcagtcagtttttgtgtgcaaagagtaaattacggttagtgtgtcccttataaagtaacagtatagcttgaggttttcgtatgactcaatatacggtatttgtacgattaaggtgacctgaattattcggtatttgtagcttgcgattttagcgtaatccaatacgcatgttattgtgaccnccgctgaaatatacaattatggtagttcgaaatgagacaattaaacgatacttcattctagcttattgttaatctgatccagtgtaatgtatttttgatttgtttttgcaaggctttcctgtgctggaagctggtctgtccacgctgatctgtacctcgtcactgttctttgttgacttgcacatggccagggcaagttgtatacaatagcctttgattacagtatactctggctactgtatacgtacctacagttgctaaattttggtacaaatataggtgtttgcccgcacaatgacgctggttgtggccatcggtttgctgcacgggctgttggtcatcccggtgatgttttccttgtgcaacaccatacggcgacgagagcggcagcgccctactgtaaccggacatgccgttatatggcctactacagtactt

SEQ ID NO: 46593 - DNA, 537 bp, Heterodera glycines
atggaagaacaccgcccaggcaacacgtcaatcttcttcccagccgcaaagcgctctgaatgcggcacctatgagctacggctgaagaacaacgtgggcgaaacggaaggccactttgaagtgctggtgcaagaccgtccggcaccgccgaagggatcgcttgcggtggacaacgtagcgcgcgactcgtgcacactgtcatggcaaccgccggaggacgacggtggctccgaagtcaccaactacgtggtcgaatgccgtggtgtgggcagccaagtttgggtgccggtcaacaacgttgttggcacaaacagcaccgtgccgaacctgcaggagggccacgaatatgaattccgagtgtgtgccgtgaatgcgtttggctgttccgacccgttgaacaccgactcggccgtggtggccatggacccatacggcccgccgggacgacccgaggtcacggaccacgacaacaatcaaatcagcatcaaatgggcaccgtcgacggacactggcggatcgccaatcgcttattatgat

SEQ ID NO: 46594 - DNA, 385 bp, Heterodera glycines
atggcaactccaggaattgaaggtggaattcaattaaagaattgtttttatacacttaagcattagttcatatagcaaatttagcatctgaagatccgacttcaaattcgaactccgccgaactgtccgatgcggaaagagaactcgtgatcgaggaactgaaaaaggtttgacaaaatttagcaaatccctttgaattctaaagatttatcttcagacggagaatgaaatcgccacacttcgtcagctgttaaccgcgcgtcagaaacacgtggcacaactgaaacgaaagcttggaatttcgccgttaaacgaaattaccagcgaaatggcacaaggactgaaaactgtcaaggaaactccggcgtatgttttcgttgtttaa

SEQ ID NO: 46595 - DNA, 878 bp, Heterodera glycines
aggtgtgccgaagagcacctactgggagtatgcgtacgaagactcgatgaacctgctcgctaaactacccaccattgcggcaatgatttacaggtaaatggatgggatccatcctggatggtccttgaacggaggagtcccccatatttattgaaagacaaaatctcttcattttggacattttataccgcgcttggaactcaggaatccgtattattgaataactatcagtactggcattgagtttttcttggtttataatgcttttagtcagttcctaaaaatgaaaaaattgtttggtccaaaaattacggatttttggacagcatgaaagtctttgctaaattatctcatatttttttttagaaatctctaccgtgatggttcttccgtgggtgtgctcgacccgaacaaggtttttttttgtttaatttttggttccatggttaaatttgatgccaccctttaaaggattggtccgctaacttttgccatatgcttggctacaccgaacgcgaattcgtggaactgatgcgtctctatttggtcatccattcggaccacgagggtggcaatgtgtccgcgcacacgtgccatttggtcggctccgcgctgtccgacccgtacctgtcatttgccgcttcgatggccggccttgctggtccattgcatggactggccaaccaggtatattttgccagcacatcgttttggcaccctctttttagagtcaaattgcatcggtttaatgtaataaattacgaaaaaaactgccttaattcccgaataccctgtaaaattttaccaatgatatcatgttctacatcaatttacttgttcaggaagtgcttgttttctgacaaaaatggttgccgaca

SEQ ID NO: 46596 - DNA, 1107 bp, Heterodera glycines
atgacctacaagatcgggtcagacccatcacagctgaaatttgcggagaaattggtcattttaaacggtgagtttggcttatagcaagcaaaatgccttacaaattgtttgtcagaccgtacagtcggcatgttgacccgcttctacaacatgaagaaggcgtgtgcagacccgaagtcaaggccacagtttttgaatgacaaatcacttgactcggctatttccaccattgtcaaacgctttccgatcattgacatcaaacggaattcggttcgaaaaactaggggaattttataaattttaaattttttaccattaggtgaaaaaatgctctgttagagggaagtgttaattaatttaaattttttacgcaattttatggaaaaaaatgcattttttaatttagtttgagtttgatttcgcttaaatttccgaaattttaaatgctagcaccgctaaatccgcatttttcaaattttggttagacataaaaattttttaaacgaattttagaccgctttttcatgtgtgaatgaaatgaaaggggacattctgaagaagctgtccctgtactactacacttttgcggacttgctcgacttgaaggacgccattttgcaactgttcaccgcaatggacgcaaatcagtgcaaattgaacattgtatgtaatggttatgacaatcagagaagatttgtaccaagaaatataagaaattaaaaatttaagagttgacaaaattacaaatttttaattttcacctttttttttgggtactaatttactttgtatccgctttttttttttcgcatttttcaattttttttcctttttattgtcacaattgcttttagattaatggaaacacttaaaaatttaaaacttgatgctttattcaaagttttggctctaccagacgaagaacataaagcgagatttggcactcacagcatcacgttgtttccacatacatttctgattttttgtggcgtaagcaatttggaggaccggatattttttataatttgtggacccaaatcgcggaattgtacccaataagcacataaagctcgtttatttgatatttaaagcaattgtgacaataaa

SEQ ID NO: 46597 - DNA, 1367 bp, Heterodera glycines
atgggccccgttcttccgtgcattggccaaaacaataaaaagcacgaagtgatgaaaaagaaggagaaaaatgacgagaaaatgaccttggaaacgaacaaaatggcgggtgaaaagcgaaaaaggccgcagagtttgtccgagaaaagttttccatacaacgccggactggagaagaacaaattgtttgtgaagaaattggattggtcgtgtacgggcgaggaactcaaagtaactaagaaaaggggaaatggagtaagattatgctttttaagaaatttttcgagaaattcggaactgtagtggacgcgcgaattgtcaccaaatggaacggtcgctccaagggttgtgcttacgtcgattttgccgacgaacaaagcgcctccgccgctttgatgggggcggacggaacggagataaggggcagaaaaatatcagtttatttgagcaatcctccgcccacaaaacggatgaaaatggaagaggcaacattggacgaccacaatttgacaaccgataaaacgaatggagcgacaacctcaaagactgtggacgggaaaactgaacaaaaacaagcgaaacaacagacgaagccctcaaggctgatgccacgggcggcttttctgaccggcgctggacaaaggatcggaaaagcaagccgattgatgttgccgatgagcggcatttcgaagagaagcggaaatatcgcaacggaaggaaagagtgaatcgcccgtcggcgttgtcactgaatcaacgaaagatatgagcttatagaggcagaggcgaacggacaaatgatgaaaatgattaaatatccattcaattgtttcccaacgaagagtaaccaaaagactaaaatcgcaaaattcggtccttttttgacaaaatttgttaacaaattgcactaattcgaaaaactcccggccggaccccacccgccatttgaaagcacaaagactaaagaagctaacacataaaatctcagcgtttaggcttgccaaaaacatttgattaatttagtgattgttgattattttcgtttgcaactttcggtacttgtgtggtttacgggacagatttcatatacatttttcaaatgcctataaatgtattcattttttaatgaaaataggttttaagaggattttggggtcggtgatcacgaatccgggctcagatcagcgctaccgttcactacatgagctgtacagggacaaagaattgataggcttcctgaacaaataataccctcattggcaagatgcccatgaatataccataggtacgatatacatactatatgtatagcgaattacgggcaaccttttgcgtataaagccgatgaagaattctttattgtttaaa

SEQ ID NO: 46598 - DNA, 1189 bp, Heterodera glycines
atgcaagagactcacattgttctcgggattgcctcggtgtgctctctgttggctatcatcgccacagtcgtcactctgccatctctgtactcggagatgagccaaatgaacagcaaagtgcgcgacggagttgaggtactcagccggccgcactcagacaaaaaacacaccgaaatttgccaatttttccaggccttccgcgtcaacaccgactcggcctggactgacttgatggacgtgcaagtggtcgtgacgccgccgtcgaagccccgtgataaccccttcaactccatcttccgtgccaaacgtcaactgcccggacactgccagtgcgctggcctccaacagccaagctgtccccctggtccgcccggcccgtccggaccgcctggacagcccggacagcctggaggcgcaggacagcccggacagcctggacagcctggccaacccggtgggcattttttgactaaccctatgctaatcagccccttccattgcagctcctccttgcccgccccagaacatcccctgcccacgctgccctgctggcccgcccggccgccccggaggacagggaccgcccggacagcaaggagcccctggacaacctggtacgcccgctcaaggtggaggacctggaacgcctggcgcgcccggaccccaaggacagcctggacagcccggacgccccggagccgctggccaacccggacagcctggagcgaacggagttgtctcgtaagcactttaatcatggcttttaagttaaaacccggttccactcgttcagacgcccaattcctggcccgaagggaccgcctggagcgcctggccagaacggaaaccccggaggccaaggtcagccaggacagccaggaggccaaggaccgcccggacctcctggcgcgcccggtcagcccggccagcctggaaactctggccagcctggacagcccggagcaccgggacagcccggcaaggacagcggctactgtccgtgcccgccccgctcttccgtgttggcagtcaaaaagaagatggcggcagccaagaaagcataagcgacaagcgcagggagaagagaaccgaaagacaaaggaccgacgcgaaagcgaagctgaagatgatcataattgggtggaagttgttgtcggaatttgtgttcaccagcgcatttcccacacga

SEQ ID NO: 46599 - DNA, 1325 bp, Heterodera glycines
ccaaccatcagtgatttgcgatatcagcagcccttttgggctttagtccctgctgaagacaaacaggaatacttccttgaagtgaaattatcattttggaaagtaaatttgttttttctctcttttttcagattatcaaagagggcactgtcattggcactgtccgtctccacaacagcgcccatcaaaaatcattttggtccattggccgttttgagccgtgtgacatcaaattggagcatccgtccgtttctcgtttccacgccattttacaatacggagaatgtataaaggggagaccgggatggtaaaagatggaggataaaaggggttttaccaatcaaatgttttctctttccaggttcatcttcgacatgaacagcacccacggggtgaggctgaacaagcagccgctcaaaaaacgcacttacgtcccattgcacaacggatttgtgttccaaatagcgggtcggaattaaatattttaaattgaatgaacaacttttggcaatgtttttcaggcagttcacgtcttttcactgtttgcggtggtcccaaaagagaacagaaagaagaagaaaacaaagaaaaggcacaaccaatgggaaaaacggagaacaaaaaggacgcagaagaggaaggagaggacgaagaagaacaacagctccgatactacgagaaggacccgttgggatggctgcaaaagtgggcaaattcaacattttttaaaatttaaattgttgacggagaaaacgaactttcagatactttgagcgcgaaggacttcccatgcactttcaggtggattttgaattttaatttaaaaaattcataaaaaatggatcccgatattttgtccggtatttttcagtttacaaaatcgtcgtccgatggaggcggcggtggcgctggggatttactggcagaatttgaggacgaacagaacaaaaagaggggacgacggcattccgacgagggccattggacctgttcaattgagtgagtgccgaaaaggcgccttttccttttctgtttccgtttttaggttggttagcgatgtttctctgaccagtggcaatgtggtcactgtgtcggccccttccaaacgattggcccaattgcaatgttcgctggtcgcatgcgaacggctgaacgacgcgtgtcttttgcgcatttcgtccctttggaacaaacgcaaaaattacacggagaatgacttttacgacagcgacgaggacacttttttggaccgaactggacaaattgaggagcaacgggaaaagcgccggaagcgatttggggtagtcaatttgaccactgattaa

SEQ ID NO: 46600 - DNA, 2056 bp, Heterodera glycines
atgccgttatcttcgcccgccgatgccattgcaattgtcgcatttgtgttgaagccgacgccatacattgaagaatttttgcaccgtttgtctttgttggaatatccggacaaaaacagtcgtgtcaatctgcgcatttacaacaaccaaatgtacaacaaacaacacattgaaacatgggcaaaacggcgaagcggcaaaaaaaacgacgattttggcattgtgcaaattttgaatggcacggcaatgggcgaacacaaaattcgagcggaagcagtgtcagtgaaatttggaatataaataaatttgagaggagaaaagcccaaatttttggggggaatcctttttaattgtatagcatttttggaacaaatcttgttaaattttgaaattccaacggggcctgagtcggtcttaaacttgaaaaaaaagtgtttttttttcgttttttaggcaatgggcaatcgaaataaatgccgattttttgtttttgattgacgccgaagcgcacattacggcaccagacacactcaacattcttgtccaaaaggcacgcgaagacaacaattatcggtccgtttcacatgagagaacataaattttatgtattttttaccgtttttttttctattcggcttgcatttttctatttaatttataagccaaaaatcttataaaattgagaatttaaacaattttcgatttaatacggtgaggcaatgactcgtcttttttttataaaaaattttgatttatgatattattttctggaaaatgggtgggtttcatcaaaaaacctaactttttttaacataagaattttttaaaatctaattcgtaattcaaaaaaattgcaaaaaataaaactttttttgccatgataaatacaaatgttgattcatcttttttcagtgcaattcttgcccctcttctgcttcgtcccgacactgtgtacagtaacttttggggtgctgtttccgagtccggttattatgcgcgttcatttggtacattcattttatgccaaagaaattttgtccaatttttcatggcattttttcctccccgtttttcagattatttggacatcatccacggcaaatcgcctgcccatgtttggaatgtgccattcattggggcggcaatttttgtctcaaaacgcaaatttgaagcgctatccaaagcgttcgttttgaagggtggcgtcgatgctgacatttcgatggcacaattttgccgggaaaatgtatcggaatttaaataaatttattcttaatttcaaattttaagggccattttatgtttgtggattcgtccaaaggcatccaatattttggctttttggtcaattcggactcattttcacaactgccaaaggaggcgcgactcaatttggagctgtacgattatccgaacaacaaaaaggtcggctaacatttatacgaaattataataatttttcataattttgtgggaaaactatatgaaaaagtgaaaaaaaatatttgaattggaaccgttatcttacaaataaaatattaaaaattattattttaacaattttattttggaatgaaattttttttgccgacttccacgcttttttaataaaatatccgccgaagttaagtgggcatatttttttaattttaatttttataattctgaaaaaatccagaaagttatagaaaaaaaactatctagcctttttaaatttaaattaagaattcgtatatttttcaaaatgctttttttcataaaaatataattattttttttctataattttttccgaagaaaaattttattaaaaaattatattgcttctaatactacaaaaaaataaaattgaacttcgaatcaccaccaccccttttttcagctgtgggaaagtcgttacattcacccggaatatttcactgtgctcaaacccggcactgatgtgccgttggcctgtccggatgtgtacgattttccgtttttgtccgaacgcttttgcgaggagctcatcgaagtgatggaggagtttggccaatggtccgagggcaaacaccag

SEQ ID NO: 46601 - DNA, 960 bp, Heterodera glycines
agcaacggacaaaagacagcagattttgattgaagaggctggcgacggccaacatacggaaaaatcgtgcatttgaatcgattttgagcaataaatgttgattttgttgacaattgagttttagactttttgttcgaatttgggttcggggttcgaaatgggtctaaatggatgtcggattcgtgatcagtgatcagcgaccccgaaaacctatattttgacttttttacttagaaattaaaaaaaaatttttatgggggacaaactgaataagagccttttaaaatttacatttaaatttgctttccaggattctcggcttgatcattgctggccatttgaaatgggaacaacggccgctttggttcgacgcttatgtcgcccattcaccgcattacgagccaaaatgggacatcaaaatgccgaagcgtgacgaaccgttgccacaaattttctaccaagaggaccttatcagagcgtaaattctttcatttaccaacaatcttggtgtcgtcattcgaaagctcatctaattctctttagccttacaaaaattacaaagaatttcataaaaaagttataaagaaaaaaattcaaaaattttgatttttttcgctattttcatatttctcttagttgtcagaatttgcgaaaaaatcaatttttaatctgatttttcggttgatttatggcctcttccatcattttttgggtttttcatttttttaactgcccttgacctggtggacacatgcctggatttttcctagacccatatgcctcggcaaatctaaattttttttctaaaatacctaactttattgttttcaattaacttttctacttcttccccctataaatttcactattttaagcaagaaattgctggagatgcgcaacgaagaaccgaagtatgagcttgatcagcaacaacagcagcagcctgatcagcttaattag

SEQ ID NO: 46602 - DNA, 282 bp, Heterodera glycines
atgccattccaacaaaatccattttttttctttgctttcagtgtccgtcgtcaagtggtcaacatcccatcatttgttgtccgtctcgactcccaaaagcacattgatctgtccgcaaagtcgccgtacgctggcggtcggccgggccgtgtcaagcgaaagaatgcgaaaaaaggtgccggaggcggcggctcgggtggcgaggaggaggactgatcgacgatgatcagttgataatttttttttgttcgacaccccctttttgttgaaacacaatgttga

SEQ ID NO: 46603 - DNA, 791 bp, Heterodera glycines
tgatgttaaattatattatacacatgaaaacgatgaccattcgaatcagttggataaagcaattgaggctatggaaaaatggtcaaaaataaatgggttagaaatttcaactgaaaaatgttttgttttatatttagggaaaaataatatgaaaaaagaatattttattaactcacaaaggatttcagaatcggataatgttcgtgacttgggaattataattgactcgaaactgaatttttcagaacacataagcaaaattatacgaaacgcatatcttagaattttctaaattttgagagtgttgaaaagcagggaaataaaaactctaacagcagcctataaaacttttgtacgacctcaattagaatacgctaccgaagtttggaaccctaatttaaaaaaagatatagacaaaattgagcgggtacaaaaattttttacaagaaaagcacttagaaaatgtggttttgtgtacaaaaaatatggggaaagactaaaaatcacgggtttacacaaattggaagaaagaagaaaaatcaatgatttaacaacagctttttaaataatcaaagggttcaccagcctcgatgctgggaaaagtttctttttctcagaaaggctcaggaggcctttatttttgcgagtaaagcgccacacggccaaaacacaaaataatttttttcataggatagtaagaaactggaataaccttccagtggtagcggtgcaaattaataaggcaaaggaattcaggggtttactaaaagcaatgagttctgagtaggatt

SEQ ID NO: 46604 - DNA, 2346 bp, Heterodera glycines
  unsure (1)..(2346): unsure at all n locations
atgaaaattgtggtggagcagcaaaaaattggtaaaataatccactatttgaaaatcatttataaaattaattgtttcttgctaagaaaaaaaattggcatttaaatttattttttacagagacttctttaatttctgctgaatatgctcaatacaatttgataagaacaaatccaacaaatcgtgagctcgattttaagcagtcggaagaagtaaaaataattatcttttctccttactctatttctctaatatgtataatttccgttttcaatttctttctttctctctttgccgtccttctcttattcacttctctctctctctctccctctctctttctctgaccttctttctctctctctctctctaacgttctttctttctcactcactcctctctcattcaaacactcactgtttctttctctctctctctctactcctctaacaactctctcactctctctttttcattttcattttttagattagcaatttaataaaaccattctgtgccaacgaaaacaaaataactctgatcaataaaatcaaaaagcaaatatattcaaatttaaagcaatgggtgaaaatagcgactaattttgaacgtacatttatttgtttaaacatataattaatattaatattttttattgacaataaaaattaaaaatttgaaaatgttacagatcccttgctgttaacaaacggttcccatatgatgaatgctgaattggacagctccgatttggatttgctgtgcattgtgcccgcacaaatcaatttgaacaattttttataccaacttaacattagtttcttttcaatgcttaaaaaagtaaattttttaattaaaattagagcttgggctttaggatttttagctcgtttcttttgtatatgggtcagggtaatttcgtttttactgcattttataaagaaatttttggaaaaatcaaaatttacttcgaaattattacttttgcaaaattttatcttaaaattatcatacaaaaaatcacttaagacccccgaaaatagcataacaacagaacttaaaagcaattctttcgtatattttagaccaagaagtcctaatgcgaaaatattagtgaaataaaaagaaaaacatcttgaataaattctatttaagtaattattttccattttataaattaaagttttatgaaattattgaatgttgcccaatttactgttcagaatttaacgaaagcaaaagttagcagtgtgtccggcagagtgccattgatacgaattgagcaaaaccaaattgaatttgatgttttgttcgttcctgtcccattacaatatttggtagaaggtgttaatttggaaagtgatcaactgatcagagaattgggcactgctgaggcgctttattcattggcaggtaaacacgctggaaaatattgtaaattttaatattcaaaccaattttaattaaaaatagttttagttaatttaaaatatgaatctttcctaagcttttatttttcatttcggttttgataattgcaaatgctccttttaataccaatgttttcggactttaattgaagattgcatttcgtaattttaatgaatcatttttataacttttaaggctacagatccggcaaatttcaattgtcacttgtcaaggacagagaaaccttttcacaatttttgagagccattaaactttgggctaaaagtgagcaaattttattgaaaaaattcataataataatttaagattaacattaatttttagatcgtttaatttattctggattatttggctattttaatggagcaactttgtcagttatggccactaaaatttgcgctttgtttccatttgcacccttggcttatttattgtaccaattcttcagcatttactncaattggtaattatagaaaaacattaataattatgcatataaagatttttacgaagttttaattaaaaattgcattacgaatcacttaacaaagtatattctaatatttttctgtatgtttaataaaaaaaattttccaaaattccctcttcttaataaaataattgtaatcattaaatatcaaggaattgggcatctgaacctgtaatgattgaaaaactgagtgaatttccgccacaaagcactctgaagccgccaaaaattgctgaaaattcaatgacagtgatcacgccaaggtttccagaacaaaatgcctcattcaatgtcaacaaatttaccattcggacaattgttgaagaaattggcatcggtaaaatttttattatttaaataattgtttaagaatttataatccttaaaattaaaaaaaaattgga

SEQ ID NO: 46605 - DNA, 342 bp, Heterodera glycines
tcggattggcctggcattcaatttgatctgagccgggtgcttcacggcgaacaatacattgaactgtacgcaccgtttccggccgacggtgcgcgactgcgctccgaaatccgagttgccgacctgttggacaagggggcgaacgcagtgatcatctccgagggtacaacaacaaaaacaaaatgcgcaggggatcatcaatcatctttaattttatcggagaaaaatgatcaaattgctggactagatggatttggacccaaaatccttccgggatgggatcccatttacataatcgccgcatatgatctattatcattaaactgtggaggattaatctag

SEQ ID NO: 46606 - DNA, 1580 bp, Heterodera glycines; identical to SEQ ID NO: 39792
  unsure (1)..(1580): unsure at all n locations

SEQ ID NO: 46607 - DNA, 1292 bp, Heterodera glycines
atgtccggcggtggaagtggacgccaaaataggggcaagacggaagcaccgcgacgcccaacccgaacgcagcagactcgtcagcccggcactcagcagcagcaaaggcgtccaacaccaacgcaggaacggagtgcgctcgcgcagccaactcttcgcagatgggaggacacggcagaattcttcttcgccctggaacgcttcgtcaacgacacaacgccgcgctccgtgcaggacctggtcagcgaattcaccgaactcaacgcagcgccacgaccggagccatcgcctgagtttacacggtgggttttggcgtcgttttcaatttgtgcatgtctaattttcccaattttcaattgcaggaacttggaatgcaaccgctaccgagatgtgatctgcacggaaatcaaccgggtgcgactccacagcggacgctacatccacgccaactggatcagcacgttcggcgagaaccgcttcatctgcactcaaggcccgctcgagacgacctgcgacgacttctggacaatgatcgtgcaggagaacatcgaaggcattgtgatgctctgcgacaccatcgaacaaaatcggatcaagtgtcatcagtactggccgaccgcggacaacaaggtggggtttgaaatttacccaatttaacaattaatcatttccccttccctcctagctcatgcgcttcgccaacaaccagatcattgtcaaattcgggcgcgaacaccacgtggaaggcgcgctctacaggacggacctcatcgttggagcaccgcagatgcgacagggccacttgcgcgttcaacacttccactggcgacaatggcccgaccgcggagtgccccacagcgacctggccccactgcgcctgctgtaccatgtgatcggcgtcccccgagcggttgtgcactgttcagctggtgagttaacggaaacaaaaacattgaaaaattaatcatttttcccattgcaggcatcggacgcactggaacgctcgtggcggtgtacttggccaaccaaacgctgcacctcggccagcctctcaacatcttcgctctcatccgtgacctccggcgccaacgatcgcaaagcatacagacactcgaccagtacctctacatttacttcgtgattcttcggtgggttttcaaattttcatcaaccagaaatgaaattttaattttttcagttatgcacaaaacaaggcgtcaaagctgaacatcaacgtgaacgcgctcaacgccctcgtgcaggcactgaactccaccatgcgacggggctga

SEQ ID NO: 46608 - DNA, 177 bp, Heterodera glycines
aatacgcactgccgaaactctatcacaaattgcactattgtgtctcgtgtgccattcacagcaaagtcgtgcgcaatcgttcgcgtgaagcgcgtaaggaccgaaacccaccgccacgttttggccaacggtctgccgtcgatcgtccgcaacgtccggggggagcggcccctggag

SEQ ID NO: 46609 - DNA, 1035 bp, Heterodera glycines
  unsure (1)..(1035): unsure at all n locations
ctgtttgtaatgcgggaactgcacaattganccggtcgagacggcactttggtcgccatggaatacatcgaggaatttccaccgctgctcaaccaaactgggatggcatcaaaaattaggaattactacaaaaaagtgggatatttttatcaaaaaaaaactgttttcatcttcttaactttgcttttcccctcagaaattgaccaaagaggaggaaaagcgtgagttcgaatttggcgagaccgctttctcccacacttcgccttttcttggcaatttgtcgccaaacgaatcgctgcaggccatcgagaacaacatgtacagagcaacaatcttccaacaccacccgatgggcacggactttctgttgatacggaacaaatacgggtgggaggaaggagaaagagcaatcggaaaaagggtttttaggctgttcatcagacaattcccggtactttttgtggtcggacagcaaatgccgctttacgaagttccgacgccaaattcgaagcgggcgaaagattttaacaaagactttatgatggtatgcaaaattacattagcactgtttcaaaaaacaaaaacggcattttaagagttacattttccgtcttttttggcaaagtgacgatttgccaaaacgcattcgaatggatgagatgaagcagatgtaccccgggcaagaggggctgatccgcaagaacttgaagcaatgtgccgaactgagacgcatggaagggcacgaatattgggtgggtttagggggggatgatttatcgaccggcacatttaaaaagtattgtgaatgaatgacaggactaatttggatccctgaaaatcaaaatgcaaaaatatacataaacgaaaagagggctaactgcaaacatttgaatttccaccggtcaggtgttacgggaagactatcgcctccccaacagagaggaggtgtccagcatggtcaccccggagatgtactgtgcctacgcgtcaatgctggccgcggaacaacggcttanagtcgcttttcgtttcaag

SEQ ID NO: 46610 - DNA, 531 bp, Heterodera glycines
atggtcgacgcagtgaaaaaggtgacaatttgattttggatacattcagcagcttctaatgcttttccttccttttcagttggtcagcatttgctccgaattgtcttataacaaaagacagttgctgtgggtggctttcaaaggtgcgatttcgtcagccgtggcgtgccctctgcgccatcgaacaacgcttctattcggatactgaggggcaacggctggtgcgcaacacattttttttagtgttttatcttttcattttcaggggttcaagtcctatcgcgaggagttggaatctgagctgcttgtcaattgccgtggagttttggtccgtttcatgccttcatttttgatatcaatccaaataccatcgcttttcaggagttcctcgactcaactctgattccaaatgcgacgaccaacctggaggccaaggtgttctacctcaagatgaagggcgactacagccgctacatttccgaaattgcgctgggcgaggacagaacgagtagggaatttgttttgatgtag

SEQ ID NO: 46611 - DNA, 926 bp, Heterodera glycines
cacgccgtggccccgtttcgctggtgctcgacgaaagttgcaccactgcgatggaaacgccaaacaaactcaacgcttccgacatgttcgcctctttcagcgctccttttaatggttgccattgggtttttcaaattacactcatttatcttttttagacacaataaattctacggcacgtaaaatcgaatgcagcgattcgacgcgaagtgttcggccatgcgactcggcaaactttgaggtggaatatttcgtggcgtcggatgcgaggtgaacattttgttgattccaattgcaacactcttttctccccctctctctttctctctcctctctctctttccttttctctctctctctctctctctcacacactccacttttctttcatctcttccccactctctgtcccatttattttctgtaaattcagcgccgtcattgagcacacgcgtcaggtgatctttctggaggacgacgacgtcgcatttgtcgaggacggcgctttgtccatccatcgcatcaaacgcagcgacgacaccgctgctttgacagaacagacgcgagaagtgcaacggttgaccatggaactgcagcagatcatgcgcggcgatttcaagacgttcatgcagaaggagattttcgagcagcccgactcagtggtgaacacaatgcgtggccgtgtgcacgaggacggacgcattgtgctgggagggatcaaagtgagtggcgacggtgagagacgcgtaaacaatgcccaccaccgatgtcaaggagtacacgaacgaccttcgccgttgccgtcgtctgatcatgatcgcctgcggcacttcgtaccattcggcattggcttgtcgtcagctgatggaggaactgaccgagctgccggtggtggtcgagttggccagcgacttcatcgatcgtga

SEQ ID NO: 46612 - DNA, 755 bp, Heterodera glycines
atgcgcggccagccgacagaacaaatgaaaatgaccgttttctaccgatattgggtgagttatattcggacaaacagcaaggagtatgagaaacaaacaaaggccgtattaatgacttttacccacattgtggaattttgacttttggttgtgtgcccgcatattaatattttttaaaaaggtacaaaaagggcgttggctgtgtaaaaaagggaatgttttggaccctttttgagttaaactaaaaataaaaatgttttattgtgagttgcaattcgcccgttttggatatgccaaaatggaagccatattcatgaaaacccataggaacacgttgtccaaaccattaaaaccaaaacctgagttcgctaaagattcgatggcaaaaattcattcattatttgatactttagtgtctgaaagaagccattatgaaggcgacagggcatggactcgtgaacgacttgagccgttttgatttcatcatcgatccaaatgaacgttataagcaaggtaagaaaagggaatgggcgactgaccaacgaaaagcgctttgcttaaaggcagtttcatcacatctacgaccttcacggaggacgcaattaagcagccccaatgggttttcgaagaatcatttgttgatgcgaatcacgtagccgcggtttgcagagaggtgatttaaaataaaatcattggaaccaaaataaacgaaaaaaatattttcagaaagctcatcccgcggtctgtacgtttag

SEQ ID NO: 46613 - DNA, 633 bp, Heterodera glycines
gtggacgacattgaatttctgtctgaacgtcttcacgcctcggtgcaggatttgagttcgtttgacgaatactgtgccgaggtccgatcgggcagactccagtggagtccggtgcataaattggagaaattctggcgcgaaaatgcacaacgcttcaatgaaaagaactttgaattgataaagtggattattacttttttttataaagcttataaataacaaaaacaaattctcagaatactcatcaaaattctcgagaccagcagcgacccattgccgctcagtgttgctgctcatgacattggcgaatacgtccggcattaccatcgcggaaaaacgtttatcctaccgcaaaatttcagaagaacaaaacaatttcattttatttagaattgtcgaacaataccaaggcaaacaagcagtgatgaagttgttgagtgcagaggacccaaacgttcggtaccacgctttgttaggtgagtagggataataagagaactatgcgtgtggccagataattaaacatctttttcagcaatccaaaagttaatggtgcacaattgggaatatcttggcaagcaaattgaaggactcgaaggggcaaaaggctctgcgggggaagaagcaaaggaa

SEQ ID NO: 46614 - DNA, 1060 bp, Heterodera glycines
tagatgattttgcgcattaatccgttaagggaattggacatcacaaaacgccgcgttgaaaaaataattaaatcgggtgccaacgttgttctgactaccggcggcatcgacgacctttgtttgaaagaatttgttgaggctggtgcgatcggagtgcgtcgctgtaaaaaggcggacttgaagcgcatagcgaaagcaaccggaggtatctttgatcaataaaaacggaagaattgcccgtttagcgacattgaccgcctcattggccactttggagggtgatgagcaatttgatgcgtcactgctcggcagtgctgacgaagtcgtacagactcgcatttcagacgacgaattaattttgatcaaaggaacgaagttgaaatcggctgcttccatcattctgcggtagattaggtattcatttgttttaataatttaatccctatttagtggggccaatgacatgatgttggaagagatggagcgcagtgttcatgatgtactttctgttgtcaaacgagttctcgaaggcaagaaacttgttgttggcggtggtgctgtcgagacagcattgaacgtttatttggagaattttgcattgaatttggtcagtgaaaatagtgcatttccctgcaacatactgtattacacaattgttgttcagactagccgtgaacaactcgccgtggccgcttttgccgattcattgctggtcatcccgaaaactctggccacaaatgcggcacaggatgccatttctctgcttgccaaactgcgtgccttccataatcgcagtcaaaccgacaaaaagttcgagcatatgaaatggtcatttttgcttttaattaatttttatctatgttattcgattttgaggtctggacttgatttggaggaaggcgctgtggcacagaatcgtgacgccggtgtttttgaaccgcttatcagcaaagtgaaaagtctcaagttcgcaacggaggcggcaatcacaatcttgcgcattgatgacttgatcaaactggacaaaatcgaaaagaaaccgcacgacgaagacgaatgt

SEQ ID NO: 46615 - DNA, 1263 bp, Heterodera glycines; identical to SEQ ID NO: 40102
  unsure (1)..(1263): unsure at all n locations

SEQ ID NO: 46616 - DNA, 548 bp, Heterodera glycines
atgaaaaaatcattcgtttcttttctgttttttacggcattgctcgtcattgtttgctcaaaagaggaggaagggggcgcaaaggaaaagaagtacggcacaatcattggtattgaccttggcaccacctactcctgtgttggcgtctacaaaaacggcagagtggagataatcgccaatgaccagggaaaccgaataacgccttcctacgtggctttcacaccagactcgggcgagcgtctgatcggagatgctgcaaaaaaccagttgactctaaacccggaaaacaccattttcgatgccaaacgactcattggacgggaattcaccgacaaaaccgtccaggacgatatgaaactttggccttttaaggttccgaaaagcacgaatatttaataagaaaaaactatttttagatctacaacaaggcaaacaagccccatgttcaagtgaaagtcggtaacgaggataagcaatttgcggcggaggaggtttctgctatggttctgacgaagatgaaggaaattgcggagtcttaccctcggtaa

SEQ ID NO: 46617 - DNA, 1985 bp, Heterodera glycines
aaaattaatctcttccgttcttcactttccattcatgacttttcctcattaagtatgtccaggccggtttctttacgggtgtcgccacaagggcgattatacaaccattcgatgtgctcaaaatccgactacaggtggacttacacacacaatggctattgcagttcacacgaccataaaataattaaacaacgttcatgcttcataactttttctagaagcatccaaattaaacattcttagtgtcctttgacagcgctaacaataagtgtcctattcaaaatctttgttttctaaacatttttggccataactttagaaacaaaacgaaatttgaaaaagttatggcacattaaatttgccaaattattttatggtcgtgtaaactgcaataaagcccaatcaatgataaatgccaaaatatcatttaatttagcttcaagaagaacctttacgtgggaaaagtcgtggaaaatacagtggaatttttcaatctgccaaattgatttaccacgaagagggaatcgcagcattttggttcctaaaaactgtaattcgaattcccgcattttttaaggcgtggtcatatcccagcgcaaggcctctcaattgtctatggcaagtttatttagaattttgtaagttggaatgtattagttattaaatttaaattatttttatctggagggtaaactctctgacttattgttagccttgtggtgggacgacacccccccccaaccttcaaaaatctttttatggtcgattttttggtcttttctctttgctgattgtctcccattctttcggtctggtacagttttgcactttcgagctgctcaccaaacaggccggcgacttcggctttcacaatttctcaaaatcagtcgattttgtctgcggtgcctctgccggctgtgagttattttggcattttcgccgttcatttggaaaatggcgctcttttgaggtttggccaccacttgtgcaatgccttttgatgtcgttagaacgcgaatggtggcacaaggcgcccatcggacctaccgtaacatggcacacgcattcatcaaaacgtggcgttatgaagggccggcggggtatttccgcgggttggtcccttccctcgtgcaaattgcgccattcaccggtctgtcatgcccattcggaattcaaaggaatatttcaaaaatgcaggtctccaattcacattctacaacttggtcaatgtgtactgggacagcatttggcagggcgacagggaatccgtcggacgaattgtgtcgggatgggtggcggggatggcggccaaaacgataacggtgtgactgcttcacatttaatgcaaagggtggtcaaaaaggacccaaagcaacaatcaattgagaagggtatcgaaacattctcccatatgggcccaaattaaatgcaagtggcgcgcaattaaggcgacaaaaccaccattctttttcaaaaaacattgactttctttgttaattttcttttgtcagtatccgttcgatttggttcggcacagactgcaggtgaaccggcacattcgcaaggacacattcggccagaccacttccgacgggggcatgctgcgcacgtttgtgggcattgtcaaaagagaaaccgtctttggtaacacatttttttgtttaaaaagaaccccttttcccaacgcaaatcgaattgtcaagacctctaattagaaaaatacggagaggcgatcagagagtccttttttgcgatataaaaaaagttgctctaattttcaaattattttaaataatcttttgggggtaaggttttctcagagtgtattccttttttattttctaaactctttgaattcacataatttaggtctgttcaaaggtttgtcccccgcggtgctaaaggcagctgtccaatcgtcgttgtcattctttttttacgaattgatctgcgactttttgcgtactgttgcttgatcttcttgt

SEQ ID NO: 46618 - DNA, 711 bp, Heterodera glycines
atggtggtcaaagagtgggcaaagcgtcacggcatcaacgactcggcctgctcctccttcacatcgtactcgctggtgctgatggtcatccactatttgcagtgcggtgcacagccaccggtgctgcccaatctgcagcaaatgtacccgaaacggttcagcgtacgtgcggatgtgcgcacgctgaacgtgtcgttgccgttcgagccaattccaaccgcgatgggctggcagttcaaggacgacgcgacgctcagcgagttgctgctcggcttcctccgttactacgccttccaattcgagtgggactgattacacgaagggggaactcctcgggaaacttagggctttattgcggatatttgtgccgttgatgaattttagcgcccggttcagtccccgttttccccatcacccaccctcaattgttaacaactcattcaatagtgtgttattactgtccattcttttagctttgacgcggacgcgataagcattcgaatgggcaaaaaggtcaacagggcacaggtggcacaaaatcaagttggtttttattttctcatttgtcagtgtgttggggttggtcgaatgtgcctgataaatttccagtcgcccttcaacacgttgtcccaatggcattgcatttgcattgaggagcctttcacactgtcaaatgccgctcactctgtgtacgatgagcgcatcttccca

SEQ ID NO: 46619 - DNA, 4665 bp, Heterodera glycines
gaagcgtcgtcgattcgaaattcacgcgcattgacattcacgagttctggctgcagtctcacgttccgttgaaggtgattttgatggccttgaaatgacggaccgttcgttacgaatttattcgcttaattatgctttattacagggaaccaccaaaatccctcaatatgtcttcccggtgaaccaagtcatggccaataacaacgagttgcaaaggtggattaatatattgagaaaaatttacgatttctatgtaattggaaccaaaaaagggacaaaaacggtgccgaggggtgggggattccgatatcagcaacttgaacacaaaatcgtctccaatttctttaatttgttgctggtgtcatgctttttaattgattttccagttttctcctttcgctctgctgcaattggcaaattgtgacattggccccgggtttgccaacccccgtccgccaggctgccgaattggccaagcgcgggcgtgccaatttcaacgagctgaagcggtgagtctccctagccaatctaatcaattaacggtgataattaatccctccagcagtacgccaaaattcatcccgcgcgttgaggacaccgaccagattaattatactgtgctgaacaaccgcctctgttataacgggcatattttggcggacacgcgtttcaacgcttaagggttgatgagactgatcagtgagacggaacgggcggacgatcaaagggacggaaatgagaatcaaattcaattttggatgaaaatatttggaaaacacattcgtcatatttgtctgttctgttctttgccttaattcttcactttgctactttatcaattattgtttaaaaaataacaaaattaaaaaaatatatatggaaaatacacaaattcattaacctaattttttaaaaattaattttaaattcgttttcttcacaaaagcaaaagaagacacgaatggtcacattgtcaaaactagagtccggcgggggttttactggattcccgcccccgtaattttgacccaaatacgggagtaaaaatacactggtaagaattgtttttttttgttaaattaataattttttattgaaactctgtttatatatccaaaatttcaaaaaaaggtttcccgtcggcgcctatcggcaccaccgacccttataatccttaattctcttaaaaactggcttaaatttgcaaagattggtcatttttggacaaaatctgaacaatgtattgtgttcgaatattcaattgtttcccgggccgccctccctcctcctccctggtccctaaaaagttcttttcaaaaaatacgctgcaaagagttgttaaaattaataaagggagttgaaaaataatgttaataaattttttgttgaaataaattagagtgccagtttttttcatctgaaattctatacatacttaaatttcgataacaatagcagttcgtacaatacatttttttacaaaattaagcttatagcttgggccaaatctaacaagggaaccgtcagaactgtgtcagaaaatgcatgtatcataactatttgatagtgcagggccggctactctgaatttttaatgttagcggtgtgttgaagccgaatagaaaagttattggacctcaaaaatcaaaattttgactgtgttttccccttcagggaggtggtgaagtggggaaaattaaaaaaaaacggtggatcagtgggttaaattcctatttttcggaggtccaggttcgaacccaacatgaaaaaaatacattttaattaatgtgcaacaaagttaacgattaaaaaaaccattttttatttaaaaatatacataggtaataatttttctttagtgaaagtaaaccaaaagtcgactaaaaaagtgactgccccatggggcccaatcggcggggcccaaccggcggggcccaatcgacccccaccgggttttaggttctaaaaaagggaacgggtcgtttcggcgccgccgtttcggcgacgccgtttcggcgacagggtcgtttcggcgccaaaaaaaatttctgatttttaaggccctgcaacttttgaagcagacgaaatcccaagccaatcctatccctctcatttccaatgttatcgtgccatttcttcctattcacctctgttgcatatgccatccatttctcttattcccttttgtgtttttccgtcattacccctcatcctatccaaaagtccatccccattgtgccagtatataagtccatccaatttccccctcgggggctgcgagatgtctgcggtgggtcagtctgtgccattccttgcctttggcaatcctttcccaaataaccaattgcactgacccacccaaaatgctctgaggttgttgttgacccaaacatattcccggttttcaattcataattatttgtcaatgcttttccttataataaattcctctctcctaaaacggtaatttgaaatggctgaagccttaaacccggggacacaacataatccctagcccgaactcgaataaaaatcgaaatttttaatttttcaaattatgattttttgttcaaatttagattaggaaatcggaattgatcaaaataatttttcgtttcacatgttttaaaaaaattaaattattcataaatttattaagtatgaaattctatccattcttacaaaggcaataactcgtacaatagcagttcgtacaatacatttttttttacaaaattaagcttatagcttgggccaaatctaacaagggaaccgtcagaactgtgtcagaaaatgcatgtatcataactatttgatagtgcagggccggctactctgaatttttaatgttagcggtgtgttgaagccaaatagaaaagttattggacctcaaaaatcaaaattttcactgtgttttccccttcagggaaggtggtgaagtggggaaaattaaaaaaaacggtggatcagtgggttaaattcctatttttcggaggtccaggttcgaacccaacatgaaaaaaatacattttaattaatgtgcaacaaagttaacgattaaaaaaaccattttttattttaaaatatacataggtaataatttttctttagtgaaagtaaaccaaaagtcgactaaaaaagtgactgccccatggggcccaatcgtaccggggcccaatcggcggggcccaatcgacccccaccgacaagtgatggacggttttgatttttgtgttgccaatggcacagaaaggtcgttaattaacaatttattcataggcacattgaagaggaaagtcgaagtgacgagcagcaaaggcacgagaaaacggcggcgccgatgctaacgacggcaccagcgatggcggcggcacttccgtaagttagtggttcttgaaagaggagtaacgcgctaccgtttcccaccatagttaatcgtcgtttccctttttccaacggtagcagcgcgcgcattgttcggacgccacacattggcacaaatgcccgcgagaatggcaccgcctcattgtccgccatcactccaatcgctgccgcctttcgatggtgcactccgctggccaacacaccaactgtaaggtgcacttttgcatcttttttagcggagatggaggtcaatattttgaaataaaaattatttggctggcacaaattggggacaaaattttggaggttcaacagtaaatatttcgtggggtatttcacgaagggctaaaccaacgggatttagtcgtctcactttgcccttccgtacgccatgttttgtccatatttctgtccatgtcaatcctggtcatttcttcgtccaattgccctcccatccgacattttcgtcgcttgcgctgctcaaccaatatatgctcaccgtatacacgcacaatcagccgggcgttggggcaccaggcttggccaagccgtacgacggtaatttggacaaataatgttagggttcaagccaaacattgttcatcctgcctgtttcctttcagtcggcgtgctttgcgctgccccggcgtacaacggatggttccgcgccattactttggcatacgaccaggtggaaagcgttctccaatcaatcccattttaataatattttatcctgttcattgtcaggaccaggatgagatgttggtccgtttcgtcgattacggcggcttcgcccgtttgcctcgggcggatttgcgccaaattcggtcatttccccgggggtttttccagctaatgtcatcatctcttcccatttcagtactgactttgtgacccttcccctgcagggcatcgaatgctatttggccaatgtgcagccagctggtaattaattgtccctaattgccaattatttcttagggcattttacctttcctttccgttcagatggatctttgcattggagtgacaaggccaacgagttgttccagcagttgtgcgtgtccaaaatcattcaggcggcgctggtgggctattgcaaaacggacggaattccgtgcgttgagctttttgtgatggacagcgccaacaaaaaggtgggcatcagagggcaattgttgtttattgctcaacgaatgagtccgttactcctcaaaaatccaggggattctcgggcgaaaaccctggactctagcaaatccctagtgctaatggact

SEQ ID NO: 46620 - DNA, 669 bp, Heterodera glycines
atgtggtgctgtgagacggtgatggaaatgacattggcattcaatcgttgtgttgagctgtcctcggcacgttgggctcgtctgcttttccagggcaaacgcatttacttgtggatgcttttcccgaccttatacggcttttactacttctggtacacccaaccgctgatttttagcggcattttcttctcatggttcttcaacccacatgttggatacattgacgattttggcaaaacggtgagtgccaatgtaactcaattttttttaattggcaaaacggtgagtgccaatgtgattaattggtaaaatcgtgaattttttttttttaattggcacaatagttgctaaaggaatatctatgtaatatatcaatttgtgaaataaacaaaaaatatattttttttttgatgggaagaatttattatttttttttagtattacgtaataaaatattaattaaaatttgttcatcaaatctgtatttgagaaaaaatatttaaatatattaaaaaaaatatttcaattatttaatccattagatagattaaattagaaaagtaaattcaaaattaaaatttacagttaaatttttgcctataaacttgaaaatatttttaatttttgttatttttcgaaagttgggaaaatataattaaagattataaa

SEQ ID NO: 46621 - DNA, 2267 bp, Heterodera glycines
  unsure (1)..(2267): unsure at all n locations
tcgttgctgcgaaaagaagagttgcggcaatcggaacgagacgcccagcgacccggtgatcatcgacaaatacttcctgaagttcttcctcaaatgcaaccaaaactgtcagttttaccgtacccataggggtggcatactgtaatcaaacacatttttgtaggcttaaaaaatgccggaaacccgcgggacatgcgccgcttccaggtggtactgtgtgccacgcctcgcgttgacgtcgacgttttagttggattttttaaaaaatttaaaaatgccgagcggggtttaaaatggaaaatttaattttttgaaaaaaatttctaattaaataattatggcgatcaattttgtaataattggagcatttataattaatcatatttttttagaattttaatatataaatcagtaaattttacatttttggaaaatttttgcattaaaaaaataaaaatttcgaaaaaataatataaaatttaaaaattaattagtgatatataagtacaatattataatttgtagtttttttctcgataaatattttgacctttttttaaatttatgttttcataccgtacaaataaattgtcgcaattttaatgcctaaaactgactccgaaaaacgcggatttgaagctaatccgaaacggaaatccccccgttttttcaaggcaatgtccgacaacatgttcgtgcacaacaattccaagcatggacgacgtggcaaacgcggcagcagtgaaccgtcgatggccgaaggtgaacaaaaaatatgcacattaaaaagtgatagaaagaattttgaccgtccaaaatttttacaaaaaatatgcctaaaaattctgaattttttatagaaatttcttatttacgagtcggaatattagaattcgggcactggctgctgtaggccctcctaacatagttaaaaatggaaatttgatatgttattggtgggcggtataaaactgtaaatttaatagtaaaaaaatgccatcatttaacctgtcgaatatggcatcattagagtgtttttaatcgaaaaatgccaaattcgctccttaacttcagaaaaaatgccatcattccttgagtcttattgatttggtgtctaaaaatggcattttcttcccaatcataattgtttcaagcccatcaaaaatgacatttttgcaatttgacatacaaaaatgctatccaagtcatcaaaaaaatatgccatatttttcaccccaaaaatgccgtcctcattttccccgccaaatgccgtgcgcatattactgtccaatccagaataacacccccaaaaatgccatgccatcattatcattcccatatccccctgtctccccgtcagaaatggcattggcaccctcctcctcatcctccaccgctccatcctcaacaactgccggtggtggcatcgcttcctcttcctcatccgtctcctcttcatccatagttggcacctgttcatcctcatccgccggtggcacaatgccgtccatcaaaatgatttttccgggcgaagtttggtgtcaaagtggtggcacggcgatgatcatcggcgaacagttccacgagggcatgcaagtgatggtcggcggtacggtcacttggcccgaggtgacgaaaaatagaggggatatggcacaaatgatggcatttgccatattttttttggaaaatttgtgccatctttttggctgccatttctatgattaaaaaaatcaactctttaaaaatttgtaaattttgtggtgaaattcaccgaacaaaattttttattttttatttcgcttatttcgttaatttttaactctcagtgaaattcattatttaaaaatgttgtggttagctaacaaaaagtttgttgttgcccccattataaagatggtcactgcccacgcgatcaaagtgaatgtgccggcccgggcaagtcccggcgccgtggacgtggtcgtctgctccccgaaggggcaaccaaaagtgcgctccaatgccatccgcttctcatnacgtttgtaagtgccaaaaataaacatttatagacttatggtaattaaagcagggcaaattccggcatttttggcagtgatcaaattccgaagaaaaaaaatgtattttgtaatttgtttggattgaaatgtttgtgattagaatttgatagcaaatttcacgggactgaattgaaacaaaaatgaaaaatgctaaaacttttcggtagttnaataccctganaacctttgggattttttttttgg

SEQ ID NO: 46622 - DNA, 658 bp, Heterodera glycines
atgattcgcaaagccatccgtggaaatcttcaaaaattcccgttgcttgagaagctgttgccttacattgtcggcaacgtcggattcgttttcaccaacgaggatttgggtgatgtgcgcaaaaaactgttggagaacaaacgagtaacttttaaaatttaatgttccttcgagtcaatggatcagggttctgccagagttccctgttcgtccgtttgaaaaaatgtcggactcagttttagacaaaataactttttttcccaaaagccgtgttttagtcctatttttaactgttccttttgttggaaagtcagagagttccagccatagcattcctggttccgaaatttacaaaatcctttccaaattttacaaaaaaaagttaaataaagacaactaaatgtagggcgcgcctgcaaaggctggtgccattgcgccatgtgacgtgcgattgccgcctcaaaacagtggaatgggtccagagaagacgtccttcttccaagccttgcaaattccgaccaaaatttcgcgtggtaccatcgaaattctcaacgaggtccatctgatcaagactggggagaaagtcggcgcttccgagtcagccttgcttaacatgttgggcattcaaccgttttcctacggactggtcgttgagcag

SEQ ID NO: 46623 - DNA, 641 bp, Heterodera glycines
atggcttcggccgcgccgcccctcggcccttctttggggcagcgaggcgtaaacgtggcgaacttctgcaaggagtttaacaatttgacttcgactattcgatttggtgggttttcgcgtttgtgttttcctacatttgatttataaggtacaaatttgcctgtgtctatccacgtcaaaccggacagaacttacgaaattgacattagcactccgaccaccgagtggcttctgcaacaagcggcggggatacgacgtaaccggcaggaggaaggtgggaaattcaatcgctccgttctttccctggcaaaccctttcaatgcttttcaggagaaatcgtcggaatgatttcggtgaaacacgtatacgaaattgccaaagtcaaatctcaagacaaatctctcattggagtgccgttaaaagtaaagacagccaaaagacaaacttgggtaaattagccgatcttttagaaaatttgtcaattggtcattgagagagcggattcgattggcatcaaagtgcaaaatgaagatttagacccggaagaatataggaaattcctggaacatcgtcaggaagttgtgcaaagacaattggaggaaatagcgaagcaagaagaggccaaactggccagaacatga

SEQ ID NO: 46624 - DNA, 1048 bp, Heterodera glycines
atgaacagttacaagagcaagcagatcattattggcagtggttaccaagttatgctgcccgagtgtaacaaaaaaataagaaaggacgataaaatcgacgaggaaagagacgaatgtttgtggtcgaagaatcaaggaaaattgggcgacacggaaattgttgagttttgtcgtgacgcattaaatcattatgggattggccctgatagggtcagtcggttgttgggataatacaaatatgcaaaaattacactaattttcaggcactttacatcttgctaaagtctgaccacaatctaaaaagagccaagtcggaattggctttaagaaacagtgtgaagaagcgcttttccgtagaagacgaattcgctttcagagaggcccacaaatgtttcggcaaaaacttcgccaaaatccaccaaatgctttcccacaaaaatttgtcagagctggtggaacattattacctcaccaaaaaacaacaaaactacaaaagctttatggacaatgaatgtggcaaaaatggaacatcggaaaggtgaaaaagtgcacagggaaaacacaaacatttaaaattttgtggattcaaaaataatacatttttcatttaatttaagtgacgaggagggacaaacgcaaatcaaatcggagctgcacagattaatttgcgagggttgccaaaacgaagtgctcaaattatacagtgccaatggacttgagctctgccgagcatgcaaaaattactttaagtaacgtttggaaatataaatgttttccctgcttcaaaatgttagtgcttttacagggcaaccaacaaacaccgcgtgtgcgctcagcccatcgaagaaaagaaacgaatcccaatttgtcctcctgaaatgaaaaatatcgcggaacaatttgaggagatggcgcgggtggtgatgggcgaacaatttgatgacatttccgatggattggacgaagtgcaagtggaacagaacaacgagaccatttgtgaacagaaaataaagtgagaaagcaaacgaagaatgggggggggaataaa

SEQ ID NO: 46625 - DNA, 757 bp, Heterodera glycines
  unsure (1)..(757): unsure at all n locations
atttttagaaaatattatttgttatttgcaaaaataattanaatcaaacaatatttttattttcgatggaaccattcgataacggatatcaggaatggcatttcgagacccaaaatnttatcggaaatcgggattccaagaatactttcaataatgctttatctccgtccttgncatttcagtccaatttctgatcggtggcgatggtccaaaacgagtggacattgaggaaatgcgagaacggtgtcggttgcacgaacgcgtcaaaacgttgggcacaattccccaattctctctgatcaaatttttctggtgctttttcattctaaatttacttttgtgttaagtcttcatgtggtgtctactcgcgttggaggaattcccgaagttttgccgccggaattcatctctttggtcgacccaaatccaaaaggtattgtccaattttttatgaaattacacagtatcaaatactattgtagattggttcatgtttaccgtagccaaatttaaattaggttgttcccattgaatttaacaataatttttggttcttcgatcattatttgactcatttataatccaaatactttatacagcaattgcagttggtcttttggatgccatccgtcggcgtgagaatggcgaattgccgtgcccggtgaagaagcatcgacaggtggccgaaatgtacaattgggcggacattgcgcagtggacggaacgcgtttatggcaattcgatggaagagccggag

SEQ ID NO: 46626 - DNA, 872 bp, Heterodera glycines
  unsure (1)..(872): unsure at all n locations
ggttttcccaccagcagcttgancccatgcacaagtctcgaccaaagctgtggttcagcactttaaaaatgtttttccttccagacatcgtggggaattgtccatccacgagaagtatcggtacgatctcagccgtgcccagctgaaggcttcttcgcggacttccgctctgcttgccggcttcgccatggtccgtttggcctaccgcttccttttgatgcccattctcagatcgctctcgtcgagctgcagtaccaagagtcgacccccaagccgttgctgatcatgctcggcgtggtcacttctctgctcgtctccgtccacctgctcgctctgatgatgtccacctgtctgttgccgtacatcggtgcctttcattgggcgcttcgatggcattgccaaaattggcactttcagaggccaacggatgcactcaggactcccctcacataaaactgcgcttttacatcgaactttcctggctgttttccacgtgcattggccttcttctctttctgttggaaatcggtgtcatttttttcgtcaaattcaattcaattggctacacttttgccgcttacattacgacgggaatgttgggtgagtgaacggacggacggcacaaattaatggcaaaacccgaaaataataacagccaaaggccatttgtcccaccgctaatcacttttggtcattttacagttcccgtggtcattgtgttcatcatcatttcttatttgattcatcgcaatcggtacaaaaacaatttcccagggaagcagccgaaatcattgatttaaaaatcggaatcactgcccaaaaacttaaacaaaaaggaatttaatcttaagaataaatcgaaattgtttatt

SEQ ID NO: 46627 - DNA, 1194 bp, Heterodera glycines
  unsure (1)..(1194): unsure at all n locations
ctctttccaagnccaagatgttttcgagtgcaaactccgctcagaaagcggagtggtcgtcaaagtgatcagcttcggtgcaattatccgcgattggctggtgccaacgcctcaggatcagctgcggtcggtggtcctcggatttgacagtttagagaattacgtcgagcacagccctttcttcggtgccattgtgggaagagtggcgaatcgaatcggaagagcgaggttaaaaagcagagtgatcagcagcagagcaggatggaaatgagcagccaccaacaaaagtcatttagattcacggttgatggaaaggaatttttgctgacaccgaacgaagggaaaaaccaattgcacggggggacagagacatttgggagaaaagtacgggggggggcaatggcaaattaaaaggaagtaattaatctcaatgtatgactttaaataataatattaaattaaaattttaaataaaaataagttaatgtcaatcaaaagcattatttgtaaattttcacggggaccaatgactttggatgagaaagcaaaagctcaacaaaggtgtggaagatggaaccgttgtgtgacaatgccgcggccaaatggccctcgggcgtccgtctctctttggaaagtgccgacggagagggcaccttccccggaaatttgcgagtgtccgtcacttatcggctgaccgcaaataaattacgaatggtgagaaaatggagacaaggctaaaaaatgacgaggagggatgaacggacattcacttttttgcaaaaattcaaccgaaaaaggggggcgaactgtgccactgataatctgagtatttggccaggacattgaggccacttcggatttgccctgtcctgtgaatatcgtccagcacaattatttcaatttgtctggccacggggacatccgcgaacattcgctgaaattggccgccgattgggcgagtgatttgcccatttcaaatccattttaaaccatttcctttagttcacgccgacttcttctgatcagattccaaccggagaaatactcaccgtttcaggcacagaattcgactttcgggaagagaaaaaactccaaacgaaagacggaaaaccgattgaattggatcataattttgtacttaccaagggaaaaggaacggacgcacaaattgcagcagttttgagagctccggac

SEQ ID NO: 46628 - DNA, 658 bp, Heterodera glycines
  unsure (1)..(658): unsure at all n locations
atgatttccgaaaaccgcgaaggaaaaatgtgctctgctcgtcaaatatgtgtccaactcgcccgctatgaccgttcttatgacatccgagacagatgccgttttctgcgcaatttttggttngacaaagaccaaaattcagtgagtttaaattntctcatataaatgttaaattaaaatattttatttattttcagttaaaatttcctttggacattttcctgcaagaacgtcctgcgcctgctgtgaataattctttcactgatcgggctgagcatttccaattgggcactctttctcacctgctcaaccaggcgaaaattatgattattagcttacactgatagaatccattcatttatttggtttattaattagttttttttcaacatttagaaatgcaatggttacactgaacttcctgactttccgtcggaacagcccgacccaaccattcgacgttcggcataccctttgccaagcgacggtatcgtacaaggaacggaaattgcaatggacgaagcggaggaggaggaggatgactcattggatgaagaggaaagtgaagaggaagatgaggaagaagacgaggaggaggacgaagacgaggaggaggaagaagaggaggaggagagcgagggagaaaaagtaccggatg

SEQ ID NO: 46629 - DNA, 1902 bp, Heterodera glycines
aacaaatttgaagaggaaattggaagtttacaactgctctctgaccaattccaagtttggttttccgatttggcgaactcccgttagaatggccaatgaattggccattcattcagagcaaattgaacacactcgagcagcagcaaaacaaagacaaaaccgactatttggactctctgcagcgattgcatgacaaaaatggcgactctcttgaccaattgaaagtttgtatcgcttatttttgttcatttcggttcctctaataattctcaaatttgacaattttcagcaactcgacctcacaatgcaaacggtggccgcaagggtcgtccatttgggtgaccaactcgaaagtgttcgagccttttcctcccgtcttttttccacttaattttttaggtccatgagccgcgtgctcgcgcgtttgaagccttgcaactgatgcggcactttgatgaattcttggcggatcagccactgaattcggcgcttttcacagacccggacagagtcattaaaagaaacaaaacaaaaataacaatttaaaaaaaattggttacaattatgctaatttaaatgaaaccatttgtttaagctgctcgagtcggcggaagtaatcgcaaaattggcctcaatcgcacaggaattggacaagaccaaatttgctgcagttcaattacgaatcgcgcacaaatacgatgaaattgagcaacttttgattgaggaatttgtccgatcgcatgacagaaaaagaatgcgcgaaattgcgatgattctttcggaattcaaaggttttccgacgaaaattacacaaacattttgaaattgtcatccaaattgtgaaggattttcgcgttgtgtggacgcattcgttgaacggatacaatcggttggcccacgttcccccaatgtcttcgaggacatccaaaatttgtgtgaccgcgctaaacccatcattatggagattttcttgagttcgcaatttgttgtctccaaattgctgttgaatgttttccatgggaaattgcaggtgaaaaaacggaaaaggaaggggaaaaggaaaaacgaataggaaatttattaaattaaattaaaaaatgaatttaatgacgaccgaatcgggctctttttaggaagcagttgtggcgacattggaggagaacaaaggcaacccggagcagtacctggccaatttacatgagctttacctaaagtatcattgtcgttttggaaaaagtcgatttccctttttgaatttaggacacacaaattgctgggccttctgcaggagaaattccgcacgaattcgttggacccccaatttttgccgacgctcactcagtcggtgttcggcccctatttggtcacatatgcaaaaattgagcacaaattcatcgccgacaaatgcacttttacgctccgaaagttctacgagtccaaagggcaccaaaaacggagtattctctcgagcgggtgggcatgcaaagcacaccccaaacacacggacatcatttcgaattcagacttcaagaactcaagtcgcgtctgctgacagcggaggattttggtggcgaaacttttctttccgaaatcatagcgataaacattctgcaggagtttaagaatgccttcgcccgctgttcatcggtacaatttattttattccaacttttatcccccccccctcccggtaaagagcagataaacatgtagaaatggaaattctaacaaaaaataagtcaattttgggacaacaatgggaatttcgcaacgggataatctcggaatggtggtgtagtccctcaaacagtttctattttcacttaatttttagctttgcaaaaaaacggagtctcttgaactgaacacagtgctttttgacatgcttctcaaatttctgta

SEQ ID NO: 46630 - DNA, 1217 bp, Heterodera glycines
atgagttcgtattcgtcctctcggcgtcgtgcgccggccagttccttcatggaggagcatgtgctcgacaggatatcccgcgaggcaataaattatcacttttccccctttttgcacattttcaacataatgggctcaataaaaatgtgaaggttttgcaaattcccatggggttggttccaaaagaaagaatgtttcggcagattttctatagcaatggcaaatcgacaagaaaagttcgacttattttttatttctaacttccgttttattaggccgaagagcgctccaacaaaaagcgccaggcgcgcgacgaagcgcgccaaattcgcatggattgtcttgagaagtcaataaaagcgggtgaccaaaaagactaccatttgttggccgacaatgacaatttggtgggtgaggagaagcaaatgaattatttaaatatgggtttcgaattacgaattattattttagcctataaattcttaggaaaaggtgaccgaattggaaaacaaataccaacgggcgatgttgctgtacacacaattggacaacgaaaaatcggcacttctctacgagattgacttgctcaaggacgaaatggaggagaaggacgtgacagtttttcaggttttaccaaacttttgcttcattccctttagtttttaaggtttcaaaagagaatcgcgagatcagcgaggagttgaaactgctcagaaagaccgtcgaggcactccaactgcagcaccagcagatgaaaagcgaaatatcgcaaagagatcgactgattcacgtgggaaaattacgagttggaaattcggctcgaaattggtcactattttcaggagaatggcttcgtcattgccgagcaggaccctaacgacgatttgctacagccaccggcggtgcccagcaattcgaacggatccaccggtagccaatcaacaaacaatgcgccgtaagtcgtcggccgatattttgcatttgcctttctctgtcagcaaattcgaccccattttgttgtcccacgtgactttgtcggccattgaaaaggcactgcccggcacttcgtcggtagaccaaaaggttcaaaggctggtcgaatccaatcggaagttgcgcaaccaaattgacgaaacggagaaggcattgtacaaccacagaagacgccaaaatgaaaaacacaacgccacaggaagcacaagcagtgacgaattagt

SEQ ID NO: 46631 - DNA, 763 bp, Heterodera glycines
atgtcattgaccggacgtgggctttacagtctcctgaagaaggcgggcggaatgttcagccctgggacagcgattggcgtgtcgattcagctactccacgcactgaagacgctgcacagcatcggctaccttcacttggacatcaaaccggagaacgccgcaattggacgacgggaaaccaatgagcgccaacggatcttcttaatcgactttggacttgcgcgccgattcatcagcagcaaaaccgtgagatcgctccccccccccccccaatcatttttttaagaacttatgattttttgttttttcacagggtaaacatagacggcagaggaaaaagacgcactttcgtgggacgccgatgtacgcatcgatctcagcgcatgcgagaagcgactactgccgaggagacgacatcgagtcctggttctacatgctggtcgacatgtacaccggttcactgccatggagccgtgtgaggagcgagcaccgggtgagtgggaggagggcacttggacatttttgagtatatttcatacattttcagacaggtaaaatgaaaagacgccgtctaagccacaaatcggaagtgcgacgaaaggccctgtccgacctgttgcagggatgcccggcacagctgggcccaatcttggaacacattgtgggttattcacacacgcttatccgattatgcccacttcaatttccccctcttttcaggaccgcctggatttttacgaccgacccaactacgaatggatag

SEQ ID NO: 46632 - DNA, 400 bp, Heterodera glycines
agttgtggtgctgacgttggacaaaagcccatgtgttgatgcgggatcagtgcaaaaacattgcccaagtgttgtgggacatgtcgttggcaaagacttcgtcggtcaaaagcaatgaaagcaaagggcgaaagagaggcgtggaccgtagcaaattggagccgagtggaaagggaaaaaaggcatacctcttcgatttgaccggtttaatcgcacattttagggtggtcttccgatgtcgccgcagacacgcatttgcatcattcgcgacagtgatgggttaattcaaaaaaacaaaaaaatatattcactttatcagtgtgtctttaagggtggactatgtgattcgtgcaggcattcgcgcaactttgctggaagtgaacgaagacatggttgacaa

SEQ ID NO: 46633 - DNA, 1072 bp, Heterodera glycines
  unsure (1)..(1072): unsure at all n locations
atggacggtctagcattggacattgcacggaaattggaggtgaagcccgcccggtacgctgtgcgaaagacaatgatgaagtcgttgttcattagtcagggacgatttgaatttaatgcgaatctgtttatggaccaaatcccccgtcggataacgttgggtcttgttgcaaactctgactatgtcggagatcctcggcgtagtccttttaacttccaaccattcaatgtgcgtgagatttccatagttgccaacggcagagcattcccgcaggctccgtactctttggactacccacggggaaaatatgtccgagcattcaacgacatgaacgaggctgtaggcttcagcaacacaacagaaggtaacggcataataatttggtacaacccattgtatctacgttttcaatatgaccaacagtggagatgatcaacccgggctttttgacttgatcaggaatggaacaacagctgtgagcattaaattcaatgagggcgtgcccatcggaggaattgtactggttgtgatgggagagtgtgatgctctagtgatgctggataaaaacagatcgatttcaactgacaccaccatttaagttttttcataagaaataaacatgaagaactcactttcttttgccgttgttttgttgatcgttctaattcaacaccaaaccctaactctcattgttgaggagggagtaaagccagaaaatattcctcactataacgaatgggcgaaacagcttgggcttaaagctaatttaaacaagacaacaaaaaccaagaatggtgtggcagcatcaactgtaaaaactacaactgtaaaaacaaaagtgggcacaacatcatcaaacagtactaccaaaggcacaccacccaaagctgcaaaacaattttcagatttaaatgcccctgtttcaatttttccgggaattcaactgtgtaaggacatgccagctgctgataattacatgnggcacatcttctgctgggctgtgtttgcactttatgctatgatgnatgtatctctgatcatttatncattacgctcgatactttnnggataa

SEQ ID NO: 46634 - DNA, 569 bp, Heterodera glycines
atgtcggtgccagcaacgtccgcaaaaccgatggtcatcgacatcagttcactttccatcgatgaattgtccgttttgcagcaacaattcgacgcagaattggcattcttcaatgattcactgaacgagttgagaaatgtcgccgcaaaattcggccgatgtcaggcgacgttggattccatcagtccgaaggaattaaacaaatcagcgctggttccgctctcagaatcggtacctattttatatttttgaattttatttgtcattatttcctaatacaggtttatgtcagagccaaaatgactgatccggacaaatatttggttgaaattggcaccgggtattttgttgagatgaaccgtcagcaatcatcagaatattttaaacggtgaataattttctgggaaattttttctttcctttagttaaataacaaattcaggaaatatgcctttttggaatcgcaagttgagacgataagccgtaaaataattccggaaaagcaacaggcgcgtcaaacgattgtggcagctctgcagaagaaagtgcaacttgccacttcgaaatag

SEQ ID NO: 46635 - DNA, 3092 bp, Heterodera glycines
  unsure (1)..(3092): unsure at all n locations
gggcccgcgggaagcagtgcggacatgtctcgagtgcacagaatgtcttcgggtaaggcgaacaggaaaatgccgggacgtatggtcaggggttntaggccgtgatctttcccgcttggccatcaatttggaccaattgcgtcgcttttggacggtccaaccactgctctcgcgtgaggattggcttcagtgggttggcactttgcgcaaccaattcatccgtcagagtccgtcgtccgcacttcgcgcctgcgctgtgttggccgaaatgtgcgaatcactctcaaagtccgttctttttccccttacttttctatttttaatgaaataatttacagggaattattcaatgccgcttttatgtccgtttggactgaactgccggagcgggaacagaacgaactgaccaatcagctgatcgatgtgttgaggcactgcccccatgccgaacccattcagaccatactgaatttggccgaattcatggaccattctgagaaggcaataaacaaagcgcagtaaaaaaaaaatttttttttgtttgtttattctttaagggacctcttccaattaaacatcgaatgctcagcgaatcggcggagaagacacgtgcatacgcaaaagcactgcgttacaaagaaatggaaattttgagcacccgcggcaacggagaaccgaacgcggatgactgtcaaacgatgataatgctattcaacaaattaaatctggaagaaggcgccgccggcattgttcagtatgccaaacgtcacaacatggaaatatcggtaagtcgtgactttcttttctcaacatgagttttaatgccttttttcgttgctcaccgattcaactgtttttagggtcgttggtacgaaaaattaggcgaatgggaaaaggcgttggagatgtatcagaacgacatgaccaccttgcccgacgaacaactatcatggaaatctatttcgtcacacagtgaaccccaattgctcccgactaacagagaggagttggaccagtccaaacccactgcaaacgcaggactcggtgatgatgccgccgtttccgccagtgcttccacgaatcgaattgcgacaccgcagcaacaaaacggagtacaaacacacggattttatgttatttttcaagcattctcctgactatttagtcttctcgctccgatcttttgctgcaccaaatgcgctgtttggaggcgctcggtcagtggagtcagttggaccgcatttgtgagacagcactcgccgaggaggaaagcaaccagtacaaccccaacttcaacatcgccacagagaagcagcagccgcagcgacaattgttacggaaacggtcgagcaggagaagcggagcccgactccctcaactacacgccctcaggcaaccgacaccgttggtggacgcagtcgccgccgaatttctgaacgcaacgctaagcgaagtggcaaagcgacagaaaattgcgacgataggagcccggggctgttgggcagtcggtacttttttgaagcccccaggaattggaaaaaaaaaattttgcaggaaatttcaagaaaatggaagattatgttgacaaaatcaatgagaacaaccgcgacggcgcctttctccgcgctgtccttgctgtgcataacaacgacttcgacaaggcatactcctgcataaataaggtgattttttaaacaaattatgaaaaatagcgaatttttaaagacccatcaagatctaaattcaagttcaaaaaaaccaatttaatttcaagttcataataatttatctcacaaatacaaaaggtcagagatatgtttgactcggaattgaccgcaatggcagcagagagttatgagcgcgcttacggagcaatggttttgctgcaagaactgaccgagctcgaggaggccatcgagtacaaaatgatccccgagcgcgaaatgcgtatcgctcttttgtggagccgacggttgcaaggatgcagacgaaatgttgaacattggaggcgcattttgatggtcaggtaggaaaaacaaaatgcttaaactcacttggatttgggtttaaccaggtcgatcgtcttttctcaaactgagttgcgccctctttggataaaatttgcggcactttgtcgttatgaggggaggcaggtgaccgtatctcgcaatgtcatccgttctttgttggaagtgccgccggacactccgttggagaaagtgccaatcccattgccattagagaaaacacagttggcactggcactttgcaaacaattatgggttgacagccaccgtcgaacggctttagttcaattggaacagctcacgcaggcaaaaacggacgatttttttttcatttcgtctattcctttagactttgcatcgatgtattgagcgcaatcgcacaatgctcacccgcgaacagcttgaaccacacgcaagactgaccgcgaaatgctaccttaagttgggtgaatggcacgactcaatcaccgccatccaatcgccgctgggtttgtttctgatcaacattaatttcccaatcataaaacaaagaattgttgacaacctaagactcgagcatgtgtttttcaattgcagtctcgactagcacaccaccgatcgcgggtcgtcacggctctatcagccttcactcgggtgctccttctgccgcactttctactgctcaaattgaacaacaacacaagcaggtgagctgtaaaaagcaaaattacaatcgtataaatatattaaatacgaatatgttgctctaaattaatgtttccattaaattttcagctttttgcttggtccgccacagttcagcaacacccgactgctatgttcacgccctctccaattggaacttatttcactgggatggaccagtcgggagcaaagaaactgattcttcaatgttacatcaacgcgaccaactttgaccccaactggtacaaggtgttgtgctgcttgcatttgtgcttttcctttattttttcatttaataggcttggcatcgtctggcaacaacatattacaacatgataatggccgaccggcaacagcgttccgtcacaatttcgccagcca

SEQ ID NO: 46636 - DNA, 1192 bp, Heterodera glycines
  unsure (1)..(1192): unsure at all n locations
aaaataaataaatatttattttcgtcatttaggatcggacacggctatcaatgccatctgcaaatggtggacaccataaaccaatcgccaatgggtccaaacgncgtgttttctcatcgagacgatgggagggcactgcgnctatttggccacggtgtcgnccatcgccacgggggcggacaatgcgtacattttcgaggagaaattcacggtggacggtgggtaatccgtgaattctttttggtcaattttgtattttacagacattaaagaggacgtcaaagtgatcagtcagaaaatgcaaaagggggtgcaacgttatttgatagtgcagtcggagggcgccagccataattacgacaccacttttgtacaaaagttattcagcgaagagggcaagggagaggcaagtgctattaatgtaattttgttttttgagggcaaccagggcctttccaacggaggctacagtcggtggtgtcccccccctcgaaagccgaaaatataattaagaaatgtaccagaatttccttaacccataaaattgccatttttggcaaatcttttaataaatcacacagtcgttcgttgggtgttttcgacttctattgcgtttgtatgtaaaaaaataggataggaaggagttggtgagaaaatcagtgttctgttatcctctcccaaccttgccttgccttttagttcagcactcggatcaacattcttggccaccctcaacagggaggcaagccaactccattcgaccgcaacgatgggcacaaagttaggcgcccgtgcgttgaaccatcttatcacacagatcaacgctaacttcgacaaaactacggaaagatgcaacgcggacaaacccgatactgccactttgctcggttagtttctaatgaatagtgtcgtggttttctgtccttttcctttttgttccgnaaattggatgtccttcagtcggttaactgattgtgagctttcttttcctcattttcggtctgatcggtcgtgaagtcgtcttctctccgctggaagagctcgccgctgagaccgattttgagcatcgtttgcccctcaaacaatggtggctgaaattccgtcctctcctgcgcattttggcaaagcatcgtgcttcttacgtccaagaagcaacttaaaagccagcggagagaatgagaaggaagcgaat

SEQ ID NO: 46637 - DNA, 561 bp, Heterodera glycines
caaacgcgccatgcgagcccacgacgcctcccccgtgcaaaccatgcccgcagggaccgcccggccctccaggaccacccgggtcacctggtgaccctggcgaggccggcacacctggacgaccaggaacagacgcatctccaggatctccagggccgcgaggaccacccgggcctcccggcgaacctggaccacaaggaccacctggcgagcccggagtgcccgcgcagagtgaaccgcttgtgccgggagaacccggagagcaaggagaccaaggtaaaatgctactaattgattgggtgatcatggtaatgctgctttgccaacactttaggaccgcccggaccccccggtccgccagggtcccctggcgccgatggcccacccggtccgccaggcccaaagggcgagccggggccggatggactgcccgggcaggacggacaacccgggccctcgggaccacccggacccagtggaacgccgggcgagaaaggcatttgtccaaaatactgtgccatcgacggcggagtgttcttcgaggatggcacgcggcgataa

SEQ ID NO: 46638 - DNA, 2670 bp, Heterodera glycines
  unsure (1)..(2670): unsure at all n locations
gactccctcacattttgctgaccaaatgtcctccgcgcancctccaaaaaatcgaagaaaacatttctcatttcactgcccaaactttcgnccggancgcgcgaatgcttttgcagcatggcgtcgttcgttcgaattgcgtggactgttggaccggacaaatgtcgtccaattcggaatcggttggatttcctttccatttgggtgtgttgcgtcgagccttttatctgttaataccacttaaatttcatacacgtgactacattaggcttttccttgtaagggaaggtggcacttggctggcaactttactccatgggctttttggctttgccatggtcgttgcagcttcacagtgaggtgtgccgtgtttttgaggaaatgttcgatgagcacggcaacactttggcatggcaatatgccggttctcaattggtccattccataaaaacgtacaaaaggacagccgtttttcaggtacggaaaggcaagcgaatggttttaattattctccaaatttgttattaaaggaaagaagtcgagatgtgttccaaacaatttcgcgctattacagcaacactttcggcgactttgagaagcaggacggactgaaccttttcctgggcattttccggtgagtttttcttttcccctcggcattttgcttcaacgaatgactaatttagctttaaacacaatgaattacttttgagtgacactggcttttcctttggtgtcttttcgcttttggcttcgttttgcttttcgtccctttctttctctcgtcgttctctacgctttcttcgtctccatcatcgtcgcttttgtctgacattgttggtacgtgctgaacaaagtctaaaagcgacggacggaacattttgcttccgactgtcagtgattggtccatcggtctcaccagcatttgctcgtgcagttgcatcagtctttgcgcgtatcccacttgacacgcttccattgccgggctcatcgccagtgcgtcctcatccgtcgctgaaccatccgtccaatctttcatttccaaaaatgtacttacgactgatgaacagattggccgccgccctcggcttttcgtgccgtttgtttcccgccatatgtctgtccgcaagcaatgcgaatggcgcaaccgctgaacgttttccccaaccatcggagaaagtcatctgggaatgggccactacgacggcaaaggcgaagaagcaaaatgttgggaggagaaggagggagggcatttgcttattgcgcaggaaaaaaagtcggaatggatttgagagggcgctaaaagttttcgactgcaaaatgaaactctttcagacaagaaattaaccaagctgtgagcaattatttttatttggttggatgcgttagtcctttaacgtccaaatgggtgaaattatgcaaattggtgcttttgtaaaggattaaacggaaccaaaggcaattagcgaaggcgggggacacacattttgttcattcgaaatgcaaattgttgaaaaagctctcacatttgctgatgtgtacgcctttgtaacgaaacaacatttctattcggtttgacaattgcgcgtatgcggaaaatgaatgtggaggaggggactgaaagtggccacaacaattgaataattaatttgaaaaagaaattggcactttccataatgtgtggacagtgagaggggaaagagcgattttttccttccatttgtactgaaatagaaaacggacggacattgcgcgcctaatgataattgcgatggacttggataaaaatgcggagacggaaggagagacatcggatggattagttcgaagaaatcatattcactaagtacatcagttaatttgaaattggaaatctagagacaatatttgtcatcgcgcagcgatagatgaagcccatttcgcccctttcccccccccccccccgttcgacactcatttaacggaatacggattaggtaggtccgcatttctcttttaattcttggtcttaggcattgaaggagcttcttaattaaagcggtcaaccaaaagttttattattggcccacggaagcagtgatgcattacaaattgaaatgacaaaataaattgttgaaggccaaaaaaagcgtaaatggggagggaatgagaataactgattatagcagaataaaacaaatagtaaaggttaatttgatcagcaggaacactgtcgaagcaaaacagcagcagaacatatcctttgcaatattattttatttgatttatttaaatggaaagaaagttgtttgttgcccctaaagcccaatatgagggcgacgcggtgatgataaaattaaattagtaatggacttgagggaactctctaatttcttattggaaatgaatgccaatgatatttgtgggaaaatgaaacggattcaactgaatgaaatgagcagaatatttaggtggtagatgagaaagggaaaatgcacaaaaacggaaaaggatgaaaaccaacaatttccatggaatttttagccatcatttgcattaaattttaatggtacctccaatttatcatccaaaataggcatttcacgcaaacatttctaaaagggtgtattttttagtgcatttgatgcaattggaaccattcgagacggttacttggggtggaaaatgaaa

SEQ ID NO: 46639 - DNA, 2508 bp, Heterodera glycines
atgtcggatcggatgtgttctttgagtgtttatgagacagcggctcatttttacataatcggttccgatccaaagggaaaacgatttcgaacattgaaaattgatcgggtgactgacaaagaattcatagctgctgaacccgaccaagactacacacaaggttaattaattaatgcgtaactcagctttcggtcattaaatcgaatttgtttagctgacattggcgaattgctcgccaccgtttcgtcgtcttcaagtgatttttttgattttgaaatgactgttgaagacgcccaatattcttttgtagttgtgactcccactgaaaaatggaacaaacggcgcagctgcgctggtggcggcggattgttgcgcaccgtggaaaaggcgtggggaatcattggcgcggttcgcttcatggagggattttatctattggtaaaacaagcaaatttcatgttattccttccaaacacacgctttgagttgcgtttttcagattgtctctcgtgccaaaatggtcgtttccatcggcgtccattccatttacaaaattgaggacgtttcaatgatttatattccggcgaccggcgccgccacccatcccgacgaaacgaagtacagcaaacttttcctggtaaagcacaaacgactgatttttcctcatttttggctactgttcagtctgtcgatttcaccgctgatttttacttttcttacacataccaattgagcagaactctgcaagagaattgtctcgccggatttgcccacaaatgggaatgaaataattacggaaaaacgataggacccgagaaaaaatttgtgtggaacgaatatttgatggaaccattgtatagggcgggggtaatccgacaagtggcattttctgaagaactgtccaacttttacaggtcaatcgcaaatggacactggaattaatgcgtgggtttgtcggtgagattttcatcaatcatggagaatggagagctttaatttttagcacaaacaaaaaagtaaaatttaggaaccgcccattctccgtgattgacacacttttagtgctttttctttgcgcttttcatggagaaaccatcaattcaattcatttgcttaagcccaccaacttttggaattgccttgtgccaaattggatcttattctgattgctcgccgatcgtccgcctttgctgggacccgttttctcaagagaggcgtcaattgcgagggtgcaattatcaaatctttaatttcttcaattttgcgatgctcaaaatgcttttcaggagctgtggccaacgacgttgagactgagcaggtcgtttgggacacgagcagtcctctgtcctttcgttccggcaaattctcctccttcgtccaacgccgcggctccgtgccgcttttttggtcgcaggaccccacccaccgcggctccccaatggtcgtcggaaagccgcccattttgatcgatcgggtggagccgcacgcactgaccacggccaaacacttcagagaattgggcagaaaatacggacatccgttggtggtgctgaatttggtgaagagagaggagcacagacataacgagaacctactccacaaaatatttctgaaagtgcatttgtttggttcttccattgttcatttcgtttggtttttcagactgttcgctatttaaacgatttccgcagagttggcgaatgcattgattacatcagtttcgatgtcagtcgttgcaacaaaagtggccgcgttttgcagcgtttggaggaaattgggcaacgggtggcaatgtccggcggatggttccaagttggtttgcttcgttttcaaaatacaccccccttcagaatttccctcttcttcattctcgactccctcacattttgcttgaccaaatgtcctccgcggcacctccaaaaatcgaagaaaacatttctcatttcactgcccaaacttcgccggacgcgcgaatgcttttgcagcatggcgtcgttcgttcgaattgcgtggactgtttggaccggacaaatgtcgtccaattcggaatcggttggatttcctttccatttgggtgtgttgcgtcgagccttttatctgttaataccacttaaatttcatacacgtgactacattaggcttttccttgtaagggaaggtggcacttggctggcaactttactccatgggctttttggctttgccatggtcgttgcagcttcacagtgaggtgtgccgtgtttttgaggaaatgttcgatgagcacggcaacactttggcatggcaatatgccggttctcaattggtccattccataaaaacgtacaaaaggacagccgtttttcaggtatggaaaggcaagcgaatggttttaattattctccaaatttgttattaaaggaaagaagtcgagatgtgttccaaacaatttcgcgctattacagcaacactttcggcgactttgagaagcaggacggactgaaccttttcctgggcattttccggtga

SEQ ID NO: 46640 - DNA, 890 bp, Heterodera glycines
atggctgaccaccagcacaatgacatcgaactggcggaggacgcctccgccactgaacacggcaccaaacagaacgtgtcggttgcggtcaaatggttcttccacggaaactggcgacgttttcaatgctccgagtggacttacagcgcacttcaggctgaaattcgcaccattgagcccaacttcagtggccaacttttttatcgaggttttttcattttgcaaaactgggtaatagtcataatcacgttattaagacatttggcagtgtttctgtttagtaaatcaccaaatgtttaattgtacatttgaagtttcaaaagagaactaaaagtttttttgaaattcaagagtttggcccacttttagtgaatcccacagaatctctcctcttgctaatgctttttcattttcaagacgccgatggagatgcaattgttttcacaacggatgccgaaatgcgtgtgatgctcgaccactttcagaagaaaatgaacaaagacacagtgacactcgaaacgatgggtttgtttctttttttttgttatttcatattacaaattggtctttaaaagtcgcaaaaatattagaaatttatacaatttgtttctatttatacgattacaggaggcgaaggaactgttaagaccggagttgtcaaaacgggttgcccttacatcaacaaaatcggcaaaatgcgtgacgtcactaatggcaatggggacaagtcgttgcatccgcacattatgtgcgatctttgcgacgggggtgtggtcggcattcgttacaaatgcatggtctgtccggactttgacctgtgcgaacaatgcgagaagacgggcgtgcacgccgaacatgcgatgtgccgtttggccactacgaacacgccg

SEQ ID NO: 46641 - DNA, 2155 bp, Heterodera glycines
cattggtgtacgacgtgaatgcaccagcggaagtggctcgccgcggttcatgaagcgcaaaaagcccaaaagtcacgaggtgcggtttttgtcagcgcgatattcgtgcacagatagacatgtacagtaatttgaaagtaatttaaacttggatgtacagtatacccatttagatcaaattaatttaaacaatagtagttatcataactacttacaattaattttttaacaccttttaatatttgtaggttcattttttattgttagtcttgccaaattgcttaaacatttttatccaaacttaaacaggagatcgaatatcgtctgcgcctaacacctgcacccgacgaagccgatttgtaccaacaggacgaaatgccaccacttggtagctatttaaatttaatttttaataattttaattcggttgcaatggctatgcaatttattcctttttttaatttaatttattcattcatctgaatattcttgatacaaaaatatttttaaatatttttttttttgcctacatttttatatatgaagaaaagatagaattgttacaataattaggggagcagaattgattgattgggcggggcaggcagacacttaagaactttctttctgctgatggtggtattaaatattttttatgtaatcaattacgattagttaaaatgaatcaaagcgcgcgccaacaaaggcagtcgcacaaaattggcgcattaatcaatcatttttggctcatttgtcagagagaaaggacaaaacgtcaaaattgggtacttccgtgttttgctcccccccccctttgagaaattttaaaaattcatattttacattttcaaacaatcatggatattttgttaaatctatgaacagatgtcatcatatgtcaaaacaaacaccatattcgtgatcagagtgaccttgaacaccacaaaatatgaatttttaaatttttcgggggggggggggcggggggtagcaaaacacggaagtacccaaaaacctaaaattgtggtttaatatccattagaaccgatttagagcccgaggatgagttcactgtggagcatgtgaaaaaggattacgacgtcgacctcatggatgagtcacaaatgtaataataaaatatttaaactacccaacaattaattagattgcaaatttacatttgttgattgagttgaggaatgaatcactgtgttttttaaaagtcgtgattatggcatttttcaaacaaatccgtgggtctgaatttttaacataaaagaaatatttttttagatagaaattaaacaatttttaaattattttgcttcattcagaaaaaatgttaaaaggtaggtagatggggttttcatacgttaaaaataaaaaatttatgaattaaaaaatgaatttgttaaaaaatcggtgaaataattggacaatacttttttaaaataaaacatgacaattcttccagaagtagcttgaaacgtcgcgcacgttcagcgaccccgcgccgaacactgaatatagaggtatttgaaatttggcaattctaattgatttattatgaattttaaaattgctaattaagaatttagtagtgaactttctaattttaaatccgtttgttcagcctgccgggccaatgggtccaatcccggtgtgtgcctattgtcaagaggaaattgatgggccaggtcactaaaaaaaaagagaattcaaatacttcttttgcccaaattaaaatttttttaatttgtcagttctgacagcgctggcaccgaatgccacaaaggcacaaaagtttcatccataccactttatgtgctgttattgtcaaaaagtaaaattttttattataccgtatatgctctttttatcccccatggggaattatttttcaaacgcctcgtagactgtgggatagttggagactgggggattaatggagattgggggataattagagaatatacggttatgtaatattatacgatttaaaaaaaataattttaacatgaaacaggcattgaatttgcatggaacattccgcgagcatgagcgtcgtccatactgccatgactgtttctacaaactgtggaacggtttgatgtatgagccggacaacaatcagcgcaaaattgagaaactgatc

SEQ ID NO: 46642 - DNA, 3499 bp, Heterodera glycines
acaaaattaatattatatattccaaacttattcattaaaaatttcaaaattccgtgacggcgagtgttaatttcaaaagaaagacattgacattaaaaagagaaaaacaatttatgtaattaattctgtcaaaagtctttctcaacgaaatgagaagctaaatggtaattaagaaaactgagaaaaatagaatttttgttaatggaatctgagtccaaaaatatggcgatgaataaattaatgcaataaaaaaaagaagaataaattgattcaatacaactgaaaaggcagtataaaagaaggtagaggaatttattttcatctttttttcctgcaattaatcgtgctaattaagttagttgtctctgacaacatttcttccctaattatgcaattatttatgttattattttcaattttgggtgctatttttttgccattaattaatgggtaagtggttgagaatgttttgaattttgaagattttctagtcaaccgcttcccacggatgaagacaatgacaacaggaacagcaccgaggacgggaacatttgggctgtgcttgtggccacttcgaacggatgggaaaattacagacaccaagtgggctgatcagtgtttaattaatggtggaaaatttgaattttacaattcggatattttatggggcggttccattttaaattatttgatgggattttttgaataattcaaaaaatatatattgagagttccagagaaacaatgaggaaaaatcatgaaagacaatgacaattctcaatttagcatcaaataaaaaacatctctttttgagtacgattttttgaggaaaaaaattaacaaattttcttttttcataccgaaatattcctttaataatttcaaacataattttcaatatttttttgtgctttttttctgagtccaatgcgcaaaaaaatattctatgattaggccgatgttagccatgcttatcatacactgataaaccatggagtggaaaagaagcgaattatcacaatgatggtcgacgacattgccaacaacacagagttagagagagaacagagccataaaaattaattattaaacaaaagagaattctaattaattattaatgaaatcattacaagaaaattcattctttgacagaaatccacagccaggaaaaattttcaatgtgccagacggagaggacgtttacaaaagtagcaaacatttaatttatttttgaaaatgcattaaaactaactaactaattagtctttgttcctttttggaagaaccctttaataaaaatgcaaatgccaatcaaattttgtaaatttgattgcacaaagtacttttcttctaaaaaatttttcaacttaaatagaatttgtcatttcttattaaggagtcaaaattgactaccgtggccatgaggttaacccccaaaatttcatggccattttattgggcgatgagaagcgaacgaaaggaaagccggtgctaaaaaggtgcagaaaaaaacaaggacaacaatttgagataaatgaagcttttcccaaattaagcactggaaaggacaaagtgtttgtgtacacttctggccacggggactttggctttctcatcttcccacactcagaagtattctaaaataattaaaattatgctatcaaacggtatttgctgaattgaataataccaaattcataaaattaattttacgtagttaatttttttagaaataaaaatttttggtaattaagcagactattaaggaaaattcagcgcaactgaaaatatcaaaaattgatatttttcaacatggaatttaagaaaaattctggaaacctttgcttaaaatgttttgtgttttcagctgacagtgaaacaattgacacgaactctgaagacaatgcatgagaagaagatgtatgccgaaatgactttgtatatcgaagcatgcaaagcgggctcaatgttttttgaaactttgaaaaaggagtggaaaagtaacatttaaatttatattattattttaaaaatattattttatttttatttaagtttatgctgtcactgcgtccaatccctacgaattcagttatgccactttttgtgaccctgattttttgaacggcgaatgtttgggtgatttgttttcagcgaattggatgaaagactcggccaaggcattaattttgcaatcatttaccaattgataaatgataaaattgaaggcaaatttgggcaaggaaactttgagggtccaatttgaaattgtgcgcaaaaaaacgaacgaaagccatgtgatgaaatacggagatttgacaattcaaagcgaaaatgttgccgaatttatgggcaaaaaacaggcacaaaaacggaacgaacgtcatcatccagcagtaatgtttgaagaattttcaattaaatgattaagaattttgaggcatcttcgcagcacaaatttctgacgattccatcacgtgctgcttctctgttgatgaagcgtcagaacgagtcccaacaagatcggcacaaccttcaacatgaggtggagatgaagccaaaaatttaaaaaattcagggacagaattaggaaaggcattcgtatgctttttctcaaaaaaacttgctcaaatgtttagatcagagacaaggaaacaaatatatgaccgggttcggtcccgttttcccgctgttccgagattaagtcgcgggttggaaatggaaagatgccgtaaaattatgtatatttatgcatttttgtaggagagaaatgttgtggagcaacagatcaagcaaattgtgaacaaacttgtgcaaaatgccaacgacagccaacgaattttgacgaaacatccgaaacgaattggcaatttggactgccatgacgaggtaaaaaacaatcagcaaacacaataattcgaaacttattcacgagattccaatttcctattcgtacgtgcaacaaaaaatacaaaaattatttaaaaagtattattgttttatgaaattggaaaacattaataagggtgaaaataatgcgatttgtgtaagaaaatttccgtttgttcatcttatgaattgggaatcttaatataagttggaagaatatagaacgaaacggcctaataaaaattgtgctttcccaatccagtttaattaatttttttttagcattttttgctttttagaatcgccaggctttagcagcacaaagctgaaaaactggacaattaggaattgagaaacccaattattttttctatttgatgattttgacaaactccaaaacatggttctgattttcaggtggtgcacacttttggcaattcctgcttcaactttagcgatgtaatattatgattaaatatatataaaattttattaaatattttaatcatagaatctttatgccctggaatatgcttatgttttggccaatttatgcgagcagtccgagctggacacagaacgtatcaaaaaggtgctgatggagcagtgt

SEQ ID NO: 46643 - DNA, 683 bp, Heterodera glycines
atgtcggactttgaaatggacgatggagaagattatggcttggttagtgaggagtttttaatgccatcgaatagcgcgattgaaatttcgcaaattttctcgcaaaaaatttcatcacgtatttttcggcatttttgctgcctgttttttcagcaatattcggacgactcgggcagtgagccggacgtggcgctggagaaccaatattatgcagcaaaaacgctgaaatcggacggcgaccagcgcggcgcgttggacgcctttcgccgcgtgttggagttggagacggagaagggcgactggggcttcaaggcgctcaagcagatgatgaagctgaactatgccatggttggcattttgtccaaattggggaaaatttggagtaatttggcaatgccaggccatatttcatcccattttttcaaattttggaaaatttggcggactttaatatttttaattttaagggcaattttgaagagatgctgcgccattatcgcaatttgctcacttacattcgttcatcggtcaccaaaaattacgcggaaaagtccatcaactccattctcgactacgtgtccctctcgaagaacacggcactgctgcagcaattctacaaaatcacgctggaagcgctcaaggtggtggcacaaatttcgcggcagtttttttttggtttttaa

SEQ ID NO: 46644 - DNA, 913 bp, Heterodera glycines
  unsure (1)..(913): unsure at all n locations
atggttggtttatcattttaaattcatatggcccttcctatagaatttggcaaaattataatttntggctcaataattcgaccaaaaaatttgtcattaaattttgaatttgttgatatagattagggctattctcacaaatattttgaattccgctgtgatttgatcgattttctatgcttcggttcacttataaatttcgttttttatttttaaattttttcaattaattttcttatatctgactaatccttaaaaataaaataaagttttttttacagaacaatgatgttgagcggacatggaaaaattacaaggaggagcagctgaagaatggcttgctcgattggcaagactacaggtgaagaaaatctaacagagggcgagaagggtggaaaatttataaaattcttaaacttttcaggaatttgatttacggaaaaccacaggagggccaggagatttcaccggaatacgtcaaaatgattgagcgagacgaacgtcggtggaaggtcagaagcaggccaaaaagacctgctaatttatattaaatcgagaggctaacggccaaattttaatatttttaaatgctttccatacagtaaactcaaaaattgatttacaggtggctgactacaattcggacggtaaaatggaccgcacggaatacggctgtttcatgcacccggaggactgtgaccatatgagagacattgtggtgcaggtggattagcaaatttatttatttaaaaaaaattaaattagattattgcttattaaagtccctttttcaatgattttcattttatatatttttcacttgtcttaacttggaacgggaaaaattcacctcaccctaattctcatatttacccagtattgttgcctaattatttaaaatgatttattatta

SEQ ID NO: 46645 - DNA, 3353 bp, Heterodera glycines
atgaccgaaaacaaggagctgaagaccaaactgagccaacagcacagccaatcgcagcaattctatccgcgaactccgaagaagcgcaagtcgcagtttccgtacgcggacgacaacgatgaggacgcgtactgctcgcggatgggcggcgacgcgtcggcggttcgccgctccgtttccatgccaccgccggagacaccgctgggcattatcggcacaaccgctgcgggacagagcgttgtccgtgccggcattaccaccgccgccgcacgccaggcactgaccgtcaacgccagcgggggcatcaaacgccgacgggcgctggtgccggcgttggtcaaaaacagtcggatcagccaatcgcatggcgacttgaccgggtggggaccatagttttattgcaagaaaataccaaaagacggcggcatttgatttatccaagaatcctatcttttaatggaatttttggactgaatttgtgagaatttttggcaaattctagtgaagttggtggttccgcggtgccgacaaataccgtttgaattcaataatttgtttgttcgccatttttagtagaaacaattcggacgaagcggtggacgacttgctgccgtcggtgtgcgaaagtccgtggctgttcgccgaccaaatggttcacgggttccagaagagacgcaacctcctcaaacactcgtgcactcgttgcgagaaaaccatcggtttcatgtcatttatgtgaaatgcacgcgatgcaaaggtaagctaagaaattggatttgggatgaaaacggattttttagaagtttttcacgagtcgtgccgccattttgcgcctttgccctgcgtccgtcggcacaacaccccgaaagtggctgggaatggcaacaaatcggctggacgtcctcgccttggtgggtctttgtttaggaggactaaccagccaaaatgtcggttctcttgcgtttttttggtcccactgaattttacgcgtccaaagtgccaaccgattttaacagtgaaatgaaaacctgttgaagcaatggcaagaaatgccatggaaagatgcaaaaaaaagaaagaaaaaacgtcaaaaagtgccaatttttacaagaaatccgcttattttcaggtgatttctgtcccgacgctcgcccgatggttcctccgctggtcattttctgcacttatttcttggaccactgcaaaacatacatgccgtacagggacttgtaccaaattgaggggtaattctttaatgaaacgggcaaaaagaaattctgagggcaaatttacgaccatttgtttattttgggccttaaattcaaaaatttccaaggaaaacattggttccgataggtgccataagtaaaaattgcaagccaaatcattagtggaaatgtctccatttttagaaaccctgctgaagttgaggccgtcacaaagcaatttctcgtcccaaacaaaagctacccgaaattggtacaataattgattaattatactaattattatttgcccctttttaggacgcttttcctcccgcagtcatttccgcttgtgtcaacaaatttttgatgcaaatccgcgacccgttgatcccctattcatatggcaaggagatttgtgcacttttggaccgctgtttggccatcgatgggcccattttggagggatttgccggcattgtcgaggatttgccagtggtaagtgtttccatttgctgagttttttagacctattcccattaaaaggcacacatggacacgttgggccacctttgtcgccattgaatcgtttggtcgcgaattcggtgagaaaattgtacaaaatttttgcatgaaattcactgacattcgtaattatgccataaaattcgttggcccaattttccactggggttttcattttgagacttttcttccatttcatttggttatggggcaaattttatggtccaaattgctctttcctgaattttcagcatttggcaaaactctttctactgacaatggtcatgcgttatttaaaaaattttatgtccattgaatttttggcataatttcctagtttgattgtcgaacccttaaaattcggacaactctgacaattattgaaaattgtttaagttcggtctgttgaccattgacgctctgtcagttccgcttggtccgctcgttttcggctccgctcgccctgactgtccgccgctgctgcgccaccgctgcgtcagtgccatggcccaattgcttcggttgggcaacgacgacttctggaccgacacttctgtccgcacactgaccaccagcagcagtgggggcacgccaattgtgcgcaatccgtcgcaacgctcggcacggagtgcggtggtggcggacggcggcggcggaacgccacagcagcccaattttggtaattcaaattcattttgaaaaatggagtccgagaccggtacccattttctattaattcagagccctaaactcaaattcgaacaaaaagacgaaaattcaaactttagtcacaaacccattgaaataccaaaaaacgctcctcccttttgctgcacagttcgccactaccagcagcagcagcttgaagtagatctgaacgcgacgggaaacggtgacaccagcaacaattgggagtcggctcggaacagccaacagtgatgatgaaagccgagatattgattgattgggttgactgtctgactttgtttgatttttctctctcctccggcccaattcactttcactctttgtttctgattacgttttgaacttttatgcctgtttttcccgcaaatttatgctttgccaccgtcaatcattcgtttatttattttatttttattgaaaattactttttctgaccctccatttatttgaatgagcggaaaaaaaatctgaggacgcaacaattagccaaagtgccgaattttgtgaacctttctcttgactctcattgattatgaatctcatcattgtcatcgcgtgcaccgacccgagttttgtttatttatatgacagttttttggagatattggcgataaaactgctcattttcggaatgtaataattgcacaacaaaataatgtttgatggaaggagacactaattagttaattaattagtaattagggaaggcacacaatattttgcataggtaaataaataagtgatcatttgaatgcgctgtgtgtggcgttgtaccttcttcagtcagcgtcagcacaggtggcaatagtaattaatcgccacgacaacgacggacagcggcacaatgacgagcagaagcgtgagcatattggagttcttgatggtccgttcttcgccatctgttatggaaaatga

SEQ ID NO: 46646 - DNA, 549 bp, Heterodera glycines
aacagaactatttgcgtttatcatcatcatcccttcattgtgcaataacaacaacacttcaaaagcgacctcatcgccgtttctcatcgttcattcgtccgtccgtccttcacatcaattcgctcgccgttttcgcaatggcacgtcgacgcatccaaaaggtggcaaatgacaactctctgatcaaccaatgctttaaatgttttgatccatttgcaggaaatggcggagctgcatcaggaactggtcacgacgggttacaccgcggcaccgatggatgacggcagagacttgtaccattggaaggcctccatcaaaggaccgcccgagtcgccgtacgaaggaggcaccttccatttggacatcgttttccgtcgcgactacccattcactccgccaaatgtgaaattcgacacgatcatttaccatccgaacgttggagaaaggggcgacatttgtttggacattctgaagcagatgtgggcgccgtcgatgaccatttctaaaggagaaggagaccacaaaacggcgaccagatatcttacttag

SEQ ID NO: 46647 - DNA, 628 bp, Heterodera glycines
agactttctcgagaaggaggactttggcacgtgctccttcgactttgtcaaggtgaacccggaccgtaccaagctgtatgtggcggtccgctttgagagcaaatcgtgcgcacgcgaagcgatggaacggtgcgtgaattgattaaactgtgattgcctacagtacccaggcgggaagagaataccgtgcatactgtatttcctatattattttgcagagcaggcagaagcgggatatgattcccagaaaaatttaatcccatggatttggaaaattttggccccagtggagcaaaaaaaaaaagaagaaaatttagggtccatgctcataggataaagtggaatttagagaatataaaatttttggttgagaatttttgtttgcgaaagaagcaatttaaaggggatggtgcctttttaaagaattttgggcaaaaatgccaagttgttaaaagtaatttttaattttcaaatttcaaatttcccggcatctcaaatattatagttgaacctaagaccgtcgtttattgttacagatttggccccgagggggaaatgcttggctacaaggtggagctgagttggttccgtgacattcgtcgctatttggcgcattgtgccaaacaag

SEQ ID NO: 46648 - DNA, 1387 bp, Heterodera glycines
  unsure (1)..(1387): unsure at all n locations
aaattgtcgaaattataaatgggccaattagaatgccattcccatcttccaaattggcatatttgccttatccttcgtttgctcagattgtctcgctgaattggcatcatgtggaaacgccgtacaccgtctctgtttggattctcctcgccagcatcgctaaaattcgtacgatggccatcatcattaagcataattatcccctaattgccctatctgtccgttagtctttcacgtgaacaaaaagttcggagaagcaattcccgacagcgcacttctcatcgtcgttggcctcgtgttgggctatggacttcaccagttgcacgtcagcatcgacctgtacaaccttaaatccaccatatttttcctttaccttttgcctccgattattttcgatgccggtaaatgcttttgtttggcttaatcgtcgccaattagtcattctttgtcaggctatttcatgccctcgaggcaattgttcgagaattgggactccgttatgctcttcgctattgtcggcacaatttggaacactttgtccattgggttcggttgggtaaaaccgactaaacgatggccaattagttgaatttgaaggttcaccttgcatgtcctcggccacttcaaccttttctccgtgcccttctcccccttcgaaattctcctctttgcctctttgatcagtgccgtcgatcccgtggcagtcattgctgtctttgaagagattcacgtcaacgagttccttttcatcaatgttttcggagaggtgaactgctgttggtctttggttaatcagtttgtcactgattgatcagtccaatcaattccctttttgctgatcattattcactgttgatcattcattccattcaatccatcattttggtcccccccccaatcgtttccccccttttttaaggcgctgttcaacgacggagtcagcgtggtcagtgaattgttgcgtttttgaattgaaagtgaaaaggggcaacattttccggtgctctaccaaatgttccgcaagttcactctgatcggcgttgatcagttgtctctcgcggattatttggccggcgtcggctcttttgtggtcatttcgttcggcggtgctctcaccggattgtttttcgccttttttgtctccattttgaccaggtgattgggtcacagaaaatcactgtgaatttattctcaaaacgcttagattcacaggacgtgtgaagattcttgcgccggtaagcgatttttttttttgctagaagtgatagtcccggggaaacgggggggggggggtaattaacaacaatcattaattaattattaattacacttggccatccccttctcatttgttttcgtctcttatcccttctccccaaanaggtgt

SEQ ID NO: 46649 - DNA, 1138 bp, Heterodera glycines
  unsure (1)..(1138): unsure at all n locations
atgccgttaacaatgcacgaganagtgcgttgcatttggccacacttaatggtcacgcaaatgctgcccgcctgctgctcagggttggaaaaaattttcaaaaatttntaaaaattttccgtaaattcagcaccatgccgatgcccgactgcgaaatgcccggatggaaaccgcgttggacatcgccgtccgaactgacaaagccaacctttgcagacttttgatgctcaattgtcccgaactgaatttgatggtgagaaaattgggttatgaaaattggacatagaagagtgcatttaaacacgagtttatgaattaaaaattacttttttgaaaaatgcaaaaaaaatgttttaatccattttttaattaaataaattacaaaattaggtaaccattgttttttaaattaaatttatgcatttaattcgaaatcaaataaaattcagtgtgcctcggactgttgttcctccactctaacaacaacaacaacacctgtgtcaaaatcacattcacctccatatccgcttcactctgctgcgagacttggccacactgattgcatggtaaaacaaatttaattttgacaatttattgaaaaattaaagttcatctgtgcccctactgatagatgccaccgaaaattttaaaaacaatgaattttcaggaggctttgttggagcatggctttgacccgaactatttgggccccgatggcactgcgcttcatgttgccatacgtcagggacagtgctcagcacttcgcatactgttggattacggtaagggagtggattaactaaaattcgttttcggcagaggctagcctcccccagctttggctatactcccctcgtttttaggtggcgcccttgacatttgtgacagtaatgggcaaactgtttcggattggttgtccacggggttgtcgagcagtactcatgagtctgacgatgggatggaccaacggttgcgtgactgtaaaaaattggtggacgaggcggtggaacagcaccgtaaggcacctcagccagcagcggaacgtcggcatggacaattatttcaaatgcgggaaggcatttggaagagtgccgtgccggagcccaaattcaagcagttcaacggcactaacaatggg

SEQ ID NO: 46650 - DNA, 1130 bp, Heterodera glycines
atggagaatgccaatgtgctcgcccgatacgcgagcatttgtcagcagaacggacttgtgcccatcgtggagccggaggtgctttgtgacggcgaacacagcttggaacgatgccagaaggtttgatttggattgttggccatcggttgcttttacaattagcccagtccgaccaatgtgcccaaaatttattggttgagtcttcgagagcaatttaatcatagagagaaaatgttgaaacgcggatgagcatttaaaaactgaagatcatcgggtgttttgttgcacacattttcaatttcatttttaattgttgtatcggtctttgtttaggtgactgagttgactttggcctacacctacaaagcattggccgaccaccacatttacctggagggcactctgctcaagccgaacatggtcacccccggccaatcccactcgcccaaggccacgcccgaccaaattggtctcgccaccgtgactgccctccgccgttctgttccgattgccgtccccggtgcgtaatgagtgcctttccttcgcattttgcatttcctttttcaaggcattgttttcctctccggcggccaatccgagatcgaggctacacacaatcttaacgccattaacagtgtgcccgggccgaagccgtggacgctgtccttttcctacggaagagcgctgcagtcgtcagtgatcaaaaaatggaacggcaaagacgagaatttgggcgatgcgcagaaagtgttgctgcaccgtgccaaggtagggggggggcgactgatgatgcccagcaattggttcttttatgctgtcctcggtaacatttcatttctgactttcctttaggccaacggcgacgctcagcaggggaaatacaccggcgaggaggcagccgcgtctgccgctgaatcactttttgtggcaaagcacgcttattgaacagaagtgtggaatatgcgatggataggcgcgaatccgagaatcactcatcatatattttagctggaggaattggcagaataatctgacaatgaacataatgataatttcgtttcatatttcattgttgtcacttccgtttggtgcacttaataattaacatatagtgataattgataaataaa

SEQ ID NO: 46651 - DNA, 265 bp, Heterodera glycines
aggtggaccaacacgtggccagcatcccggccgtgctcgaaatcccctccaaagaaatgccttatgacgcgtccaaagtaaggacatttacttaaatgaaactaattcgtttttcgtgtttaggatagcattttgaaccgagcacgtggcctggtgaacactgacgacctcaagtcatagaagaagacattacaaaaaacaaattctcctttattagtcaatgaatgtgtttaattaattatgggaatgacgagaacctacatac

SEQ ID NO: 46652 - DNA, 1162 bp, Heterodera glycines
tcctccaacgcgcaaattcgctgctctgaataccctcgcgacccctctttttcattgtcaggttggtaaggcgaaactcccaaaacccatttaaaatgcattttgtccttccattttttcaaaattaggagaccaatacggggtttttcaaattcggtgatcattggtcaccatatgaaagggggggggggggtcgtagcgaagggaaaagagggaaatttctgaaaaattagactaatttctaaataaaattcgttaaaaacctaaaataattttccccagcggcgcctatcggtaaccgccggaaccccatttgccaaaaaagttttatgaaaaagcgcttcgcaaaaaaacgggtttgaaaaacaaaaaaaggcattaatatcggcgtttgtacccactcctttcacaaaaatttataccgacgtttttcgaaaatttacatttttaaatttaagaccagaaccagttattttttttcctaaaaaaatatacctttttgtcacatttctgttcgttgcgccccattcattagtcttttccccctcccacgtcgttccttcctctctttccctccgtccctctccatttctccgtttctctccgccactctcaccccgttccttttctccctctgtatccatctttttcgttatctctccacactctctctctcccttcccctcccttttgatccgtttgtttcccttttagttttggctttctgtggggtcctttggcgtattgtcaatttctgttctccgagccccgtcgcgtggtcaccgccgtttatttgctcagtgttttggccactctttacacttctctgtggcttcaaagttcccttctcaccgtaatcactgccgcccttcaaacttttggcctcatttggtcagttttttattgcattttccatgttttaattggttttattcctaactttttctcccccattccttccctttctcccctttttaggtttcttctttcctatgtcccgggtggggaaaacggcctcaaatggatgggccgaatggcaaaagtggccttttgtgcgcgtcagtcgtccactttggttttgcccatttgacgccagccgatgcgactgaatattaatttacctatttttgtttctcttttctgtttcctctttctttcattt

SEQ ID NO: 46653 - DNA, 1307 bp, Heterodera glycines
atgccatatgccaaccagccacaggtgaccattttgcagctgagcaacgagtttgtgcagtttgtgctcgaggacactgacctgagcgtggcgaatgcgctccgtcgtgtgttcatcgccgaagtgccaacattgggtgagcgtcggcatttgcatttgatggcacggcatttgggtttatcctggccagaaacataagaaatgcccgaatttgggtaattttaatgcccgatttgtggatccgaccgggaaaatggacaaaaaaagcaatcggtctcaggtaaacctgacaccagaaaagaagagaatgcccgaatttgggtaatttttaatgctctattggatctgaacctgcacgaaatctgtgttgggtccctatcgaacacttggcgaattttattgcaaaaaaaaaaaaatcgaattcgaattttctgggcctgatcttggcaaacccaaaaaatttcattttatgccctcaatttccaccattttgaatttttggcatttggcattaaaaggcattaaaaaaaaacattttttcagcgattgattgggtacaaattgagcagaacacgtctgtgttgcatgacgaatttgttgcccatcggatgggcatgattccattgtccagtgacaacattgtggaccgcatgcaatacgctcgggtcagcgaaacaattttttcctccaattaatgagtttgtctaaaatccggcattttgggtctaattttcgagttctcggggattatactcgaaaatgaagcaaaaaaagccttaaactaatggccattgttaaattgcaaggtaggctggcctcgtaaaaaaaaaaattcggaacggagtcaaccgactttttttttcctcgaccagaaaattttttccggtttttcgaattatcgtcgtcatgggcgaaaataatacccctttttagaagtttcccctccattttaaggaattttaagaatataggtaataaaaattccaaaaaaacacctgtttttcttaaaagactccgtttttcattttagggggcgtgggattcccaaaaaaaattttttttttttggtttttaccgttttctgtgccccctcttcctctccactaggatttcattttatacgaaaaaagcccccccccccccctttttttttgctcttccgttgactttgctgtctgtattcccaggattgcacatgcaccgaattctgtgacaaatgtgcagtgctctttctgctgaacgtacgctgtgaagaggaggcgaccaaagcggtcacatcggacgacttggagtccaacaatgtcgag

SEQ ID NO: 46654 - DNA, 1804 bp, Heterodera glycines
atgcgttctgatggttccgtcattttcggacgttgcgacgaaccgagggaaatcattcaacttccggtggaccttcggacactcagtgacgacgagcgaaggatgcgaatagccgagcgaaagccaattgccaagaaagtggttgaggtgagaggacggggaaggaacaaatggggaaatttaaaaataaaccaaaaaaactaaaaaaactaattgtaagtgatgtcacattttggcacacaattgctaacaaaatcctagcaaaaactaaaaaaatattcaactttgtaattattgtcggatccaagaaattttagacccggttgtaaaaagacttttatattggtttttcggacaaaaaaaaacaatccctttttttctgttggactctccaagacccacctcacaaataatcccaaaaaattcgcgaaatttttccaaaacccttttaacgaaatttgcgttaaagtttgccaaatttacatatattttttctccttgccggaaatgcattgaaattaaattagtatttttggctcgcctcttccaattcatttactacaaaaggctccatttttggatcaaaatctattttaaaaaattcgccaaaaatgccagtaatcaaaagtcacggaatgaacgctcctttctgtttaggatacattggacgactccttcgactttcacaaatatgtgtctcaatggaagcgatgataaaaccctttctttgttcgttagatttttgaataataaaaatggtcaaattgtccgttgtattcatttttacggttttcacctttttatcttttgctattgtttgttctttcgagggaattgtcacaaaatcggcacattttgagatttcggttccttcttttcattgctatccgtgcctcatccctttcttatttggctaataaattgctgaaaatgcaatcggatgacattgtgtggaatcagttgaacaaaggccattgctcctacaaaattttgtaagtaaacaaagggaatggtccaaaggcttttctttgggattgattcgtttcaggaccaaggccaagaagttctgccgcaatgagttcaacttgaccggactgtgcaatcgtgcttcatgtccgctggccaacagccaatacgcaacagtccgagaagagaacggtgggccatcaaaagcgaattgacgaaatgagagaaagtgatttgttggttgattaaggcgtgtgtttcctttttatgaaagtggccgaacggagtcatttcccgggcaaactttgggagaaggtgaagctgcacaggaatttggccaaggccgttgaacagatcagcacgcatttgctgcattggagtgaatacgtccgcaaaaagtgcaaagcgcggcttatgcgccaccaccaatgtctgaacagaatgcggaagatggagctgaggggacgcactgcgaaagtcatcccattgcaggtgacaaaacaaaaggaaagggaagcgaaaaacggcggaaaaattggaaattcagaggaaaatcgaacggagggaacgccgcagggaggaaaaagcattggccgcggcaaaattggacaatgccatcgaaagggaactgctgcagaggctgaagaagggcacatacgggagcatgtacaaattcagtgacaagacaattgacaaagcgatggaaagggtggacgagtcggagcaaagtgaggaggaagaagtggaatatgagacggagacaacgcgggagaagcagcgacagttcgtggaagactttgacgagtcggaggagggggaagacatcgaagactattag

SEQ ID NO: 46655 - DNA, 1431 bp, Heterodera glycines
atggacccggaaaaggcacgacagcacattcctgagccggcaattttcacttatgcatccaaagatgccattctctacgccttaggaagtgagcaattaagaaaagtgccgccggcaaaattaaaaaaaaaattttgggtggtctaagtttggaaataaaaattttaaaaaattttgaggcctactcaccaaaatttaattatctttttatccgccgagttcaattttttagttggtgccaacactaccgaggatttgcactatgtttatgagggtaataaaagaaatttaaaaaatatatataaataataataatttatacgcaaagcgtgacgccgccaaaataaaaacaacaataagataaagcaaaatggtcacatatgagagtggttcataaatgtgtaaaacgaaccaaatcaattgagtcaagaagtttagaaaaaaacagttgaattttgtaacctaacttctttaggtaataacctatagaagcgagaagcacgaacaaaaaatgaatggtatctaacattagttgagcaaaaagttggcttaattaaattacccagtctactagaaaaattgggttgaggtttattatattaaatttttcatttttcccgtccaggccatcccgactttcaagtgtttccaacctttgctgttgtgcctgggatggtggccgtttcattggtcagtttttaaaggccaatgtaatagaaattgatctgttggccaatcgaagaaagtgccaaaagcatttttggaatgcgtcatctgattcattattcatttcctttcatggtctgatcagtgatcagaaaattgatcagaaatcatcgttcggcattctgccggatttggtgacccataaaacaggggtttttggcaccaaaatcagccgatcccacagccaaagtaatcacaaggaatttaagaaaattggcattttgccggattttgagaccaagaaaatttgggatttttggcaccgaaatctccgctcccccagccaaatccattctgtcccaaaattttgatcatctctacgcatctagaaggttaaaactgatcacacatcgatttaagtcggattggcctggcattcaatttgatctgagccgggtgcttcacggcgaacaatacattgaactgtacgcaccgtttccggccgacggtgcgcgactgcgctccgaaatccgtgttgccgacctgttggacaagggggcgaacgcagtgatcatctccgagggtacaacaacaaaaacaaaatgcgcaggggatcatcaatcatctttaattttatcggagaaaaatgatcaaattgctggactaaccgatggatttggacccaaaatccttccgggatgggatcccatttacataatcgccgcatatgatctattatcattaaactgtggaggattaatctag

SEQ ID NO: 46656 - DNA, 1261 bp, Heterodera glycines
ttagccttcccctcttctcagagttatgtgcacggctgctccgttcagccccttctttttgagacaatcgccgaaagactgagaacggcggcgagcaaatggccaaaccgcgaatttgtcattttcaaaagggagggaatccgcaaaagctacgcggaagtcttggcggatgtgagccaaagggtcggcttcgttgtccgaatttgaagagtttgtttagagcgaacggttggccgccggattgattcatttgggcatggaaaagggcgaccgattgggcatttggtcgcccaacaaatacgaatggatcaccgcccaattcgccagtgcactcgccggctttgtcctggtcggccatttagttcgaccaattggccaattgtcccgattaggtcaatgtcaatccgatgtaccattctgaggatctctgttacgctgttgaaaaagtcggcattaaaacagtaattgcctttgtcttattattatcccaaaagtacctttgacatcagtgaattttgcagttgattgctccgcccacattcaaacgaacggattattatggcattttgagggaattaatccccgaattggaagaggcgccccggggggacgggcgcctgtgcaccgacactttcccgaaattgcgcaatttgatcattttcgatgcggaaaagagaacatttaagtgagtgggaatgggagagttataaaagaccgacacataaatggacaattaattaattagtcaattaattaattggaatttcagcggcgcatgggcatacgacacggtgatgggaatggggacggcggagagccgaaggaaattggcacagtacgaagcgagcacacagcctgacggtggctatttgttttccctttggtccacccaaattaatccgtcccccattagtccctccctcttattagcccccccccccctttagacccctgcaacatccaatacacaagcggaacaaccggcaaaccgaagggggccacgctgactcaccacaacattttgaacaatgcctttttcgtggggcttcgcgccggttacgccaaccatcggacggtgatttgcatcccaaatccgctttaccactgcttcggctgtgtgatgggctctctcgccgcgctcgtccattttcagacgtgcgttttccccgccccttcttttgagcctctcgccgcgttgcaggccatccacgaggaaaggtcagcattcagtggtcggtcttagtcattcgtcatgggaaat

SEQ ID NO: 46657 - DNA, 2055 bp, Heterodera glycines
  unsure (1)..(2055): unsure at all n locations
attacttagttcgaccaagcgaatcgaatcccgaagattacaccattcccatccaccaggggagccgtgtgactcacgtcaaaatacccttgnacaacgcatcaaatgtctacagatttcccagcggacaggaatttcgatcactcgaagaaattggcaaagcgttaagcaacggaccggacatattgaccgattgtgaagtattcaccagtttgagttcgcctctgaagatacccttctgtgaaacggtggttaatgtcggaagagatcgtaagtcgttcattttgcgatgtttaaaaattttcatattttaatttcaaagtttttagtctcgagtttcaattttcattctcgaacatctctaatttcttttctgttgaggtttctttcacatttcgaccagtggtcaggaggcggaggctttgctgagactgaaacacgaagggacttttctgttgcgggagagtacgagcagtgagggcgaatttgcgttgagtgtgaagagcaccgacgcggtcattcacgtgcgggtccatcgtacggtgcgcgttctgtccctcccttcagttacttcccatttttgcttaagcatggacgctttggcattgttccgaaggacaatttcaggggttttgccgatctgttagacaattacgtccgaatgccaatggttcaggtccaatgcttttctggtggtattttttcccattgtaattagtatttgcagaatgatggaagtgctgtgaaactcgtcgccgccctcccaacgacgcgattcacagccgcgacgatcgatgatcggatcgattgtttgttacaatcgcaaagaaaaaccggcgcaaaggacggttttgtagaggaatttgaggttttgaaaacaaataaaattgctttgaaatcagtggggtcattttttgcgaattatttgaaaaataaatcattgcatagcaccttattattctcactacattttctgttagggtttacaccgtgaggaggacgcacaaatgttcattagctgtaaagagggcggtaaaaccgaaaacattcgcaagaatcggtacagaaatgtggtgccctttgatcacacgagaataaaactgaagtcagtccgcgagaatgactacatcaacgcgaattacataaaggtacttttgattgtccaatgcttcaaattaaaattgactttttcaggttccattggatgcgaggagatacccggaatttggggaattcagacggagttacatttcaacgcaaggatgtttggaggaaacggtcagtgttcgtctataggcccatttctccccatttaaatcacttttgcaaatgaatccgtaattttacaggtgaccgacttttggtaaatgtttctttcgtccgatttgaacccaatctgtcgtactttttttaccaggcaaatgatatggcaagaagaaactcggctcattgttatggtgacaaaagaagtcgagcggggaagggtaaagcaattaaagcagcttttatttgacagtttctttctcattgtcaggttaaatgttttcgttactggccggatttggacgaacgaaaaaattatgggacgacaaatttgaccgtcaaagccttgcaggtagtataaattctctgaaatttgaattttcaataccataccatttataatttcagtttaaaagctctcaaaatgggggaccccttcgcacgcagcgataggggggggggggaaagaggaaaaattttcaaaatcgtacaatttttaaccaaattattaaaaattccccggctgacaatgagcatattggtaatgccgacccctaaaagcccttaattcttttaaaatttggctcaaaataacaagatttgttcatttttggcaatttcaaagcgcaaattaacaagggtaacaaaattattgcaactttaagagatgtaatacaatcgatttttatatgcttacccattctttaggagaatacactggatgattacgtccatcgtttgttttcttggaggtgtcgaaggtgaatttatttgaaactgaaccattctatc

SEQ ID NO: 46658 - DNA, 950 bp, Heterodera glycines
cagagtgattctcctgttcctaattggctgcttaacatcggaccaatttcttgccatgcgtggaacaaggacaaaactcgtaaattattttctttttatttaaaatgaattaatactttctagaattggctgtttcgccttccaacaacgaaattcacatattcgctcgtttggagactgtttggaacccgttgcacgtgctaagagaacacgacttgctgatcaccggattggattggtcagtgggaaagtggcacgaaatgtgggatgatgttgttgtttcatatctgaaacatttcagggctccgaatactaatcggattgtttcatgttcgcacgacaaaaatgcgtttgtgtggacatgggaggctgaaaagaacagttggaaaccggagatggtggtcgttcggataaacagagctgccacctgtgtcaaatggtcgcccaacggtcggtttgaccattccttactcattcattggcccattctttaaaatgtctcattttttaaatacatttaatttaagaaaaatgtttatattcgttttaatttatttttattaagaaaacaaattcgccgttgggacgggtgcgcgtttagtcgctatttgttattacgaagtagcgaaggaatcttcccccccccccttctaattgttggcttttaattggaaattaagcgtgaaaatgactggtgggtagcgaagcaaatcaaaaagctgattcgttccactgtcacctcattgaattggcatcccaacaacattttgttggctgttggcgcctgcgacttcaaaacgcgtgttttttctgcttatgtgaaagaggcgagtgaaaacgcaaaaataacaaatggaaatttcactgcctttttagattgacgaaaaaccaacgccaaacccctgggggaccaaaatgccatttgggagaattgctcaaggagtaccagt

SEQ ID NO: 46659 - DNA, 436 bp, Heterodera glycines
atgcaaatcttcgtcaaaactctcaccgggaagaccatcacccttgaggtcgaggcgagcgacaccatcgagaacgtgaaagcgaagatccaggacaaggagggcatcccgccggaccagcagcgcctcatcttcgctggtacatcgacttttgatatgccgaaacaatcatttttatacccaacccttattttcagggaaacagctcgaggacggacgcaccttggccgactacaacatccagaaggagtcgacgcttcatctcgtcttgcgccttcgtggagggatgcagatcttcgtcaagacgctcaccgggaaaaccatcaccctcgaagtcgaggcgagcgacaccatcgagaacgtgaaagcgaagatccaggacaaggagggcatcccgccggaccagcagcgccttatcttcgctggtacaatttga

SEQ ID NO: 46660 - DNA, 1299 bp, Heterodera glycines
atgtctctaccacaatttgatctgcctgaatgtgtgtcgaactccaacggatggggtccggggtctgtaagtgacagtcaagtactctcagagtttgtgggccttccgtatcaacatttcaacaaatgcgatcggattgggcgtatcgtcgattggttgggcgtcgatcgctttttcaaaaaaggcgaaacgcgtaatttttgacagagtttttcgagaggattttgtttttttgcaggagatcggtacaatgagcgtgtgtatggctcctcagcgactgcgggcgttcaattcgattacatccacgacaacgaggaatcgaacttccaattggtcgactcgagtcgaccacaaaagccgcagaggcctttccgtcgtcaaattccatttgtatgcaaaactatcgcatatttcttaataaaatatatgttgcagcgtaaattggctcaacgtgagcaggaacgccgagaatatgagaagtacaatgtttcgacgaagatgaagcggagtatactcaagtattgtaattactctgctaatgtattggttttgccatactttaacaaagggggaagatatgtcctaacaataggcaaattcgtactttcgcttatgacattcaaaaaagttgtgaccaacgagtccgaaaactcttaaatacaagttttggttttgtaaaaaatgtactcaattaaaaaacattaaaaataataatttaggactgggtaatttaaaattttagtctttttataacgaatttattgttagttaaataaaaaatcgactgctccaaaatttttctttaagggagcaacaaaaagcgtacaaagtgtttttgcgtcggggcggtggaactcgcggcacagcgcagcgaccgaccgggcggcgcttcaatgaccgacaggcgggcaaagggcgacagccttcggttcaagttcgacccgattgggcggttctgaaggagttggactttgtccagctgaacaaactttacctgccaaacattgaacctggaaaggatatgtaagttctttctaagggaattctctaaacaaccgatggtttagacccggcgaaacgtacggcacccttcacttttatgataaagcattaatggacaaactgagcgtcaaaaaccccctgcatttggagaaattccacgcgtctttttattcgctgaccaccactgaagacccggtgttcagaaaggttgttgtgttcacttctttgctgaatttcgcatggttaagctgtcctgcaacaatgtcggcaatgtattcgccacagatatcattttga

SEQ ID NO: 46661 - DNA, 1670 bp, Heterodera glycines
atggcaagagaggactactgcttcgatgcaacggcggcggcagcggcggagcagtctcggccttcggcaacgacttcaacacttgtgcaaggagatggcctgtcaagcagcttcgtggacgcgatcatcaggaaggtcaggcattcgcctgtccaacgcttcacggatgaggtgggatttttttgacatgacatttcaacaattaaaacatttcattttttccacagatcaccgacgaggagctcaaacaactctgcatggcggccacggacatcttcagaatgcagccgacgctcgtcaggattcagccgccggtcgtcgtcgtgggcgacatccatggacaattcacggacctgcagaggatcttccacacgcacggcaaccctccagagcagcagtacgtcttcctgggcgactacgtcgaccgaggcccccagtcactggaaacaattgttcttctcttctgctacaaggtgtggttttgtgaatctttaacagaccaaattaaatccccaaaaccattgcaggtcaaatacccagcgaacttcatgctgctgcgcgggaaccacgagtgcgccaacatcaacagagtgtaaggatcgcatttttttgtgttgtttcagacttaaatttccccccccccccacctttaaggtatggcttcttcgatgaggtcaaccgccgctaccagcgtccgggtccccgccgcctctacgacctcttcaatcagacgttcgcctggatgccctacgtcggcctgatcggcgacaaaatcctgtgtgagtcacattttttgttgttgttgtccattcatactaattcattatttttcaggtatgcacggcggcctctccgaccagatcaacagcctggagcagctcagccacctgaatcgtccgcaaatcgacccgccgcttcggacgctggagatcgatcttttgtgggcggaccctgcgcgcggagttcgtggcgtcatcccgaacaccagaggagcgggcatcgcattcggcgaggacgtggtggagcgggtgtgcgacatgctctgtctcgactacatcattcgggcgcatcaagtgagtttttttcatttgcttctggactaaattcccacttcccctttccaggtcgtgatgaacggagtggaatatttcgccggccgccggctcatcacccttttctcgtcggcgcgctacaatggccgcaacaacacgggagcaacgctgacaatcgcggcgaacctgagccacagcatcacccgcttcccgccggcctgaggacgatgagcatcgaacactaacagaacagaaggatggagaagcgccctgggaacgcgactggagatcagacaattccccttatcattttgtgtgtaaacccactcattttcatatttccgtatgtatgtttgttgaggtgtatatgtgctgataaacattatacaaatgcaaaccaaattgtactatcagtttaatgcttctcctttatttttgatcaatcttccatttgttagtcaaatgttatcatacacggcgattcaattttgggctccaagtacaattaagttggttttttcgtcttagtggtctgtgagttagtcaccaaaaggggggtcccaggttcgagtcccatgcatgctttaactgtattttgaggtttttaaagcaaataaa

SEQ ID NO: 46662 - DNA, 1199 bp, Heterodera glycines
atgaataaggaaaattataatttattacttttaaaaaaaggtatttaattaaggaagtaaatgagagggatttgaaaaaagtttcagcatattttcgggagtgccccagggaagtgtcttaggcggccactcctcttttaattttataattaaaagatcgccgtccttttgcaaatgaagcatcatcagttggcataaaaatgtatgccgatgatgttaaattatattatgcccatgaaaatgatgataaaacaaatcatttagataaagcaatagacagctgaagataaggaaaaatggtcaaaaataaatgggttagaaatttcaactgggaaatgttttgttctttatttagggaaaaataatatgaaaaaagattatttaattaactcaaaaaagatttcagaatcggataatgttcgtgacctaggcattataattgactcgaaactgcatttttcagaacatattaacaaaattgtacgaaacgcttatcttagagttttccagattttaagagtcttaaaaaccagggaaataaagactctaacaacagcttgtaaaacttttgtccgacctcaattagaatacgctaccgaagtgtggaacccaaatttaaaaaaagatatagacaaaattgaacgggtacaaaaatttttcacaagaaaagcttttcgaaaatgtggatttgtgtacaaaaaatatatggaaagactaaaaatcactgatttacacaaattagaagaaagaagaaaaatcaatgatttaacaacagcttttaaaattataaaagggttcaccagcctagaggctgagcaaaatttctttttctcagaaaggcccaggaggcctttacttttgcgagtaaagcgccacacgcacaaaactcaaaataattttttccataggatagtaagaaactggaataaccttccagtggtagcggtgcaaattaataaggcaaaggaattcaggggtttactaaaagcaatgagttctgagtaggattttccatgttgccatatttacactatatttttatcacctgtgaatttttaacatttgattgatttatttttattcattttttttattacggtattcattttgtattttttatttgaccaactttatttgttgttttctttttggcaccatataagagcactcatgtgcctttggtttgctcgataaataaa

SEQ ID NO: 46663 - DNA, 609 bp, Heterodera glycines
atggcctgtgacatgttctaccaaaatccgtcctacaccaaccagcaagcgggcgccaccggtggggcggacagtcggaaaatttgtcacctgttcaacaaatatgccaccggtttgttcattttattattgatgataattccggtgtgcccttggaccgtaaaaaaaaaataaaacggttcggaaactttgaatttacaactttttgttcgagtttgcattagtagggattagcaattggtcaaaataatgttgtcagagaaccgtggtcaacaatcctgaaaccccaaaaccaattgatgatcacaaattttgttttttatgctccatcctaaggtcgagactacatatccctaacaaaacaaaaagcaatttttcctaccccccccccctcttttttcagatccaaaggacaaatctcagaaaattggacccgatcggatcggtcccaatgggatggttcgtttcttgcgcgacttgaacatcgagccaacgagtcgggcagttatggttttggcgtggaaaatgggtgctcagaaacagtgcgaattcacactgcaggagttcggcgacggaatttccacactgatgtttgtgtctttattttaa

SEQ ID NO: 46664 - DNA, 2748 bp, Heterodera glycines; identical to SEQ ID NO: 8908
  unsure (1)..(2748): unsure at all n locations

SEQ ID NO: 46665 - DNA, 2519 bp, Heterodera glycines
agcatgtcatttttgcgcttagtcccagtgagttgctgcattcaaggaaaacataaggacatgccaagggcaatttttgtaatttcaaggtgattttgccaagatttggctcctcaaacatgccctcctcgtcgtctatacgcccgaccgcgagcattttggcattgtgccgattgaagcgatgttcatgcgctgtgccgttttggcagtgaacagtggcggaccactggaaagtgttgagaatggcagcagcggctttttgcgcgattcgaacgccgaagaatttggcaaagtgatgaaattggcggtgaaccgaccacaactgatgcaacagatgggcgaggctggtcggtccatcgtttgtttattctccggggaaatggaaatttcaattttaggacgaattcgtgtcgaaaaacatttctcatttggcgcctttgcgaataaaatagatgaaattattgtcaaacttggaacaaattcccggcaatgagaccgtttattccccgcaacccagttttaattgagtccctcccagaacatttggaatgtttttattaatttctatttatatattattgtttgatttttttagagatttgataaattattctgtgctttcactgttctacttagtgcaggaattttgagattgtcgggcatagggcttatttgttagaacacttgcggccgcttttttcaacaaatttttctggcaattccaacaggcttgctcgcgttttggtctagaatatgtcccaaaaaatagacacttcgtactttttagtcgatgtttaatgagtgaagacaaaactttttaaaacaaaaaatcaaattacaaagcatcacatggcttattgctctttcaaatgctaacggaagaactgattggattgcgcattttggccaaaatgccgcccatattctgcgtctgacgattgaatgagcgcgacggggcgaatccgagcaatttttgcaaattctggcggagactcattgtgcacagaatataaaggaaaatgaaggaacagtcggtgaaatcgtcgcctgaaaagcaggggaccaattaagaaaatcagacaattaaaaaaagaaatcactgaccaaccaaattgcgatggctaaggccctggacccaagtgatcggctcaaatggcaatttggcaaccacacgaccctcgaaaatgctggagaaagtgctgagcaaagcggcgaacacaaaaccaatggcgagccttagaaagaggccaaatgagtgggtgtggtgctgttttggtccacaaaagttacatggacttcatgcggaacatgctcaggtcgcggttggtcgacttcagtctctcctcctcccgctcgattttccgtttcgtcgttttgctggccgcgttcgccgcacccgcaccgcctgccgcgtcccctccggcgccaattgcgtcctttttgcgctccaacttcttcgatttgcgttccatcgaaaatttcagccgtttgtactcgtcggaccttcaaaggcacatggacaattttggccaggaaaacattgtcccaaatttttgccaatgaaaatgcaattggccccgttttgccaccgacctgtagacgagcacccaagtgagtccctcgccgagcaaagcggtgaaaaaggcgatgaaaattatcaacaaggcgtcgctgtacatctaacaaattatgggaaatgcaaaatgattttaattggaaaagaaaaagaaatgcaaaaactccggtaacaacggaataaatatgaaaacgatgagaattattaaagctttgttttccattcgtcaacgttttaaacaaacattcaaaaaaaaaaatggaaaatatcggccaaaaagcgaatataaattagaaactgtatcaacaatcgcaataataaactaatacagtacggaaccgacatttgccataaacaaaatatcaacattgggtataatcatcggacattgtcacatcgaattgactccacaaaataacttcgaaatcccgaaactgctcttcagacgaggaacggctcgatgttcagctccagcgccgagcatggattggtcagcgcgaagttggcgagaaccgtcgggtggagcactccgaaagtgccaacgcacgcattgcagaacaaaacgttggcacaccgtccatcaaaataactggggtcttaacgggcaaaaaaaggactaatttggcaaaatgtgttactaattttgccaaccgtccgattggacgatgcgatagcccccgacggatggctcggagtcgttgcgctcgtaggcaatgcccaacatttgcatgattcggtccaacagtccgtggatcacctcgaaggagccgcttttgctgtagaaaatggccgccaaatggcgctcatttcggcattttgtatctgatgtttgcgctttttaaccattttgccggaacattgccaacctttgctctcgtcgatgaacaccacgtcctgcacttcgaagagacgtagtggcagtgccatgtccttgttgttggcg

SEQ ID NO: 46666 - DNA, 2822 bp, Heterodera glycines
tccgagtcgtcgcatctccgcgaatatttgcacatcatccgcgacaagccgttgtacccggtgattttggacgcggacggcgtcatctgctcaatgccgccgataatcaactcggaacattccaaaataacactgaacacgcgcaacattttcatagaagtgaccggcactgacctggtcaaattggaaattgtgctggacatgttggtcaccatgttcagccaatattgcacagagcaattcaagtgagtggcatttggagagaccaaatcacaattaattggaatgattgattatccggcgaataactcgtactttccatttacatgttttagcgttgagcctgtccaaattgtccagccgaatggcaccttcagcctttttccggttggttcaacaaaaagtggaatgcgaaacccaaacattggtctttaaaagggccaacttcacttaaaaacgctgtctttgtttaaacggtcgtcgttttcaaaatttgtttgtcttttaattgttcaaaaaaccttttccgcattttaattcctggtaaatgtgagtgtgtcactctttgttttagaaattggattaccgggaccatttggtcgatgtgctgagtttggccgccaaaattggcatttcggacatcggagcggacaaagccgtgcaattgttgtccaaaatggcgttggaatgcgtgccgatcaaagatgaggaacagccgcaaacggtggacattggcaaagcgttggaattgttgaagctgacaatgagcggcgaggagaagcgaagtgaaaaagcgcaaaatggggacgaagtgccggcggttttagtcaaagcaagtttcaatttttataaattaatttgccagagggggacttttgtaaaaattaattgccaatttaaatatttgcaattgccaaattaataaacctccgttaggtcactgttccgcccactcgccacgacattttgcacgagtgcgacttggccgaggatttggcgttggccttcggatacaacgcaattccgacggcactgccccagtcgaacactgtggcggaaccgtttccgctcaacaaactgtccgaccagctccgtcttcagttggccatcagcggatggacagaagtggggcagggcgagaacaaatcgaattagagtgagtttactcattttaaattccctcttttaaaaggtgctcacttttgcgctttgttccacggaagacgtcggctcgaaaatgcttcgacctgaccacgaaatggactcggtggtgcgaatttcaaatccgaaaacgatcgattttcaggtgccattccccaaaatttagacaaaatacattattcttttaccatttttaggtggcccgcaattccctgctgcccggcattttgaagaccatcgccaacaacaaggacatggcactgccactacgtctcttcgaagtgcaggacgtggtgttcatcgacgagagcaaaggttggcaatgttccggcaaaatggttaaaaagcgcaaacatcagatacaaaatgccgaaatgagcgccatttggcggccattttctacagcaaaagcggctccttcgaggtgatccacggactgttggaccgaatcatgcaaatgttgggcattgcctacgagcgcaacgactccgagccatccgtcgggggctatcgcatcgtccaatcggacggttggcaaaattagtaacacattttgccaaattagtcctttttttgcccgttaagaccccagttattttgatggacggtgtgccaacgttttgttctgcaatgcgtgcgttggcactttcggagtgctccacccgacggttctcgccaacttcgcgctgaccaatccatgctcggcgctggagctgaacatcgagccgttcctcgtctgaagagcagtttcgggatttcgaagttattttgtggagtcaattcgatgtgacaatgtccgatgattatacccaatgttgatattttgtttatggcaaatgtcggttccgtactgtattagtttattattgcgattgttgatacagtttctaatttatattcgctttttggccgatattttccatttttttttttgaatgtttgtttaaaacgttgacgaatggaaaacaaagctttaataattctcatcgttttcatatttattccgttgttaccggagtttttgcatttctttttcttttccaattaaaatcattttgcatttcccataatttgttagatgtacagcgacgccttgttgataattttcatcgcctttttcaccgctttgctcggcgagggactcacttgggtgctcgtctacaggtcggtggcaaaacggggccaattgcattttcattggcaaaaatttgggacaatgttttcctggccaaaattgtccatgtgcctttgaaggtccgacgagtacaaacggctgaaattttcgatggaacgcaaatcgaagaagttggagcgcaaaaaggacgcaattggcgccggaggggacgcggcaggcggtgcgggtgcggcgaacgcggccagcaaaacgacgaaacggaaaatcgagcgggaggaggagagactgaagtcgaccaaccgcgacctgagcatgttccgcatgaagtccatgtaacttttgtggaccaaaacagcaccacacccactcatttggcctctttctaaggctcgccattggttttgtgttcgccgctttgctcagcactttctccagcattttcgagggtcgtgtggttgccaaattgccatttgagccgatcacttgggtccagggccttagccatcgcaatttggttggtcagtga

SEQ ID NO: 46667 - DNA, 3639 bp, Heterodera glycines
agagaaaacatcttcaaggatctttttaacatccacccccaccgggcgctttcagaagaacctaaagacaaagtttaccccttgttttttccttaatttttcagcaatttagaagccttgtctcaaatttgataacgaacaacaacagataaagacggaatattctctccgtatttacccattgttcactgttcctttgcttataaccgaaggtgccgacgcgggcattccgcaaatttgtgacgaaattattgcacatgtcagtgccgaattacagcagcgtcttaacagtgggattagcgaatgggacggcgaagagcgaatggttgcgaaagctgcagaagaccttgttcaggtcgtttttaggcaatcttgaagaatgggttattttttactagtaattcgacgtatttatttcgagccttatacttcatcgattgtgactgttttctaccggaaaaacatgtttccgccggatccttacttttagaattttttgggtcctcatctggttcttaataattttctaaaaaccccatatttaaataaagtccaaaaacgcagacggaattagtgagaggattaactttttataattttttagctcttgtatgacggtccgccaatttcatattcggaatgggaatgcgcacagtgtgggctaaaggagaatctttggcttaaccttaccgatggtgcaataatgtgcggtcgcttttctcaattagctggcatcaaaggcaacggacacgcgaaggcacactttgagtcgacgggctttccattggtcgtcaaattggggaccattgagaacggagacggcgatatttacagctacaatgaggacgtatgatttgcagcattaacatgtttataataccatattagatgaatccgtaactaatttcaattaggggtttagttttaaaccggcctaagaatggacacactttaaattgatttgtgttttattttagtaaaaacggtgtatcggtacaaagcaggcgaagaacaattccttttgttgtgaatttttcgaatttaggcgccggtctgcgacccatggcttggtcaacatctggcacgttttggtctcgacatcaaaaaattccgcaagaccgaaaaaacgactttggaaatagaacttgatgcgaatttaaagtagacatttcgaaatgttctgttttcattccgttattaggcacgaattctcggcaattcaagaagaaggattggagttggtcaatgtgagtgggcctggctacactgggctgatcaacctcggctcttcttgttacatcaattcggtgcattctttttccctttttttgcctgaatgttccttttgaggctctccaagttctgcttattgtccctgactttgtccgtgcgtttactgaagaactgttgctaagaaaacaaccacccgaaataaatgaggatttcgccgctcaattggctaaaattttcgtcgcgatgaaatcgggggattattcgcgagaagacaacaaacatggtgccgaaaaggagaagggcattcgaccgacgacattccgtcggattgtgggccgaaaccaccccgaattttcaactgcaaaacagcaagatgtggaggtgggcaatcattggaagtgccaatggacaaatgtcgttttccacaggaatatgttcgctttctgtttgagaaggtcgacgcgtgctccgacctctcctcggaaaatcccgtcgctgcgttccgatttcgtctggtcactcgtttcctggacgaactttcagattgcgttcgctattctttccgtactgacaacattttatcggttgcaattccaatggacttgtgcaaggaggtgaacattaattcgttatattcatttgagaaccaaaaccttacgttttgtcattcctttttattttcaaatcggcaaaatttgtcctcgtcgtttagtttaacgaatgttaattatgttaatttagtctgacactgttgtgaatggggtcagacgaaagagtgtcactttggagcagtgtttggccgccacatttgaagaggaaatcatcgacgattatttctcacctgttttgaaaatgaaaggccgagcgaaacaacaacaacggatgggcagtttccccgactttttgcttttgcaacttcgcgtgagtaggcattccagggacgagcagcattgttttccagatttaaatttaaaaaaacttaaaattttctaatttataattagatgttttcctgttaaaaagggattttttcaaaagaatttgatttttattttttatatttgtaaaaaataattttaaaatccacgtctttcaataaccattttttgtagatttttcttcatgaaaaatcctctaattgtaagagttagaaaaataaaaaatttatatttgttttttaatttactggtgcggaaacgaattgcttaaacatgtgttaattgtttttaattttttagagattcgcatttgattggattctcggtacgcagcataaattggacgtggacgtgcatgtttcggacgaattggacattaacgcgttcttttcaactggagaattacagccgaacgaaaaggcacaattagaaaaaccatggaaattaaaataaagattaaaattgctttgttctaacagagtttgcctgttgacgacacttcagccgtcataaaggagcgcttatggcaagagccgaaccatgaaattgtggccaaggcaagcagtgattattacttttgtaattttgataatttataatcagttgctttcgatgggtttcactgaaaacgcagctaaaaaagcggcgcttttcacaaagaacgaatcagcggaatcggccattaattggattcttcaggtgcctctttgccccccccccctaacattccttaacaataaaatacgaaaaggcacgaaatgctgctttttgaaaaaatttaaagcatgagaatttcacccgaatgtttatgaatgatttatttttagcattctgacgacactgatgtaaacgatccgcatccgatgttaacgaaacaaagcactccgccactgacatccaaccaaggtaaacagacaagaggaacacatggacaaattaaatctaacaaataaggagtactcaattaatggtctaattgcatttttaggccagaacgcgtctcagaaagttcgtcacggcaaaggtcattaccgactgcgcgccttcatttcgcacattgggtcgacgccaaattctggccattatgtcgcacacgtaaaggcagacaatggccagtggtgagttcgcagagttcggtctggactttggtccaggctatacattaaacaaggggggggggttcaaccaaaattttggcgaacgggtccggcggctctgtaaatcgacgacccattttttgctttcgaaccgctttattagtgcctaaaaattaggttttttgcgattacgaattaattttttaacgaaatagggattttttgggggccggttggttgcaattcctaaattttctatcggttacttgataatattctttgacaggcacatttttaatgacgaaaaagtggccaaatctcaacatcctccgaagactcttggctatctttacctgttccaacgggccacc

SEQ ID NO: 46668 - DNA, 171 bp, Heterodera glycines
gccgattggaccttccgcggcaaacatttgggcgtgtacgaattcggcacggacctgaacaggtccgactgggtgctgatccataagcacgaggagaagaagttcacggagaacaggcagcagatgggcacgctgaacattcccagcactttccctgtgcctcctttgcag

SEQ ID NO: 46669 - DNA, 1894 bp, Heterodera glycines
atgcccattgactattctgcttggagtaacatcgaagtgtcggatgacgaagatgacacgcatccaaacgttgacaccgcttcattgttccgctggcgtcatcaggctcgtgtagagcgagaggcggagatgaaacaggccaaaaaggaggtgaaggaggaacaatcgaacgtgcgcaacaaaatgcaggtttaatgaatgactcgaacaaactgatatttaaaggatacaaattcggcactattaccgttattcccctttaggaaattgaggaaaagttgaaaagcgctaaacttgaggagaaggagcgcatcagtttggaactcgagttgaacaccatccgtactcaggaggaggagttccggaagaaggaaaaggagttggaggaaaaggaaaaacatcagccatggaatgtggacacgatcgcaaaggaagcgtggagcaaaacgatcgtcaacaaaccgaaggagggcaaggaacagccgaagaagggcacgaccagcaaaagcgaagaagacgaagagatcaaccgaatgcagaaatacttcaaagtcagtaaacgcagtgcacccattcatttttcaattccaaaattagatgaaacattttttctgtttgtttgagtataatgccctttctgccaaacttaggacaatgaaacacttttgcaccaactttgtgtcttggatggttttgacaaaatagaagaattcctgctggagcatcctcagctcgccagtgagtacgccaccaattttctgactgttgaagcactcaattatgctatcgatgcgaatgtgagtttgtaattttttagtttttttaatatattttttgtttttattattaaatcacttccaaaatattttttttgcgaaaattctttttttttttggctaataataaacagctggtttttattaaacatttttttatactgccattattttcgaaggatttctttaaaaacaaacaaacattatgattaaggagataaacatgggtcgggttgcggagaattacataatgattcaatacgaattggaattggccaaatcgctgcacgcgatggccaccaataccaatgtgataaagaacttcttcaaaaagtttgtttctgtttatttttctttcataatggcttaaataatcgtttatttacattcagaattcgtatcgcggaacaaaattatatgaaaatgttcacggacgaagtggaagcattcaaagaccgtctgagaaaacgcgcgcgggacaaaagggaggcgatgctaagcgaaacggaggtggaggagaagaaaaagcgtgtggcccagtcgccaggagggcttgacccgcaagaagtgttcgactcactgcctgcggtgagttattctatgagatggaatgaggaagcagtccaaaattagaaatttgcagcgattttcatttaatggaaccacctgaactattcaaaaagtgcatatattatataccactaataggtcagggccgttttgtattctgaatttttaattttacgtgctaacaagggcaataaacctacaaattatggggccgcaaaaatcggaattttattgtctgatggcgcccattttccaaatacaaaacaaaatgttcaaaagcagaaaatgcatgtgctatccttgatctggttactggcgagttgggagattttttcttagtaatgaaacttgaattttaggaaatgcaagaagcgttcgaaacgcagagcatgtcaaagatatttgaagtggcgaagagcatggactccgaggtgttcaagtaccatttggatcgctgcactgcctccggactttggattccaaacgcaaaggaagccgagggacatggacaagaggaggaggagaagaaggaaacggaggagaaatga

SEQ ID NO: 46670 - DNA, 201 bp, Heterodera glycines
cccctcgacaaaaaacacgaacaatcgctgaacgacgccctgcaaaagtttgccacgcgtggacagaagctgaacttgaccttcactgtgaagccggacttggttggtggactggtggtgaacatcggcgataaatatatcgatttgtcaatggcaacacgccttaagaaaatggacgcggtggtaaagggatcgatctga

SEQ ID NO: 46671 - DNA, 4189 bp, Heterodera glycines
aaacgtaccgttacccgggcgcaacaatcaacatccatccgttgctttcatcgttggtcaactatacacatcccatcaaattttcaggtgttttttttgggctaaatgtgcgaaaacccctgaaaatcccaatccccccccccccccctcaggacggaaaatccattttttattgggcgatggctcttcaaaatgccattttaggcggggaagggtgatttgaaagttcatttaaaatttatttaaatgtagatggtaaaaatcttaaattgcatttatgtcaatgaacttgggaaaaaaattatattcacttaaaattaaaaattattttttttcccgtttcaggctttgatgtggctgaacagaacgatttgcactttcatatgtcgtccttttcggtacaaacagttttaagttgggggtcattagtaagacggggattttagttatttaaatattttttctacagctttattttgatgagaaatatacgaaaaaaaacatcatttttagcggtaaatgtggttcattttaattatacattatgcaaaactagagtgccacgggaccgggaattttgggcaaacccgggaccgggaccttttcgggttgaaaaccttttcgggttgaaaaatcgggaatttttggctgggaaaaccgggaaaaagccgggactagtcccggtcccggtcaaaaccgggaccttggtactcagttgtccgctaccaggtcccggtcccgtggcactctatgcaaaacataaaaaaaacatattgaacggttttcataaataaaatattaaaaaaatgttttatttttatcaatacatttgtaaatattttgatattttaactttttatcaatattctcataaaaatattttggcattttcgaattttttgagaaattccttaactaaagtgtaataaaaagagaaaaaatacagtccctaagaattgagttttttgaaaaaaaattcaatttttataaaataaatctcagccttagtcatttgcatagcaattaaaagtgattaattataaaattaattagccaacttttacatattaatccttttttaaaggaaagcaccggacttggactgcttaagcagagtgcactggaatttgtcaactacaacaagcgccagctgagcagaatttaccctaaaggtgcacgggtggactccagcaattttcttccccaggtaaacaaacaaaacacaattgtgtgccattagtgaaaaatcagtctcgagagtctcgactcgatcgtttttttttgcgcatattttggcagtttatacaaaatttgttttcgaattcacgaggaactaactgtctattaaagctcaatttttaagattgaaaattatttatgttgtataaaaaaatagttgaaacattgatttatctgatattaccaatttaattaagttaattcccttaatttaatttaataagacaatttaaatagggaaataaaaatatatattaattatttttatgtatatttaattgagcggtttatggcttcgattcccatttattttagtttaatcaccatcgattaattaatcaatcaattaattaattaatcattccccgggctcagattttttggaacgccggctgtcaaatggtggcactcaatttccaaacgccggatgtgtgcatgcagctgaaccagggcaaatttgaatacaacggccaatgcgggtgcgcgttgtttcgcccatttttttgggaaatattacgggaaattttaaaattttaaaaattggcttaatttttgcttgaaattttttctacccctccccccgttcattttaatttttcttttattttgaattccattttccctttttcaaggtatttgctaaagccggattttatgcggcgtccggaccgtacatttgacccattttccgagtcgcccgtgggtgagtttgtgccaaagcaactaattacagaattaaatacctaccgtatttgttaagaattagcttatttggggacggggacaccttagtccacgccttttcaagcccagtcaaaatgccaaaaatttataagccccccccccaacttttagatggcgtcattgcggcacattgttccgttagggtaagcagcagctgcctcagcaaaaattgtcccctaaatattttccgtttttttcagataatttcgggccaattcctttgtgagcgtaaaacgggtacctatgtggaggtggaaatgtaagaaaaaaaaattttcgatgcctaattaattattttcaaaaaatttttttgcataggtacggcttgccgacggacaccatccgcaaggagcacaggacaaaattggtgccagcaaacgggctcaatcccatctacaacgaagaagtgcggtgaaattaatgggcacactgacctccgctcttttttcttgaagggcctagttgaaatggattttattttgaaaaaaaaagtaatttacaattttcctcaaaattttatattttccaaatttttcgcccatctaaaaaatacaaaatttttcttcgtgcgccaagactcattacagatgagagtttcggaacaaacatcattattcccccctcccctggggggggggggggggatgaatcgtcggcgaatagggaaagatggaaaattaatgaaaaatcaaataaattttaaaatattattttacataattaaatccgctggtttgattaatttgactttgtttgatcacttttaattttgatcactaactaaactgatcattttccctaattaactctcctccccccaaatatttcagccatttgtgttccgcaaagtgatccttcccgaactcgcggtgcttcgtttcgctgtgtatgacgagaacggcaaacagttgggccaacgcattttgccgttggacggcctccagtccggctaccggcacatttcgttgcgaacggagcacaaccaagcgagcacgttgcccacattgtttgtgcatttgcaactgaaaacctatgtgccggacgaactgagtgtaattataaaaaaaaaaattggaaaattatgttaattttttgaaaattttttcaggggttggtcgacgcattggccgacccgaggcaagtttttaaggcttgtttgtcttaaaaaattctgaaatttttgaaaatcagaaaaatggaagcctaattttagggctaactttttctttgttttttttttgagtccactctaactttgctagatatttgaacacttttagaggagttatttatgaatgtttgggatttaatttttcaaaaaattattttaaaataataatttaaaaaatgcaaaaagtggcacaatttccaagggcttaaaattagcaaatgccaattaattccgctttgtttttccgcatgtaaaattttaaataatttcaatgaaaaaaaaaatcaagaaaaaaacaaaaattcatagagaaactaaaatctttttcggacttagaaacggcggattaatgggggataaactgactattaaaatttcccttttattaattagttcctaattacttatatgtccagggcatatttgtcggcacaagaaaagcgggaagaggcactgcagcagatgtgcgtggacgagctggacattgtggacgatgttgtgccgtcctccaatcagtcccagccgcaacagcaacagcttggcgtcggcgcccgccgggaccgaatcggcggcgccggcgcggacggcgtgccgttcgactcgaacaactctatccgacgtcttcagaatggttccacccgggaccatcagcagcagcaacagcagatgaacagcgtgcagactacgggcacaataattgagtgagtacggcataatataaaactgtataacaatgattgagataaatgggggaaggtgacatggtaaaattaagacaagatgaggcacacaataattttctgtacaatgacgatatggcacaaaacgatacgatataaaacatacaaaacaaatacgatacacattacgaaacaatactatacatatatgatacagtacacggtacaatatacaaaacgatacgatataaaacatacaaaacaaatacgatacacattacgaaacaatactatacatatatgatacagtacacggtacaatatacaaaacgatacgatatgacattactctaca

SEQ ID NO: 46672 - DNA, 876 bp, Heterodera glycines
taaaaaattatcatggttttttatcttaaaaaaattttgcaaaacaaaagggtcctccctgttgtttcaaaaacggccacttttagactagcgccaatttattcaatgtttccatttcattataattctaaaaaacctatttttccgatttcgattcattaaaatttccttttttcaccctcagatttacggcggaatgcgttccatgaagggcatggtcactgaaacttcggtgttggacccggaagagggcattcgcttccgtggctactcaatcccggagtgccaacagaagttgccaaaggcagagggtggtgaagagccattgcccgaaggcatttggtggttgttgtgcaccggtgaaattcctgaccaggtttgtcaagctgggaaacttttctgaattacgacatctcactattttttgcattgttttacgtgggttatattccgcggtcaaaaagaaaacaattcatgttattagctacaaatccggcacatatctttagctagaaaaccataaaaaacaggacagaccattttggatttgctcccaaaaaagacggaccattttcggtttgctccaaacttttaaaaaccaaaatgccattccttttttctaactagcactaaaatatgctcttatgctatataggagcgctcaaaaaccgtttaaacatgcatgcaaaaatgcggcataaatcctggagttttagcattgactttgtctctgacaatgagagtaatcccccacccacatctcattgcagaaacaagtgaacgcgatcagcaaggaatgggcatcgcgtgccgatctgccagcccatgtggcccaactgttggagaatatcccgcccaatttgcatccgatgtccc

SEQ ID NO: 46673 - DNA, 841 bp, Heterodera glycines
gtcttgtattggaatgctgaggccgaaaaccgcggtgccattctcaacgacccggaaagggacgattatatgcgcaacccatgcgaacgggcgcagaacaaatttctgatcattgaattgtgcgagactattcaggtacctaattaaatatgtctacaataataaaacaattaatttttaaattttgatggttcgtaattagttaattattttttgctttattttttaaccttaaaaataaactcacaaattttcagcccactgcgctggaaattgccaattttgaactgttctcctccagcccccggcagtttcgcgtttggggtagtgaacgatatcccacgcaagaatgggcactcatcggcgagtttgaggcattggacaatcgcgaagtgcagctattcaatgtgctggaacacacttcgtacgccaaattcgttaaggtaatgacctatttgcatatttttaatctaggcttccctaatcttaatgttagcccaaaattcattttcatggcacccccaaatttatttttttacacaaaatacagttggaactgctcactcactatgggtcggagcattactgcacactgagcactttccgtatgtacggcacctcaatggttgacgaatacgaagcggaaactgtggtggcggttgacgccatgcaacaacagcaacaccaacaacagatggactcggtgttcggccgcacattctccacacttccgtccacaaattcagcagcggtgaatgaagctgtggtggccacgggtggggaggaggaaaacagacagaacaacggcacaataacggaaaagacaccgctgacgacagtg

SEQ ID NO: 46674 - DNA, 392 bp, Heterodera glycines
atgcgacaatttatgttggtggtctggacgagaaggtcaccgaggcgagtgagtgttgttgcacattttcaattttaatgaaggatttggaattgagtgaaacaaatttacgaatcgcaatcaatgacctcaaaaactactacaaacaaattttcaagaattattattgagaaaaaagattagaaaaaaatcccactagttgtagaggggtcttttgaaaagtttaaaaatgttttattcaatttttgagtttttttttggcttgcatcctttatttttcttttattttttgcagtcctctgggagttgttcgtcaacgctggtccggtgaccaacgtgaacatgccgaaggatcggatcaccggcaaacgccagggcttcggctttgtgga

SEQ ID NO: 46675 - DNA, 1400 bp, Heterodera glycines
aaaaaattcctccaacgccacaaccacactttggcacaaatgttgtcgtcgcaaccgacgttgatcatggacaacggcgcgtacagcataaaggcgggctattccaccgaccaaagtgccaggtatttgcgtgttgcattcattttcttgggacatagattttttttccaaattttaatgaaaattgtgtaaaattaaaaaaaaaaatagccattttttcttgaaaaatcatgataacaagttctggtgtaatttgaaccaagtcattaacccaaactcgaaaaaagtcgagaaattaactgtcttttgaattttgttttttaaaattaggaaaagaaataaaatttaagtatatttttcatgggccttaaacagtaaaagtaccaatttggcacaattttggaacggatggggccacgatgccgacaaattgaccctccaattttgacaaaatttagagaatgaaacagtctttttggtatcatatttcatagttccatgggttttctattagaaaactatggcaaaaaagttcaaaaaatacaatttttttttcttctaaaataatctaagtttttttttaatttggaaattgaaaaactcggaaaattttgcggaggttatacattatttttatacaataattacactcgattctccccgttttttttttagaattttccccaacactgtgttcaaatcgaagggcgagcggaagcgcatttttgtcgccgacgaattggaccagtgcaccgaccgttcggcactgtttttcgtcttgccattcgaacggggatatcttggcaggttttcgggtcacattttttgggaaatttacattggaatttgtgcccatctcctaactgttttttaaaaatcgaaatacgaaaaataccccccccccctataagatcagaggccaaaaatttttctaaaaaacaaatcttagaattttcaaaatctagataattttctcaaagaaaaaaaaagattttttttcttgtttttgcggaagggtctccgccaaatttagataccttttcatacatggaaaaggggagggggtcggaaatttgcctttacaaaatacgaaaaatacccctccctccctccctataagatttccaaaaaaccttgggacccgaaagaaaattcatgaaaaaattttttcaatgttttaaaatttaatttcaaaaattattgatgtttttccataaatttgtgcaaaaataggaccaaaaccatgcaaaaattactctaaaaattttttttccaatttcagttaactgggacacgcagctgcagatttggaaccgcgtgttcggcacggagggcgccggcctcggcgtggactgtcagcagtgccgcctggtgctcactgacccccacgaagtggcatt

SEQ ID NO: 46676 - DNA, 2640 bp, Heterodera glycines
acggatgcaggagggatcactcacttcagaagtggaatgacacacgacgaggaccaaatcatcccaaatttgtacagatacattcaggtaatgctgaaattcttaaccctgatattttttatgtcgtatttaagccatgggaagcggagtttgtcgattctcaacgtgtgtgggctgaatacgctcttaaaagacaggaagcgaatgcgcaaaatcgacgtttgaccttggaagacttggacgacagttgggaccgtggcattccaagaatcaacactctgttccaaaaagaccgtaacacgttggcttatgacaagggctggcgagtcagaacggagttcaaagcttaccaaatactgaagcaaaatccgttttggtggactcatcagagacacgatggaaaattgtggaatttgaacaattatcggactgacatgatccaggcactcggaggtgttgaaggcattctcgaacacactttgtttagggtttgtcttttcattatttctttttccatgattacattctttagggaacatatttccccacttgggaaggtctcttttgggagcgtgcgtctggtttcgaagaatcgatgaagtttaaaaagctgaccaatgctcagcgttctggattgaatcagatcccaaaccgtcgcttcaccctttggtggtctccgactataaacagagcgaacgtcagactttttaatccttaattcgaaattgttttgttattcaggtgtacgtcggtttccaagtgcagcttgatctgactggaattttcatgcacggcaaaatcccaactttgaaaatctcattgatccaagtaccttttttgtacttggcttttctataattgtttttcagattttccgtgcccacttgtggcaaaaaattcacgagtcagttgtgatggatttgtgtcaggtgttcgatttggagttggatgctttggaaattcagacggtgcagaaagaaacaattcatccgcgaaaatcgtacaaaatgaacagttcttgtgccgatatactcctttttgctcaatacaaatggcacatttcgcgtccctcgcttttggccgatacgaaagacgtaaaactgaggggctaatggggcattcgttggttggctaatataaatattgagtctttattttacaggtaatggacaacacgaccacgcaaaagtactggctcgatgttcaactgcgctggggagactacgactcgcacgacatcgagcgttattcgcgtgctaaattcttggactacaccacagacaacatgtccatttacccctcaccaaacggcgttctcatcgcaattgatttggcttacaacctgtacagtgcttacggcaattggtttccgggcatgaaggtgctcctacgtcaagcgatggccaagatcatcaaggccaaccccgccttttatgtccttcgagaacgtattcgcaagggtctgcaattgtattcatccgagcctacggaaccctacttgacttcacaaaactatggcgagctgtttagcaatcagatcatttggtttgtagacgacacaaatgtgtaccgtgtgaccattcacaaggtcattggcttttttatacggttgttacggttattgttacaactttcagacatttgaagggaatttgacgactaaaccgatgaatggggccattttcatttttaatccgaggactggacaactgtttttgaagatcatccacacaagtgtgtgggccggacagaaacgtctcagtcaggtgggctgaacgccgatctatgtttgtttctacttttaataatttagctggcaaaatggaaaacggcagaagaagtggcggcattaattcgatcgctgccagtggaggagcaaccgagacaaatcattgtgaccagaaaagcaatgcttgacccattggaggtgcatttgttggacttccccaacattgtcatcaaagggtcagaattgatgctaccattccaagcaattatgcgagtaagctgaaaagaacgacatacgatttatagatctgctgattaaacttaattaatttctttttcagattgaaaagtttggtgatttgatattgaaagcgacagagccgcagatggtgttgttcaatttgtacgacgattggcttaaggttgtttcaattttacttttttaccaaacttagtattttttagactatctcgagttatactgccttttcccgggtcattctcatcatgcgtggaatgcacattaatccggacaaaacaaaagtgattctgaagcctgacaggaccacagtgactgaaccgcatcacatttggccgacactttctgacgaggaatggatcaaagtggaattggcattgaaggacatgatcctgaatgactatggcaagaagaacaacgtgaatgttgcttcactgactcagtccgaagttcgcgacatcattttgggaatggaaatcagtgcaccgtcccaacaacggcaacaaattgccgagattgaaaagcagacaaaagagcagagtcaggtgaccgctacaacgaccaaatcggtcaacaagcatggagatgaaataatttctgcaacgacgagtaactacgaaacaacaacattctcatcacgaacggagtggcga

SEQ ID NO: 46677 - DNA, 1216 bp, Heterodera glycines
  unsure (1)..(1216): unsure at all n locations
tacggtgggctgtcggatgattcaccggcccctgggggactgatcggacagtttggattctgttcggctccancaaggacggtaaaccaacacccgacgctggtggaatcggaagggcggttggcaattgtttgggcggtagcaattcgccattgcccggcaaacaattcatcaacaatgtgccgacttttcactcactcatttgccaatgctatgccatttttgcaggttctgtacaaaacactgacctccggctccgtgctgccctcctccgcctctgccaatgcttccgccgaccccctcaacgccacttcggccctcggccttccctttcctcagtccgtctctttgccgcctgttttggccgctttgttccccgacctgaacacttccaccccaatcactctgaccgccgcccaacaggaggcgatcggggagaatttggagatgatccaaaatttgattgtgcagccgtccagtccgttgtgcagcccaaagcccgtggcggtggccgagttcaatttggacgcatttatgggacaatggtaccaggtcagtagtcagcatggcatgtgccatgaagaagggatttgaatgttgcttatgtttgtttcaggtgatgtacagtcctccgctcgtccaaagtgcgtgcagtgtcgtgtcctatcgcaaattggccgacattaacagcggcggaattggctccatttttgaagtgtttgaggttggaaagttaaagcacagagaggggtcgggtggcaaaagagcataatcctttgatggtttccttttcctacagtacacaacggacggcactccatacagtaagccaaagatcacttccggctacgcaatcattaaacaaatgggcgaactgatcttccggacgaccgcccaccaggaagacgttaacagtaagagatcatttgcgcgggattaaccaattaattaattgaccggctaatttctgttcagtccatgtgttgttcaacggacctttgaacgagcgaggacagtatgaattcactgtagtcagcaccaactgcaattatcccgtgtacgtattcgcccgagaccccgtcagatacaaacaggtcgaattcggaggggggtgccaacgggtgcttaatttgggcaccactcaaaatgcctttcagaggtacgaaatggcggtgcaacagcttctggaacagaagggcgtcgtcaatggtatcag

SEQ ID NO: 46678 - DNA, 1059 bp, Heterodera glycines
aagcaattgatcgcaattggaattgacagggacaaggtgagtgccatccataacagttatccgaacggaccgggccacaaatgccaccaataataataatcgttgtgccattcattttaggccaggacatatttcgccccctatttaacgcattgtgcatttgaaagcctcacgcaagcattcacaaattcaatgtttgtctttccttttgcgctgcttttcccccgttcatccttttttaccccagggcattgatggaatggttcaaacggtgtgcccaccaaacgctgaaattgggccgtccgatggaatgggtgactccgcttgggctgcccgtggtgcagccatatgttacggtggacaaggagggcaccggccttgtgtttcggcccgtcccacacaaacaggtagcccaaccaccacacaccgcatgggcatgtctattgaagtttggacttgggaggagggggggggggagcggatgccatcccatggtgcaacttgaaatggcacacaatgtgccaatgtatgacataatttcctctctaattcaccgaacaggtcaacgcttttccgcccaattttgtgcactctttggactcctcccacatgatgctgaccgcgctgtgctgttaccgacacggcatcacttacgcttcggtgcacgactgtttttggacgcacgcgtgcgacgtggacgaaatgaacagggtaagacaaacggtggcagggcgaggggaggggggggggaatccacctgtgttgatcaatcagatcagttaaatgatttttccagatttgtcgtgatcagttcatcgctttgcatgagcagccgattaccgagcaactctcccgggtgctaactccacttttagccccttttttattcccattattctttagtttttcacttcaacatttttaccacccgaactgcgccaattaatgtccgtcgacgaccaaccgttgctgaacaaaattgtggaggagttcaagctgaacatacccccgggcaatttggacattaccaaagtgcgcgaatcgaaatactttttcagt

SEQ ID NO: 46679 - DNA, 1221 bp, Heterodera glycines
ggtgtgtgtagtttctacaaatgttgcagaaacttcgttgacgattccaaatgtccgttacgtcatcgattctgggcgggaaaagaagagggaatatgacccgattacgggagtttctcggtttgtggtcggatggtgttcaaaggcgtctgcagaccaaagatccggtcgtgccggacgagttcagtccggatacgcattcaggtgacatagtaaaattaggacttttgaagggatttgtgcattttggtttagattgtattcttcggctgtttacgaagatatgcgcgatcattctactcctgagatccttaataaaccgatcgaccaattgattcttatgttgaaagcaatgaatttcacgaaaatcgacaattttcctttcccgactcctccaagattggaccaaatcaaatcttctgagctgagactttctcacataggggcgcttagagttcaagaagttgatccatgagtcacttttcttgttttttataattgtcctttcaggggctttataccatcacacaacttggacaatcacttgcgcagctgcctctcactccttcttttgcgaaggtcgtcatcagttcaattcgtggcggacttcttccttttgccgtcactttggtgtcggctctctccgttcgtgaaccattattgttcatttcaagcacaaaagaggacggaacggaagagagacgaaaaagaatgtccgaagtgattaagcaaagatttctttggtgtgctgttggcgaggctcgactctttggtgatttgacagtaattctgaacactgttggtgctgctgactatgaggaagaggtgggccacagaccaagcacttcaaatttaattaaaggagatttgtaaaggaatattagccagatttccagaataaacatttgttactgtcactattaatttgcgcaaaaaaattcatcttaaaatactcataaccagaatactcaaaaaactttcttcttgccattttgaccataaattttggttatttatgaaaaatgaggtaccattttcaaacagaacgctcacgcaatcgaagccctaggacttcgccctaaggccctaaaggaaatcaacaaacagagacatcagctgacgcttcttctgaacaaatccgattctggtggagaagttgcccgagaagttcagaatggatgcaccctcccaagaacaactgaggagattaaggttgagtga

SEQ ID NO: 46680 - DNA, 1156 bp, Heterodera glycines
tcacttaaatcttatatttatcaccaattggtcaaggttgaatacacgggtgccgtcgacgacattttctatgctggcacggggctgttgctgttgaagaacgcggactctgtgcaaatgtacgacttgcagcagaagcgtgtgctggccagtgtcaaggcaacaaaggtgttgaacacaaaactgggtgttcaaaattactgaaaatttgaaaaaaagtgtttgaaattgaagttttatccaacgataaacctaaatcgtcactctgtttccgcaatgtttttgctttcaggtaaagtacgtcatctggtccaagaacatggaatgcgccgctttgctcagcaaacacaccgttaccctcgtcaccaagagattggaggtggcgttgtactctttggtctcgtcttacaatcttttttctccaggtgctcggcactgtgcaggagtcgactcgggtgaaaagcggcgcttgggacgcgggcaatgaggcctttctgtacaccacctccaaccacatcaagtacgcgttgaccaccggaggtgaccatggcatcatccgcaccatggatattccgctgtacattttggcggtgcgcggcagccgactgtactgcttgagcaggttggagttgtaaattccttttttaagacatttcggaatgatctttttgcatttattagaaatttttaacttaactttttacctggctcaattttttcatcctttttatgtgatttgttacacagagaggcgtcgcccgtggaattgtccatcgatctgaccgaattccgcttcaagctggcgttgacccatcgtcgttatgatgaggtgttgaacatggtccgcaatgccaatctgctcggccagtccatcatcgcatttctgcaaaagaagggctacccggaggtggcactgcactttgtgaaggacgagaagacgcggttcggactggcgctggagtgtggcaatttgcaagtcggtttacgagtagaaaactcaactttagatgggttttgacataaactgatttcaaccaattatttttaatgacaagtttcaaactccaaggacttgaaattcttcattgaaaagcactctcattttttattttttggtatgtgatggaatgaaatgcattaattttgacaaaatctc

SEQ ID NO: 46681 - DNA, 2036 bp, Heterodera glycines
atgagtgcagaggaattcagtgccaaactgcgcgaagtcactggctcacaggtgacccaaaaaatacggcaaaatttttgtgcaaactcttttctatttaatttcgttgttaaattgatcatatgaaaatcccagcaaaaatttgattaatttaaatttgttttatgatgccatttgatagagaaatgtttgctgatcattttaaaataagtttaattactctacctttattttaattttttttatgaacttttaaaaattttgtcatttttatcgatttttcggaactttgatcaaatttttctgatcatttttggcgccggagccaaaaaagccgaaaattggcaatagtaaatcgactatgctctacacgataaaagtggtttaaaagtgatttgaacacatacagttcgtaatgttcccttgtaaatgtacaataaacaactttttcgcttcattccatttatttgctctgtttaaggacaaaggcactctgttgccctttttgaaattgtcacttccgttgctgcgcgtctcccttcgcaaaggcgaacagaatgaattacagcaaatgcttcgtttggacggtgccggaagcgcctcgcccgaagaaactgcggttaatctgatgacagaacatttgagtggggtgggagacgaaaggcgttactttcaagaacaaggcaacaaaatgccactgatttttaatttacgatagttttcttagattatgattcaatcaaaagaaaatcatttttattcttgacataatttttaattttttggcagttgctttctccgcaacaacaacaactgtcagacaacggcgtcgatgaggcggtcacggcacagcgacaacttcaagtgtcgcgcagtgtgccgccgccatcgcttcagcaacagcaaattcaaccggcacaaattgtcaacgtggtccgtccgctttctgtacaaagtaatttttaaaaagaaactacgaatcagtaaaaatttttttactcctttagattctctcaacgcgctgtacccggcgacgaccgcttcgaccactttcgttgtcgagcgaaagccgccaacaccacagcagcaaccattgcagaaacagacgcccattgcttccgcctcaccggcacaacaagttcaagcagtagcgcaacagccgcaacaactgcaaacgaatcggcccccttctacgagttcatcaatggcaacaacaaatgtgcatgagagcagcggtattatgtttattcagatattagttaataaattaaattcattaagccaaaatcatcgcaaatttttaaaatttttagcatcaacgacaacattagcccaagcgcaaatggcacccgaaagtttgcaggtgggcacttaattttttgaaaaacagggactttttccccttcgttgcgaacccccctatttaatgtattgtaggaaaaaactaaaaatattacactaaagataaaagtatttaattcctaagccaaaaaacggtcatttgcatgaaatttttggaaaagcacactctgtttaggtagattcttataaattattatagattactattttcattcaatattagaatttgccaccgatgttgctgaatccacaagcactcgccgatcgcattttggcacatatgccggacgcgcaaggcgttgatgccgaagtgctttccatcatttcaatggtattttcatgatttatcgaatccattttgcccccccccccctcttaattttttcaggctgctgaggctcgtctgcgcaatgttttggctcaattggcctcgttggccgatcatcgtcaacggccgttgcgcatcgacccgaactatgcattggtggacgaaccgcgaaaacaaatgcgtttcatggaggacattgagaggagggctcacgaaagtcgcgagacggcagaaaaagaggcgatgatgcgaacggcgaaaagcaaagggggcaaagacagagacgtggtggagaaagcgaaaatggtgggacattgggcaggcggaaattgacccaaattaccaa

SEQ ID NO: 46682 - DNA, 730 bp, Heterodera glycines
atgattatttccgtgtggggaatcgtctttctaggccttcttggcgttttcttttatatgcacgctgtgactttgtttccagaccttcaccttgaggaagaagcaaagctagaaaggtaaatgccttttaagataaaaactcgctgcaattaagctaaataagcaaatgcatttttgaccgaaaaacttttagacaaatggtggaagaaaagtacgaggaaaaggcgaaacaatgctggatagctgcaggcatgtatgtggtcactttgattgcagtgttttggcaaaaccgattcaacaccacacaaattttataattcgttttcaatgacaaatttattcgttcattatgttacacacattatttgtaaacaaacatattttaagaccatttgattaaagaaaattttctcctaccccagcagactattgtaaatctcccatttattaagatccgttccaaatctattttttcttctgggtcagtcgcttttgtcccgtttatcttcagtgcaccagctctcatcaaatttattccatcctgttttgtcattgcggcgagatcacccattgtctttatcgaaccacatacaatttcgaaggttgaggccgagccgaacatttctgtgatttcatccgggttgagattttccagttccgaactcgaagcgcctaaacattagacattaaaattcaaatatttaatttgtggtattcaccatcgaataaa

SEQ ID NO: 46683 - DNA, 1673 bp, Heterodera glycines
cagtttcaaatcatgctgtatcaaaatctaagaaaaattgtgccatcagcagattctcaaccgttatcctccttcattcatgatttattacgacggaagttattaagctgcactcatcccgaatttccatacaaacaacaaggtgtataatacatcattgtgttctttatttcatttttaaatactttacagatataactgcatattcttcgacattgccaaacgtgctttacgcgggtgttgatccaacagctgacagccttcaccttgggaatctcctcgtgctcaattccctgattagagcttccttttttggttgttctcctattttattaattggagaagcaacagcttccgtcggagatccgagcgggcacaaaagaggtgccagacaaaacatctaatgaattattgataattttaattagacaggaaattgttattacatgaatttatctatgcgaattcaaaggcgttgcaaagacaggtggagaaaataaaggcgaatgtttcatcattgtatggggaagacatttctctcgaaattcgaaataatgcagaatggtataaagaggtgagtttggctcgtgggtctcttaattttcagctttttattagatgcggattttggactttttcgaatcaacaaaaagatttcgcatgagtgacatgctgaagagtgggccgatcaagtctcgtttagacgactgtgaaacattgtcctatgctgaattttcctaccaaactttacaagcaattgactggctaaaactttacgaagaaagaggctgtctttgtcaagtgaatttattatcgaattataatttccataccccaaaaattctcttttgctgttagattggcggaactgatcaatttggaaatatgagagccggttttgagcacatacgagcaaataccgaacgtttatcaattgcgctttgtatgcccctactaactgataaaaatggacgaaaattgggtaaatcttcggaccaaaacggaggcactgccccactctggttggatcagttgaagacctcagcttttgcattttatcaacatcttcgacagctacatggtaaaagcaatgttttaataaaatgcacttttttaagccgtatttcataaaattataacgtttagatgatgctgcggaacattttttggttagcttttctcttcgcaaataaccgaagttgaagatgtacttgaagaacacagaaataatttgggaaaatgggtcgcccaattcatctagcagaggaaatgacagccattgttcatggaaaagctgcgctggaaagagccaagaaatgctctaaaattttattcgatggtgaataccacaaattaaatatttgaattttaatgtctaatgtttaggcgcttcgagttcggaactggaaaatctcaacccggatgaaatcacagaaatgttcggctcggcctcaaccttcgaaattgtatgtggttcgataaagacaatgggtgatctcgccgcaatgacaaaacaggatggaataaatttgatgagagctggtgcactgaagataaacgggacaaaagcgactgacccagaagaaaaaatagatttggaacggatcttaataaatgggagatttacaatagtctgctggggtaggagaaaattttctttaatcaaatggtct

SEQ ID NO: 46684 - DNA, 618 bp, Heterodera glycines
atgtctgcgttaattccatttataattgttacactgttttgggctgtcattggtgcaggaggcccatttttggtaccaagtggtatgaacagaggtaatatatattttcaatatatttcatcgttttcgaatgttaaaatgaataattatttgtttccgattttgtatcattattttttaagggatcattcaaacgatgatcgtactgaccgcagtctgctgttatatgttttggctgatcgtctaccttcaccagttgaaccctttgataggaccacaactgcccgtgaaaacgatttggtggattcacaacacttggggtatataaatattgtacaattgcctatttctcaacacacatagtcgactcaatcttaattttcatttctcaaaactccgaattaatatcttacaatacatttctatttttagggaatgtgaagaattgatgatcgatgattgcagtgattttccacttttgggtgtagtattagtgaattctctatttctgtgaaaaactggcatgacaaaaagacacatataatttttcaaccttttatttctataaaaattgctttattttttattccattgaattaataattgttttcattatca

SEQ ID NO: 46685 - DNA, 1045 bp, Heterodera glycines
atgtgcgagtggaggaaattcccttttcggtaagaaaatttgaaaaagttttgatttttcaaaaattttgttccctaatttttattcgttctttcaggtgcccagcggtaagaagcttcaaattcactcggtcaacagtaactaccacatagagctgaccccgaggttgtccccaccaattaatttgctaatttttacattttctgtcaatttataatatttagacttggctttattatgactgttttccctcatccgtgacccatttcagtgacgttggcatttacgaccgagtgattgtgcaagaagtggtcaaaacaatggcacaagttgagcagctgaacaggtccacgcaaaaggctttcaaagtggtcgttctgatggaagcggagaatctgagcagagaggcgcagcattcgttgcgtcggaccatggaaaaatacgcggggacgtgcaaaatcattttgtgttgcgagtcggcgagtcgcatcatcgacccgttgcgcagtcgatgcatgttgatcagagtggcggcaccaaacgacgcgcaggtgggacgagcccaacgcagcgcgaaaaacttgcttgggggttttctgggagtggggataatcgaaaatacaagtgtgaaatcccttataaaggccctgaagcggcacttatggccaaaagatactcataattttccttgtaatttggggccgggactgaacaccaaaaagacccgtcagaataatgaacattataaaaaatatattcatcaaaaccctttgtcttatttgtgtaaatctcaggtgttacacttttccgagtttctcaaattttcaatttgaaattcattgcgattctcgacaaaacatttcttcagatgcgcgaatgcattgagtcggtctgcgcaaaggaacgcgtgaatttgtcggaattttggatgaaaatgttaatcgaaaaagcgggcggaaatgtccgacgtgcgatttgtttgttggaagaggagtgtagcacaaaagtgaaggaaataatgagccaatttaatgggaatatgtga

SEQ ID NO: 46686 - DNA, 1285 bp, Heterodera glycines
tttagggatatcgactcacttttgtcatcgcatatctccgggtaagttccatcatcttacatctcattgacattgtcggctaggaagaaaaaataaatttaggacatggccatggattacgcagtcatcggtaggatttgtgaatgggattttgtggccaagtttaagtcccgcaaatatttttgatcacaaagttatgtttatggcttaaccaccaccataattaaggtgaatcctttgaaacatcagtgccttggtaaaaaaaacggttataatttgcggattaaattcactgttttatcaataaggtcacgcgtgttggacgtgtgccgaaatgtgcgcactttgctggtgcatgaggcacgacggcacggcattaaatacccggtgttggccacgtgccggtcagcagttaacattaatttatttgatggctgattaaattttcggatgtaatgccgaattttccataaatttttatactcgatttccaatgattccattcaaaagagggtgtattagcaaacagttattaattagtcccgccattactgaaattgcgccctttctttcgcttcttctctttcagtgtcacccaagtgtacgatgccggcgcctgcatttatttttactttggcttcaattgccgaggccttgaaaaggacccattgcatgtgtatgagcaaattgaggtactgtgccattcatcatattcgctgctcgcgactcttgccatcattagcttctctggacttttagggaaatttattagatttttgagtcattggcccgtttccaagtctcgagatcattcaaaaactcattgaattgtacgacccggttcccatgctaaagtctaaagtataaacttgaaaatcttcgactcccaatctcatcgccgctttaatcagcccgaacattaacacaaatttttgcagaccgctgctcggaatgagataatcacatgcggcggttccatctcgcatcatcacggtcagaaagtggaaataatttaaaaattataaaaatcattgattggattgatcagcaggcccactaaatgatcatttttgctccttgcttttcaaaatgatttaccacaatcccattttgacattctaaaagggaacgaatataccgatagaaccttgctaagaccttaatccaatggcaaagccatgggtgcgaggccaggggtgtagccatggtttagaaattcccgcggtcacggatcgcgcaagaaagaacgatcattcactgcccaggaatcggcaaaattcgaaaa

SEQ ID NO: 46687 - DNA, 636 bp, Heterodera glycines
atgtcaccagaaccaacgcctccttttttgcctgttgcgagcgcacatgcaaaagtggaggaagaagtgccaataccatcgacagctttgaagccacagacatcgctagagctagacgaggtcaagaaagaggcggaatcacgacgagaatccgctgaggattacgacgaggactatgacgaggaaaagcccattgacaaatcgcctggtaattagcgggagggaatggctcaaaggtcaaccacaaatcgatcctttagataaccgatttttgaaatttgatgaggaattgggtcgcggttcgttcaaaactgtttaccggggtcttgacactgaaacaggcaaatgcaattgttcacattggcatcacatcactccacaattcattcgtttctgcaggtgttgctgtcgcttggtgtgaattgcaggaacaaaagttgaacaaagcggagcgccagcggtttcgggaggaagccgaaatgctgaagggcctccaacatccgaacattgtcaaattttacgactattgggaacggacggacgggaaaagaaagttggttggcttcccattttattttgtttggggccgtcgattcaaaaatgcaatttgcagatacatcgtgctcattacagaag

SEQ ID NO: 46688 - DNA, 532 bp, Heterodera glycines
atggttcacgatggtactgttgtcaatctgacgcccgggtcggtgattaacgagaaaatggttcggccggacatacccgagtttttcatgcaatcacactatccaaaaaaggtcagaagcaactgcaaagttttctctaaattaaatctgcttgttttaggggactggcaagccagtggagtacagtgtgttggtggacgaaatcggcatgacgcaggatgaacttcagggctttctgaatgcattgtgctacagccaccagatcattagtttcgctatttcccttcccgagcccatttggcaggcggatgaattggccaagaggggccgcaacaattacttaactatgaagtgagtttggcatggagagtataacgttaattgcattttcactttgtattttttgtcatttaggcgcttcttccccaaagatattccgcgacttcccaacggtgtggtcgacacgaagcgactgacggaaggcttatgctatcgcaacggacgtttgagcgccacacgtttcactgcttaa

SEQ ID NO: 46689 - DNA, 475 bp, Heterodera glycines
atgtacttggctgatcaggaagcggtacaatttgttgccaatgctcttcaatggcttcggcctgacggttatctccatttgcgcgagtcgtgctcagaaccttcgacaagtacgtaagctatttgaaaactgggatggctgcatacttattaatttttaaattgtacagaaaaatctgctgatcactcaaccaccacaaccactaccagcacttcatcatcctcatcctcgtcgttgcacaacaattcgaagccaaatccgacccgttaccgcttctcatccgcctacatccaactgttgcgctccctccggcacacggacgtgcaaagcggaacccagtggcgcttcgatgtgcagtgggcgtgctcagtcggcgtgtacattgaggtgtggtgattggtgtaaagcggctagctgaaaaaattatatatttgaatgcaaaaatcaaatagaaaagaattaagcaaaaaataaa

SEQ ID NO: 46690 - DNA, 4461 bp, Heterodera glycines
atgccaacttattcagcgatggacagtcgtcggaagaatgatggtggaaatggagcggttacagaagtgaaggaatacaacgccaagtgggcggacgaatacggtatcggccaggacagattgccaaagaatgtggccaagacgggggaggaggaggaggacaaggcggacgaggaaaagttggtggtgatcacggtgccggacaaattttcgccatggacgctagagaggaggaaaacccaccatcagttgtgagaattctctctcgagaatctcggccataaatgggactcatcgagaatctcgacagtagtgccaagtcgcaggaggcattttgccaaagttttttgtttgttttttgtcacaatgtcaagaaattgtctaataattctcgggaatctcgaccattgatgggcgggcccctcttgtcagtctcaagtctcttggcaaattttatttccagttttcacaatgacaagaaaaatggagcaatgttgtgttgttgtgttttttggcactggccctcaatttcggcacgaatttcattgcttttgaattgttttactgtatatattttttgcggttgaaataaaagagaaaattacaaaaaatagcataataatccataaaaaaaatttctttatgggccaagtcgtgcatcaaacgaagccacctttttgaaaaagaaaatctaaattttttggaaatttttgacacagtttcgtttgaaaaaatttttcgcagaacttcggccagcaaaaatcacaaattaattaaggggaacaaaaaataataaattcaccagcgaaacaaacaattacaatgtttatatacggtgatattacggtaattgtttttttaaatgtgccaacaaatagaagataaaactttttttttttgctttttaatagagaaaaaattcttatccactcgcctgcttctgtaaggccaggataccgccgggaaatttttaaaatttattcatttttcacagattttgcgccattgaatattattagagctgggatttttatgtttttacatatatttctttgcggcttagttacgacgagataagcccaaaaatagcattttctccaatcgacatacttgttgctggtttattttgtagttaataaaagcttagattgtcaaaacattaaaagtaattacttaaagattaacaaaattatttaaatgcaattttttttgcaaatcaactcgtacgaaaacgtcctggcctgtaaaaatcaagcacttctaacaaattttcaaaatgtttttttatttatttcgaatgcaaaaatagccaaatcgagttcttaattgagtcattggatttcgaagttctctgctgaaactttcaatttaaaaaataatttatcaaaaaacaaaaaacaattttaccctaggacgccttgacacgtatttgatttgcgattgtgcgggcgaaaattaatatttttcctatttttagcacatatttcagcattttttagaacatattttattacatatttcaggatttttagcacataaaaatcccagctctaaatattatacataaaaattggactaaaaaataactatttttttaaattttataccaaaatcgagaaaaaaaggaaaaaatgaaaataaggtggtagaatcttcgaattaaggatttcgcaaatttctaagaacccctccgaataagtacaaatcagaaaattaggacaaatagtaaattttagagtgccacgggaccgggaccgggaccgggccgggaattcccggtcatccgaggtcccggtcccgggttttgaaaagctcaggtcccggtcccggtagggcaaccgggaaccgggaaccgggaaaaacaagcactggtaagaatgggggtctgagtgaaaaattagtgaagaaaattggagtcaaagggaaaaataaaaaataataattaatatattctttaaaagtaaagtcgacgattgtgcggatggcctagtggctagtctccctgtctttccctttttctttcccatagtttaattcctctacagtaattaaattattttgaattttctttttgtatactcgtgggtttcctatagagaaaatatgattcctcatagtttttttttaaattgatacatattttatcattttttaaatgaaaatcctaccaattgagcttaataatcacaaaaaccaacttttttttgttgaaaatctgtaacaaattacacccaaatttcaaaatttcccaaaaattttttgaaaaagcgcgccgaaaaaatgttatgtgaaaagcaaatattaatttataataatatcaatcatttagtccaaaaaaatattaattgtttgaaataattaaagaaatttgtttgaaaatttcattaatttaatttattaaataaaaaaccaaataattttgtattattttcacttgatataaattaaaatttgaatttttttttaaatttttaaaatttttttgaatttttaaaatttcccggttggtcccggttcccggtttttcttgcggtcccggtcccggtcccgaaaaaaaatcgaggtcccggtcccggcttctcaggtcccggcaagtcccggtcccggttttggcaaaaattcccggtctcgtggcactctagtaaatttgcccgatttggcgctatttgcaaagagcaaccttttgaaattttttttcacttttttttggtcaattttttttttgtttatttttaatgcagaatttgtttttttaacatggaacgtattgcatactatttaataaactgaaaaaaacattttaaaagaaaatttagcgctagttaaaaattgacaaattttgagttttatcaaaaaccaaaggggggaccctattgttttgcaaaatttttttgagataaaaaatcgtgaatatattttttattcgccataattatgctgttaatacttaatattcatcattatgtgtcaaaaaaacaaaaaaaaaaaaattgaccaaaaaaagtgaaaaaaaatttcaaaaggttgctttgcaaatagcgcctatttataaatcctattgtgtttttttttaatctaaaatactcgatgatttttggcttaatacatagcatatttgttctttagattggttgtgacttagaatgagcagttccgaagaagtttcttggatctcttggttttgtggtttgcgtggcaatgacttcttttgcgaagttttatgacatataatataaatcttgacattttattgtaggttgacgaggagtacatccaagaccgcttcaatttgactggactttctgaacaagtgccgcactttcgacaggctctcgacatgattttggatttagaaccagatgatgactatgaggagggacagtcggatttggtggagcaggcggcggaggtaaaaaagcactctaactctggtaaatgtgtatcattggcccagagccaaaacgaaaaaaaaaactaccttattaccaaaaacaaactcaaaaatactgtttcaatctttaaatttgtttaaaacttaaaaatggggaaagaagcatgcttaatcttttaagacgtcaagcccggttaaaaaattgaaccgctttaaagactcattgtcagatgtcgttgggtgttttggctctgggccgtatgatacacattttccccagctctactcattgccagccattcttagatgctatacggactgatacatgcacgttatgttctaactaatcgtggcatccagcaaatgatggagaagtggaagaatgaggagtttggcacatgccctcgggtacactgcgaaaatcaggcagttcttcccatcggttggtgttttatctgttggcctctcactgttccatggttcaggtctttctgacgttgtcggtgagtgcatggtccgtgtgtattgtccgcgttgctgcgatgtgtacgtgccgcgctcttccaagcatcagcacaccgatggtgcctatttcggtcagcggtattcttttcgctttacttaaagcatcccatccctttaaggcactggctttcctcacatgtttttctttgtccacccgggactgagacccaaacgtccgaacaaacagtacgtgccaaggcaagtcctccctcggacacatcggcaaacaatcgactaattgcaatgttttcagattatatgggtttaagatcagtcccatggcctaccaattgcaggtggtcgtttaaaacactttttgccatttgcgaatctttcagtattaccaaagtcaatcgccagttagcggtgtccagggcacttcacagcagcaggtcaatcttctgattttgttgacttattgtcaatgaatgactgtttgttttgaatttgaggccgtcaccccccagcagacgactcaatcggtggcgcaaacccaacttttgaataacggaggaagacaaagcatggacgcatttgacgactga

SEQ ID NO: 46691 - DNA, 938 bp, Heterodera glycines
atgaacgcaccggaaagaaatgatgaagaagtgaaatatgaggtgggcaattaattattgggggggggggagggcacggcaccgagcgaattccaactgattaattcttaattggtgtcgagtatatttggtcgaatgttggggtgaaatccatttcattggaattacagttggattttcgaaaatttttaacacgggacaaattccatagaatggagtctctgagtttcaatccgtccaacaatttcatttcgatgaaatttcagaagttgtgcaaagaaatgcgcggactgctcaacaaagtcactccgtccacttacaaagacttatccgaggaattcatcaaatacaaaatccacgaagaccccaaacttttggaggttttcgctgtctcaaaactaaaaaatcataataatattgttatcctcacagatgatcattgatctgatctttgacaaagcggtggaagagccccacttttgtccattatattcggatttgtgcaaaaagcaagtggaggaggagaaggtggcgatggcagacaaacagccgacggagaagagcttcaggcaatccggggaattaattagaaaaagcccaatctttgggctttaattggggctaaatgggtactaattagggccaaatgaatactaattctaagttagccccccaataaggccattttgcatgggttcttcaaaattaaccaaatttggctaacaaaaattaattttcaattttataggactgagatcattcagaagtgccaaaaaactttcacagtttccaatcattttgacgataaaatcgccgaactgaggaagaaaatcgacgatttggaagaaggcgacgaaaagggaagggcacaagtggaagaggaaatagagggacgaaggagcaaggaaaagcgacgactgctcggcatcatttcgtgg

SEQ ID NO: 46692 - DNA, 935 bp, Heterodera glycines
aggaactgaagaatgaacccaactgtcgcctcttcgctcagcaaattgcacggaccgccaaagacatcgaaattctgatcgattctttgcccgccgacgaacaatcggtgcgcaaattaagccatttaagcgtcaattaattaattgtcccttaattatccccagttgtccgtggaagagcatgagaaggcgttgttggagttggacgacgaacgcgcacgggcggccaaagtgcgtgaagcatttgcatttatgggaaaccgataaaaaaaattgaatcagagaagggattaatcggccacagttattcatgccatcgtaaatgtccggcaatatcagaaattttaattggaccaaatttaaaacccgcaaaaatataccaattttttccaaaaaacactttttacatttaatggacacttttggattttcgaattgaacctaactgttatctcaatcatctaaccgagctgtccagccgaaattcaaagttgtgccgtaaagctagagtgcagcgggacctaaacacggacaactgagtaccgaggtcccggttttgaccggggccgggactagtcccgggtttcccagccaaaaattcccggtttttcaacccgaaaaggtctcgtttaagcccaaaattcccggtcccgctgcactctacgtaaaactcataaacgatgggggaggggaaacaatttaatttggataatttatttggtctaatggatttaatttgtttatgcaggagcttgaacaagcagtggaaaaggcggagaaactgacggatcagttgggcgaacttttgtcacgcattgcgcgccttcaaatggaatcgcgcccgatggcattttccacctgaaaacaaccttttcaacccacattttttttgtcgaatttatttgaatattaatacgcataaattaattttatta

SEQ ID NO: 46693 - DNA, 1313 bp, Heterodera glycines
  unsure (1)..(1313): unsure at all n locations
cggccgttttcgcgtcattctttngggtgcgcaaaatatcctatttttcaaatttttattatactcataaatacagaaaatgagcaaaaacggaatgattttaaacttaaactgatcaaattgatctcccttttttagttttccaaatccatcgcttttttcatcggagtttttttcatggccaaaacaaaaaagcaattaaattcttcacattataattaacatcattttccgtcatttaattcgttgatgccttcgtcaggtgtcacttgtctatgtgtttggccatgtgctgctctccgtcggtgccattcccgtcttggacagtttggtccgcaaaacattggactattccggcttggccgtgatcgcattggccaccggcgggataaagccgtgtgtgtcggcatttgcggccgaccaattcggcgacgaccagcagaggcagcgaacgcagttcttctcggtcagttatcggtgccaacgaaccaacaaccaattgttgatcagtagcctttaaatcaaatcaattttgtcactttttcccaaggctgatcagtattggtcctgatcagtggtcgtttgccatacaattggcaatagtcccaaatgatcaatccgccgttcagttcttctacttcgccatcaatgccggctccctgctcgccatgggcatcacccctcggctccgtactgtccaatgccttggtgccgaccattgttttccgttggcttttgccatccccggccttctgatgctcgtcgccttcctcacctttctgtttggctggcgcaactacaaaatcacgccggccaacaagggcaacattctgtggaaggtcgtccgctgcattttcttcgctctccgacgcaaaatccgcaacacatgctggtgaataattgggggaggggagactgatcaaatccagcacagagataagacaaagtgatcagaaaatgccatcgcatcgtattcggcggaatcgatgctcaaattttttgtcacttagagggcttaaactcatagtttccgcccatccttagccattgatggcatttgctaaaccttgaaattgcctaatataacaataatttgccctatgaattgtctcaggggaagcaaaagccgaagccatcggcgatcgcccgaccattggttggactacgcgcgaccaaagtacgacgagcatctgatcgccggagtcaaaagcatgttggccattattgtgctgtacattcccatcgtgttcttctgggctttgtacgaccaacaggtgggaaaagcggttttaacacttttcatgacattgtct

SEQ ID NO: 46694 - DNA, 177 bp, Heterodera glycines
atggcccgtcgctatgatactcgtacgacaatcttctctccagaaggccgtctctaccaagttgaatatgcaatggaagcaattggtcaggctgggacttgtcttggaattcgagctcccgatggcattttcattgctgcacaaaaactaacggccaacaaattgcttgatgatcga

SEQ ID NO: 46695 - DNA, 1111 bp, Heterodera glycines
  unsure (1)..(1111): unsure at all n locations
ttgcaaaagcgcttaaagnnaaattcagcaataaggtgggcttagagaccgaaagttacagacacaaataattgcttcttaaggaaacaaatgtcgaaataatcgaatctgttagaggcgaagatgtctacataattcagagcgggtaatttgtttttctcggcgcaattcgctttactctttggacaacttttgcaggtgtggagaaatcaacgaccacctgatggagctgttgatcatgatcagtgcatgtaaaattgcttcagcttgccgcgtcactgccgtcattccgtgctttccatatgccaggcaggacaagaaggacaagtcacgggccccaatcacagcaaaattggttcggttatttgcctttttatgcggagctgttctgtcaggtggctaatatgctttccatctccggtgctgaccacatcatcaccatggacctacacgcttcgcagatccaagggtttttcgatattcctgtggacaatttgtatgctgagccggccatcctgaagtacatacgggagacaatcccgcactggcaggaatcggtcattgtgtcgcctgatgccggaggtgccaaacggtattggcataaaatattccaggtttattctgcccatttagtgtgacatcaattgctgatcgtttgaatgctgcttttgcactcatccacaaagaacgcaataatccaaatgaagtggagaagatgacactggtgggcaatgtgcaagacaaagtggccattttagtggacgacatggcggacacttgcggcaccattgttttggctgccgaaaagtcactgacttcaaatatactagcgaatgttgctatttatacttttatattttcaggcttttcgaagcgggagctcgtaaaatttacgcaatttgtgtccatggcattttttcgggaccggccatcgatcgtttgaacaaatcgagatttgaagcggttgtagtcacaaacacaattccacaagaagaaaatatgaaaagatgcaacaaaattcaagtatttttagcgggccatgggttgctaaaaagcatttttggcaaacctaccgatggtatcacaccttttttgaaaaaaatattttttg

SEQ ID NO: 46696 - DNA, 975 bp, Heterodera glycines
atgtatggggcacgaattgaacagacgcaaaaggaggaggaagaaaaggcgctgaaattggtgcgaatgttagaagagctgaaagagaacgaaaaatgccagtggaggaaagaggaaacacgggaagaagacaaagagaatgttatgttaaagaaaggaccaaggaaaacggcggtggtcgacggatgggaggaggcgcaaattgaggaggaagaactgattgaaaagtcgactgaaaggaaagtgccatcggatgggtgggaagaggcacaattcgacgacgaacaaatgcacctcaagaggaatgaacaacattcaaattcagtggatgggtgggaagagacagaaatttggacggatgaagcgaacgaagaacggttcaaatcgaaggatgtttttgaagaggcgcaaacgaaggaagaaattgtaatcaaagttaaagaacgactcaaaccattggatgtgtgggaaaatggtaaaagtgaagagcgcgaacagtcaaaaggtgcattagtgctaataaaacaacgaattaaagccccactaattaacagctgaacaatcccaacttctcgaggagaatagaaaattatttgaacggtttactaccaccaacgcagagctttcgagaatagaaacgcaaatgagtgagatccagcggttgcagggcatatttgcggaaaaggtaaataccatttaaaaattacattgtaattttatttgattttttaaagataagtgaacaggaacaagaaatcgatgtgatccattctaggactgtatacacattggacaatttggagactgccaatgaatttatcagagaggcaattaaaaatcaggccaatcgtcgggtcatcctcatattctgtttgcttgtactcactttcacgctcatattccttgactggtacaatccgtgattcggagtttgtgatatatgattcgatattttatttatgataaaatcgccaa

SEQ ID NO: 46697 - DNA, 615 bp, Heterodera glycines
gttgtcagtgttaccgcctccacttcccagggaaagccattggagcaaaatgaggtaatttcaaatttttatcacaaaaaaatcaatgggtttttatagctggatgttatcatcgaagcttgttcaatggctgaggaactgtatgatttgcgcatgaaaatgcatcttttcgtcgaattgcgaatggctctcatcgccccaaatctctgccgaattgtcggtgccggcaccgctgccatgctaatttctcaggcgggcggactcgtaccgttggctaaaatgccggcgtgtaatgtgctaatccttggcatgttttccaccttttattcgtttttattgcaaattttaggaaaacagaagaggactttggccggcttcagctcctccgtgatccttcccaacaccggcttcatttaccaccacccaatcgtccaaactctgccgcccgaccttcgcagaaaagcggcgcgattggtcgctgcaaaatgcacattggcttcccgagtggattcaattcattcttcgttggacggacgaattggggagcgattgtcagtagaaatcaaagggaaattggaaaaaatgcaagagccaccgccggtcaaaaatgccaag

SEQ ID NO: 46698 - DNA, 926 bp, Heterodera glycines
ccctgccttcgcccttggattttttgttaagttacccctctctgtccaacagaatgaaattaaaaatttgttttattttccctttttttcaaattccaatgaaaggttttgaacgaggccactgctgcgctgctttaccattcgatcagtttgggccgcgaggatttggtgaagttcaaggcgctcaaagttgttgtccgaattggctcgggcgtgcacaatgtggacatgcaagcagcgactgaccttggcaagcatctttggagtaaaatctggcataatgccaaagctaatgaattctgacagtcgctaatggatcagcggaatatgaatttgtgacaatgcttgttaggattgccacgattttctcaaagagattgataaatccctggtgaggggtgggggtatgccaaagatagggtaattaaattttgtttttgttattaatttattttaaatgcatccccccccccccccctcaggcattgccatttgccattcgcccgccgaatgtgtggaggaaacggcggactcgacaatgtcgctgattttgaacatgttcaggcgaacattttgggccgcgagaacggttcaagcgggaaaacaggtgcgtttaatttgccataattagtgttgctaattcaaaaaaggccgatcgtacgtacctaatttatttttgttttttagcccgggagtgtcgagcagttacgtgacctgatgtccggctcagcaaggatcaacggcagtgtgctaggactgattggcctgggccgagttggcactgccgtggtgggaatttggccaattcaaatttaactacatttttaattgtcgaaaaggctcttcgcgcaaagcatttggcttcagagtgctcttttatgatcctcatctgccaaatggtgacttcatacattataaattctaat

SEQ ID NO: 46699 - DNA, 1084 bp, Heterodera glycines
aatcgttccgtcggacgtcaaccctcttacaacgggcatcgaaaccgtcggtggagtgatcgacaaaaccgatcactcgcaacaccgtcattccgaccaaaaagtctcagatattttctaccgcggcggacaatcagccaaccgtgactattcaggtattacaactacgataattattacaacgctgactatagtcgccagaaaaaagaacatttacattcgatcgagttttaatatttcccacgggttgtccaagcattggcttcgtccctatttaagcaatttttcgtagcattttgtgcttccaaagagaaggaaaaatgggcggaaatctaagcataatagtagttaagacgcatttagtacaaagtgttttaaatgactggattgccaatttgtatctatattaaaatcccttttaaggttttaatttaaaaataattctcattaaaatgaaaaaattaacaggtcttcgaaggagaaaggccgatgacgaaagacaatcatttgttggggaaattcgacttgaccggcattcctcctgctccccgaggcgttcctcaaatcgaagtcacttttgagatcgatgtcaatggaattttgcacgtgactgccgaggacaaagggactggcaataagaacaaaattacgatcaccaatgatcacaaccgactgtcgccggaagagattgagcgaatgatcaacgacgcggaaaagttcgcagaggaggacaagaaaaccaaggaagtggtcgaagcgaggaacgagtttgagtcgtacgcctactcactgaagaaccaggtgaaacggttgtcctttgctagagttcattacgacaatttagctcggagacagtgaaaagttgggaggaaaactcagtgcggaggacaaaacgaccatcgaaggggctgtggatgaggccatttcgtggttggactccaacaaggacgcgccacctgaggagcttaaggagcggaagaaggacctcgaggccaaagtgcagccgatcatcagcaaactctacgcagggcagtcgcctccgcccggcagcgaaacgccgccgactgaggagaaggacgagctg

SEQ ID NO: 46700 - DNA, 594 bp, Heterodera glycines
atggacaaaggaaaagctgacattggccaaagcaaagggatgggacaaccgatggataatgaaacgatgcaaaattggagagacagcggcggttcattgggaagacggaaattgggacaacaattttgtttcattcacaatcgaatcatacattccctttcctgttcacatccacaggtccgtatgccaaacgtctcgcgaacggagtgccggtctacatgactgctgtgctggaacacatcacgggcgagctgctcaagaaaattggcgagatcacgcaggccgaaggcatgaagcgtctcagtgcatttcacatccgaactgcagcgcgcgataacgacgagttgaggaaggtcagtgattgagtggcagaggttttgcggcacaaggacagacagcggcacatcaaaattattggcatttcagctgttctctggcgtctctcttgccgaggtgtgcgtgctgccggagctcgaatcggatgtggagcaatcatcggaaggaagtggcgagtccgactccgatgaagaaagtacggaagggagcgcgagcggaagtcaggagggtggcggtgctgctgctgcgcagcaatga

SEQ ID NO: 46701 - DNA, 2762 bp, Heterodera glycines
atgaaaaatttaaaaaatttgctgttttcccccagggaatacattcgggctggtggtggtcctttgctctgctcattggtcattgctgcgttcattctgaatgttggtgccaacatttttggcactgtttggctcaaaaattggatggtacgacttaaaaatttgttttacctacttacagtaatcaaaaaaaaaaaattacaaaacctaattatgtcccacattagcgtgccgcacacagcaatcacagtgccactgatggaactggtgggagtttggccgacagtccatccttttacatcaacatttatggtgggtgggtgggttggttggttcacattttctcggcaattatattgaaatctaaaaaatttattttttattccatttttttgcgttttttatatgccaaaaaaacttagaaaatttcgattataatccgcagaaaatttcgattataatccgctttaatgcagctattaaatattttttttccaaatcttttttctttttttttttgtaaattttaattgtgagtcgtttttaggccaaaataaaatgcataacatttttcagctttcactttgcttgtgttgtttatcagcggactgctcaaggcattggtgtttgtcaaggtgtcaaatttcacaaaaaaaaatcattaaataaaatgattttggtattttattcctacaaaatttgtcccatagtttacgcttactgccgccacacggttgcacaatcggatgttgcgccgtgtactgtacgccactgccgcctttttccaccgtacaccgtccgggcgcattttgaaccggttcagcaaagacatggacgaaagtgagcacagcttgtttttattttgtttatttgacttacaattaaaatgatggctaattttttcatagttgtctgaagcaaatttaaatttaaaaaatattgtaaaacttttagcatccgctaattccaaggcatgaagaatttgtaattaaattttatttaattggattgcttttcacaaattgttttctaattttccaactttgttcagttgatgtgaagttgcctttttcggccgaagcattgcttcagggaatgttcacctgtttgggttcgtttgggcaagggttaatatttttaaaataaattatcttttttccctaggatttattttcatgatcatttggactttcccactctttttggttccatgtgctccattgtttggcctctttttgctctttttcctatgcttccgtgccggcattcgatggtaacaattttttattttttttttgcattttaaagaaaatgtttatgccccaaagatttcgccccttgttgaccgttttaaaaattttgaggtgtaggcacaaaaccgaatgtattttagcaatcgaacaattccaagcatgcttaattatttggtttacaaccaaaaaaaaaaaaaatacggtccaaaatcctcaatcgacatttttgagtgcaccgaatcgaatgctttttttttgttttgttttcagtttgaaacgtgttgagaatgtcacccgttcaccagtgtttgagcatttgaccacttcgctggacgcccttccgacaattcacgcgtttggccaaacccaacgctttgtggagcagctgaagcaacacttggatgagaacaggtaagagtttttggtgttctagaaatgaacgccaatatgtcactttctttattcctcctccgtactttcccaaattttaaaatttcttcaatttcgaaaaaaaaatttaaactacctcattgtaatgaatgcagccaaccaaggacgtagccaggcccttggcttcggtgggctaagggctaactggtacaactcccccccccctccctgtatcgttttcaaaataaattacaatttgaaatttcgcaacaaacaaaaatgaaaattccaaaaaaaaattaaaaattttctacgattattcaagaaaatgttatatttcccgcaattaaaaagaccattttctattcggtcgtcaaagtttttggtttttaacttgtcgttatgtattcctcttggcccatttttcgtccgtctgtttttttttgttgccacattaattttttcgtttttttttcattttccagtggtgctttgttcctctaccattcggcaatgcggtggcaggcggtgtggcttgacctgttggtggtcgggctgaccttcttcgtctccctgttcattgtgctgctcaccgggcgcattgacccggcggaggccggtatggccattgcatttgctatgcaggtgaacatggcagagcaatgatgcatgaatgtgaatggggggggggggctaattgcaacgggagcagctcgttagctcgccccccccccaacaagtattacaatttttataattattatgctcaattttacagacttacttaatgttataaaattattaagacagtttgatgatgcaaattagtaaatcgttgctttccaattttagtttaatgttgataaaatcattaatctatacatttgatgacttctacattttgcctgtttttcacaacattttttatgtaaccctaggacatttttcatttttagcttaattggctaacacttaaagaatgcaatttgaatgttttggattgataaaattatcttcagatcagtcattataaatatcaactaaatagcacgaggatctgaaatttggagaacaaccaggaccggcacttgcccggatgaaaaaaactccaatattaaa

SEQ ID NO: 46702 - DNA, 543 bp, Heterodera glycines
ctcggtggcaccattggtgacattgagggcatgccgtacacaatggttgcgctttgaccctttttgcgcgattcattttcttctaattttaaggctttcagcatggcatttcgccgcaaaacataccgtaatcgttttctgactgtgcacgtgaccaaattgttgcacgaggcaaacaatttgtgctagtatatatattagttaaactatgtttttcagtcgggcgaaataaaaacgaaaccggcgcagaatgggctgcgcagtcttcgcgagacgggcctttaccccgaccttttgctctgtcgttctcaaaaaccgttgacccaagcgctgcgctccaaaattgccagctttgcccaattggacatcaacgaaatcatcgacgtgtacgactgtcacgacattcacagtgtgccgttgcttttgctgcagcaacaaatgaaagagttgctgatcagccaactccaactgcccgacatgcgaacgaaggaggacttttccgccttctacagatggcaacagctcagtgaaaagcaagtttaa

SEQ ID NO: 46703 - DNA, 766 bp, Heterodera glycines
agtggacaaggagaagcagttcttgaagttcttcgccatgaatttggcttcgggcggtgccgctggcgccacttcgctgtgttttgtgtaccctttggactttgcgcgaacgcgtttggcagcggatgttggaaagtgagattaaaattttaaaaatacttaaataaaatgtccctttagggccgatgcccgtgagttcaaaggtttggcggactgcatcatgaagatcctcaagtcggacggtcccatcggtctctaccgcggcttcttcgtctccgtccagggcatcatcatttaccgcgccgcttacttcggctgcttcgacaccgccaaaatgctcttctccccggagggcaagcagatgaacttcttcgtcaactgggccattgcgcaggtcgtcaccgtgtcgtccggcgttctctcctacccgtgggacaccgtccgtcgtcgtatgatgatgcagtcgggccgcaaggacatcatgtacaagagtaagtgtgctctctattctcaggataaactcgtttatcacccaccctcactaatcaaccttaaatttctgaatttcagagggttttcttgattccttttgctaatttccaagaaaaaatggtaaaaattgaacaaaaccaaagcaagcaataaaaaatggatcatttatttgttgctctttcattcgctctttttagacactttggactgtgccatcaaaatcatcaaaaaagagggacttttcactggcatgtacaaaggtgccctgtccaat

SEQ ID NO: 46704 - DNA, 1190 bp, Heterodera glycines
atggatgatttgacaacgacggaattgaaatggcgaccagcagaaagagctaatgatgacagcttaccactaaaacctcttaccgatattgagagacaaatgaatgaaattcgtacagaattatttatggcaagacaggaggaggaagcgataatatcacggatcaaagatgaatttcggcaaacgcagaaagttttaggtcaattagaataattattttatttaaaatgtttgaaaattaacagttaattagtatttcaggtactgataatttccagcgtctgttcgatcaatcagttgctcgcattaatgccgaatttgaaagagtcgggtccaatgctcgtcaattggccaattcgcttgattctgtctctgccttggctcaaaatatttcctgtcgagttgtcgcgttggatcttggaaaaagccgtgttgtggagtgtttgcaaagagtgaacgacttaaaagaccttggaacctgtgcattcggcgtgcaggaggcattgcgagctgaaaaatacgaagaggcagcacaacatattcaccgtttccttacgcttgacacggccgttttcaaaatgggcgaccatcgggagagcaaaggtcgacatggaaaaaccatttccattaaaaatgtttttaactaatcaacattttttcagatgctggatattccgtgaaaaattcttatgaaatccttagaaatgcgaccagtgaattaaagcgcatcatcgaacaacgttttgacgaggcgcagtcctccggcgacgtggcatcgatggaacgctttttcaaactttttcctctgatcaacgaacacaacagcggactgcagcggtttgggactcatctttgtggtcaaattgaggcacttggtgaccagaattttcgtattatgcaggtgttcatttcactttaaattccatttattttattttatttaggccggtgggactgacgacaaacgcaaaaacgtactttatgcggacactttgacaatgcttttcgagggcgttgcacgtatcattgagctgcatcagccgataatcgaaaatttctatggcccagaaaaattactgttgctgattgagctgattcagcccgaatgtgacaaacagtgcgtccgagtgttgaacacgttcatccaacgaagacattttgaggagaaagctcagcaggtgtttttttaa

SEQ ID NO: 46705 - DNA, 870 bp, Heterodera glycines
tcggcatggctctctgttggcttttccttttcattttcatccttttgctgttgctcgtcgccctccatcgaccgctccccgcgcgaatcgccgaccgaaggaaaattgcgctttttgagtttttgatgcgattgttcaacgaatatttagttggtgggggataagtgttaactcagtgcacacattctccgattcattcggcttttccttttccttttgcttttccctctcatttctctccctttttcccccaaagggttccctcgtcgaaatcgccgccggtcattccgcacgtaacaaattgagtcgtgccctttctctcctcaccttccccgtcttccctcgttggcttttccgttggctcttcgccgcccattggtgcgatgtgcgcgacgaatccattgcgggggtgccgtgccgattgtacgtgccaaagggggacaaacgacggcacaacggtgctgttgtgtttattcacggcggcggatggtgcatcggaaagccaagcaagcaaatctaattgactaatttagccaatggaagtggcgccatttgtcctaagcaaacaattgatcgtaatgttgcccattttcagggtattacgacggcgctttgctgtgtttgagttggaaagtcggcatcccaatcatttccatcgattattccctttcgcccgaggcaaaattcccaacggcacttctccaatgtgaaagagtcattgcggaattgaacaaagtgccattttcgacttatggcatcgacccgaccaagattgcattaatgggcgattcagcgggcgctaatttatgcgccgtaatttgtcagagatatctgaaggccacgaagggaccgacgatcagggcaagggac

SEQ ID NO: 46706 - DNA, 2671 bp, Heterodera glycines
cgaacgctttcaacgattcccacgacaaacctttgcccccaacgccgacgcattgcgaaagcgcacactttgacaatggcaacaacaataacaacggcactttggtgctccgttcgtccgtttccccgcagtggcgacggcgcagcaacagcagcaatttgttgcggagggcggaggagaaaaggcagcggacggagtcacggggaagtctgaacagagtggcaggcattgtcaagccgtgctcagtgccagaagtgcgagggagggaaaggggacggcacgggaggggtgattagggtaattaggtgccccagtagttgggggtcttagggcgggagggacaatggcacggcagacgggttacaatggcagtacttttggcggtgattttccatttcttgtgcagcagcgttcgccactgcgaagcgacgacttcgattcctcgtcggatgagtcggaagggacgggcgtggaaatggacagccgatcactggggggaatggtcgtccatcggcacggcaaaaagcctttgtccgaagtcagtggccacggctcatcggcaattgaggacacaccgacggaagagcaaatcgtttacgtaaatcgggtggcccaagtcattttgagagaagagcaaagggcggaggaggaggaaatggtggaggacccggtccaaacactgaagagaccgggccaactgaagttgaggaacgccgaggggagaagcgaagagcaatgccaagtgaggccgaaggagcgggaaaagtcattcatcggatatttcgccggagggggcaccgcactcgtcagagacagcaacgaggggccgctggcgggcgccattcattcgggcaccgtaaaccgacccggacggatgccgaatccgaaccaagtaaagggaaaacgggggcggcacaaatttagacaatgatcgaattttaaggtccaagtgaatgtgaatccaaacagtgccgcgagcgacggagacgcgccggagattagaaaatacaaaaagcgattcaacggggaaattttgtgtgctgctctttggggggttaatctgctgataggtgagagtgacaagcacttacaaaggctttcagctttttatttttaattggcatttaaattcttttccgtcaaagtgtgccatggcattttctcatgcgcaatttcaggcacggacacgggtctgatgctgttggacagaagtggccaaggcaaaggtaaagcggtgatcaaaggatggccaatgccattccgtgctaattgctttgtcagtttaccatctgatcactcgccgtcgctttgaccaaatgtccgtcatggagggacagaacattttggtgacaatcagcggaaagaaacggcgcgtccgcgtttattacctctcgtggctgaagcaaaagattctgcggactgaaggggtgggaaggccaaaggaaaagccaagctcagaaacatggctttgttcagttgcaacagacggagaaaaggaacggatggacaaatgtcggcgaattccaatgcgccactcatttcaaaatcggtaaacggcgccaaggcttggccttccgcatttgttccgttcagtgcgctatgagcgcatcaaatttttggtgattggcattgaggactccatttccatttacgcgtgggcacccaaagtcagtgggaagggccagctcttttttccctttatttgtttaaatatccgaatttagccttacaacaaattcatggccttcaaggtactcatggtaagcccacaacaatcggtcgcttctcttctttcagagttttggccaattgtcccatgcgccggtaatcgtcgatttgaccatcgaagagaacgcgcgtctgaaggtgctttacggcagccttgccggcttccacgccatcgacttggactcgggttggccccacaatgactcattggcattcgccgccaaaatttaccttttcagcgtccatttacgacatttactcgcctcaacaggtgccatttgaatgtaattttggcaaattaaaaagcaccatacacttttgaagagcacaatgtgccaagggatgtgcccgcattgcattgtgattctgccgaataccaacggaatgcaattactgttgtgctacgatagtaagccaagggagtcacgtacagtaggccctaaccaataccgtaacccaatcgacagatgagggcgtctacgtgaacacttacggcaaaattgtgaagaatgttcaattgcaatggagcgaaattccctcttccgttggtaagtgccaaaatgggccaatgaacggcaaaagttaacgaattcagcttacatttccacaaaccaaataatgggctggggaaacaaagccatcgaaattcgcaacgtggagacggggcatttggacggtgagcaaaaaaaggggagggaagaaaaatgccataaaaagagtggaaagaatgccatagaaagtgtgccattggaaatgtgccatagaaattgtggcaatgtcggttagctaattggtcctctgtttttaaggcgttttcatgcacaaaaaggcgcagaagctcaaattcctttgtgaacgcaacgacaaagtgttcttttcgtccgccaaaggctcctcctcccaaatttattttatgtcgctgaacaccaaactgaacaattgg

SEQ ID NO: 46707 - DNA, 1146 bp, Heterodera glycines
atagacacggtcatccatttcgctgccattacacacgtggacgaatcgtacaccgatcgcattggcacaattcaggagaatgtgattgccacaacaacgtaagacccacacaagtagccaaagggtgacttgcctttaaaaacattccttctcccacttttttagactgctcgaggcgattaatttctatgggcgagtgcgtcgtttggtccatatcagtaccggtgtgtggcattgtgccgcaaagtttaagcagaggcattcccttaagacgaagtgtacggcgattcgatggacgacacaacgccgaagtgcgaggattcgccgctgaacccaacaaatccttacgcagcaagcaaagccgcgtgtgaggtgatcgtccggagttaccatgtgagggagggagggcacggacgcacttggaaaggcggagacaaaggtcaatttcacacccttaagcactcctacaaattgccctatgtgatggtccgaatggtgagcatggattgtctcggcatcgtccaaatgcactgcgattggccctttagaacaatgtgtacgggccacggcaagcgtactccaagctgatcccgaagttcacccgactggcgctggagggcaagccgtacccgctgatgggcgacgggatgcactcgcgcagttggatgtacgtggacgactgtgcggaagcgataagacgcataacggagaggggaagaatcggacagacgtacaacatcgggacggagttcgagaagtgcaatttgcacttggtaagagacagcaaaggcagacagaacgacgaacgaacccccttaagacggaaatgctgcaggaaaaagtgcaaaaactgatggacaggcaagcaccgcccaactgatcaccgccaactcacccccccccccccattttaagggacccctcccaaatatccttcgaaccgatcgccgaccgcccctaccacgaccggcgatattacatcgtaagcccaatcgaaggaacggcatttgccaccccgctgttcagaacttcaccaaaatacgcgaggaattgggctgggagtgtacggtgccattcgcgcagggtttagccgacactttggattattacgtgaaagagtaccgcaagacacacaatgccatgctg

SEQ ID NO: 46708 - DNA, 762 bp, Heterodera glycines
tttttaatttttataaatgatctgccgtccgttattacaaatgaagcggcatcagttggcataaaaatgtatgccgatgatgttaaattatattatgcccacgaaaatgatgaccattcgaatcagttggataaagcaattgaggctttggaaaaatggtcaaaaataaatgggttagaaatttcaactgaaaaatgttttgttttatatttagggaaaaataatatgaaaaaagaatattttattaactcaaaaaagatttctgagtcggataatgttcgtgacttgggaattataattgactcgaaactgaatttttcagaacacataagcaaaattatacgaaacgcatatcttagaagctttcagattttgagagtgttgaaaagcagggaaataaaaactctaacagcagcctataaaacttttgtacgacctcaattagaatacgctaccgaagtttggaaccctaatttaaaaaaagatatagacaaaattgagcgggtacaaaaatttttcacaagaaaagcttttcgaaatgtggatttgtgtacaaaaaatatatggaaagacttaaaatcactgatttacacaaattggaagaaagaagaaaaatcaatgatttaacaacaccttttaaaataattaaaggattcaccagcctcgatgctttttctcagaaaggcccaggaggcctttacttttacgagtaaagcgccacacggccaaaactcaaaataattttttccataggatagtaag

SEQ ID NO: 46709 - DNA, 1286 bp, Heterodera glycines
ttccaaccattcgatgcagcttacactgccggtggaaaagaagctgaccgtttaaagtttggatggaaagtcaacgattgccaggggctgttcagcattggcacttggatgggcttggtagttgccactctgctcatcggcgtgctctttttcggctttctgatgcttaattctgtgcagacaatggacagattcgatgacccgaagcagaaacagttgataattagttcgaaagagtgaatttcatcattttattttattacatttcccttaaaattttcattctttgtagctttataaatataaattttttccttgaattaagatttttagtagccattgttgtttcactttattgtattaaaaatgattgtagaatatgctaatttattaaagcattttatggaggaaagcgagaggataattttggttggtccgttgtttcgttttcctttacgttttttcagtgcagggaaagggaatgtgcacggcgtggcatcgccgttcctccgctttttgtggctgctccgatggtccgttattcgaagtgcgtcttgccaattaaacgatttatcctcccttcccattgcttttgttagacttccttttcggcgattggtttctttgtacggctgcgacttttcctacacgccgatgatttacgctgactgtttcaccaaatcggagaagtgtcgacaggtcgaattcgtaccgtcccccggtgatttgccaattgtgcaatttgcggccaaaagggcggaagaatttgcgagcgccgctcaactcgtttatgggttctgatttcaatccgatggagagtttcaatttcaaaaaagcgtagacattgccgtggaatcgacttgaactgtggctgccccaaaagtgatgtgcgctcggacggatacggctcaaaactcttggaagacccgcaattagtggccgatattgtgcgacagtgccgcgcttccatcgccgatcccgactttaccatttccatcaaaattcgcattcaatacccaatggaaaggacagtcgatttgtgcagaaaagtcaggaacataatcaagcaaattgtcagcagaagaaattctcaaagttccaggtggagcgtgccggtgtttctcacatcgctgtccatgccagaactgtcagtcagcggtcggagccgccggattatgcggcggtggcactgctgaagcaatgcttgcaagtgccaattttcgctaacggtggctgcaaaacttttgaggactcattggaaatttcgcaggcgacgggcgccgatg

SEQ ID NO: 46710 - DNA, 559 bp, Heterodera glycines
gttttgacatcagtggacacgccttcctgttgatctacagcattttgataatctgcgaggaatccacctcattccaaaattggccctcaaaacctcgtgttaccattcatcacgttccttcccgcaaggaatttgaactatttcaacggaataccaaaataatccaggcattcatgcatttctgtgactttttcaccacaggctccctttttctagtggcttttcgtttctctaatgctccttcacttgctatgggatttgcaattgttgatcacttcactttattaccacgaattttggcaaaaactcattggggcaagcattggagtgttctcgtggttcggttggtgattgttattatttaagctttaaaatatactttttaagtgacctatcgcttttggttcgtcgtcggattcccttttttacccatccggcggcacatcaaaagtttctgacctgcgattatccgccgcttttgctcacttcatccgacccttttagaatgcctttgctaccgtaaattcctcaaacgattgaatagcttttgagaaaatgc

SEQ ID NO: 46711 - DNA, 600 bp, Heterodera glycines
atgatggattgctcaactattttggaatgcgcaactgaacattctttaattctgatcgacgagttgggcagggggacgagcacttatgatggatttgggcttgcctatgctatttcagagtgtgttaatactaaaaaatgagataaattagtcatttcagggatatcatctcgcgaattggttgttttgctatgttcgcaactcattttcatgaaatatctcgacttcaatcgaaataccccggaaaagtaaaaaattaccggatggatacgatttgcgaaaatggagaactcacaattctatttcgagttgtttctggcgtagccgaccgctcatttggacttaacatagcgaaagttgttggttttgcagatgagataataaaggtaagttcttcatcatgttcaaggcggtgggaggggttaaacttttgactttaatttatggcataggtaatgggtcgagaactgcctacgataaacagactgataacaaaagaaattgacaccttcccacccctgaacacttttgatgttatagtgaattattttttttaaggacgccgaagtaattttgaaccaattggaagccggcgagtag

SEQ ID NO: 46712 - DNA, 687 bp, Heterodera glycines
cacgcgtggtttggcatggagcaggagtacacactgctggacgttgaccagcatccgttcggatggccaaaggcgccgttcggcttccccgggccccaaggtcatttcccggcctaatcattttttggctctaattactctataaaattttaaaattgaattaatatattcaaaaatggcaaattaagggccttattattgcggtgctggagctaacaaagtgagattgactataaattagttgacaattttttctgttaaatcatttttaggcttatggtcgtgatattgtggactcacactatcggtgattcttttttagcacttttatttaattaatttatctatttatttactatttttaatttaactttttcaagcgcttgtctttacgcgggtattctgatttcgggtacaaatgccgaagtgatgccgggccaatgggaatttcaggtcggcccatgtgaaggtcggtgtcatttttaaaataaaaaaagaagcaaattttgctttcatttaaggaatccaaatgggagatcagctttggtcagtttttcaaattaatccgaaaattataaaattgtatttaaattgcttttcattttcaaaggatggcccgctttttgctccatcgcgtggctgaagaagatggagtgattgtctctttcgacccgaaaccttcgcagg

SEQ ID NO: 46713 - DNA, 3087 bp, Heterodera glycines
atggatgtgccagcttcttcctcggcaactccaccgccgttttgcggcaccgccttcgaagtcagcagcggtggcggcgacgaactccactggcgcttctcccaaataaagggaaacattgagacgggcgaggcgccaaccgacggttttttttacaatttttagtgaataaattaacttttcaatacgattggattggtaaatccaaaacaaaagttgtaaatccatgctgttcgtgtttcttttcttttcacttttcattcatttccgtttacttttttctatttttgctttatctttggctttatccccccaattgtcttttagttttaaacgttttaacagattaataaaagcattattaatttcagctgacataatttcgtgcgttgagttttctcacggttcgttttctttgttttgttttaaataaatacaaaaacttttgcgtttttctcgcacagatggtgaactgctcgctaccggtgacaaaggcggacgagtggtgatctttcaacgggaccaaagcgtttgtcaattccatttcaatttgcttctgatttgtccccttttcagggagtgtttctgaacggcgtccgcacttccgagtacaatgtgtactcaactttccaatcacatgagcccgaatttgattatttgaagtcgctggaaatcgaggagaaaatcaaccaaatcaaatggatgaagaaaaagaacgcggccaatttcatcatctcaaccaatggtgtttttttaattttgaattttattcggctgagacatttttaatgccctttaatattttgacatatttccctttcaaatgtttcaaatcccacgcattttttcacctcaaaattattttctttttccgcagataaaacggtaaaattgtggaagatttctgagcgtgaacgaaaaatgacggaaggcgggtacaatttgcggtgtgacgacggatcgcggaggtaaaatttaatcgaagggagaaattagttagatcagtattaaactgtctgttttcaagtgcttatgttgccttttgaggttcctcaaccgtgccatgcctttgaaactgcccaaattggtgcccatggaattaatcgtcgaagcgtcgccccgccgcgtgtacgccaacgcgcacacttaccacatcaattcgataagcatcaactcggaccaggagacgttcatctcggcggacgatttgcgcatcaatttgtggcaccacgaaatcaccaatcagagtttcagtgagtgggcagagagaacggaattcaaaaacaaacatttggcacaatgttttaagtcaaaatgggcatttggcgtgacattggaaagtgtccgttttaatgatttttaaaactggttcttttttcccaagatccctacgaaattatattttttgcagatattgtggacattaaacctgccaacatggaggaactcaccgaggttggcttcttccatttttattttttctttcattttttctcactttgtcaggtgatcactgcggcagagttccatccgtcgttgtgccatgtttttgcatacagtgaattaaaaaatacacaatcaaatccaatccaatttccattaaatgccgtatccatccatttttaggctcttccaagggcatcattaggctgtgcgacatgcgcgactcggcactttgtgacggaccagccaaaagtaattaattaaacactattaattaggatttggttttaatttatgcttccatttgagcattcgaggagaaggaggaccccgcttcgaagtcctttttctccgaaatcatttcttctgtgtcggacgtcaaattttcgcacaacggccgctttttgctgacccgcgactatttgacagtgaatgtacgttcattagagttttcaggcattacttaaatactggtggggcacatggccctgttaatctgtgagtttagtccccgtggttgggtaattaatggcacacggatattattcatttgaggagggatttggatttaactatttgcgagggcaatcacatacaatacatttcattcattcattgttcgtctttttaaggtctgggacctgaacatggagtcgcgtcctgtcgagtcgtaccatgtgcacgactatttgcgctcaaagctgtgcacactttacgagaacgactcaatttttgacaaattcgagtgctgttggagcggcgacgaccggtgagtggcgaacatttgcgaagggggccggcccatccatataaatcggcgaccttttgcttttcaagttgttttttgcggtgcacctttttcataaaatttttggggaaagggcgggtagtccgacgctgccgataggcgccgctgtggaaaatttttttcgattggtgagaaaatgacataataaccaaaaattaggggaaaatatgaaaatttaaaaagtttttttaaattttcaatttatcttcttttcaaatagaaaacaattgattcggaaataatttgtaaagggtaatcctttccttaactgaaagtacagaaatggccaatttcaaaaaaagaaaatcaagttttgaagaaggacttcttccagttaaataaatcaacattttttgtttttgttttcactccatttttgagcagcattcataaaatttttgagctttctccctaaaaatttgtgcttttttattctaaaaaatatgcaattttctgtcggcgtcgtcgggccccaaaggctttctttctatccccactcaatcaatctgtgatttcaacatatattttgttaattcattagacatgtgatcaccggctcctacaacaattatttccgcaccttcaaacgcaacacttcggtggagtccacgtacgaggccagcctcgacctgtgcaagccgtacagaatgggcggctatggcggaaggccgttgctgcaccacgaacggatggaattggcggcggcgatggccagcggcggttcgtcgccaggcggcaacaaaaagcagcagcacggcagcagcagcacaaatatgccaccggggaaaaagcgaagggaggaaatcagcgcggactatttggactttaacaaaaag

SEQ ID NO: 46714 - DNA, 401 bp, Heterodera glycines
gttgttgacattctccatccgaatcgcgcttctgtgcccaaatccgaggtgcgtgagaggctggccaagttgtacaagacgacccaagatgttgtggttgcgtacggtttccggtgtcaatttggaggaggtcgcagcacagggtttgcaaatgtgtacgactcactcgactacgccaagcgctttgaggccaaatatcgcttgttgagggtccgttatttttccaaagccttagggcaacaaactcgccgttttccttttctgcgctagtattgttttccactttagcaaggcgttggtcagaaagtcgagaagggaggacgaaagcaacgcaaggagcgaaagaaccgccagaagaaagttcgtggtgttaagaaagtgaaggttcaagcgggcaaaaa

SEQ ID NO: 46715 - DNA, 855 bp, Heterodera glycines
atgaagggggcgctgatcgatcagaaatcgatgggccacggaggccccgcgcgggtggagaaggcgaagattggcctcatccaattccaaatctcaccaccaaagcccaacgtacgtccatttcatgcatagacaatggggcggtgggggggggggggggggggttcatagatttgggcttgcaattaagcgaaattcaaaaaaaaaaaaattttggctaccttttcccaatacttaattggtatttcagatggaaaatcaagtggtcatctctgactatgctcaaatggaccgtgcgctgaaggaagaacgaaattacattttggaactgtgcaagcaaatcaaaaaggccgggtgcaatgtgctgctaatccaaaagtccattttacggtaagcggtgatgaacgctgactcgttttccgacatgttttcatttttaacattatcctctttagcgatgccatcaacgaaatggcgctgcattttttcgcaaaaatgaaaattatggtgatcaaagacatcgagcgggatgacatcgaattctatgccaaaatcctcgggtgtcgcccggtggcatccgttgaccattttgtcccggaatcgctcggaacggccgatttggtggaggaaattgagacggctgatgggaaagtcctcaaagtcggtggagttttactctcctttttggctatttttgtaactattttcaggtgaccggccttaaacagagtgggtgcgctgtgtccattttggttcgcggctccagcaaattggtgttggacgaagccgagcgctctctgcacgacgcattgtgcgttattcgctgtttggtgaagaaacgcgcccttctgcccg

SEQ ID NO: 46716 - DNA, 945 bp, Heterodera glycines; identical to SEQ ID NO: 42798

SEQ ID NO: 46717 - DNA, 793 bp, Heterodera glycines
gtcccagcaaaaaagcgttcaccaaaacagcatcattacccaagttggattgtcaaaaagtcaaaacagcaggcaacctttctaaattttatctaaacttgtcgaagccaactttaaattttcaaggttggatgtgtctgcttcggtggatagttcagtggccttttcaatccacaaaacttggcccgacttgcaattgaaccaaagtcacttgttcttcgaatgcactctgttcctttactctgttcttgcgttgtttctacagtatctgaacctgtacaggactttgtggtggcttcccaagtctcactggcccaattctcttgtcggtttttcccttttcacttttttattgcttacctttagaaataccacctgataaacccttacattttgtcctgtattgggcttctacttggtcttcgagttaccaaatgcttttgggatacggtaacattttggaacccatcaaataaataatttatttagataactgaccgtataagcttcttttctgctgggcaagatggctggaagttcatttgttggaaagtgtttgaaaatgcaattgttaagactcctctcaccaccgttgtgttgtccagcttcctgttcagcttcacacgaatttactttgaattcggcatcaaatccttcctttgtttcacttgcccgtgggttttatgaaattgaagaaaaaagctcaaaatttttgcttaagatttgttaattttgtagaaaaatgaccatatttgatttttttatagatttttactaaaactatgtaattttc

SEQ ID NO: 46718 - DNA, 2153 bp, Heterodera glycines
agaaaaagcttttcattttttgtgttttcactttttaggtgctcatttcacgcaattaccggttagccagtcattcaaatatcattcaattttttgggtcttgattttgaaggggagatgttgacactgttgttatcgagaaattcgtcccacttttggtcgatctggaagaagagggtcaacttgcacccgtcgtcgatgttgagagtggcacccacatgatttggattcgtttcaataacatttatggtacatatcatgaagcaaatgtttatttctgggtcaattttgaacaccgaattaagttgttgctgtgtcccggtgcaataccaacgtgtcgttagtgcaaacattcttatacaaattggttgctgtttttgccgaatatttcaaggatgttgaggaggaatcaattcgtgacaattttgtgatcatctacgagctcttggacggtattaaatacccaattcctaatttatatttttcgttcttttaaagaaatgatggattttggctatccgcaaatcaccgaaggacgaatattgcgcgagtattttctatttgtctttttctgttcttcatttttttcaggtacataactcaggaaggacacaaattggaggccgcgcaacagccgcgtcccccgatggcggtgaccaacgccgtctcgtggaggttggttttgcatacaaatgccaaaaaggcaatgatgaggacggaaaaggacattatcaactcttgaataattccctgaacattggctgtcgtttttaggtccgaaggtgtgagacataggaaaaatgaggtttttctttttttaatattttattcgtttttttctttttaaaggtattccttgacgtgatcgaatcattgaaccttctggtaattgaaattaatattttttctttttaataattcaggacaacaaattttttattcgcgataagaagcttttttaaggcaagtggcgccggtacagtgttgcaaagtgaaattgtcggttccgtcaaaatgcgtgtttttctcaccggaatgcccgaattgcgcctgggtttgaatgacaaagtatttcttttaattcaattcaattgttatttttattattgttctttttgtaatacaaattaattaaggtccaatttgatgcggctgggagtaatttaaaaccaacgaagcataaatcccaattagtaatttaggggggagaatcaaagccgtcgaattgaaagacataaaattccatcaatgcgtgaggctttcgcgttttggtaatttgacaaataaaagtataaaaaaacaaaatttaattaagaaaatgatcgtacgataagttttattccgcctgacggggaattcgaactgatgagttacaggtacacacaccccgcactgatattgcattttcttaattttccaagattgagcacaattgtcaaaccactcatttgggtcgaagcggtaattaatttggttttgcgtttgttatttgcttaattttacaggtaattgagaaattttcgcacagtcgtgttgaatatatggtcaaagtaaggtcaaatgggaaggttgttaccattattattaaaaaataattattattttttaaattatttgtttaactacttaatattttatgcttttgcgtttgaaggccaaaagtcagttcaagcgacgttcgacagcgaataatgtcgaaattgtcgtgccggcccccagttattcggacagtccgcgcttcaaaacggccatcggaaattgccgttaccaaccggaagtggggaagagcaaaaggaattctcattcgatcttcgcacttttcctttttaggacaattcttttgtgtggaatatcaaaaatttccccggagggaaggaatatttaatgcgcgctcactttaaacttccgtccgttctcagcgaagaagttgaggcgaagcgtccgatcaaagtgcgctttgaaattccatatttcaccacatcgggtgagcgaagcaaaaagtggaccaatgtttggcttaaccacgtaagtaataatccatcaaatcaggcattcaagtgcgatacctcaaaatcatcgagaaaagcggctaccaggcactgccatgggtgcgatacatcacgcagagcggggactattccctacgattgaat

SEQ ID NO: 46719 - DNA, 992 bp, Heterodera glycines
atgtcacgtgctgcaagcattgcacgacaggtcaatcacataagaacaaggattgaaaaaagcctatttggccaaattataacaaattatgctaacaaaaacaaataaactgaatttctcatttccaggcttccaaacatggcttgaaagtgaaatccatcttcactgttacgccaggaagtgagcaagtgcgtgccaccatcgcgcgtgacggcttcatcaaggactttgagaacattgggggtgttgtgttggccaatgcttgtggcccgtgtattggccaatgggaccgaaaggacgtgaagaagggcgagaaaaacaccattgtcaggtctcatcgctaaataatgccatgtgcatctttaactgggtttataatcaattagtaaattgtaattcgtcagttcttacaaccgcaatttcaccggacgcaacgacgccaacccggccactcatgcgtttgtcacttcgcccgagttgaccattgccttggcgttggcgggcactttggactttgacccacgccatgacacgctgacgggctcggatggtttggaaatggttcaaaagggaaaatacttaaaaggcaatttcaggcaagaagttcaagctggaagaaccgaaaggcgaatgccttccggccaaagggttcgatccaggcgaggatctgtaccagccggcccgtttccaaggcgacgtggtggtggacccgaaaagcgaccgtctccaactgttggagccattcgacgcttgggatggcaaagacctcacggacatggttatcctcatcaaggtaatgggacaaggggtttaatcaatttcctctgataatgagtttggacaagccaatttaattataaatggtttaggtcaaaggaaaatgcaccactgaccacatcagtgcagccgggccctggcttaaataccgtggacacttggacaacatctccaacaaccttttcctgactgccaaaaacgcggagaacgacgaa

SEQ ID NO: 46720 - DNA, 755 bp, Heterodera glycines
ggaccaaggccaagaagttctgccgcaatgagttcaacttgaccggactgtgcaatcgtgcttcatgtccgctggccaacagccaatacgcaacagtccgagaagagaacggtgggccatcaaaagcgaattgacgaaatgagagaaagtgatttgttggttgattaaggcgtgtgtttcctttttatgaaagtggccgaacggagtcatttcccgggcaaactttgggagaaggtgaagctgcacagaaatttggccaaggccgttgaacagatcagcacgcatttgctgcattggagtgaatacgtccgcaaaaagtgcaaagcgcggcttatgcgccaccaccaatgtctgaacagaatgcggaagatggagctgaggggacgcactgcgaaagtcatcccattgcaggtgacaaaataaaaggaaagggaagcgaaaaacggcggaaaaattggaaattcagaggaaaatcgaacggagggaacgccgcagggaggaaaaagcattggccgcggcaaaattggacaatgccatcgaaagggaactgctgcagaggctgaagaagggcacctacgggagcatgtacaaattcagtgacaagacaattgacaaagcgatggaaagggtggacgagtcggagcaaagtgaggaggaagaagtggaatatgagacggagacaacgcgggagaagcagcgacagttcgtggaagactttgacgagtcggaggagggggaagacatcgaagactatt

SEQ ID NO: 46721 - DNA, 838 bp, Heterodera glycines
atgacagaagaaacttcgggcacagagcgcgtctttgcattgtctgtgaacgtcggaggactggtcaaccacgtcatcttccgccgtcacaacgggatgtacaccttggacaactgcgacaagggcttccgaacaatcgaacgattcgtcgaccactacctgcgcaccggagcttccgtcaccaccgtaatcaaacagcttgaatcttattattttttcattttcccttttttcagaaacaacacgtcgctctcatcagggccgtgccccgcgcgcactgggagctgtcgcacacttcaatcatcctgaacaatgaacttggccgcggcacgttcgggatcgtcaagagtggcgtctacgtggatcagcaggggactcgagcgacggtggccatcaaagaggtgtctcagacgagcaccaaagagcaagtgaggaaggggggggaagctgtgtccatattaaacattgctccgttttttaaaagatcttggaattcatgaacgaggcgcgagtcatgcggcagctcagacaccccaatgtcatccagttctacggcgtcgcggttggccaggagcccctgatgatcgtcatggagctggcgtcggacggcagcctcaccaactacttgaagcagcagcggcggagcgcgcgggtcaaactctacatgtgtctcggcgcagctggcggactggaccacatccactcgaagggcatcatccattgcgacgtcgctgccaggaactgcctctacacgaacggagtggtgggtgaaaagcatcaaaaaaaaattttttttgtcatgaaacttctaaatttgttcatttttccccacaggtga

SEQ ID NO: 46722 - DNA, 1015 bp, Heterodera glycines
ttgcggagttctcaagcccatcttggcctgctaaaggtccattctttttttttcgttgtttttacattttatttgcttcttcttctttaggttttgaccattcactcaactcccatcaaaacgctttccaacaattttttcgctgggctttacattcgtcgacttgagcttatcaattgcgaaattgaacttttggagaaaggggcttttggaggattggaaaatgttttgcaggaattggccattaatgggaatcgggtaaaataaagcggacaaaaaaaggaaatgaatttgacaaatcagatcaaagaaatgattccggaaaccatcgcgggattccattcgctggtccgactcgatctgtccaacaattccatcgaagaattgaaggtcgaacattccctgccgaggctgccaaaagtaagagaaaacggacaaacgaatggacaaattgccaaattaataaactattttaaatttaaatttagctcacagacatcgatttgtcgtacaatcgaatctcagctgttcacaaaacttttttcgatggggtcaaaggcactgtgcagacgatcaaccttggccacaatgtcatcgaagaagtgcctgccagcggtgccctttttaatttataatattcactaaaattctttccagcagccctattgttttttggaataacccattttttaaaatttttcactcataaaaacttcaatttgttgacgattcatagataacattcaccaaatcaaaaaatttaacgcaaaaatctatttttgactgttgaattgaatttttctttaattggttaaataagtaattaattcgtaattaattaatttaattaacatttgcttaatttgacagctatccgtggctttcgtatgttgatggcattgcatcttcacaacaatttgcttaatggcattctgccggcactttccttcatgaaccttcccgtgctcagtcttctcaatttggcaggcaatcaactcagtgccatgcatcgcca

SEQ ID NO: 46723 - DNA, 479 bp, Heterodera glycines
tagaaatttcaactgaaaaatgttttgttctttatttggggaaaaataacaagaaaaaagaatattatattaactcaaaaaagatttcagaatcggaaagtgtacgtgacttgggcattataattgactcgaaacttaatttttcagaacacataagcaaaattatacgaaacgcatatcttagaagctttcagattttgagagtgttgaaaagcagggaaataaagactctaacagcagcttataaaacttttgtacgacctcaattagaatacgataccgaagtttggaacccaaatttaaaaaaagacattgacaaaattgaacgggtacaaaaatttttcacaagaaaagtttttcgaaaatgtggatttgtgtacaaaaaatatgtggaaagacttaaaatcgcgggtttacataaattagaagaaagaagaaaaattaatgatttgacaacagcttttaaaattattaaaggg

SEQ ID NO: 46724 - DNA, 2177 bp, Heterodera glycines
atggtcaaggtggagggccaaagggaggagtttgtccgcaactgtttcgtcgttggcggttgtgagtcggtcgtcggctctgacattgtcgagtgccgtgacgagaaggaattgctcgaggcgagtgttttttttcctctccaatttttatattcatttccatcggtcccatgtgtgtagaaatgggccgcgtttgtgctttgcgtcgatcccgatttgcttaccggttacaacatccaaaactttgatcttccatacattttggatcgggcaaagcatttaaaggtattaattctcaacacacgattaattttttgtactaaaggaatacattttcctattttggttcgtacctttcgccaatttcatttattttatttttgtcacagattgacaaaaccgtctgtctgttgagtcgaattcgcgggtcaatgtgtcgacaaagggacgccgccatgcagtccaaacaaatgggcaatcgggtgaacaaattcgtctccatggacgggcggatcatcttcgatgtgcttcaggtggtcccttttccgtctgtcccatttcaatttatttttccttttccatccttttttcctcagttggtccttcgcgagtacaaattgcgcagttacactcttaacaatgtcagctattttttcctgggcgagcagaaggaggacgtttcctacactttcatcccccaacttcaggtatttttcatcaatctccaaatttttaagaaaatgcttagaatccaaaaaaaacattttctaacgctcttttgcccattttcacagaatggctccaacatggacagacggcggttggctttgtattgcatgaaggacgcctttttgccgttgcgtctgctggacaaacttatgctggtgatcaattacattgagatggcccgtgtcaccggctgtccgttgaatttcctcgtctcccgtggccaacaagtcaaaattttgtccatgttgttgagaaaggtgttagattaaaatttatataattaaaaaataataactttttccgttgtttgttttgcagactcgcgagcactttttgttccttcccgtcgtcgaaatgggcgagggcgccggcggcgacgaggtcggctacgagggggcgactgtcattgagccgttgcgcgccttctacaaggacccaatcgccacgctggacttcgcctctttgtacccgtccattatgatcgcccacaacctttgctacaccacactgttgcccaagggggccgtagccaaaaaggcgattccatcggagtgtgttcacactactttcattgttttttccaaaagttttcatttctttttgttcagttggcgcgagggagaagattacattgttacgccgtccggcgatatgttcgtcaaggccacccatcggcagggattgttgcccaaagtgctggaggagctgctcagcgcacgcaaacgggccaaggccgagctcaaaaaggagaaggacccttttcggtaatgctaagtccaagattttgccattaactcattaatccatccattagttgactaattacaattctttgaataattgactatttgtattttcttcaattgcagacaaatggtgctgaacggtcgtcagcttgcgctaaaaatcagtgccaattccgtctacgggttcactggtgcctcccgtggcaaattgccgtgcttggaaatctcgcagtccgtcaccgcttttggtcgtcaaatgatcgaagctactaaacaaatggtggaaggtgtgtgcaaccaatgccaactactatcatgaactgtttatttgcattactttaagaatcttacattgccggcgctgtcgacggactttgtcctgcaaatgccaaagtgatttatggtaaatctttttcaattgactttttaaataataaatgtttgtatattttcatcaccatttagaggtgacaccgattcggtgatggttaaattcggcgtcaaaagtgttggcgaagcgatggaattgggccggcacgcggcgcgagagatcagccgacgttttccgccacccattcagttggagttcgagaaggtctacttcccgtatttgctgatcaacaaaaagcgatacgcgggtctctattggaccaacgaggaacgacacgacaaaatggactgcaaaggggtaatggaagagaa

SEQ ID NO: 46725 - DNA, 812 bp, Heterodera glycines
gagtccgtcctcctttcgggcagcaacgattttacgctgaaaatgttcgattattcaaaaactgcggttaaaagggcaatgaaaacgatcacggtaagtcatattctgaaagaattttacaatgaaatgtttggaaggaggtcgagccgatcactgcggtcagttttcatccgagcggagagttttttctatgcgcaactcggcatccgaccttgcgtctttatagtgccgaaacacaggtaccatccatatttttagattttaatttgtttaaaatcgctttcaatatgttcttccgtttttaaatagcatagaaaacattttttacatgattctgaaaacttcatcgaatctgtttctttagcaatgctttgtttctccaataccgaaggaccaacattctgattccattacggatgtgtgctattcggaaaatgcgcgaatgtttgtcacgggaagtcgtgatgggaatgtaaaaggtcgattattagacataggtcatatatggaaagaggggcgagggagtcgactcattaaagccatttttcgccgataaaaggtcccaaaaatggaggtttttagaattaggttttcagcccttgtccttctccctcacggcccccttcttttttgtcctttatttcactttttttttagtttgggacggagtttccaatcgatgcattgagacttttacccgcgcgcatgacggagccccgatttgcagtgctcagttcactcgtaatggaaaggtattgcttcattatgcataaattttcccagaaattaattactaaagtgtcattgctgtt

SEQ ID NO: 46726 - DNA, 645 bp, Heterodera glycines
gatattccgagcccacttgacgcggaaatccaaattgttctgagggaaattcagtcggaagtgcatcagctagagaacagtggcgaatacggggaacaattgaaaaatgcgcgtcgactgttggccaccggtaagaaatttgagcagcaaaaaccggattgactgcttttgaataataaatcccagaagcaaccaagctcgagaataacatcgacccagaatggctcgaagtggacatcaacaaaccgatcaaagtctccaagaaggtgctcatccccagtttccgtcatccaaaggtttcttccccaacctttttcattaaatataatcactgttatttggattcagtttaattttgtgggcaaagttcttggaccaaaaggcacgactttgcaaaatatcgccaaatcatacaaatgtcacgtgtacattttggggcggggcagcactcgcgaccgaaccaaggagcaggtaattctcactcaattttgtttttcttttcatttcttactttcttttgttctcataatggctatttctatcgcttggtcttctcaaaccaaatttcccaggaaatgctcagcagcggcgacccacagtacgctcactacggtgggcctttacacgtcaaagtggagacgactg

SEQ ID NO: 46727 - DNA, 960 bp, Heterodera glycines
accgtttctcggcgtcacttcaatttcctgtgacactcactaagtgtgccaaacttttgtccaattttgacgctttttttctttgagtatggttatgccccgaagggtacttctgtaattctctaccgtagccatgatttgcttcaccaacaatacttttgctcgacagaatggcccggtggactttacgctacgccgacactttctggtgagaacattcgccgcttcgaataataaaaatttcttggcaactgaatatccccccttttctgctgtccatttgtctaatgctcctccgccttttccgtcttaaggaagtcggccgggtctgaacattgcgctaacttgggccacactccaacacttcggagaaaaagaatatgcaagacgagcccacctaattctgcagaagaccacacaattggccgacgctgtcgctaaagtccccggaatttgccttgtcggaacccctgaagtgtccgtggtcagaaaatatttgaatatcatcccatatttgcattatggcagacttacattgaaaggtggccttttcttcacatcgctttaacattcacgcgttaggcgactgtctgagtaaaatgggctggaatttgaatttccttcaaaagcccgatgcgtttgtttttgcttttcctctctgtttgcatttcctttttagccttcatttttgtatcacttacaatcaaacggctgacggagtgctaaacgccttcttagtggaccttaaaaaagcctgcgaagaagtggccgcgttgcccgaccgaggggcaaattcaaaaacggtgccacatttggcggatgaggctaaattttgcctaattttttttaaaggctgcgatttatggaatggcagccaaaatcccggacaaagggcttgttgaggaagtcgcccatttgtacatcgatgcttgttactcgatgccatcgttcacttcctca

SEQ ID NO: 46728 - DNA, 1313 bp, Heterodera glycines
attagcaggccgatcagtggttaattgcttttgcttattagaagccgccgttctcttacatttggctcacttacatggccatccaaaacagtgaggacaaaatgttgccgttgacagacatttacaatttcatcatgaatcgttttccgttttatcggcagaatacgcggcgatggcaggcaagtggcgatggacaaagggcaaaatgaaagaaatttgggttaattagtgtctaatttgagtacactgtgagcatggtcaattaagcagttcgcttttcgttcagaattcccttcgccacaatttgtctttcaatgattgcttcatcaaagtgccccgacgttcggataaaccgggcaaagtgcgttttttgagttttattttacattcttttgatgccatttcagtgttttctccaatgttttcctttctttcccctaagggttcatgttgggccattcacccaaaagcgattaaaatgttcgaaaacggaagttgccttaggcgtcaaaagcgattcaaagtgagcatgatttaatgatttaagtgagtttcgtttttgaactgtttcagctcgacccattcgcacccggacgaatgtcaaagcgaaaaaaaagcgaaggaggggagagaatggcacggccggagggacgagggagccgaatggcaccaggggaaagtgggggagaggagcggacagaaggggagacgagcgacgcatcagcgtacggggaggaggggagccaaagcgaacagcaaatggcacttgcaatgctggccatcaattcggcacttcaacacttcggagaggtgggccatctcacttaattaagtcggcactcattcgttagaaggtcggagggtggtcctttattttgctctgctcccgatccgtaaagggattgccatgggttgttaatgcaactccttcccgccccctccctcccgcgctcctcccattgctcttccttttcctttagctttgtgctcctcccattccgtcgcttcttcctttgtttgttccgccgcttttccctccgccgcccgctgtttccgattctccgcttcttctcaacttggccctgtgttattccacttgcgccgatgttaagctccctcccgctcttccccaactgttggccctttccctgccgtcccaaaggggccgagcagtgcttcgccctccccctcctccgattgtgccccttccgtttggcaatgccttcgccttccctccgccctcttttccttcctccccctccttttcttcctcctcctcttccaccttttccatcacttcgctgttggcgcaa

SEQ ID NO: 46729 - DNA, 1060 bp, Heterodera glycines
  unsure (1)..(1060): unsure at all n locations
aactgtcttccaggcatgttcatcgtcgggctgccgtttgccgtcaaaattggcggatggtgtgccattctcgcgctgaccggcgttgcctggatttgctaccgcactgttagtacttttttgttcatctgtcgtccggtagcgtcatgattttgatcacttttgcatggacaccgaccggcctagttttttttcttacctaatgccaaaacctggcacttttctccatcggtcccagttccaaatattctaccgttcatttgcttatcattttgccagggtctgattctgatcgagtgcctttacgaggactgcccgactgacggcactgatcactcatcgcagcagaaaatgaagaggcgacgaaaagtgagacggaggtgaacgcttgggcagtagcagaaggcactggagatcaggggatggcacagaattccgatttccaaaaattttgtgcctcggaatgccatccctgctggagatgttcgagagtctatttttacctaagagaacagagttgcccagaaacgacactgaagtccctaaaaattcagttatcgggaagtggccgaggcggtgcgaccggggcttggcaaatttgtactcatcgcgcagctgaccgaacttgcgagcacgtaagcagacgaaaagcaaatgaatattaataggacatttaaaaaaacttcccccatttttggcacttttttaaaatttatcaattcttttacctatctttttgccccaccgatgtgccacaacctaagtatccaacaaattaagttgcattctgtacattgtgctggccggggacctgctccaaggctgcttcccgagtgtcggtgcgtttgcttttcccattttttgttgttgatcaaatctgtaagggacagtctgtgaccaaatgatcaggccaaatatggggggggcacttaattggctaacaattagtggcataccaaacaaattatgccgagaattgatcaaacatgtgacaaaatacaagcccgattgatagtgtccggtcaaaactaagggcgaaaactgctctannnaacccgaa

SEQ ID NO: 46730 - DNA, 951 bp, Heterodera glycines
ggactgaatgagccgtgctctgtgaactcactggttgaagttgtggtgggcaattttgtaaataataattaaaataataaactagagtgccacgggaccgggaattgactagccactaggccatttgcacaattgctattgtttctttgaaagaatatattaattattatttaatatttttccctttgactccaattttcttcactaatttttcactcagacccccattcttaccagtgcttgtttttcccggttcccggttgccctaccgggaccgggaccgggacctgagcttttcaaaacccgggaccgggaaccgggaccgggaccttcggatgaccgggaattcccggcccggtcccggtcccggtgtcccgttcactctataataaacatatccaatttaatattacaaaaattgtaaagctaaagaaaataagtaaacaactttttcaaaaatcacaattttcttgtgaaaacaatcaaaagaaaaatcccgataattaattataattatttataatttttgcaggtcaatacgaagggcggttcctccggcgtcgccccgggcgaagtgtcaatttttgccacttcccccgctgggcttaagcaaaagtgtgaggttattcggcgcgaaaatgccttcaccagcacatttacaccggacagaatcggtgggtattaattaattgagtttattaatagctttaactaatttgaactacaggcaattggctgattggcattctgtacgagggggaacacattaaggggtcgccgttcccttgccaagtgttcgatgcttcgctggtcaatgtttatgggtgggtgtaataaataaacaagaaattaaaatatttaatggaggctaataattaattgcttttttaaggctcgatgttggactgattggccaagaacttacttttacagtggacgcgtcccgggcag

SEQ ID NO: 46731 - DNA, 3338 bp, Heterodera glycines
ggctgacccaagacaagatcgctttatttctccaaaatgggtccaacttcgtgaaagcacaaacccagccaaagatggccaattggcgggtgttgtaattggcgaagtccgcaattttacacttgtctcgtgtattacggacaaaacagtgcattcatacattttgaattccgaaggaaatcttctgaagacggtgccaaactttgataaatgacaaaatgcactttttggcacagatagtgcacgatgtgaagggttgtgaacggaaatgttggcattattcgaagacgaccaatcagctcattgtcgcgagtcgggaggtgggcaaatggcacaaacgaaggtcattggttggtaatttgcgagttgctaagatggtctacttctatgacattaatgactgcttggaaatgggtggcgaaaacggacgatgtcacgccctggggagaggaagtgaaaaagtgcaactgctggagaaagatgggcaaatcgcactggtcactgagcaggaaacgcaaattcagtgagttttgtcaaaataaatgcatttaattgagaaacaacgcgaccaacgagctggaaaaatctttgggttataccatgaaaaaatttcatatagggctactcttttttttctttgccttattacacttttatctgatggcacaatttgttgtcttttaaatgattttattttaaaatttcttaaaagttttaattgtttgctttccattttcactattcccatgccattcatttttcatagatcagacaacaacaaaatgaatgttctctatctgtttgacatcgaatcgcgttacatttcatttttctgctcaatgccttcgccctgtcatatttttacattgggcggtgaaatttatctgcgcaattccgagggagtgcttagcaaattggtagaagagagtgtggagaccaaattggacattctgttgaagaagaatctgttcgatttggccattaggtttggtcgagttttgcgtttccaattgctttttttcattttttaagcattgcgcggcgtggcaaatccgaggaactgctcaaaagcattttcatgaaatacggtgactatttgtataaggtaaagagagttatttttactctcatttttgtgtttattttcagaagggggactttgacaattcgattaagcaatacacaaacactttcggatttgtcgagccgtcgaatgtcatcaaaaaggttttgtttatttttaccaaattgttcatgtcaattgctttctgttgacagtttcttggcggcgctcgaatttcacaactttgtcaatatttggaaggttttttttaatgagaattgccaaatttaagtcccacttgctttagcgttgcatgccaataatttggccactggtcaccacacgactctattaattagtgcttatgttaagcttcacaatgttaggaagttggaagaatggttaaaggacggagctgcacaattcggacccgattttgatgtcgattccgcgataaaggcacctaaatcgaagcgataaaaggccaaagagtacatttttaagctgttacgatccgctgaactttttcacttggcctcaaaattagcagcaaaatccgatcgaccattcacatttttggacattctttgtcaggacactcgcgaatggggaaaagccgtcaaatttataagtgaaaggccgctgtcagtttcatgcgaattactggaaacttatggcccgattttgcttgaacatgtcgaggaacaaaccctcgcgcttatcggacgattgatttggtcggaaggtgagaaggtgttgaatccagttctttatggattaaatttgttagcaaatcggagggttggtgggttttaatgggtacctttttgtgttcacaatcaaccttttttcagtgcaatttttcaaattcaacgtaccgcagaaaaatattatttttaacagattttgcccaaaaaggcgatttatgttttctagaaaattttgctctgaataggaacgcaagcaaattttaatagcattttttacgcgttaaggagtgaaccttaaaaatctgacgaaaatattgacaaataaaccgaaaagaatggaggaactgttcagcgagcttaatttggctggcgaactgaaagacccgcaagtgaggagtcttttgcttgagcaacgcctgaaaactctccaagagagtgccacggttagtgcatttggacgccatactcccaaatggtcattttcattcagaacccttcgaaggcacagttcgcggaattggtctctctggttgattcggcctctccccaccactcccttctcttagcttatcagtacaattgttcgccgttggtcattcacattttgagacttttgaacaggtttaaatcgactttttgcttggcattgaggcctatgcacaaatcgttgtcagttattttaggtccaaaatataaaaatggccactttagattttgagcagcaaatcacattttatatactgactgacaagggaaccacccgaattgtaagtcaaaaatgcatatttattatataccattggatagaaccttgccccatactttgatttttttcacacaccgctaaaattaaaaattcaaaaacaagtcaactctgtcagtccaatggaaataatacaaatgcatttttcggcttaccgttcgggtggttcccttgcaagtttcaagttattccaagttaagcagtttgggtgtaattagtattctaatttccttgaccagcccatttaaaaagattttgggcatgggagtaatgtctgggcgcaaatgtttatttgttgttttcacacaaaggatcgaagaactcttccgttatttgctcactgagggcgacgtggtggcagcgatcgaattgtgtgaaggcaaatcactcgaggacatgtgggtcgaactgatcagtttcggaacgaagagcaaaagcgccacaaaaaaagaggatttgatcgcgcttctacgaaagttgcagagatttgcttcttttattaatttttacaatttcagaatttcggaatccgactctttaaaccctttaatcgttttggaaattttgtctcgggacgagtcgctccaagtgggcgatattcgcgagtttatcatcggatggttggaacgacagaacgagtcactcaaggacaatgaacacagaatcgcggagcaagagcgtcaattgcaaaaaatgagcaaagaaattgcggacctcgagaataagttgcttttcggggtaaaaggcggaagggaaagaaagggttgtcaattttccatgacaattcgtcatcggcggtgct

SEQ ID NO: 46732 - DNA, 907 bp, Heterodera glycines
atgccgaaggtttgtgcttttcctgttaactctgatttgggcactttttcactattctacaggaagaagtgcccgaaggagttgaccagctgacttattttcgtgagcaatgcgagcataaggttgcccatttgaagtccattttggaggaatgcaacgagcgcgtgcggtccaagccgaagaccactgaaatttgtcacatggttcgatttaagtattatcattacaaaaagaatagacttgcgactttttgattggaatgttgcaaaattgggagacggtcacaaatagagattatctacgggccgggtccgtatacgggtttttagcccgtaacccgtatcgatgtcaaacccgtaacccttacccgtacaattacgatacgggttatttttctgacgttcttctaaggtgaaatggagtaaatttttaaattttgtgcagtcaattcgccaaaacattgaaatttggcggttacttttgtaaaattttctgtgaaaatcgaaaaagcactggtaaatgttggaaaattttatggaattggaaaaaaaaatcaacataaatttttatgttattcaatagcacttcgttgaatttatgaaattctctttcattttttccaattcttaaatttcttaagaaattggtttattcttcaaaattatagatcattttagtgaaaaactgtcagcaaaattcacgaaatcgtttaaaatcgcaaagttgggcattttttctataaaatctttgcactctaattttaaaaatttttcccagcggcgcctaccggcaccgccggactctcctccccatgttcctaaaaagttttttgagaacgcgcgccgcaaaaaaaagtagggtgaaaagtggtcgttaaaaatttttgagcatatttttatttcgtaaa

SEQ ID NO: 46733 - DNA, 966 bp, Heterodera glycines
atgctcggccaaccgatgggtgtttgtgctgagaaaacggttgctgaatttggcttcacgcgtgagcagcaggacgcgtatgcactcgcctcctatgctcgtgcgactcgcgcgtgggcgggcggcgcatttggtgcggaaattgtgccggtgaaagtcaaacagcggaagggcaccgagttaatggtggcagaggacgaagagtatcggcgactaatgcccgacaaagtgccttcgctgcagccggcgtttgtcaaggacggcactggtaccatcacggcggctaacgccagctcattggttagcggttttggcactcaatgttgagcatttttgtaatttttgagtattttcagaatgacggagcggcatcgcttgtgatcgcatcaggccaagttgaaggggcaaaaccgttggctaaggttatcgcctacgccgaggctggcagagcgcccgtcgacttcacagtggcgcccgttgacgcggtcaaaacggtattcttggaaattaaatgcttgaccaacgcccacttttacattcgtttcgacttataaatccattaaatttgatttattaaattacttatagcaatccaaaaagtcttgtttatatttcaaaggaagggttaatgtaaaaattcagttgttacaatcggtgaacatttcgatcgatcaaattgcgcgttgggaggtcaatgaggcgttctccgtcactgccttggctttcattcgtcagctcgacttggacccggcacgggtaaacgcactcggcggagcggtggcgctgggccatcccattggatgttcgggagcacggattgtggtcactttggtgcatcaactcgagtcaggtcagtgtaatacaccgcgaaaaagccaccaaatttattaatcaggggaatttggtatcgctgcaatttgcaacggaggcggagaagcgactgccattcttgtgcaaagaatttga

SEQ ID NO: 46734 - DNA, 949 bp, Heterodera glycines
gccaagcgcagcagcgatgagtcttgtccatcagttcatttcggtctgcccgggtgcctttcctttttgttttccatttggtgcctctctctcctttcgaaattcgaatgccgttgtcccttttaggcgtgttttgggccgtgccgattcgtcctccgcccatgccgcaccccctccctgcgccaccggtggcaactcgcgcactaagcgtttgttcggccgtcagctccgtggcacaatgccaccgcaggtgaagcagaaaataattcaaagggcacagaaaggaaagcattgcttgttcagcccgttctgacgatgatcgaccatttgctgttgtacggctcggagacggagggaattttccgcaaatcgcccaaacagcaaacggtgcgcatccttcgccagcagttggaccaggtcattctttggcatttcccccctcccctctcacctcccccttttttcagggccaagtccctgacttccatcagttcaatgttcacgtgaccgcctcgctgttgaaggagtatttgcgctgtatcccgggtcagctgctcatttccggcaattaccgcctttggatggaagcgaatggggacggactaagcgacgaacagcgcatttgccggtgccgaaaactgctcacaatgctccctcccgcgcacacagtgctggtgagacggaggccaacgaaggaaaattggggggagggcgacttttggaaattggggaggtgacggaaaacactcgaaagatgccatggaattgggggggggggaaggactgaaaaatgccaagacggacggcattattgcactcatttgatgtttctttttcagttgcgctctgtcctccgtttgttgcgtcgcgtggctgccaacgaagaacacacaaaaatgggcaccaacgctttggcggtgtgtgtggcgccgagtctgcttgagaaact

SEQ ID NO: 46735 - DNA, 798 bp, Heterodera glycines
atgtatgccgatgatgttaaattatattatgcccatgaaaatgatgataaaacaaatcatttagataaagcaaatgaagctttggaaaaatggtcaaaaataaatgggttagaaatttcaaatgggaaatgtgtttttctttatttagggaaaaataatatgaaaaaagattatttaattaactcaaaaaagatttcagaatcggataatgttcgtgacctaggcattataattgactcgaaactgcatttttcagaacatattaacaaaattgtacgaaacgcttatcttagagttttccagattttaagagtcttaaaaaccagggaaataaagactctaacaacagcttataaaacttttgtccgacctcaattagaatacgctaccgaagtgtggaacccaaatttaaaaaaagacattgacaaaattgaacgggttcaaaaatttttcacaagaaaagcatttagaaaatgtggttttttgtacaaaaaatataaggaaagactaaaaatcactgatttacacaaattagaagaaagaagaaaaatcaatgatttaacaacagcttttaaaattataaaagggttcaccagcctcgatgctgaaaaaagtttctttttctcggaaaggcccaggaggcctttacttttgcgagtaaagcgccacacggccaaaactcaaaataattttttcaatagaatagtaaaaagctggaataaccttccagtggtagcggtgcaaattaataaggcaaaggaattcaggggtttactaaaagcaatgagttctgagtag

SEQ ID NO: 46736 - DNA, 2101 bp, Heterodera glycines
atgcagaaccagtgggattggatactgaacctgaacaagtgcctggagggccacctgcgcgacgcgtgcaatgccaaggcttttgtggaggagtcggagcaggtggagcagcagatgcaaaaacaattggtcagtttggcgtggcgtatgactgcatagggggaggggggtactgtttgtttccggctcaggaattttcgaaattacgaaattatttaaattttttaaatgttaaaaaatgattatttaattttttagaaaataaaaattattattacaagacttcccttctttcaattaaccatctagaatttccaggaaaataaaaatggtttttatttattttttttgaaatatcttttggtgagtttttttattgattgaaaaactaagcccatggaaatctcaacacgcttttggctctattcctgaccgctccaactgttttcaaatcttcattaagctggctatacgagaaaatgccaaaatccaaatcattcgaatgccaaagttgttgttggcatgcatttttttagtatgccaccactaattttggcacacattttttgggacgggggagggggagtggaccattaatgctgcgcttctgaacgttaattaaaggccatgccatatattcaggcttccttcccatcggtggtgttcggcattcctccgcctgacccgcggttggcctcgttcctcagccgactgcacaaccaattcgagaagttgcgcaaattgtgggaccgcacccatcatttggtgggtgttgtacaaatggggaggcaattaagggtcattagcgacggttatcaaactacgtaaatatcaccgaattagcttcgtgaccaccaaatatagtattgtataaatcctcttttgaccgtatacatctcagcacaattattctctgtcagtctcctcatccccgacattacaatcctactgtatcaaatccgctccgattgcttttccaattcttactgtatttgtctgtttacaggtccgttacaacatggtgctgaacacaatgcgcacagtgcgtgcatgggacttggacactttcctgtgtattctatccgatcaacgggacgagatcatcaaaacattgaatgaggacgtgaacaagctgctgtcagagatggaccccaacgatcccttggccaagcggctcaaggacgagctgcggatgaccaacgaacacttctacgatttgttggcacgagctcagaaagagccgggtaattaatgcctgactaattgggaattaattgattcattttttgccattgatttggtcgtttttgtgatgcgttaggaccagttgattgcgaattatttggcacataagtgattcagacaaaattgatttactacgagtaatagaccatttctgattaagcgagtaattaacacagctcaagctaataatcaaattaattaattatcgaacgcacttttttgactagtaaacataaccaaaacctaatgaactgatcagcgatcactttttccattccatttgaacttgccatgatctgtgtattgaatcagatctgatcgtgatcactcccgtccttttctgatcactatcaccctctctcttttcagagcccgactactccaaccagttcgatgcggcatgtgccgagttgttgtgcaagttcaaggagggcgggaagcagctgaaccaccgggtgcagaaacgaatggccaccaatgtgcgacgcttttccttccgtcgatcgtgtgccatccttttgtttctttttctgcttgtgtgcaagtttccgcacacaaacagtagagaaataacaattgaatatggcatgtgttggatcgaacggaatacggagacacgaaccgggatgtgcccttcgacaccaacaccgacgaccagcgacagcacaacaccgacgaccagcgacagcacaaccacaaccaccacaatgaccaccactccgccaacaaccacccaaaaaaaacaacctgacgatggaaaaaagccaaaaaagtcggatttttggaccgtgaacaagatcatttccatcggtgttccgctctgcatcctcgttctgcttgctctttcggcgccttg

SEQ ID NO: 46737 - DNA, 155 bp, Heterodera glycines; identical to SEQ ID NO: 43381

SEQ ID NO: 46738 - DNA, 1239 bp, Heterodera glycines
cttttgctgcgcggcgggaaaggacgcgcggtgattttgccgttgggtcgccttggacggttccattgcgcacctttttggcgcaaaatttggcgaagtagtactcttctggccagaggtgagatgataaatgggccattagccaaaagaaatctcaagcaacgcgaaagcattcgcagatattccattcggagtacgagcccaaacggaagattttcccacgagagacggccacaagcgaagagttggtttccttctggcgcgacaatgccattccgttggttggccaaatgacccgtgccaattcggccacgcggtaccaccgccgcccattggtaaaagcaccaaaaaatcatttgctgtcccaattggacattcgcaggtggccgtttattacaacgtcgacttctccttggcctacagagatgggacgcaattttggcagaagaaagtgttggccattgccaaaaaggtgaccgccaaatgccatttgtggccaaacaaatactcaccgacgaatttcagtacagcaaacaaaattatcattttgcggtggccgatgaggaggagttttcaactgaattaaatgcggttggcctcggcaccagtggacttgaacaaaatgtcattgtttttggggtggacggcaaaaagtatccgatggacccggaaaaatacgacgagaatttggaggagaatttggccaatttcctagaggacattggcaaaggtgaacagcagatgaacaagcgaaaagcactgcgtccgtttaggcaaggtgaagccatttgtcaagtcgcagcccgtgccaaaaggcgacaaaaagggggcgccggtgcgaattttggtggcggaaaatttcgcaaaaattgtgaacgacgaggccaacgatgcgctggtcgaattttacgccccgtggtcggttcagcaatcgaaaaacattttaaataggcaaaaaactttaaaaggtgcggtcactgcaaagcatttgagccaaagtacaaacaattcgcgaccaaacactccaaagaggagccgaatttaatcgtggccaaattcgatgcgagcgaaaatgacgtgcccgagggatatgccgtcgaaggatttccaacgatttattttgtgccttccgggaaaaaggacaagccgataaagtacggcggaaacagagacttggaggatctggccaagttcgtgaagaagcatgcggtggcgagtttcaagaagcaagaaaatagg

SEQ ID NO: 46739 - DNA, 2470 bp, Heterodera glycines
atgccaccagatattactccgccgccaactttggaggacaatttggacgacaaatttcagatgaagtgcttggaaaacaaattgagaattatctgtgtttaattttcaggcttgaagacaggacaaaagtcagtggtggtgaaacaagcgaagatgaaattgctgacttttctggcaatgaaatatcttcccgctcctccgaggatccaatgttttggacagcggacgacgaatgcaacttttttaagacattgagtgcattaaaagaacgcgacccaaaaatttacgagcaaaatgcgaacttttttgatgaggaaaatcagaatacaaaaacttacaggtttaagactccggtaaattatttatgccttttgtttcagcgatgcattccaagacattgaggcaaaaaaggggcggaaaacccaacaaaaaatgactcttcgggattacgaacggaaattggtggttgaacgcggcggagagtttagcgaaagtgacgaagaaatgaacatgccaggtccgtcctcttcgccctcgtattttgaccagcaacagcagcttaagaaagcgtaagtcgactttaagaatagtttattcttttccattcatttaatcgtaaaatttagtttcaaaagtgcactcgccgactctgatgacagcggaacggaagaattgctaaggaaacgcgagaaaagtgaacaggaaaaagtgagattgttccaacccaatttacggtgtcatttcgatttttaggtaaaagagcgggaagacttttacgaatggctcaggaacgaaggggcggaggaaagcggggcgatcatcgacaaggatttggtcagttctcactcatttttttgttgttgttaaagtttcctttttaggtcaaattgaaaaaacgatggtccgccagcggaggaaatcaattggacgaagaagaaaagtttttgagggattatctgttgaaccgaaattatgaaaacgatgaggaggaggaagaagaagagggcatcggaggggaaaggtaagggaaaaagccgaattctgttcaatatcaatctgcgaatttctcaacctgacagagtgcccacctatgaacaaatcattcaggaggaggaggacgaagaaatggccgaccaattcgaacgcaaatacaatttccgttttgaggacccggaccaggaatttgtaagtcttataccatatgcctaatgaccgtatgttaattttatgattttgtttagcttaaacaatacccgcgaactgtgcgcgaatcattgcgaacgaacgaatcgaaacggaaacggcggagagaacggcagaaagaacagcgcaaagaggaagaacagcagcagcggggggtgaaggtggaggaggtggacattccattccgatatcgcactgtgctcccaaattcatttgggctgtcaacggaagaggtcagttagaccaaatccaaagccacgaaatcaatttaaaaaaggatggataatggcacctttataaactaaaagtcgtgccagtgcatacttaaacaaggggtgcgccagggcgaggcccatacgacggacgattggcgcaggggcgtgtgccaggaccaatttgtcgtacgaaggcccccaattttctccggcggcgacattttttttcctttttttgctattcaaatcatttttttgcgaccatttttttttgctattcaaaccaccttttttgaggcgcgctttttaaaaaaattatggggaaccggaaccgtggcgccgctgggaaaatttattgattttggaaatttaaatactggcccggttttttgacgactccaacccctccccctccatccgtctctcgtttatccttggcatggatctatggcattaaattttcccatctctcagattatgaacaccgatgacagaaggctgaatgcttgggctccaattaaaaagctgaatcaataccaatcagaggaggaggaacacaagcaattgatgttcttccaacgaaagtcgcaacacattgaaaaaaagcggaaacttttggaagaaattgatttcgcattgtaagataagataaatagaaatatttacaaaataattaaattaaattgcttaaaatttgcaggccgaaaaaggcgcaaaagtcaaaagcaaaaacagaggaacaaaaagaagacaatgcaaagagagaagaagcaactgaatcaaaagatgaagaagaaaaagcatcaaaaagaaaaattaaacagaaaaagacaaaagttgaaaagaagacgaagaaaaggggccgagtggaggaggacggaacggttgacatcgccgagttgggcatggataggctgagggcgtacggagtgagcacgaagaagttgaaaagagctcacttcagcaagaaaaaggcagcagcagcggagagaaatcaaggggaaaagcagcagaagaaatcagaaagaacttaccaaaatgggacggattga

SEQ ID NO: 46740 - DNA, 766 bp, Heterodera glycines
atgcctttcggatgcattcgaaatgtgaagttggaacagcccatctttggcgccaattatttggctggcgaattggtcgcacagccggacggaaattgggaaggagaagtgaattggaaattgacgttcaatcggggcggatgcatcgaattcggccaagctttgctgaaaaccagcgaaatgggtcggttcaatactttaaagcttttccgtaacgtttgataattggcactcattaagccaataacttttgtcctcggcccgcaaatgcgccgccgccgtacgctccgccgcctggcgcttattactcaccaccacccgcttattattggagcggaggccaattcaacggataccaggcgccggtccacgcgtttccagaccaaccgccgcgtaaatccatctattttgagttatgataaatgtccccttttcaagcggaaagtgtgttcatgtacgagcaaccacctccatatgcggggattgggccaattcgtggtcaaaatccggttccatacccgtcgaatacgcccatgtatccgccacaacagcaagttcagagcgaagttggtagttttttttctaatggatttttttccttatttcattagcctctaccaaccaacactccttccgctccaccagcgttttatccgtcttccagtggcaatggcatcgccaattttgctccctacccggctgctccattgccgtcgtacaaccaggcaaccgaattgccacagaaaccaaaggtcgagtgaaatga

SEQ ID NO: 46741 - DNA, 1321 bp, Heterodera glycines
atgggacaagtactcgaagtaacgaaggacaaagctgtcgttcaggtaaatgcgaatttaacaaattattattccattggtgaaagttaaggtgtttgaaggtacgtcaggtatcgatgcaaaaaacacaatttgcgagttcactggcgatattatgagaacacccgtttccgaggatatgcttggaagaatattcaatggatccggcacacccatcgacaaagggcccaatgttttggcggaggattacttggacatcgatggacaggttttaaaggcgtaattaatttgcaaattgatatgacctttaatgttttagcctatcaacccatggtccagaatttatcccgaagaaatgattcagaccggcatttccgcaattgatgttatgaatagtatcgccaggggacagaaaatcccaattttttctgctgcaggtcttccgcataatgaggtgactaaatggtgtcgacctgtgcaattctttccccattgtcagatcgctgctcaaattgtacgccaagggggcctcgtcaaacagccgaacagaaagaaggaaaatgaggtggagggtgacgacgactttgccattgtgtttgctgcaatgggtgtcaacatggagacagcgcgctttttcaaacaagactttgaagaaaacggttccatggaaaatgtgtgccttttccttaacttggctaatgacccaacgtaatttaatgtatggtaattcacgcatacataaaaaaattatagcatcgaacggatcatcacaccacgactcgcgctgacttgtgcagaatttctggcttaccaatgccaaaaacacgtcttggtaaggaggaaattacctttaaagaatagctttgtaaacacaatctcggataagaattatttagtgtttcgattgttttttaatgcttttgtattcgttaaggttgtgctcactgacatgtcttattacgctgaagcacttcgcgaagtgtccgccgcccgagaggaagtgcccggtcgtcgtggttttcccggttacatggtaatctccactagtacattttcatgtattttaactttgtcttgttgttagtacactgacttggccagaatatacgaacgtgccgggcgtgttgaaggccgaaaggggtcaatcacacaaattccaattttgtctatgcctaatgacggtaaaagaataattggtggtaggaattttttatttgaccttttagacatcacccacccaattcccgatttgaccggttacataacggaaggccaaatttatgtggatcgccaacttcacaatcgtcagatttaccctcca

SEQ ID NO: 46742 - DNA, 781 bp, Heterodera glycines
atgctaaaattcaaccgactggcggcattaagcactgatttggaccagatcacctcagccctgaaagattcacatctcatcgacgtgtcggacgataacgtaaaaatccgtcgaaaccccgaagaaccgctacccgaaaacactttggaatattggcaggagattaagcgtcgtaccgtttacttggtaagttaattttatttcaatcacaaaagttataccaaaacattgtaccgctttagaaaggattcccgcaagagagcactttggacgaaattgctaaatttgtaggaaagttcggcgaagtgaaaaacattctgatgcgaaagaccagagggagcaaagaaacgcccaaagtgttcaagggatcagtcttcgccacttttgtggaccaggaacaggcgaaaaaattggcgtcggttaaggacctcaagttcaaggtggttgagctaaaaatcaaatgaaacaaaaagagaaaacgggcatttattgttttaaggacgaatacgcaatggtcaacaaaatgcaggaggattattgggcggaaaaaaacaatgaacgacgacaacagcgggaactgaagaagcaaatgcgaaaggagaccatcgataagcaaaatcagtcgcattttgtcaagggattggtgctgaaacttagcggtctgccaatgcaaagcggggagacgaagaaggaagtgagcgtgcacaaactcaaagagttctttgaaccgtatggccaaccggcgtatgcagtgatcgaaggctcggaggtgactgactga

SEQ ID NO: 46743 - DNA, 3056 bp, Heterodera glycines
atggaagattctcttcttgatgctgagacatttttgtacaaatgttctcatcataatgttgcagcagattctattgaatttcatggcgtaaaaacaacacgaactgatgcattgaagaaggaagtggccgaattatttcgtgcaaataatctgtatgggtttttttctcaattaaattaaattcttccctttttagccaccaactgatacaaaattctggcaaagctgcaattcatatgatggtgggtcatccatccccagatattcgtgtgtaattttacttttgtatggcctcgcaggagatgggtcttttcgaggaatgtcaagcaatgattgacattgcgcctgggattgacaacggagagcagaaatacgtcggtcagttaaattctcaatttttggatgcatcaggccaattcagttaagttcttcgccaaagagctaaagaacgcgttcaaaatgaacataaaaatggaaatgcaaacgtcgggcgaaacggacgctggtctaattgcgaagaaagcagtaaattcaacacgaaatgaccacccaaacgtggtttttttttaacgtcagaacatctttggtcggggcgagacggcggaattgactttttcgaagggattacgaaaggacgggggctacagctttggattttcgggtttggtctggacagaattttgaattgctttggctttctttccgtccatttagcactgaagccactcctcggctggcagcgatatgagaatattggcgcccaaattaacaaacgatcagactttctgaaatggaacaaagctgacacacacgaaagtgctgcttctttcacgtttaacaagtactttccggagtatgcacttatgtcttcattcggcttcaactcggtaaagcgctgaggtcgaatggcgcggggttaattcatcagtttaattttcgtaaaattttctttcagaattggcgctcttttttggctcgcagtgacacgcctttcccaattcgagaacactccggacacacaaccaaattctcgtttgattacactcttttgtcggatggacgagaccggcccattttgccaacgaaagggtcgttgttcaaactgcgggcggagtacgcgccgggagcagtcggcgattcggcatttttgaagggcattttcgattttcaggtgcagtaagtaacccacttctcctgatttccccttactttcgttcctttttcagactgccgcccccctccccggtggccttttctgcggcgcgtcgtttcgcctcggcgttgtccatccggtggccaaccgcggcattcatttgctcgaccgcctttacctcggaggaccgtttgatgtgcgtgggtacgaactgaattcaatcggagcgacaaaggaaagtggcgcacttggagggtcgacactgctcgtaagtgaaagacgaaatgcaatttcaatgtgggttaagcattatttgttttgggattttgattgcgttttagcaaatattttgcattttaagagcaccgctgttcatctttatgctccgctgattcccaaggatatggtaggtgaagtttctttttcttaattcattcttcataaaaaagggggaggagggtcgccggcgaaggggaaaagagaagaattttcaatttttgacacagaagagtttcaggtttcatttaaaattcgcggcgcatatgttgtcgattaattttggctctattgaagtttacacaaccataaaataatttgacagtttaatgcaccattttttctaaaaacacccaattaacatttttgatattatttgatagcccaagtcctctatttcagttttttgctcatttcttcgtcaccgctggctctctgtcgccaatgcgctccaaacaccgactttatgacctttgggagttgcagcgcgtttccgccggccttgggctggctgtgaatctcatgaacatggtcaggctggagttgaactacacttttccgctccgaaaactccctggcgatgtttgctttcccggcattcaaatcggtgccggactgaatttcatgtaaccagaaaactgcaagagatttgttttaggctcaaaaaacaaaaaactgaatttttttacaaaattgcaaatgttttgttcacttttctttttgtttcatttgcatttggttttgtttttattgataaacaatttataattcaaaaaaataaaaagtttaaaataggtaattcttaaatttactttaaaaatcccttttcacttttacatcgttttattttgtttggattttacgatggctgccattcgaaaaacactaaattttgtgagtggaaataaacagaagttgcttgagcttcgtcttctgctcggagacgaatttgaggttggatggcaatggatagtaatcatttgctttctaatcacaaatccatggcatagattgctccgttggacattgaccttcccgaactgcaaggtgaccctgcggacataaccaaggcaaagtgtgccaaagcggtggacgccaccggtggcactttgaaagtaatcgttgaggacacggcactctgtttcaacgcattggacggactgccgggcccatacgtaaggaaagtgggctcaaatgtttatcagcgacgactttaggtcaaatggtttctcgcgaagttaaagccggagggattgcatcggttgttgggtgagcggaattgaaaatcaaattttaattgttttttttgtaatttagctggctacaacgacaagtcagcttattctctgtgcactgtggcctattcagagggaaaagacaagcccatccatctttttactgggacaacaaatggacaaattgttgagccgcgagggtcgcgcgagttcggatgggacccatgcttccaagtgaattaatgcttattcaaattaatggtttttatattcatcctttagcccgatggatttcaaaaaacatttgcagaaatgaccaaggaagaaaagaatcaaatatcgcacagagcgatcgcattagggaaattgagagaatttttgcaaaatgagaa

SEQ ID NO: 46744 - DNA, 323 bp, Heterodera glycines
atgccaccaaagtttgacccaactgagatcaagatcggtatcctgatttggcttttttaacatttaacatgaaaatttagtttacctgcgttgtgtcggtggtgaaattggtgcaacttctgcgcttgcacccaaagttgggcccctcggattggtctgtgcattatttgaaattgtttaaaacccaatatttagtcgcccaaaaaaatcggcgaagacattgcaaaagccacccaggattggaaaggactgaaggtgacgtgcaagctgacgattcaggttcgaagaccatgccaattcaattttaactaagttaccgacgt

SEQ ID NO: 46745 - DNA, 818 bp, Heterodera glycines
catgctatcgccaatcccagtctttatgtgctgaaaccgcaaaatgaaggcggaggacacaattattttgatgatgaactcaaacaaaagctgctacaattcacgcgcgaagagcgagcagcacacacactgatgcaacgaatttggccggtgacagcgaaggtaataaaatggggaaacccagcagtaatcaattaatgaacaaattcgatgcttgaacgtttactcaaaacccataaaaagggctaaaccattttggaaacttaacgaaatttgttgaaattgtgtaggatggtaaataacattaaggacaacctgagaatttcttgaattaaaaattttgttgctttttagcaaagcaataaacaaaaagttttaatagttttttgcctaacatcatagcatcaatatttctatcaattattttgggacttacaaattaggattcaaactattgaaaatctgcgcaatttcattaaaatgtgcgcacattttgcagaatttcatggtccgtcccatggaggaggccgtgttggatgacacaatcgtcgagttgggtatgttcggctacctgctgggtgacaaacgtgacagaagcattgtgcgcaacaaacagcgcggctacctcgtccgcactaaaccggcgtcgtcagcggagggcggaattagcgccggaggcgtttacgactcgctgaatttgttctgagggagagtaaccaaactaatcattattttggatacctacagtattatatgatatgatgcgatatatgtttgtcattatgtctcttggtaaatatggtttataataccaacaa

SEQ ID NO: 46746 - DNA, 1608 bp, Heterodera glycines; identical to SEQ ID NO: 43627
  unsure (1)..(1608): unsure at all n locations

SEQ ID NO: 46747 - DNA, 384 bp, Heterodera glycines
atgacacgttttgcattattattggcttgtgcattagacaagcttggccacagaacgctgaagaagggccaagcgctttcggcgtccgcagccgcaaccgcagccaccgccgccgccaccaccgcacccaccgccacaaccaccgccgccgccaccaccgctggggcctccgcaactgacaccaagcgtgatgcttccgcctccacttccaccaccgcaaccgcctccgccaccaccgcatcctccaccgcctccgcagccgccgccacatcctccaccgcatccgcccccgcaaccgcctcctccaccgccacatcccccgccgcaacctccgccagaacctcctccgcctccacatcctccaccactgggagctgcgcttga

SEQ ID NO: 46748 - DNA, 1645 bp, Heterodera glycines
atgtttgacagagcgaatgcttttgttatttatcatacagtttcaactgctttggaaagggaagtggaaaagaaacgtcgaaatgaggcactttctgaggcctgcaaagacgaggagattgttttgctggagggcagcacttctaaagaagagaaagctgaggcgtcaaagtctcctaacaacacagaattgcgctcaaattttaaagcattggtccacaattttgaggtaagtaatattccctgaattcgtcccatattattgcattctctatgatttagcctttcattgcgtttgcccactttgatataaacatttgcgggtttgtaaattatacacaaaataacatttatgggtttgtagattatacaccttatatgctgtttttttaagatatattattgacaaagacttggaggacataattttctcaattgggcttgatgtttcaagatgggatgtgcaacgcctggtaaaaaagttactgtccaaggaacgcatcaattatcgtgacctcaccgacaaatgggtggacaaggaggtttttggtagcaaaatggcaaattaaaatcattcattcttacagggaaaagtgcgatatgttccacttccttcgtatgaaaatattttccaaagtttttccgaacacgcaaaaggtgggattaagaaatcgcacttaaaaattttattaattgtcaggtcacaaaacatctggcgatctttttaacagttcttcgcagaatattaatgaaatgtccgatccaaaactcattagcgaatcggaatttgcttatttcgaaggtgtttttggagtttgtatttgttacgaaaaacattttaggctcgttgattaacattaaacagagtattgagcgacaatacgcactggaaaaagagcgacaagaaacagtggaccaaaacgagaagctgaccctccaacttagtgagtttctaagcagatggtcaaaatgttcagaaaatttattttttgaacttttctgggcataacttttttgatacacaatgaatttctgaaattttgcaagctaataaaggacatttgggttatcgaatagaaaaagatatagcgcattaaagttgtcaaattattttatggtcatgttaactgtaatagagtccaaataatttgtttgttaaacgggtacttatcttattttttttagacaacattaatgagcagcgagaacatctggaaaagaaaaagcgacgactcgaagatgacgttgatcgttacaaaaagaaattatacgacagtgaaaagctgctgaaggttcgataaatcttagtcgcccattcctagaaaaaaactcgaggggggggagtcttaagagcgcatgccaagtcgggaatacaattcatgtaattttaatttaagaaggagcaggaggacaattcgtccatgaagacttctttattggattgtaagcgctacggggagagaatggtcgccgttgttgagaaagtattgcccccgccatcgaaaaaggaagaaaaagaaaagtcgtcgggatcggacaaaaatggaacgagcggaaaagaaaaggacaacgaagttgcgaatttgaataccgaagacggtgtggagaagggagacgaacaacaacaaaaggtggcattggcatag

SEQ ID NO: 46749 - DNA, 1513 bp, Heterodera glycines
gcggctgcttgtggcactgaacatgttcttctgttgaccgatgacggccgtcttttcagttgggggattaaccgatttggacagtgcggaaacggcacggaagagccgatccatgcgccaattgtatgcctcttggaaaaagaccgaatttgaaaattgccaggaaataattggcaaatggggccgcattgtcagcatttgcgcgggtcattaccattcgggatttatctctgaaaaggacgagatttacctttggggctggggactgtacggacagctcggaaatggcagaaccgccaatctgaaacgacccgcgaagagtcgtccattcagtgctttgaattgtgtcaagaagctttggtacaaaaaacatttccattgcttcaatgtgccattctcccccccccccccctctcagtctcggctattcccactctttggcactcctcgccgatgggcgtgtctttggctgcggtgcgttctctcatggccaactcggcatcgaccctcacaatttggaagggtgcccaacgaaggccttggcccccgtccaattgccatttccaatgccaatttctctgatcgcttcaagtagtatctttactaaccatgactgatgaggacttgttttagaatatttccatggtattgctttgggcgtggaccatttgaggagaaaagtgctgtttgagtggggcgactccccccaatctttgaaaatgaacgcatttctgcaaaagcgtctcaaattgaaacagaaaagtaaacatttgtttaaaaaagtgccgaacaaaaataaatttagaagcaaaagacaaaaatttgaaaatggatggacaagaaaatccgccgacggcggagagaaaaggcgaagcgaaagtggcgaccattgcgatagacgaattggaacgagtccatttcaacattcggacagtttgcgaatggaatggcgcggcagtgaaggcgcttagtgccgggtaaaaaacaaaggcccggggtattctccgattggccattgcttcagattcaaccactccgctctgctgacttcggatggccaactgttcacttggggaaagtccttggaaatgcaattgggccatcagaacagaaaggaaaagggcacaccgaccaaagtcgatgtgcccgaaactgttcggtggtccgaagtcgtttgtggttggtccgcatggacttccccccccccaaaaaaaaggcccttttcagcccgcaatttcaccactgccatttcggtcgaaggcaaagtttttgtttggggtcgaaacgacaaattccaattgggacttgggaaaacaacgaagaaagggacggcatgccaaattcggacgattgcgcttaaatcggacaagggaaatgcgcaacggagcgtggagttgccggtggacaattgcgtcgagagtccgacgatttacacggactgcgggcatttgtggaaagcgaaacgcaacgtgaagggaagtgctgacgagggactgaagacattgatggttta

SEQ ID NO: 46750 - DNA, 438 bp, Heterodera glycines
atggggcaacatccagaagacatcgcaacaattccagcacgtgagctgcacctcaacgcgccattcaacatccggaccatctacaacttccgcgtacgtttgtcggtttgggaggctttctctgctaattgatcaatcattgtgcaatttcagctgatcaacacgggctcaaagcgcattgggttcgccttcaagacgacgaagccgaagcgcatcttcctgaacccgccgtgcggcaccgtgggcgtcggcgacaccgtgaacgtgatcatcaccgtggcaaccttcgacccgaataacgaggacatcaagaacgaccgcgtgatcgtggaatggtgcaacacgcccggcccgtctgacaccgtgttcaagctggagtggttcggcgaggatggaatggtgcgccgcaagaatctgccggtcatctacaacctgtag

SEQ ID NO: 46751 - DNA, 1144 bp, Heterodera glycines
atgatcagcaatgttgagattgacattgagctcgccctgcagtcggacgattttatgatacatcaggaagccgcaaatagggacaagtacacgcttgaagttgtcgactgcaggctgatagtgaagacggttgatctgatggacggactcagccttgacattgcaaagaagttggacctggagcccgccagatacggcatccggaatacgctgatgaagtcgctgttcattaccggtggacgatacgatttttctgccaatctgttcaccgaggaagtgccacggagggtcatcattgggctggtgcccaaccaaaattacattggacacaatcagaagaaccccttttacttcaaccaccacaacgtaagtgccgctttgacatgtatttctggcagaaaaaatgttcaggtgcgggatattgaactgaccgcctctggcaggacgtacccacagtttccgtacaacttggactacaagaacaacaggtacgcaagggcgtaccatgacacccaggagcaccttggcatggcctgtacaactgagagcaacgggatcagctacagcatgttcaagactgcctactgcctctatgtcttccaaatgaccaatgcgcaggaggactcgccgggctttgagctgatcaaggagggctgtacagcggtgaacattcggttttccgaagcggttccgaacgagggggtcactttaatagcctatgccgaggctgacgggctcattctgattgaccggaacagatcaatcactagtgaccttacagtatgaatggtgagaattattcctccgattttgttcaaatgccctcctccaatgctgcacacgaagggattgtactgtgttttccggatgtgatcgagaagtcgccaatcaacttttttctctgcctcatctacctgtttggtgcagcaggtactgcggctgcgggattttacctgtttttgagggagaggcggattcgtcgcaggaatggacaatcggttcatcgacagagctctctttgagaaccgggcgacgagaaaatattttgttggcacttttccggccgaccgattgccaaagtgcacgaaatttccctgcagtctaattgtcaatttggtgagtgccaaaaaatagattaaataaa

SEQ ID NO: 46752 - DNA, 428 bp, Heterodera glycines
aacgaaatgcctttggctgaagatttgttgtatcctgatccgcaaaaggaacgtcaaaagcacaagctcaaaagactcgtgcaacatccaaattctttcgtatgcattattataaataaattaaatactgtcatcccttttttaagtttatggacgtcaaatgccctggttgctataagattactacagtgttcagccatgctcaaactgttgtggtatcgatttattcttgccaaataatttagtgatttaatgagctaagcaaatgaatagtgcacactaagaccggtcataaatgagctgtgttttgtagaaatttgcatacatttctaatttaggtctgtgttggttgcagtacagttttgtgtcagccgaccggcgggaaggcgcgacttgtcgaagggtgttcgttccgaacggaagggcac

SEQ ID NO: 46753 - DNA, 1892 bp, Heterodera glycines
aaatactacccgccggactttgacccggccaaaattccaaaggccaaacagccacggaaccgtcagttcatccaacgtgtgatgacaccgttcaacatgcggtgcaacacttgcaatgagtacatttacaagggcaagaagttcaacatgcgacgcgagacagccgagggagagaactatttgggcttgaagatcttccgcttctatttcaggtttatttttacaatttttaactgtatttctggcttggagtcattttgtggtcttacaatgaatcacaatcattaaattacagcgtttttcacggattttgtataccaaattttgtacacaaaagttgtttggtcataagacgaatccgtgtgtcgtgttttaaggtgtcagaattggtcctgttttatgcaatttgcaatcttcgagtacatgaaacaacaattaaaatcataaaattacgttccttttgactcatccaactgttttagatgtccgaattgcttagccgaaataactttcaagacggacattgaaaatgtcgactaccaagcggaacatggcgcaacacggctctttgatgcattcaagttctaccaggagcaggaaaggcgggaggaagtgaaggaagaggaggagaaggcggacgcaatgaaaatgttggagaagcggaccaaaatgagcaaaattgaaatggaggcattaggttagggtttttgaattttttaggtttcccagaaaccgttcccagccaccaaaaatgtcaaaggcatcacaaaagtatatgcaattggtttttaaatcgggaattttcatttgatttgtctgaaattccggatccaatgcttaaaagtgacacaattcaaacccggaaactcgagaaaaattgtttagtcacaccttggtattcaattggttattaaaacgggggattgtcatttaattagtctgatattccgagtccaataaaaataacatcggaacccgaatttttctctaaatttaggacacattgaggagttgcaggagtcgaaccgtcgctatgagaagattgacgcaattgcatacatcaacgagacggagcagcaacgggcgatgtcatttgcggaccaaattcgtgtgcaggaggaggaggacgagcgtgaagtggaacgactggttgggcgggcaaacggtggtaaaattgagcgccgattaaacgatgacgaggcggtggagcaggaaaaggcggagaattgtccaactacatcgtcaagaaaaaataggcaggcggcgattttaagcggaattattttgaagaaaaaaaagtgattcgtccggatttttttttaatttttttatttgatgcataaattgatcattttttcctacaatcgtttttcatccattgtttttacagtctgatgctgtgtcattaatattttgcatatttgatttatgtttttattttcaaactgtttttgcagccatttgcgaatttattcaaaataagggaaaatggtcgaagccgccgaacaatcgcaacaacagcccatccgtcgccgtgccggaccgaagtcggcacgtcgcctttatgtgaaggcggtgtttaccgggtacaaacgcggacaccgttctcagcacgagaacacgtccctgctgaagcttgacggggtcaatgacaaggtttctgtttgcattaatttggaattgctatgcttgtagttttagtagtagtgagtgaaagttatttcattttgtgttttattttatttatttattttggtccctgaatacaaatgttaattttcatgttggaccgaaatccgcgaaagattagccccctttcttgactattttctgttcacgcatttattccaaatttttcggcgcttcaattagatagttgtaagtgcaataaa

SEQ ID NO: 46754 - DNA, 3774 bp, Heterodera glycines
atgccacccatttcatcaaattccttttatgttgttgtcccttccaacactaacgttgatggaaatcgaaccaactccttccgtgtgcgtctgccgcgaaaattacaatttaatgcggaatgggatgtggggctagcaaccatcatatatccccactcatggccatccttgggcaccactgaggaacaattcatagaactggaatggcaaactgaaaatattgttcgcattccggtcccttcttccaacattatacgcccttatgagttgagcaaaagtttgtacagtctcctggatattagcagtgagcatctgtcaaaccaggttcacgacgctcagcaaagctataaagaagcgatgaacgcagcacgtaaactggcacagaaagaatatgtaaaaatgaaaagtgacgataaaaagaggagaccgaagagaaaaataattgaccagaatgaagctcttccactcttgtccgcacttctgattgctattgacactattgacgatgctcttattagtaatgaggacggtactataaaccctgaaatggttgccggtgctttgcttgatcgcgagaagcgagcagcaaccagcaatgtgcctttgcgagaagagagtgatagcgaagaagaatatcaaagaaaattggataacttttttttgaaaatgagagattcagatgatcttctacttttccaaaacctaattgccaaacatttggaggtggagctgaacaaactgagcaaagatgagcagtcgcttaacaaatctattaaggaccttggaatggaagcatggatacaggcttacaagaaagtgagtagtgtagtgcaattcatttttgatgtccgtcataatcgttttactttggcaatcaacacaaaattcattaaacgggttaaactttcagaacaattagcatatatccttggttttgcgccccaaactcagttcaaaaaagataaaaatccagcaaaattcatgccggatatgagtgggggagtgtccacacttcatgtctacatacccgatttgattgagccaatgatgattggaaatgtcatcgcccccatactgcgcattacaataatccgtggtaaccccgatgaggtgattgaggaacaattttactcagttcaatatcatcgtgttttgctcaaagaagtttcagaaattttcgtagaaataagaacgtcaagcggagcactaatgccatttcaatacggaacgtgtacattaacactacactttcgaaagtcttcatatttttgaaaaatcctggtaaaaaaaacaataatgaacagtattgatctgaataaaattctgtcaagaaatccggtcacaaaatatgcatatctcggttgttttccggctgataaaatagttttcaatccaagtgtgggtttgttcccccgctgttttgttgccaacattgatcccagtgatttaattgggtcacactgggtagcattctattgtgaatcggtcggaactgtagactattatgattccagtggtgtttggcccccgagcagcgaacatattagaacttttctgtcaaaattctcatctattcgctatagccgtgccccattacaatcaccttacgctcgctcttgtggtaaacatgccatatttttcctacaccatagatgccttcactactcatttgaagaaatcttgcaatatttagttcaatcaaaacaaccccctgacacaattgtcaacacatttacccgagagagaatttttttagaatataaataaactaaaaaacaaagaatttagttactgcaatatttagaataataatgataatgcatattgattttgaccctttaaaggttgaatggtcatcctttccacttaacaattccgcgtcatcactagaattgtcgtcggctcttaatcaatggggaggaggagtaggaagttataatatttttcgtggccaaccataccaacgtgggaatggaattggagcggtgttccgcagtctaatgcgttatttggttccaattgggagggaaattggttcaacaattggtcgtcaaggactagagtcgggcaatcgtgttttatcaaatgttttagagggcaaggacctcaaagaatcattgataagtgagggaaaggttggattgaaaaatttattggaaaaggcggccactaatattaacacccaaaagggaaagggttttgattttaaacgttacaaaacgaaggaagcagaccaaaactctaacagcaataaatttggtgcgataaaattaggtggggaaacgcccaaaaaaggtataaataaactaaaatcaaacattggacctccacaatttctccccaccacacttggtggaaaacaaaagaacaaatcgagcaaaaaaaagaaacgaacgcaaaaagacatttttggtacttattaaccaccattataacattatcgcataaatgagttgctcgcaaaaaataagtgaacaaagcgcattagcagtcaacagtgctctgaatattttttcgactcctccgacaaacgtgtcggttgttcgttcatttttccgtgaagttcttccactcgttaccattacccaagaatcaccatatttgttcaggctatacagcgataacttgtggtgtgacctctgccgtatttaccttcaccttgagctgtcgattgaaaaaaataaagatgacaattgggtagatattagcaatgctgatgaagagaatgtgggtgtaatacagggcgttggtcaaacctttattcaacagcttaaagtttcagtaggtaatacagaaatatatgacagcggtaacttgtatccctacaggacatatctaacaaatgcgttgtctttttcgaaaaatgtgaaaaatagttttttaacctccaccggcttttaccatagcgagaaacatgatagtgataaggacaaaggtttcaaagagcgttgtaaacagtttgagggtgggaaaaaggctcaatttctctcgcgtttggattttgatcttggaaatcaggaattgtatctgctcaacaatcttgacctattgttttcaatttataaggcaaaagataattttctcattcaaacgcttaaagcaaatgacactcaagaatacagactgcgtgttcacgatgttaagatttatgccaaaatggtggaagttcaaccatcgttgaacctaaacatttacaagatgcttgaaaaacaaccagcaacctatgctgtgcgtaaaacggaagtaaaatccacttttattagtgccgggcggtatgaggtagaatacaacgcgttcagtgcaacaattcctcgacgattaacaattggaatggtggagaatggggcatttaacggaaactcaaaattggaccctttcaatttcaaacattttgatataagagatattgcggtgcacgcgggcggtttcatatacccaatggtaccgtataagttggctttcaaaaaagatgcatttgtcagagcgtatgttgacttctacgaggcgctaggcatggctaactctgatcgctcatgtgacatcacccgacaacaattcaaaaatggctggacattgtttgtcattccacttacatcaactctggatgacagcgttgggtatgaattgcttagaagtggaacaacaacaatccgtgcaaccttcaactctgcaattccggccggaggggttgaaatgatagtgcttggcgagtttgatcaaatgataatgattgactacaacaggcatatagtttcggactcaaaacttggttga

SEQ ID NO: 46755 - DNA, 1858 bp, Heterodera glycines
atggcagcgcaaaatgatcattctaatgccatctttggaaatgcttcgttttctttcccttcgccggtgcatttggccgaatgcgcgcatttgacagaactgacaaacggaacgaaattgggggaccccaaaatcgtgaattttaattatttatttcttcgagtggataaatattttttagtttgaaggcggtgacttgattatcagcaaaaagatgcagtcgctgatattcacttccttttaccttggcggtttgctgatcattttgcccggcagttttttgtgcgattggttgggccccgctcatttggtcttttacggtgcattactcaacgtttttggtccgtttttacattattcgagctatgaattcatgtctaaaggatacttttcatgcgtcatttctgtccgattaaggcacttttttcacccctttcgttgttcgacatttgggctccgtcgctttgatcgtcgtccgttttctgatgggttgtggccaagtaaataaatcatcggcattatttctcttttgtatcactttctttgtttttgggcattttggtgccgtgtgtcaatgtgctcattgcccattggttccctttgtccgaaaaaagcacgggtaacttaacttatcaagggttttcttgtaactttttttcagcaattgcaatttcgacgaccggcaatcaaatttccgttgtgctcgcaatgtttgtaactgctgaactttgtgtcgtccgatggatcggcggatggacggcttctttttacatttatggtactgccttttaactgccgtatttcttcgattcaacccctaaggggttatttctgaccaacatttcctattttacttacgctttccaagacgtcccttaaacaaatttctaaacaaatcgatattttttccaaaaatacataaaaccgcaacaaaaaaaaaaggtacaaaagcagaaaaaaggtcgtcgcttagggcggtggtacctcctctaaagcaagttcctgggaccgttcctggtctaatcatttcattttaagggctaattggcgtcgctttttgtgctgtttggatgcttttggttcgtgattatccctcccagtccaaatacattcggtccgacgaacttcgactcatcgaattgaatggaggacatgctaacgtttcccaaaaagtccgactgtttgtggacttcatttacttttttaattttctcttgttcagataagtccaaacgaagtgccatggcgtcgcattctatgttcaatggtcgtttggtccaccgggttcagctcgttcagtgagtttacataatacagttggatgaattaattgtgttttattaataatttgaggccaaaactttatgaatgttggcattgtggtgtatttgccgacgtattatcacaatgtccttggcatggatttgacttcagttggtttttctcattttattcactttaaaacggctgactcacaatcagaatgggctgatgtcggcacttcctttcattgttcaactgttcactaagattttgtttgccgctattgctgattggctaaaggtaacaaatttgtgggaaatccgcatttgtttcatcaaattgaccgttcttcaaggaccgtcgtctgatgtcatccacatcagtcaccaaactgtttaatctcatcgccagcttcggttccggcctttgttttgtgttgttgtcgttgtgtgactgtcggacgccctatttggccatctcattagccgtgtgtgcaattggcatcagttctggctttatccccggatacaacacctccgtggttcgaaaaacaagatggagatggcataatcatgaattaccggcccaagactga

SEQ ID NO: 46756 - DNA, 2725 bp, Heterodera glycines
acaattttgccggctgcatccaatgacatttattatcgagatgagatcggcaacatctccacctcaaatgtttatccccgtgccgatcgtgttgaggttgagctccgcccgcgtttcccattgtatggcgggtggcgtacaaattacattttgggttacaacgttccaaggtacgatttttatctggaaagcttaaattttgattatattcagtacgtcctttctccgtcattccggctcgaattttgcgatcaaaatgaaactgatggatcgtctctacgataatgctgttgtggaaaaactgtgtgtcaaaatcatattgcctgaaacgagcaagtacgaaacgagaccagttgtattttcatatttcttggtgaactgaacattgttcatatacacacaagggttgctcacaatcagattgacgaccctacaaatatgaactttattggaaatttttggttttttcttcttaatttataaaggaattgacaatttcccccatttacaacccccccccccttacgacgaattgatgggcttacgacatggggagcgggtgttctgactttccttatgctaatgcttcgtttaacgattaattttcttttaggaacattaagctggtcaccccttactctgtgaagcgtcttcccgacgaggtgcacaaaacgtacttggacacttttggtcgccctgtgattgttcttgaaaaggagaatcttatcaacaaccatatccagcccttcactgtgcgaaatattaacccaaccaatttttatagtcttttaagctttactacgaattcgaccgcttttccatgctgtacgaacctttgcttattgtggtggcatttggcgcattgtttttggctgctgttattcttttccgtcttgactttagcatcgccggcaaggtgggcaaatgagagaaaagaaacaaatgttaaaatacgataatataacctaaatctcaaggacgaaaaggaagccgcaagtggacaccagaaaaaggaatgagcaatttgaactaccttttgttaatttgatataaatattaatttaattatttattttgtttattcttttttgggttttataagtagtgaaataaagattacctattaccaagtttgaatgtggcactggcgaatttacttattacttttgttagtcttatttatgaaggatatgataactctgtttaacttttttattcttcctttttgtagtttttccttttcaggtcaattcgctttcttttcctggatgattcctctttttcccctccggggtcctttctcttcttttccccgcactttccactcaaaatctccgcttcatcagacaaaaacttcgcttttggttggaccggctgttcgccttctgctcggtcattacgacatcaaaacgagcgtgctcagagcatcggggccaaagaaaaacattctcaaaaggtgacttgttttacctaatttgaaccccaattcgcccaaaattgcaatatgtttctattttaatttagcgatgtgctgagtcacataaatgacaaaaaactgtctccgattaaagcattttcggctaagccaccatcaaaaatgtctcttgaaaacgaagtgatctccgcgtcatcacatccgatcattccgctaaaatcatcgggtcggtccgagccgactcatcgccatgtccatgtggacattcaattgtcggaaatgcgtcagaatcaaacaaaacaatttgtgcagtcaagggtacaactttctttgcttattttatttctcatttttaaaattaatgttttcttcagaattcaattccccatgcttatgcgtcggcccaaatttctgccaacaaaatattggaattgctcaataggctttctgaaagggtcgattttaagctgtcgttaaatgattttatcataaaagcgtgctccttgtccctgcgggtattatttgttttgttaaatatttaatttgttaatttcggttttggtctgtccccgagttaaacgtccattggcatggtacttccatccatcgcctttcttccgtggacatttccgttgctttggccaccccaaatggatttgtcactcccgttctgaccaatgttgaccaattgtcgcttcttcaaatttctgctcgacttcgcgaattgacggctcaggcgcgcgatggtcagcttcgcccggaggaatcccaagagggcacatttacgtgagaatatgatgctcaataataataatacatttttaaaaaaagaatttcgagccttgacatattcgattcggtgtccgactttaccgctgtcattaattcgcctcaggcagcaaagtgccattgattacccttttaaattcgaaagtttattttcagcctgacaatcggtgctttaagaaggcactttgaaccagatgaaactacgaaaaagccaaaattggttactaaatttggggccactctttgctacgatgcgcgaacaatcgaaggacaaacggcgcggcgattccttgacagttttaagtataaaaaattatttattaattatatgatgactttttaagaaccgcactgatttctcccgagtctttatttgcggaattggactatttaattgaagacgaagtcgatattagtgaaatggacgatggttcagcgattgaagaaaaaattgacattgggaaagaagacgaggaattggctaaactattgcttagataa

SEQ ID NO: 46757 - DNA, 754 bp, Heterodera glycines
atgaacatgaatcaacttttggttggccgttcgctgttcccaaaaatcatccgccctttctcgcacaccaaaccccttgccaagtctgaggctgacccggatgattacggctacttcccggacccaattgaacactcgtggggtttggagaggaaaatgctcatcgctcgtctgaagggtgacgacgtgagcaaatttttgatttttactattttttgtaaattttaactttttagcgctatgagccgaaggtatatttccgcgctgaacataccacccgggactatccgaatttggtgccggtccatttgcaggacaaagtcgtcgggtgcctttgtaagacagatttaaggcgtaacttttttattacgcattattagtatttattttattaaaattataattatggcgaaggagatcaaagaaagaaggaaacgaactggaagtcatcaatgcttaaaaaagagcatgtaaaccatttttagactaaaaagtgaaaatcggaaaatttgagcttcagattttgttcgaattcggacccggggttcggaattgttcgaaaaggatgccagatacgtgatcagcaaccccgaaaactccggaaaattttcgtggcttttgaaaacaaaaaaatttttttcgaaaaatgggcgggggaccagccttaaactattaccaaatcttttcatcaattattaaatagagtgaaatacgtaccattattaaaaaagcaatctacttccaaagggttaaa

SEQ ID NO: 46758 - DNA, 1389 bp, Heterodera glycines
atgttgtataaaaaagtggatgtgtcaagtgctgaggtggcaaatgcggggctggacttcttcaccatacccccaacgagctgcgctgtgtccaactctagctacagggagtacctgacgctgaacccaataagctctaggccctttcattttaaggtaggtggttttcacatacaatagcagacaaatccgttggttcagatccacccaatcaccagctatgtagaccttagcaaggtgtttgtgtgcacagagttcaagctcaaaaaagtggcagatgacggggttgtggttgatgtgccggcaaacgcagcggtcggccttatccaaatgcccggcgcaacgttcatccggaacctgaaagtgcacatcaaccagcgggaggtgtacgactcaaaccagctgtacagctacaaggtgttcctggacaccgagctcagctaccctgtaacggcaaaggattcatactttggcgtggctggctatttccgtgacagtgacccgaccaaagtaaacgatcgaaggaaaaaggcggtggaggagagcaagggctttcaagcgataagcaagctgagcgccgacatattcaaccaggacttgtacatgatcagcaatgttgagattgacattgagctcgccctgcagtcggacgattttatgatacatcaggaagccgcaaatagggacaagtacacgcttgagattatcgactgcaggctgatagtgaagacggttgatctgatggacggactcagcctagacattgcaaagaagttggacctggagcccgccagatacggcatccggaaaacgctgatgaagtcgctgttcattaccggtggacgatacgatttttctgccaatctgttcaccgaggaagtgccacggagggtcatcattgggctggtgcccaaccaaaattacattgggcacaatcagaagaaccccttttacttcaaccaccacaacgtaagtgccgctttgacatgtatttctggcagaaaaaatgttcaggtgcgggatattgaactgaccgcctctggcaggacatacccacagtttccgtacaacttggactacaagaacaacaggtacgcaagggcgtaccatgacacccaggagcaccttggcatggcctgtacaactgagagcaacgggatcagctacagcatgttcaagactgcctactgcctctatgtcttccaaatgaccaatgcgcaggaggactcgccgggctttgagctgatcaaggagggctgtacagcggtgaacattcggtttgccgaagcggttccgaacgagggggtcactttaatagcctatgccgaggctgacgggctcattctgattgaccggaacagatcaatcactagtgaccttacagtatga

SEQ ID NO: 46759 - DNA, 880 bp, Heterodera glycines
atgacaaagcaatcgaatcaaacgatcaatcatttggccaaccaactgatcaatcacaataatcaatcaatcggtcgatcaaatcctcacaaatctgccgatcaatcaaaactgttcaattcaatcaaagcaaactgtgtggtggcacgaggaaatcgccaaaaaagcaaaaaaggctcccaaacaatgatgaaaaagagggaaagaaaggaaaaggaggaggtggttttctctcagccggttgtttgggtgaaacagaaaaaacgtaattttttgtgtaaaattatgggattgccgggtcgacggtggtacagaattttggccatttctaatttgaatccgtctccatttttcagtcgttctcgctcgcgtgatttgccctcctcacgcggtggtggtggcggcggcggttactacggctcgcgtcgtttccatgacggacgcgacaacccaaatccgaacccatgcttgggcgtgtttggcatgagtttggtcagttgtgtgtgttcaatatttgtgtcagttaattgtgactgattgtgagtctcggggatggggaaacatattgagggaggggcgcaaaattttcttagaaattcattaaaagttgcaaaaacattttttgtgggttggtggcatgcatttttacagcgaacccgaagtttactttttgaagtaaatgcgaattgtttgttggagtgggcgagcgataggccccttaaaatttatttgctttcagcataccacggagcgcgacctgaagcatttgtttggccgttatggcgaggttgattcggtgcaaattgtgtacgaccgtctctcgggacgctcgcggggctttggctttgtctacttcacacacaccaaagacgctgcgagg

SEQ ID NO: 46760 - DNA, 2340 bp, Heterodera glycines
  unsure (1)..(2340): unsure at all n locations
atgtcaagcagtcttgacgtcttcaaactgacggacgatgacgcaatgaaatttttggtgtgcgaatcgcacatcggcaccaaaaagatggacttccaaatggagcattatttgtggaagcgtcgatcagacggtttatcttttcacttttcacacattaaccttaaaactataatgcaaaagcaataccggccgtatgttttatattcaaaattcggatatttttgcatttttacccatgatttttgaaaccttttttatcatgcctatcgtgatttttgaaaccttttttatcatgcctatcgaatcatgcctaaaacaaaaatcttacaaatatgtaagaaacaatcccccttccccgcgttaaggcattcacatcatcaacattcgcaaaacgtgggagaaactgttgttcgccgcccgtgccatcgcggccattgaaaatccgtccgatgttgtggtcgtctctgctcagccgtacgcccaacgcgctgtgctcaaggtttttgcttattccatgctctcagggtcgggctgattgtgattttttatttatttcggtcccttaatacggagcggtaaacccgttacaaatgcattgcatggaaaagtttagtttggttttccaaggtaaaagaaagcacagttgaaacggatccctctttttctccaaaatcgatgccaataatctttctataataactttttcgtcttttttcagttcgccgctcacatcggtgccactccaatcgttggccgttttacgcccggctctttgaccaaccaaatccaaaagaatttcaaggtttacaaattcttttaaaaaccaccaaagaatagggaatgggaagaatcgctgctctgaagttggtttcagaactcatttttataaaagaaaatagccattgtcggtgtcccttccccatttttgaagaaattaatttttgtacgaatatacgcgacagatttataactgatagctcttaatatccatgngtcaatttgttatcttttttaacatatttggcacttcctagggacctttgtttacaacattaaaaaaaattcaattcgtactgccccaaatcgtattattttattatcataatttttctaaagtcaaccaaaataaaatntggtaccatttgatagcctagcccctaaggttcttttttaagggtttttgcggtttctactcacgaatccgggatccatttcgaacaattccaaactccgggtccgaattcgaacaaaaagtcgaaactttacatttttaaactttgtttaagtacatggaagacgaaactcaacattttgttgttttgcaggaaccgcgtctgctcgtggtgtccgacccgtagttggaccaccaggcggtccgtgaggcgtcctacgtgaacacgccggtgattgcggtggccaacacggactcgccgttgaaatttgtggacattgccatcccggcaaacaacaaggttttgtttttttagcaaaactatcccgaaggttgtattgaatttgtgtctttcaaagagttgatagtggccggatgcccgaataatgagcccatacccaaccaaaattgctaaaagctatctcaattatatgtcactgattggattggtaaatttctgataccaccgggccatgaaaacttggtacatatacggtcttggtattactcgaatcggatctatagaacaaaaaatgttttggtaccatattgattgatcgttttaatacctaaatactgtcccaattccaaccccctcccctcacagcaaaagcactccgtcggactgatttggtggctgttggctcgtgaagttttgctgttgcgcggcaaaatcagtcgtcagacgggctttgtggtggacgacaagctgatcatgcccgacctgtacttcttccgtgacccgcaagagcaggagaaggagggcaccgagggtgaggccgaggcggacatcaccgtcaaggagggcggttggggtgcgaccggaggcatggagaccataggcggcgactttccgagttgttccgatttcatgtggcgcgcttgctgcgatctcttcccattctaattggttatcgaccgacaggactaacgtcttcattctttttgcttttgctgcgcgaattttgaacagcaaacttccgactccaaatagttggccacgctcgagtgttgcactgacgacggtgtctgatgagcagaggcgattgcaagccaatccaaatacagcgcaaaacacggccgctgaaccagacggtccatgaacaatgtcgtcgttaggcggttcgattcgcagtgtcacgcggttgttcacaaaaaattggtct

SEQ ID NO: 46761 - DNA, 1223 bp, Heterodera glycines
  unsure (1)..(1223): unsure at all n locations
taaaacaattntaattgcctgtctctgtgttcttngcgaattcgggtcccgactcgggactctntgaaatataccctggaccaccaggcatttatctcatccgtgttgggtttgagatttttcacaattatcaagccctttttacttggtcctaatttcgttcgtctccttatttttttgattctgccaattgttaggctgttgttgtacctctccaatttgacaggtgacagtcgacgcgatggagcgcctgttgaagagttgccatggctcgccgtcgctgaaccaattcattgagggctatttgctgatggtgcaaaggctgctcgagacgaataatgcacatatggaaaagctggcaaccggtcggtgtgtaatttgggcgaaaaattgaaaattcatttctctctcaacaaatttaatttcataatcaaacacaacttctatagtttttcctcggggtcttatccgcttttctccgtcggcacaacgcgggaaattttgattgcaatttaaccaaattcttttaaaaaaaattaaaaagttttgccaccgaaaaattttaaataggttttacaactgaaaattacatctttattaaatttgagaaaatagtaaattattagaaaattgacggttctatgtcagttactcaaaccccaacaaaaagggcgttactcaaaaatacatttgacacttttttaaaatctgtctttttttgcttagatttgtttgagcgcttctccaccattgaggaggactcgccgtcctaccatcgccaatacgactttttcatctccaaattctccgcaatgtgtcatgcacaaaacgatgtgtacgtgagctcacagcgctacaacggattgcgcgggttgagaggtggcctaacaaaaaaaaattctaaaaaattttttgaaaaaatttccaattttttactatttgaaccattcatttttaggtgtcatttggaagtcggcgtccgatgatttgcaggccaacatctgggagaagcagcacatgaacaaaattgtgccctccattctgttcaactttcaacatgacgacgaaagcggtgggcaatataaatcatttaaatgccgtgcagaaaaagttttaactgttttgaaatgtccatgctgcacattccatccttcgcatcatcattttctccctaccaattaaaaaaaaccaagcggtttctagtaaaaaaattgaaaattttt

SEQ ID NO: 46762 - DNA, 2543 bp, Heterodera glycines
atgcctgagcttgtcaggaaaacagtgattttttgctccgtggtgttcactttgatcggcatgggcttatcaattgctgccattttaaccccgtcgtggcaggttgggtttggcgcaatttttaattcaataaattttcattttggtcacttttttcaaaaaaatttccatttttaccccataattctcaggttgtcaatctgcaagagtacaactcggtgcatgagcatggcctttggttggattgcattcggcacatccgggacggaggcggcgttctcctcagacggtcggtcgtcaattttgattaaatgcgctagaaaaactggtctcgagactcttgactgagaaaagtgccgagttccggcattggaaaatttaagctatgcacataataattgtgccatatgaggacaaagtgatccatgccgaaaattttctgataatttaaaaatttatttgaattaaattttgtcaatgcatttagttatgcaacactgaccgagcctctgcattgtgtctacaaatttgattatgacaagtaaattaatcaattttttcggcgtttttgactgcactaaataattctcattttatgttcaaattaaaaataggttaattagtttttttggcgcttttgattggcactaattaattattcatttcacacaaaatgaaaatttattaattttttcggcgcttttcatggtactaattgatatgccaatttaaggtattccggcactttcgacgtggaggatgacaattcgccggttggtgaagtgaaccggcaccgcttctacggatggcacagcgccacactgataatgctggtgaaaaatggaaaattttatcgaaaaatttgaaatttttcaaggccctcgctctgatcaccagcttctgctccatttgtcttggtgcttgtggctgttgttacgcttcaatgtcgttggtgttcacagccactgcactgcttaccagtgatgtttttaaagcagtcccctattttaattagggcctggaataatgaaaaagtcgggattcgggattagaattggcacggataggattactgggattgaaatctctgctttgccgggatttcaagacgcaagacggcataataatgcattgatcacgggtcaatgataaaatgatgcttccgattttggcaaaaaaagtgacacgatcctttggcttatattattacgctccagtcaatttcaaattacttataaaatgagataattataattctaatatttaaatttaaaaatgaatattaaaataaaataaaataatttatcttgcagctttcctttcttctgttgccgaaggcgtgttcttcttcttctcccatcgtgccgacaatcgtttcatcaagggcattgttggcacttatgaggtattaactaatataatacaatatcaaattaaatttgaatttagcaacgtgttggactggccttttttcttcaaatggccgcttgtttcttccattttattgcctttttgatcgccatggtggccacttagtaattaattggatatgcaatacaattataatttattttatttaaatttagaattaaaatttaattacctaattaactgttgttcaaatggccaataaaataaatttataaaatgagaacattcttcagttttgccttcacacgaaaaggcgtcgcattggacagagaacgatattccttgcaaacatcgtcaaaaactaacatgaccaatgtgggaaggtaagagtttgtattttaaataatttttatttaaacaaatatgtttatttaaattaaatatatatttataattcataatttttttacgcaacttttttttgttttatattttcccattttatattttaattttattgtagcctgatatttttctttatttcatttgtttgtatattatgttgttgtcatgccggcgattaccaaaaagtccctgattccaagtgccaattctcgacccttttttgatgggttgaatcccgatcaccgaatgataatacctattatattttctttatttatttgtgtaatatgtttggtgtgcaatattatgtttatcttttctctctttttcattctttgtcacctcaaaatggaacaattttcaaatttccgttttccgtagcaattgtttagtttattattgccgtagaatgaaatagtttgccgaacgcacttttcagttaatattttttaatttatttcaataatttgttataaattgcacaaatttgttttttgcactttttgaccaacaacttttcgtcctaatttggcaacaaaaaaaaaaattgcgaagatggcaatgagttttaataaatttttgagttacacattttattgctccggaaaacgccaaaattgaaaaaattgtttcattttaggccaatggatcggatgccattgcttgaccaacttcagcctccaccatcattccattccagctcacaatcagccgatcgtattgatagaggttttttgaggaccgaccttccttttctgaatttttaa

SEQ ID NO: 46763 - DNA, 806 bp, Heterodera glycines
atggccgacgaaatattcgcagctttacatgctaatgggaaaaattatttaattttgttaaattcagttcatgtaagaaaaaaaaccaattcccataaggagttaaaattttagctgttctcctcccccaaccaaagtgccgagggcgcaattatttgtgtggcccatcagcgcctcgggcccaacaatggtctgatgggactcattacgctgccgtggccatttcctcatctagccaaattttcttcaccgccctcccccgccccctctccttgcacgagtaaactccgaaattacagcggacaaagacggcaaaaattacttacgaaagattggcacaattcggagaatgatggcactaaatgagtgtcggggaataggtgaaaaaatgcaaggaattgaggaaagaatgcaaaaactcacttaaaatcttttggtatttgaaaaaatgccaaaagagagcgtctaataaatgttaatttaataaaaaataaaatgcaaaaaataataaaataaggaaaagtaagggaataaattcagttgcaaatacaaccgaaaacatccaacaaattgaacgccccgaggggaaaggtttcagccgcagaagtgcatttccccgtcccccctgcgatcgagtgaggcaaatcatgtaccattgaactcggaattctatcttgattgccttgctgtgtctgacggtgaaaatttggtcatcggcacaattgacgacattcggaagctgcactttcgaacggttccattgggagaaagcgcctctatttcggctggaatcgaaagcgactgtc

SEQ ID NO: 46764 - DNA, 913 bp, Heterodera glycines
  unsure (1)..(913): unsure at all n locations
atggccgacgaaagtggaacaaacgcaggaggaaccggtgcagctggaggcgctcagcctgctgagtacatcaaactgaaggtcgttggccaggtctgttttctttgtgttatggcgagaccaaaccttttaattgttcattttaggactcaaatgaagtgcatttccgggtcaaatacggcacatccatgggcaagctgaaaaaggcgtacgccgagcggactggcgtccaggtttgccagacttgggatctttaaagtttaaacaggggtgtccacccaccnccatccataaattaccaatacactgattgtgtccacatttttaggtgacttctttgcgctttttgttcgatggccgccgcgtcaatgacgacgacacccccaaatcacttgaaatggaggaggacgacgtcattgaagtatgtggggtgatggataggtggatgacgaggccgtccttactgtttttcattaattgtttaggtgtaccaagaacagctcggaggctacattgtggaggaataatgaagattgtgaacatttctccgtgtttctttctctgacgatgatcttttgcggatgttatatttatacttcgctttgtttctttttttgtttctttgaaagaattggattccaaacttttgttgtttaatttatcacacttgtggtgttaacattgggatttttctaaattccggttttgctgttccaattttgcatgcgtagtccgtatttgattttttgctaatctttggtacatacagtatgaagaaatttggagagagcgagttgattgctggcttttaggttggctttctcagtatcatttactagcacacaaaattttaaattcattgtttcaaaaaattaggcaaaggtgtagaattgcggtcccgacgggaaataaa

SEQ ID NO: 46765 - DNA, 1518 bp, Heterodera glycines; identical to SEQ ID NO: 44027
  unsure (1)..(1518): unsure at all n locations

SEQ ID NO: 46766 - DNA, 3236 bp, Heterodera glycines
atgagtgtggtggtggaggatggcaagccggaaccgaaaattgactggttcaaggacggacacccgctgcacatcgacggacagcacatcatgcgcagggacgagcccgacggacggcactcgctgaccataaacaacgcacgggcggaggatgccggcacgtacacgtgcaaagcgttcaacaaggcgggacagtcggtatccgaagccaacttcggcgtccaacagcgcgttgaagagcctgctcagcagcaggccgagccgatgttcctcgtgccgctcgagccacagacagtccgcgagggcgaaacggcggagatgtgctgcaaggtgaacgcggaagagtccaagccggacattcgctggtaccacgacgaaaagctcgttgtgccgggccaacagccgaacgttgtcattgaacaccttgcggatgggacattaaatttgcgcgtgcagtccgccaccaagtccgacattggcatgtaccgctgcgaggcggtcaacgcggcaggccgtgcgcagaccagcgcgccgttgaaatacgcggaagagatggaggtggaccacaagttcgagctggctgagcccatgttcgtgcgtcctctggagccgaggacggtgcgtgagggtgaaccggcggagatgagctgtaaggtgaacgtggccgaatcgcaacccgacattcgctggtaccgcgacgacaaacccatcttgcctggccaagagccgaacgtcgtcattgaacagcttgcggatggcacacaaaagttgcgcgtcctgcacgcgtctgcctcggatttgggcgtgtaccgttgcgaggcgatcaatcctacgggccgtgcgcaaacgcaggcaccgctgcggtacgcggaggagcggctaattgagcagccggaagaggagcacgcgccgttgttgagctggcgtcgaaccctacgcgaccagcagatgtccaagggaacgcgtggcgtcgtgttcgaatgccagctggagccgtcgtcactcagcgcagtgaaacgcgtggactggctgaaggacggctccatcctggccaacaagatggagctgtactcgttacgagtggagcaactgcaggacggcacccaacggttgctgttcgatcgcgaagcgcacttcgaccacattggcgtctatcgctgcgtggccaccgatgccagcggcaaccaaatttggacagaggcgcggctcggcgtcattggtaatatattcttagaaaattttgggattattaggatattttgtctgctttaagcacctcgcgacgcggaagagatggcgcccggaccgcccgagtttgtggagttgctcaagtcgtgcaccaccacaattggcggcacggcggtgctgcgctgcaaagtgaagggcaacccgcggcctaccatcgcatggtcgcgccagggctatgggccattgtcggagtcggatcggattagcacggagtaccacgaggacggcacaatcattttgacgctaaccaatgcggacatggacgacacgggggaatacaggtggggaacaggacaacagcaacaagcagtagcaggaacacatggggatgaacaatgcggacatctatcccttcacagatgcgatgccgaaaatgattatggcacggcatggactgaaggtccgattatcgtcgctgccgagggcagtttgccgaccgaaggcgaagcgcccgattttattgagcccgtccgaccgattacagtcaaagtggtaggcacagagaaatatgtgaatttgtggcaaaattgtttgctatttcgagacttacccaatttatcgagaatcactttaaatttctgacacaaatttttagggcgacaccggcattttggagggccgaatcaccggtttgccattccccgaggtcaaatggtacaagggcgagcagctgataacgcccggcctcaacccgcgctatcgcctcgagaatttgccggacggcacgcaacggctaattattacgaacgcacaaatgggcgacatggacgactaccggtgtgaggcgacaaacaaatacggcgacgtgtggagcgacgtcacattgaccgtacaaggtggacagtgggggagggggtacggtatttgctagggctgcccagaattctcgagacagaatctcgaaaatcgaattgagtaccaccagaccaaagagccgagacgagacttactcgagaccgagactcttgagcatcattagcattttggtggatttaatgaagagtaattaatttttcaatttccatttgtgcatttagagcctgagccggaagaggagccatcgtcgccatattttgtcagagggcttcaagaagtgcgagtgaccgaaggagaacaagcggatttggaatgtgtggtgaagggatggccaacgcccgaggtcaaatggtacaaggtactgtatgagtatggtaatgtttcataaaaaattcgctaatttttaggatgacgatgagattcggcccgaggatgtcaatttccgcgccactcagtcgccggacggcacgtgccacctgacgttacccgccgcgcgcatcaccgacgcaggagtgttccgttgcagcgccacaaacccgtccggcactgcgcacacagaagcgccactgcgcgtattgctcgaggaagaggcgccgatgccagccgaagtggcacccgaatttgtacaagggttgaagccagttcaggtgggaaaactcaaaaaaccagagaaataatggcatcatcgactgttcgaaaatatcaggccacggaaggagacgaggccatgttcgagtgccaagtcagcggtgtgccgcagccacaggtcaaatggtacaaggatgacgtgccgttgggtccggcggacgcggtcaaattcgaggcattgctggacggcacgcaacgactgataatccccaagtcgcgcatggacgaccagggcaattattgttgcgaagcgacaaatccagcaggaaccgccacgacaaaagcaccgctgagaattatccgtaactaaaaaacaaccgatcgctaattagaaaattttattaattacagcgatagaagcaaagccagcggttgtggaggaaaggccgaaggaagaagaagcaaagccaatggaagacgaaaagccgttggaggaagaaaccaaaatggaatgggaagaagccaaaccaaaggaggaagaagccgttaagccctttgaagaagcaaagccaatgggactctag

SEQ ID NO: 46767 - DNA, 994 bp, Heterodera glycines
aagttccttcgccttgtgaatttttgctttgacttttttatggagagattgttcaataccccgatttcctccctttctacgaacacatcaaattgcacacgaaacaccatttgtcttggctttttggatgggtccatccaatgtttttcctttgacacacagcgagggatcactccatcgatggaaagttcggtaaaactcggtggaatgtggcgcaaacggatgaaacggtccgtcagggcaatgcaaatttctgaggatggcacttcgctttatgcgaccagttcgaacaggttgcccattccccctcgccccctccccaattgtcagttttgaagggccgtctgtttgtatgacgttgagacggggaagagagtgcgctgtattcgcgaagggcacaaaagtcggcccagtgcgatggcactgctgccgggcgaaagacggcattttgcaacgggtgccgaaaacggcgaagtctgtcgggaagaagtccaatgagacaatgtcacattttaacatagataaaagcatgggactttggacagcccaagccgaacgtgcacacatttggcgagcaggcggacataatcagttgggtgtgccccttttttgtcccctccccagcggaatttagcgaagtttcttaatctggcccattgaatttcctcagatgcgttgcacatttggcgcaataatttgctggccgcgagtggcgacggcactttggccgtttacgacacgcacaaaggcaaagtgcgaattcagtcggagacaatgcacagcgaattgctcagtttggcggtgactgaaaggtttcgtcggttttcaatttgcgaaaaggcatttctgtccatcactgattgtcagattcacttacgtcggagcggccgatggacacattgaagtgttcagcaatggccaatttgggaacatccgcgaacgtatggagacgccctttctgatgggcgtcgagcaaatggtcgtcttgcgcaac

SEQ ID NO: 46768 - DNA, 727 bp, Heterodera glycines
tttgtgccggaaaaacgagtcgacgaagctgggcatattttaaatgatccgaggttatcttcctattttacttatcgcattttttccatgtttattttcttcagtaaaagtttggccgatcgtttccgtgcgcttttccttctcagaagcgtaaaaagcgacagggctgtccattggatttgcaaatgcttctccgacccatcggctcttcttaagcacgaacttgcgtattgtcttggtcagatgcaaaaccccgcggcgattcaaaaattaatcttcgttttgcaagacactgaacaaggcgagtaaatttctttttgtttaacattttcctttgtctttatttatatttttgtatatagaaattcaacttatgtaataatacatttgcttttttcattaattccacttaattcagaaccaatggtccgtcatgaagcggccgaagcgctcggagccatcggcgacccgtcgaatgagcacggactcagcaaactgttcgagcagtacagcggtgacgcagtccgagaagtggcggagacatgccttttggcactgcgacggacgcaatgggttaaagagaagggaaaggacgacacggaaagtcggagcatttacgattccattggcaaggaaatttgtggaaaatttggttttttaattgtgccacattaagcgtttgtcagaccacgagccagcagcggacggagggaaaggagcagccgaa

SEQ ID NO: 46769 - DNA, 693 bp, Heterodera glycines
gtgaccaccgcaaaaaagacggacgcagccaatgaagacggctctcccgacgagaaatatctaatcgcaacttctgagcagccaatcaccgcctttcatcgtacatttttatccatttattctgctcccctcaactttgccatttgtaaggtgacgaatggcttaacccatcggatttgccaatcaaatatgccggaatgtccacctgttttcggcaggaggtttgtatattctgccaatatttgtttctttaatcccatggcatcgtcaccttttattttcacttttttaaggtcggaagccatgggagagacacccgcgggattttccgtgtgcaccaattcgagaagatggaacaatttgtcatctgttccccatttgacaacgaatcgtggaagcacatggacgaagttagtggacttttgaaaatatagtccattaaatttaattctttttaaaattcagatgattgacaatgctgaagagttttgcaaagtgctcggccttccctaccgaattgtggccattgtttcggccgaactgaacaacgcggcggcaaagaaattggacctcgaggcgtggttcccgggcagcggtgcatttcgggagctggtttcatgctccaactgtacagattaccagtcgagacggttacgaatacggtacggacagacgaagaaaatggacggaaag

SEQ ID NO: 46770 - DNA, 925 bp, Heterodera glycines
atgggattcgcgacgccaatgtcggcggaggacaaagtgacgattgtccagtgccacaacaattaccggtcgcaattggccttgggcaaagtggcgaacaaaacgggacagacaatgccaaccgcggccaacatggcgaagatggtgtgggacgacggactgggcaaatcggcccaggattgggccagcaaatgccaaattcaacactcgggcacagactttggcgagaatctgtacttctccagctggcgcgactttcccaacagtaagtcaaattgggagccaattaaagtagaaaattgtgacaatttaagaggaagtgctggaaaagtcatgcaacgcgtggtggtccgagttggcagagttcggcatcaacaaggacatgtggttggacgacgacaacctgtccaaagttggccattggactcaggtaatttagcctctcattatctcgacaaccaattctcattgatacaatgaccaaattgacattctttgggcacaattttttttaccccttttgagcgttaaaatttaaattctcaatcgcaaaattctgtgttttatacatattaaaattcagatggcatggtttaattcggtgcaaattggctgtgccgtggccaactgtgacggcgactggcaaacttatgtggtgtgccattacaatccagggtaagctgtgaataataaattataaaattaattatttataaatgccttttaggggcaattatgtgtggatgagcacttacaagtcgggcccaatttgcagtgaatgcgaagcgccgagaaaatgcaacaattcgtcgggactttgtgaataaacaaaacatagaagaaagtggaggaaaaagaaagaaattcacaaattgaacatagaatgggaatagttttatttacatattttaaatggtataataaa

SEQ ID NO: 46771 - DNA, 2139 bp, Heterodera glycines
atgcaaaatcaacagaatatggacaattcagcaaggtcaattttcgttggcaatatttcttacgatgtgagcgaagacgaattgcggaagcttctctcagcagtaaataaatatgctaactttgacatttttcagactttttacatatttctctcttttttattggtaattcgtttttagtgtggtcaaattgttagctttcgccttgtccatgaccgcgagacggggcgccccaaagggtttggtttttgtgaatttgccgatgtgcctcaagcggaggcagcaattcgcaatttcaatgggttcgagtttcggggacgtccacttcgtgtcgactcggctacgggcaatgatcggagtgctgatgaggtgatcggcggatatgccgtatttactgtacaattatccccggcagcctcgtagccggggggagggaatttccccaaccctcgaaaatggcaaaaattagtcctttttggcaaaagaaagctacaaatcactccggcgtttaaattttaaaataactggagaaattggcccgaagagcacaaaattacaattagatgtgttaattttctgtttttttttctttacttttctatgagaatgatattacacttaaaataaagcaattaaaatatgacttttatacataattttaaatttttctgggagaataggtaaattggaaagttcttgtttaaattagcattttcataattttctatttttactttagatgcaacacttccaaatgactttgactcgtccgcaaaatcccaccgacgaattgagtccttatgggcccgaattggagccgggaaaagcaccggaagtaattgcccgcacagtcgcgtcaatgcctcccgaaaaaatgttcgaattgatgcgatccatgaaggaaacggtgaacaacaatccgcaaatggcgcgccaacttttgatggaaaatccgcagctgtcgtatgcattgctgcaggtgcaaattcccaatttttaagtgttgaaattctcaattttaaaagtaaaagtagacctaacttttgtcggaaatgggaagatattaatttacttaaaaacaactcttttttgtccttattttttatggtaaatgtattgtcgataggtttttgtgtcgtcgctgatcacgaaattatattattttgattcgggactatgcatacacatttaacacataaattggtttgaaaaagcgagtttggtgttgacaattagattaatcaattctcctttttatattgtttttttccaccggaaggctcaagttgtgatgcgagtggtggacccgaagattgcctaccaaatgcttcatcgtgaacatgctcagccgcttgtaccgccgacttccatccccactcatatccctcaacaatttgctggcaaaccccctcaattgcctccccaattcaacatacctccgccctccgtcccctctcatcagtttcaaatgcaacctcctccattggtgccaggccaatttcaccacggatttccatccatgggcatggctccgccttcgctactgcaacagcagcagcaacagacgccttttacacaacaaaagccgacacccatcgctcctttggcagtgcctccggcagcgaccgctccgcaacagcagcaggtggtggacaggccgactgaatgccttcctcccgccagaattggtctttacgtatcatttaggctgttactccgcctccgcttagccaacaagcacagcaaagcaacagcgacaatttggacgaggagcagcaggcgcaaatgcttgtgagtgttcaaatgaaagatgtccttttatataatagtggcaaattacccctcaaactaaaaaacgatcaaaaaacagtaatttcggttatgtgtaaacggattttatttaaaaaagcaacaaaggccaaaggaattcacacaaataggggcccaacatttggcggttgcctcttttaaatttcgcgctgttttcacataaaccgaaaagtaccaaaaaactcaatcgaatctcaaaaattcaagatccgcgtgctgcaactcaccgatgagcaaattcgtatgttaccacccactgaacgtgcccaagttatcgaattgcgtaaccaactgagaagtgcggatgca

SEQ ID NO: 46772 - DNA, 579 bp, Heterodera glycines
aaaaaattggtataaaggggcaaaatttttatgggggataaagggctttttgagtaataggacttttcgagttaaaattggggattccttatcctcaagtaaaaaagttacttctggcgtcccccagggctctgtcctggccctttactatttttgatttatattaacgatcttcctgatgctttgccatcaggagtgaaaataaaattatatgctgatgatgttaaaatatatatatgctataaagcaagatctgacacagaaattatgcataaagcattgcataacttattcgaatgggcaaataaatggcaaataaaagtttcaattcaaaaaacttttgtattatatttgggttcaaaaaacccaaaagaaacatacaaatttgatggaaatacaataaatgctgtggatacaattagggatttaggaataaacattgataacaaattccaattttccggtcatgttaaccaaataacaaggaatgcgtatttacgtatgcgttccttgtttagaataattaaatccaaatcgtctaagatttggattacgttatataaaacttatattaggcct

SEQ ID NO: 46773 - DNA, 1049 bp, Heterodera glycines
atgagcataaatggacgtgaagttttcaactccaattcactaatggcctacaaaacatacttctcacatgagctgtcctattccaatacggcaaaggactcgcatttgaatgcggcgggctattaccgtgacatcggcggctcgcttgagacaggggacggatgcattgcgcgacgcaacctgtttgcgagaagcagaacagcgcaattcattgccaaaattgacgccgatttgttcaaccaacctctctacttgatcaacttctgtgagttggacattgaaattttacccaacgacaacgagtttgtcctaatcactacgcccattgttgcccagggtgctgcagctgctcctcgttatcgcttcgaggttgtcggcttgaaaatgtatgtgaaaaaagtctcattgatggatggactggcgttggacattgcgcgaaaacttgaagtaaaaccagcacgatatgctgtgaggaaaacgctgatgaaatcaatgttcattagtcatggacgtttcgagtttacagccaatttgttcatggaccaaattccccgtcgtatcacaatggggttagtggctaattctgactatattggaacaatttcgcgcagtccgttcaattttcaaccgttcaatgtgcgcgaaatctcaattattgctaatggacgctcctttccccaagcgccatacgacttggactaccctaattggaaatatgttcgccctttcaatgacatgaacgaagcagtgggattcgccaactcattggaaagcaatggaattagctatgaacagttcggaaaaacccactgcatttatgtgttcaatttgaccaacagtggagatgatcaagctgcgctgtttgacctgataaagaacgggacaacagcggtgagcattaaattcaaccaggcagtgcccgccggagggataatgctggtggtgatgggcgaatgcgactctcttgtgatgttagacaaaaatcgatcaattagcacagacattactatttaaggctgtcatttttttcgtatgccactatcatttga

SEQ ID NO: 46774 - DNA, 759 bp, Heterodera glycines
cgtgatgccaagctgcaggagatgggcaaagtgttggacgagggatttgcgcgttacgcggacgacgaggcaatgaacgcgcggttgaaggaacagttgcacgaggaggacccaatggcggagtatttccgcgtcaaatcccacaaagtccaaatgcgcaccggtgttggtatgcttggaattggcaccacttaaaatggcacattcgtaaccctaggcccgtagccaaaaaaatttcgggagggggaaaccgaatacccctttttttgctcttcgagtctcaaattttttgtccaaatgttcatcgccagggagaaaagcaaaacttttgtacccctttttgccaaaaaaaaaaaattttttttgccatttttggttaaattttcaaaaatatgagatttgggggtccgtgatgccgagattaggcgcctccggggaaaatttttggaatttttaatgcaattttttcttaaaattcggaaaaataattctctaaatggttacctaataaactcattcattttgacgacaaaatctgtttgagcaatgcttttgccaattcaaaatgccttcatttctcccgcttcagtgtacccctcctacaaaggccaatttccccccaatcgcttttcaattgcgcccggctaccggtgggacggcgtgaaccgctccaatggctttgagtcgaaattgcaattggagaaaaacaaacggaaggcgcgcgagacggacacttaccgatccatcgcggaatgcgaa

SEQ ID NO: 46775 - DNA, 736 bp, Heterodera glycines
gtctacaacaagtcaactaataacagttgtagaagcttctacgaggcaattattaatggaaaaagtgttgattgtatttatattgattttcaaaaagcatttgactcagtgccccataatttacttttatataaattggaaaaaattggtataaagggcaaacttttattgtggataaaggactttttaagtaataggacttttcgagttaaaattggggattctttatcctcaagtaaaaaagttggctctggcgttccccagggctctgtcctgggccctttattatttttgatctatattaacgatcttcctgatgctttgccctctggagtaagaattaaattatatgctgatgatgttaaattatatatgctataaagcaagagcagatacagaaactatgcataaagcattgcacaatttattcgaatgggcaaataaaagtttcaattcaaaaaacttttatattatacatatttgggttccaaaaacccaaaagaaacatataaatttgatgggaatacaataaatgctgtggatacaattagggatttaggagtaaacattgataataaattacaattttccgttcatgtaaaccaaataacaaggaatgcgtatttacgtatgcgttccttgtttagaataattaaatccaaatcgtctaagatttggattacgttatataaaacttatattaggcctttattggaatatgctccggaggtttgga

SEQ ID NO: 46776 - DNA, 1782 bp, Heterodera glycines
atggatacgatttttttggtttgtaagtccaactccattaaaagtaacaaaaatacaaaaaaatacttgaaaaagaatccgataatacattttgaatgatattaatttgtttaacttttttcctttttaaattgtttttaaaaaataaggaaaattggttttttttttatcgacctatttatcatatttcaattggctactaatctttgtgccatctttcagttgctgaaaacaatgccaattcttcagtcccaaattgactctctgctcgactttcaggcattccttctccgctccccctttttttcttttaatttcgatgccttttcaggtcagcagttccgagttgaacaacggcgtcatcaattgctctttcattttgcttttccgcgatttgatccgtttgttcgcctgttacaacgacggaatgatcaatttattagagaaattcttcgacatgaacaaaaaacagtgccgcgaggcgttggaccaatacaaagcatttttggtgagtttatactcattgaattgaattttgggtatttttttatgacgagtgtatttgaattaaataaaattcaattttgactcccttattttgttagtctcgcctcgaccgcgtgtccgcctttttgaccgttgccgagtccgttggcattgaccgtggcgaagtgcccgatttgacgcgggcgccagcctcccttttggaggcgttggaagcgcatctgttccaattggagggcggccggggcgcgccgagcggacagtcggcacagtccgtccaacaagttcacacaaaatttgaataaaattcaattttatgggtttaattttcagatggtctcccagcaaatcaattcggcccgtcaggaacagttatttcaatcgaacagcagcgtagacgaaatggcaaagcagcgctatttggaggaggagaaggagagactgcgccaatttgaggagcaacgccgacgccaaatccaacaacagccggggggaggaggtgggaaaatgggggaaagggggcaagtggaaactttaaattcataagggacaaaaactgttatttgaaatattttttttacaaaaattcatttaatttccaatgaattttcggacaatacttttttctcaacaaaatcaagcattcttggtaatggttttgttcatatataaaaagaccaagaccaaaaaatttcaaaaatccaggtttttgagttgttctggccatatttttttgaaacttaatgaataataatatatattccaaaccctaaacaaataagaaccacaaattattggcaatgttattatttaatttttccctaaaatacgtcttttgtctttctccaaatgtttctccgccctttcagtgccgacttcttccgtgccctccccgtcgtccatccccccgccctccaccaatccgttcgccctcgcttccgaccttatctgtttcgacactccgccaaaagatgggaattctgtcgccgtcggtcaaattgagccgaccaatcccttcgccattgtcgccgagctgaacaaccgaccatcccaacaaggcaatttcagttgatttttgtttacatttaacaaaatgcgcattttgttaaagcaaacaaaaatcttttttatatcaactaaaagaattttaaaaaggcagcgggagtgccccattagctcagtcggttagagcgctgtacttataagtgatgggatatgcagaagtcggcggttcgagcccgccatggggcagttattttttacattttttaaattaaa

SEQ ID NO: 46777 - DNA, 826 bp, Heterodera glycines
atggaaagtggcgggggctcgtcgacggacgcggagaactcgcgacgcgaaaacgacgagacggctgacgacggtcgggcggaatctgttggtttcgccggtctccccgccggtgcagaacgactcgacgcagcggagctaagcagacttcgtcagcatgaacttttcctctcgcgcattgtcgaaaccctaccagccacacaaattcgtggcaaatgttcggttgtgattctgaacgaggtggagacgtgcgacatgtatttggaccaagaggcaaccattctcgagacaccaacaaaacaaaaataatacaatttttaccccttaaaggactctttcttctattctttggtttacgacccgaccaatcaaacgcttctcgcggacaaaggacgaattgaaatcggagaacgataccaagcgcaaattcccgaattgactgttagccaagaagaagtgaataaagtgaagagagaaggggaggaagagaccaccggacggacggaagtgcgatgtacggacaaagagttcgtcgtgtaccacccgcaccaccggctcagtgaccgcgacatcgatcagtttctgatcatcgctcggtccgtgaacactttcgctcctatttataacaagttcaatcccttttagcgctgtcggaatattttctcgcgctttggacggctcttcctccaccaaattgaccactctccaccaaacggcgtcggccgcctcgcgcgacatcactttgctacacgcaatggcacttcttcaccaagccgactactccctaggacaagtcttttgccgtgttcaattgctgttttgtaaa

SEQ ID NO: 46778 - DNA, 648 bp, Heterodera glycines
atgtggttgcaagcgttcatcgcttattggggatacactgccgattatgacggtaatccttcaattgttgcgatattggaacgttcgttcccattagtctacgaatatggcgaagacatcaggaagtacggtgaaaaagatcgcgtccttgtcattgtgaaccatcagagcaccgccgatgtgcccactttgttcactgtccttcaaacaaaaggcgtggccactcgaaaggtaattgggtcagctgaaagttcaaatggggcgcaatattcagacgatttggttgatggatgtgatgtttcgttggacaccttttgggattatcggacgaatgcatggcgattatttcattcagcagggcaaagcgacgcgagacaaagaactgatcagactgaagggacacctccaaaaggtgggcactcattgtcagtcatgtaaacactgggcataattatacgatactttcaggtgttttgggacagagaccgacgttgggtcattcttttcccggagggcggcttctactacaaaagaaaagaaaccagccaaaagtgcttttactcaattttcactgtgaactttttgttttcagatatgccaaggagaacaactttccccacttggagcattgcactttgccgcgaatgg

SEQ ID NO: 46779 - DNA, 715 bp, Heterodera glycines
agaataattttgtaattaatctgctgctcacccattcgcggcaaagtgcaatgctccaagtggggaaagttgttctccttggcatatctgaaaacaaaaagttcacagtgaaaattgagtaaaagcacttttggctggtttcttttcttttgtagtagaagccgccctccgggaaaagaatgacccaacgtcggtctctgtcccaaaacacctgaaagtatcgtataattatgcccagtgtttacatgactgacaatgagtgcccaccttttggaggtgtcccttcagtctgatcagttctttgtctcgcgtcgctttgccctgctgaatgaaataatcgccatgcattcgtccgataatcccaaaaggtgtccaacgaaacatcacatccatcaaccaaatcgtctgaatattgcgccccatttgaactttcagctgacccaattacctttcgagtggccacgccttttgtttgaaggacagtgaacaaagtgggcacatcggcggtgctctgatggttcacaatgacaaggacgcgatctttttcaccgtacttcctgatgtcttcgccatattcgtagactaatgggaacgaacgttccaatatcgcaacaattgaaggattaccgtcataatcggcagtgtatccccaataagcgatgaacgcttgcaaccacatgtacaattttccctcgtaaaaccaataaaatcgtgg

SEQ ID NO: 46780 - DNA, 479 bp, Heterodera glycines
atgcgcgggggtggcataacgcagcaacaacaagcgattggcaatcatccacagcaaatgctctgcgcgggcagcggcggtggacagccgcaggaatcggtgaagcgcaagctgatccagcaacagttggtgctgctgctgcacgcacacaagtgtcagcagatcgaacgggtcggtttttatcctaatttccattggtttcattcatacattagtagtgtctttttttatgttcgtgagaactgcaatagagccgtcgggtcgatccccccccccccccacatttctaaaatctctattttcagtctgaactgcgacaaaaccgtgcgccctgcacattgccctactgctcggtgatgaaggccgttttggagcatatggtcggctgttcggccgggcggcagtgtcagtacgcgcactgcgcctcctcccgggaaatcattgcgcattggaaggactgtcacaaggacgactgtccg

SEQ ID NO: 46781 - DNA, 472 bp, Heterodera glycines
  unsure (1)..(472): unsure at all n locations
gcgtgatggcattgctcccggcttaatggacacgccattgctttcctcgttgccaccaanagtttcttcaataatattttctgggtttttcgcaatatcgtttttgcacaggtcaaaaagttcctttctggcactgttccgtttccgaaccgattggggaagccggaagaatttgccgcattggtggagcatatcatcgacaaccattacttaaacggcgaaatcatccgattgggtgggtttattggatgactttgattaaagtttatgcaaagtttaattgattggatgtgtttagatggtgggattcggatgaatgcttgagaaggacagcagcagaagggcaccattggctctttgatcacttttgttgactttttatctttgcattgttttttgttgtgcgtccattcccacgaccctttggattttataaattgccaaaagcaatcggtggtcatttgtcttttat

SEQ ID NO: 46782 - DNA, 664 bp, Heterodera glycines
ctgctgcctgcgagtcgcccaaatactccgccaacggttactccacgcaagacggatttttccactacaaaacttcttacattgttgaatttgcgatccaatgctctaacaattacaaggtttgcccatctttcgtaaatcgagaatctctcatttttattgttttcattttgagcattatttttgcttttttcaggacgcgccattctacgcactggtcggtgaaaaaacgctccaattggctgtgtctgaggagaccaacaagtaccaggtgtcctggcaattggaacatgccgattctggtgcacaaacattcgatattcgcgtttatgacgaagacaaattcgcggagcacaaaaaggtttcacttactttcaaatttaaaaatttacattagtcctacgaaaattttaaaatcttgttttttttaatttgtgtcaatttaaaaaaaaattctgaaaactctaaaaccactggatttttttctttctaggccgatgagtccggctcaagttctgtccaaccattgttcactgtccagcattaccacggcggcacctctcacaaaacgtggatttcctcagagtccgtcttccttttgttgggcgtcgtggcgctgtactttacgatgaatttacgccaattgttggccaaaagagactga

SEQ ID NO: 46783 - DNA, 1786 bp, Heterodera glycines
atggttcatcaaatatttgaccccaattctgttgattttgatgattttatgctagtagagcaggttggatcgggagaaacctataattattttcgtgggattcccccataccaacgagggtacggaaggcagcgtgggggaggagtaggagatattctaaggttattatggagaacaattctaccaaaattaaaatccgctggcacggtattgggtagagaagcactagacaccggaacacgtgtattggacactatagagaaatctgaagcaccaaataaaccatcaataatcgccgaagtgaagaagggagtggataatattctcgaaaagggaggagttggtcgtcaattcggaacgggaagacgaagaaagagtattaaaaggaacgcgataattggaaaaactgtacctaaaacagtgataaacaagagaaaaagatcggacgtatttggaaaactattttaaaatggtctttaagaaaatagacaaagagtcggtaaactctataacttcagctttatcaatattcagccttccaccaactaatgtgtctgtgagtagttcttcagtgcgcgaatatttaccccttaaccccttaacggacattcctttccactttaaaattcaccctagcgccagtttcatagacctaaacaaatgttacatcttaaccgaaatgtccattaaaaggttcgacaccgacaccaataaatatgttaatttgaaagtgaatgagcaagtggcgacaatcaacatgatcggtgtgacatggataaagaatataaaaatcacggtccaggggcgtgagatttatgactcaaattcactttatgcttataaagcatacttagacaccgagctttcttattccaaaaacgtaaaggaatcagacatgcaggcaagcgggtattacgtggatagcgagaatcaggacggtacggatctttcccaaccgggtttcgaactgagaagaaaattgttttcacaaagtcaaactgcacaatttattacaaagttggatgcagatgtgttcaaccaggacagatatatggtgaatggtgttgagattgatatacaacttacccctaatgataatgagtttatgatcatggcggcgtcaaacgataaatatagaatagaaattaccgcttgcaagctttacgtaaagaatcttgaagtcgttgatggtctcgcactggacattcagaaaatattggaaaacaaagaggcaaaatatgcacaccgtaaaacattgatcaaatccatatttataagtgagaatcggactgaatataatggaacgctatttacgggtcaattgcctaaacgggtcattctcggaatggttgagaactctgcgtatgtaggcaaccaaaagaaaagcccatttaactttaggccgtttgatgttcgatccgttacattgacggccaatggaaaacaatggcccgcagcaccatttgagcttaatttcagcaaaaacttatatacccgggcattccacgaaatgaacgaggcgctgggtatggccagttcaaccgacagtaacggaattactctcgagaagtacagaaaggggtggacaattttcgctttcaatatgacgaatagcatggaggagaacgaatgcatagatcttatcacagagggcacaacgacagtgtccatactatttaggtcaccggtcccagcgggtgggatctcactaatcgctatgagtgaaatggactcaattttgatcttggataaaaaccgaactgttatgactgatacaaccgtttga

SEQ ID NO: 46784 - DNA, 259 bp, Heterodera glycines
ttcctggcccgaagggatcgccccggcgcgcctggacaacccggaaaaccccggcagccaaggccaaccaggacagcccggcggccaaggaccgcccggaccccagggtgcgcctggccagcccggtctgcctggaaactctggtcagcctggacagcccggagcgcctggccaacccggcaaggacagcggctactgtccgtgcccgccccgctcctccgtgctggcggtcaagaagaagatggcagccgcggtggtt

SEQ ID NO: 46785 - DNA, 924 bp, Heterodera glycines
actccgatggtcactttggaatcgcatcgcgagcctgtggtcggctgcgcgtggcatccgtccaacttgagccaggcgatcactgcttcatgggaccatcagctgatgctgtgggacctccaattggcaggtgatttttgggaagggaatggatgcgcaaaatgaaatttgtccacttaatttggaatttttggtctaaccctcgcgcaacaaataaatctcgaattgggtcggcattcaaaatgtccctttttctgcctttttaggccccatctccacgctgacttcgaataaagccttttccgcactttccgtctgtccggccaatggccttgtgctgacctcctctgtcgattcgttggttcggctttgggattttcgttccaggggttggtgacccaactaaatgcccctccccttttttctaattaatttcgccattagatggctcaatggtcaaggcatcgttccatggtcatgttggcgttgtgtccgatgtctgttggcactcaaccgaccagcatttgtttgtttcggccagctttgacaacacagttaaaatgtgggacgtccggtgagtttctggcacaagcgtcgagtaggtatttagcgaatgattaaaacaaatttatatttagaatgccattattagtactaaatattgtcttcataaatttttgactgtggaggggggggggggggggggttgtatttcgaggatttgaattttaagaaattctttttttctgttgctctaatgttttttgtgtccaattttagcagccccagggcggctctatatgatttgatgggccattcggaccgcgtgctgtgcgttgattggacagtgccgagccgtatttgcagcggttcggtggactcgacggtgaaagtgttctcacatgggaccaaagaaaatatcta

SEQ ID NO: 46786 - DNA, 1204 bp, Heterodera glycines
attctgttgccaaattcgtgtctcgacaatttgatgcgtcgcaacattcagtacccgatgctcttcaaattgactaatgtcggcccggcccttcagaggggcacccatgccggtgtgctggagtttctggcggaagaaggccgctgctatttaccttcctgggtgagttctcggaacagaaacaattaaaatttcctgttttaattgcattggatcaatttctctattcagatgatggcccaactcgctctgagggagggcgacctcatcaccgtggagtacaaagcgctcccgaatgccacttacgccaagttcaagccgatgtccaccgacttttacaacatttcaaatccccgtgccatgctcgaggtttgactaacatttatcgagcggttgataaatcctttttccacaggtcgaactgcgcaagttttcctgtctgaccaaaggcgatgtcatcgcagtgcaggcaagcaatcacgagaattgttttttaaattgttttttgatgtcctgccattccctcccacaattgttcatttgttcatttcagtacaacgaacaagtgtacgaattccaagtgaaggcactgaagccggaaaatgcggtgaccatcgtcgagtgtgacataaacattgaatttgacgctgcggaaggctacgtggagccgaacagaacgcatcaacaacggaatgagatggtcgcagcggaggaagaggtgaacaattagcgtaccaaaagaaaaggcaaataaattgactaattttgtagcagcagtcgcatccacccaacgtgttcaaaccgttctccgggtcagggtttcgtgtcgatgggaagaagccgcgatcggtctcaacaagttcacagcaggaggcgacgagcagctcatcctcttcggcatcttccgggcgacaggtaaatggcatcggcatttcagaaatggttgccttgccttcatccaagtctaatcacttcctttaagccttcctctgggattgcttcgactgcgtccactgcgcgtgacgctttggaggcaattgctgtggacgaaaattacatccctggggagttgcgttttgtgcgtcgtccgtacaaaagcaaggcacaaagggacaaagaggcgcgcgaaaaggacaacggagggacgatgaagccattcggaggcgaagggaacacaatccgaccgacgcgaggcggacaatga

SEQ ID NO: 46787 - DNA, 1341 bp, Heterodera glycines; identical to SEQ ID NO: 44752
  unsure (1)..(1341): unsure at all n locations

SEQ ID NO: 46788 - DNA, 1654 bp, Heterodera glycines; identical to SEQ ID NO: 44767
  unsure (1)..(1654): unsure at all n locations

SEQ ID NO: 46789 - DNA, 1221 bp, Heterodera glycines
atgctccccacggcgctgttgttgtgcgcatcgatcgtttttatgacgaatccatcggttgacgccgaaatttctatcaaaattgaacgccatttcccatgttccgccgcttctggtgcttcgctatttttttaagcaatttgaaaacatttcaggtccaaaaaaggagaatctgatcatcaaattccccagctacaaatccacgggtgtcgccttcaaagaagagaaggacgacgcgggccacaaatgctttcaaatgggcggagggaaagtggaggtccaagggacggaggagaacggcacaatgccaaaagctaatggcattttttgaaggtgtatgctccaggattggacggcaacaagaaatattacgtacacgtggagacaaggattggcatccacgggaagccagagagatgtgtgaaccctgacaaggagggatgtggcggcatagggtcgtggtaagacaagaggagaaaggcggatggggaggggggaggaagaaggagggaacggggggagggatgacagtgtaatcgagagtctcgcccttgagggcttctcaaaatgtcaggtcatcggaacaattgccaacaaactctaaaaaatactaaaactaaaactttcagtttttctgtatatatctttttgattttttcggattctccgtttttcttgaaattctcgagcatcaaaatgataattcgttacttttgtgtgtggtaagtgcggtggcgaagggcttttgaatctgtcaatttgtgagtttctgtctgttgtgatgctccccgccccaattctgtccctctgactttcccattttcttttaagtgtccactgcgacatttgccaaacgattggcggttttcgccagttcatccaaatcttcaaaggggataagccggcggaatgcagcgccaaaggccttccccccggcacttatgacaatttgtcgctcaaagtgtgccttcccagcaaagacgagctgttgcccttcctcgaccaagtcactcccccccccctctcatttggttcacttttcctctcagaattcgagtcgggctgaacaactttgggatgttttcgtgagcagtcgcgctcgttctggcggagtaaatttcgaattagccgcttaaagcgaatcttttcttaggaaatccctttggtaatcgccgcccgcaatgtcgaccgcccaatcaacaaactttccatcaaagaact

SEQ ID NO: 46790 - DNA, 1767 bp, Heterodera glycines
atgacacatgtgtttttcgatcccgagtcggtcgattggtcatcttttatcactccccaacatggaagaggacagaaacaatattttgtcggaagcaagtatcaacggggattcggtttcctcggtaatgtggcacgtttcttgacccctattgcgaggaatattgcctcgagtgcaggacatgaggggctcgccgctgggcagagagttctgagtgacatcgcccagggtcgtgatttaagggatgccgtcagggaacattcaagacaggggttgactaaccttaccgacaagttacaacaatgtgggaaaggaaaaaggtctctgatcactaataagaaccggaaacaagtatatgatcagttaagtttcatctaaaggtataaatggaataaataatacaaaaagttaaaaatgacaactctcaagaaaatcgacacggcgagtgaggacggtctcgaggggggcctttcacttttcgacatccctccgacgaacgttgcaattaataaatccagtattcgggaattgctgccactttcagcaataaatcaatctggaccatatatctttagacttttttcagataatcagttttgtgatctcaataaaacttttctttatttgtcaacttcaattgagagaaaagacaaaagcaattggattccgattaccaaggacagtgaagctgaccaacacgtcggtgtcattcaaaattttgggcacagctttgtcaaaaccttaaaggtgtcaatttcaggtgttgagtcttatgattccggcatttactatgcgtttagggcatatatgatgaatgaattgggattttcagaagatgtcaaaaagggtctctgtgaagcgtcctgctattatgtcgacgatgtcgaccaggatgattacacaaatagcggctttaaaaacagagcgtcacgttttgctgatggtgccaaatgtgaaaccatggtgaaacttaattttgatctcgctcgtcagcccaatctattgcttaataactcggatgtcatttttagcatacaccgtaacaccgatgattttctaattatggcaccgccatatgtttcaggaaatgcagtcatagcgaacccgcacacatatcgtattaacatacatgatattagaatttatgtaaaaacagtcgacattacccagtcattaaataacgtaataagcaatcagctacaaaccaccccggccaaatacccggttagaaaaattgagatcaggagtcttttcatcccacggggcacttctgatctctcacacaatgtttttaccagcattgttccgagacgtttaatcgtcgggtttgtttcaaccggtgcgtataccggaaatcctaaagagtcacccttcgtctttgaacatgccaaaatacgctctatcagtgtcgaagcgaatggaaacattttccccgggtccccctattctcttaattttgatagaaacaaatacattcgagcatttgttgacatgtatacggggctcgggatggacgacggagaaaggacaatgtcgatcaatatacaaaaatttgtaaacgggtggtgtttcttcgtcatcccgatgacctctactctagaggacacccccggttttgaattgattcgaaacggaacgaccagcatcaaggtgcaatttaatgagcctataaaggacggcgggtatgagatgatcgttctgggggaatttgattcgattttgtctattaatgctaatcgtgtgctcagtagtgacggaagcatatga

SEQ ID NO: 46791 - DNA, 1842 bp, Heterodera glycines
cagaccaagagaatggcaatccaattctcccgaccatttttggcccaattggaagtgacgttggcatgaagagtttgttcggctttgattcttacagcgatgtaccttttttttaaattttgcttttgtaactcttccatttcaggtgttggctgatgttgtttgtgacccaaatttgccattgccattgaccattggactttacgccaaatggggttcaggaaaggtgggctaaccattttcatgacttgtctcattgcttccttccgtttctataaaatttgctaatatccctctccaacttctctttaagtcgctgcttttgcctcggattcgcgattcgatgagcgccttctcccgcacttggctggacggggtcgagctgtactggtcctggtccctcgtgctgtccgtcctcctttcctccgtctctctttcgttgttcatctccgcactttcggcacttattcttcaaaattcacattttctcatttcccttggcgtcggagttggcatttttttgctctttcttcttctctacggatttatttactacggcagtgaggtgatatcataattttaaaaatgtttagcgatacctttctgttttaattgcctattttatagcagttttcctttaaattgccctcgtttaggtcaaattttggaacgggtcaatcgccaccgctcgactgattggtcgttcaattgcccgtttcaaattgatgctcaatgttttgtttctgaatgcgcccgtcagaagggaaaagagtcgaaagtgatgaaattggcactctgtcccttaacgaagcaaacctaaaaaaattcagaattatttcgccggtgagttttctctttgccgatgaccaccgcctttctttcattggcggcgaacactctttggccaacattatccaatcgtttttcaccgctgccgaaggtgtacaaatttattattataaatcaaataaaagggaaatgccctcagagcatttcggcactttggctgtccatctgttcaccactctccgttcgtcctcgccttcccttctcgccgatcgttcctccaaattgaagagttactgcggtgtgcccgtgttggtgctgactttggcatttccctgctcactggtctccgcttctttgctgttcatccaaactcggcattggctcgcctccgtttttctcgccttggcactcgtctcgggcgccttcattctttacattttcagtgctcgcattttcgtcaatttggttggggttccggaagttgtataagtcttcgaagttatcccttatttttaagccaaaaagacgaattacgcgaatttctgatcggttgcatttgatgccattcgaacgaatgatccaaaagctgcagaaggaggtcgaccttcttgtctcattggtgattttttcgccattattttccccattttttgtttgatcttttgttcatcaatttaggtgttcgctttggatgaattcacttcgagtcagacacggctggtcataatggtggatggacttgacagttgcgaatcgaacaaaatggtccaaatgttggacgtaagtcagtttggatattaaaattaccaaattccatgggtaatttatttcctttttaaggcactttcgttgtttttctgttcacgtcaaaatgcgccgttcattgttctgctcgccatcgacccgaacattgtcgtgtcgaccattcagcagaatttgcggacaaatgcgggcccggagggaggcggaatcacaggaagagactatctgaaaaacatcgtgacaatgtatgtatctgccctttctcaattctttgaattattaggacaaaag

SEQ ID NO: 46792 - DNA, 736 bp, Heterodera glycines
atgtcctattacaaaacgaatcgaatgcgtttgttggatgagaacattggtgacattaaaatgcaaattgtggacgcggaaacgaacattgtgcttaagtgggtcaattaaaatgcaaaattgtctaaattcttcttcgttttcagtttacaaaaacgtattttggacagcaaagaggcggtgctcagtgccgtcgaattggccgccactttggactgtctaatctcactgttcgttttctcgcatttcttttttaaatttcaatttcagttccgttgttgcccggaaatacaattggacacggcccaaatttgtggaggagtcaattgtggccattgagcaggcccggcatccaattgctgaacacatttgcaaggatggaaaatatgtgcccaacccagtgcagtgagtgatgcactttttcaccaattcgcttcaattttttatttcttcagtagttccaccgaagtcggcaaagtcaaagtgctttcggggccaaatgcatcgggcaaaagcatttacttgaaaatggtgccatttcgtctgcttttgtctccactttttttgttttgcttaggtcggctccatcgtctatttggcttgttgcggttcctttgtacccgcccaacgtgccaccattggtccgatcagccgcattttgtcccgtctttacaccattgactcggtgttggacggaatgtcttcgtttgccaacgatcttaaacaagtactgtaa

SEQ ID NO: 46793 - DNA, 1142 bp, Heterodera glycines
atgaatttcctttaatccaatggaaaaaattgggataaggggcaaacttttaattgggataaagggctttttgagtaataggccttttcgtgttaaaattggggatgatttatcctccagtaaaaaagttggctctggcgtcccccagggctctgtccttggacctttattatttttgatttatattaacgatcttcctgatgctttgccatcaggagtaagaattaaattatatgctgatgatgttaaattgtatatttgttataaagcaagaaccgaaacagaaattatgcataaagcattgcataatttatcggaatgggcaaataaatggcagatcagaatctcaattaaaaacacttttgtacttcatttggggaataaaaaccccaaagaaatatataaaattggtggaaatataataaatgtcgtggatacaattagggatttgggcataaatattgataataaattgcaattttccaatcatgtcacacaaataataaagaatgcatattacgaatgcgttctttatttcggattattaagtcaaagtcttctaggatttggattattttgtacaaaacttatgttagaccgttattggaatatgctcctgaggtttggaatctatctattcaaaaaaatattaaaaaaattgaaaaatgtcaaaaatatttcaccaaaaaaatcatacaactttgaaccctagttataatcatttttatgagattttattttttcgacttaattattttattccttttaaattcacaaaaattctaagattcaatttttctcattttattttttctgaatttccagtggaggggggggggggggggggtggccccgggcgttgccgatagagcgcagtcgggaaaaaaaactttcattgcaatttttaacagaatttgttaaaaattgctaatttttgaaaaattcaaaaaaatcgactctttatcaaaaattttggaaatcggaattccgacgtccaaaaacgtctgaaattggaattccgtaccatcccctggtaagcatactataataaagttctttatgtttctttccatgccaaatcagggggttttaaatactgatgatcgatcattaattacctaattgcatgaaataaaattact

SEQ ID NO: 46794 - DNA, 1156 bp, Heterodera glycines
atgttttcaattgttggaaaaaaggtcttcaacactacctcgtgcaattttctttcgaaggcattttacgctcatatgagcaaagatgaaataatgtggcattggcctgcgcagagtaaattttgttgtttttttcaattttgaatgtttgtctaaatgttacaaattctcagaatttgaccaacatttcatcgattacttgaacaagccggacattgacgggtgggaaatccgaaaaggtacaaaaccaattttgaataaattacacattttattgtacgctgattccttcttgcataatcgaataaggtcttcatcctaacttttccttttttagctctcactgaactcgggaactttgacgtggtgccagaccccaaagttgttgaagcagcgctcagagctattcgccgtgtcaatgactttgcgcttgccatccgttttctggagcagattaaatacaaatgtggtggacccaaaagccgatccattgtgtatccgtatatcattcaagaggtaatttgtgacgggcattaccgcccggtatagaacgggatcccgcgcggtttgtgggatcgggatcccattccgcattttttggaaaatgtgggattagtctcagcggtatgccattctgcaaaattttgagttccaatcccgagcgggattcgcggtttttagttcagattgcattgcatttaaaaaaaggacattgacaaatatttttctgaataaactttgaataaatccaattacaagatttctgtaaaatttcccggcggtgccttcggctcgccgaatcagcctaacggacggcgtttaccggcactgcaggactatttatttttttttgaaaaagcgtgccgcaaaaaacaacataaaatcgtcaaattttatgagttaatcccattaacaaactcacgacttctctccaaccctcggagcccttaggaaaatctaggtctattttctacacgaaaagtgattttattttttaacaattaacttgtccgaaaaataattaatcgaaacgactcattgtcaggtcaaaccggtgatggatgagttgggcattccgacgctcgaggaacttggctacgacgagcccgaattcttcactcccgaccccgagtggtactgggagaagtcctggtaa

SEQ ID NO: 46795 - DNA, 1251 bp, Heterodera glycines
atgggcggaccagttgggctactgctgaacgcccaaccaatggcagagatcctttgtgtttggatttggggctttggagtatccgtccggtccgatagggacaaacacaagtgatgaggaggggggaggggtaaaggagagatcaaagcgaccgcaaacacaaatcatttttgttttcgaaaaatcaaattttaacactaatattaaattgattagaaaagaaataaaatggtaaaacttataaaattaatgaggtaattaataaattttcacaaataattataatttaaaaagaacgggaccattagcctttgcccatagcacaacatcgccatcattttcattaacgtaaaaattcattcatcgacttttcattcccaggaatgctttgcagcattagtcattcactccgattacgatcgcattcaaccgtcagtcttttccttcaccgtttttatttataaaaatgacattttctaacgttcgtttgtttgtccactttgtacctttgaacacatacctctctaaatattcatacttttctcattttacattctttgaaaagctttttgcaagtgttttggatttgcctatttttaaaaaattatttttaaaggcaaatcactttttattgtctctgttattcaatggctgcgcgaaagactgttgcacgccgtgcccgaccgcaacgggcgaccagcaatgttttcgccatgttcgaccagccacaaattcaggtggtgaataaaaaaacagtttatcggtaaataaattgaataattttgtgaaaaatttcctttattaacaaaaagacttgttaaggagttcaaagaggcgttcaacatgatcgaccaaaaccacgacggatttatcgatgagcacgacctgaaggacatgttcgcttctcttgggaaggaagtctcggaaaagttcattgaaaatatggtcaacgatgcatcgggttctatcaatttcacaatgtttttaacgctttttggggagaaattgactggcactgaccctgaagaggtgaggcaagcaaagtatgggaaagaaagttttaatttttgccgtttttatgtgcacaattttaagggatttaacaaaaatttataataatgggtcaaatccagaggggatggattgaaaattgagccattttgaatacccttaaaaatttaggtgatcaaaaacgcattccaatgttttgatgaggacaacagcggaacaattgcagagggttggacttaa

SEQ ID NO: 46796 - DNA, 686 bp, Heterodera glycines
tgagattgtgtcgcttcgtccattctctttaatattacaaattatttcattgccatttcctcaggtggtgaaatccagcacacttctcagcttgttgaacaaattgcgagtttgcatctgaacgacgaattcagtgattttgtgttggtcgtcgatgatcaacgttttcccgtccatcgagtggttttggccgcacggagttcatatttcaagtaggggaggggtttagatgataaccaaccgaatgccaacttaaaagggcaatgctttacggtggcatgcgcgagtcatcggaaagcgaagtcattctgcacgatacgcccgtccaggctttccaagttggtccagttttatctgattaatgtttttttgctgatgattttctgttttttaggcccttctcaaatacatttacactggcaaattgcaactcaaatcgttcgagctcagttttgtgttggatatgctcgccctggtccataagtacggcttttccgaactcgaagctgcaattccggaatatttaaaggtaacaaaccatacattctttctaaaaaaattctctatcgatttagaccattttgaaagttcgaaatgtttgctccatttttacggtcgcgcatttgtactcaatcgaaggactttctgccgcctgtttggattttatcgataattacgcttccgat

SEQ ID NO: 46797 - DNA, 1399 bp, Heterodera glycines
atcgacgaccgattgccctgctcaatggagggcgagttgctttacatgcactcgcaagaactgtcagttggaataacatttcaaaaacatttttaatttcattgttttttggttttagaaacgaattttggagcgctttgttggaaaaagcatacgcaaagtaagcgaaacaattggaaaaaagcattatttttttagaaatgttttcgtatttcaaaaatcgcatttaaatttgaattcccattcgacctcttcaggctgtacggctcgtacgaagcgctgaagggcgggacgaccagcgaagcattggaggacatgacggggggactgaccgaattcttcgacttgcagcagccatcggagaatttgatgcaggcgaggcaattgggaaaaggatttaacaaagggagacaaattgttggcagagaattaaatagttgctttcaatttcgacctcacggagtttaattccgaaattccgtcgctaattgcattttccaagtcaataatccttttggcgtcgtcccaatttatcgcaaaatccctcccctctgcagatgatggcccgtggctttgagatgggctctctgttcggctgttccatcgaagcggacccccaagtttgggaggcgcgactgcccaacggattggtcaaagtgcgaaaagcgcagaatgagaaatttaccgggttctccctttttgttttcagggccacgcctactcaatcaccggcatgcgaattgtgccgaccccgcggggcgaagtgccgttgttgcgaattcgcaacccttggggcaacgaccaggaatggaacgggccctggtcggacaattcgtcggagtggcgacagttgtccaacgaactcaaaacggacatggggcctcacatttgcccacgacggcgaattttggttggtcaatttttccatttcactcattttgttttgggttccttttaaggatgtccttcagcgactttttgtccaattttgaaaagatggaaatttgcaatttggggcccgaagttatggaggagatttacgaaatgaccggcgtcaaggcgactccgcacaacgcgtgggccaccgtcgcccacgacggctcgtggcgtgcggggcgaacggccggcggatgccgcaacaatttgcgtacgtttcttttgggttaattgactcttatatcgcttttaaggcacttttgcgctgaatccgcagttccgcatgaaattgaccgactcggaccccaacgacgacgacaaactgtgcaccgtaatcatcgcggtgatgcaaaagtatcgacgcgagttgaagaacaccggcgtcgagaatttagccatcggatttgctgtttatgaggcaacacttttttgggtgcccaggggggggggggggggggaaact

SEQ ID NO: 46798 - DNA, 2289 bp, Heterodera glycines
atgacaaatgagcgtgatttttctcacgatgaccacattaacaacgctattgggaccaatggcgacagtaaagacgcagccaaaagaaaggacatctgccgtgattttctgaataatatttgcagcagggtatgttctctctcacttttattttattacaaatcaaacactaaatatttgaggggaatcgatgcaaattttatcatccggaagacagtgtcgaaaagaatcaaaactcggcggatgagccttatcagttctgcattgattttcaggtttgttatgcttctttctcttaattgcttttgcgcaaaactttatagtcgattagcgataatttgtactcgttttcctgtcatcccagcaacctcaatttttgccataacgttggttgccataacaaagtgttgggagggtgggaaggttcgtatttatggcaatcctggagaatgggtgtccctaatttaacttttttttattttgagctcaaaatcagttttcgaggatgctgattacgaatctgaactctgatttgccttattccgaaccccgggtccgaattcgaacaaaaagttgaaaattttttttccaaaatatacgttaaaatcggtcaaatttttagcgcaaattgcatatttttccaattaacaattgaagcattgttttacatcaaaataaatagtttttaatgtattagaagcttttacccaaaaaatacattattgaaaaaaacattcatttttttgttcgaattagggttcggaattgggaaaatccgagttaagatccgtaatcagcaccctttaaaaccccttccgtaatcagcaccctttaaaacccctatctggttttgagcccaaaataaaaaagttaaattaggaacacccattcttcaggattgccgtattggcattaaagttcgattaactcaaaccaagactaaataattgtatcacttattttatttattactatctgtctattatgttcgctcaagatttttccttaaatggacaggcgcataaataggaatatttgctttcactttctgcggtggcggctaaaagtccatttatgctgcaatttcagaaccagggctgttaccgcgaaaattgtcgttatgttcacgcgtttcgcgaggatgtcgatcgttacaagcgcagcggcgacgtgacgcttgggttggcgcgagctttggcagcgctgttgaaaggcgatacgataaatggaattccgctttgcaaagagttccaaaatggacactgcgcgcgcggcccgcaatgtcgctattggcatatcaatcgcgacgaagagcgacgcaaacgctttggcggcggcaggaactgcggcggttcgccttcgtcgcttgcgttcggcgcttacccggcggtgcctccggcaggaggtcgaacctttaacagtgaaaacagcgcattttaacccaaattaatgccactggaagatgcccttaataaaattattttaaaaaggaaatgtgtctgtagcaatgctcaatctattgtcaaaacttcatttatttagcgcaactcagcagacgaagaggtgacgagttcgtcagtgaagattttgcaccgccctccaaacgatcttttgctcacaatcagccgtttgcaacgattcccggacagatggctccaacgtcagcaccaaccgcaccgtctcacccgtcccctcaattagtcattgagttggaacgtcgaaacgcggaattaacgtaaaaatggattagtacatggcattgctagtggataccccccacttgcgtcccgaatatttgcggctttgttaaaattcattagctctttattcatttaaactcgcaaatgtccgaaaatataaccatacgaaatcgggcgcaaaatcccaaatgtctgcttttgcaagcaaatatctgaacaccttgttagttcttaaaaaaagtattttttgaatacgcattcaaaaaaaattcgatttttagtgttaatttaaatcctaaaaattgcctaatttctttgttcattggcagcactgaagtggaaagtctgaagagggagcttaaccgggaaaaggagcgttacgatgaccttatgtcgctttttcgagccgcccaaggccaaccgacggttcaacgttcggtgatttcgactccgtctttggtacccgccaatttgcagccaaacatttcttcactaagcgcgcttcaacaacaacatcagccgcagtctctgcagcagtggagcgcaacgtcaacatcgcaacagccaaattggacaaaattcgattggg

SEQ ID NO: 46799 - DNA, 416 bp, Heterodera glycines
tcaaggaatatgagcttaccgcgagaattttcggacactggcattttgggttcggcattcaggagcacatcgatttgggcataaagtacgacccgtcgattggtatctacggaatggacttttatgtggtgctcggtcgtgctggtttgcgggtggcaaaacgtcgacgaatccaaggacgaattggcgcatcgcatcgtgtgcaaaaggaggaagcggtcaaatggttccaacaaaaggcaattattttgggttaagtgggactaaattgcgtattttttacttgacttaaacttacccatctaatggaaattaatttttgttgtaaatctcacccttttcagtatgacggtgttattttgccacccaaaccgaaggaatcccgtaagggtggtcaccgcggacgtaagcgctaa

SEQ ID NO: 46800 - DNA, 1577 bp, Heterodera glycines; identical to SEQ ID NO: 45058
  unsure (1)..(1577): unsure at all n locations

SEQ ID NO: 46801 - DNA, 201 bp, Heterodera glycines
ctgctctcaaccaacgaggacgggttcatttcgctgatggatttggagacttgcgacaccaaggacgacctgcgtctgccggtttgtttgttgtgccattttatctgttaaaaattatattattttcccgtcccactttaggaaggcgaaattggtgaccaaatcaaacaggcctacgaaaaggacgataacggcattctt

SEQ ID NO: 46802 - DNA, 1167 bp, Heterodera glycines
catactatcggggcgccgtcggcgcactgctcgtctacgacattgccaagcatttgacgtacgaaaatgtggaacgatggctgaaaggttttcaatttttccccaataaatggcgccaatttaaggggcttttttcttgtacaggaattatgacggatatggccgcaattaaaaaaataatgaaattttcaaaaactttttatttttttagttggacggttaattgtccatttcggcacctttcccatttggttttacgcccgggccaattttacatttaaaggcacggcaaacattttttttttgtttccagaacttcgtgaccactccgaccagaacattgtgatcatgttggtgggcaacaaaagcgacttgcgccatctccgagcagtgccggtatgcacttttgcaaaactatgtaaaaagcgcccctaaactgcataaaaaacaagtatttataattcgaatgtgcaataattttctaatttacaattttaaacaaaatatttccctgccagaccgacgaggccaaggcgtacgcggagcgtaaccaactgtcattcattgagaccagcgcgttggacgccaccaatgtggaggcggcgttcaccaacattttggccgaaatttaccgtgccgttagcacccggtgggcattttaattttcgctgagtttttacaaattttcaatatctggaaggccggaattaggcccccgaaatgaaaaattttcgaaaaatgaattacaaattttacccaattttctcgctaaatttgaccttaagtttccgggattcccataatttttccaagattagtctcaaaagacaaaaaccccatttttgcaaaaagctctcaaaattaccaaaatcacccttttttctacggcgctaaaattggacctaaaggaccaacttttgaggttttgggtaaaattacggaaaaaaactcaggcgcgccgtcaacagagagataaatgttcacagcaaattttttaagaaaatttcattagtaaatttttgtataaaaacgcagacaagtgccgcccgaccgaatggtgccgatcagcagccagaacaacatcacgctgtcctccaccacggccaacaaggagaagaaggcgtgctgttcctccacctaattgtttgtgatgatggaaggatggtg

SEQ ID NO: 46803 - DNA, 569 bp, Heterodera glycines
atggaaattggcaaaggaagggccgagccgacggaggacattttggtggacagtgcgaagagaagccgctgggattgcgagtccattctctccatgcattccaccgtaaacaaaacatttgccaatcatccgacattcccccacttttcaaattcattcagctttacaatcatccgactgaaattagggagccgatgaaaggcattgggaggcgaagggggaggacgaccaaagagaagggcatggccaatttggaggtgacggacaaaatgaccaccaaaaacaccggacaattcattcactcccaactttaggaaatggaagttgacggagaccaaagagacgggccaccggcgccgtccgtccgcacgcgcacttcgatggttagcgtaattcgaccgaagggggagacgacggaagagcggcgaattcgtaaaattgcggtgaaggaagaacggagagagcggcggaaggaaaagaaggcgaacaaacaattatttcgagtggagagactgaaattggatgagcagcaaagaacgaatcagccgaagacgcgacaaattcattga

SEQ ID NO: 46804 - DNA, 1917 bp, Heterodera glycines
atggccactttgctgcaagacaatgaatacgcccatttcgctctcatcggtagtggtgtccagcggaaggtcgaccgtttgactttgggttagtaattctcttgttttttgaattttataatttccatttttaggcgtacaaactgtttctaaggtaaatttttttttattctttcgccataaatcatttattattgacagcacgtagatgttgcactgtctcagaaataccaaaacgaagtcattcagctggtgcaaagagttgacccgaattcgcaagttgacttttcaacaatgtcttgaaataaattccaaatttagtttctgcactttgcgccgtcgaatggatgcgaagtcgaagtgatggtgcacgaacaaggaaagggtgcgtggatttgaatgccttttttatgggacggaaaatgcatttttcagtttggaccaaagctaaaggaatggcgaaaatagttggaacgctcggcgaatccctggaaaaagggacggtgcttatttgtggggacacgcattctgacttaccgatggtggaatttggcaagtcgaaaaactcgacggtaattggattcaaatacctgttttgggtttgggcctgatttgaatttaaaaataagtgacaaagaagtacaaaaattattctgcattttttgggcaattgtgaagatcataggtcccgaaattttttaattaattttttttttctaaaaattttttaaacgcttttctagggggggttttaaggcgctgagcacgaatccggactccatttcgaccaattccgaatctctaacccgaacatttttcgagatttaaatttaaattttttttaaagtttctcttaaaacattgtttttagtgttttcgggattgctgatcacgaatctgccattcattttgaccaatttctaatgccggatccgaactcgaacaaaaaatcgaaaattcaaaattatcaaaattctttttttgttcgtatctttacagaatgaccattttttggttttgaaacggcgtttatctaaagttgacaaccccgaaaacacaaaacaatgttttaagagaaattttttaaaaaatttaaaatttaattctcgaaaaatgttcgagttcgggttagggattcggaattggttgaaatggagtccggattcgtgctcagcgcctcaaaacacccctagaaaattgtttaaaaaatttttagaaaaaaaaaatttaaaaatttcgggacctatgatcttcacaattgcccgttttttgtttctttttttatatacattcaaatccgtgcaacaagcccgaaaagtacccaaaacccatttaaaacagtttcacgggttaagggtgtgatggcgctgtttgtcacttgcgacaaagggttgcaggaaagcgtgagggaaattgtggaggacagtgaccgctgctgtttcgtttcgactcccgacgttattcatgctgcggtcatttcgtctaattagcattaattagcacaataatttcttttctttctgtttcagatgatgactgttcttttgaaggcgaagaaaatggcagaagttgacagcgaattgggagggaaaaattgaaggagacgaagagaatccgatggaatggaagtgaagggaatctgtgtggtctcataaagtcgtagaaatccgaattgacttctaaacataatgctatatttttgtttgtttaattggtttaagattcttcgttcgtttgttcttttcttttgacgattggttgttatgacatttctgttcgggaacaatttcatgattacggtttaatcgagttattcttgtcttttcatgtttttttctaattgaaattaaaaagttcgaaccacaatttaagaaaaaccagttattttactatctaatgaacttatttataaataaa

SEQ ID NO: 46805 - DNA, 1507 bp, Heterodera glycines
  unsure (1)..(1507): unsure at all n locations
atggcagacgacgacaaaacattggaacaaaaagaggatgagactcaaaatgatttatcagatgaaaagccccaaatgaatgatgatgaaaaacaacaaattgcgaaaagtttagcagcaaaaggcaaaccaaagcgaaaaaatgttaagaacgacgtcgaacccatacaaattaattccgacatggcagcagcggaatttgctcgtaagcttcagctcatccaggcggcatcgaccagttcatcggctgtaagagatccattcgaagcaaagcatcacaaataccaattttggaacacacaacccgtcccaaaattaagtaggcggattgcattgtgccttttttcattgcacttaattaagatacaacaacaaccgaaaacaattacattgatcctccgcttgatgtttcgaccataaaaaaagatccgtattcattgttggaaaagtttatttggtctgacattgatctcaacgcggatgaacaattggatgagctgtacattcttttgaccgagaattatgttgaggacgacgcgaatatgtttcgcttcgattatgggaaaaattttctgaaatggtaggacaaccaaaattggtaatattcgatggtagggcatctttttcaacgttttttacatcatgaaaatataataatatttctgcaaattcaaaatcgataggttttagcatatggtaatttagaaaagactaatttccaatttttgtacggattcagtcggaataaataaatgactgccagcagagataatcccgcatttctcaaatttgctcaattttgtcttcagggcactgatgccacacggttggcagcaacaatggcattgtggggtaagggccgttacttccggaaaattggtggcatttatcgctgctgttcctgccacaattcgaatttatgacaaaaccgtcaaatctgtcgaaataaatttcctttgtgtgcacaaaaagctgcgaaccaaaagactggcgccagtgctaatcaaagaaatcacccgacgagtcaatttgtttgggatttttcaagcgactttcaccgctgggattttcattcctaagccagtgggcatttgccggtagcaatttttttgaatcataatagtcatacatattacttttttaggtattggcaccggtcattgaacccgaaaaagctcgtcgagtcaagtttttcgcatattggcaaaaatatgacgcttcctcgtatgataaaattgtataaactgcccgaagtgagtcttcgaacattttcagcctttgtaaattgcattttcagaacaccgagtctcaattgacgctactcaacagagattctgccaaaagcgccttcgaattgctcagcggatatttgaccaaattcgacttggtccccatcttcaccatcgaagagttcgaacatttcttcctgccncgcgatgatgtcatttacacttatatgattcaggtgggaaaaccgactgataagtcgcgagacgggggacaataa

SEQ ID NO: 46806 - DNA, 676 bp, Heterodera glycines
gcgttcagtgatcgacgcggatgagagggaacgcgtggtgggcgcggtggcgcggacattcgtcgaaatgttggacctgcgcgaagtgagtgtggtggaaagacagacactattttagggaattttaatggccggatatccgattctggcattcgtattgactttgtagtcctggctgatcctggcaatccatcaccattaattattgcattgacatttcatttaaacttttaaacataatcacgcttaaaacaattttctaaaaaagtattacatattttgctgttctttggtctcatcaaatttttaaataggcaacagaaagcggcgagattaattaatacacaatttaaaataaagaattttgggatgccattcaattttatttatttgaaattaaatttttttaaatttaaaaataaggacacaaacagcgaagtacccccaaaaagggatgattaattcaccattgatcatgattcatgacccaatgatcagattcaaaatcggccccacccttacgcttcatccctcgcccgtttcaacccaattcggctgatgaatggccatttggtctgttccctgtatttgttcaccaaagtgtgctattccgtcaacattatgctccaatttgctcttctcaatgccgcactgacctcaaaagaccattttctgt

SEQ ID NO: 46807 - DNA, 1110 bp, Heterodera glycines
atgcgaaaattgacacccccaaatggtgaatggggacatttggatgctactgatcaggttgttccaatacaattgatcaggcacaccttcatgcgggacctgaaaattgcaataaacggtcgtgaaattttcaattctaattcactgatggcatacaaaacttatctttctcatgaactttcgcaatcacttgaagctaaagtttcgcatttaactgctgctggatacgaccgtgaagatgctagcaatctacaaaacgcaaattccgaagggttcaaaagtagaagacaacggtatttgggaggtcgaacagcacaatacattgcaaaaattgatgccgatcttttcaatgtaccccaatatttgattaatcattgtgaaattgatataacgatacaaccccatgacgacaattttttgttaattgacaccttagacccccctggtcaaccatatagccttgagcttgttggattgaaactctactgtaaaaaagtcagtcttatggatggtttggctcttgagttggcgaaaaaattggaaatgaaaccagcacggtatgctgtacgaaagacaatgatgaaagcattgttcataagcccaggacgctatgaatttaatgcaaacttgttcatggaccaagttccacgccgcgtgacaatgggacttgtcgcaaattcagattatgtggggaacatcaaaaggagcccattcaactttcagcactttaatgtacgggagttaagtgttgtggccaatggtcgctcctatccccaggcaccgtatgacattgactatgaaaattggaaatttgttcgtccctacaatgacacgcaggaggcgcttggttttgccaactctacatatggaaatggaattgattacttttcttttttgcacactcactgtatttatgtgtttaatatgacaaacagcggcgacgatcatggcggtttatttgatctaatcaaaaaaggctgtacagcagtgaacattaaattcaaaaaaccagtacccgatggtggaataacacttattgtgatgggtgaagcggactctatttactttttggataaaaaccgaacgattgcaaccgatacaaccatttga

SEQ ID NO: 46808 - DNA, 712 bp, Heterodera glycines
atggtggatttcgacacatcgtctttatacagtgtcaaggccattcttatccttgaccaggacgggaagaggataatggcaaaatattacgacaaacagctttttccactcgaaaaggagcagaatgtctttgaaaagaatgtttttcagaaaacccacaaagctaatggtattttttcattaatttaataaaatttgacaccgaacatttagcggatataatccttttggatggcctcgtttgtctttatcggtataacgtcgatttgtttttttacgtggtcggaagtgcaaatgaaaatgaattgattctgcaaagtgtgctcaattgcctttacgaagcgttttcgacaattcttcgaaaaaatgttgagaaaaaggctctgttcgagcacattgacacgtcttttctcattatggatgaaatttgcgatgatgggttcgtttccaattcacttttttaaaactttctgctatttcagcattattctggagaccgatccccaggcagtggtcgcccgttgtgcggtcaaagcggacgaattggcatttggcgagcaaagcatttcccaagttggcatgtcgctgttgggctctgcgaaggaccaattgaaatggtctcttctgaagtgaccgaaggataaaccaattttgtgattaatttttgttgtgggaaaataacaaaagtgttttatttgtattttttctataa

SEQ ID NO: 46809 - DNA, 454 bp, Heterodera glycines
atgggcaagggattccaaaattttatgtccaagaaggacttccatccaagtgcatggtggaacttaaaaagggtaattcctcacaatcagttatatttggctattattttaaaaatttacagaaatgggaagctgagcaaaagaatgacttggagaaaagaagacaggatgaattgcgtgtccaatatgagaaggagcaagaaattctcaacaataagtttgtttaagaaaacattttgcagcttacctaaattaatttttctttagggcacttcttggtgacgaaaaagcgaggttgggcctttctttcatgtacgatgcgcccgctggcattaacaaaaagaaggaggaagggccggaaccgaaattcgaatggcaaaggaaatacaatgcaccgcgtgaagaatgggcgaaaggaaatgaactcatccaggaccaacctttcggaattcag

SEQ ID NO: 46810 - DNA, 1066 bp, Heterodera glycines
atgtcagcacccgctgcaaagttaccccgccctccagagcacatgctgcgttatatggctcacatccgggccaagtctcttgttttctgtgcgatgggggtcagtggtctcattggcctttccttttacttcttttacgtcgaagttcgtcgcaaggcatatatggaatttgggaagtatgttttgttttgtttacatttacaatgattttgttttatttttatagaaattacaacccataccagagaatgcgtgaaatttgcgagtatcccgtcaagtacatgcattcctgcccttctgagctagccaagcgcctcgaagagaaggtttgaattgttaatataataaactgctgcatttcctacaatttattctagaatttttacacaattagaatgccctaaatctatcaaaattaatctaaactaaagcttttgcctcattttgatgttttcattgaaaattattgcttgccaaaaagtcacagctattataaaaccatagattagacaatttcttaggacaaatgcatttttgctgcaattttcatttcttgtaaaaatcctattcccggccgggatcccgcccctaaaataacacccggtatttggattcctacaaattgggatttgaatccaggggtcggaacccaaaccttggaaaaaccggaatctgaaaatatccttaattttttagttgtcactgaattccaatatgacatccattttgacaaattctggagcccggacccgaattcgaactaaaaaatttttcgaagttttcctttcttgagttttaatttaacttaattttcctgcgggactgcaattctaccgaattttaccaaacctgaaaacccatgaaataaatgacttttatttttattctaaatttagggagtgctcattggtgaccgcgactattccatcccattggacgacgttgtgcctgaaagccggaagaaggagttcatgatggcgaatgcgttcgaacgttttatgaaccgttaggcaattaagtcaggtgatcggactgttgacattaggatggatttagcacaattaaa

SEQ ID NO: 46811 - DNA, 1077 bp, Heterodera glycines
atggcgcatttggcaggaggaggcggccaagcgggaccaccgcaaattgggccgcgaccaggaactgttcatgttccacccgctgagtccgggcactgccttttggtacccgaaggggacgcacatttacaacacactgctcgagttcatgcgacgcgaataccgacgccggggtttccaggaggtcagaacattcaatagtcgaatgttgccttactaccaaaaacaaatgaatgagttgacagaggttttcgattgagcctttcccttgttccaggtaatttctccgaatatttataacgcaaagctgtgggagcagtccgggcattggcaccattatgcggagaatatgttccggtaagtcttttgggagagttaatgtaatttatggagcatgattagagtggaaaagtcggcattccctttaatcatttttaggttcgaaattgagaaggagcagttcggactgaagccgatgaactgtcctggacactgtctgatgttcgactacaaaccgcacgcctacaacgaattacccatccgttatgccgacttcggtgtactccaccggtaaatttaaattttatttttgttcattttcctgtccgttttaagcaacgaaatgagcggcgctttgtccggtctgacgcgcgtccgtcgctttcagcaggacgacgcccatattttttgccggaaggaccaaatattgtcggagatttcgggctgtttggattttctgaattttgtctacgtggaagtgttcggcttttccttccgtctccatctgagcacgcggcctgaagagggctatttgggcgacttggccacttgggaggcggcagagacacagctgaagcaggcattggacaacagcggactcaaatgggagctgaacccgggcgacggagcattctatgggccaaaggttggcaagcggaaactgattgatttatttgcttttagaaatgccaaaaaatcaactaaccaaaaaaaagatttctccgttgttcttttcttttccagtccaagggatggaatacatttacatacattagtagttacacgatgaacaattaa

SEQ ID NO: 46812 - DNA, 821 bp, Heterodera glycines
gtaactttaatcggcgcaagtggaggcatcggccaaccgctcggattacttttgaagaagaacccttccattgcacacttggcactttacggtgattaaatgtccattatattaattttcgactcattttgtattatagatcttgtcggcacccccggagttgcggccgacctttcccatataaacacccaggcaaaagtgactggccatttgggaccagaccaacttgttgcagcgttggagggtgctgacgttgtcattattcctgccggtgtgccacggaagcccggttggtggcattaatattctgctcacaacaaaatgattaatttcctttgttttgcgaattttaggtatgactcgtgacgaccttttcaccacaaatgccggcattgtgcgggacatggccgaagcagccgcaaaaacttgtcccaaagccttcatgggcattataaccaatccggtgaactcgacccttcccatcgcctgcgaagtctacaaaaacaatgactgtttcgacccgcgacgcattttcggcgtcactcttcttgacattgttcgagcacaggcattcgtttcagaactaaaagtgagtgaacatcattaaaatgagtcaaagttcttcatttcccttctttttaaaggggttggatgtttcccaaacaaaagtgtcggtggtcggtggccattccggagtgaccattgtcccacttctgtccagatgtacgcccaaagtcagtctgagtgacagtgagacgaaggcactcaccgaacgcatccaagaagcagggacggaagttgtgaaagccaaggctggcgcg

SEQ ID NO: 46813 - DNA, 770 bp, Heterodera glycines
atgcaaattttcgtcaaaactttgaccggaaaaacaattactttggaagtcgaggtatcaacttaacagtttaagaaaagattgtatatttgcattctaaggcgagtgacactatcgaaaatgtcaaagccaaaatccaggacaaagaaggaatccctccggaccagcaacgtttggtgagtcaattaaaatagagcgaatctatttaaaaaatggtctttgcagatttttgccgggaaacaattggaggatggacgtaaaattcctcaattactataaatattttaatttttgctcaaactttaaggcactttggctgattacaacattcaggtatgtctcaaattcagatgtttttttatgttttaccagtttgcttaatctttgttttagaaagagtccactcttcacttggttcttcgccttcgtggtggaaaggtttgccgtctcaagggttcttttataggaattaatgaactatacttaaaattagctttggagatttgacattcatttcttggtctaaaaagtaaatgctgacaggtccacggatcattggcgcgtgcagggaaagttcgtgctcaaacacctaaagtggagaaacaggagaaaaagaagaagaagcgtggccgtgccttccgtcgcattcagtacaaacgtaagtttatttgagtcacttaaaatgaatgacaatgttataaggtcgttacgtcaacgtcgctgcagcgggaccgggccgccgtcgtgggccaaactcgaatgctgcataa

SEQ ID NO: 46814 - DNA, 1687 bp, Heterodera glycines
atggaacaagaacaacaacaaaatgttcatcacagtgggcgcgaagtgcgtcagatgttcatcgactttttcgtcaaggaaaaggcccacaaatattaccattcctcttccgtggtatgcaacggtcgtttccgctctccctttgaccattggcattttcagattccccacgaggatccgactctgttgttcaccaatgccgggatgaatcaatttaagcccattttccaagagactgtcgacccgaacagtgacatggccaagctgaagcgtgcggtcaacacacagaaatgcataagggcgggtgggaagcacaacgacttggacgacgtggggaaggacgtgtaccaccacacctttttcgaaatgctcggcaattggtccttcggcgattatttcaaggtcagtcgtctcctttttttgctattctgtttttaaatgttttagagggaaatttgtacatgggcttaccagttcctaacagaatggttgcatatttcgtccgaacgcctttacgtctctttttttggcggcgatttggccaataatttgttgccggacgaagagtgtcggtaaattgtaactgtcaaatttaattttattcctgttattcaagccaaatatggttggacatcggtgttcctagtgaacacattcttccctttggaatgaaagacaacttttgggagatgggcgagacgggcccttgcggtccgtgttccgaaattcattatgaccgaattggtggcagagatgcggcccatctggtgaacgccgatgacccaatggtggtggaaatttggaatttggtcttcattcagttcaaccggtgtcttgtgagattggcagccattagcatgactttttaactttagggaggagggcggagtgttgaaatcgttgcccaacaaacacatcgattgtggtctcggctttgaacgtctcgtcgctgtggcgcagcaaaagacttccaactacgacaccgatttgttcaccccaatttttagcgcaattcaggaggttgtaggtggtgaaattttgctattgtaagtttggagcttcaggggaccggagcccgcgagtacactggcaaagttggttccgaggacgtcgacggtgtggacatggcttaccgggtggtcgcagatcacattcgcactttgaccatcgcactgagtgacggggggtcgcctgactcgaccggaagggggtactcacttgggagtttaaaaatcactgatgatgatatgcaatgcttgctttgtttttagttatgtccttcgtcgcattttgcgccgcggagttcgctacgcaactgagaaattgggggccaagcccggcttcttcgcctcgcttgttcccgtggtcatcgacattttagtactttgtttttgtggtctggtgtatgggggtctcttgaaaaccaatttcttaagggcgacacttttcccgagcttcgaaaggacccaagctcagccatggaaattatcaatgaggaggaggcacaatttctgaagacgcttcgtcggggccacgttctgtttgagaaagcggtcaatgctttgccttcgggcaataaaactttccccgggagcatcgcgtggcgcctctacgacacttacggatttccgattgatctcacccaacttatggccgaagagaagggactcactgttcagatggacga

SEQ ID NO: 46815 - DNA, 845 bp, Heterodera glycines
cgagtacacgccatggtattcgggccaaacaatttgccagccaaaagggcagcggagggttcatgaaggtaagtaagcggatgagtgtccgtcagggatgtcgggggatcgaggatgcgggaattcgtggtccgaagatgtcggtggatttcgggatttcaagaattgtctctaaaatggcgggaattcggctccgtgcatgtcgaggggtcgggatttcggatattctctaaaatgacgggaatttggggtccaggaaggggcatttgagggtgaagggagatatggtttagactcgaaaaaagaagcgggattctagaccggggaggacacaaaataaaagatttcgggatttgcggaggtaggtccagattattttgttttgttgaagatattagaagtttgaatgcagatcatatggtgcctcgagagcggagccaattaattaaccaatcaaaaataaaactaattgagggataattagtgcctcaactgggcaaactgagagaaatttgagcgactctaatgaccgctttttaaaggtgcgcgacgttttaccgcacagccaagggggcaaggatattccggaagatgacaagctcaaatccgaaggcattgtccgactacaggtgtcccccgagagaatttttaaatacctttaattaccgtaaaattttcattagtcgggcaccaacaaattggcatcccaacggggcatgaccggctttggcacaccgcggaacacgatgagcaagatgggctggaagaaggaatgggtggaggagtacgaggcggcaatgcgcgaatttgaggagcaacgaccgcccgggtcggcatcgtcggat

SEQ ID NO: 46816 - DNA, 1093 bp, Heterodera glycines; identical to SEQ ID NO: 45385

SEQ ID NO: 46817 - DNA, 2705 bp, Heterodera glycines
gggaccctttttgtttgcacaattttctaatatatagtcatgaaaatttattccctggaattcttggggtctataaccttgaattagatgtcagattcgtgatcagcgccctttcaaacccccggataataaaattttatggttttttatcacaaaaaaatttgcaaaacaaacgggtcgccctttttgtttttaataaaattcaaaatcgcccttctttaaagtagcgccaaaaaccccattattactttactggatccacaaatctataattacaagcaccaccttataattagtatttttacttgattttgaactccacaggtgcctatttgggttgtctgctgctgccattgctggatgctgtgcatcctctgcagatgcttggcatgtactgtttgatcatgatgaagcgaagctgactgagggttggccatgttttgttgggcatgtgcagtggtcgtagcaacagcagcggtgaactgctgttgtgttctgacggaaatgttcccattgttgctgctgctactgtttggcgaagggttcatttgttgctgacggaatgcgtttgaaggtctcccggggccacgcgcagcagaaaaagacgcactagcggaattctgattgtgagcacttttggacaaagacatcgctggaggatgaccaatggtaggggaaacaatttcagaggtttgcgatggactgaaactggtcattctttgggtaacaaaaaaaaaacactgtatcacatacaaaaaaataattgaatttgcggtccggacatttgcggtccggacaattgcggcctgctgaaaatcggacatttgcggcccgacaaatgcggtcggacatttgcgcctcggacatttgcggccaatttcttaagggccattttcggacatttgcggcccgacatttgcggcctgctggaaatcggacatttgcggtcaacggaacgccaaataattattttttaattccaaaaacaatgttttcttcccgactttttcgaccccaatcaaaataggttcatttatcggaaattcttttactcttaaaatttacgccgaactttaactaatctagtaattcttttcaaaaattgggcttgtcaaaaccccatcagtttgaaaattgctagtcagtttaccaactcttgcaccgaccagttgatattgtagagatctgagattttctactaatgttcgtacttcttttgccatcatttgggaattgtttcgctgatattcttttcctcctcttcgttgcttctagttgggtaggtttacgatttttttttcgagaagacttgaatcggcggcttattagagagcattaaattcggttaaaatggatggaaaataattttctgaggtttttattttgttggagtcgaaaaagttgaaccgcaaatgtcgtatttggctgtggccgcaaatgtccgaggcgcaaaagtccgaccgcatttgtcgggccgcaaatgtccgattttcagcaggccgcacatgtccgggccgcaaatgtcctacaacccttaaaagtaacttcttttctaaacaaattcgctgtttttgaaaaaaatcttaggaattcttcattttttaaatgaaaaataataatagttttgaaaattttcaagcaaaaacatacatggttttttattcacatacggcactcattgtaaagttcgattgtcatgttttgaatttcgcttttgtcagatgatggcacctttgcttggcagtggaaatgaccaggccgactgcgacctcatccgggcttttctttcctacattttgaaacgctggggcaaagagctgaacgcacgggaagagagcataaagcgaagtgcaacaggcaaaatgcaagcggggatgcacaaacaaacggtggaacatctctccccgctgatgaaatccctggaaaagtacacagtgaacaacgacatccgactgtacttgaccaacattaccaagtgggataaacagacccttgacaaagacaagtgactaaaaatgacacgggatagagaccaaacaaaacaattacttgttttcgttttggatttggcatatcttttaccattataatcctctaacactgagtctcatcttttgctcactttgcatttgttgacacaaagggaggaaaaagtgaatgattgtagcaatgcaacttgagttttcagtcttgcatatataagagacttgaaaatgacaaaattgttgcacattttgcggcccatcattgacatttctttattttaattcacaaattttcagactttgtgttgtcgaacgcaattacatcgtcgcaagcactgcttacatggaaatgtcattactttttttagctaaactttctatttgtccctgcaatgttttcttttctcaggtcaattggcaatgctccgtggcccgtcggagtgactcggtcgggcatccatcaacgccccggctcatcaaaggcgtacgtgtccaatgtggcacatgtgatgaatgacgaaacgcagagaaagtagccgagtttcaattatttaattattatatattttaagatacatccacggtcttaaaaggtattttcgttaaagcgcaagatttcaaagtcttatttctaatcgcttttttaggataatgtcaaaatgccaagaatttttccccaccgatcccagcaaatgtatggaatttgtgaagaataaaagc

SEQ ID NO: 46818 - DNA, 1635 bp, Heterodera glycines
atgcatttctaccagataaaattggtcgacaaattgtccaccgttttgctgaacaccgtccaaaagggtctccactcggacgacaaatgcaaagtgatgcgatccatggaaattgtggctggtttatgcgcaacgccaaccaacgagtcaattgtttgtgaattcttcgaagaatcggttccacgcttttaactgtgtttttagagtaattattaatttttagcaaatcataccgcggattttcgctcttttgtcactgaaggatattttgatgtgtatgtgtgccatggagtccgtgttggccatttccgagttgggacgggtcgcgtgcgaagccgtcgcccgctgtgaccgcgccgttcaaagtcagtggcaaattaatgctttttcattttataataattagtttataatcatttctgctgtattttagtgctcgtcggctttttgaccaccgatgccctttcttttggcaccgtcggtttggcggggatgcacgtggttgaggtgcacggacaccaaaccaggccttatgttgcggttagtttccgtcttgaaaatcacaattagaagatttaaaacttcgcaaaatgaatcaatttttagccaaacaaaaagaatcctcccccgccgcttaaacttcaacccgtacaacctcccgttcaatatgcgcaacaacggcaccaaacgccggcgagcagtacaacaacaacggcaccaccatttggtgaagcgatggaatttgcaataaatgctcgcacagatactcttgaaacatgcccaggtaattgatattaattaattaattatccctccgaatgctttcgtctccttcagatgcctttcaacgtcgtgcaaccgatggcaatgactctgctcaatttgcctctcatcagcgtcatccaccgactcgcaaaaaagtttatctgaaatcttcgcgcctgccttttctcaaccaccgacaacaattggccaccgatgctccgcctttacaaaatggcctttcgtcaattgctgccgcggttccgtcgtccattgaatctgtggcgaatgaacgcgactttatgtgcgaatggctgatgcagtcggagggggacgacgattggtcggacgaggagggcacagcagcggggccaattgagccgtgcgcgaggtgtgccgggggttgtagttcttatacaaaaattccagactttcccggcggccggaccccattgatttttgaaaattttatcccaaaacagcaaaaattgaattgttcaatttttatgcgcaaaaccgctgaattactacttttttggcctgaagagcaaaaaaaaaaaactctccggtgccctccccaaaatgttttatggatactggcatagtctacggtctcactggccatttctcagggcattgttttgttttttctctttttgttccccacttaattctttcgtctgaaatttcaggttttttgcttccgcctcacaaatgcttttccacgtgtacaacgaacatttggtgccgcttgtccaacagcacagcgacggcgaaccgccgaggattcgctgtcgttggcccatttgcgacaacactccgcgcactctgtggtccatcacaactcatttgcaagtaaacaatgatgagtaa

SEQ ID NO: 46819 - DNA, 1270 bp, Heterodera glycines
atggacgacctgaagtatgtgtgggaattcgacttctcggcaaaagactccatccgctattacaaccgtgtgccggtggaaaagcaagtgtttaaaaatctgaagctttttatggaggagaaagatccgggggacgatttgttcgaccgattggatgtgagagagcaaaaaggaaacattgcttatttactcgcttgtttagacgagttcgttgaaccaatacctgaaggaactgatggacggactgaccgcgaaagtgtttcgtacgtataacgcgtcgatcactctccaagaacagctggacaaactgacaaatcgtatccatctcatttttaattgccaaattaattccgaaatttcagcttccgattccgtccacgagaaaatgctttcctacaatcgtaaagccactggttcagaggcatttcacttatattgcctacattcaggtgcaaatcgtcaggtggccatcctttgtaaccatcaaagggcagtgccaaaaacgcacgaaaagtcgatggaaaatttggagaataaagtgaatatgacatgaaacggaaaagcaaatcctaagcaaaattcagataaaagagaagaagcaggagtacaaggagttgaaggatcagctgaagaagagcaaatcggtggacgagaaaatggcaaaaaaatacgaaagattgaaggaacagatcgccaaactgaacacacagcgcacggacaaggcatgggggaggaagggttggccaaaaagtccgagacaaatttggaatttgattttttttggggaaataagtcacccttcaaatcaacgaatcgggaacagcaaagattggtcatttttgatttcaggatgaaaacaaacaaattgcactgggaacctcaaaactgaactacttggatccgaggttggttctatcgaatattccaatttactatgtccaaaaaaatttcaggatttcggttgcatggtgcaaaaagaatgacgtgcccgttgagaaaatattcagcaaaacgcaacgcgacaaattccgctgggctctcgacatggcgaaggaggacttcattttctgacacttcctcgcaaccctttccgatttcccttcacccccttttactcgctgttccttacttttggagagtgcccctttcctctcaatcactctcttctgctggacctaaactagtagttgtttatatcttgtcatgcctattgtttgtgtgagcgtttgttttcatatgtctgatgattggttcgtattttattaataaa

SEQ ID NO: 46820 - DNA, 453 bp, Heterodera glycines
atgcacggcggcatctccgatcagatccaaagcctggaccagctcagcaacttgcttcgcccgcaaaccgacccaccacttcgttcgctggaaattgatctcctctgggctgacccgtcgaagagcatcacaggcgtcgccccgaacagcagaggagccggcgtcatgttcggcgcggacgttgtggagagcgtgcgcaacctgctcggcatcgactacatcgttcgagcgcatcaagtgagtttttttttggcttttcatttcacttgctttcaataattttccccttcccttctttttcagctcgtcatggacggcgtggaatacttcgcggaccgccacctgatcaccttgttctcggccccccgctacaccggcaagaacaacacgggcgccacgctgctgatcgcgccggacctgagccacacaatcacgcgcttcccgccggcctga

SEQ ID NO: 46821 - DNA, 374 bp, Heterodera glycines
  unsure (1)..(374): unsure at all n locations
gttgccagcttgtggatggaactctgctcaggacttatggagttgatgctgattcaaccatccaccttgacctcaggttaacttaaggtttacaatgtgtgcaaaaatatttttagattgcttggtggtgggaaaaagcgtaagaagaagcaatacactggcccgaagaagcagaagcatgttcgcaagaaggtaatttgggtttttaggtctatggacgaacaattccaaacttaggtcaaactcgccgtgttgaaactttacaaggttgttagacattacaattgagagaataggtaaaattttgaagattgatgacaatggaaagattcatcgacagcgtttggaatgcaatttcgncagctgtggagccg

SEQ ID NO: 46822 - DNA, 278 bp, Heterodera glycines
tcgaccgagcaggaggcgcatcgcgagttggtcaaggcgatcaaagagggcattgttcgtgctcagttggtcgccggcgacccgttggcgggcgggcggcactacgtcaaatttgggaccaccgatgaccaatatcgcggggttgagccccgcagggaattcgacgcgcgggtcaacgaactgttggagctgtaccaccaggcggtgaaggcactgcggtacccggacatgcgcaacccggaggtggagaccattgacgagcagcgcaggcgtgaaca

SEQ ID NO: 46823 - DNA, 672 bp, Heterodera glycines
atgacgacactcgaaggcgcatttcaccagttggaggacggggaccacgttgtgttcaccgactttgagcacgccgaactgaacgaacttccaccagtgccagtcactttgaagggaagtgagtgccaccactgatcatttgttggttcatctacagtcctcccatttttaggcaaagtcttcaacattggaaatgctctcgcggccttttctggcgcagttcaaggccccgtttcgcgtggacgtgttcagcaagtcaaagtgcccaagaaaatgtccttcaagccattgtctcgcgcactcgccgagcccgactttatgatttgggactttgccaagttcgacgaacctgcgcaacttcacgccctttggcaggctttgtacagttttgaggagatggttcgtcatcttgcgactttccatttggttgggttttcctttcagaaaaactacagccctttgccccgttccgatgccgacgcaaaattgttaaaggaaatgctgccaaaagatgcgcccgaaatgccggactcactgctcttcaacttctcttaccaggtcccttgtgccactttcaacttcgaattcctccccgtctttaaggcgtgtggaaatctccaacccatcgcttcgctcatcggcggtttggtggcccaagaggcgatgaaggca

SEQ ID NO: 46824 - DNA, 1011 bp, Heterodera glycines
atgattggtcagactttcatccgaaacatcaaaatgagcataaatggacgtgaagttttcaactcaaattctctgatggcctacaaaacatacttctcccatgagttgtcctattccactacggcaaaggactctcatttgaatgcagcgggctattatagggacacgggcggcacgcttgagacaggggacggctgcattgcgcgacgtaacttgtttgcaggaagcagaacagctcaattcattgccaaaattgacgccgatttgttcaaccagccactctatttgatcaacttctgtgagctggacattgaagttttacccaatgacaacaactttttgttaattacgactcttgcggctgcccctcgctaccactttgaggttgtcggtttgaaaatgtatgtgaagaagatttcattgatggatggactggcgttggacattgcgcgaaaacttgaagtgaaaccggcacgatacgccgtgaggaaaacgttgatgaagtcaatgttcatcagtccaggtcgttttgagtttactgccaatttgttcatggaccaaattcctcgccgtatcacaatgggattggtggctaactctgactatattggaacaatttcgcgtagtccgttcaactttcaaccgtttaatgtgcgcgaaatctcaattgttgctaatggccgctcctttccccaagcgccttacgacttggactaccctaatttgaaatatgttcgccctttcaatgacatgaacgaagcggtgggattcgccaattcattggaaagcaatgggattagctatgaacagttcgggaaaacccattgcatttatgtgttcaatttgactaacagcggggatgatcaagctgcgctgtttgacctgataaaaaatggaactacagcggtgagcatcaaattcaaacaaccagtgcccgccggagggataatgctggtggttatgggtgaatgcgactctctggtgatgttggacaagaatcgatctaattag

SEQ ID NO: 46825 - DNA, 2243 bp, Heterodera glycines
atggttcatattgtgtttgatccaagtaatgcgggttatgatgaatatgtgcaatatggtagtggcgtagagattgaagactatttcaaaggatccagcccattccaacgaggatacggtgctcaacacggtgctggggttggggacgtgtttcgagggatttggcgctttttcttgcctattcttcgccgtgtgggcactacagtaggatcggaggcgctgagcactggtcagcgggtattggatagagtcggaaatgagggattgcctataaaggaggcgctcgtgagtgaggggaagcgaggcattgataatgtgttggataaaggcggattaccaaaacaatttggcacaggcaaaaagagtataaaaagaaagcaaaatagccatcaaacaataattggacgaagaattgcgaaaccagtgaggaaacgtgtacgctcagacgcatttggtctttattaaatggcttttcataaaattgataatgatagtgtaaactcaataacgaatgcattggacttttttcgtattcctccaacaaatgtgagcgtctcatcctcaaaagtatttgagcttcttcccagcaatccactggccgacacaccttatcactttaaactacattcaagtcaaaatttcattgacctttcaaaatgttatttgctcactgaatttcgcattcgtaaggaaaatgaaaacggtcagttggtgaacattaccgcagcggacgaggaagtggcgccaattcaaatgcttggccacaccttcattaaaaatatgcgaatgagcatcaatgggcgtgaaatcttcaactcaaactcactaatggcttacaagacatatttctcacacgaactttcatattcaactgccgccaaggactcgcatttgaatgctgccgggtattataaggacacctctttggttctcgagacaaactcaggctgtgctttaagaagaaatttgtttactgaaagcaaaacagcccaatttgttgcaaaaattgatgcggatttattcaaccagccgatgtatctaattaatttttgtgagcttgacgtggaaattctaccaaatgacaccaactttttgttaatttcacccacttatgccgggacgcgctttcatcttgaactcgtgggattgaaaatgtatgtgaaaaaggtatcactgatggatggattggctttggacattgcgcgaaaattggaggcgaaacccgctcgctatgcggtaagaaagacattaatgaagtcaatgttcatcagtccgggtcgttttgagtttaatgcaaatttgttcatggaccaaattccacgccgcatcacaatggggttagtgggaaatgctgattatgttgggaatattatgcgcagtccattcaactttcaaccttttaatgtgcgggaaatctcaattattgctaatggacgctcatttccgcaagcaccctatgatttggactatcccaatggtaaatatgtgcgcgcttttaatgacatgaacgaagcagtgggcttcagcaactcaaatgaaagcaacggaataacttttgcacagttcggaaagacccattgcatttacgtgttcaatatgacaaacagtggtgatgatcaggcggcactatttgatttaataaaaaatggaacaacggctgtgagtataaagttcaatgaggctgtgccagttggtggggttatgcttgttgtgatgggggaatgcgattcgctggtgatgttggataaaaatcgctcaattagcactgatgtgactatttaaatcgatttgtaattgtgctttggccagttaataaaatgaaaagaatttctatcatttttctattggttcgtatttttcttcctgtcgtgagtgaggtgaattccttacctttttttaccaatattgatcatttgaaaagattagataatgcgaccataacaccacacaatacaactaaagtttccaaactacctgaaccgcataaattgattgatgagcctgtcgcagcccttctcccaccattaattcaattgtgtaaaaataagccagaggaagataatttttatcaacaaactgtgtgctgggctctttttcttctctatttaatgctaattttgagccttgttctgcatcaactctattcaatttgctggtttaagcgaaatggacagcaaacaaattacgaggattttgatggaaaatcgattcaccgcaccggtctttcgggggtgcttcgctag

SEQ ID NO: 46826 - DNA, 2441 bp, Heterodera glycines
tatattaattacatttttatttaaataaaaaaattttaaaataaaattgaattaatttatttttatataaaaagcacgtttcagttgttgatttttgactggaatgaagtgtcgacagcttattccattagtgcctggcttctgttagccagcatgtcaaaattatgtaaaaataatttatttttttaatttatatttttaatttttttttttagtttttcatgtaaacaaacgaattgccgaagcattgcctgattcggcactgctgattgcgttgggctttgttctcggcttcattttacgcttgtgccaaattgatcaccgaatttatatgctccaatcgcctatattttttctgtaccttctccctccaatcatttttgatgctggtaaatttagttaaaaatcaggcaatattaaaaggagtggttgacaaaaaaaaaatcagggtaagggttgaaaaattaaaattttttgttgcaaaatcaaggattgtataaaaaaattttgaaaatcaaaagggtcccccttttagttttgtaataaaattgttcgattcttagtcagactttttgactccataaagtgccaaaaatcctttaatttaatttattcaacaattaattgtcccaaatttctaacattgaactttaggctttttcatgccaaatcgacaactgtttgaaaattttgactcaattctgttgtttgcttttgttggcacaatttggaacacaattgcaattggtaaaaaaaataataaatttttattaatttggtaaataattaattaaattagtttttcaaaggttactcattgaattggatgggccaagtcggctttttttctgtccccttcacaacctttcaaattttgttatttgcttcactgatttcatctgttgacccggtggctgtcattggcatttttgaagaaattcgtgtcaacgagtttctgttcatcaacgtttttggcgaggcattgttcaatgacggggcagcagtggtctaatttttttgctttttaattccattttaatttaaattatttcctgaaaaaaaagtcgttgacctgggcctgaaccaacattccatgttgcacatgaacctgcattttctaaacaaaatccatgtcctggaaaaatacaggcttgtcatggcctggatgtttttttctttgaaattggttttaaaaagcaaacaaatgaattgcttaggaatatttaaaaatagctaattgacaaaaaataatatatgattaaatatatttaatcattttttaataacttgaaataaaacatcggaacttgaaacaacaaaatttcaaatatgacgcaggaaatttaggttctaattaatttattcaaatatttgatgacttttcgtctttctaattggtttcataatcctgttaaaacaggacatggttttagtcgatagtgctgtccgggtacgactcggaaatgcgtgacatggtcggacatttttttcgttgattttttaaaatttttatggggcgaccccaaaaaacgaggaaatagcttaaaaaattaagaacaataaataatagctaattatttattgttattattattatttttttgtttacagacactttacaaaatgttccaagaatttaccaatattggcccttacaatttacatgcaatggattacattgaaggcattttgtccttttttgtcatttccattggtggttgcattcttggactattttttgctgcactaacatgcatagcgacaaagttttttttttatagaattttttaataaattaacgaattattatttcttattgacaccatttttcggcaaagcacaactaaaattgtgaatttatttttaaggtatacccatgtgcgtctgatagcaccaatatttgtgtttgttgtaccatatatgtcctatttgactgctgaaatgtttggcatttcctcaatcttggcgtaatgtttattttttcattgaataattaaatttcgatattaaaaaaaaaatgttttttttgcagtttattctcttgaaaatacagtatcaccagcaattttttgcacgaataaatactgtttttttctctcaaaaattagtgcgtgcacaattgtaagaaactttttacagtaatgcattagaacatacagtatcatcagcattttttgggcaaaaatgaaaacgatatcaattgttttctttctttagaattactgcgtgcacaattgcgatgaagcaatttgtgaagggcaatttgagtcatgatgcgtacagttccgtcaaatattttaccaaaatgttggcacaatgcagtgagacggtgattttcttgttccttggcttttccctggtgtcacgggagtacacatgggattggacatttgtgtgcagcacaattgcattctgtttgatacatcggactgtcggtaaaa

SEQ ID NO: 46827 - DNA, 461 bp, Heterodera glycines
atggccggcattgtggccatctacgggctggtggtggcggtgatcatttccggccggctggaggcggccgggcccggctacaccatcgaccgcgggttcagccagttcgctgcaggcctcgtgtgcggtctgtgtggactgggcgccggctatgccattggcgtggtgggcgacgcgggcgtgcgcggcctgtcgcagcagccgcgcctgtaaaaagcggtgttgaaagcaaaaaaggtcattgatttacattaatttacatggccggagaccccttcgtaaaattggaaaattggccgctgatcccttgttttgcaataatctgaattttgaggtctacatctgaattttagtgttctttatcctgaatttgaaaaaaaaacttggtcaccctcaatatacatatacttctgaacaattctaatgctaaaaaacaggcactcgcgcgaaaactgaataaa

SEQ ID NO: 46828 - DNA, 3909 bp, Heterodera glycines
catcataaaatcgaaaagccccattcccccctccccccgtttttcgcctcctttttctttctctgccgttttgccgcgctaaattttaaacctttggcgtcagaagagcggcacaaaaaaatatatttgttgccaatttttgataaaccgaatttctaaccctgcaattgccaattgtttcttttaaaataatgccattatttcgacccgtcttaaaataagaaaaaaaacacaattcaatcaaagaattacatatgaaggcactttttaacttaaggtggcccaaattcttataaaaggaaaagaaaataaaaatgggcatcattctgacaagctttttttctttccaaacattgttctgtttggcactcctttttcgaaaaaaaacattttaaaaaggaggcaaaaagatatttccggtcgctgaacaaattgtgactttttaaaacaaaaatattttaaaaaggcgagaactacattaaaaaattctatgtgaagtgcgaatttcccattatttttgattttgattattttcttcaaaaacctttcattaatcaatttggtgacctttacagagatttttaaccacatattctattgaaatgcacgagttccatgcttacaacccggaccttccacaaattatcacttcttttaaaggtgttcaaatttattgccaatgatttaaaattttatcgtaattaatccctctttgtgctttcaggcaatcagaagctgatacttggcggctttcgctacaatatccaccacatcaaagagggcgtgaaaacgtggcgttgcgtttgtgccaaaaaattgaccggcacgcgcagttggtgcaaaggtgggacggataattagtttagttattactggggaccagcagcagtcagtagaacaggaccggaggctcctgcaaaaaattaatagtatacagtacccgtccatgatttcataaaaacaaagtcttactatacttttcaggattggaaatgtaaattttgtccatttgaatttgggaatgttaaagcattagttattccgaaaaatgaattagtcccagcgaattgtttcgtttatttgtaattttgatcaatttgaaggccgtgccgaaacatgggacaacgacagcaaaggcattccgaagggcgaacacaatcactcgacggagcacgaattggccgagttggaattctttaaggtgctgctgctaatcttttaccaattttggcgaattttcaatttaaattgttttcttttttcagagtcaaatgattttggcggcaatttctgaaccaaccgccgatttgagcacactaattgatgaggcggccaaatttctgagcgaaggcctcaactttgggaatagggaatcgatgaaaaagtgagtgccatggcatttgctaagaaacgaatttgaacttggctaaaagaattgcattgcttttctggcgttttctctattcttttttccggattttatctttttggcgttctgtattctgtttttattcaaaatgttcaccttcatccatccatccccaggtctttgcttgtggcgcgcaaatcggtggagagcggcgagttcaatttgggcaaacaccggacaatttcatcgggcggtcagcagcggagtttgagcagttcgactggcaaaaagaaaggggcgggcggcggaggaacgacggcacaccaaagcggcaaatcggcagcagcgatttcagcccctaagggtacagtggcgagcaaaagtgtgagtggtttgtccattgttttgtgggattatttttgtggcggtgaaaccatggcttatctgactgtgactttgtccaaatgcgtgttaaatgttttgtttctcgtccattgtttgttggtcccccttttaattgcttttaaatttgcttttatcttttaattggctccgttattaatcccattttgccattgtcaggtgcccgtttcgtcccttctctccgtttccgctgtgccaatgccttcctcgtccaaatttccctctccgtcatcgtttaaacgtagtgccgcctcttccgccgatggcatcgcaacttccttcgacacgtcgggtgctgcgagttgtagcaacaccagcggttacggcacattgtccacttccggcctcgcagacgaagactccgccacccatggcatcggatggatggatttgtctggcgaaagtggcaactttctcacttcgacggaacaccacagccatgcaaacaacgcgccgatgggaatgaacggcgggagtgccaatgccaatcttctcggagttgaaggtgggatcagatcacttgctgatcattgaactcagggtctaatcagtcagtcacgtttgttcaggtaatccgtcctcctcaaccgatcaacaacagttgttggctgcagcattgtttgctgctgccttgctgggcaatccgtccccaacgccgtcgaccacaatcgctgagacattctccaggacgttggcgaacagtaacagcaacacaactggcagtttccagcagcaccagcacacggtcggcgaaatgatgatgtcaatgatgatgccatcgagcaacaacaacaaaagcaccaaacgggggttggcacggtcttcggcaacggcaccagcggtggctggggttggagcagttcaagcaaaacaacagagggaatcatcacaaacgagaacagcaaatggcactttggataacagccgaaatgcggcgattaatgcgcgaaaaaagacggcacgcgtcaattgcattttgaataagtgagtcccaaaagggaaagtgccattgaaattttgaaaaaaatgcaatcacttttccgactctcgacaaaagctgcggagaagagtgtgtcgccatctccgtcctccaataactccgagtcaagttcagtcgccaaagtcgcggactcagttgacagcgaacagaaggacactgaaacccaacgtgagaagcaattggttacggtagcgacacagacggaccgggatacggtagtcaatgaagacgaagagctgaaagggacgcgaaagcgaaaatctgacgaaaacgcgccgtttggtcgagcgaagcaacagaacaggaacgaaaaagaggggacagagaagcgaaaggttcgcatgaagtcaaatgagaaagagaaaacgaagatagagagagagagagagaggaaaatattattgacaaaagagaaaaaagtaattaactaattaattaccctgagaatgatagaggggaaaagcattgaagaaaacgatttattatggcaattttaggtggtgtgttgctgctgttgcgaggagagtgaattgaacggatgggaaatgccgttgggatgcaaacggagggtgctgaagaccgaacaaaacggcacaacgacgaaacagcaacaaatgccgaaacaggaggaggaggaaatggcggagcaagagagcgatttggaggaggaatttttcgagaatgaccacgagatcaaattggaaattgcggaagaggaggaagagcatccgcaaaagaaggaggggagcaaaggcgaggacctttgagaagttgaagcaaaaacagatgaaagtgtggcagaaagaataaaactcaattgatcattccggtatcgaacatgtgcgaaaagaattggaaaaaacaattcgaaatcgaatggaattgaacaacaacaattttgatcgaatgcacgggtgttttgccaatgcttttccttttcttttttgctgctgaaagcctatttttgtcattttcagccaacgtttttctagtctcgggaagcccttctctctctgataaaattgttttttaattgcattcatttgattgattgtcccttcttttttcaattgtttctttcggacttgatttggctatttctcttcttcattaacca

SEQ ID NO: 46829 - DNA, 1449 bp, Heterodera glycines
atgggcgccgatctgtccaacattctcaaaattcaacggctcagcgacgagcacatccaatttttggtgtaccaaattttgcgggcattgaaatacattcactcggccggcattatccatcgggatttgaaaccgtcaaacattgcggtgaacgaggactgcgagttgaaagtgtgttgtgtgttcaagattggttaaattcagcagaatgatcagtttaaaagtatttttttgtcggaatttccgcccaaatttttttcaacaattacagtatgaccattatttggtttcaagtaatactgtatttccttgcatttttttagtttttgaattaaaatccaggttcaatccaggggataagccgatcccgaatcaaatccccgacatttttaggtcatcatcgtacaccgatttgcgattcacaaattttgaaatttcgggatttttgaattttcccctaatcggatccaaaaattaaaaaaaaatgtataacaaacaatatgataccggcacgaaatggctggcaattttattacttttcaagattctcgacttcggactggctcgtcatgctgaccaagaaatgaccggctacgtggccacccgatggtaccgagcgccggaaatcatgctgaattggatgcactacacacagacgggtgaatgcttttttatacttttttaaataaataaattaattattaaatattttttgatttattttttattttagactattaattgctcttttgattattttttgctaaattaattaattatcaactacaaattgcttttttaatcatttatcaaatattgtgacctgcaaattgttttttatttgggttttactaattaattaattactaattgctttttttgcaaattaagtggacatttggtcggtcggctgcataatggccgaactgatcactggtcgtacactttttcctggagcggaccgtaaaaaacaaaataaaatttgaaaaaaattccaatttgaagatattgatcagttgacccggattatgtccgtctgtggcactccaaacgacgaatttttgaaagtcataggcaaaaaacggcatttttcatttacctcttatgccattttcgtttttccagaaaatctcgtcggaagaggcacgaaattacattcggaatatgccaagaatggagcgcaaagatttcaaaaaattttttgccaacgcaacgcccgaggcggtggactttttggagaaaacactcaatttggaccctgattatcggtaaaattggatggcataattagcaaattgaccgattttcgaataaataattttttgttgcacagtccaaccgctgaacaagcgatggaacacgtgtacttcaagcagtaccacgacccaaacgacgagccaacggcggacggacacatcgaagtggacattgaacaggagctgagcattg

SEQ ID NO: 46830 - DNA, 1781 bp, Heterodera glycines
  unsure (1)..(1781): unsure at all n locations
gcatttgcacacacttttaaaaaatgacaaccgcactgcaaagnnccatgaattggtgaccaaagcgactgaagaggacaaaaccaaaaattacgaggaggcacttcgattatacaccggatcatgcgaatattttatgcacgccttgaaatgtgagtgggcgaaaaagtgattttcttaattgtgagacggttgggggtgaaagtacggcactttgcatagatttggttaaaaatgtcaactcgaaaactgtagggagttggctatacttttctattgtaaatttatgacagaaaaatatctgtgaagtttgtcccgaaaaaacgagaaaggtgtcaggaactgtactttcgaaggtaaactcaaaaaatgtcgtcctttgtttattaagtgccaaaaaccgaaattttcaattttgcgaattcactgcttggtagttcctgtttgaagccaacgaatattttttcaattaatatacactggaataatccttacttaaacccatttgaaaagataaatgaacaaaatggacaaacccttcggcatttcaacagcctattccaaaaatgggcatttctataacataggggaagctaaaaacaacgggtttgagaaaaaagtcctaaaaatttaagaaatttgtatccgtttgtccatggagtttttttttgatagggagtgttcattacgaaatgataaatttctaattccaatccaaaagtaatttcttaggacacaatttttttcaaaatacggttccccttcacctttggcttttattggctcatttttgctgttcattcatttgcagacgaatgccaagccgaccgacagaaagagaccattcggctcaaaatcacggagtacatgaaccgtgccgaaaatttgaaggcatttttgcgcgacggcggcgagcggacgaaaagggcacggccggtgaaggaaaatgagaaggactcgagcggagacgaggcggacgcatcggacgagaacaaaaagttccaaaaggcggtaggtaccattttcaatttttttcaatttcatttaattttttcaccaaattgtgcttttgcaaaattaattccggggtaaagcgtggaacaggaccggatcatgaatggttttctcgggaaacgttcccctcatgtcattccatcccaaaattttccaaactactagtattttgtgcaaatttccttttggacagcttcttaagcttggaaatttttttaaaatttttcggggacgggaaacgttgtgcacccggtttttcactgggtcctcctgtccgtgtttctgttcctgatccgagtaatgttgccaagatcatccgatttatttctccagattaatattattgttagttttctaacctctttaccggaaaaaaacaacataaaacttttgccaatttcgtaaaaaattgtataaaatttaaaaaatcgcaaattcttcagatgagcaaggcgatcattgtggagaagccgaacgttgtgtgggaggacattgccgggttggaagacgcgaaaagggcgctgaaggaggccgtcattttgcccatcaaatttccgcacattttcaaaggtacggtgatgaaatttaattttctgtttctgtaagaaatttggcatttcttaattggggaccaaattgtgccataaaaaagagggcaaggagtggaccaaattttctcgaccgaaaaataaaaacaattgaaataaatttacaaaatgcttattaaaatgaataaatattaaaaaaaagaaaatataaagcattga

SEQ ID NO: 46831 - DNA, 852 bp, Heterodera glycines; identical to SEQ ID NO: 9955

SEQ ID NO: 46832 - DNA, 2272 bp, Heterodera glycines
atgggaggcccagcaattgcaaaccgtacaacaatcattcaccgtgaaatgtttgcaaaggtgggatacgaagcggccaatttgccggacaatgatgcggaaggcattgtggccaaggggctgtatcaggcttggtaataccaattctagtaccaattaaaaaatagccaatttttatcgcttcaataatttgccaaaaacaataattttgtttaggtttactaatctgattgccctaccattttaaattgccaatatccaagacaacattccaggcccggctcctaaatcctggttctattcccgaattttaaaaaaacatataaggatcacagatacccaggacatcttttccaggcctgacctaatcatggtcctgccttttcaagtatcctttccagtagtcccttctaatcctggtcatgctcccgattttttttttatctccttctctcaataaaatacaatttaaggcttgcatttggcgttaatgacgcaattgttgttgtcgtctctggtcacgctgatcgcaacattgaacagttccaattggaactgcggctggaacaattgtcgggaaacaaaatccaaattgtcaaactttcaattttcgaatgcgatgatcagtgaatttttttatttaaatttaatccaaataatagcgataaacattttagatttgggaattaaataaataaattatttcccccaaattatttaattattcaatattttagattatttcttgatccagaagacaattcattgcgatacaatggtcacttggtcgctgttgtgtattacaaaacaattattgtgaacccaatacaaaagtcatataatgcacggctcaaaatcgaaaaatcgacggcaattgtattaataaaatacataaataataatattattataatattaaaattaaacgaattatttcacctttaaatgaaacgtaaatataaattttcatcaattaaattcttaagaaaagcccgactattagtctcgagttgacatgtgccaaaaaagttcaacaggtgacgttcaaaaaatgatcgttttttcataaatttgtttaaattaattatagaaattaattttttaggccctttctgaaccaggtatgttggaacactttttccctgaaccagaatatgcacaaatggtcaacgatatacgaaaaacatttgcaaaaatgtggagccttgagcaagatgatgatgaaaccatgaaaatcattagcgtaattaatataataaccattaattaataagtttaaaataatttttgaaatcccatggacaaaaagattttttccatttcacatatcttactgtaatgcttaaatccaattttaaatcgcttaagctgcaaatccctaaatttaaaggatgccattgaaaatcctggtaattacgtgctaaaaccaagccaagaaggaggcggcaacaatttttggaatgaagaaattgctgaaaaattacgcactttcaaacccaataagcgagcagcacacattttaatggaaagattaaggccacttgttgtgaaggtgcgcggtacaattaattaataattatccaattaacagtggtcggtgataaaggaaaaaaaagaggggtgtgcgagacagtgtgtgaaaatttaatttaattaattttaaatattattatataatttttgatctattttccactttactttcccctccaaagtaatatattaaatttattgaattaaatttcaaatttatgatatcatattattaacgggtgggggatggagaagcgaaaaaattttaataaatattaaatgttattttaatttttcatcaaatatccacttcaccctcacccttaatgggctggtactaataagtttaaaatttaatttattaattttaatactattttaattgttttattatcctccatttccgctggtgccaatatttttacattttaatttaaaaaatataaaatattggttcaattttatcgatctccagttcccctccccgttaatgggaaagtattaataattttaaaaattaatttaatttattgaaaattttatttattagaatttcatggtccgcccatacgtaaaagaggttcctcaactgtccaacattgtcagtgagctgagcatctacggctatttgttgggcaacgccagcaacatgcgtgtgttgcgcaacgaacgtgacgggtgcatgttgcgcagcaagcgcgaggatgccaccgaaggcggcattcactcgggcggaggc

SEQ ID NO: 46833 - DNA, 946 bp, Heterodera glycines
atgctttgcactggccatcactgctccgaacggtggccaaacccccctttccccgggcagtctgtcttccgtggccaagtcattcactcgcgcgcctttcacaccgcaaaaccattcgaagaccaaactgttgtggtggtgggcattggcaatgtaaatttcccggatataatgaataaattcaatggactaattaacatactttcagtccgggggcgatattgcggtggaactgagcaaagttgccaaaaaggtgggcccatggattaagatcggtcgaattgtgtccctaaaggtgtatttgtcgacccggaccggctcgtgggtgatcaacagagtgtgggagaagggccaccccactgacgcggtactgctcaaccgattcgcatttgccctgcgggcgatcactccgcgcagcgtccaaaacaggcaaaggatggcattaattgggccggggcgggcacttcacagttccttcccctcggccttcagattgatagagcgcaagttgaaccttcgctttgaccacgaacggtacggccttcgcccgtcgcatcgctttttggaggcgcacgtcacagtgaacgacgaactgcccaatcgaatcgcgagcggaacggtggtgatgaagccgaacattcagaagttggcggagaaggacgtggtgagaaacggaagggaccgacgggacgaacttcggcagacaaatcgaacccaacaaaaaacaaaatacgaccccccggggacaccattttgtagttttggatgaccaaacaaagtttcagacttttgacgatggtacgactgtgtacggtgtggatacagtaatcttcgccaccggctacaactttttctttcctcagctggagaatggcagattgatttctgtgcaggacaacaaaacacttttgtacaaattgatgtttccgcacgacttatcgcctaa

SEQ ID NO: 46834 - DNA, 1951 bp, Heterodera glycines
atgaataacgatgattttcgaaaacttttggctgttccggcctcggtccgcagttcgcactcttcaagtgacagagtatctgtcaattcgtcttccgtggccaccttcacccatcgtcaagttgtgtccgttgctgcttcgactgggaatgtggcgaacaaaaaagcgccaaaaaaacggaattttgccaattttcaccgggaaaagcccgtcgagggcaaggaggaagacgacctcttcgacgagtcacaggccagactgaatgaaataatgaagaattatcgggaccgggcggcggaacgaaggaaaggcgtcagttcgacggacgacgaaatcagacaacggctgatagcaggcgcatacaaagcggtgccaggcaatttccttgccaacagttcgctggaggagacacgacgaattgaaattcaggtcttgtttggtttggggtggacaatcccagtcgaagaaaaacccattttagaattattttttatacgtttagaagtcgaaatatttgggcggagacatggagcacactcatttggtcaagggtttggattattcgctgctgaacaaagtgaggacggaaatattggagcgcgatgtgacggacaaagaccaggagcaacaagtgggtgatagaatcacttttaaccgtctttaaatcgttgggagccatgcgatgggataaacaaaacccaaccattgaattaaggacaacggacaccaaaaggattttagaaagaccgaaatttaatttaaaatgaatgagacaatccttatattttcttacaattagtcaataaatttaatcaatgttattctcgtaacgattaaacgtaataaattgtttcaggattctcaagcgaatgcgccgttgtcggagagcagtaaagcggccaactccaaattggcggcaaacatttgcaaattgctttttgagagtaaaccgcccaaacgcaatgagctttttgcgcgtggacgtatggcttatgtggtggagttggaggacgaggagacggacgtgcccagcactttgctccgttcggtggtcgactgcccactggaccaatccagcgagaacatcaacgcggacaatctgctgatcaatgtttgtgtgggacattcactgacattggaactcattctgaacaaaacgcgaaaataatttatattctgaaattattatttttatttctttgaccaaaaatagtcggaaactgctgaataagggaatttagtttatttcatcataataaatttctggggaatttgattttatataaattggatatcttttttaatttgcaatttttgtgttaagaaactcactcaagtgctcgcttatcttcggacggacgtcaaaaaaagacggaagggcgctggtgatggcacgacagaagcggcaaaaggggaggctgaaacgagcatttttgaggggttggaagagtacgagccgagcaaggaaaggcagcaggagacgagacgaggacgggaagaaggacagcagaagaggacgacggcctcttcctattttgacactgacaacagggacaggtaatatttttggaaaatttgaaaaatatttaaaatggaaggtatttttccggtatacgggtctgatcaagaccaaatttccatactaatatccaaattttaacgatgggagtccgcggtgccgataggcgccccaaggaaacatttgcaaattgtcagacagttgcctaattactcccagttttccagcagaagcggcagagacgagagggacaagcggggacaccgcgagacaaaagacagagagcggaagagggagagggaaaaggacgaaccgacgaacgcagcgaacaacgcggacacagcggaagagcagcacctggagaagctgaagaagcgtcgtttggagcaggaggacgcctacgccgaattctatcctggtacagagttttaa

SEQ ID NO: 46835 - DNA, 2586 bp, Heterodera glycines
atggacagcgcaaccggtgaaggaggcggcaatgctctaactttggactgggaaaacggagtaaaattacctaaatgccataaaatatataataatgccatttggctcaatcaaaaggttgtccgtgaggttgtggattccctggtctaccgagtttctgcttccactgaacacgaaaagccaaaccagaaaaaagtatgccattttgaccgatgcatttattccttatcattgcttattcctcccctccctttcttcaggacgttcctccccgttcaaggcacacttcgaccgatgagcggctgagtgtgaacgggttgtacagcccaacggtgcccaatggttcggctactcattcatttgaccaaacgacagcggaagacgaccacagttcggcgggaatgggcggcggacagaacacgccgcagcaaccgtcaaaattggagtttcacagtttggaggagaaagacgcctttctcatcttccgcgcattgtgcaaattgtccatcaaacagacaccggacgaccaggatacgaggtgggggaaacggagtaatgagtggggaattttatttctaggaatctaattgtacgggtttggctgaatgcattttgaatgacaattttttactccatggtctcggataatatatttgctatcttatgcaaaagtaatgtggaaaatgacagtcagcggcaacagatgctccaataaaattaaatattttatttaaagccgctgtgtttagaatcaatccaattttcgagtcggacccgctaggaacagctttggattggctaacaatcagccagcccttttccccagcggaattttctctcatctccccaaggagtcacgaattgcgttcgaagctgttgtcgctggacatgattttgctgattgtgcgcaacttcaacgctgcactgcccgacacgcacagtttcgtctacgccattcggcactttctgtgcgtggctttgactcacaatgccgtctctccgaacatcagcgtgttcagcaaagcactggacatttttgttcatttggtcgacaagtataaggtagttgtaaatagagaccattttataatttcatattttaatatcgacaaaaatgattgacaatacgaaaatacataaaactcttaaaattatgaaaattttagacgtaaaaaatttaaatgttttgaaaagataacgaaatatagctatgatttttagcacataaactgttttctattttttacatattcaaatctttcatataatggaattgtcttcggactgattaaagtatttattttctttgtttttcaagatccatctgaagaagcaaatcgaagtgttcttcaaggagatcatcatttccattttggacagcagctccagttcatttgaacacaaatgggtggtgctcacgacaattgccaaaatttgtgacagtccgcagagtgtggtggacatttacgtcaactacgactgtcacatgacatccgccaacattttcgaagaattggtcacgcatctgtccaaaatagctgtactgtcttcatacatgtacatttatgtcatgccattctgtgccttttccagtccggttactccgccgattcgtcctctccgtcccatggccaaattgcgttgaaagagcgcgagaggcgaatgcgcgagttggcattggactgtctggtgaaggtgctccaatgcttggtttactggtacgaggagatgaacctcggcaaggagcagtccattcatggcggtgacgaaactgcgaacgcggcgccctccgcgtgcaatgggaatgggtcggacgtgaacgtaacagcacaggtcattcattaatcactaatcacccctcaaaatggagccgtttcctgagcttattacaggccaaacaacaaaaaggcattgtggagagtggcattgagctgtttgccaagaaacccaagcagggcttgtcatttctgagtgagaagggcttcgtcggggcggagccgacggacattgccaaatttttccacgcggaagagcgattggacaagtcggtgatcggcgactatttgggcgacggcgacgagttcaaccagcgcgtgatgtactcctacgtggacaactttgacttcaccggcgtgagcattgtgcaggcgttgcgcactttgctcagcaaatttcggttgcccggcgaggcacagaaaatcgatcgaataatggagaagtttgcgagcaggtcagaatcttcggtttttgtttcatttaatgttttttttgttgcagatattgtgcttgtaacccgcagcttaaccacatttttgcctctgcggacactgcttatgtgctcagctattcgattattatgctgaccacggacctgcacaacccacaagtcggagctttatgaaaataacattttggttcattttgttcaggtgaaacggaaaatgacaaaggatgaatacattcggatgaatcggggtatcaacgaccaatcggatttgccggacgattttttgtctcaaatttacgatgacattgccaccaatgaaatcaaaacgaagccgggaaatttaaaacggccgaaattga

SEQ ID NO: 46836 - DNA, 1860 bp, Heterodera glycines
  unsure (1)..(1860): unsure at all n locations
atgggcaaggaaaagatccatatcaatattgtggtgatcggtcacgtcgattccggcaaatcgactaccactggccatctcatctacaaatgtggtggaattgacaaacgtaccatcgagaaattcgagaaggaggctcaggaaatgggcaagggatcatttaagtacgcttgggtaagtcgtaatccaaatcatgttcatgttaaaatatattttttttaggtgcttgacaagctgaaagccgaacgcgagcgtggtatcactatcgacatcgctttgtggaaattcgagacaagcaagtactatgtcaccattattgacgctcctggccatcgcgacttcattaaaaacatgatcacaggttctgttttgcaatacctttgtaagccattgtcgttataaccatgataattttcattgtgcaaattaaaatttaacaaccaatgatttgcagggacttctcaagctgactgcgctgtgctggtggttgcttgtggaacgggagagtttgaagctggaatttcgaaaaacggccaaacgcgtgagcacgctttgcttgcgcagactttgggggtcaagcagctcatcgtcgcttgcaacaaggttttgcttttgtattgtttcctgaaatagttctcctttccagatggacaccactgaaccgccattcgccgaggcccgttacacggaagtgatgactgaagtgtccaacttcatcaagaagatcggttacaacccagccaccgttccattcgtcccaatctctggcttcaatggcgacaacatgttggagccgtctgacaggatgccgtggtttaaggggtgggcgatcgagcgcaaagatggcaatgcatctggcaaaactctgctcgaggctcttgactccattcttccgccgcaaagaccaactgacaagccattgcgtttgcctctccaggatgtgtataagaattggaggtnttgtttgtttgacacatggctatttcatttgttgcatgtcatggcagttcgtataacagttcgtgcaataggcaatgcgggaaacggctcataataagcttggcttaattttgggttgcttggacttggacttaagtttatttatggtgctaactgctattgaccccatttgttgtttaggtattgggacagtgccggttggccgtgtcgagactggtgttctcaagcctggaatggtggtcacttttgctccgcaaggcatttccactgaagtcaaatcagtggaaatgcaccacgagtccttgccagaagcgcttccaggagacaatgtgggcttcaacgtgaaaaacatctctgtgaaggacattcgccgtggttcggtcgcgtccgactcgaagaacgacccggcaaaggagaccaagagcttcacagctcaaggtttaacattataatcttatagcagttgtaacacctatgcacttttagtcatcatcatgaaccacccgggtcagatcgctgctggttatactcccgtgttggactgtcacaccgcgcacatcgcgtgcaaattcgccgaactcaaggagaaggttgaccgtcggtctggaaagaaagtggaggacaacccgaaggcgctgaaaaccggcgatgctggtagaacaactctatataatcagaaatcagtctttaatttttctagggatcgtcgatttgattccaaccaagccgatgtgtgtggaggcattcacggactacgctccgcttggtcgtttcgccgttcgtgacatgaggcaaaccgtcgctgtcggtgtgatcaaggcggtggagaagactgaaggcggtggaaaggttaccaagtcggcgcagaaggctgctgcccctggtgggaagaagaaatga

SEQ ID NO: 46837 - DNA, 889 bp, Heterodera glycines
gcccttctgtggcgccagctttggatttggctggccgaatccgaacgcgaattgggccttgaggcgcaaatcagtgccgaaatggtggccgagctgaaagcccaaaagcacaacatcaactgggacaaaatccgagcaaatgaacggacgatgaagcatgaagtcgtggcacatatccacgcctacggcgaagtttggcaacaaaaaatgggcgagggcaaaaaaatgagccatttaacagaagagtcgttagtttgacagctttatttcgggttcaaatttgcaaattttaagcgttcgaaatacaaaaaaaaatcatttgacttaaaaaagtacggatgttgtgccgaatttcggcacaaattgtcaatgaattcgaaaatgatacattcaaaattgcccgaatgattgcaaatgggaccatttaaaggggcaatggcagtgagtgatgaattcccggctctattccattttttactcgtccaatcagtgacaatcatcagttttattgaatatacgcgaaaataaatgaatttcgggttttctcgttgttttttcttaatgaaagtatttattcttttcttgtatttataaattccttaaaactttaagctttcgattggtaccaaaaatgtaagcatttaccaaataagaaaaaagtcatggcctaagaaactgagaaaggtcactgattggacccataaattggaatataaccgggaatcccttccccaattcctgagtaaatgttaccaaatctaaaaactgatgcttttgaggtgtgcccgttggccaaagggatcatccatttgggtgccacttcgtgtttcgtgcaggacaacacttgtctgatactccaacgggaggcgatcgaccatttgcttgaacg

SEQ ID NO: 46838 - DNA, 693 bp, Heterodera glycines
atgcacggcggcatctccgataagatccgcagcctggaccagctcagcaacttgcttcgctcgcagatcgacccgccgctccgttcgctggaaattgacctcctctgggccgacccatcgacgagcatcacaggcgtcaggccaaatgtgcagcgcaaggctggcgtcctgttcggcgcggacgtggtcgagagcgtgcgcaacctgctcggcatcgactacatcgttcgggcgcatcaggtgagtttttttcgcttttcatttcacattgatttctttcattaatttttcccattcccttttttccagctcgtcatggacggcgtggaatacttcgcggatcgccacctgatcaccgtgttctcggccccccgctacaccggcaagaacaacacgggcgccacgctgctgatcgcgccggacctgagccacacaatcacgcgcttcccgccggcctgaggacgacgagacgaacggacagaacgcgcgcacacacacacactaactgcacacagagggatggcggaactgcccgaagaacgatgcgtgtggagaaatcggatcgtctgccccccattgttgtattgtattgtaaacccccattcacatgatcaaccccccaaaaactgttgtcatttcaattatttgcgtgtttgaatgtatgtatttgtatgtatatgtatgtgtgtgtga

SEQ ID NO: 46839 - DNA, 628 bp, Heterodera glycines
atgcacggtggcatctccgacaagatccgcagcctggaccagctcagcaacttgcttcgcccgcagaccgagccactgctccgttcgctggaaactgacctcctctgggccgacccgtcgacgagcatcacaggcgtcaggccgaacgcccggcgcaaggccggcgtcctgtttggcgcggacgtggtcgagaagcatcaagtgagttttttttttttgcttttcatttcacattgctttcatttcaataattctccccttccccttttttcagctcgtcatggacggtgtggaatacttcgcggatcaccacctgatcaccgtgttctcggccccccgctacaccggcaagaacaacacgggcgccacgctgctgatcgcgccggacctgagccacacaatcacgcgcttcccgccggcctgaggacgacgagacgaacggacagaacgcgcgcacacactaactgcacacagaaggatggtggaactgcactgagaacgatgcgtgtggagaaatcggatcgtctgaccccccattgttgtattgttctcattttgcatgataaactactcaaaaattgcactaaacgatggggctagctcttttggagcaaaacaaattgtagca

SEQ ID NO: 46840 - DNA, 899 bp, Heterodera glycines
atggagcgtcgtgcggcaaaccgacgtgcgtctcctctggctccattgcggcgccgcgttgtgcttacgggtggcaacggaggtggttcgatgcgcatctcatcttcaactcgccttatggtcgaccgagaacgggaacgacaccaccggggagggaccagcgcaggagggagcggtcgaggaacaattgtcgggagaagtcggtctaagagtagatctccgcacaggtataggtcaagtaccgtctaaaaacaaaaaaaaaattttacaaaggaaggaaaaacgtaatatggtgggagttgaactcgagccgcgcatttcttcgcgcagacaccgctgccgtgactttcatggtaacaaattgtatagcactgtagtgtaacaacagattttagaaaaagggttttgtatgcgtggtgataactgcccatttgaccatggaccggaccctgttgtagtggagaatagtgctttgaaagacatcgttcgcgacaccactatttttgatacttccaccacttacggggtgaatccacctccgcctggtttggaaagcacggttacaccaagtgctatttgtgtcaacaaactttctggtggtgtcactgaaggtgggcactttaaaaatgacgggccgtaagacgtgaattcatttattttgttgttcaggctacaacccagaagctccatccatggataattcggcagcaattcctcaaatagatttttcggttccacctccgccccttccgcagcatttcctacaacaacagcgccaaatcctttatccacctgcaccaacagcttccggcattattccaacatttggtgctgctactgctacgacggctcctacaaatgcctccggtggtggcgttcttccgcttcgttcagcagtt

SEQ ID NO: 46841 - DNA, 1446 bp, Heterodera glycines
atgccaacacggtggtcggcgccagaatgttttactaagaacaaattcacgcacaaatcggacatttggtaggccaacgtttaccatcgaaaccaatagatgtacggttttctgcctctttaccccgaaaattggctcatgccttttggcaccatatatattttttattctaattaatagtataagggattgctaatcgcaaatccggcttgcatttcaaacactgacttgctttcgacaaaaaattagccggattcgtgctcacaatcagcgacccccaaaacctataaatttgcatattttaagaaatgtgatgattttcaggtacctaaatagcatcctttttctagtgcgaatctaaaagtgttaaacaagcaaaaagttcacaaatcattgaaacatcaaaaaaggatatttttgttcagattctaatacaaaagcaagtttttaaaagttcgactttttgttcgaatttgggttcggggttcggaataggcgaaaataagtatcgtattcgtgataagcgactttgaaaaatcccgggttcttgttttcaggacttattaatccaaaaaaaaattgaaaaaagttgaccaaaaaataggacccaaactcgagtaatactatttttattatctgcattttaaggtcttacggtgtgctactcttcgaaatattctcgtttggtgaaattccatttgacaactatacaaatgacaatgatgtgatcgatgccgtcaaaacaggtgcggatccgggtgtgccgaaagactgccaagaagaaatcgctgttattatgccaaaatgttgggatcaaacgccggaaaaacggatcagtgccgaaaacataaagtgcgcgttggactgcataattcttgcggatgttatgcaaaaatgttggacaccggaaaaaaggatcagtgccgaaaatgtaaagcgcgagttgggcaacatcggtcgaatggagcaagaggcgaagtagcgtaactgacttggcacacaatgcccaccctttctgaagccattcacaagcgataagaggcacaagcctcgtaacactatgtatttcgattcatttctataatttattatttctcactatttcaataacaaaatgaaaaagaagtgtaaaattaatagtgtattatatatatgtggaaaattgattactaatgactagagaccggcgcaggacagggtcctgcgcaggattttgcaggatcccagtccgcaatcctgcatattttggaaaatacaggatttgcaggattaatcctgccggatcctgtcctgtaaaaaattttgaattccaatcctgcaacagggcacgcaaatttgattttttgcaggattcagcaggatcctgcattgattttttgaaaatttttaaaaatagaatgccaaatattcagaaactttctttttcaaaatttttttcttaataaa

SEQ ID NO: 46842 - DNA, 820 bp, Heterodera glycines
  unsure (1)..(820): unsure at all n locations
atgagcattttaactgcttcgaaagtgtgcactttgccacggctttcttccgctcgctctatgacttggtggtgggncccggagaaaaacaatgggcgcgaagttgttggccccactttccacggggatgaagtgtgttgacttggcaattgtcaaattattatttgtaataatttggttccgatagttttaccaagatcgtcttgaccgttggtacccgtccattcgatttcgcaaaaatgacgaagtgatcacgcccattcgccacaaggaattgggagattggaagaagttgagcattgaggagaagaagcttatctaccgctactccttccgtcaaactttggtcacatttcgtcgtacattttctttggcattagcattatttggattcgatagattattattattttttctgtttaggccgagtttgaggcactgacgccttatggctatctcacagtcactttgttcttttctatgcttgggcttactattctgtacgcttcgtttgttaggacttacggtattcagttataggtactttgactcttatttatattttttgaacagtgacaaaattcaatgaccgattgcctgacactttcgatgatgaatataaagtttgttttgaagttttaagtaattttcaaagcaaacaaaagtattttaggaaagtcaggccgagcgccgtgtggtactggaaagggtaagcaaattgcgatgccatttgagtcctttgagaattattcgccaaaaaattcagggccatctttatgggccggcctactattacgattacgataaaaatcgctggaag

SEQ ID NO: 46843 - DNA, 435 bp, Heterodera glycines
atgaacataattctggccgactgtgaagagatgcgccgcattaagcccaaacaaggagctaagaagtcaaacgtcgaggaggaaaagcgcattcttggcctggtgttgctgcgaggggacaaaatcatctccatttcggtggaaggaccgcctcaaaaggaggattctggtgtgcagttgccaaaggctggcggactcggtgggcctggacaaggacgaggtgccggtcgaggaatgccgatgggtgtggtgccgccaatgggagctgttcctccgggttcgcatctcatattatttcaatttgtttacactgcctttgttttttcaggtttgcagggcgccgttcgtggaattggtggtcctggaatgggtgggcccatgcagcccggatacatgcaagggatgccgcagggaatgccgccacgtccattttga

SEQ ID NO: 46844 - DNA, 1807 bp, Heterodera glycines
  unsure (1)..(1807): unsure at all n locations
ttctcattaatttggtggacacttaccgcactctcaacaaacccatcgtgctgacgtcgctgaaaattctcgctaattctgtcgcgtcttcaaaggaattggctcaaactgtcgccaattccggtgaccctttgcgttttatattcggaagatcaaatggacggaattgaaacttggcatttataagatggacggcccaaaaagggttgggcacggattgactgattttttcgctctctaacagagctccctccccccccccccgcgtcgttctccttcaaaaattttttttgaaaatttttcagcgattttttcaaatttatggtgaactaataagttatttcaaaagaaatttacaaaaaatcgctgaaatttttaaacttttttttcttgaaatttcttactaaaaaatttcctcgttaactttttttgtcaaattttctacatttggaatttttttttcaaaacgtttttcggggggggggaacgacggggggatagaaaaccaaggaaaaggttatttgtattattaaggttaagcgaagagaaaacgcacaattaattccgatggctttcttcagattggattccgcttctttcgtcaatgctcaaaaatccttcacacgacgaagaacgaattttatcacacaaaattctgtccaacattcttttcgcctttggacgcgagaaaaatgaattgccggcgcacctttacgaattgcataagccaatgagcaacaaaatgccacaaattgacattgtaaatttaattaccaaaaaccaaggtgcagtgacaaagggcccacggacaaaggacccacaaaataatacgggccctaataataaaattatatattaaaacttacaaaaagctatcaaaacagtcctattttccttacacaaagccaattggtttttcaaatttatcaggtgtttgtccacggactgcgcggaagtgcgtttcggacatggcgccaaaaagacagaccgaacgaaaggaccacacttttttggccaaaagttcgttttgtcagcgtgccaaatggcctcgcttttcttaggattggttggccgtcgacctaaaggaatccgtccgaatgatcgccgtcgattattcttcgcgtttttttcaactgagcaaatcaatggaaacgtttgaagcacgcgctcaactttttgctgaagagtttaagagaaacggaattggagaaagaccaatcgtattcatttgccacagtatgggcggactgctggccaaacagttgcttttaggtacacctcanaaagtgtctaatttcggtccacttttacattnaatggtcaataatactatttatcattttgttttacattaggtccttgatttttggacttaaaatagcaatttggttcagaaaatgagcagctcctctcgaagactgtcggtgtgcttttcatggccaccccccatttgggcactcccgtggcctctcaactccgcccctatttcatcagaccgtctagcgacgttttgcttcttcagcccaaaagtgaacagaacaacaaattggccaaccgtttcaacaaagcagcggaacaaatcccattcattgcgaccgtattggagtgcaagaagacaagggttttcggaagagaagtgatgctcgtgcccgtggagtcgggcataatgggcaaaggaccggtgtaccaccttgacgaaggacaccataatgtgtgcaaacccgagtcaaaagaatcgattgcgtaccaaattgtgtttaattttattaatgatgtgttagaatatgttaaaccgtttaacggtaaa

SEQ ID NO: 46845 - DNA, 5253 bp, Heterodera glycines
caagtacaactacacgggccaggagaaagcagccatccccttagtgagggagagcaaggccttattgttagccagaaaacattttggaggggaaagcccggacttttttttgttcttcgggtcaacaatttcttctcaagtcttattttaaaaatcgcagtgctggagagcaaaaaacaggaatttatattaattttcgccaaaaaacaggactaatttttgccattttggggtcaaaattgttaatgtacctttttctttaggtcatttcaatggccaagggcgtccagtcgcttatggtcaacatggacacggactttgccgtcgccatccgacagcacatttacgctgagctgcaggactttgtcggcggaccgttgcgcgaccttttggccaaagccgtgaagcacaaaaaggacattttgacggggtatcaaatctttttttttttaatttttcatcaattgccataatcatttgctatatgatattcatttaaaactaatggaagaataattttttcaaagatttcgttagtttttttgggctaaccgttcattttcgaaaaattcaaataaattatcagccaaacaccggaggatggataataattctctacaatctggcgcattgcactttccatcacttcgatttcagtgtgatcagctcaatcatggagacgtgctctgatcagtcggccaacagcggaggaattgcagaccatcggccgttgaacaaattcaattcccgctcctccgacctttcgtcatcgatgcgttcgttgggcggcggtggcggcaaaaagtccaaaaagggcggcgccgacacgggctcaatgcccgacttgcgcggccgaaggcgcagcgtggtgccaagcagcactcaggtgccatcaaaacagtcaaaacccattttttaaatttaattaaaaataaatttggaggaaaactttttcgagttttccattgcttgccagtcaaaatgttgttttttcgtagctttatttggctcggacgatgctggaatcgctggtgcatgagaagtcgtcctcgacgggccgacgaatttatcggaaggatttggacgaaaaatatcgcgagaaaatggtaatgaataagaacgggatggatctatggaaatgccaagaaatggcactccaaatttgcgttttcaggtgcatttccttcgccagtcgtatttttggcccgcactgctcgacctgaagcagtcgctggacgaaagtgtgaatttgtcccagctgtggttccgcgagttttacttggagatggcaatgggcaatcgcattcaggtggcaaaaaaagatggataaattaaaacattggcagtgagtgccagggatggaaaaatgaagcaaatttataaaaattggtgcggaacgcaaaataaatgaaaaatcaacacacaacagttagtgcagatggaaattagagctttaaatttcaaatgttcgggagcgaaactcaatttttaattttcaattaatttccccctcatttttgtatgattctcccctctcatcagttcccaattgacatgtccatgccgtggatgctcaccgaccacattctgaccacgttggacccctccctgctggagtgtgtgttgcatcagctcgacctgtacaacgacgcggccgccttcgcactgggccatttccgcaagcagttcctctacgacgaggtggaggccgaggtgaacctgtgctttgatcagttcgtctacaaactgtccgaggcggtgttcgcccattacaaacagcgggcggcgacgtaattcgggaaaacacagaaaatgttaaaaaggcccctgcatgacaaattgttattgttattcagaaaatgaattgaaattgattttcatcatcattttttggtcctctaatccctaaaactaaatgattttttttaattcgggtgcattatgaacactttaccgtacagaatgctgctcgacaagggcttcaaggaggactgtgcccgttatggaattgccatttttatgcccaattcggtacgctttgaaactctgcttcgacagcgtcatgtccaagtaagccgcagcaaatttccgactgtcttttagctttatcgtctcaatttgctttctaattctgttttatcttcagttgttgggccgttccatcgatttgaatcgccttatttcgcaacgaatcaacgcggtacatttttccaccgggggttatgtaaattttgcattttataggctttattgcgctcattggacgtggccatctccaaatttgaagcggacggtctcaactgtattatggtgagttttttttggtggtctgtttttgaaaccccttagaatcgattcacaattccaactttaaatgaattttaattcattttgccgtggtcattaggtgctggacaatctgatcgaggtgaaccgtttgtgccatcggctgctctccgaccatttgggctctttggccgactttaacgaccttttgctggaggcaaatcgccaagtgtccgcccccaacggacgcatcactttgcacgcgtttgcccagctgacggacgacgtgttggtcaacttctgcttcaacacggccacgcgccgatttgttcgcggaaaggtgattgagcttaataaacgattgtcatattgcactgcaaattcgactattaatttcgttttggtggctcagttggttatttgctgtccattcgcttattatggcgttggatcgcttcccgccacgtcccgtgtttttaaaaatttaaccggaaatgatgataaatacagacctgtatggaaatgcaccatgtcgaattaaacctctaagaagttctgatccggttaatcctttttaaattagccattgtttttttaatgttccctgttcagttgaactatcgtaagccgtcccgtggtcgtccgcccgctgttgcggcccagtatgaattcggttccaaatcgttgaactcctccttctccaacttgtcgatgatgtacggcggtttcgttggtgtgccccattttcgtgtggtggccaaattggttggctatcaggtgtttaaaacataaaaactaagaaaataaataaaatattaacgaaggccaatgaatttaacatttagtttattacaatttccagggcatttctgccattctgttcgatttgttgggcctggcccaacggctattgaacgatcagataaagacgcactttcggtcactgctcggacttatgcccaaaatgtgcaaattgcaacgcttcgaatacggcgttgaaggtgaacaagaaggaaattgggtggcactaaattgttattttttccacttgccataatccgcgcattcatttggcattccggtgcgcttgtcggattcccaaattaaattattacttaaaatttgcgtttcaatcttgaaaatcccgttttgaattaggcaatctccaatatttcatccaccaattgcgcgacttttccgcctacggcccgctgagacgcgaatgttgccaaagtttgcgtgaattgggcaacgttttggcggtcgctttgctgatggagttgggcatggcgcaggaggaaatgttcgatgtgtttgccgctgccgcgttcaccaaccaaattccgaaaccttacgcaaaaagttcggtcaattaattaaaaaggaataaaaatattatttttttttattgggggcaatttgttttttcaattaaatttcataaaaaatcacaaattttatcagacttggaggatcaagcgataaaaatgcacaaattggagagcaaatattcgcgtcttcaaattggcaaaattgtccatcagtttggcactgaaacggtcagtttgcggccacaattcagcagaaacccaattattttccattttctgccatcttcggttcagcaagccaaaatcgcgctggacagtgcagtgcttaccagtgaacggctcagttgcggactgaggatcttcgacatggtgctgatccgactgcacgacactttgctgaccgaccccatttggcgtggcccggtgccgaccaacggagtgatgtgggtggacgagtgccacgagttccaccggatttggtgcgtttttaatgggagggaatgcaattgaggctgccaactaatcatggatgttgttgatcaggtccgccttccaactcgccctttcgcttgcccacgtgcaaacccacggactgtcccatcagacgtccgccattggcagtgcgtcgtcgtcgttgtcgtcgatggaaaatgtttatggaacgctgaaaaagggcggcggaccaccggcaccaatcggtgccaatgtgacattggacagcggtgtggcatcgacggctgcacaacagcagcagcaacaaggaacgaccattgagtgagccaatttgggggaggatgggggatacacgactgaataaacgaaagggggggggggaatccgcggaggaagtatttggagtgcttctcgtggcgtgggacacactgatccgttcgttcatccacacaaatccctgtgagtgcttaaagggagctgttcggcgatggcatttattgggcgggctgtgccatcgttcgtctgctgggccaacatcggcgctttgaagtgctcgacttctcctaccatttgttgcgcgtgaatcgggcggttgggtcggcgcctaatcagcagcagcagcaacaacacggcacaacggcagggccaaaggaagggggaagcggcaacaaagcgcagcaacagcagcagcaacaacagcgaaatgtgagcaaatggaaaagggaaatctttagccatttccgccaaattttggcctttttcagacaaatttttttgcaaaaatatacgaaaataaggatccgccgggaaaatttggaataaatttattttttaaaaattagttaaattttaaaaaaaaactattttttctgatacaaatttcgggagaggggcctctcgcggggcttaacccaccctttattgtcacatttgtagactttcccattttaataattgtggaaatattatgcacaatgggaatatctcaggctaacagcaaaatgtatcctttccgcagattgtgcggctcatcgaacgaatccgtcgagttcaggcgcaacacaaacaggtgttcgccctgctcggcaatttctgcgttcacgtggaggaacaggagcagaaaattcggcattttgcaccgcccgtctatcagccgctgcaaaatccgtacgcaaatggccgc

SEQ ID NO: 46846 - DNA, 1317 bp, Heterodera glycines
atgacatttcataaaatcgacaatgactccgtgaactcaaccaccaatgcgctggactttttccgcattccgccgacaaatgtcagcgtctcttcatcaaaggtgtttgaactgcttcccagcaaccctctgacggacacacctaccatttcaaacttcattcaagtcaaaattacattgacctctccaaatgctatttgctcaccgagttccgaatccggaaggaaaatgcgaatggtcaacttatggacctgaccattgacgacgaaaacattgcgccaatccagatgattgggcaaacattcatccgaaacatcaaaatgagcatcaaagggcgtgaagtgttcaacgcaaatgcactgatggcctacaaaacctatttttcacatgaactctcctactcaacaacagcaaaggactcgcacttgaatgctgcaggctattaccgggatacgggcgagacattggagacggggccgggatgcattcaacgcagggatttgtttgccgaaagcaaaacagcccaatttattgccaaaattgataccgacctattcaatcagccgctgtacttgattaacttttgtgaattggatgtcgattgccaaatgacaacgattttgtgctaattgcacccgccatcggcggtgtttttcctcgttaccgtttcgaggtgatgggactcaaaatgtatgtgaagaaggtgtcattaatgacggattagcgctggacattgcgcgaaagcttgagataaagcctgcacgttatgcagtaaggaaaactatgatgaaatcgatggtcatcagtcagggtcggttcgagtttaccgccaatctgttcatggaccaaattacccgtcgcatcacaatggggcttgtttcaaatgccgactactcgggcacaatcacgcggagcccgttcaattttcaaccgtttaatgtgcgggaaattgggatcatcgccaacggccgttcctaccccgaggccccttacgatttggactacccgcatggtaaatatgtgcgcgctttcaacgatatgaatgaggcggtcgggttcgcaaactcgtcggaaagcaacggaataacctttccccaatttgggaaaacgcattgtatctacgtgttcaacatgacaagcagcggtgacgaccaagccgcgctctttgacctgataaagaatggaacaaccgcggtgagcataaaattcaatcgtgcggtaccagtggggggactgatgctggtcgtaatgggcgaatgcgactcgctggtaatgctggacaagaaccgatcgataagcaccgataccactatataa

SEQ ID NO: 46847 - DNA, 988 bp, Heterodera glycines
atgcaaatggccatgatgctcggacggcaacaaattttcctcgagctgccggatggtgaagacggactgctgggggagctgaacgcgaactcgcacctgcacaaacacttcctggcgttggcccgcgagttggacataatgacgcccaaatcgccggacgatgtgtacaaaatgcacttggagcaggcgcgtccgttcacgcaccaggtgggcaccacagcacgggtaaatactcatccatttttaacacatttttggaaaatttttcgcgattatcgggttcaaacatagattttttcaattttagatggcctaaacaactttaaataagtgatcgaaagtgattgtgtccaatagtttaatcgtcagcgaatttgaaaaaataatcatttatccagccaacagaaagttatacagaatgagtcaaaaaaccaaatttaaatccgattttggacatgcgcttaaagatctcaatgcgaatgcaactgaaaaattgctgtttcatatgtcaataatgcttttcccttcgcttccaggccgtcaagacgactacgacgacaccatttgcgcagtttgtcgaagtgtgcgcatatgcgggcaccggaaatgtgctgaaggtgcagaaaatgttgcacatttgcacggaacacaccgacaaaaaggaggtgagccgaccaacaacaataaaaatggaggattttaatgcaaaataaatcccaaaagtggaacgggaacactagcgaaagaccatcagctgatttgtttttgcctcataacgtttgttttttttttgtcaaaaaagtttttaaaaaatcggtaaattcaaatagctctctcattttagtaccgaaaaaaactagctgaatgaataacttgcaaaaaagtgccgtcgggaagacatttatgcttatgcctaaaattttgtttgttttcattccccgaaaaatgccaaaccccccaaaatacttattttatcggtatttttgta

SEQ ID NO: 46848 - DNA, 539 bp, Heterodera glycines
gccacacggttacgttgcacctcgtcctcttggaaaacttctccgcctcctgtaccatgcgctcaatctcctccttggacaggcggcctctgtcgttggtgatggtgatcttgttctgcttcccggtagacttgtcctgcgccgacacgttcagaatgccgttggcgtcgatgtcgaaagtgacttcgatttgaggcacaccacgtggcgccagcggaatgccgctgatcttgaacttgcccagcaggttgttgtccttggtcatcgcgcgctcgccttcgtagacctcaaattgaacagttttcacacagaaacaatcaaaaggggaaatgccgttgctttacctgaatcagcacaccaggctgattgtccgaacaggtggtgaatgtctgcgaagtctttgtcggaatggtcgtgttgcgcttgatgagtgaagtcatcacaccgccggccgtctcaatgcccagggagagaggggcaacgtcaagcagcagcaagtcctaaaaagaaaggaatacacacacaacagtgtcaaaaaa

SEQ ID NO: 46849 - DNA, 819 bp, Heterodera glycines
atggcggaacgcttccatgccccacagccgccaccgcccggcttgccggaggaggcggtaatttttattattaatgaaaggatttatttttatttttttaggtgtgggtcccgccgcagggcgctgatggtggcggcggcgaggacggtgctggcggcggggacggcggcggcggcggcgccaatttgtttggcggcgaggtttttagtttatactttataaataacatgatattttttgacactgttgtgtgtgtattcctttctttttaggacttgctgctgcttgacgttgcccctctctccctgggcattgagacggccggcggtgtgatgacttcactcatcaagcgcaacacgaccattccgacaaagacttcgcagacattcaccacctgttcggacaatcagcctggtgtgctgattcaggtaaagcaacggcatttccccttttgattgtttctgtgtgaaaactgttcaatttgaggtctacgaaggcgagcgcgcgatgaccaaggacaacaacctgctgggcaagttcaagatcagcggcattccgctggcgccacgtggtgtgcctcaaatcgaagtcactttcgacatcgacgccaacggcattctgaacgtgtcggcgcaggacaagtctaccgggaagcagaacaagatcaccatcaccaacgacagaggccgcctgtccaaggaggagattgagcgcatggtacaggaggcggagaagttttccaagaggacgaggtgcaacgtaaccgtgtggcgccgccgggaaagattttggaaatttcattctgatttgttcatttaa

SEQ ID NO: 46850 - DNA, 1632 bp, Heterodera glycines
  unsure (1)..(1632): unsure at all n locations
ggcggtgttgcgggcattgaacagttggaccccacccaatggacgggcaatcaacgaattgtccattttggtccaatggcacagcgcgacccgttcttctatttctatccgaaaggctgggatttgctttatcccgctcagttcggcttcttcccttatcggactaagtttgtgccgaccgaccaaataaaacgaatatttcgtcaagaaaaaatatcgaaaaatgtaaattttttgcaccccaaacattttttcagcaaatntcttggcagttctgcggtcgtttgtgtgtgggctttcggcatttttttgttcctcggcggcattctgatgatttatttgggctattttattgaatacaaaaaacncgttttggcgttggactgttgaagagcggcaaaacactgtattttcatggatttattttttacaattaaatttaatgatataaaatttaaaattaaatgtgccaaatataaattgtagatggttccgcccgttcaaattgctggcccattgttggccggcaccggccattttgctgctggtggttggcatggtttgctcagtcagcaattctcaggntgtgtatgtgtgtggtgttgtgccgcggcaatttggaaaagcccggtggactttaaaattgccgatggccgattactagagccttaaatttgaaaaaaaaacggggtcgggataatcccgagtttgtcgggatcccgatcccttccgggctctatcgattaccacaaaaaaaacgtttttatccaaaaaattttgaacaacaaatccttgataaaattggtggactttaacagttcaagaaatgatgatttgaattggtaaaaagcgctgggctttcatttttaaaaatgatcggccctcaaatagccgacttttttaagtgcccaaatgtttgcctatgccattggtattaaaatgactaatgttttacaaaatcagtctaaatgttaaagattttgcatatcttggccatttaaaatgggaaattttttttttaaattacaaaaaattataaaaatgccattgtccattgaatttctttcaaattttgcagtttctcagtgataaactgcgccatcaccaccaccgtgatcagccagcctcggtcactgtgtacacaacccattacaaagtcaaaaaaaaactatgaaatttccaccaaaaaaaattccggttttagcagccccgtgccacctacgaagtcagtccttatcagccgttgccaccgccggccaacccagtctatgtgaatccaaatgcacgaactcatctgttagacccgaacaaggagctcaaactgttcccaccggtgtatgagaatttttgggattttttttttatataaagggctcaaatggactaattgaggtggttggaccccatttcggcattggacacttgggtatcaaacaaaaaatacactgtttggggtttaaagagtcactgatcagtgatcaagagggataggtatgtctgatagagagagagagagagaatggagagagagagtcatgggggagagagagagaatgagagaggatatggcagagagagagagagagagaggcccttaaagggaaggagagagagagagagagagagaaagag

SEQ ID NO: 46851 - DNA, 3199 bp, Heterodera glycines
gagtccgttgcgaatgttcgacgtccccggcattgacgcgccggtgatgtcattggtgtacaaagagcgatttccaaaggccaagcagcaattggagagtcgaatcctccaattcctgcagcagaatgcacccctaagcggcttcagctctcagctgcttcagccgaccatcgcttcttcaacgccgttggtgggtcctttttgagggtatatctcttcaatttcttccgattcagcgtgccacttctccccagcccggtcagccccccggtgccatctctgaccattcgtccgtctgtcggcctcagtcgccgctgcccgtgcgccctctgtcgccactcgtcaccgaatcggccactgcaattggcgacgcggtcattcgttcatcggctcatttctcctcccagggattgctctcaccgcaacagcaacgaccttttgtggaagaagcagaaagaattgaaggtttgccttgtcatcattcaatctatgcaacacaattcggaacaggaggagaacgggacggtcgtcaatcgtcgctcgccaaacattcgtcgcctgtttgttctccgtcctccaccacggttctgaccaccaccgaccagaacattcttcggctcatttccgacggggccactcgctttttgcaccaccaattgtgcgaaattgcatccgactgtctgcagaagagcaaagacggaatgctcagctgtgcctacttttgcaatatgtccgtcagattggacgaaacgttggcggaggtcagttgaaaacagtcaaatttaggacaaacatctgaaattatagaattaagcaactcaaataatgtgttttgttcaggctgaagtgaaaatcggacccgattcttacagctatttgactcggttggtcaagcaacttttgatgatcgtctcaaggtctggagatctttaaatactttaaatcctttaaatttgctttttagggccgcccgtttgttggaatgtttggtaagaaattagttacgcaactaaataattttgaaaggaaaaagaggagagaagggaaaagcggccgattgtgtagctcattggttaaaacaccattttggttgagttcaatgcccccatccgatgttttgttaaagtgccactcaaatgagacaatgattaaattaattggtcaagtaaatttatgatctctgtgattttgtcactttatgagtctcacaaaaaaaatcaaaactcagcggggatagtctttttattgtgttctttccactttcaggagtttgaccccgacgagttttatcagctgttggaggaggcggagggcgccgtgcgagttcagctcggcgccggctcggcccgagtgccggacttaccgcaatacatcgtttccaaattgggcctgaacaaaaacatccacctgctgatggaggacgaccaaacggcgatggatttgggagaagaggcagaagaaacaagcgacaaaaggatgacagaaataatggggacgaatgaactgatgaaaaagagggcggctgaagtgttggcacagggagtgccaaaagaggaggattttgagacagtgcgggtgagtgaagaggcaaaacgaattcactcttttttccatggcacattcaatctattcgtttgggtcaatttatggatttgacgatttggtatacaatcaaacaatgctttcagttgattagcaatggtgcatacggcgccgtttatttggtcaaacatcggcggagtcggctgagatacgcactgaagaaaatgaaaaagcaaacactgctgatgcgcaaccaaattgagcaagtttatgcggagagggacatcctcactttcacggacaatgtgagttgacaaagccatgggacggaaaaatgttactgtttcagcctttcgtggtgtgtttttacggttccttcgagaccaagcagcacctttgcatgctcatggaatacgttgagggcggtgactgcgcttcattgttaaaagtccctaaaatttgttttcaattgtaccaattcatttcagtccgccggaactttgcccatcgaattggcccgcctttatgtggcggaaacggtgttggccatcgaatatttgcactcgtgtggcattgtgcacagggatttaaagccggacaatttgctaatcacttccatgggacacataaaactgacggatttcggcctctccaaaattgggcttatgaatcggactactttggtgtcggaaggttatctgctacaggacgacacgcagcagttcaaggacaaccaactttgcggaacgcccgaatacatcgcaccggaagtgattttacgacagggatacggtaatgaatgtgaataaattatggccctaaaaaatattggtagaccagcaaattcactatttttgcttatttaaggaaaaccggtggattggtgggcacttggcgtcattctctacgagtttttggttggaattgtgccttttatgggagatacgccggaggcgttatttgccaacataattaatgaagacgtggaatacccggagggggacgaggtgctttactacaagctgaaatgttaattagccttttatttctttctttaggcattggattcggatgctgagtcgttgattcatcttttgctggagaaaaatccgctggaccgactcggaaccgtcggcggtgctccccaagtgtccgcgcatccgttctttacaccactcgactttgacacaatcttgcggcagaaggccgagtttgtaccccaactcgagaatgacgaagacacttcctacttcgactcgcgctccgaccgttacaaccacgacgccaatgagtcagcggaggacgacgacgcggcggcggtgccaatgttttggtgcgtctgtcgttccttccagtgattcatctcttgcctttctttctgtgaaggtccttctcgacggcatcgcctcggcatagcattgtcgggttggaattgcccgccgggggaatggcaatgcttcaggccgcccatgcagcagcaattgaacggagtgggcagccgctgcagcaacaagaccgaattgtggacgatgaccgggtcgagagccgcagacgactcctttcctcggcaaccaccgcttcttccggcattggcagcgggccaaactcggcattcggtccattgtcctctacacttttaacgcgtaagatagcatag

SEQ ID NO: 46852 - DNA, 1144 bp, Heterodera glycines
atggtaagttgtttgttttgaaggattaaaatttattggtcaaaagggacgtcattgaggatgactcaccaagggccgattaaatgcgaaggaattttcatctcaaggcttgtcgaagggggactggccgaatcgacgggcttactgagtgttggcgacgaagtggttgaagtcaatgggattgaggcaatgggtcttttgctatccttactaaaatcaatcttttgaaggtgaatggaaaaaagttggaccaagtcgctgatatgatggttgctaatgtacgttttcatggtccattgatttttttattctggtttattctgtagaaattcaaaaaacgattgtgttaaatacgcttttggagctaatagtcataattcatacaattagcagactttaccaaaaataaataaataacatcactgttttgattcaatttttatattttaaaatgaaattgaagaatttaggctaggtctccggcctggactgggttggcatttttttttaaaaagaacggttcccaggccctgtaaaaaccgggcccagtccagtctccaattgaacatgatgccatagaaacctctgacgatattcattaaatttttagtcaaagattttttcaatttaaggtgtattatcgaattaaaagtcactgcgaagagcacaaaaaatattcagaaaatttttggagttcatttttcataaagggaaatttctgaccccacccccttttttttgttcatgtgtagtaaataaaatttattaaatttcaggcacacaatttgattgtcaccataaaaccggctaaccaacgcaattccctgcagcgtaaaggaaaagccgaccaattcgcagttcaaagccaataccatcaatatttcaccggagatggttcttcatcatcagccgttgggaaaattggcactttcggaagcggtggaggaggaaaagtttacccgactgggcacgggtcgtctctgtatcatctgggaacggacagacaccaccaccaccaaatggatgaattttttgatgattacgctgaggatgaagatgaggatgaaatagtggaccacacaaagacagcgttaaaaatccattgaaaattatgcaagtttttctatatataatgacaaataaa

SEQ ID NO: 46853 - DNA, 826 bp, Heterodera glycines
atggctttttgcctcgtccccggcgttcatctgcacaaaaaatttatgccggagatgttggcatcgcgaattgatgttcacgaagcgtgagttggagcgctaccagtgggaacacaatttgctgaccattcaggtttgtgcattggattgacatttgtgaaaccatccctgccagtgggctagaaaacccccaccccacgaaattaaaaactaaaaaatttacggagttttgcataaattttgtgtttttttgtaaataatttttgaagattattgcaatcaaatgaattggacaatattggtatcatcgaaaagcttttgatgatgagaaacttttccggcgaattctaagcaatttgtggatagaaaattttttttcgggttttctctatttgcagagataaagaaatagtcgctaaaatcttaaatccctatgtcagtatgccccccaaaagtgccgagtttgccatatttttcaattaatttctcagatcgtcggcactcaaagtgatgatgaatggcgattttcttggcaaaaattttgcgcttgcctacccggaggagcgcgagtgtttcctggacagcaacggggcggcagcgacgtgttggtgcgtggaattttcaaaatttttcgaaaaattttagttttttcagcaaattaaaacgctttggcactctgatcgcggtgggcagcacggacggacgcctgttcatctacgaccttatcaccaaaagtgcggtcaaggtcggagaagttgttcattcccttctaaattttaggccctgtttttactatatattttttgcactttttagtggggattag

SEQ ID NO: 46854 - DNA, 462 bp, Heterodera glycines
cctttttggtggcggacaacgaccagtggttcagctacgacgacgtggagagcatcagaaacaaagtgaatgaaagcccatttcgaatttcaatttgaaatgcttttgcctcattcagctcagttggattcgccaaaactctttcggcggcgctttcgtgtggactttggactttgacgatttcaacggacaatgccccggcagccaactcggtaccgtacctttatttgcaacaataatgcagaatatttgattcaaaattgaatttaaattatgttttgtccaggccgttacccgctgatccgcacaattgcccaagaattgggcggcatccaactctcacagacacccgtctcggcactttcgaatgtagaatttaatttaattaaaaataaatattatatatatttttgttgacagtcgccttcgccgtctacgggcgcagctttgccggctgtcaca

SEQ ID NO: 46855 - DNA, 3410 bp, Heterodera glycines
atgagtattatcaaaaaaattgacaaagatagtgttgaaggtcttgaaggtagtctatcattgtttaaccttccaccgacaaatgtggctattaataaaacgagcgttcgggagcttttaccattgtccgctctcaaccagacaggaccctatctttttcgtctgttttccgatagtcaatattgtgatcttagcaaaacgtacatgtatctgctaacttcgatagagcgtaagaatgccgccggagaatgggtgccgaccgacgatgcgattgaagaggacaaacatgtaggtgttattcaaaattttggaagcagttttgttcgatcattgaaagtcaacatttctggtgtcgaagtgtttgatagctcaatatactatcactatcgtgcgtacataatgcaggagcttggctattcacatgagattcgcaaagcatttcacgaggctggctgctattatccggatgaaaacagtcaggatagctactcaaacaaaggttttaccagccgagcacagcgattctcaaacggaaaacagtgcgaaacaatggtaaaactcaactttgatttggctcgtcaaaacacacttttgctgaacaatcaggatgttgtgttcacaatccatcggaacagcgatcctttccttctgcttacaccaaaatggaaaaccgttacagatgcggtcaaagatgcacaaggtaatataattacagcagcgcgtgtgacatggcatgataacacagccgaataccgtatccgtctacatgatataagactttacgtacgcactgtagacgtaacttcaagccttaatattgcgattagtagacagttggaaagcacgccggccaaatatgcgcttcgtaaggtagagatgcgttccatcttcttaggcatgggtcgtactgagctatcacacaacgtgttcacctcaactctaccacgtcgtctaatatgtgcgtttgtgtctacggacgcatattcaggcgcccggcatttgtcgccgttcaattttgagcacgcgaatgtacgttcaatcagcgccgaagcaaatgggctgacatttccaagcacgccttatctattctcgtttggcaatcagaaaaggtttgtacgagcatttgtagacatgtatgcaggccttggccttgacgattcggacaacaaaacagtgtccatttcgatggcacgattcctcagtggctgggcatttttcgtaatcccaatgacatccacgttggatgatacgcctggttttgagttaatcagacaaggtacttgcaccgtaaaagtgcaatttgagcagcctataaaggcggacggttatgaaatgcttatattaggtgaattcgactcagtcctttccattaacgccgaccgcgtgttgagcactgacggaagtgtgtaataatgaattcggttcagctaacagcaattctcaaaggcgtacattcaaccaagaataaattcattggcgtcttcccatctgataaaattccacatccaaagtggagaagaaaatacccccattgtatgataataaatacagacaaagagggaacacagggcgaacattgggtcgcctgcttcgctcttaacgctacaagggttgagtattttgacagcttaggcaatgcaccgaacgaggatttgggagcgtatttaaaaaattttaggcacattcaaattaataagcgtcaaattcaatcatcaacagcagacacttgcgggcatttttgcatttattttttagtcgctcgttgctctggcgtcccgtattgtgaggtgatggtcaatctttatcgtacacgtactattgcagatttactagtaaaggggtttgttcaggcgcttttacgtgtataaaaggcactcaaagttgaataaatttgtttccagccatgagtatattttttctcctgcttttcaccatttgttgttataacaacggcgcgaaaggggaattttttacagttgaagtgacggttgatcatcctaattattttgacaacaattttaggactttttccaaaaacacaggtgatcagctagtttttggatacagcaaaaaaaaacgcatgtcttgcaagtaaaaataacaacagccaatggagaataagttttcagaactttaacaaactagttcgttctagtccagtacatttcgaaagcattcgaaaacttgaaccaatggcatgctttgagtataatggcaagagctatgtgttttttgaggaccgtgaggcggacgaaatgcacctttatcgtgggcatgagcaaaaaattgttaagaaatttttggccaacgcaaacagaccaatgtttgactatatgaccgagcgtttatacatatctgataagtacgaacgtcagatcagtgaaattgaactaagctatctcgagcggttgtggacaaataagaatccgacaaattttacgctgctaaagctgaattttgtatgcatgttaccacaggataaaactgatttcataataatagataacaaggtgtatctgattcgatcggaccgtcgtatttacaaatatggaattaatgacggtcaaatcaacccaaaatttgtgtccaacatcagtgacacgaaatttaactttttattatttaaagaatatcgcgacgatgtaattaatatacttcaagccagctcgccaacgcctcaaatcaaattattgttatggtctgcttatacatttgacgtactgctggtcgtcatttgcgcatatgtaataagacaaattcgtcgtaccagcagcagcagtaaaacttcatccgaagatgttggcatgtttgaccaaatggaactggaaatcttttcggataatccgaaagatttagtgtacaggccaacaacggtcagagaaaggagtatttaaggcgactattctatccatctgactttatttctacccgaaacgtatatgcagcgtgcaataaaatattttattgactattatgcgttagatgatatagctcagctttatgctctgttcaaatccgaaatagactctgaaccgtccaactattttccaaatcccttgcaatcagttccttgtgtgcaccttgtgaacgaagagtacgaaaatcagcctgttgttgtagaaggaacacttgatctgataggagatctgttcttttcaacatgttatcccaagaagagacaggggatcgattggtaaaaattttaattattattcaaatgtcaatttaatcatttttatttattcaggagcgaacctctgtatgtggaattgaaggatctgatggtttgtccgggcgatttgcggaaatgtctgtcacacttcggacatcggaaggatcagcgcaacttggtcgtcgacgagctggattggcacgacgaagacgacgacatcgcagaaggagcttggtga

SEQ ID NO: 46856 - DNA, 2841 bp, Heterodera glycines
  unsure (1)..(2841): unsure at all n locations
ctgacatttaanttgaatgggcgggaataatttggaatatctttagaagacttccccggcgtaattccacttcaccggataatgttccttacattttattaaaaaattgtgcagaaccaattacaaaaatattagcagatatatttaggctaattttggattacggtcaaattccggaaatatggcgaacatcattggtggtaccaattttcaaaaaaggcgaaaaaactgatccattaaattacaggccggtttcattaaccagcactgtctgtagagtttttgaacgaattttgagtagcaaaattttagaatttctgaacagtacaagattctttgataaagaacaatttgggtttttaaaaaatagatcgactacaacccaaatattaaaaatgatggacgatatatataattctatacaaaagaatcaacaaattgacataatctatattgattttgtcaaggcgtttgattctgttccaattgatttattacttcaaaaaatcaaaaagattggaattgaaggaaaaattcataattttttaactaactttttaaaaaatcggagttttaaggttaaaattggcgaagaattgtcagaaagtttcagaatattttcaggagtgccccagggaagtgtcttagggccattactctttttaatttttataaatgatctgccgtcctttattacaaatgaagcggcatcggttgatataaaaatgtatgccgatgatgttaaattatattatacacatgaaaacgatgaccattcaaatcagttggataaagcaattgaggctttggaaaaatggtcaaaaataaatgggttagaaatttcaactgaaaaatgttttgttttatatttagggaaaaataatatgaaaaaagaatattttattaactcaaaaaagatttctgagtcggataatgttcgtgacttgggcattataattgactcgaaacttaatttttcagaacacataagcaaaattatacgaaacgcatatcttagaagctttcagattttgagagtgttgaaaagcagggaaataaagactctaacagcagcttataaaacttttgtacgacctcaattagaatacgctaccgaagtttggaaccctaatttaaaaaaagatatagacaaaattgagcgggtacaaaaatttttcacaataaaagtttttcgaaaatgtggacttgtgtacaaaaaatatgtggaaagacttaaaatcgcgggtttacataaattagaagaaagaagaaaaattaatgatttgacaacagcttttaaaattattaaagggttcaccagcctagaggctgaacaaaatttctttttctcagaaaggcccaggaggcctttacttttacgagtaaagcgccacacggccaaaacacaaaataatttttttcataggatagtaagaaactggaataaccttccagttttagcggtgcaaattaataaggcaaaggaattcaggggtttactaaaagcaattagttctgagtaggaaatttctgtgccacatatacactatattttaatcacctgtgaatttttaacatttgatttatttttattcatttttattacggtattcattttgtattttttatttgatcatttttatttgtttgtttttggcaccatataagagcactaatgtgcctttggtttgctcgataaaattaaattaaattaaattaaactttacattttggtgcaaaattaattaaaaatttcattttccggtttttttctccggcgttgcctaacggaaccgtcgacctatgaatcttcatatttttttaaatcgagacaagatctcggtcccatttttacatcccgcccatttctattgctaccaaaaatacgaacaatttaaaaaaatcgggatgtttaaatgagcattgttcggccaatcactttccgtttgacggtaaatactgtaaataccgtaattaccgtaatcattgtgactgtttcgagcattcggcgcgtttgggaacatcgtccgtccgtttggcgtttgttcgttggcattttttgtggccaaattagtgacggatgagcagagcaaaaaggcaaagtttaggaagaaaactgcaaaagaagcagcagtgccgactgtaaaatgccatagtccctttttgaattttaaaaatggcacttttccccactaactttttggcattttgtctccctccaccgtttctccattatttttcgacattttactcagttgcgacttgccaatgttctttttgtgcatattcactggtgccgcttcgctgctgctgaacctcggctttctcaactcgtgccgcctcagtaacattttggtcacttggtgcgctgtcaattctgagctttgttcggccgattactttccgttttgacggtaaataccgtaatcattgtgaatgtttcgagcattcggcgcgtttgggaacatcgcccgtccgtttggcgtttgttcgttggcattttttgtggccaaattagtgacggatgagcagagcaaaaaggcaaagtttaggaagaaaaaatgtgcgaagttaaaagccattttataaatcataaatttttatgaatcgtaaaagtaaaatatattttttcgattatgctaaatgacaaaatcatatgctaataaagcatcgattgccaagtcattgaattagccaaaatttaaaaaatattattcacacaaatttatgcgtagaaaatgaacagaaaaaacgctaatttagaaataaataggaactaaaaaaggaagtgtgtttgatcccgaaagtcaattaaattccccaacaaaaatgccttctttc

SEQ ID NO: 46857 - DNA, 1279 bp, Heterodera glycines
gtttgtggtgacatccatggccaattttatgacctcatgaaactgttcgaggtcggcggttcgccttcgtctacaaaatatttggtaaatttattttgtgccaattaatttggctggcattttgccattaatttaatttttgaaaatagcaatgttccattcaatttttggcattttgcccgtgccattatgtgttggtacatattcagattccatggattatcatcggcgaaattctatgataaacagctttctttttactaattcccgatcccgaattttaaagaatctaaaccctttaaaaatcccctcagggtgccaaaaccaaaatttgtgccaaattcagcaatttaatggcattttttcagttcctcggcgactacgtggacaggggctacttctccattgaatgtgtgctttatctgtgggccctcaaaatttgccatcccgccacgctgtttttgctgcgcgggaaccacgagtgccgacacctgacggaatatttcacattcaagcaagaatgtatgtttggatggcatggcatggcacaccgctaaacttgacgagactctcgagcagggaaagccctgaccttttggggtcccgaattcagaacacacagactctcgagtagagcttttcaatcttagcatccatgacaatctcctgagtctcgaccggagagagccgagcccggcacttttgagtatcgaattcggaacaaaatctagaatctcggcccaagcgatcgattgagtacccaagcaaaagcgacaatctcgggcggagataggcttggcctttttaagttcaaattgttggggtgttgccctgctggttctcgtccgagaatatttgaataataagcatatcaaaaatcccgtctttgccaactgatgagtgccaaccggattattttttgggatttttagaaccgggattttgttaatgcttgtatactctgtacgtggatcataaaatgggaatatttttccccattgatcacaacaatcagcacacactgattttgccccgggcaaattggcccccattatcacccactaattagtgggataatagtcaacaattaacaactaattgctgtttcctcccgcgcccatccaggcaaaatcaaatattccgagcgtgtgtacgacgcgtgcatggaatcgtttgacgcactgccacttgccgcgctaatgaaccaacagtttttgtgtgtccacggcggactgtcgcccgaaattcaaacgctggacgacatcaaaaaggcgagcag

SEQ ID NO: 46858 - DNA, 544 bp, Heterodera glycines
atgcgcgactgggtaatgccgttgaactttgaccatgccgacgcggaagccaaacatttaattcatattgctgacgaaaacaaagatggcaaattgtcaccggaagaaatactcacccattacgacacattgtgagcaggaataattaaaaaaatcagaatatttcagcacagaatttgtacttatgagcttaatgatttttgcttaaaaaatttatataccctcgggtttttctaatttaatatgaaaaaacgattcagaaaaaggggaaaacatttatttttttcgtttatcagtcttgattctttttttttgctaaggcgcccacagaaaaaccattttaattctcgtttgccataacttgccataaccatttctgaacaggcttttataaacagggggcggtgttgtttgaagatttgaatgtttattgtttagcgtccgctcacaggccaccgactacggcgaacagtttgcaaaaacctggacccggccgaacccccgatcagggggcgatcattcctaatccctccttttcattaaa

SEQ ID NO: 46859 - DNA, 2017 bp, Heterodera glycines
aacaatgatgttgagcggacatggaaaaattacaaggaggagcagctgaagaatggcttgctcgattggcaagactacaggtgaagaaaatctaacagagggcgagaagggtggaaaattctaaaaaaattaagaaatttgatttacggaaaaccgcaggagggccaggagatttcaccggaatacgtcaaaatgattgagcgagacgaacgtcggtggaaggtcagaagcaggccaaaaagacctgctaatttatattaaatcgagaggctaacggccaaattttaatatttttaaatgctttccatacagtaaactcaaaaattgatttacaggtggctgactacaattcggacggtaaaatggaccgcacggaatacggctgtttcatgcacccggaggactgtgaccatatgagagacattgtggtgcaggtggattagcaaatttatttattaaaaaaaaatcaaattagattattgcttattaaagtccctttttcaatgattttcattttatatatttttcacttgtcttaacttggaacgggaaaaattcacctcaccctaattctcatatttacccagtattgttgcctaattatttaaaatgatttattattaataaatctttaattgctattggagcaaaccctcaccataattctcatatttatctcaaaccctcgccataattctcatattatctatgtattttcctaattaatcccgaagtattgctaattaataaatcttttaattgttattgatgtcctttccttaaaaatccttaaaaatttctgtacaggaaaccgtcgaagacattgacaaggacaaggacggtttcgtggacatggccgagtacatcggtgacatgtacagaccagacgattatccggaactgaagggcaaagagccggaatgggtggagtcggaacgggaaatgttcagggagcaccgggacaaggacaaggacggcaaattaaacaaggcacgttgaaggggaagaaaaaagtgccacgaaaatgccaatattggctacaaaattggcaattctgccacaattaattaacagaattttgaattttaaaacttttcggctttaatgcaaaaatcgccaaaatttattgtattttcaagaataattaacttcttataaaattgaaaaaggaattaaattatctttaggaattttttcattaattttaattttttggttgcaaataattatgtctttttcaactttttttttttgtccattaaagcaaaaaaaggaattttaaatactttctttggcataaaaagagaaatacattttacgatatacatacttatgtctagggatgcaatttatagttgctaaaaactgccatccccaaaataggtgccaaaaatttcaaattagtggtgttaaatcgtaaaattttatccaaaaatggaaacattgccaaaaaaatttcaaaattattttataattttcattcaaccgttcaaatttggcgttttgctttaaggacgaaatgcgcgactgggtaatgccgttgaactttgaccatgccgacgcggaagccaaacatttaattcatattgctgacgaaaacaaagatggcaaattgtcaccggaagaaatactcacccattacgacacattgtgagcaggaataattaaaaaaatcagaatatttcagcacagaatttgtacttatgagcttaatgatttttgcttaaaaaatttatataccctcgggtttttctaatttaatatgaaaaaacgattcagaaaaaggggaaaacatttatttttttcgtttatcagtcttgattctttttttttgctaaggcgcccacagaaaaaccattttaattctcgtttgccataacttgccataaccatttctgaacaggctttattagagggggtcggtgttgtttgatgatttgaatgtttattgtttagcgtcggctcacaggccaccgactacggcgaacagttgcaaaagcatgacccggccgacctc

SEQ ID NO: 46860 - DNA, 3030 bp, Heterodera glycines
atgaacctgcacttgccccagacgtacgaggccaaggcggaggcgtcgctgctgatgggcctcaagtacaacctggtcagcccccgggcgggccagccgctgatcgccgcaattcaaggtgaattttggacggaggaaagaaaatgtcaattaaaaataatttttttaataaaatttctgaatttaaaaaaaaattcggccggcggagagggaataatctgctccattcttttttgctttgtcttacaccttggggttttttttttgacaagaatgattgagttcaatagtcgggagttcgtttttgggttactttcttcaatccttgtaatggaccctgcctaatcaaaatttttgcaaaaaaaaaaataaaatttttaaatgaaccttttttaataaaaaaatttaaaattttttatgaaccttttccgaatttgtaaaatttaaaaaaatgccttccaatttttttttgtcgtttttgtgattaaatggttaaaattccttttgaatttttgtccattaatttgcgtctcaacctaaatttgttttggtcctttatattttttttaccatcctcagatttcatcacctcgggctatttgctcacccacaaggacacctttctgccccggtccgaagtgcaacggattgcggccgccgttgtggaggcgaacaccggtgccaaacgcattcgtctgccgccgccggcactgctcaggcccaaggagttgtggactggaaaacaggtgggatcctttttgggcggatttaatggggaaaaatgaaaattttgcattttaactttaaaaaatatgaaaatttttcaaattcttcataatttatttttttatattttattctttaattttcttttgataattctttttttaattattattttttcaaaattcatttgactagtttctttaataattccagcttatcgaactgctcattgcgccctacaaaggcacggaagtgtgtctgaatttgtccaccaaaaaccgaatgcacaacccggacgagggcgaattcacaccaaatgtacggaaaattgcaaagatacaaacataaaaattgaaaaattttggtaaaattttaagtgtgttggggaaaccggtttgatgaaaaataaaattgttcattgaaatcgcaaattgacaattttcccgtcctgtccttaacacatttacaaaaccgagttttaaaaattttgcccataagtgttacggaatttttgaaaaatggcgtggtcaaattcgcagcgggattatacctcgccggaaaaccaaaaattttttcaatttctaacgagttttttttaacaatttgtaaatattttcatgagttcttattttctaaagaaaaaggaattttttttttattttttccaacgacttaaaacgattctgcaaaaactctttaaaaattaaaaatttctttgtttcaattatcactcacaatcaggacacctttgtgatcatccgaaataatcagttgctgtgcggttcgcttgacaaagcattgctcggctctgaaagcaaatgttcaattttctaccgtttgttgcgcgattggggcgagggccatgccatcgaggcgatgtggcggttggcacgcatttccgccgtctatttgtccaaccggggcttctcaatcggtcagttttcagcttgagcctgacttccatccccacccttccagacataaattttacaaaaaaaacttagaatacttttttgaaaatgtcgtgaaaaaaaaagatgttgaaaaattgataattttgctggccgaaattacgccgggacaaaattttaccgccaaaattttgaaaaaaaattgaaatttttttagctatttttttaattacaggggaaaatttggagtgcacccaaaaattcttattttgcaacgacgcctgccatactctcagaaataattttgtttttttttctccatcctcaggcattggcgatgtgaagcccaatgtcaacctgttgcaagagaaaagtgtgctgctgaacaccggctacaaaatttgtgaccagctgaacaaaagcatgcgcttggagcgccaaaaggacaagccggacttgggcctggtggaggagttggagtccaaaattctgaaggagctgtccagcatccgtgaccaggcgggcaaggcgtgcaagcagtacctgaggtgggtgtaccgtgcaatgccagaatttgggtggttcatgtgctcggttggggcgggggagaccgtcactgggtcccggacaattttttggtacaaattttttcacaattgccagaaacgaacaaattttgtattaaaaaagttgttgtttttttgccatttttcgccaggttcaattcggacaactatgaaagtaattatacaccaaaaacaggtccaaggacccaattaatcgaggcccaattattgtaaaatcatataaaacttccgaaaaaaaggccgtctaaaattggccaaattttatgcaatttttttagtcgaaagaatgcgccgctgacgatggcccagtgcggttccaagggatccttcatcaacattgcgcagatgatcgccctggtcggccaacagtccatctccggcaaacggccttctgacggatttgaggtcggttggtttttggtagttccgttgtattggatcaaaaattaaatcgtcttcttccatcttagttaaaaaacagacgacattaaccatgcccaaattttgccattttggggtctaattttcaaaaaataatggtacaatacagttcggcggtgccaatggcgccgctgggaaattttttcttggaaatttttgattcgcagaaccgctccctgccgcactttgagcgcaacgaccgggcgccggacgcgaagggttttgtggagaattcgttctattccggcctgacgcccacggagttcttcttccacacaatgggcggaagggagggcctcgtggacacggcggtgaaaacggcggagaccggatacatgcagcgacggctggtcaagtgcttggaa

SEQ ID NO: 46861 - DNA, 345 bp, Heterodera glycines
atggtccaatacaaattatattattttgatgggcgcggtttgggtgaatcaatccgtctgttgcttcactatgttggccaaccgtttgaggacatccgaattaaagacatggaagaatgggagaaaacgtacaagccgagtgagtaaataatgggtggcataacgccagagaaatgaatgccaaattaaaaaaaaataaacaaatttttttcagaatttttttacggaaaggtcccagttttggaggttgacgggaagccattgggacaaagtgctacgattttgcgctaccttgccgaaaaatttggtaaattaattataataattaattttatttgtttttaa

SEQ ID NO: 46862 - DNA, 1841 bp, Heterodera glycines; identical to SEQ ID NO: 10355
  unsure (1)..(1841): unsure at all n locations

SEQ ID NO: 46863 - DNA, 2691 bp, Heterodera glycines
aaatgtttgcatggtaaaacaggcctgtcaagcgcttttgaggcaccaaatttgtaaaaattaatttcaaatttgatttaaaaacaaaattgatgtccatttattagtagtctgaataggcttgggacaattttcaaagtcctacttattttttcaattcattttttaaaaattttcttaggcctaaccgacgcatcaccggcccgcaatgaacaacagcaactatccggtgccaaaacttcgtccatcttccagtttagaccaaatgactacgagcgcatgccgatcactgaggttttgtgagagggagggatggcattttttttataagttgattaaaaaactgcccaacgaacaattcataacaaaacaaacaggaaatctaattgctttttgacactaaatgccgttttttgaaatttgattttataaaattttcatttttttagaaatcaatcgcattccgtcgacggaattcgacgccgcctgccgagcccaacaatggcacactgtgttcactcaatgcgtttgtcatctgtttcagcactgaaaaaggttttcatttcctgtaaaatgttaattaatttccacgaatgcatatatctggcaccgtcggatttttaattttttttttcctaaaattcttaatttagtaaatttgttgcatggttcgtcctcttgcctcttcactaaattgctgaccaaaaaaactaaaaaactgcctttctgaacattttgttaacttttctgaggactaacaaattttttacaaattttacaggcaatagacgaaagcctagggctatcaaatgataatgattggttattgtcaaaatactcgaaaacccagttgttgttgtttttttttaagttttttggtcataattttttttttttgttatacaacgaaattttttggaaatttttgcattcctaatagagataatttagagttaccaaatgataatagattggttcaattcgcacaaatatgaaatgagttatactcaaaaaccaggaaactgttgccaatttgtctctttccatattccacttcccacttatatttattattaatttaaaaataaatattttacccagaactcggcacatttcgcaccaatttggacacattttgtcgtcgtcaaccaatcgcagccgccccgggcactggcgacgggaccgatgccggcaaaaagacggactgtgccggtgccagcaacaacaaaaagcgcaaatgtgacggaattaacggcaacaatgccgacgacgacatcggcacaaccgctgcggacacagcggcaaatgggatgaaaaatgatggcattggcggtgaacatgagcaaaacacgacgcactcggagtttgactcgagaaccgaacaaggttttcacatttatcgtttaatgacataattttttgttgtttgggtctttcaattctgacccaacgactgtccaaaaatgccatttttggggtaaaaatttattatttttagctttcatgattttttggagttttttctagttgaaaaaatgaattgggctaatagacaaattatcggtggccgatggtgttaattctgataaatttttctacagaaaatgcaataattttctctgttttctcaccctttcctaatttttgaaaacttaattttcacgtttttcttcaattttaatgcatcatgtgctgacaaaaacgaaattacgaattcttaattcaaaaaaaaaatcccaattaaaattaatttttccattccttcctttttctccccacaggttccgccgtccaatatttccaattttatggctcgctgttccagcagcagaacatgctgcaggacttcacccgaaccgccacctatcagcgggcaatttttgacaattggcacgattttaggggaaaggtatggtgttgcagaaaaaattaaataaaagaatttttcatctaccaaaaaaaaaagtttattttttttttgggtttcctagggaaattcaattaatttctaatttcacttttttccgctttttcaggttgtgttggacgtcggcgctggcacaggcattgtatggaatttttgaacaaatttcaattttttttttattatttatatcataaatcttttttaaatgggaaattttcgtttgttcaacttcagaattctaatttttaaaaaataataattgatgactcctaaaatatttttcattttgattctctttagttgtccttctttgccgcacaagtcggagcaaagcgtgtttatgctgttggtttaactataatttttttttctccaaatttgatttttcatttttcaaggtcgaggcctcttcaatgtctgcacattgtaaagtataaaaataaactttttttttttgaaatttcaaattcttttctaaggaattggttgacgcgaatgggttcagctcagtgattgtggtgttgagtgccaaaattgaggaggtggaattgccagagcaggtaaattaattagtggactctaattaaataaatgagtaatttttttttggatttaattttgcgaaaaaaaacgcattgaaattctgtggcaatttttgaaaatttgtaaattgaataaatagttaataaaaaaacccaaattgaaaaataaaggcgatttttatgtaatttattcttcgagaattctcgttaaataaatttccc

SEQ ID NO: 46864 - DNA, 263 bp, Heterodera glycines
agcgcattgggtacgccttcaagacgaccaagccgaagcgcatcttcctgaaccctccgtgcggcacgctcggcgttggcgacgccgtgaacgtgatcatcaccgtcacgaccttcgacccgaacaacgacgacatcaagaacgaccgcgtgatcgtggagtggtgcaacacgcccgacccggccgccaccgttttcaagctggagtggttcgccgaggatggaatggtgcgccgcaagaatctgccggtcatttacaacctg

SEQ ID NO: 46865 - DNA, 932 bp, Heterodera glycines
atggaatcgtccaatgaggagcagcagcttcaggaaattgaggctttggaggtgtaactattttttataatagataattttgtttaaaattttatttagtcaatgtattccaacgaactgagggttttgtgccgggactttccgaatatcagtgtcgaattggatgtccgccccgatttggtttgctcgttcaatggataattaactattagaatttactgattaaggacgaattcactgaactcttcggcaagagtgtcatttctctgcgcgcaacttttccctcggactatccgaattgtttccctgtcatcgatttgccagattttgatggggacgacgatgaaaacacacttcagaagactcagttttgggatgaatgtgaacggagagtgaggtcggaattggacaaagtgatggaggattgtgtcgggatgccaatgcttttcacactgctcggcgctttgcaggttcaaaagctgtacgtttcagataaccaatccaacaaaacaggaattctttgtccaaatggcagatgattaccttaaaaaccgtgatgaattggagaggataaaagcggataaaattgaacgcgaggaacgggccaaattcgaaggtaattgtttaaccaaagcgagtaggacagataattttataattcatttagggacgagagtgacggtcgaatcattcaaaaaatggaacgatgcctttttgaagtctgtcagagtgccacaggaaaaaataaaagtttaaaatgttgaatttttaatataataatcatctttcacctacaggacaatcagacgacaaagagaatgaccggaaaacagctgttcctttcggacaaatcacttaacatttccgatttgcaatttattggaaatgccaaagacgaaaatgtagttgaaattgaccagtctctttttgag

SEQ ID NO: 46866 - DNA, 813 bp, Heterodera glycines
atggacgacgacagtgacagcaacaacaacgacgaggaactgtcgctgggcgtcttcgagacgtacgcggtgttggtcaaaattttgtgcctcaaaccgatgctgatcatggtcattgtgctgctcacgggaaaggtccaacatgggagattgaatttggatttgactgacagtttttttccgtttttcagatagcttttgccgccacagatggcatgacggaccttaaggtggcctacaaaatttataaacaaaaactttatttgtttttttctgggtccactattaccaccaccactccctcccccgtttatttcccgctgaaaaatttttttaaacacaattcttggaacttttacaagaaaaattttataaaattttttgaaaatttatggtgaattactccaaaaaatcgttgaaaaaatttttatcttttgaattttcttacattttctaacaataaaatttttttaacttttcgtttcaatttttttttttgatttctgggggaaaaagtacgggggggggacgaactctcgctataaattttcttaaattttccaaaaataaacactttatttttgcgaatttaacttctcttttctgctgttcagttgatcaacgaggggctgaccacggacaaaattgcgtcccgctccatcttcctcactccgctgcaaatcattctgccgtgggtgctcggcaaacagacggccgggccgaagccgttgaacgtgttcttgtgggcgtacccgtaccgactggtgatgagtttggcactggcactgctcgtctactggacaccgtcatttc

SEQ ID NO: 46867 - DNA, 1982 bp, Heterodera glycines
atgcacagctcgggctgctgtcgcagcatctgccaacaaagcgttccgggcttacaaggtacgggcgccggcaggcgcaaaaaattttgccgacgcattcgggcgcgtggaaaaaataattggccagatattcgagcttaagacgaaaccggaccacagtaaaatgcattttaaatgtaaaaaacacagtaatttgacacgcagaatacagtaatccctaccggcgatttttcttcccacacaaaggacggctgaaaattgaacaacaatcatattcacagttggacagagtgtagttgaataaaaatataatttttttttaattacgatttagaaaaatgttacggtatctcagtctatactgtacatctttggtaataagatggagaaaactgtcagacacagtggggaaaagaaagtgggcaaaatgtaaagagggtcccaaccccgactggtgaaaaagtaaaattttataccgtatttgcctgagacagagttcccagggtggcaattacggtacttaaaatggtcggcattttttgccattttttttgcccacctccatgcaagtgaacttatagccggcgccacaacaggttagcgcgggagcgccgaattccggaagacaagcgtactcatgatgagggcatttttgcctcgcactttcgcattcagcgagctccgtcaatgggcggggcggcagctttttttgtgggaaattaataaattaattaacaaccaatagttaattagtttcctaataaataatcaattaattaacaaatcaatagttaatttgtttcataataaataattattaatgtatcaattaacaaatcaataaataattagtttcctaataaataattaattaacaaatcaatagttaatgagtttcataataaataattaattaattaacaaatcaatagttaatttgtttcataataaataattagtttcataataaataattattaattaattaattaacaaatcaataattaattagtttcataaaacaatcaatagttattagtgtcataataaataccaatcaccttagaaagtgtacgtgacttgggaattataattgactcgaaacttaatttttcagaacatattagcaaaattatacgaaacgcatatcttagaattttccaaattttgagagtgttgaaaagcagggaaataaaaactctaacagcagcctataaaacttttgtacgacctcaattagaatacattaccgaagtttggaaccctaatttaaaaaaagatatagataaaattgagcgtgttcaaaaatttttcacaagaaaagcacttagaaaatgtggttttgtgtacaaaaaatatggggaaagactaaaaatcacgggtttacacaaattggaagaaagaagaaaaatcaatgatttgacaacagcttttaaaataatcaaagggttcaccagcctcgatgctggaaaaagtttctttttctcagaaaggctcaggaggcctttacttttacgggtaaagcgccacacggccaaaactcaaaataattttttcaatagaatagtaaaaagctggaataaccttccagtggtagcggtgcaaattaataaggcaaaggaattcaggggtttactaaaagcaatgagttctgagtaggaatattcatgtgccatattttacattccatatttaatcacctgtgaatttttaacatttgatttatttttattacggtattcattttgtattttttattttgatcaaatttatttgttttgttttctttttggcaccatgtaagagcactaatgtgcctttggtttgctcgataaattaaattaaattaaaaaaaactgattgtgagcataaaaattaccgttgttattgtctcctaaaattaaaaaaaaaaaagattaatagaaaagaaacaacaaatgtttaattatttatttctagggattcctttttatgtaaataaa

SEQ ID NO: 46868 - DNA, 2780 bp, Heterodera glycines
gaaatcttcctccgtgagctgatctccaactcctctgacgctcttgacaagatccgttaccaggcgctgaccgacccgtctcagatggagagtgggaaagagctcttcatcaaaatcgtgccgaacaaagccgataagacattgaccatcatcgacactggcattggcatgaccaaagcggacctcgtcaacaaccttggcaccattgccaaatccgggacaaaagcgttcatggaggctcttcaggtacagttttctagtcgcgtcgacaacctgcaaattggcaatttgtttttaaggctggtgcagatatttcgatgattggccagttcggtgttggattttattcggctttccttgtggccgaccgtgtcacggtcacatcaaagcacaatgacgacgattgctaccaatgggagagctcagctggtggctcgttcatcattcgcaattgtgccgatcctgaagtcacccgcgggacaaagatcgtcctccacctgaaggaagaccaaacggattatttggaggtttgtttcattggtactttggttcgaaagttatgtcattgtttaggaacgtcgtgtgcgcgaagttgtgaagaaacactcgcagttcatcggttacccgatcaaattgttggtggaaaaggagcgtgacaaggaaatttcggatgatgaggcagaggaggagaagaaggaagatgaagcaaaggaggaggagaagaagccagaagatgacgtgtcaggttgtctttaatcccaagtcaacttttaaactgatcacatatttaaatatttctcgttgctttctaacaactgatacatctacgtttttagatgacgaagccgagaagagaaaagaggaaggggacaaaaagaaaaagaagaccaagaagatcaaggagaaatacacggaggatgaagagctgaacaagaccaaaccgatttggactcgcaatcccgatgacatttcaaatgaggtgtgaatttaggcttccttattcacttgctttgagctattttttttctaattccaggagtatgcggagttctacaagagcttgtcaaatgactgggaggaccatcttgctgtcaagcatttcagcgttgaaggccaactcgaattccggtcggtcttgccttacctatgtttattctattactagtaatgagaaattggtgtcccagcggaatgtaaaaaggattttttcttgagcgaagaataagctggcaaaatgaacttatttttcctagtgctctcctcttcgtcccccaacgcgctccgttcgatctctttgagaacaaaaagagcaagaatgccatcaagctttatgtccgtcgggttttcatcatggagaactgcgaggagctgatgccggagtacctgaacttcatcaaaggagttgtcgactctgaggtttgtttaaattgacattgatgaaaatttactaaaataagtatctcaacctttcttttaattaaggaccttccgctgaacatttctcgtgaaactttgcaacaatcgaagatcttgaaagtcatccgcaaaaaccttgtgaagaagtgcatggaccttttcgaggagatttctgaagacaaggacaacttcaaaaagttctacgagcaattcgcgaagaacattaaggttgcgatttttcaattacatgttcccggacgctgtctttcatttcaaattaattttagcttggtattcatgaggactcggtgaatcgtaagaagctctcagactttctgcggtactacacttcggcctccggcgaggaaccatgcagcttcaaggttatattgggctattactactgtgtctctggtttgggcttctaaaataaattttattgggtatacaaaaggctgaatgtaatttcttttttcaggactatgtttcgcgcatgaaagagaaccaaacatgtatctattacatcaccggcgagtccaaggacgttgtccaaaactcctccttcgtggagcgtgtgaagaagcgcggcttcgaggtcatctacatggtcgacccgattgacgagtactgcgtccagcagctcaaagaatacgacgggaagaagttggtcagtgtgaccaaggaaggccttgagctgccagagagtgaggaggagaagaagaaatttgaagaggacaaggtcaagttcgagaagctgtgcaaagtcattaaggtaagtactttgtttttaattttagttcggagcttaatttattttttaggacatcttggacaagaaagtccaaaaggtttctgtctcaaaccgtttggtctcttctccgtgttgcattgtgaccggagagtacggatggtctgccaacatggaacggatcatgaaggcccaggcattgcgtgactcctccacaatgggatacatggcgtccaaaaagaacctggagatcaaccctgaccattcaatcatcaagtgagcgcattcaagatgaaattgagatcatgatgtaattttttgacaatttttcgtttttaggtctttgcgcgaccgtgttgagaaggagcaggacgacaaaactgcaaaggacctcgttgtgctgctgtacgaaacttctctgctcacctccggcttttcattggaggacccgcaacagcatgcgtcgcgaatttaccgaatggtgaaacttggacttgacatccccgacgaggaggagccggccgagcaacagccgagcacttcgggcgagccgacaattgcggagaaaattgctggtgccgaagaggaggcctcgagaatggaggaagttgactga

SEQ ID NO: 46869 - DNA, 2520 bp, Heterodera glycines
caaatttccatccaaaaatgccgtgttttatgaaaaaatgccatattttcaatgccgatttcgaaggtgcgtgaaatgaacaacaccggctacgccctgctctccaaggaccaactgcatctgctgtatgggcccgagtcgccctataacaattcggacgtaataaaattaccccaaaattacggggcaatcgaattcccgcaattcttggattgattctcgaaactaattcactgctgcttaaaaaggctctgcaacgctttgttcggttgagtgacagcgaaatccatgccggcattgagagggatgtgcacgcgttggccgagttggagtccttcaaagttcggcaaaaggacgttgtcctgtcgcccattttgttcaccacctttctcctggtaaatgtccaaggatgaatggcataatatattcctggcaccacatatatctaaatggcaccaaaaggcggcaaaaatgggtaaaaatgaaactcgttattggccattcatatcgctatgattcgggatggggtaccagtacgaattggcttagtacgagttggatttcgtccataaaaatggtaactaatgggtgcaccccctaaggcaaaaggtaaacggaaaaaagcatttggctgtgcggccaactcagtctcgactcgatctcgggtcaagaaatgtttctgtttttgccatttaaatctgagtttttgggccaatataagccgaggattttatcggcttcttctttttggctaatccccaactttctctctgttcagactttctccgccaagtccacaattcttctgtcgcccattctgttcagtccggtcattttgtcccccaatgtgcttggtcccaccattctctccccgtggctttttgtgccggtgattttgtccccgcgagcgttgtcgccggtaagtcaaattcgagtaattgtcacttttccatttggggatggatcaaactctcgagtctctatggccgggactctcgacctgcctcaagtcatattctcgccatttttttttgatttgcttcccactcaccacagactgttctgtccccttttgtgctcgaccccatcattctgtcaccgttcgcaatacatccgatcattttgtcgccgggtgttctcaacgccatcagttcgaattttttttattgggaaaattccaatcagtcctggattctgttcacagttgaaacttgtgatccggagatgtcagttttttgctcccgggaagtcacaatcgctgaataacgaacgccctttttgttttgctgactctcccctttcagtactgaactaatttcctcgccattttacccttactttcggtgccgaagccgtttccccgccatttatcccttccaattcagtactgaacccatttccccgcgattttactccttctagtttagtaccgaagccgtttccccgccatttatccctcccaattcagtactgaacccgtttcctcgcaattttacccctcccaattcagtactgaacccgtttcctcgcaattttacccctcccaattcagtactgaacccgtttcctcgcaattttacccctcccaattcagtactgaacccgtttcctcgcaattttacccctcccaattcagtactgaacccgtttcctcgcaattttacccctcccaattcagtactgaacccgtttcctcgcaattttacccctcccaattcagtacttaacccgttcgtgctgtccccgttcattttgtccccgcaagccttcaccccggttattctgtcgccaattgcgctgtcgccgttcataatgaacccgagcatgggcagtccgactattctttcgccttttgtgctcactccgtccattctgtcgccacaatttttgtccgccctcattctgtcgccgtacgcactttcgccggtcatcgcaaggtcaaaaaaaattggaaaagccaaaaaagaagaaacccaataagccatggttggtacaagatcaaatgaacttattccagggtcggatctgtccttttatcagaaatgtcctgattttaagggtccaaatctataaaatgaaaatgtcttggtttgtcagaaacgtcctgattttgaggaagcgaccaaaatttgaaaattgttaaatcgataatctgaggcgaaaaatataattatttaatacatttttgatcgataatttaaaaaataactgacttgaaacaatttcgcaaaatgttctgattttcgacccaaaatctgatttttttaggcccggtgttctgattttgaaaaaatttcgatacaagccctgacttatgctaaaaaagttctattaggatgttccatatttatatttaacaaaagtttaattgttttcaaagatattgaaaatcggtacgatccaaatgatgataaatcccaaatgtcacgccatgtatctcccatgtaattaactaattatccctacaaattcagtccattgaccgccgtttctgtgattctgtcaccgagttggctaagc

SEQ ID NO: 46870 - DNA, 2986 bp, Heterodera glycines
atcataggtgccggcctgacgggcgctggcatcgcaaatgtgagcattgacaaggatatcaaaacggtaagtcacacacagaatcaggggtgtttcgtgttacccttttttcgttttacgtgtttcgttttcgtgaaaaaaacatttttgttttcgttttcaaaaattattttttggttttcgcacacttgcacagaatttataaaaagatcaaattcatttttgaaaataatatattaaattaaccaaaaacttatttaaaatcattttttaaccaaaacaatttctcgtataatccacgtaaaattataaattgatcgtaattaataaaattttaaattataaatcatgaaaatatccataaaagaacacatcccaaatatggcacctatacgcgctgaaaattatgcaattacagattctgatcgacacaaaccaggagacattggacggcggactgaagcaaatcacctcccaaatggagggtcagataaagtgcaaattgatcaccgctgctgaaaaaaaaatttttctcgccaatctgaaaccggtaagatgaaaaaatatgacacattgtatgaatttagttttttgataccctttaaagttatttttaatatagagaaaaaacttaatttccttttattatttttggctcaattttttgtcaaattttctgaaaatttttcgttttctgatgacattttttgtcaggaattggatgattatgagaaattgcgaaatgcggattttgttgtcgagacagaatctgaggagattgaatcaaagcacgaaatcataaagaaggcaagtgttatttatttggaatgtccatgtgtttttattatttcttataaattaattttcttattctaatcaatttaccaaataaaataatttttttagtcttttttttctaccgaattgctttttcagcttgaaaaggttgtgcccaaccattgcatcatcgccacaaacacttcagtactgcccatccacgacatcgtagcggtcgcacaatgccccgagcgggtcatcggcatgaactatgtgtgtgaagcaaatcacaaatatccttttattaatttttatttgaaaaattcaaaatcaaatttagaacaactcaattaaattttctttatcttaaattttataaattttcttattcacttccatcaatttccatgcatcacagtcaatttttttacacagattattaaaatagtaattaccttatttcctaaaatagagccatgactttatttttcaacctacctcaaaggcgggctctatttaatgcgagggatatattttaggaaatagtgaattggtttccctttttcagttttcgcctgtagacaaaatgcaaatgctggaagtgatcatcgctgacaaaacatcccatgaaacgcttgccgtggccgccaaactcggtttggaccaaaagaagatgattgttgtggtcaaggcgggttgcatgatttgaaaaattattttttaaaaatagactttttacattaaatacttaatcttgaaaaaaatatgtaattttcatttttttaaaaattttcttttcaggatggccctggctttttcgttgcccgctgtcttagcccaatgcttaatgaggtagtccgtctgttccaggagggcgtgtcgccgcaacaagtggacaaaatcaccacccaattcggcttctccgtcggcatggccaccctggcggacgaggcacataccaatttgttttttgaaaaaaaaaaacaattttttttagattggacttgattatagcgaatatctgaccacctttttgggcaaagcgcttggcccccgtgtgcaaggcggctcctccgaactgcttgctgacctgacaaaggccggcttcaagggcaaaaagtcgggtgcaggtgagagctgcattttttcgatgcttgcacaatgcccttattcactgggagatatggaaaataaaaggccattcattccaccgccctccttgaaaagcttaaaaaaagcttgaattttggaacaaattcttaattttgaattttttaatttggagatttgatttatttaaaaattggatggatatttaattgctttatatagtaacactcaatttcttccttttcccactcaaagtgcttttttggatttcttgcctttatttcgcaaaacaaacaatttaaatagccaaaacaaaatcatattcactctaaaaattaagtgatcaatcaaaatattttcaatgtttcaatctcgctaagatattcaaattcatcaaatcctcattgcaaatacaaatgaaattcgaatgcattgccaataattaatttttcaatttcctcaggcatttacacctattctgccgatggtggcaaaaagtcgaagaaagtgccaaattcgaaggcgcaggaaatagtggcacgctacaaactgagctcgtccgagggcgcttcgtcggtggagtatcaacaaattcgggtggtgtcgcgtttcgtcaacgaggcgctgatttgtctggaggagggcatcatttcatcaccggtgggcaattgttaaaactacaattaaattaaaaaatggatttcaattgcagaaaatgcatttatttttattggtccaaaagtttggaattttgtgctgatcactttttaattgattgcataaaattttttagttttttaaaggaattttaaaatatttgcatttaaaaataattttcaaagcaacatttgttttagtcagacggtgatgtggccagcgtgtttggcctcggcttccccccgttttggggtggtccgttccgcttcgtcgatttgtacggggcgcaaaatttgatcaagcaaatggagcgctacgggaacatttactcgaccgtacaattcaaaccgtgccaactgttgatcggtgcgatttgtcatataaacctattttaaattttgattttttagattacgctaaatctgggaagaaattttattcg

SEQ ID NO: 46871 - DNA, 1135 bp, Heterodera glycines
aaatgcccttacggggccatccaaatcatcaatttgcccagcaatttggagcgcgagaccacccaccggtacagtgccaattcattcaaattgcaccgcctgcccacgccgcggctcggctcggtgctcggcctggtgggcaccaacggaattggcaaatcgaccgcgctcaacattttgtccaaccgactgaagccgaacttgggcagcttcaaggtttgagcaaactttttgcgttcaaccatttacaattcacgtcacttttttgcgatgtccatcttttcaatggccattttttatgcattttttcccggtgaagggaaaatttttttgaaatttttaatgcaaatagtcaacaaattttgtccaaaaattgacctagtttttgctattttgagaaaactgtttttcaatggccattttttatgcattttttcccggtgaagggaaaatttttttgaaatttttaatgcaaatagtcaacaaattttgtccaaaaattgacctagtttttgctattttgagaaaactgtttttcaatggccattttttatgcattttttcccggtgaagggaaaatttttttgaaatttttaatgcaaatagtcaacaaattttgtccaaaaattgacctagtttttgctattttgagaaaactgtttttcaatggccattttttatgcattttttcccggtgaagggaaaatttttttgaaatttttaatgcaaattgtcaacaaattttgtccaaaaattgacctagtttttgctattttgagaaaactgtttttcaatggccattttttatgcattttttcccggtgaagggaaaatttttttgaaatttttaatgcaaatagtcaacaaattttgtccaaaaattgacctagtttttgctattttgagaaaacttaacaatgcgcttaaaatttcaaaaattttgccggacccccctaaattttggggaaaagcacgccgcaaaaaaagaggttaaagcaaaaaagaaaagaagtcgacaatttcatggctggaccacttcgcaaaattggcgcgggccgctgccccctacccccccccccccccccctctggcattccgaggccccaaaaaattttcggaaatcggaatttttcaa

SEQ ID NO: 46872 - DNA, 679 bp, Heterodera glycines
atgaaaaagagtgctaagcccgaaattcaaacagcacagacgcgaatcgcaattgtaaacccggacagatgcaagccggtgagtttacgcctcaatttaattaaagttaattgcttatttgatatgggttattaataatttgcttttttaagcgttaattcttttatttcaattttacagaaaaattgtgggcagccatgcaaaaagaattgtcccgtcgtccgcactggtaatttttttttttggtacttatatattttacagactataagatttcatttcgaccaatttcggactcgaattcgaacaaaaagtcgaaaattcaaattaaaaaaatcatattacggtgcagaaaaaacaaaagtttaacacaatttctgaacatctgtggcgcaagcattttgggcattatgactctgccttttttatttctggtcaagatttgcgttttcggatttttttgttcgaaattttcaccaggaattggtcgaaatgggtgtcagactttgtgtgatcagtgaccccgatttaccctcttttttgaacattaaaaatgattttttgccctctatttttaggcaaacaatgcattgtggttgagccaacatcgaaaattgctgaaatttccgagatattgtgcatcggatgcggcatttgtgttaaggtgtgcatacattaa

SEQ ID NO: 46873 - DNA, 2500 bp, Heterodera glycines
atgtgcgatgactgccgccgtttcgaggccaaagactattggcgcgcgtgtgtgcaggtgcggcagagatgcgactacaaaaagacacttttctatttggagcaattgttaatcaaacacaatgcgcaggtcgcgcatttttaaaacattattaggttagggatggcatagaaaagtaaaacaatttatataaatttcataaaaaaggtgaccgcttattaaaaccgactcttttaacacaattttacgcagaaaattccattaggatttttgggttaggaatttgaacgaaagaattgggctatcacttttttatattagactttaaactttctttaggcccaggcaagtggcataaagccggtgcccaccggcatcgactttttcttcgcccggcagcaagaggcacgcaaattggtggatttcatcagctcggccttgccttccaaattccatcagtcccaggttctgttgatgctgagtctaaaaaggacgttactcaaaaaacaataaaatggtgaatttttgacaaaaattaacgttgctaaataaatcaaaatttgattcttgatataattgggttgccctaattgtaagaacttcttggaaattttttttaaattggcaggtaatagagaatttttagggcttcgaatgggtcaaaataattaaaaatatgctcgagttttttagcaaaatttttattttgatggttttttgagtaacttcaaacaccgttctgtttggctttgggttttgcatttgttttattgtctccccccaattttacagcaattggttacgcatgacgtgcgcagcaatttctacgattacaagcacactttctgtgtggacattgtgccgatcacgaaggacgcgctcatttgtctgccgcgcactttggcccaatccttcgcaaacattggccaattcgtcctctgtcttcgcgtcaccgacgttgtctcactgatcaacccgcaaacattgcaattgtacgagctcaacgcgtaagtggttttttaaatataatttatcccttttttcgtttataccgttttttgtttccaatttcagtaccacctattggaagaaccctttcgacattttggttcatcctaaatcgcttgtcgagttttttgtggtcgacgtggaggaggtcgacgacccttacgccgttctcccacacggtcatgggtccgtgtccacaaagcaccgactggccgatgtttgggtggtgcgcaggtgcgcctcccgccccccccccaatttgaatctcattcgattcaatttttttaattttcctgtactttttaatgcatatttctacctactacagtgaccaagtcggacattccgatgccaaatccgtttgttgccgttctcatcttggccatctgctcaatgccggcgacaccgttttgggtgcataatgcaaaaaatattccctggctttagatttagttttttcggctttattttcaaatgggtctctaaagtctactcgttccttgatttccaacgaaataattttcttattgtttttcctttttcgggttacaatgtttgtcagacgaatttgaacaatcggacatttgacgcggtgaaagaggaaaatgtgccggatgtggtcagtcagttttacttaatgctgattcgtcatttctatttgtatttatgtttttcgcttgtttaggttttgatcagaaaagcgtacgatcggagtcgccgactgcgcaagagacagtggcgactgaagagactgctcgaccaggaagagactgccagcgtggagagggagttcaatgtgagcacagtttgaatttgaaccaaccgcttattgttttgttagccggaacgatagacccggaatttttgcaaaaattttattggtaaagggaacaatggaattttaggaatttatttaaaaaaattattacattatttaaggaattcatggacgacattgaggaggatccggcattgcgcgaacggatcaacatttacaagaagggaggcggaaagcagtcggtgaaacagacggcgacgagtgcaaaccgaacagcagcccaacaacggcaccaccgacagcgaatggcatccgccgcggctgattcagcacttagcgaaggcggggaggaggagcacattgacggagcgccgacactcgcggaaatgttggacgatttggagctggacgatgtcgaaatgcgggaggaggaagaggggtagaacagacagtaaatgaatgcgatggtacagtaaccagtggatactgtttgacgcttccctctgaccatttttgtgatgtgtgatgtcaatttgtttgtttcccttttgttattgttccgtttttgtttaatgacgaaattttaaaaataacaaaacaatattttaaatttagcgattaattatcgaacttttttgaatatgattctaaatattccctggcttatattttatataaattttattctgtatattacaagtttttacaaataaa

SEQ ID NO: 46874 - DNA, 1375 bp, Heterodera glycines
atgaaatatctgctctttgaggccttctacaaagggcaacaagaactgctgtacattgtgccgttcgtggtcaaatgcatcaccgccagtgccaagagtcagctgttcggtcctcactgtggttgggtgtacgccattctgaaggtgctcgccgaaatacacaacgagccggacctgaagctgaacttgcgctttgaaattgaagtgctctgcaaggagttgaacgtcgatctgcgaagcattgaagttggcagctacctgaaggagcagcgacgtttggtgagtgtgaaacaaaaaaaattttccgatgattgtgcaaaacttttttaagcccaaattggtgccgccctccaaactcggcacaaccgccgcatctccaacattggcacaatgtcagttgccgcccatccaacaaccaccacaaattggcgctgggatttcagcacaaagcacggcggattatacacccactgacatggcgaacatcctcactgaaatgagcatctccaggaaatattcgccggccagttatacgcccggcggatcgcaacaacaagttccatcaataacagcccatcaaactctgcccaccttcaactacgcggacattgctttgcaatctggtacacatttatacataaattaatttgtagcaaattttgcctgttttaaggcattttgcaaataatcgtcattcctccacatttgatgcttttccaagttcatccgcagcttaaagcgacatgcaaaattgccattaatcatgcaatcaaagatgtctatggtaatactaattcattatagttcattgaaaaatttacaaattttttgtttgtttttaggtggcgtcgccgaccgcgcaattagcgttgcaatcgccgccactgaacaaatctgtcgcaaggacttcggcctggactcggctgagcaaaatttgcgtcgtggagctcaccaaatgatgcgttcaatgactgcagctatcgcatcaattacgtgccgtgaaccgttgtcacagcaaatgaacagcattctgaaaatgtatttgaccgacgcaatgggaaatgttttgcccggaagtgaccaggccaaaatggtggaagaagcggccaccgctgtgaccgacacgaacatcaacatcgccacaaatttcgtcgtgaaaaacgcgtgcgaaaaatcggttgccgacattgagaaacggcttgagccggagtacgtggcgcgcaaaaccgcctcagacgaccgtccgttccaagttgacgccgacatggcggaaatgagtgaaaaagtgccggaaatgatcagactgaaggaggggccgatcagtgaggcgatgctgaaggtgtacgacgacttctcatcgtatgtgaaattttga

SEQ ID NO: 46875 - DNA, 1753 bp, Heterodera glycines
atggagacggacgaacagatgtgggacatgccctactaccacggactggtacgttttggtggttggcatgcaattctgaccactaatgcttttgcttgtttagctgccccgcgaggacgtcaatgatctgctggtcaaagagggcgacttcctgatccgcatgagcgaggagacttcaggacaggaccgcatctacgtgctctctgtcgtcgcgggaggccacaagcatcatctcatctttcgcaccgagcgtggaatgatcgcggtggacttcaaacacgaaagaggctacaggacaatgcggcgcttcatcgagacacatctgagcaaaaaagacacggtggttgacgtgagtttgttggggagagaggggggaaggaaggcgctaattaccccgaattcccttttcagcagaggaaggtgattctactgaaaggggtcggccggcagaaatgggagctcgcacattcgaccatcacgcagggcgctgaactgggcaagggcgcgttcggcgttgtcaagcgtggcgtcttccgcgacccgaccatcgggcagcccgtgcaagtggccatcaaggaggtgtcgcagacgagtacaaaggcacaggtaaaatggacgggcagcaaattggattttcagcctgctaatcgattcccctccccactttttcagatcaaggaattcatgaacgaagcgaggatcatgcgccacttggaccacaaaaatgtcatcagattctacggcgttgctgttggccgcgaaccgctgatggtcctcatggagctggcatccgacggctcgctcgacacgtatctcaagaagacgaaaaggagtccgcgcagcaaactcttcatgtgctacggcgccgccgcgggactggaccacgtgcactccaagggcatcctgcactgcgacatcgccgccaggaactgcctcttctcagaaaacacggtgggtttctgcttttcgcctgtgaccggcgcacaatttgccgttttctttcaggtgaaggtggcagacttcggcctcgcattcaaaggaccgtcaaagcctgtggaaacgggcaagccggtgccgatcagatggctgtcgccggagacgatgcgcgaacgcacattcacgccgaagagtgacacgtgggcctacggagtgctctgctgggagatcttcagcaacgcgcaacagccctaccagttcatatccaacaacgacgtcgccccgatggtcagtgcagtggggggaagggggttgaaaacgaatttcccattttcagaatcatctcccctctcccttttcaggttctgcgcggctcacgactccgcttcccaaatgtgacgccacctccgtttgcggaattcatcaaagcgaacgtttggactgccgacgtcggtaatgttttttgtttttgttttaacattttcaaaaataatgttttcccttccctttcagcgcgccgctatgcaatgagggatgtactcgcctggatcgagcaacacatcgatgagctgatcgacgataccacagcatcgcggcacgacacgactacagctacgactcgaaaccgcggatcccgtcaaggctctcgaactggctcatagaagatggtgatcgatgtgtcgctgatgcgtttatacgttctttatgtgtgttgtatatatgtatatgagtgtatattacgtcgctgttgtatcaatatttactgcatttgtcccgtatttcgatcaaatgactgtcatatttgtatttgtcatga

SEQ ID NO: 46876 - DNA, 1753 bp, Heterodera glycines
atggagacggacgaacagatgtgggacatgccctactaccacggactggtacgttttggtggttggcatgcaattctgaccactaatgcttttgcttgtttagctgccccgcgaggacgtcaatgatctgctggtcaaagagggcgacttcctgatccgcatgagcgaggagacttcaggacaggaccgcatctacgtgctctctgtcgtcgcgggaggccacaagcatcatctcatctttcgcaccgagcgtggaatgatcgcggtggacttcaaacacgaaagaggctacaggacaatgcggcgcttcatcgagacacatctgagcaaaaaagacacggtggttgacgtgagtttgttggggagagaggggggaaggaaggcgctaattaccccgaattcccttttcagcagaggaaggtgattctactgaaaggggtcggccggcagaaatgggagctcgcacattcgaccatcacgcagggcgctgaactgggcaagggcgcgttcggcgttgtcaagcgtggcgtcttccgcgacccaaccatcgggcagcccgtgcaagtggccatcaaggaggtgtcgcagacgagtacaaaggcacaggtaaaatggacggggcagcaaattggattttcagcctgctaatcgattcccttccccactttttcagatcaaggaattcatgaacgaagcgaggatcatgcgccacttggaccacaaaaatgtcatcagattctacggcgttgctgttggccgcgaaccgctgatggtcctcatggagctggcatccgacggctcgctcgacacgtatctcaagaagacgaaaaggagtccgcgcagcaaactcttcatgtgctacggcgccgccgcgggactggaccacgtgcactccaagggcatcctgcactgcgacatcgccgccaggaactgcctcttctcagaaaacacggtgggtttctgcttttcgcatgtgaccggcgcacaatttgccgttttctttcaggtgaaggtggcagacttcggcctcgcattcagaggaccgtcaaagcctgtggaaacgggcaagccggtgccgatcagatggctgtcgccggagacgatgcgcgaacgcacattcacgccgaagagtgacacgtgggcctacggagtgctctgctgggagatcttcagcaacgcgcaacagccctaccagttcatatccaacaacgacgtcgccccgatggtcagtgcagtgggggaagggggttgaaaacgaatttcccattttcagaatcatctcccctctcccttttcaggttctgcgcggctcacgactccgcttcccaaatgtgacgccacctccgtttgcggaattcatcaaagcgaacgtttggactgccgacgtcggtaatgttttttgtttttgttttaacattttcaaaaataatgttttcccttccctttcagcgcgccgctatgcaatgagggatgtactcgcctggatcgagcaacacatcgatgagctgatcgacgataccacagcatcgcggcacgacacgactacagctacgactcgaaaccgcggatcccgtcaaggctctcgaactggctcatagaagatggtgatcaatgtgtcgctgatgcgttcatatgttctttatgtgtgttgtatatatgtatatgagtgtatattacgtcgctgttgtatcaatatttactgcatttgtcccgtatttcgatcaaatgactgtcatatttgtatttgccatga

SEQ ID NO: 46877 - DNA, 1305 bp, Heterodera glycines
atggcagaacagcgcaaggacaacatccaacgggccaagctggcgaggcaatgcgaacgctacgacgaaatggccaaggagatgaagcaggtgttgtgagcggcgatggatcgaatggatgctttttccggatttccctgttataattttcctccccccattcaggtggccgaaatgagcgtcgaactcaccgaagaagagcgcactttgctgtccgatgcgtaccgaagggcgatcagcactcgtcgttccgcgtggcgtgtcatcgaatcccatgtgaaaaagtcgaccatggacaaacagaagcaaggtgtcaaggagctgcagaagaaggtggagagcgaggcggaggagaagggccgtgaaattttggtcagtgcgtccgtacgaatttaactgcaaaaatttttttgaaatttttcagactctgttggacaaccagctcatcccaaaggctgccgacccggaggccaaagtgttctacatgcggatgaagggcgacttccaccgctacttggccgagatcaaaccgtcggaaacgaagggtaaaagggcttcgaaaatgctaaaattcaacaaattcccccctccccaatgttcagatcttcgcaatgcactgaaggcgtatcaggaggcgtacagcattgctcaggaaaaacttcgaccatcgcatcccatccgtcttggtgtggcgctgaacttttccgttttctacgaggaattactgaaatcgacggaggaggctcgccgaatcgcacaaaaggtgggggaaggattctatttttttagtggctgttcatttttaaattttattttttttttgcgcaggctcacgacgatgcaaatgcggtcatattggcagaatccaacaacaaaaccctgaaggaggccctcgatttgatgatcaagctcagcaacaatctgagagagtggaacaagcgcaaaggtggagctgaatagaacgccgctgctgtgaatggagatgaatcgcgcaattgatatgggtgattaaattccgatggattgactcaattgtacacatatgtatgtcatgatgttgtgtatatgtatatattgctgtattacatatattgtattgcattgtataggctgtataaaaggctctacttcagtttatgcgtccaatcgttttttatgcgtccaatcgctttttatgcgtccaatcaaagttttgtgcgtccaatcaaagttttatgcgtccaatctcatttcatgcgtccaatcgctttttatgcgtccaatcattttttatgtatcaaattatgttttttttgccaaaataaa

SEQ ID NO: 46878 - DNA, 971 bp, Heterodera glycines
atgccattttgtcccctctgttcagaatatgttggcgaaactgccgcttcggacggcactttgcaaggcgataccagtgctgcaatggcgagcgcgctttttcacgaaatgatcaaaggtttttttttgtttgcttgcactttttatttctgtggaaaaacttcaaaaacccgctttccaaatatttttggccatcatttttttttgctatttcgcatattaatagaatttttatggctgttgaatgataccaagaaattgatccaattttcggtgtttttttgggtcaatggcaactcgtacaagaaaaattctaagaaattttcaactaaaacttagaatttttagattaaaaaaagtctaaatgaattttctagcctagaaaaatttcttaaaacacttaaattttcaaataatttaagaagtttaaaaaagcagctgaaaattagtaaaaaaaactttaaagaatttttaaaatgtttttataggctagaaaatccatttagatttttttaatctaaaaattctaagttttagttgaaaattcttagaaattttttttgtacgagttgtaatgacaccgtttttattaggtgacgggtaatttttatgtgaaatttaggaaaaccaaaaacaattcaatgaaatggtacggcgctcgccgatgaattttgaaaaagcatttgatttttttaacaaatttacaaaattagttgggagatgctgcgaaattatgccaacattttcaccaaaaagtgccaattttctcaaatttcaattccctccactaatttttaggtgctgctaccattgtgggccacactttcatggagccggtcaccattaactacccgttcgagaagggtccgctgagcgcgcgttttcggggtgaacacgccctgcggcgctacccgtccggcgaggagcggtgcattgcgtgcaaactgtgcgaggcgatttgtccggcccag

SEQ ID NO: 46879 - DNA, 660 bp, Heterodera glycines
caaaatattttgactcagtgccccataatttacttttatacaaattggaaaaaattggaataaggggcaaacttttattgtggataaagtgctttttgaataataggacttttcgtgttaaaattggggatgctttatcctcaagtaaaaaagttacctctggcgttccccagggatctgtcctggggcctttactatttttgatttatattaacgatcttcctgatgctttgccatcaggagtgaaattaaaattatatgctgatgatgttaaattgtatatttgttataaagcaagagcagacacagaaattatgcataaagcattgcatatttttatccgaatgggcaaataaatggcaaataagtttcaattcaaaatacttttgtattatatttgggttcaaaaaaccaaaaagaaacatataaatttgatggaaatacaataaatgctgtggatacaattagggatttaggagtaaatattgacaacaaattacaattttacgtatgcgttctttatttcgggttattaaatcaaaatcttctaggatttggattattttgtacaaaacttatgttagaccgttattggaatatgctcctgaggtttggaatccatctcttcaaaaaaatattaaaaaaatcgaaaagttcaaa

SEQ ID NO: 46880 - DNA, 1443 bp, Heterodera glycines
aaacccacagatagaattttttttttcggcatatttcgtttaaaattacttaactagtttcaattttctccaaaacagactttgggacatcgaatgcggcaactgcttgcgcgtgttggaaggccacgaggatttggtgcggtgcattcgcttcgattccaaacgcattgtgtccggcgcttccgacgggtaattttatgcatttaaaaatcggtcaaaaatatgacgtcatatcagtgatatgacgtaaattgaaataagccccagaaagcgaaaaaggggaacttatagcagttttgcgcaaaaatttcaattttttgaaccattttgaggtcaaatttcataaaataagacaaaatgggggggggggggaaggcggctacgggcctgcttaatacaaaatgtatttttatgtaaatttcattaatttctgtcattcatatacagggggtgtctcaaggtgctaccccccccccccctccgaaaattaaaaaaaacaatcaaagtttttagttttttttttgcaaaattaaaaaggtataacgaaaaccaaaaaaaatctatttatttgccattctttgaattaattacctgtctaaatgctttaacttattcaaaaaatatttaaaaattattattttttttcttgtttctttttttgaaaatggcaagaagtcttcacggatagcagaatgcttaattttcttattaatttattttttaacataatttaaaaatatttttttaacagcaaaattatgatctgggacctggcggcggcacttgacccgatgacaccgcccaactccatctgtataaagacactttcggtgagtgatcagtcggcagatcaatggcatacagactaataaccagggaaaaatgcgaatcgaatgacatatattggcgagtcgagaagcaaaattttgaatttttctgtaattgccaaccgatttagcttccaacaaagtaaattttcgagagtttgaggccgaaattcgccctgttttctccataatttttgtttaattttcggtggaagtaaattgcctcagggccaggtatgttgaaccggattttcaaaaataccaatggaattccgaccctccaaaacttacgaaatgctcgggtacgggctggtcagtggccaatgaacattcttgtttttaagtaacattttgatgttcgttcagcaacacaccggacgcgtttttcggcttcaatttgacgagttccaaatcatcagcagctcccatgacgacaccattctcatctgggacttcctcaacacgggcccgtccgccgccgttgccgcgggcgctgcggcagcagccgcgcacaaccaggcaaaagaagggcgaagcgggggcagggacggtcccgggggggggggggggatgtcattaaaaaagttttattaattgacgttctaaaggtgctatg

SEQ ID NO: 46881 - DNA, 1975 bp, Heterodera glycines
  unsure (1)..(1975): unsure at all n locations
tttgccaaaatgttttcaaattttcacatttaaatcttcttccctctccctcacttcaccaggaagaagtacttcttttgctccaaggaccaggcgacacgcgcaatttctcagtcgtggagacagccgaagaacggggaggacgcgttggagttccagcacaaattctaccggtacacacacaaaaatggaggattttgtaataaaaatttaaaaaaaaacgaataattcagcgaactttacccaaaaatcactgctgacattcggcaaattgagcagaattggcgcgagggacgacatcgattggagcgcatcaattgccaatcggagaatagcaaaggcatggggcggaggaaaactattatttttttggtgtatggacatttgtcgacacaaatccggagttaaaaacctacccgattttggtttgccaattttttaatgcttggctcaatgcatttcgacgccggtcctcttcaaaaaaggctcattacattccttaccgaaaatttttttttttagaaactttttaagttttctaatttttattgagatttttttaaaagagaatccacgatattctaatcgttttgttttcaaaacatgacttaaaatgatttctatgcaaatagtataaaaaaaacattcatgaactaaattgttatgaaaaaattttaatatttaaaaaatctctaattgtaataaatttggaaaaataaaataaaattgtttcctttgcggaaacgagatgattctttaggcctatgcctccccccaccttcactctgtccaaaaaacataaattcatcgatgagcacattttcattttccaattcaggtgtctactgtctccaatacgacgacgaaaagatcatctcgggactgcgcgacaacacaatcaaagtaacccacacaacaaacaattttttggtggaaatctgttaataaaaatggtcaaaatttccattttttctgccgatagcacctctcggcacaacaggaccggagccctcatttccattttaaagttgacccaaaaattggaaaatgtaatttttggcgaaaattggctacaaatgcctgctttttatccccggcgctcaagtttctaaaataactgaagaaatttttttttaatttttgccagaagagcaacaaaaaacaaacgtctttggattcccctttccgaaaaaattttctggctacgggcctgctcccttacaaatcccaaaaaactaaatcctttgacagttgcgccgattggaggattaattgcaatggaaatggaaaatcgtgtttatttttataatttttttctgtactttttattaaaacgtctctaatctatgggttttcttcggccaaaaaatgagccaacatagctaagaaatattatgctataaattctatttaaacctctaactttaaaaattccccctcagatttggtcccggcccagcctcggctgtgtgcaaacactgagcgggcacaccggctccgtgctgtgcctgcagtacgacaaccagatgatcgccagtggcagcagtgacgcgacagtcaggtgaaggatgaaactcaattttcaatggcatgtcaaaatggtaccaaggccgtagtcgatgtgatgaaattttgcgtgcacctcatttcccccccccccccgaaaaaatttcaaacctagaaattttcataaaaaaaattcttagaaaatttcttattgttaataaggaaatttaagaaaaaaaattttgaaaaacctttcagcgatttttcgaaattttatgaagaactactaagtttttcaaattttttttttttttaagaatttttttatgaaaaatttctaggtttgaaaattttttctgggggagggcaaacgacctgctccggaaattttttcatgaaaattatcagtacagcgtgtatcccttcccttttttgngttttccattttttttttcaaaaaatactaaaa

SEQ ID NO: 46882 - DNA, 1979 bp, Heterodera glycines
atgagcgataacattgactttcaaaatgaaatccgggaaatgctcagaggaatcaaccagaaaatagacctctgcaacgagcgaattgatacactgcatcaggatatggctgtcctcaagtctgttgctgcgctgaagtcggaaaaggtttcttgggctttcttattttatgataattaaattgttttcttgggctttcttgttttatgatagttaaggttagtaagtattgtcactaattttggaaaaggccggtctgacgaggaaacattcgactttaggacctgccatgcactgccgcagtcgaaccgcttaaccaggaagagaagaaaaaggaggttcgcaattgcctatggtgtcttttgcgaaattgttgtttcttcttttaggaatcgtcgggtccttcggaggtggaacatgcgcagaatatggaaaatgtgcccgaaaagtatttacctgagactgaaataaaagttcgcatttttggaaaaggcctatctaaagcggaacgttcgacttttagggcctgacatttactgtcgcgatcgaaccgcttgaccaggaagagaagaaagatgaaagtgtgacagatgagcgtgagcccggggttgataaagaggtccgcattttaaactccatcttttgaatttttgtttggaaaggaatgtcttaaaaggaaaacggtttgctttttaggaattgtcaggtccttcggaggtggaacatgcgcaaaacgacgtggaaaatatgcccgaaaactacttgcctagcaacgagactgaaacaaaggttcgcatttctggaaaaagaccgtctaaagcgtaaacattcgactttaggacgtgccatgcactgccgcagtcgaaccgcttaaccaggaagagaagaaaaaggaggttcgcaattgcctatggtgtcttttgcgaaattgttgtttcttcttttaggaatcgtcgggtccttcggaggtggaacatgcgcagaatatggaaaatgtgcccgaaaagtatttacctgagactgaaataaaagttcgcatttttggaaaaggcctatctaaagcggaacgttcgacttttagggcctgacatttactgtcgcgatcgaaccgcttgaccaggaagagaagaaagatgaaagtgtgacagatgagcgtgagcccagggctgataaagaggtccgcattttaaactccatcttttgaatttttgtttggaaaggaatgtcttaaaaggaaaacggtttgctttttaggaattgtcaggtccttcggaggtggaacatgcgcaaaacgacgtggaaaatatgcccgaaaactgcttgcttagcgacgatactgaaacaaaggttcgcatttctggaaaaagatccgtcaacatcgacttttagggcttgaccaacagccacaagactccgttattggcaggatgcgtaagtttaacgaacatttactattcgttttttcagtgagaaatcactcaaaaatcttgataattaatattgtcgacttttacagcaaatcaccgcttccggtttcatgggcactgaccgtgttaaaattggacgtttggtcgagttgcatggcggtgttttcactgggcagatgagtcgtgccacttgcactcatttgatcgctgctgcgagttcgggcgagaagtacaggcgagcacgtgaatggggaactgtcaaagtggtcaccagtgagtggctgttcaaatgcgacgaaatggtacatcccttcattatattattattggaatgtgtgtcacaaaaaaacgcaatttcagggctatcgtttgcgtgaggaccattttctgttggacaacgacggtgagaaacgacgttcgtcagcggacatcgaatggaaaaccaccgaaggacagcagcgcaacacgacgaaggatgagagaaaggagaacatgaaaccggcgactaagaaaatgaaggtggacatgaagcttaagaagaacgaacattaa

SEQ ID NO: 46883 - DNA, 2468 bp, Heterodera glycines
atgccagcgcaactccgtttccaaccgtccaatgctattggaacgcaccagcgctcaattataactgcacaacaatttcaacagcagcctttttgtgtaaaacgcgcccgttatgattatgatttatacgaagggcaatcgcatcataatttccaaagacagcgttttgatcaaacaccgccctccgctattcatccaatgcgcactttccaaattcgtcatcgttcaacggataaaacgcgcgggttgcgtcattttgctcaaaaagtttgtgagaaagtgaagcaaaaagttcaaactaattacaacgaagttgcggaagaattggtcaatgaatattttgacaatattgctgaagtcccatctgacccggttaattgatattattcgtaatgaaataatgcatttaaatttcaggaaaaattacaatatgatacaagaaacattcgccgtcgtgtttatgatgcgcttaatgttttaatggcgatgaacataattgaaaaagaaaagaaagagattcgttgggtgggcttgcccacttcgtcgttggccgagtgccgacggctcgaagaagaaaaggtttgacgccacagctaattcaacgattgttaaattttatggctttaggcacaacgtcaggaacgaatccgtcaaaaaaccgaacaacttcaggaactgatagttcaggtgattgaaccgccgttttattctctggggtttttggggtccccgatcacgaatctttcaattattttgatcaattccgatttcctaatctaaatttgaacaaaaaatcataatttgaaaaattcaaaatttcgatctttattcgggttagggattagaaattagtcaaaatacatgtcagattcgtgattagcgacctttaaaaccccggataacaaattatcatggttttttatcacaaaaaaaatttgcaaaacaaaagggtccccccttttgtttcaaaaaggcccactttccatatagcgccgttatttcatttaaattgatctttttagttagtttcttacaaatctttggtccagcgcaatagagaaaatgaacgagtaaatggcaggcctttggattcgacaattctttaccttccttatattattgtgagtacgaacaagaaaaccaacgtcgaatgtgcagttgcaccggacaagtgaattaaatgctgaattatttataaaagcccaagtttagatcagagtatttgttcaattttgatcgaccttttgagattcacgatgacattgaggtgttgaaacgacttgggcttgcatatggaattgtgagtttgtgaaatgtttaaataggaatgtaataacttttaaggaccgtggtgaagttgacccggcatatgtaccacacattaaggtaagagtaaatactagagtagagcgggaccgggaccaaaacacggacaactgagtacagaagtcccggttttgaccgggactagtccagtcccgggtttccctgccaaaaattccctgtttttcaacccgaaaaggtcccggttttgcccaaaattcccggtcccgctctactctagttttttaaataacgacttccgcccctatcaaatttgtcagatataaaaaaagtaagaaatgcaaaaaatttttcctatttttcgagtttctaaccagtttcataattgttaaagcaacaatgcaagtaactgctcataaaacaattggccaaattacttttttcaagttcttttatcgagttcaaattttgcctagaaatgatttcaaattcgtcgctgataaaattcggttggctgcagtctcgtactgaatagcagcgactcggcctggcgtgccaattcggcgtaacgaagtgtcgccgccatgttgccgtggttggtgtgcaaatggttcatcaacgtattggtgtaatgttcagacaaattgcagtgcgaggcgaccagcatcggacagaccgctaattgctgaacaatttagaaaattgacaaaaattattttactaattattattagggttataagttgtatgcactaaaaatgccaaattatgcgcataaaatatgcactaaaaatccatcaaatatgcactaaaactccgaaaaatatccaaatatgcactaaaatatgccctaaaaattacccaaaatggcttataaccgtaaaaaatgccaaaaatgcaatttcgaatttgtaaaatttttgtcaaagatatgttaaaacaaattacatttttctactattgttttcaaaagttcttataaaaaattcaaaattctcgattttcaagggtatgtttttgaaattcccaaaaaagtcgatccttaggggtgtatttttcgtttttattgcatttttcttattaaaattgccaaaaatgattgaaatatgttttaaaaatgtaaaaatggcaaaatctgtatttattctcgaaaacccccaaaatatgcttttatatgcaataaa

SEQ ID NO: 46884 - DNA, 1070 bp, Heterodera glycines
atgaataaagcgtttgtcaagacagcactgtgctccaaatcgcggaatgcttttctcttcaaacgcctcgtcagccccgtccaaattggttgccgtccaatcaccggcggtggttttggccatccaatgaccaggcaaaagatgcaaatgtacagcccggaaatgagggcagtcaattaccaacaaaagcgcacccacatgcatgtgaggcaatttttaaattgaggggtcacaaaaaatttcaagaaattttggcacttttaaaaatttttcggaggcattttgatatttttgggaaaattacgcacaaattaccaatttgcaatgcaacatttccctgaaaatagacacctacctataactggcattgggggttattaattgaaacaataaacgggaattaaggcattcctagaaatttagacataaagaaaattttaaatttccaaaaaaaaacaaattttgaaatacctgaaaacacacaaaaaacattagagctcggcaaatttttcctcattaaacgcacatttttaggcaattctcaccaagaaaactgttgaagaccgagttatgctcaacttacatttgtttgacaaggtggacaatgacaaattgacgttcgactccgattttttcaaggatcttgggattgattcgcttgactttgttgaggtttacattcatcattttttaattttgaacacagtctggacccctaaaacatgaaattacacaaaaaaaattttggaattttaatttatagcccaaaaccgtgtagagaggaatatttatttatgtatgctattctaatgcatttaattccgaatgtttaaatggtttctaggccataaaacaaatttttgaaaaaaatttgaattttttactcgaatccagtttttgggggtttggaattggcacgaaatgaatgcattttattgctttttttgcagtttatcattgcgattgaggacgaatttgagttcgaaattccggacggtgactcggacagaatgcgaacgccacgagatgtttacaattacatttgcgacaagtgcgatgtgtacgattga

SEQ ID NO: 46885 - DNA, 2084 bp, Heterodera glycines
atgatcaggttcaacagcagcgcgttcacttggacgacgagggacaaaatggcacattggaattggacgccgaccaatttgcgcattcttcgtcgaccaacactgacacggacagtgatgaaattgtcaatgtggcacgcaaaaagccgacagtgttcgaatacttttgtatggaagtgtcaaggtacgtgtgccattcaggtctgcaaccagaaaaaccggatttcatggcgggtcagaccccacgattttttttgctgattttttttttttttgcctatttgtcaaccgattttggatcaaataaacatctgggggaaattatattttggaatcaaggcgccgaattttaagaaactcgctggtatcgttcaaagtttgccagtttttctcttaaaaactttttcaaattcgggcgctggaacatccacccaaatttttctaactaaaaaaaaaattcatttcggttacgggcctggtcccattctcattttttgtaataaattccaatctttggcttatcccctcatttttaaggcgctactcacttcagaatgagaaggaacaatatgcggagaagcggcgcaaagtctatgcatttcttcgaattccagtggaactggaaaagttcatttattacgggttccgtcagtgtttggacgccttttgccacacatttaccattctgccaatacgcgtattggtgagttattgggtcagggccaatttttcaaacactggaacattatccctgaaaccaggtaggtacctagccggaaaaaaaacatttcgtcgagaaatcccgaaaaatttgtgttttcggcacctaaaattttttccatggttaattttttaaattataaggctctattaacgaaaaatagcgttttttgtataagaaataactaattgtgcattttttgtcaaattttgaaattttcaagtgcatttattggccggtagtgtgccaatgggtaccgccttgattttttttttttgcaacttttactcaatttgttgagaaatcttaaacaaatattcaaaaaaatttctgacctttattaaactttttttatgcggtgttctcatattagaatcaaaattccgttggatagatttctccccgaaatttttttttaaatttcttggcaggcaacctgccaccgaagccttcagcagaatgggtactttttcttcaatacaaaatttctgattttataaatatttttttttggatgaatccctctgcagaatatataggtaatgtgttaattaattgccactgtgttttcagttcaatttgtttgcttgctcagttcgattgaagcggtggtcggccgccgacacctgtgacattctcaaactaatcatcattttttgcgcttcttggttcatgcaatttgttgacacttccgtggtctatcacattgttcgtggtcagggcatcatcaaattgtacattttttacaacatggtgagttattgttttatcaaggaatggacggaaaaaattttattaaaaatccaaaaaagaggggaaaaaaaaaatttttttttgtcaaaagtcgtgacaatttgttcctggcttttttgagaccgctcgctgattatgagtttgaccattccttctggtaaattccgatacttaactcgaacaaaagatcgaaaaattcaaatttctcgaactatccgaatttgtttctcgaattcggttagacatttttcagaatttgttaaatgttaaatttgtaatcagcgacccagaaaagctctggaggacgattttttaggactaaccaaaaaaaatttacaagccaaaagctcctcccaatcctttccaaaaatattacctttttaaattagcccaattttacactatttacatttagcttgaagttgccgacaaattgttcagcagttttggacaggtgcgtgcgtgttaaccgctgtttgcttataatataacggaaatttttttcaaaatttaagagaaaaaaaattttgtgttttttaatttgtttaattctccgtaggatattttcgacgcgctcctttggactgcctccgaacggggcacaaataaa

SEQ ID NO: 46886 - DNA, 1879 bp, Heterodera glycines
atgacttgcccacaaaaaatcagcgacagcagtcccctagcaattaacagtggtctaaacattttctcagttccaccgaccaatgtgtctgttgtgcgttctttctttcgtcaggtgcttccgctagcaacaatcacgcaagaatcgccttacctatttcggctttacagtgacaatttgtggaccgatttatcgcgggtctatctttatctcgaactgtccattgaaaaaccgggagcaaacgataaatgggttgcgatagatgatgcggatactagtgtctctgccattcaagggattggtcaaacatttgtccagcaactaaaagttacggttggcaatacggaagtatacgatagcggaaatttatacccattcaaggcctatatcaccaatgagttaagctttccaataaatgccaagaaaaattttcttggttcaacagggtattatcacaccgtaaatcaagatgattcatcagacgatgggtataaagagcgttgtaaaatttttaagggtggtaaaaatgcgcaattcctctcccgtctcgactttgatttgggaaaccaagagctttatctcttaaataatttggacttgctcttcacaatttacaaggccaaagatgtctttcttttgcaaacattaaaagcaaatgattccaccaaatatcgtttgacagttcacgatgtcaagatttatgccaaaatggttgaggtacaaccttcactaaacatgagcctttacaaaacccttgaaaaacaacccgccacatacgcagtacgcaagaccgaaatcaagtcgtcattcatcagtgttggtcgatacgaatttgagtacaatgtattcagtgcaaccattcctcgacgtgtgacaatagcgttagttggaaattcagcatttcatggtgactacaaactgagtcccttcatgtttgagccgtttgatttgcgtgagatttcggtacatgctggtggcgtagtttacccagctgttccttataaactaaatttttcaaatgatcactttgtcagcgcctttgttgacatgtatgaggcactcggaatggctaactcggaacgttcatttgacatttcaatggcccagttcaaaaaagggtggaccttttttgtcattccattgacttccacgcttgacgacagctgtggatttgagctgttgagaaacggtacgacaaacgtacgagcaacattcaattcaccaattccgcttggtggtgtagagatgattgtcttgggtgaattcgaccaaatgattatggttgattataaccggcacattgtgaccgactcaaagcttggataaaatataaataaataaaaatattattatgtaatgttaaaatgaataacaccaacacaacaaaacctgacatacaaattttgaattccccagaagagcctaatgaaactcttttgcatgtactgcttttttctcattatcttcttgcatttcctgtgtttttgcttttttggttcgttttaattcggtggcttaaaagtcatggtcacctctcgcccagcgaggccgagacagtaatggaagagatgaaaaatatccctcgacaaccaccaatatttttcgcaacaaaatgatgcaaaattagagaaaactgacaatgaaatctttcttcagtatgacaaaatcgaaaaagactcaagaggatttgctcttgaattggtggcgtgaagacccgacaattgtaagcttgttttttttcaatttagcattttttaaatttcatcacattttttcagattcgtttctttttggacaccgtcgaatcgaagccgcgcttcttcagcgcgccgaacgcgaggccgaaattttgcgccaatacgcagagaatcagcaatga

SEQ ID NO: 46887 - DNA, 915 bp, Heterodera glycines
aagacatggaaaatgatgcgatgcacattttttggagggtctgccatccgaaaggttcttatcaccacttcgccgagagcaaaactcgtaagaatgatattatttaaaaaaataaaaaattttcgtcagaaaaccttcaaactctgtttcgagttaaaaaaggtcattccgaatgcagaaattgtgtctaggaaaaacgttgccataaaacgtgttgtgcggcaggcaattgagcgtggtttttctgacctaatggtggtgcacgaagatcgcaaaaaaccaagtttgtattccttttctactttccattatttccaattattaattcagatggaatcgttttttgccatcttccgaatggtcccactgcgttttttaagataaattcgcttcaatactccaaacagatcaaagtatattttgtttttctcattttcgatattgaatttgcaggacgtcggtgaggcaacggaacattaccctgaacttattctgaccaacttcaacacaaggctggccaaaacggtgagccgaatgttcgcctgtctcttcccgcaaaaagctgattatggcggcagacgagtagtgaccttccacaatcagcgcgactacgtctttttccgtcaccatcggtaaaattgcaaaaggctccttgtaaatcactagttatcttgtaaaacgtattcgaattttgccgctttaggtacgaatttaaaaaagaaggacagaaggcagcactccatgagttgggtccccgaatgacattgagacttaaatggctccagaaaggcacattcgatacacgcggaggagagtacgaattttatgtcaaggtaaaaaatatgagcgaaagagggcttcaattccatattaaagagacacgacatggagaagagtcgcagacgttttatgctt

SEQ ID NO: 46888 - DNA, 2323 bp, Heterodera glycines
ttttaattttctgaaacgttttcatctaattttaaccagacctctaacagatttattcaaattgtctctaaaatccggtaaactaccaaaaatttggaaaacctcaattattctaccactatttaaaaacggagataagaatctagcatcaaacttccgtcccatttccattacctgttctcctcagaaagcgctctaccaccctccaattaatttcgactcttgaggattggtataatgccatacttctcaataaaaaaatcgactgtatttatttggacataattaaagcatttgacaaagtccctcatgaattgctaatttataaaatagaaaaaattggaattaagggcaaccttctaaattggctcaaagatttcctaaccaacaggacattcaaggtcagaattaatcaacagttttccaaaaaatttcccatcaaatcaggtgttccccagggatctgtcctggggcgaattctatttttgatttttataaatgatttatccccagtaatccctgaaagaatttcgctaaaactttttgccgacgatactaaaatttacttgtgttatgacaccgaatttcaacgtaaaaaactaaacgaagccttacattgcgtctgccaatgggcccaaatgtagggtctacaattttcaccagaaaaatcagcttctctttacctcagcaaggacaattttaaggttccctaccaatttaatggaaagactattaaatagacccaaacaattcgagatcttggaatcttaattgacaacaaactgacttttaaatcccatatttcatctattcttcaaaaagcctaccttagaagcagaacgctttttcaaaaaattaaatctaaatcatcaaagacatgtattaaagtctataaaagctatattaggcccttacttgaatattcatctgaaaattggaaccctcacattaaaaaaagcaattattcgccttgaaaagtttcaaaagttttttaccaaaaaagttttcttaaagtgccatttaccggttttacaatattcagataggttaaaataccttaatatttccactttgggaaataggagaaaatatttagatctgatcacggccttcaaaattattaaacaagaaactcacctaaaccctctaaaattatacaatttatctcaaagaagaaaatcgcctttccacgaaaaggggggcaacaaccgcggcacagcagcagataagaaagaaagcccccaccccctctccctccctccctgtcggcttctcttgccttttcaaagattagatttggccgagtcgcccccccccctttcttttgctgacagccgcttaatcccccccccccttcaatgggtccgtgtcaaccgcccgccaattctctgccaaaatgtcgcaattgcggtgagtgaggcagaagaaatattgaacgaattctgactttagcgatctcaaaaccccgagggcagcagaagcaaggatcgatccctccaaatgcttttcctccctttcccttttccctttgagtgcatttgccccctccccattttttgtcccttttgacttttcccattgtttttaatgggttttcgtcgctttaaaagctgttttggtttaagtggggaggtgcttttccgctgttcaatttggccaaattggctgagttcactgaccgtgaaaatttggacacaaacggccgacactttggcacaaaggcaaaggcaatgaatgggcggagaaagaattgagccaatgccaacaactcttttaattgttcactgtcgaattttcttttccatttctcgccaatatttctttttaatttcgaaatttcttttggtcactcccattttaattttttttttagaattgaaaagtgccaatttgttcttcccaatgttccgttatgagtgcccttcccaacggcaactccctttgaaaattgtttttttcccaaatcgcctccgtctctgcccctctctttagtcgtctctctctctctcttttgtttctctttctctctcttccgatggcatttcccttccggcactttcatccccttccgatgcctacgccttcccttggcctcattctgctcgttcttttgctcaatttggctgatgacgcgtcggctggcaccaattgttctgctgcggatgccacgcgcaattgcgtggacgggtgagaaaagcattggccgattgccagtcgctgatccactgatcagtggtgattggttctgactgatcagtcaatggacgatgatcagtgtgccaatggactgtcccttctcccttaagaatgggcatacccattt

SEQ ID NO: 46889 - DNA, 929 bp, Heterodera glycines
  unsure (1)..(929): unsure at all n locations
ctcaattgttcgtccacntttcttcgattcggtgnaaagatgggccgaccgcgactttggagaagatctcagtgggtgtttctcgatntattgggcaatgaatttgcaaattaaggaaattttttggaagagattagttactccgatttggcaagttacgcgcagttgatccatcacaaagtgagaatataaggcaaagcaaaataaggaatcctttgtttttttactttctttttactctatcgttttcttttcatctctcctttccctttctctctttctttttcagctctctcctcactctctccctctttctcttctctcccccttctctcttgttctccttgcactcttctacctctatctgtttgtctcactttttgcctcccttcaccattttcaggatatcattatccaatgtctcctccgtcacttggccgatcggtctctctctttgcccgctttttgcgatttttgttcggctattgcgacggatttgcgtgacgattttcacacgcatttttggcagatttttgatgcaatttcaaatttggttttggcatcgaaaggtaaagagcaatgcagtgataacgaattggagtgcacatttcgcgcgatggaacaaattgtgcgaattaattttcgattcatttcagcgcggctaaaacaattgtttaggcatggcttttatgtcaattagttccctaattaccttcccctccctcccttttagccgtcttttaccgctctttgcttttccttctgatgggcgcctccgttttatctccgcccgaactttttcctttgtttttctaaaatcgcctttcccccacaaattggccaaatttcttctcgtcaaatgtttttctgattgtggccatttgcgcgacggactttcgctgtttttcttcgacgcttttttaggagtt

SEQ ID NO: 46890 - DNA, 1502 bp, Heterodera glycines
atggcgcaggcagttgctgctgttgctcccgcaccaaatgctaacgcagcctcggctcacacaacccaaccgcaggttatggcaccatcttatccgttggcttctctctatgtcggcgatcttcatccggatgtgagaaatcaaattaaaattttttttttcaaacaccgattaatttttttggtattgccaggtcactgaggccatgctctttgagcggttcagcaatgctggtcctgtgctctccattcgtgtttgtcgtgatgcaattactcgtcgttcgcttggctatgcctatgtgaattttcaacaaccggcggatggtaagttaacacatttggactgcgtttttttaaataattttttttgcttccatcataagccccttattctgttaagctgaacgtgctttggacaccatgaactttgacatgatcctgaacaagccaattcgcattatgtggtcgcaacgtgatccaagcattcgtcgctcgggtgctgggaacattttcatcaaaaacttgggcaaggaaatcgacacgaaggccatctacgacactttttccatgtttggaagcattctgagctgcaggtgtgtttgcttaacttcaaacaatttcgtctttattgtccacaacaacttttgtagattgccactgacattgagggaggaagcaaagggtatgggttcatccattttgagactgaggaagcggcgaacagtgcaattgcgaaagtgaacgggatgcttttggatgggaagaaagtgtaaggatgatccccacctaaaattgtttttgtgctattaaatttatcccatcttttttgctgtaggtttgttggaaaatttgtgccacgcactgctcgtgagaagcaaattggtgacccgtccagtcgtttcaccaatgtttatgtgaaaaattttggcgaggcaatggattcggagaagctgagcgaagtgttctcacagtatggcgaaatcatcagtgcaaaagtgatggaggatgacagcggcaagtccaaggggttcggctttgtcgcctacaaggaccataaaagtgctgcgagggcggtggagaagatgaacgaggtttcggtgccaggcagtgagaaggtcgagcaaaagtttacggtgtgccgtgcgcagaagaagagcgagcgccaggctgagctgaagcgtcgttacgagcagtacaaagctgagcgcatccagcgttatcagggagtcaatctgtacggattttgtttggttggggggaatttttctcaaattttaggattttgttagtttggggggggagtttttctcaaattttccatggataacttttgtttattatattaatgtgccattttttgtgtaaaactgttcggaaagctctccactaattaaaaaaataatggaatccataaaggtatactaccaaattgtttactgaactggagattttaaggtacgtcatgaacctgcacgataccatccaatgatgagacactttcga

SEQ ID NO: 46891 - DNA, 485 bp, Heterodera glycines
gtacgtcaagaacctgcacgataccatcaatgatgagacacttcgaagcaattttgaatcctacgttacttcacaagtgcaaaggtttgtcttcaacggattattggtatttgctataaagcggtgcttgaccagataccaaaacgaattttgcggaatcctaatccagcgaaagccgactttttttttgatttgggcattaattacaaacccggaccggcaaaaatttatgaaatccaactacacattttggctcgcaattttgattttccaatttctattttattattttccaggttatgtgtgatgagcatggtcgctccaaaggattcggttttgtgtgctttgaaaaggcggatgaagcaaccaaggctgttgtggaaatgaacaacaaaatcatcgaaaacaagccgctttacgtcgcgcttgcgcaacgtaaggaagaccgcaaagctcaactggcctcgcagtacatgcagcgctta

SEQ ID NO: 46892 - DNA, 1006 bp, Heterodera glycines
ggaaggcgtcgtcttttccttcgcttttatccgtctctgaaagcccttctcttcctcgtcacgttgctcttccaattggccttcgtcttttccttctcttctgtccccagcctttcccttcttttggccaaatgtcgtcttgagaagttaactctctccgacgtggcgcaattcgacgctgagggccaattgccttttcatttgcggaggacaaagtgagtgatcggcggggcgcaaagagaaacacagaatacccaataccgtgctcatcgcggcacttctaaaaatggcaaagtttatccgaaataaaattagacagctatttttgcgagttttttgactcaatcgttaagtgacgcaattttgatttgatcaaattttgcgaaatatcatcgaatttatgtctcaagtcctaaagtatgccatcgcttcccttccctccctttgtcagtgttttcgcgcgtctttggcgttcgttggtttcgcttccctcgactttgggccgtctctttacttacgctcttttcctggtccaatttctcgagtatttctactcggatgaactcggccgtcgcttcgggcaatttgtggaagggcgtcggaatattcgaattccgacgcatccgttcaacgtacgctatcacttggccaatgttttgcgaattcggaatgcttttccgcctgactttgtttgactttcgtttagaatttaccgactgaacagcaaactctttgcatggaagtggacaaatgcccaatttgtcgtcggatccgcaaaaatgacaccgttctcaccgtttccggctacgtgttttgccattcctgcattttcaacttcgtacgatttattttgtttgctgacaaacaatagtcggaactgactcttttcaggtccgaattgagcactgttgtccgatcacttcgcttcccgccacttcaaatgaactcgtcaaaatatacaattgaaacatttataattaatggagtttaattgaatttatgggac

SEQ ID NO: 46893 - DNA, 2755 bp, Heterodera glycines
atggaaaaatggggaacaacatggacaaaaaacatagcagaagaagacggtcttcttcaacttcaggcgaggagaaagaattcgacaaagtgcttggacaggaaaaggcttgaaaagattttgagagaaaaggaggagaaacagcgactcaaagagattgaaacgcccgatgagaaaaggacacgaagacttgcgaaaaagttgcaaaaggttgattttagctgtcaaaataattgttaaataaaaattgtttttttaaggaggaaagaagacgagcagaaacaattaatggctttcctgaagtcattccttatacggacttgaacaatccattcaatgacaccaatttgactgacacatttatttggaagaaaaagtgggaatccgaagggaaggcgaatgtatctgtaaaaaaggccgagaaagtgtaagaaaggcagccaaataaatctttaacttaaataattcagaaaccgcgaaactattgctaagaattttgccgaaatggaacagttaaagcgaaatagggaggcgcgggacgcagcgagggaagacatggaaatgatcacgagggaccaggagagacgccagtgcgattggagtcgtacagaggatgtttttcatctaaaacaggcgaagttgcgctcttctattcgcataaaggagggcagagcaaagccaattgatttcttggcaaagtgagctaagggacggaaaggatgggcaatttgtaaaagtctgtcaaaggtatatttcttacacggacgaagcgaaccaaggcacagcatttgaactgaacaatccgttgactttccttcccacggactccatcgaagattttgaagacctaattgccgacattcaagtaagtctgttcttgttacacagttcattaatttggttcaaggcatagtccaaaacctcctctttttaattcaaaaataacaaaattctactaccatttataggtttatcgtctaatcgatggccataagaacaaatgttattgggatgacatagaaacagtcgccaaaaatggaatgaaacgattgttagacacgcgaaaacgaacagcagacatcggaacagttcattcatcggtacaagaggaagtgcataagatatttaaggtattctaatgctttgctaatttaaatttgaccatggataattcaggggaaaacttacgacgaacttgaacagcttgagagtcaaatcactgcaagaatttcgaacgcgaacagagggaccgatgtgacatattgggagtcgttgttggattcgctaaggccgtttatggccaaacagcgcctcaaagagttgcacaccaaaatgactcaactgcgtctgaaaattattcgtcaggagcagattaatcaaatggataaaagtgatgaccgtgaccaagttgaagaagaaaccgttgaaaaggacagtggggagacagatgaggagaaaccatcagaggacgaattggagatggaaatcgaacaaaaggcgaagctggaaagggcgaaatacgaggacaaacagcaaactgtgcagcaggaaacgaagacaatgccattcacaattgagcagttcatcggggcagacgatgaacaaagggagcaaatgaatcagtaagtaacgacaatttggatccattaattggttgatatttaaggcaactcgaagccagaggcatgtcggagcaattctcaacagttctatatgagtatggtcgctacagtccggcgtacggaagcttatcacacacaatgcctggcatagaaattttggacgaagcggaagatgaaaaacggatgaatgatactcgtttagcaacacaacataaagaagatggaactggaaaactgacggtggatttgcgggaaaatcatatcttaagggggggggggggaagttcaggcattggttccctaatgtcgcctaaaagtagaaattcagaaattgtgaattttagaaggcccttttatgtgcacacaaataaaaaaagaatgtttaaaaaaatgcgtgtaaaagttatttaggaggcaaaaaatatcttaatttagccaaagtcttcaagggatttcctttattcatttaatgtcctattttgttttattgacgttttcttacaattgttagtttctggtttaatcgatatgttaaggccaaggacaaaagaatgttggagatcgcaaggcaaggaatggaccaggacgaggccgaattttctgtcgaagaaaagctcgaaaagcagaatttcctttggtctgataaataccgtccgaggaagccccgctatttcaacagagttcgtgattgacttttgttggtttaaaatttatttctgttaaggtgcacaccggatttgactggaacaaatacaaccaaacgcactacgacattgacaatccgccgcccaaaattgtgcagggataccgttttaatgtatttgcacaatttggcttactttcgtataacataaaagggtgattctgttacagatattcttcccggatttgttagacccgacacagacgcccaccttcactctgatcagatgcgatgaccccgacttttccattcttcgcttttgcgcgggaccgccctatgaagacattgccttcaaaatcgtgaaccgagaatgggaggtcaactacaagcacggatataaatgtcaatttcagaatgggatttttcaactttggttttttttcaaacgataccgttatcgtcgctgattcttttccattttaaaactgta

SEQ ID NO: 46894 - DNA, 1662 bp, Heterodera glycines
taccaatttggttttgttagaaataggtctacgacctttaaactaataacagttgtggaagattggtacgaggcaactataaatggaaaaaatgttgactgtatttatattgattttcaaaaagcatttgactcagtgccccataatttacttttatacaaattggaaaaaattggtataaagggcaaacttttaatgtgtataaagggctttttgagtaataggactttttgagttaaaattggggattctttatcctcaagtaaaaaagttacctctggcgtcccccagggctctgtcctgggccctttattatttttgatttatattaacgatcttcctgatgccttgccatcaggagtgaaaataaaattatatgctgatgatgttaaattatatatttgttataaagcaaaagccgacacagaaattatgcataatgcattgcataatttattcgaatgggcaaataaatggcaaataaaagtttcaattcaaaaaacttttgtatatatttgggttcaaaaaacccaaaagaaacatataaatttgatggaaatacaataaatgctgtggatacaattagggatttaggagtaaacattgataacaaattacaattttccgatcatattaaccaaataacaaggaatgcgtatttacgtatgcgttccttgtttcgaataattaaatccaaatcgtctaagatttggattacgttatataaaacttatattaggcctttattggaatacgctccggaggtttggaatccgtctcttcaaaaaaatattaaaaaaatcgaaaagtgtcaaaaatatttcaccaaaagggtattttttaaaggtgactggacaatcggacagtggacaatcggacagtggacaatccgacagtgaggacaatcggacagaagtggacaatccggcagtggacaatcggacagtcaaatataaaatagataagaaaataccggtcgccttgtactcaaaaccgtccgccaaaagaacagcccggcgctgtgttgtttcagcaacaaaaaacttttttttcatttggttgaaggttcgggagagggtcatgggcttgtggatttggatgcaattcttgaactgggggatttggctggggatgctcatgaatttcgccttcttcggaagatgaggaattaattttgtgaggaaacaagtgaaaatttgggaaggaaaaggaagtggtcaatttgtgcagtgcacgggaatggtcatttctacttgtaagtaatttggcaaacatttttatcagctcatattcacatcattttacattttctaggtcattcccagaacattagtttatttgcctattttgttttttcttgatatggcacaatcggtccattgcggcgaccggtattttcttatctattttatatttgactgtccgattgtccactgtccaattgtccacttctgtccgattgtcctcactgtcggattgtccactgtcggattgtccgggagccttttttaaatgcagccttccgccaattccataccaaaatcgattagaatacctgcaactgccaacacttgagaataggcgaaagctgtttgatctgttcatggcgcataaaattgcttatggccgaacagatctgaaactattttctatttttaatcc

SEQ ID NO: 46895 - DNA, 1185 bp, Heterodera glycines
atgcgaaaattgacagcaccaaatggtgaatggggatatttggatgctactgatcaggttgtaccgatacaactgatcggacacacgttcatacgagacatgaaaattgcaataaatggtcgtgaaattttcaactctaattcactgatggcatacaaaacttatctttctcatgagctttcgcaatcacttgaagctaaagtttcgcatttaactgctgctggatatgaccgtgaagatgctaacaatttacaaaacgcaaattccgaagggttcaaaagtagaagacaacggtatttgggaggtcgaacagcacaatacattgcaaaaatcgatgccgatctgttcaatgtgccccaatatttgattaatcattgcgaaattgacataacgatacaaccccatgacggcaattttttgttaattgacacattagaccccccgggtcaaccatatagcattgagcttgttggattgaaactctactgcaaaaaagtcagtcttatggatggcttggctcttaagttggcgaaaaaattggaaatgaaaccagcacggtatgctgtacgaaaaacaatgatggaagcactgttcataagcccagggcgctatgaatttaatgcaaacttgttcatggaccaagttccacgccgcgtaacaatgggtcttgtggcaaactcagattatgtggggaacatcaaaaggagtccattcaactttcagcactttaatgtacatgagttgagtgttgtggccaatggtcgctcctatccccaggccccgatgacattgactgtgaaaattggaaatttgtccgcccctacaatgacacgcaagaggcgcttggttttgccaactctacatatggaaatggaattgattatttttctttttgcacactcattgtatttatgtgtttaacatgactaatagtggagatgatcatggcggtttgttcgacctgatcaaaaagggatgtacatcagtgaacataaaattcaaaaagccagtgcccgatgggggaattacactgatagttatgggagaagcagactccatctactttttagataaaaacagaacgattgcaactgatacaaccatttgatttcaaaaaaaatgtttcatttattctttattgtcttgttttttcaaccaattttttgtttaattgttgaagaagga

SEQ ID NO: 46896 - DNA, 152 bp, Heterodera glycines
atggctgcgcacaaaacatttatcatcaaacgaaagttggccaaggctgccaaacaaaatcgtccgcttccccactgggctcgaatgaagacgggcaatcgcattcgctacaacgcaaagcgtcgtcactggcgccgaaccaaactgaagtt

SEQ ID NO: 46897 - DNA, 3597 bp, Heterodera glycines
atgtacaacgacgagaaaatggtggtgcggccgacgcaactgcgcggcttttggatgcacaattcgtttctgttggagagcggcaaacggccagtgaaactgtacaccaactactccattctgttgcatttggccaacgaggaggtgggaatagtgccatcagtggtgttgttcttgaagagtttcctgtctcggttctcgactcgagaaaagtctcggactgtactaattctaggaatattggcctagacccgataaaagtctcgggtttattttgaatattggcctagacccgataaaagtctcagatttttcaaggcaacctgaatctcgggctaaagtctcctcaaaaaccaaaaattcggaccaaaaagcgagccaatcaacgctaaaatggctttatttttttacaattatgttcttttgcgaatttgtttgatcactgatcgaaaaaaacattaagcgagtgcttccgggcgaatttcaaacgccgtttatggccaaacatgacattgatggcattcatttgcacgcctcgacattactcaagaacttggataagcaagcaaaagtaaataaatcatattaagtaatattttttgttttaatacaatatttaattctagtggataaatttttggaaaattttatgttctttgcgaattttaaacattcaaacaatgcattttctttggatagcaaattttataataaaaaaacgcactcaaattaattttggccaaattattttttaattttttccattaaatcgtcataaattcgctttttcgtcatggtctcgagtcctaggaatctcgaacatatgcttaaaaattagcaatgaagttatttttctttgacttctggatttcttggttctacatgtaatacatctttttttaatgtgtttttcctttcttcttctcaattcagtcccgtgccgcgcatcaattgccctccgcgcagccattttacgcggcattggtcgcgtgccatagccgaatttttgcctattacaaagcaccggggtgaacaagtcgcgctgtctgtcctacagtctgtgcgtgctgcccgaagtgccgcaggcgctctgtgccatcacgcgtaacactttcggcacgatgttgaccaaaggggcgaggacggcaattcacgtgagggaacagagcgaatttgggcacggccgatgcacggacgaaggcggaatttgagggggaaaatatggacaaatgaattgttggataaacaattttgaaatccagaaaaattaattatttgaattttaaattatttttaataacttttgaagatttaaatatcgaacgatacaaataaaattaaattggtttgatttgatttggtttcaattaatttatttgttggattaaattatcaaaatcaaatcacaaaatagagcaattccaaccaactgcaaattgacaagcaaaaatatccaaaatataaagaaaatcaaatctcggcatgaatttcattaattaattaaatattaattaattaagtatttttcagttcataaatttttgtacaaataaaatgtaataattttacatgtcaattcattacattcacttttgagaaaatataaccaaatggttgtactcctctcactaattggccaattacctaacattaattaattaattagtgttaattaccaatttcgccccattttcacttccattgactctgcgcaacgccaaaaaaaaagaaaacatttgcccgtcggcggagtttcgtcgcccattttctccgttttcatttacgcccattcggcccgtctctccgtttttctgttttcacttttttttgctgcgcattttacaatttttgagttccaccgctgcgtcctttgcccaacccaaaaaaatgaaaatgaaaatgcaattaattaatttaaatttttattttcttttttttaaattttcttttttcgcccatttgtttgcccctccggcgaatttccaacggccgaatgtttttttttgtgtcaccgccgcgtaacggcccaatttttggggcaccgaatcgttccactcccgcaacaaaatgacgacaaccaaaacgacgacgaaaacgcaaaagatgacattgccccgggcgatgggccccgggggaagaagcgtatttaagcggagagaagtgggggaagggcatcagttgcagttcaaccaacagcagcagaagcaaaagtgaggcaataaatattcaaaacaattaaaatatatttaaaataatattagttaaattatttcaattccaatttcagtttaatttttaatttaaaataataattatttaaattcaataattgaattaaatttcaaatcaattacaattttaatattttagatggccgacttcgacaaacacgctgcccagcgcgaggcggagtcgctccgcactttggccttcttcggcgtgtgcctgtccaccgtggccacggttatcgctgtgctttccgtgccgttcgcctaccagcacttccagcagatcggcgcccaaatgcagaacgaagtggacttctgcaaaatgcgctccggcaacatgtggcgcgaggtaaagccgaaaaggcggaagggaaaagccgggaagtttcaaaaaatttcaacaaatttccaggtcacccgcacccaggcctactccaaggtgtcgcacgacagccgtcacaagcgtcaggcaggcggttgctgtggctgcggagtgtcgcccccgggcccgcccggaccccctggcccatcgggacaacccggcggagacggacaacccggaggctcaggacagcccggagcaccaggtccacaagccgtacttggaattccatgaaatttaccttgaattcttttacaggccaggcagctcctcgcccgtacccgccaagcggcggatgcgtgccgcaatgtgaggccgcccagcccggactccccggcccgcccggaccccccggacccgagggacagaacggccaacccggacagtcggcaccgcccgcgtctcctggccgccccggaccacaggtcagcttttcctgaaaagcttgtccaagcttttacaaatcccactgtttttagggacctcctggacccgatggacagcccggcaaccccggagagtctggccaacccggccagcccggcaaactcacccagggcccgcccgtcgttggaccgcctggcccatcaggaccccctggccagcccggacagcccggcgagaacggacagcccggccagcctggaaaccccggcccgcaaggataccctggcgacggcggaagccccggccaacccggcaaccccggaggcagcggcgagcccggacagcccggagcacagggatccagcggccaatgctgtgagtggatttagcaaatccaaaatccatttttctaaaattgttcgactttcagaccattgcccaccgccccgcaccgcccccggctactgagtgtgatcagtcgaccatcgacaattggagaagaacccccactgatgatccacgaggctgctgtcctttcgtctctcaccattttcccgatcattttggcatttccaaaacgctgatcggacaattctcaat

SEQ ID NO: 46898 - DNA, 788 bp, Heterodera glycines
  unsure (1)..(788): unsure at all n locations
ctgctcagaagcaaaaggcagtggggatgcccaagcgcgtgctnttcgccgtgtaagttccttctgttaatgtaaagtcgggccaaaaggctgcttaatgtgcaggtatgaactcggcccaatgtcagcgctatcagttggccaccgtttgtgtgttgggctgttgttgccccgcacagtcggcacagacaaatctgacaagtcagtggccaattagacaattaattaattaatcatttgctattgaaatggcaattcaggcgcatgtgacggagaccccgcagttgctgcctgtctaaatggcctttgtggccaaggatacttctgcaatgcacgcaacttttgctgccgatgccagtccggcacatcgccaggttttattttccgtttctccctttacttaatgtcgctctctttgtctctctctctctctcccccactttctctcacttctctctcagtctctcccactttccgtctctctctcctctatgtcaatccaccatttcgatggcttctaaattgctgatcagtttgcttatctcctgatcacttccccaggtccctgcgtgaataacctttgtccccccggctatgcttgcaacaccaacaatttctgctgttcccttggctccggttctgtacttggtccgtgcgttaatgaagtgggtgttttgcttatctttcccaaaagcttttttgccgattgatttcgttttttggcacagcaatgccccgtgggctacgcttgcggtgccggcaatttgtgttaccccgtgacgggcagc

SEQ ID NO: 46899 - DNA, 1367 bp, Heterodera glycines
cggtgtcgttcccgagtcgtggtgtatttcaggaccgagcaattcaatttttttgtttttctgatctaacatgatttatttttccactctttgtagcgttccgcttcgccgcatggacaccgtccgcgcccgtctggcgctcaccggatcgcttgaacagttccgcaagcatcgcacggagtcgttgcgccgtaccgtggagcgaatgaacaacaactacaacaacaatgaagagtacagcagcgcggaatcggaccaggaacagatggaaatggcacaaaacggggccagagttggcacggaaattgacgaactgttgcgcaactacatggacgtgagcagtcgggccacatttgaaactgatatatttggatttgaaatgaaacttggctttacaaaaaatgggattatgaaagccattcctttggaattttatttaccgaacccaaaccccgatatttttaaatttttcccaaaatctctaattggcatcccaattgtttttaattgatcctgaattttaatattttcatttttgaaaaatgtaaaaatcaaaatagctgacattagagaccggaacgaccgatttaatatttatcgaagattttgatatattttttcgatatttatcaaaaaattagtcaagaattttcttatttttcgatacaggcccaatattacggtgacatttccatcggttcaccggcgcaaaatttcaccgtcatcttcgacaccggttcatcaaacctatgggtgccgtccaaaaaatgtcccatttatgacatcgcttgcagtatgtttttttttaaatttttaaaccctcataaattttttgtgaaatttgaggccttcaccacaaatatgatggcgccaaatcaacctcctatcagcccgatgggcgaaaggtggcaatacagtacggcactggctcaatgaaagggtacggtagagacagtacgcgaaccaaatgagaaaaaaaaaactgacaaaatttacaaaaagaaagtactagttggagaaatttttaaaatttaaaaaatgcataaattaagagatttattttattatttttaactaaaaaaataaaaataacaatttttattttttattataaaattcaattaaaatacaaataattataattataattttcataaaaaattttaaataaatttaatttaaaatattattgtacagatttgtttccaaagacattgtttgtatggcaaacatttgtgtacaaaaacaggaattcactgaagcgaccaggcatgtctaatgctaggcctaaaaatttcaacaaaatttcctttttaagtgagcctggcctcaccttcgtggctgcgaatttgatggcattcttggca

SEQ ID NO: 46900 - DNA, 3581 bp, Heterodera glycines
atgccgcgaaattcacatgcaattggcatcgatcttggcacgagcgcttctcgtgtcggcgtttttcgaaatggatacttcgcgtcgatccacaatgaccgaggtgataaaaagaccattttggccatttttgaatgttttaattgctttatattttcaaaatttctttcaataaatttctttttttttcgtttcgagggttgggagatggcctacccaatttcctaatctttttttcattacgggaggttcaggagtttctcccattcccctgaagggcctaaccaaattttttcattttgtaaattgaggaaagcgtatgatgccatcttacgttgcgttcactgacagcggacctttggtcggagaagcggcaaaagcacaggcaaaaaaataatttataaaatgattttttaatgaattaatgaaaattgggtttcaaaactaaaggaaattgaaagaaagaaagtctgatctaattcaatcaatgatcagtgctaaaaaagggagagagagcgcgaaagagagtacgagagagagagagacaaggagagtgtgtgcgatagaaaaagagagagggaggtatctttgttctagagctttttgaatttaattttttttttctaatttaaatctgtggaagcgatcggatatgaattcaaaatttttaagcgtctgtttctgaatcatagaaaaatcatgtccaaatgttataaaaagcggatttgcagaaaaagtttttgtggaattaaataacctaactttttttatacttaagtaaaatttaataaaattatattctgatatagaacaccttgagctattgaacaatactatgaaatatttatttggttgaattaagaaacgacccaacacgcggcaaaagcacaggcagaaacatttaataggaatatttttatgaattatgaaaattggtttcaaaactaaaataaattaaaagaaggaaatctggggccaatcacaattacgaacgacaaatttggcaatcgtccgaattttgattacgacaacaaattatatcgttgaataagccgttttcagtttgtctctgtcgtgtgaattgtcgtccaatcacaattaacaaaatctaccgtaaatttgtcgtcacttttcttatgaattaaccaacatttctcaggaaaatgcaaaaaaattgaaaaatggctaaagggtttttctagaggttttttggtaagtattgtagattccaaatctaatagattcgaaaaacccgaataaatttaaaaatcatcgataaaagtatagaaattaaaatctgagatctgattcatgaccaacgaactcatttacacctggaaacatgtttttaatattaaataaaaaattttagatcaaaataatttggtgaatttttgggacatttctcagacgccaaatttgaggggcgaagttgaacgccccccaaatatttggcgtttatcgtctgaaatttgtcgtttgtcgttggtttcaatcacaattacgaacaacaaacgccaaatttcagacgaaaaacgacaaatttcggtaaacaaacgacagattttttaaaattatgattggagataacgacaaacgacatattttacgacagatttggcgtttgtcgttcgtaattgtgattgacccctgctctgatccaattcaatcaatttaagtgacaagagagagtacattttcatatttatagttcgttatgttcccttgataatttgccggcatacgctaattacatattttggcatttagttggccataaatccgtctaacaccattttcgacttttttcatctcatcggacggaaattcgttgaccgagcagttcaggcgaacatcaatcgttggccatttcgcgttgtgcctggagaggacggacgccccaaaattgccgtgcaaagcaatggaaaacagcagacattcaccgtggaggtgtttcaattatgaacatttttccctcaaagtgaaattgacaacaaaaaaaggaaattgctctttaattagtcagatttgattcagctaaaataaatatttcgacaaaatgtaggaattgccctacatttgaccaacacattaagtagggccggtcaggtgtggcgctcatatttggtgtagccagtgaagtttagcgcgacattttttaacttttttttcacttgtactattttctctaattatcctccatggggcattatttttcaacctcctcagaagggggcgggataattggagaatgtgggattaatggagattagaggataattagagaaaaaacggtaattcacagatatttttcgaatccaattttccgcggctaagggatatttttaaaaatgcaataaaattattatacacactttttggaaagaatacaaatccatcaaaaaaaattacattaattatgagccttgtcctagtagtttttgagaaatgaacccccggataagaagtccggaaaaattctgaaatcttgtccataactccggattctgactccggatttaaaaagtaattaatcacaaattatttctcatcaataatcaatgtccattacgcagaccattttgtccatgctgttggccaagttgaagcattcggctgaagcatttcttggccatacggtcgccgacgctgtgctcactgtgccaacgcatttcggccattcacaacaccaatcagtaaaagattcagccaaaatcgccggcctcaatgtgttgcgtttgttgagtgcgccaacgtcggcttccattgaatacggtagggattgagtacggtttcagcataaattagtgccaaaaaatcatgcatagatttgtttttgcatattgagcggcttggtattttacatgctgtttttctcggcttataggcttataccatcaccgcataaatttaccattccatcactccactagcattttaatgagacaattaaattttgaatttgttttcttttcacagcatttaacaactattgggaaaatgttaatgtgcttatcttcgacttgggtgcgtccaatgttggcgtgacaattgtcaactgcgaagatggtatcattcgagtgaagtcatgtgtcggtgacactcgggttgggggcgatgacttcaccaatcgaatggtaattatgccggattatggcatgctttattaaatttggcatttacggtcgatcatttcgttgcggaattcatgcgtcagcacgggtacatgctcagctggagccctgaagcgctttttcgtgttcgtgccgcctgtgagaatgccaagtgcactctctctttgtacacagaagacaggtgaggggggttatttttttgggaaaagcgcgccgtaaaaaaggggtgtgaaaatataaaaatagtcatgtcaatgcgggattgcggactggaaaaaatcgcgcgcgggatcccgtcccgctcaagtctaggattccagcccctattttttggattccattttataattactattattactctccgtttcagcattgaattggactctctcctcatctcaagcaggctgagggagatgaagcacttcgttcaaaacagttagacaa

SEQ ID NO: 46901 - DNA, 879 bp, Heterodera glycines
taagcaatttatcccactctttacactgtaaaaattaattttagctccgtatggttcagcaatgttgagatgggaccgccggatgcggtttttcactccttttttgtttttaaaaacccatatttaagattttgggcattaccgaggcatacaaaagggacactaacccccaaaaagtgaaccttggcgttggtgcctacagagatgaccaggtcggctgcaagtattttatcccgaaaatcatttcaataatttttctttccttagggaaagccttttgtactgccgagcgtaagacaagccgagcaagagataatcgcagcgaaaatggacaaagtcagcttttcaattgcaaattgactctcccccttcctccgtccccaggaatacgccggcatcgccggtttgcccgacttcaccgccagtgccatcgaattggcactcggcaaggacagcgaagtgctgaaggcgaagcgaaacgcgacggtgcaggcggtgtccggcacgggcgcgttgcggacgggcgccgaatttttggtggacattcatttgcagacatttaatgggatggatttaaatgaactgactttaaagtactccagggtcgctgatcacggacatgacctttcattacgaatccaaaaatcaaaaatacgatttttgctttgaattagggctccggtgctcgtaaggtgccaaaaagaaggtcatattcttgattagtaatcccgtagcaaattgttattagtgccattgtttaagtaattgcgtaataattccaatttccctccctccccaaagtccaaatggttcccgcatcgcaaagtcgtctatcagccggcgcccacttggggcaaccacgtgcccgtgttcaagtgc

SEQ ID NO: 46902 - DNA, 2213 bp, Heterodera glycines
aatatgctaaaaccattttcgcatcttaattccatacaatgcaccaaacatttgctggtcagcaaacggcccatgcacatttggatgccggacgcgcagtttatgcgtcagtatcaggtccttcctttggttttgcttttttattttattgcattaatcaatcacacacaaattttaacaatttcaatcaaattttgaggtggaagacagcggaaaaagacaaaacacagccggagaaacacagtcgagacataacgcagccggaatagatttttttaaatttttcaaatagaaatttttcaagaaaaaagtcttactttgttagaaaattcgatcaaaattttttttttaattttccaacgattttttcaaaattcactgataaattaccaagttttttcaaaaaaatcgctggaaaatttttagaaagttttttctatgaattttctaagaaacattttttctaagatttttctaattgaaaaattttttaaaatttattcccggttgtgttatgtctcggctgtatttcggcggctgtgttttggggtgtaccgggaagacagaataatttttacgtaccttacttaactatgatttcttcagttccaagcgccaatcactcgaaatccgtggcaatggctcaactcaaagacccaaatcgacccggaggataaagtcggactgaggaagcaaatcgctagtatggaaaagatttcgcacatcagctggaacgatttcgcctgcgaatttcgcgaagcccaaatagacagcatggtcagaatttggtgcttccaaatttgaactttcttttctgcttctccaattggacagattctcaactttggccccaatcatcccgcagctcacggagtgctccgtttggtgcttaagttggagcaagaggtcgacaaattgtcaaaaaacattacaaacgaaaatcatttatttattgacagttatccgaattttccctctaaaactccgtcatttttaaggtttgcatcaaagcatcgccgcacatcggactgctccatcgtgggactgaaaagttggtttcgctacttttccgttttgggccaacagctcaaaatttaaaaaaaaaaaagttcacattcaataatttgtgcgcgaaatcgaaaaagtcctttatcgctacgctaatttatgctatgagaaattggaaggtttaaattgtcccttaagcgcgctctttgttcattttttaattttgatgtgaaaagtgtctttttatttctatcaaagcttttgtcatttttatattgtaattccatcagatggttttgagtgccccggctttttcaaatgccattttcacttcatttttcagactgatcgagtacaaaacgtacacccaggcattgccctactttgaccgtctcgactacgtgtccatgatgaacaacgagcaggcatattcattggcggtggaaaagctgctcggcattgacatcccaccacgtgccaaatggattcgaagtgggttcataaaaagggaaggcaaaacattcatttctattgtaagatgggcattaagttgggaactgagtctttctttaccacccgtgccaaatgtgaaattgacctcaccccctaaattttattttttaaatttagtccgtctttttctgttccatgggacattaaaccccctccccccccccttctgtagcattgtttgccgaactgacgcgcatccaaaatcacataatggccatcaccacccacgcgttggacgtcggtgcgatgactccgttcttttggatgttcgaagaccgcgaaaagtgagaaaagcgccggattgaattgaaaagccattctgaacagattaatggagttttatgagcgcgtgtcgggcgcgcgaatgcacgcgaattacgttcggccgggcggtgagtggaaatgtcaaaaacccaaattaacacccatttgattcatgtttatttgaaaggcgtcgcttgggatttgcccatcggtctcatggacgacatttacgattggtgcacccaatttccccaacggattgacgaattggaagacactcttacggagaaccgaatatggaagaaacggctcatcgacgttggggtggggtcagatggtttgagaaggcaacctccccatgttcctgacttaacaccaaatctggggtggagggggggggggggggggggagtcggagagagagagcg

SEQ ID NO: 46903 - DNA, 385 bp, Heterodera glycines
catccaaggcatcaccaagccggccatccgccgtttggcccgtcgtggaggcgtcaagcgcatctccggcctgatctacgaggagactcgctcagtgctgaaggtgttcttggagaatgagatccgtgacgtggtaatttgcatttctcattaatgctatttggggaccaaatttagggtgcgtttttcgaattttaaaactaaaaacggaaaatttgcgtgaagtgctgaccagttaaaatcatttatgtgcctcaggtgacctattgcgagcacgcaaagaggaagactgtcaccgccatggacgttgtctacgcgctgaaacgccaaggacgcacgctgtacggatttggcggttgagcgggacggaaagaacggaggagag

SEQ ID NO: 46904 - DNA, 3122 bp, Heterodera glycines
  unsure (1)..(3122): unsure at all n locations
caacccacggccgcgggccgaccaaacagcgggcagagcaaatcgttggatttccaacagtcagccgaccaccggcaccacaacagtagacagtcacctttctcctcctatatgaagcaccaccaaacgcagcagcaccattcgttgcggcacggggacaacgacgtcgaggacgccattgagttgctgtccttcccgcaaaggtttgtggctgggtgtatttcagtaaaaacctaggtaactcaatggtctcatcattcggccaaatttttgtaaaactccgtgaatcatggcgtttttggtttgtgaccaggggtgatacacttttaaaaagacctccgtgatcactgattgtaaaattgtccgtgattgaaatttaatccaaattacgtccagccctttacccataaataaataaactcgtgtcatgggatattgatgcttttggcggggattcttttctatacctcgtactaaaccgcactttgttgctcttccagttacttgggcaagaatcggacaaggcgtgagcagtcgctgaagccggaatggcgggagattcgcggcaagcgcatctacgaggtgcgcacctgcaccatctatttgcaggcggaccacaagctgtacatgcacatctacaacaaggagggcaaccgggaccacgccaggcaataatcaacgaatttttgattacgaaataggttgtatatgagaacaactgttgagcgaaaagttggtattagcctattattacgcatttttggcacaaatttaaaaaatctcttaaaatatatatatataaaaaaagagttcaaaaccttgtaaaacattaattttaggacacgtgaggagattgtttcgctgctgtacaatcacatcaaggcggtgaacagcatctacgaaaacaccgactttcacggaatcaacggcatcaattttgccattcaacggacaacggtttgtttttgaggtgtgggttgtaggctttttggaatttacaaaaattttataaaaatttcccaccctcagatttacacgccggacacatgcgcaggtgcgtcgtcggcgaattccgctgcgactgtcggcaacaacccgttctgtgaggagaacgtggacgtgtctcactacctgaactccaactcgcagaaggaccacagcgcattctgtttggcctattcgctcacctaccgcgactttcttggcggcacattgggcctggcatgggtggccagtcccagtcaaagtcggtgatacagtgttaaattattcatttggtctattattgcttttatatattttttatactgttttaggcactgccggcggcatttgccaacgtttccagcgctacaatgagcagcaacgcggtggggtcaaccggtcactgaacacgggcatcatcacgttggtcaactacgggaacagagtgccaccgcgcgtgtcacaactaacgttggcacacgaaattgggcacaattttggctcaccagtgagtaactttttttcgcaaattctaggaaggcttcaagactttgtctcaaaactaaatttatttccattttagcacgattttcccgccgattgccagcctgnngtgcccgacggcaacttcatcatgttcgcctcccgcacctccggggacaagccgaacaactccaagagtctccaaatgctctgtggctaacatcagcgaagtgttgtacgaagtgctcggacaggttttttgaaaaattattattttttacaattaaattttagagtcccaaaaaccagcagtttggacggaagaaaaactgcttcactgaccgtgagtttctcatgcattttaacatcttttgggtttacgagagatctgggtttcgggttcttttttcgggattttctggttacatccctacaaatcttggtacgctttctggcttcgggattttctttttttcaataaaaatcagagaaatggaatgcccaattcatttttatatatttaatcaatcgttaaatacaaacctccttttaactgtttccttggtttcacagagctcaagtcgttctgtggcaaccaaattcgggaggacggcgaggagtgcgactgcggcttcaccaagcaggactgtcacgagaaccaggaccagtgctgtgcaccacgggagaacaatgacgagcgcacaatgtgccgacggttggccggcaaaaagtgttcgccgtccgagggcatttgttgccgagcggcggactgctcatttgtgcagcgcaacgggcgcgtgtgccgggaggagtcggagtgccaacacgagcagaagtgtgacggaacgcaggccaaatgcccggacagcaggaacaagccggacggaaaggcgtgccaggagagcaccaaggcaagtcgggcgagggtgggcgttcattctgtaatgttatcagttcatggcttggcccaggcctgtcgctgtgttttttgtttataaaatagtcaatggatgtgtgccctccccccctcaaaaactaaaaaagtcatattttttgggtaccgatttttgttaattttcgttcggaatagaaatgttttatttttgaaatattttttaacaaatcgcaaaaaaacatgctagagatgccctttacaatacaaacttaattttgttttattttgtccacaggtttgtcagaacggcagttgcagtggctcaatttgtgcgcaccatggcatgcgcgactgtttcctgaccgagggcaagccggaggacttgtgccagttggcctgccaaacggaagcgggtatggacaggcatgggtgcttggcatagtatcttattataacgtcacatcgggtaacgggtgcatcccaaaatttctccgtccaaattttgccgggacaaaataccattgccaccttttgaggatgccaagcagcggccgacatcccgcggttgaccgtatacacgcaggaggggcgcaagtcgggccatttgctgttgccgcccggctcaccgtgcaacgactaccagggctactgtgacatcttccgcaagtgccgttccgtggactccaacggcccattgtcacgactgcgcacgctgctgttcaactcggaaaagatccaagagttcaaggaatgggttaag

SEQ ID NO: 46905 - DNA, 1578 bp, Heterodera glycines
atgctgaaaaataacttattaatccgtggcaaatccgtccttttctcgttgccgttgagggctttttccctgtccgctcagtgcgccaacggtgagcccattcgtcgcgtcgttctgatccccggcgatggcattgggcccgaaatttcttccgcggtgcaaaagattttcgaggcggccaaaaccccgattgactgggtttgttgttgtcacatctctcaattttaaccgcccttttgaaggatcccgtcgatgtcacaccggtgcagggccgggacggcattttccgcattccgaacaaatgcattgagctgatgcacaagaacaaagtgggactgaaggggccgctggagacgccgattggaaaggggcaccgttcactgaatttggcggtccgaaagtcagtcaatttccaattaaaaaaagctgattccgttgcccccagggagtttaatttgtacgccaatgttcggccgtgccgttcgttggagggccacaaaacgctgtacgacaatgtggacgtggtgaccattcgggagaataccgaaggcgaatattcaggcattgaacacgaggttttgaaggggagagggggaaagaaagtgccatcaatttattcgtttgaataaaatgcccattcggcaagcattcgttctatttttgtaacgttcagattgtctctggtgttgtgcagagcatcaaactgatcactgaacaggcgtcccgacgcgtcgcccgttttgcgtttgaatacgcacgacaaaacggacgaaaagaggtcaccgctgtgcacaaagccaacattatgaggtatttgtcccttatttttcgcttttctcaaattgcaaattcctttcgcagaatgtcggacggactgtttctgaaaatgtgtcgcgaacaagcgcaggaattcacggacattaaggcaattttggggacaatattagatattcgtataatccgtcgccatttcaaaattttaatacgtttttttcagttcagagaggcctatttggacacggtttgtctgaatatggtgcaggacccggggcactatgacgtgttggtcagtcaaaatgccgctttttgacgcaacatccaaaaccgagtctgtctttgtctaggtgatgcccaacctttacggtgacattctgtccgatttgtgtgccggacttatcggtggacttggtgtcaccccgtccggaaatattggcgaaggggcggcagtgtttgaaagtgaggatctttttattgttggaatgggattgatgaacataatcctgtcaaaaggtgtgcacgggacggcgccggacattgcgggacaggacaaggccaaccctaccgcccttctgctgtccggcgtgatgatgctccgctacatgggcttggagtcgtacgccaacaaaatcgagaaggtcggcactgacggggaatgcctttgctgtcgcattagcatactttcctccaatcccgttggttcaggcttgtttcgacgcgatttcgcacggggaccacaaaacgcgcgacttgggcggcacgggcacatgttcatcattcacggcggacatttgcgcgaga

SEQ ID NO: 46906 - DNA, 564 bp, Heterodera glycines
atgagcaacaacgacatcatttttggaaatgaggaaggcgttaattatttggcaccatggacatattcctgtctcatcaaaacttcgatagatcggttgaaaactgctttatctgaggttaaaaagtacatacaaatgttgttcataataaaaatttaccaataatagaatcgtgaagccatacatgctttaaatgtgagttaattcttggttgaataggatctttaactgatttctttatattctaccacttaagcatttacaagaagtctttcgtcaaattgaccgtgcttctccctcctttctttatgatttctcaaaacttttgctgatcgagtcgggcgttgcaggaactaatgtgcaggaatcgtaccttcgaatgcatgcaaacgcggccacagaagagctggaactgccacaatttgcacacattgcagaatttcaatatttgtcaatgaggtttttgtaaaaatataaagcctttattgttcattttaattcagagctgtttcactgtgcaaggtgcttgccagaattccggacgaaatgactgataggttttaa

SEQ ID NO: 46907 - DNA, 565 bp, Heterodera glycines
atgaacgaggaatactgcttctctacttcgactgttgttgcacagagctgggcccaaacaaactttcgaccagtggacgagcaaccgaacagccttgtggacacgctcatcgccaaactttcgtgcacgactttcgagcagttcacttccgaagtgagtgatgcgttcattttatccgtctttcatttcaactcttcaggtcagtgctcaggacattcacaagctttgcgatgtcaccgtcggtgttctccagcaacagtcaatgctcatccgtctgcagcctcctgtggtcctttgcggcgacatccatggccaatttcgggacttgctgagaatcttcaagacgatgggctttccgccggacaagaagtacctcttcctcggggattacgtcgaccgcggcacgcaaagcctggaaacaatggtcctgctcttctgctacaaagtgagtttgctgaggaggattgcgcgagaatcgttttaattgtccactttttaaggtgaaatatccggacagtgtcatccttctgcgcgggaaccacgagtgcagcaacatgaaccgagc

SEQ ID NO: 46908 - DNA, 1732 bp, Heterodera glycines
aacgtgccttggcacacattgacaatgtgtacaaatttggcgctctcgacgtgtacgggtacatgtgcaagaccaacttggcctccaacaccgcttttcgtggcttcggagccccccaaggaatgtttgccaccgagaccataatgaagcatgccgcggaacaatttggcatcgacgtggacacggtgaggacgaataggcggccaataatatatggggagatgtgcgagagtctcgggaaaagtcagtttcggatggcatttgtatatttttaaacagattaaagccaattttcgctggttttattccatttttacttttgcgaaaacatatatgtataaacgggatatttattgggtacaaaacctgagcagttttgctttttgattcagcttcgggagcaaaacatgtattcggagggggacattacacattacgggatgcatttgcaccaatgcaacattcgccggtgttggacagaatgccaaaaattggcaaattatgaccagcgaaaattgaaggtattagtggaggagatatgcttttaaatttgatttttaatcaactatttcagctccaagaatgtaattccaggaataaatttttgaaacgaggcatttacatggttccgacaaagtttggcatagcttttggtttcaagcgacttaaccaggtatttcacaataagtttaaatgaattaaattttgaaattaaaaaataaaaattaaattttttagggattatttaattttaaattaattgttttgtcttaggctggagctcttgtcaatgtgtacactgatggttccgtgctaatttctcatggcggaatggaaatgggccaaggattgcacacaaaaattctccaagtaataataataaaaaggtgaataattaaatcaattaataataattaaaatccttcagattgcttcaaggtgtcttggaattgacgtttcaacgattcaaatcattgacacggccaccgacaaagtgccaaatgcgagcgcaaccgctgccaggtgggcggaccatgataaggaaaatcatcatttttgttttaatatcaatgttgttgttgttttttttgttagcgttggaagtgacgtcaatgggttggctgtgaaaaacgcatgcgaaattttattaaaacgattggagccgttgagaagcgaactgccaaaagaagccagttggaaggtaaaaataaaaccaaaaaaggaattaattatgctaaatgggtcacgccgtgttgaggattcgggattactgaggtcttggcctaattcagagactgggatggacatgtgccagggaatagaatgttttggcatgtaaatccggcatcttaacttttttgagttccatgccgtatgtttaggatttgacgatcgtttaaagataaaggccaagaatggattccatttttgaatgatttatctttttcttttattttacacctgtcattaaataaatcaaaatgccaggatttggtgatgcacgcctattccaacagagtgcaattgtctgcgactggatttgctatgtattttaatttttaaaaattcgtttttattttttcttttaatttgtatgttaagcattcattctgagcctcctgatttcgtagaaggtcgtggctccgaatcgtacagttattgtgtttatggggtcggatgtgcggaggtcgaagtcgactgtctgacaggcgaccatcgtgtacaattttaa

SEQ ID NO: 46909 - DNA, 1506 bp, Heterodera glycines
atgcaacttaagagttcatcgagttgtgaaacaactgacagtgagtcggacatcgaatgcgatccaaatgttctcccggaagacaaagtgcagcaaattcaattcgatttggctcgaggacaggggaacatctcttcgtcaagtgacgacgaatcatcggatgaaatgtttgaccaaaaaacgggcgaaaacaaagagggggaggaggaagacaattggggagaattggacaaagaagtgcgacgcgtggaatgggcatcatctaagttggcaatctgcaatttggactggggcaatgtgcgggctgcggatttaatgctggttggcacaaaaaatgttgattcaataaacaaagaaattgcactggtttttacaaataaattggattcagttattcaactcactaaaaccgaacgaagcgaaaattcactcggtttctgtttatttgtcggattttggagcgaaaagcatagagagagaaaagcgaaacggaccgatgttgaaagtgaagcgattcaatagaaaagcaaatgagagggaggaagaggacaaattggaagagtaagcatagaattgcattataattcatttacaaaaaaagcaaataggcaaacgaaaaaagcaatccgtgcgcatgagttggacaaattgcgttattattacgccgtttgtgtgtgtgactctgtcgacacggcgactgccatatacgaagcttgtgatggcgtggaagtaagtgattattttatttctttcattttcaatatacgaatttatctcccttaagtacgaatccagtgggctgagattcgacattcgatttatccccgaaggaatggaatttgaggtgggatgaatatacagtgaataattaatatactcctttagactgaacgaattcgggaacaaattttgtcggatcagttcagcgctgaatggtaccggccacgaaaagttggaatgcacacactcaccgcaagtaacccaaaaatcagttgggagacggacgacccggagaggagaagagcattcaagcgagcattcgacgaggaggccaaattggaggagtttaagtaccgtaccgttgataaatagtatcatcaattccgaaaatttttggggttaagcgctttcattggctccgacagcgaagaggaggaaaaggacaaacagaatcagcggaatgcaaagcgcgatatgttattggccgctgcgcgtgaaggccttttgggaaattcgaaggcacagcaaagcaaagatgaagagaaggacgacgaacagcatgaaaatgtggagaaagaaaaggcggatgagaaagagaggacaaggaacgaaagcgacggcgaagacagagaaattacagacgaagacagcgaggaggaggcggtggacatacagagaccgaagcgcaagaccaagttccagctgtatttggagcggaagaagcagctgaagcaggaacggaaacaggaagaggcgaagcgacggaaacggcggagaggggacgag

SEQ ID NO: 46910 - DNA, 856 bp, Heterodera glycines
atgaatgaacgaacaaagcaaattgacgttgaagatgatagtcgttttatggatttggcgaaagccccaatgttcagagagatgcgcaagaaggagcaaaaagttcaaatcgatgatcgtttcaagaaactactggttgacaaagattttcgagaggacgctttccaattgatggacaggcgcggaaggcctacgaccaaaacgaacagagatgcgcatttgtcacacatttacgagttatatcacgatgagaagttggtataacttgtcataaaatcattattttatgacttcccctcatttaaggacggcaccgccgtctgtaagtggagaaatgcaacttaagagttcatcgagttgtgaaacaactgacagtgagtcggacatcgaatgcgatccaaatgttctcccggaagacaaagtgcagcaaattcaattcgatttggctcgaggacaggggaacatctcttcgtcaagtgacgacgaatcatcggatgaaatgtttgaccaaaaaacgggcgaaaacaaagagggggaggaggaagacaattggggagaattggacaaagaagtgcgacgcgtggaatgggcatcatctaagttggcaatctgcaatttggactggggcaatgtgcgggctgcggatttaatgctggttggcacaaaaaatgttgattcaataaacaaagaaattgcactggtttttacaaataaattggattcagttattcaactcactaaaaccgaacgaagcgaaaattcactcggtttctgtttatttgtcggattttggagcggaaagcatagagagagaaaagcgaaacggaccgatgttgaaagtgaagcgattcaatag

SEQ ID NO: 46911 - DNA, 2863 bp, Heterodera glycines
atgtgcaagtggacgacatgcgacaacggatgccgtacggagaatagggcggacaatgtgagcggacggaaaagggtgaagggcacggacgaagagaaattggcaaaggggaaaaaaggggaggggggaatagggagaaaatgggaatagggagggaggggggagaatgtgatcactgatcagatggcatgctgggggatcatttcggaaaatctgttaaaattgacacttttacgaaacgacccctagcatcatctgaatggtgatcaggagggtcgactgatcaaagattgtaagaggcggacatttcatcattaaattggttgctgatcatttttttaagagtggcgttgtggtccaagccaaccgaactgtgatcgtcgggctgaacgcctcggcggctgatgtgtgcgaatgtcccgcctattctccgaagagtgagtgcgatcggactgtttgcttcaacgggggcgtctgtcacgacactcggccaggaactttgtgagtattatcctcgttaaaatgccaattataacaaatcccccctcctttttctcagctgcgaatgtcgcaatgcgcagctgaccggcttccgttgccagggaaacacgcgcagtttcgacggccgcggcttcgcatggttcaaaccgttgcccggtccgccaccccccccctttttttcacagttttcgagaccgattcgttctttcagcttgcacttcgctcaacatttctctccgcttcatgaccaagcaggacggcgtccttctgtacaacggaccgatgggcgacccgcatttggacgcattgagttacaacgactatttgctgatgtacgttgagaagggcatgctgcacgcgatgcttcaattcaatggcaaagagccggtggaccttttcgtcgagcaaatggtcgcggacggccgatttcaccgcgcaacgctcagccaacagcacaaaaagttgcgcttagtgttggacgactgcacaacgatggaggtcggtgcacagcagcagcagcaaaagccgaacacggccttctgcttgacgagtcgggacgcgccggacgacgacgagcgactgaacatcgccgccccgcttcagttgggcggactggcgccgctgtcgggagcggaggactatccgagcgcagtcagagaacacgcgttgggcaattttgtgggctgcactcgggagttggtggtcaacaacgacgtgagtgccaacacttcggcacttcccttaagcccttgcccttttagcactacgatttgtatcgtccaatccatgccgaacagagttcgcccgactgctcaatgttttggggctcttcctgtgccggcgactcggcttcctcgtcggccgatggccgcgccaatcatttgacggaaagcgcgtcagtccaattagcaagcacattttgtaatggacatggcgagtgttttgtggaatcgatggatcagcaggtggcgaagtgcgaatgcgagcccggctgggaaggggaaaggtaagcggctagtcgaaaaggctctctggctatataatattaccccgcccctaattacccacacctcaattatcccctctttaattacacacccactttattaccacctcttaaggtgcgatcgcccgatcaattgggtggagttcacttcccgcgactcctttctcaagtacattctccaagtccaacccgcttaccaagagtctcgcctgcgagtgttgtttttgcccggctctaccggaatgggacagttggcatcggcaattgggcaaaatcagcctccggcttacatgaaactagacattaaccggtacttaccgtccttttagcccttcaaactctgtttagtttcaccacccgcggctcctttgatttggtgccgtcgacaattggggcgaattcggcgccaatggaaatggaattggcggagcctcggctgaatcactccgtcccttatttggtcgactttcaccgaacccccagcaggtgaaattgagaaaggcaattgtcaaaagggcgttttttaagtgtccaacttttggtcgatggtcagtaccgactgctgagagaattggtgccggacaaagaaacggcactttttgtcgcgaggactttctttgccggcagtcagcaaggccagcagggcttccaaggctgcatcggcaaattccgctacaacagtttcgagatgggccttcgcctcgacgaaagcaccgtcgagggaactctgaacgtggcggcagggaacgaactgcagctgaacatggctccgggcgggggaccggcggcacccacgcgaccgcacagggaggaggacagcgaggggcgagtgcggaggtaccgcccgcaccagcacagacaccgcagggaaccgccaaacccggggattgtccgtttggacaccgtcaaaggcgtcgtccagggatgctcacaggtgcagtcggtgatgaacccacgcactcctcaactgctttttgtttagttggccacctgcgataaactcggcgctcagttttgtccccttgggcaaatttgcgcggacacgtggaaaggtacggacggattaacaaatattaattaattaataaataaataatcaaatgaaaggtgcgttttgtgtgtgtccggaggggaaccacgcgtctttggacgtgaatggtaggctgagcaggtgcaatcagcgcgaagccgtggccagtctgggcatcagcaactcggccatgctcatgatcttggcctctctgctgctgctcactcgtaattaatccctccccttctaattggtcattcatttcccacttcagtcattgtcatgctaatggttgtttacacgagaagacaaaagccgccatttga

SEQ ID NO: 46912 - DNA, 1150 bp, Heterodera glycines
tcaaaattatattgatctctccaaatgctatttgttatccgagtttcgaattcgtaaggaaaatgcaaatggtcaactggttgaccttgcagctgatgaggttgctccgattcaactgattggacacacattcattcgaaacatcaaaatgagcatcaatggccgtgaagtgttcaacgcaaattctctgatggcctacaaatcgtatttttcacacgaactctcctattcaacagcggccaaggactcgcatttgaatgctgccggttactaccgtgacactggtggtgtgcttgaggtgggagacggatgcactgcacgacgcaacctgtttgtaggcagcagaacagcacaattcatggccaaaattgacgccgatttgtttaaccagcctctctacttgatcaacttttgtgagctggacattgaaattttgcccaacgacaacgactttgtcctaatcgcaccacccggtgttgctgcagccactcgctaccatttcgaagttgtcggtctgaaaatgtatgtgaagaaggtgtccctgatggacggattggcgttggacattgcacgaaaacttgagttgaagccggcacgatatgcagtgaggaaaacgctgatgaagtcgctgttcatcagtcatgggcgttttgaatttacgtctaatttgttcatggatcaaattccccggcgtatcacaatgggattggtggccaatgctgactatgttggcaccgtttcacgcagccccttcaactttcagccatttaatgtgcgtgaaatttctataattgccaatgggcgctcctaccctcaagcagcctacgacttggactacccaaacggaaagtatgtgcgccccttcaacgacatgaacgaagcggtgggattctccaactcatcggaaagcaacgggattacactagcacaattcggcactacgcattgcatttacgtgttcaacttgacgagcagtggagacgaccaagcggcgctttttgatctgataaggaacgggaccacagcagtgagcatcaaatttaatcaggcggtgcccgttggaggaataatgctggtggtgatgggcgagtgcgactcgctggtgatgttggataaaaatcgatcgatcagcactgacatcactatttaa

SEQ ID NO: 46913 - DNA, 1237 bp, Heterodera glycines
gtcgctgatcacgaatctgatattcgttttgaccaatttcgaatcccggattcgaacaaaaagtcgaaaattcaaaattcacttatgttcgaatctgtatagaaaatttcttttggcggaatcgaaaaaaatgttattcacttccttatttgctgctcaaaataacatttctaaaataccctgatttttagtggctctcaaatgttgacggtggaccatctgcgaaatttctcgtttccaatgtgcacacgatgagcgagctgaatatggtcggaaattgcttgaaagggtcgaggccaattctctcctttgacccggaatttgatggaaaatcgcacttgaggctcattaaagaacttctcgtcaacgtaacatttcattaacaaatgcagaagtaattgctgtaatttagacattcaaaacaccgaatcatcacccgcgaagtcagccgttcattgaccatgtgattaatttcgcagtgaccgaagatggaaatatttggtaattgggctctgctacactagcagtccatccatcaattcgcttggtttcgtggaccataacttttcttcgaatgtcgagaaccattcattctaactttcatatcagaccaacactcgaatgatgtcaaaaacataagggttgtaaaaatatggtccacgaaactcagagtgcttggatgattggacagtaaactgcaatagagccggatttacttgcgatgtaaataacaagaattgattccacaggttccgaaattatcaagttgccgaaaataatgaactaatggaaattggtaatctttctattgctagaaaaaaagaaaaaaaaaatctagttgaaaaattgtgtacgaattttcatgacaccatttttaaggcccgcgatttgtgcttcaactgatccgtttgtttgacaattctttttgcggagccgtcctttatgacaacccgaattaccaaacgccaaatgcgatcagaagacaaatcaaattgcaaaaggccgctgaatttaaacaaagacaagggcaaagggaagaggggaaagtcaaagaacggatgatcaaagaagtggaaatggaagacccactgggggaagtgtttgacacggaagaaaaaatggaggaggaagagaaaacggaggaaaaagagggaagaagaagaagagggtgaacgcagcaaaagcactggagaagagaattctgaagaagaacaaaaagaaacggaaaagcacgggg

SEQ ID NO: 46914 - DNA, 1975 bp, Heterodera glycines
atggctagctggacctgtatgaaaaattcaggcatgtatccatacatggacgagaggcagggggtcaaaatacgaaatacccccccccccttcctcagaggccaaaatttttagtaattgaaaaaacgctcaaaacttttctgacgactttttctttcacccactttttttgcagcacggtttttctaagggagggagcccgacggtgccgattggcccgtcaggattttcaattatgacgtaatttattagcagattttgtccaaaaaattaccatatttgctactagttttgttaacagattttcattataatgaaatctaacttctaaataaaattcgaaattgatcagatttatttagccataattgcaaaatccaggacaaatctctcgaattttatcgtaaatttttcattattatttgcggacttgactccattgaagctcgccgttggcttaatgcgactgtggttggttcttaaaacttaccaacaagtctaccatagtaatgcattaagtgttctttggttgaatttgatgacggaaataacccaaaatccaacaccatagtgccgttgatcgatggtggaacagagggattcaaaggaaattcacgggtgattattcctttcatgacgccgtgtattcagtgcacgatagatctttacactccccaggttaggttttgtttttgtgtgtttcttatcacgaaatgcaattcatataagaaatcatatattaatacgatctaaaaaaaatttatttgaatctatttcaggtcaactttccgttgtgtacaattgctcacacacctcggcttcctgagcattgtgtggaatatgtaaaagttgtgctttgggaaaaggagaagccttttgggcaaggtgaaaatggtaaataactccatcaccattttccatttccatagacgttaaattggatgctgatgaccctgctcatgtcgaatgggctttccgtgctgctcaacaacgcgcgaatgagtatgaaataaaggatgtcgatttgcgactcacccaaggcgtgctcaaacgtataatcccggcagtggcttcaaccaatgccatcatagcgggttttatttttgttttttaaagctaacgttatatatctcaggaagctgtgctcttgaggcattgaaactggcatcaaagtaagcattcagtggcagcaatttcacattagaataactgtttgactcacaattgttggtgtttatttgtttttttatactggggttcgtctactcatttccctaaaaatagtttcaaaaaccgtgaaaactaaaacgcactatcaaacttatttaagcatctcatgttctctgaacaattacttgaactttgctaacgtggaaggtatctgtttcaacgttgttgcattggaacgtgatcccgaatgtttggtctgcggtcagaaatctgtccaaatgtattccgtgcgcgaggactgtacactctcaggctttttagatgacttgaaagacaaatagtaaggctaaaaaatacttatggagaatgtgaatactgcttttgcagccaacttcagaatccttccattcgagcgggtagcactttcctgtatgaaatcaacactcttatgccagaaatggagacagcaagtcggaagaatttgtgtaagacgctcaagggttagttaaaacaatctttaaatatttttcgaataaagcgaatagttatatagcacacttaccgtctatattttttatccttaaaagtttttgttgtaattgaagcttttagaacttcatgtcaccgaggatagcgaactgcttgtagcggatgaagcattaacgagatctattgtttttcggatcaaatattccaaataaattttattcgaatgtccgataaatatctctgaaggcattttgatttaagggctcgcagatttgataagggaaaagtgcaatcggaaacaaaacacgaaaataaa

SEQ ID NO: 46915 - DNA, 3047 bp, Heterodera glycines
atgaacattcccaccaacggcgatgaatatttggaccgaggcgagtcggctaaaagggagaaacgattcgtattcgaatgtgcgtgggaagtggtgaacaaaggtggggagaaccgaacccggcatcgctactctttcgagagttcttaaattaagttggaggcatttacactgtcctgcggacgaaggcgccgattagcacagacgaactaggcgaccagtattacatgatggttggtggacagcaccaaatggaaggggaatcaaatcaacaaacattacacgaacccgaagggttcatggtccattaatatatgtttcgttcgatactctttttggaattttattcccgagttcgaacaaaaaataattaaaatttaagggtccctacgtggaggaaagagttcgcctggaagtggaggtgttggagccggagactgcaaatctcaagtacacgttggaccaaatgtatgactggggtttccgcgttgtgtacgggcggtggctgattgacggatatccgaaagtgttgctgtttgatgttgggtccgccgcttggaaattggatacatggaaacatgaggtgatagataacacgccaattatttccttgctttttcctctggtaacaactttatcactaatttgtgtaattttttgtttactattttgtccaaaaaatgaccattatattactttttgtgttaaattttaaaaaatagggaattttgagtccgacgttgcggacaggcgcctcgggaaaaaggaaaattttaaagaaaaaattagccaattattccttgctacatgtcaccttttcaaatggttcgtttaacgagaaatgaccattgttggtaatttaaacaaaaatattgctttttcacgtatcttttcctattttagttgtgggaaaagtgcagtatcggtgttccgttcctcgaccgcgaggccaatgattgcatcattttcggctttttagtggcaatatttctcaaatcgtttttggactcatccgaaaatttccaaccgaatgttgctgctcattttcacgaatggcaagctggcattgggctgattatgaccaggcaattaatcattcactatttattccatcaaattccaacattttgatgtttttcagaatttggaagttgaacatcgccactttattcaccacccacgccactcttctcggccgccatttgtgcgcctccggggccgacctttacaataatttggccatggttttattcaaagtgtctcttttaattccataaagtcgcattttgcagtttgacatcgatcgagaggctggtcgtctgcagatttaccaccgttactgcttggagagggccgctgtgaacatggcgcacgtgttcaccaccgtcagcgaaatcaccggcctcgaggcggaacatttgctgaagcgaaagccggacactctgacgcccaacggactcaatgtggtcaaattcgcggcgctgcacgaatttcagaatttgcacgctcaaaacaaagagaaaatccacgactttatcaggggacacttttacgggtgcttttttccatttttaattacgttttcatttgttgtgccttttaagtcacatgaacttcgacttggacaggacactttaccttttcaccgctggtcggtatgagttctgcaataaaggcggcgatttgttcatcgattcccttgccaagctgaattacatgctcaaagttggtcccccccccccaatccttttttattgtaatttattgtttccattgcatttacttttgcaccaaatgttaatggtttcagacctctgaggacaaacgagtgaaaggtgtgactgtaattgcctttatcatttacccggccaacgccaattcgttcaatgtcgactctttgcgaggccaggcggtgtgcaaacagctgaaagaaaccatttcgaaggtgaaggatagcattgcggcgcggatgttcgactcgtgtttacggtaagttgtgatgggctgcaaaataaattttttggaggaatttcccaaaaaagaatttttcttatttatttttattaatttttaaaaagactataatttttcctcaaatgttagaaaagcaaaactatagttttttttaaatattttgtgaactgcttccctttgtaatgtgtgtgtttaagacgtatttgttttcagcggtagaatcccggacatggaggaacttttgttgccggctgaacgtgtccaattgaaacggtgcattctctcgtcaaaggtgttgtttttgttattcttactatttcctaaattcccaattttccaaaattcaaattcaccattcaatgaaacacacttgtttttgtttaagcgtgacactttgcccccgatttgtacccataacatggtggacgatgccaatgaccaagtgttgaacgctttccgtcgttgccatctgttcaatgaagagagtgaccgagtaaaggtacccattcgaatatttcatgggaatcggaatttgttataagactttccaactttcgacaggtgatcttccatcccgagtttctgagttcggtctctccgctgatcggattggattacgaggactttgtacggggctgtcacctcggcgttttcccctcttattatgagccgtggggatacactcctggtaaatattttgctgtccggacaatcagtcgatttctacttgccatggccattttttattaaaatttattagcggaatgcactgttatggggattccgtcagtgaccaccaatttgtccggcttcggctcgtttatcgagaaacaagttcctgaccacgacaactacgggctgtacatcgtggatcggaagaaccgaagcccggacgaatcaattcagcaactttcctccattctttacagctattggttggctattttgattatttgtcacttttcaactgcaaaatgttctcttttagcgcattgtcgcgccgtcaacgagtgatcattcgaaatcgggcagaacgcgtcagcgaattgttggattggaaaacattgggcgga

SEQ ID NO: 46916 - DNA, 1804 bp, Heterodera glycines
cataaatttggcaaaagttcggaatttgacctgacaaaatagagactgccttccccaatgctctcagatgggtctccctccccccaaaagcccttcccaattagcccttcctccgctcagtttgcttattcctcctccgttgattatgcgctgattgcttttggtacggtcgcttctgtgctccacggggccggcttccccttactttcgattgttctcggtgggatgacctcaggtagaatgttttgggttttccatagatttttcttcattttttagtttttttgagggccgaaaattccgattttgttcatggccaaacgccgcgtcaaaatgctactaattcctctgccatttcgccaatttcaaagtgaaagtgaaaaacaaattcgcaatttccttttttaaagagaggaattccaatcggaagtggccgctttctccgtgtactatttggtcttgggtttcgtcatgttcgtcacttcttacatccaggcaatctttcgatgccaaacattgccaattccctcctcattgtcagatcgcttgttgggaggcggtggcagagagagttgcccatcggcttcgtcatacttatttgaaagcgcttctccgccaggaaatcgcttggtttgacaccgttcagtccggcaatttgacggcccgcctttcggagtgaccgaccgactgatcattttttgtcaccgcttttccaatttagcgatttggagagagtgcgcgaaggcctcggggacaaagcgtcgctattcatccaaatgttctccgctttcgtcgccggcttcgtcgtcggctttttctacaattggcaaatggccctggtcatggtcagaatattccttctctttctccatttgcgttgcgtttgcccctaaaggcacttttcaccccggccattgccttcaccggcgcgtggatgggacgaatcaccgccacacggacgcaagtggagcaggagaaatacgcagtggcaggtgcaattgcggaggaaacattcagctcaatgcggacaattcatgcgctgaacgcggaacggcaggaaatggaaaggcacaaaaagggggaaaataccaaaaatggaaagggaaacgaatcaaaacgcgaatgaaaaggaacagaagaaaattaactcttttgcttaggtatgaaaaggcgttggaggacgggcggaggacggggctgctcaaatacctttacatgtccgtcggcttcggtgccacccatttgatcactcacgcgtcttacgccgtcgctttttggtccctcccccgtggtttttttttcaaattgacatcgctttaggttcgcttctcgtctcatcgtgtgggatgagcaatttgatcgcggcaccgttttcattgtttttttctccgttatgagcggctccaccgccctcggggcggcgctgccaaattttacgagcatttcaagcgcaaaaggggcggcacggcacgtgctcaaagtgatcaacagagtgagtttgatgatacatgctcaaaagtgggttcttattcatctatgaatatctatgaattcaattgcgattctttccctttttaaaatttgcttttttttgaaaggaaccgaaaatcgacgcttattccgaaggtggtcaaatgctgcgagaagtcaaaggcgaaatttgcttccgaaatgtgcgctttgcttaccctttgagaagagacatcgaagtgagtgtttttcagtgcgtccgaatgagtcccaattcccttttctttttaaggttctcaaaggcgtctctttcaaagtttgtcccggcaaaaag

SEQ ID NO: 46917 - DNA, 3659 bp, Heterodera glycines
  unsure (1)..(3659): unsure at all n locations
ttggcatttctctgcctgctgttggcattattggtgggcatcgatgctcagcaaagtcaatgggagcagaagcagaacagtgcagcaccngcgagggttggcaaggtgaaaacaaaacttttgtcaaggaaaaaacaatttcaataattagcgaattctaatttcaacttctgcctcttcagatttagttttaattaaagattcaaaagttttctgttcggtgaaaaataattttgtagggaattcgaatttattatattttagcttttttgattaaagtttttcttgcttaatttagaacttaaaattgctttaaaatccaataaaaattaaaactaatactttacaacctaaaaatttctcgaaaaatctccgagaatgaaaaaaattaaaaaataataaaagagaaaagattacttaaaaacgatatccttaaaaaattttcaaaatcacctttttaaattctttttttatagtgtgacattgcgccggatggacaccgtccgctcgcggctggcagccgccggttcactcgtccaattccgtaagcatttgcgccaggcgctgcgccaacgcttggaccgtctgtacagtgacaaaatggcacgcgcagacgtggcatttgacaccgatgccgcggcaagggaaggcattgacgaagtgttgcgcaattacatggatgtgggtttcaaaactaacaatagtaatgaatttaatatattcttacaggttaaaaatggttttcaattaagggactaaaatctttaaacggcacaaaaaatttctttttcgaattgctatttaaaagaagacttttaaatttatataatgtgaaattgaaataaaaaattttaatttaatttaataaaatattaaaatttaaattcaagcgtaaataaaatttcaggctcaatattatggtgacatttctattggctctccaccgcaaaacttcaccgtgattttcgacaccggttcctcaaatctttgggtgccgtccaaaaaatgctcatttttcgacctcgcatgccgtaaatttagtttttcatgagaaattttaaaaactttaaccattcaggctaccatagtaaatatgaccacaaaaaatcgtccacctatcagccggacggacgcgaagtggcaattgaatacggtaccggatcaatgaaagggtacggtaaatttctaataaaattatttctttaatatattgatcattaaaataatgtaatgcttttttcaaattaagcttcgtctccaaggacacggtttgcattatggacggtatgtgtgtggaaggtcaggaattcgcggaggcgacaaggtcggattacatatgcataagaatatgtctaataaattaaaaacattgaaaatataaaaatcattcattgggattgataagagaaaaataggcaattaaaatatgttgcaaataatatttaaatttattggtatgggaaattttttttataatattcgaaaaatatatattttttcaaagggagtgggattttttagaattcatattttacaattagagtccgcccgttttgctcctttccttccgcgtcacttacatatgtataatgggaattggtccacagggattgaattttgcttttgatgctccataattttttgatatttgctatgagcgcgtaatagtaaaattcatagtcgaaataccaaatttatacccactttccgacttacagttcttcgcatcctttcacttgtttgagttcttaaaaattgttagacagacgattttgaagggtgcatttattgctcaatgagaagctgaaaattacaaaaaattatgccaaataattcagaaattttctctatttaaattttaagtgaaccaggcgacacttttgtaaacacaaaagctgacggcattctcggcatggcttacccggcaatttctgtgcagaaattggcaactgttttcaacaatttggttgagcagaaagaagtggaggagccggtgtttgcattttggcttaatcggtcagttaattgacaatttaaaatataagaaaagtcggtgaaataaaaaggaatttcaaaccgaagaaatgtttttagtgacccttcgtccgaatttggtggccaaatgaccgtcggtggcatggacaaacgccgttttgtggaaccaattaattatgtgccggtcactcgccaaacttattggcagttcaaagtaaggatggaataaggttttttgaaaaaaataaaacgtatgacaaatttcaaagatggactcggtcactggcggacaaaatggcaaaagcaaaattgcatgccgaaacgggtgccaagcaatcgctgacacgggttggaattgcaaaaatgttttaatatttattttgtttttaattttatgtttgtccaggcacttctctgatcactggacctcagaaggacgtggaagccatccacaaacacattggtgccaccgaacttgcgcagggcgaagtcatttaaaaaaaatttatgtctgagtgattacgggactaaatttgagattatctcaaatgggtctttattagatatttaaaaattaaaatttgattgatcattcggaagccctacacgtttagatgcataaattcaacagcttataaaaaagttgaaacatgaatactaccaaaaagtcagaatttttgcatattcttttttacatgtcggttatctttgtgttttttgggaagccgatagagcttgttaagagcatttgaatgataccaagtttattggaattggttaacaaataaaaaagttatgatgctctaaacttggctcagactataccggccagactatagtgtctcagtccgaataattttttaattgaatgcactcgtttttatgggtagaccgagttttatagaacaaaatttcgatagttttgaagacaaacttttttgttgcccaattcatattctaaatttatttatttacttttgtttaaattattttgtcaacaataacataaaaatatttttacaattttgttacagtacaccttgccctgtgacagtatcgagcaacttccccacatttcgttcaacatcggcggcaaggcgtacacattgacgggcaaagactatgtgtggaaggtcaactcacgggggaaaacaagctgcctgtaaattggaaaaaccaaatgaaaattttgaagttttccactttctcatttcagctccggcttcatgggcatggaaatgtcatcgactgctgacaaattgtggatccttggcgatgtgtttataggtgaatggatggcatgattattttttaaattatcaccaaaatttgcgtaaattcgtcaatttctgttgaaatttttgtctttaggccgctattatacagtgtttgatgcgggccaaaaccgtgtcggttttgcgcaggcaaaggacgaaaatgagtgagttcaataacaactcaaatgccaaatttaaaattttcctttttaaccttgaacatgaacaattttcaattctggaaatgtcttaaaaattaaaatttttagttttatatattttaaatatttttttaaataattaaaatgcacttttagcgagcccatagaaccaaaagtggacgacaatgatgatgctgatgatgcggatgatgatgggatgccggca

SEQ ID NO: 46918 - DNA, 1216 bp, Heterodera glycines
atgcttcacctaaaaacaaaaccacaggttggactgacaaactatgccgcagcttacgctaccggacttttgttggcacgtcgccacctgaacaaattgaaattggacagcgtttataaaggcaaagaaaatgtggacggagaggactttgacgttgagcaggtttgttaacacagcaaacttttcaacactgctttttattgaaactttgattttcctcaatgtcttttcatttaggaaggggacaatccgaacccgttcacatgtgtgctggacactgggctcgcccgcacaaccaccggcgcaaaactgttcggagtcatgaaaggagttgcggacggtggcattcacgtgcctcataggtgagcaatgggaagaaacgtggaccgactgttgccgaaattttggcttcttttctttaaatccagcctgagttcacttatttgttcccttttccattcaagtgagactcgtttctttggctatgacccggaagagaaaaagtacagcgcagaagcccacagagaccgcatttttgggaaacacgtggctgactacatggcccacctgaaggaagaggacgaggaagcgtacaagcgtcagttctcccagttcatcaagaatggcatcgagtcgggaacggtcagttttatttgggacagagggaataatattatcatacacagacagccattaaatggtgggtcatttatgaacacccaaaattgaatgatcggtgttaaatgattatttgatgctctttttagttggaagaaatgtataagaaagcgcacgaggccatccgcgcggatccgtccttcacgaaaaaggaaccaaagaagccaaaggagcaaaaacattggaacaaaaagaagtacacactgaccgagcgcaaacaccgtgtggccaaccgaaaggtgcagctttcagtatttttatttttgtctaattttcatcttttaggcgtatctgttgcatctgaaaaaccagcaggaggcagcgttggaaggctgaaaaaagcgattgacctatttgagagtgattgctctttctcaatttttatttgttgttttgtggtgagagagaaaaatttgttgtttgcttttttggcaattttttccaattcaaatgccttgatctggcgctaaattttgttggtttatttgacctcgtttatttggcaattgtgaagattattggtcccacaaaaaaaaga

SEQ ID NO: 46919 - DNA, 1435 bp, Heterodera glycines; identical to SEQ ID NO: 11030

SEQ ID NO: 46920 - DNA, 119 bp, Heterodera glycines
atggaacgccttgaggcggtggtgcacgaacggaacgacgcctttttgcagttggagacgggcgacagcgcgtcgcccccgaaaaggacggtcacttccttcatgggattcacctacga

SEQ ID NO: 46921 - DNA, 771 bp, Heterodera glycines
atgccctcgccgttcccgctcagtctgtacacaaaagcatttgaggtgcaggaaacactgaacgaactgtacttccgcatctcctgtgaccacgagttcctgctcgagacgtacaaagacgtgatcaaggtacagtgtacggattacggtatactgtcctaatcaggcccgtagcaaaattaaaaaatttcggagggaagaagaaccctgcttagggccaaaaaattctttttctccagcttatttttcaaaaatttcaatgccggagcgaaaaagcagaaatttatagcggttttatgccaaaaaattcaaaattttgccattttctattaagttttcggaaaaaatcgaaaattttgaaattttcaagggcgacccgtacatcaaacgatgcgtggaaattgcgcagcaaatccatgacgaaggagtgcaccaaccgttggcgctcagtgtccaacgtgccgattatttgtcccattgggacgagcagaagcaatgcattgagctgaaacaggttgggaaaagcgatcgatcaaaaaaacattcattttctgatcagaggtgatcagttggaagttttgaaaaattttgcattttgaagattgatagacgttatgccaaaatattttgctgccaaatttgaaagcaaaaaacttcatttgatcagtgaggtgatcagaaatggaagaaccgaggagactctcggcacttccctactggtcagagaccgttagctaggcatatgtaggaagaatctatcattagaataaa

SEQ ID NO: 46922 - DNA, 1397 bp, Heterodera glycines
atgacctttcacaaaattgacgcgagtagcatcgattcgattaccaatgccgttgattttttcagtatacccccgacaaatgttaccgtatcatcgtcaaaggttttcgagattttgccgagtaatccactcaccgacactccttatcattttaaaatacactcgagccaaaactacattgacctgtcaaagtgttaccttttgaccgaatttcgaatgcgaaaattgacacccccaaatggtgaatggggacatttggatgcttctgatcaggttgtaccgatacaattgatcgggcacaccttcatgcgggacctgaaaattgcaataaacggtcgtgaaattttcaattctaattcactgatggcatataaaacttatctttctcatgaactttcgcaatcacttgaagctaaagtttcgcatttaactgctgctggatacgaccgtgaagatgctagtaatctacaaaacgcaaattccgaagggttcaaaagtagaagacaacggtatttgggaggtcgaacagcacaatacattgcaaaaatcgatgccgatcttttcaatgtaccccaatatttgattaatcattgtgaaattgacataacgatacaaccccatgacgacaactttttgttaattgacaccttagacccccctggtcaaccatatagccttgagcttgttggattgaaactctactgtaaaaaagtcagtcttatggatggtttggctcttgagttggcgaaaaaattggaaatgaaaccagcacggtatgctgtacgaaagacaatgatgaaagcattgttcataagcccaggacgctatgaatttaatgcaaacttgttcatggaccaagttccacgccgcgtaacaatgggacttgtcgcaaattcagattatgtggggaacatcaaaaggagcccattcaactttcagcactttaatgtacgggagttaagtgttgtggccaatggtcgctcctatccccaggcaccgtatgacattgactatgaaaattggaaatttgttcgtccctacaatgacacgcaggaggcgcttggttttgccaactctacatatggaaatggaattgattacttttcttttttgcacactcactgtatttatgtgtttaatatgacaaacagcggcgacgatcatggcggtttatttgatctaatcaaaaaagtctgtacagcagtgaacattaaattcaaaaaaccagtacccgatggtggaataacacttattgtgatgggtgaagcggactctatttactttttggataaaaaccgaacgattgcaaccgatacaaccatttgataaaaatgtaccaaattttacttgcttccatattttttcaaccaattgtttcattgattgttgaagaagga

SEQ ID NO: 46923 - DNA, 3010 bp, Heterodera glycines
atgcaagtgaagaatcacatgtgggtgttcgtcaattcgttgatcgaaaatccgtcgttcgactcgcaaaccaaagagactttgacactgcaagccaaaagtttcgggtcgaagtgcgatgtgagtgaaaaattcatgaaagaagctgcgaaatgtggagttgtggatttggtgctgaattgggtgactttcaaagaaaatcagcaaaaggacaagacgagcggacgaaagacggcgaaactgaaggtaaattattactgaatccctattattagactgacaattatgtaaatattttccaaatttagggcgttgcaaaattggaggatgccaacgaggctggcacgaaaaactcgaagcggtgcacattgattctcaccgagggagattcggccaaaactttggctgtcgcaggactcggagtgattggtcgagattattatggagtttttcctctccgtggtaaattgctcaatgttcgggaagcgagtcataagcaggttcgaaaatgcatctctattttgctatatttttttcacaatagataatggaaaacgccgaaatttgcaatatgatcaaaatcatcggtctccaatacaaaaagaagtatgactccgagcaggacatcgaatcccttcgttacgggaaaataatgatcatggctgatcaggtgaaagaaattgctgaagtggaaacaaaacaaatgggtcatcatttaggaccaagacgggtcgcacatcaaaggattggtcatcaacttcatccattccaattggccttcacttatcaaacggaatttcgtggaagaattcatcacaccaattgtaaaggcgacaaagggcaaagaggagaaatgcttttattccatcccggaatacattgagtggaggaaaggcacggagaattggaagagttggaagataaaatactacaagggtttgtattcttttgggtttctcaaatatatcattttgctacccttagggttgggtacatccacctctaaggaagccaaggaatacttctcgaatatgttgcgacatcgaattccttttcgctataaggatgacacggatgatggcgccattgaattggctttttcgaaaaagaaaatcgaagagcgcaaagtgtggttgacaagttggatggaagtgcgtttttgatcattttgggtgaaataaaaactgaatttgtcaggagagaaagcagcgtcgtgaacaaggagaacatgacatttacttgtacaataaggacactcgaagtgtcactttcgcggagttcataaacaaggaattggtgttgttttccaatacggacaatgaacgttcaattcccagtttggtcgatggtctaaaacctggccaacgcaaagtgcgtgaaattatttttatccattttttgcaatccaaatgttctctgtttaggtccttttcacctgcttcaaacgtgcggacaaaaaagaagtgaaagtcgctcaattggccggtgctgtcggtgaaatgtccgcttaccatcacggagagcaatcgctaatgagcacaattgtgaacttggcacaaaactttgtcgggtctaacaacataaatcttttgctgcccattggtcagtttggcacgcgacttcagggaggcaaagactcagcttcgccacgttacattttcacgcaactcaagtacttttgaagcttttctgatactaatttaaaatattctaatgtttaagccccgtgaccaaagcgctttttccttcggtcgatgaaaacgttctccgttttctctacgaggagaaccaacgcattgagccagaatggtattgccctgtaattccaactgttcttgtgaatggggctgaaggaatcgggactggatggtcgacgaatgttccgaattacaacccacgggttttggtggccaacatgcgtcgattaattcactctgaacagcttgaaccaatggttgaatatatgtaacaatattataattgcatatgttttccagattccgtggtacaaggggtttaagggtcgcattactcgaatggacgaaactcggtttgagacccgtggtctgataaatatcattgacaatgggagtaacgacttggtggaaattacggaactgcccatcaaaacatggactcagtcttacaaggaacgagttattgagccgatgtatgatggatccgacaagaaaccacaattattgcaagactacaaggagtatcacacggaccaaaatgtgcattttgtatgcaaattgaaacaggacgaacttcgcgaagccgaacagaagggaatttatgatgtgttcagcctgaagtcatcagttaataccagcaacatggtgagtttcttggaattaaaacaatgaatgtttaactcaaaggtcctttttgacgctgccggatgtctaaggaagttcgactcgcccgagcagatttgcctggaattcttcgagtgccgcagggaattgtacaagaagcgcaaacgctacctcgaaggaatgctgcaagcgcaaagcgaccaactcagtgaaaaggcacgcttcatagtgatgaagatcaaaaacgagatacacatcgaaaacaaacggaaatcggctatcgtagagcagctgcagaagcacaagttcagaccggatccggtgaaacggtggaaggacgaacagaagcggaaagagttggagctgtgcggagaggcaaatgtgtcagacgacgaagaggacgtaagaaaacttaattagtaaattcattaaaaccctaactgaacgactggacacaacaggaagacgaacatgcggaccaagcagttgatgaggccttggagaagcgctgctctgattatgactaccttgttgggatggccatctggaaactctccatggaagacaaagacaaacttttggcagaaagtgaatcaaagaagaaggaacttgaagtgttgaagaagaaggaatggtcggatttgtatgaggaggatctcgaagcttttaccaaagcattggatacacag

SEQ ID NO: 46924 - DNA, 1804 bp, Heterodera glycines
tttttcacgcgacttttgccgcccatcgctttctccgccatttattccgcgctgtttacaaaacccaatcgaattgcgcgcattttggcgggcagcaaaaagcgcattttgaccaaaaagccgcgcttcctcagcactttcagtcaggtggagcaacgatggggggggggggcaaagagatcgacgaacactccgatcaccgggggttttaaatacttgtgctgtaccattttcgacaaaattaccaaatcttttcgttcaaccttccggtttgacattccaaaaattgcgtcgacacactgttcaacccaagtatttcggtatagttagaatggtgatccttttagctgtttataaaaaggataaaagatatattagatggggtgcgtatttttttctttttctcttgttgtttgaatctccaattttatatgctattttttgtcgaggaaaattaataactgtttaattatgcaaaattaaaatatacaggtagtaatcacgtggtccttggtgggtgttcagtgcgcaattgttgctgtcagtgtgatggaggagatgcctcaggcggggttcgaccccaatttgatgccggtaattatcccattaaactttaatttaataaatttttaaattaatgcttcatttttcattagcgtcgcatgtttctgatctgttccatttccacgcgtgcatttctcgcccctttcgtgtggaatttcattctgattctcttctgcactttgtacgccttcaaaacgcgcaatttgccggagaatttcaacgaggccaaattcatcggattcacaatgcaagtttatttttttgttgacattcatttgcttatttcttaaatctttgatttaattgccattttgccaatttaaggtactgtaccttggttacttggggcgcgttcgttgtactgtatgtgaacgccgtaaacaaggtgagaagcaagaatgggcacagacaaaattcctatcgtactgtatcccactattttcaaacccgcctgttcaattttgacggcctcactcaattcactgatctatgctttgtataataaatgaaatgctaattcacaattaattagttatcgacctcattactcacccaattagttccccctccatcttcgtcactttttccctctccaaaggcattgaccgccagtttcactttttctctgtccgcttcaattgcgctttgtctgctgttcttccccaaagtcttcatcattttgcttcggcccgagaagaatgtgcgctcctcctacaccaccaccaaattgatccgttgccatttcggcaattcgcaggcgctcaacgacagcaaacagttctcatcatcgaaggcgcgcaacagcacacaatcgctgtcacttgggtcagtggacaaaacaatgggaaaattggggaaaacttaaaatttaattattgaaaaacttaaaggcgttgaaaatttgttacacagaaacccttcagttttacgcttagttgcccaacgcggaccgcctcgttgcacgtggccaaccacaacagcgtggccggcacgccgaccagcgggctttgcccgcgcagggacgcctttgcgcagactgaattgtccacaattgtccgcagtaatcatcatcaacaggcgcggcaacgtcaccacggcaccggaggatttgcacgcttcacgcgcaccttttccgtgatgggcggcacccacggcgggtacggacggacaacgccgcagcggtgcaacgggcaggtgaccgattgtccgagtcgagagggggagggagcggatccagtct

SEQ ID NO: 46925 - DNA, 1700 bp, Heterodera glycines
aagacaccgacgaaggacaaaaacagcagtattgtgtaacggaaattgaacacgacccaaaaattttgcttgaacgtagtcaggatgccacagattgggcactgtccaatgggctgatcaaattagtgccggcaatgtgccaaaattgcagaataaaaatgcaaaatgttaattaataaagaaattaaaataaaactttaaattacattttcagcaaagcttcgtcgctgaatttattccaatttctttgtatccatcgccatttcccggcaaattatttcgacaagccatggaagtgcacaaagtaatcactttaagggtgaacagtagattgtgcgggaccgggacctggtactgaaaaaacgtacaactgagtacctaagtccaggttttgaccgggaccgggaaaagtcccgattttttcgcggttttcccagccaaaaagtcccgggttttcaacccgaaaagtcccggtcacggtttttctcaaaattcccggtcccgtacaactctagtaaaaagcttaaattaattaaattatttcgtcatattcgcgatattttttttccgaataaaaattgaagcaaactttaattttcaaaattaaatttaaataaaaatttcttcaattctccgattgatttgccattgaatttcacaggcaatgcttttgctgtattttcgcgcctcccaagattttgcttttttgaaagaaacgcatcgccaattagtggaaagtaatgaagacaacaaaataaagaaaatgatctcactgcttgacggtctttatgaggaaggcatcaaacaaccggtggcaatgttttgccaaagatcggtaggaaaatgccaaaaattaaatgataattcaacattaatcaaaattatttttaattatttttacctaaaattaattatatttttaagtgaataatgttaaatagagataacatttataggcactaaaaaccgccaaaataggtaggctttaggctctaaaaaaccccaaaaataggcactaaaaaatggaagataggcactaaaaatcctcaaatttagggggtgtaaaatgacaaaatgtattcgaaaaaagtaaaaaaaaattaggccaatattgagataaataatttttaaatcacaaattcttgtcaagaaaataaataaataaaatttggagatgaatttttgaaaaaattttttatttcttaggggtgtatttttgaaaattttcgggtcgattcttagagatgtattttttgaaaaaaaattaggtcgatgcttaggggtgtatttttcgtctttattgcatttttattaacaaattttggactcaggaaaaaatagccttttgcctaaaaatgttatccctaattttaaataactaattttacatttatcaaaaggattacatggcgagtcaaaacgatgatggagagtatttgctaaagcaggtgattacatattaaaaacaacaattaatggataatttctttaaaagaaatttttttaaaaattattcactaagataaaaaactaacaaaataaaaaataaagaaatttgaattaaaacaactaaaaaatttaaattaaaaaaaaacgaaaactgaaaataaattttaaaaaaactcataacgtttcagcatcttggtcccattctgtccccgggtaacctcgatcgagatcaacctaggctttttggttga

SEQ ID NO: 46926 - DNA, 681 bp, Heterodera glycines
ggttgtttcaattattgttaattaaaaaaatcaaaagaaagcgccaaaatgaaagacgtgctcattctgcacaacattaatcaggtagatccaagagatttgtattgaatggtttaagtgtttggaggtgcggggcgggggtgaaaggacagacaattgcagtaatatttgccactgattgtttctttgatttcacacagattgttcaagtggtggacgatgatcggactttttgtttattgggtgatcaaatggggaaaatcaaagtgatgctaattccaaaattctcacataaaaatttcttaattcaaaagataatggaatcagatggccacgaattggccattctttgcatcgaaggacgaattgagcaaattggcatttttgaagaggtcgaaaataaagtgctgtaaaattcataaactcaggcgcagatttcttcccgattcaactcgaaagaattgaccgatgtgacgagggtggactgtgggggagggagtgttctgccgggcatggcggacgcccattcccacccggtgggaacaagccatttcaaagggatttgatcacaaaacaacttaacaaaaaaaaaggtgttctctggcgatcgggtgcatgaatttgcgatgaaactcgctggtgaaacttatatggaagtaccgatggaagcaaagaaaagaa

SEQ ID NO: 46927 - DNA, 563 bp, Heterodera glycines
atgttcgacaagaacaatcacgggtacatcatggccacgcaaattggccaaataatgcgggcaatggaccaggactttgaggagaagaagctgcgcaaactgatcagaaagtttgacgcggacgggtcgggcaaattggaatttgaggaattctgcgcattggtaaaaaagggggggggcgatatggtaccggggggaaacgtttgatgaaccaacgacaggtgtatacggtagcaaattcggtggacaaagagacgttgcgcagagagctgagggaggcatttcgaatcttcgacagggaggtgggcagaagcagggggtttatccgatggaaggccaactttttatttgaacactcaaaaaacattcattccccggagcaataaatcgtcgggtcattaattaggctaattaacccagggcaatggctatttgtccaccgacactttgaagaatttgctgcgagaaattgagccatctctgagtgacaaagagctccaatcggcggtggaggacattgacgaggacggatcgggcaaaatcgaattcgaaggtggcgaaat

SEQ ID NO: 46928 - DNA, 1059 bp, Heterodera glycines
atgtttaaaattttcgttttattcaacgcttttttgctgatcaaattcgcaataactgatgaggaacgagaaattcctcccggtggagaggttgaacaggatgtaaatagcgagatgattaaggtaaaggaaacaagtaattaaaagcgaattctcgagagtctcagcttcaaatcgagaaaaaaatggctcaaaatcgcaaactttggttattttttagacaaaattatttcggttgaaccccccccccccccgtccccttctgtaatggtcttttgaaccctggtctcgaattcgtctctaatttcgggctcgcgcatcgctagtgattaattgaaataatttggcaaaattccttaattaattatttttgtttaattaagacgctcgcctctcgtgcgatggacaaaatgaatcaagagtccaacaatacgctcatgtttatccctgtgaaggtgctcagtgccacatcacaacccgtagctggagtaagatatgaactgcgcattttggtcggaaagtcaaaatgcttgaaaaaggtaagtgcaaaatggggagaaattggcacaaaaatgggcaagtcggcactgtaatttttttttttgggggggggggggggaaatttctggactgacagtttaaatcggatttgtatcgagattactttttgttttccaaaagtcgtattgctcattattgggagggataaatgtgaaatttaaaaaacaaattttataaaagtaaagttaaatacaattttgatttaaaatgtagtttttaaagcagccaaaggcgaagaagtgcataaaatatgaaaaagaaactgaccgggcagcacgaaaggcatggacataattaaataaattaatacttaattacatgctaattagactaattgtatattcttcaggtctataaagtggaggtgtaccaacgagcttgggaaaactttgaggagattacattcgaacaagaaaaaattgcaaatatgacaggatgtttgggataaagttgattatcaattaccaaattggacatgttaaagtgccaccatgttga

SEQ ID NO: 46929 - DNA, 2038 bp, Heterodera glycines
atgggaattgtgcaggacacattgaccgcagttcgaatgatgactaaacgcgacgtttttattgattacgctcgtctcatggatttgttgatgcatttgccaaattgggatggaaaaattccgcagccagcgataatcaaacccaagccactttggaccggaaaacaagtgtttacaaagataattccaggttttgtcaaatgaaacttttcctccattctttgttttgttctaactaaggcagtgtcaatgttatccgaacacattcgacccatccggacgacgaagacagcggaccatacaaatggatttcccctggcgacaccaaagtgctcattgagaacagcgaacttctctctgggataatttgttccaaaactgttggcagaggttccggaaaccttcttcacattgtcgcattagaattgggtcatcaaattgctgccgagttatatgccaacatacaaactgttataaacgcatggcttctcgccgagggacacaccattggaattggtttccaattttactttacaataattttgttcaactctcaggtgacacaattgctgatacttccacctacagagatatccaggagaccataagaaaggccaaacaggatgtcattgatgttatcgagaaagctcacaacgatgatctcgagccgactcccgggaacacacttcgacagactttcgaaaaccatgtcaaccgaattctcaatgatgctcgagatagaaccggagcttcggcacaaaaatctttgtcggatgcgaataattttaaggcgatggtcgttgcgggatcaaaaggatccaaaatcaacatttcccaggtcgctcaatacaaaagtgttttttattgttaatttaatcattcaaggtgattgcctgtgtcggtcagcaaaatgttgaaggaaaacgaattccatttggatttcggcacagaacccttcctcattttattaaagatgattacggacctggtaactctaaacagtactttcgttaggttttgccatttatttacagaatcgaaagggttcgtcgaaaactcttacctcgccggactaacaccggctgagttctttttccatgcaatgggaggtcgtgaaggactgatcgacacagctgtcaaaactgcggaaacgggctacatccaaagacgtttaatcaaggcaatggaaagcgtgatggtcaattacgatggcactgttcggaattcgtctgggtatacagttttcctttattttttaataaaggaaatgctacaaatagggctgttattcaattacgttacggcgaagatggactggatggcatgtgggtggaagaccaaaccgttccaacgcacaagccgaacaacaatttattcgaaaacgagttcaaattggacctcaccgacgaacgacaactgcggaaattatacacagaaaacattgtcaaagaaattactgtaagtaactacaaaaaatcatttcacttatatgactaaatccaagaattctgccgatgctcttcactcggttgagtcggaatggcgaaagttggaggaggacaggaacattttacgttcaatatttcctagaccaagcacgaaagtctatttgccttgcaatttgaacagattaatcaaaaatgcgcaaaaaatctttcatgtttccatgaataaaccagttgatttggtgagttccccaatatttttggcatgtccttttctttatcttccacagagtcctgtccgagtaatcgaaggggtcaccgaattaaccaaaaaactggtcatcgtgtctggagaggattctattagcattcaagcccaacataatgccacactgttgatgaacattttattgcgttcaacactttgtgcaaaacaaatggccaaataccataaattgaatcttgaggcatttgaatggcttcttggcgagatcgaaactcgctttgaccaggcgatttggtgctggtattccatatttatgttttatcgtttaaggctattgcacaaccaggcgaaatggttggcgcattag

SEQ ID NO: 46930 - DNA, 1216 bp, Heterodera glycines
ggacaaatatccgccgtcaaattccatccaatcaaacctgttttggtgacggccaatgtttctggcaacatttcgttgttcgaagtgagtttaaaacagggcacgtgggcaaaataaagtatacggtgcaataatcttggcccctcatttccactattctatttttaggtgtgtaaagacaatacaaatttgaatctgaagagcaaagactcctttctccaaagcgtgcatttcccacgttttcgtcttgaaaatttcgacttttttgatgatggcaattctattttggcaagttctgcgaatcaggtgatggatgaattaatgacgtgctctgaattttgctttttttatttagaatcatctttacacttatggtatggcagtcacccttccgcttttttttctttttcagatcttttaactggcaaagtggcattggtccgtcaaccgataggtccgttgttgaactcaccgttggaaacattttaattccgtgccttttttagtacttgactcccttcggatgcgaatggcccgtctctccggcgatggttcgcttatcggaatgttggccaattcttccgacattttcgttttcgacttcaaagtttttaaattaaatttctataatttaaaactcattagcattaaaatcgcagtcagcaaattttccaaaatgacttctataaaaccgaataagattagactgcacatttaaatttcagacgatggaacatttgcacacttttcgtggtggcgagaacgtcgtcgacttttgttttgctccatttaatagacagattttgtattccctggcaggtgccattttgttttatttctttactttttcgtcattcgttcagtcggtggtgctgtgaacactttcgacttggccaggtgcactggccaggacacattcttcgaccagggctgtgtccgtgccacgtgtctttcgtgcagtccttcgggccaattcatcgcctgcgggtgcgtccgcttggaaactcgggacatttttgtgttaaattaaaccccatttacttttagttctaacacgggaattgtcaatgtttacgacctgacaaaactctctccgagtttggccaagtcgaatgcaccaagaccagtacggatgttcgaccagctgaccactttggtgtcattcgttcgctttaacaacgactcgcaaatgttgggatttggtactgcagtgccg

SEQ ID NO: 46931 - DNA, 2020 bp, Heterodera glycines
gcccccttttcagaccctttacctgcacaatgccgaagtttggtgcgtcaaatttttcccctgcggcaattaccttgcctcgggggccaaaggcaatcaggtgctgatctggcgggtgatcaggtgggcgagtgcaacaatggccaatcaaccgaccgaaacattccagtcccacccaagtgcacatccaccagaacatccacattctgcaggaaattgttggcatttcttccctctcctggagtcaggacagtcgctacttggcggtgaccagcactgagcaggccaacggagtcggggtcggtctttcagtcccttcgtccgtttcacccccccccccccttaagtgtttcatttacttcgtgccaagtggtcgtctcgtcaaggcattcgttcccccgcttctcttccctttcaagactttttgtccttaggagtacgtccattacaccggcgatgcctttaccaccgtcgcctttttcaaagacggctcccacaaattggcatgtgccggcgaaaaaggccattttcatgtttatgtgagcgaatcaatttcaaaataaatttaatccgtaaagtggagggccactgactgaccaacggtactttcccaaattaggacatccatcggcccgaggacagtgccaaaatgttcgaaggttttcgaattcgttgtttatacgcgtgcatggacgggaaaactgttttggcagcggacactcacaacaggtgggaggaggggagaaggaaaagggtacaccccgaaatctcgccgggacaaaatctcgccgcagaaatttcaaaaaaaatttttcaaacggaaaattttcaaggaaaaaattcttagaaagttttttataagaaaatttcaaaaaaaaatatttattaagttttttttgaaatttttcgaaaaaacagtaattatcataaaaattaagaaaaaataatttctttaaattttttcaaaattatctaagaattttttccttgaaaattttctaagttagaaaaaaaaatttgagatttcgggcggcgaaatttcggcggcgagattttgtccagtccccgaataaaggggaagggacactgctaatttatattcaattttttaacaaattaaaattcactaaattttactcggcggcacctatcggtaccccgtggtctcacttaaccataatttttgaaattgacccaaaaataaaatattttgatatatttttttggcgaaaaacgactacaatccacttgagaaaaatatttttgatccgaaagcaaaatagctttgtggtaggctggacaacgtgaaagtaagttttaaccatatacgattttcagaataagggcctacgatttcgaaacgatgcacgagcaaacgctgattcaagaggccagccaaatcatcactttttggtgccattttccctcctccatttctaattttccatcgtttcttcagcgttgaccgaaaagagaagtattgtctggtgactaccaaaaccgagggcattcggttgtgggacttgcggacaaatgacctcgtccgctcttttttcggctcaaaacacaacgaatttgttggcttttcattaaattgggtttaacgggttcatattgcatcagccccccccccctttttgataatggaattgtttaaaaataaccaggaaaatgcctattagaaacctgttgatttgaaacattctcttcttcaggtgatcacttcttctttcggtggtcctgatgaattattcattgcctctggctccgaaggtgtttttgtgcccaattctttcccaattaattgcttcccatcagataacactgtggtcatttggaatacgcgtcggactcacccggtcaagcgactgatcggccacacaagtgggcgaaagcggaagaaatgacttattaaataaagaattaaggcacggtcaacgcggtcagttggaacccggtggacaattcaatggtggcctcgggcagcgatgacggaaccataaagtgggggggggggagg

SEQ ID NO: 46932 - DNA, 920 bp, Heterodera glycines
  unsure (1)..(920): unsure at all n locations
ccaaaaagataatgtgaagagtgaagttggagatgtgcccaatggcgggacgtcattcactgcacagcttagcgacgatttcactatccaagtaaattgggattgggctgtgtgttcactttcattgtggaaatacaaaaatttggagtttcttttcttcagcctttgaaattaaaaattcataagcacttgcctttttaaaattaattttatattttgagtcgaatacgaatgaggtggtcgattcattcgacaacatgcaactcaaggacacattgctgcgtggcatttactcattcggttttgagaaaccatccgcaattcaacaacgtgcaattgttccatgttgttcaggttttttagattcgctttttcattcattccgattcttcttgaatcttccttggctggcccttttttattttttatttttagggcgtgatgtgatcgcgcaagcccaatctggaaccggaaaaacggcaactttctctatttccgttcttcaacgtgtcgatgagaatgcaccggatgttcaggcacttgtgatggcaccaactcgagagttggcccaacaggcaatcccacccactcttcccattggcactctctggacttacttgtctccgtttgacagattcttcttgttatgcgtgcacttggcgagtatatgggggtcaagtttcacacttgcatcggcgggacgagtgtgcgcgacgaccagcgcaaattggaggggagcgttcaagtgatcgttggaacaccgggacgagtcaatgacatgatcctgcgcggagcactcagttagagctttttgtaanatataaatttgcattttctattnagagactgacaaaataaaaatgtttgtgcttgacgaggctgatgaatggtgtctcgcgggtcaaagaccaaatttatga

SEQ ID NO: 46933 - DNA, 3988 bp, Heterodera glycines
atgcgactggtgctgtttccggagccccttcttgttgagcatgtggcacagctgaaattggaaacaaccggtgaagggcccgtggacagagtcaaagtccaaatatttggtaaattaagcgtttaatatttaattaattaatttattttttcatttcagaaccatccggcaacgaaatcgcggtcgtttcgcgcacttacgcagacggcacactgcgcgcagaatggcaaccggccagcgaaggccgtcaccgggtaagtaattaccagtgatataaattgtatggacttacatatatttttctgcgcatgtgttatgaagaaaactgttcaaaaaaggcatttctacgttaaaaattttttgatttgattaatttttagcgcatataaaagcatattttggggtttccgagaataaatgcataattgtgggcattttcgggtttttagggcatattttatgcgcatatttagcatttctaatgcatagggctgtcaaaaatatgtacaaaaccccaaatatgtaaataaaatttataaaatgattattttttgggaaaaaaaaattttcttaaagtatgaaataggcacaaaatgccataaaaattacttcaataagcttagaatcacttttagtattttataaattactttttggtatttttaaggatattaatacaaatgaaaatttttaaattatattaccatatatttccattttcctaattttttaatcagtttgaggagaacaaatcatcccccccccccccccatttgaatgttttcgatgaatggctgataattctgacattttttctattttttccgttccgatgtttcaaattaatattaatcacgcacaactttttgctaaaacaatatgaagaaattattctatttttatttttgatttattagattaattttttcaaaaataaaaaaaatatccaaattaacatatttacgttatttgatttttgttcttcgatttaaattctccatgctcaattttgtgaaaaattgcattcatttcttctcactgatattacacaaattattggtatttatttatttttatttatttaattttttcccccaattttaggtgctcatccgcgatggctcccgccacatttgcggttctccgctgcccgtctccgtgttggatttgtccgccgtccgattggttggtcttcggaatgccaatgccggcgttgagcagaatttttcatgtaaaattttgaaatataaatttaagtaatttattttgtttttttaatttatttttcctttttcccttttttctcccctctctccaaaatacaaaatattcttccattcgctgtcccattgttcacccccccccccataatattgaattgttgtgcccaatgtttgctgtcccctctttttcaagtggattggtccaattccggcggccaatgggcatccgtcggtgtgcaacacgaaagcggcgaattggttagcaatttgtaattatgaaaattattagcatttttaaacgttcatataatcaatccattaatggaatggatttaaaattgtacaataatgtcaaaaaattaaaatttatattcttttaattttataaaaggaccaaattttcatttcccttgtaataaatggtaataatttttaatatgctttccgttaatttttttcatttttgcccaatgaaaatagcctttgttaaatgaattggtttgacaattggtcatgctctcgtcaattaatttcttcataattttcttaatttcctttatacaacctagaagaaatcaaaataacattaataaaaaccatttttacttttaaatttattcattgaaaaagtttctatttttaaaatttttcttgaaattgaattttatttcaaatttcccttaatgacctccattttatttatcgcactttaattttgtaaattaactcaaataaattaattttccctccttttcaggtgaagtgcacaatgaaacggcagaaacgcggtgtgaacgccgtgtcattcactccgcgacttcccgggctacactttttggtgatttttgaaaaaataaaaaacaattatttaaaaaaaatatatatttcgaagaaatgaaaaagaacattaaaaaataaaagcacataataaaatttattttaaaaagtcaataaatatttttttaatacttatattatgattaaattgaatataaaattttttatttaattttagcaaaatatatttggaaataataaaacaatttattaattttagacaattttgattgatggcatgatgttaccaggtgaaacgatcaattaaaccctgaattactattaaatttttcatttctttggcagaatgtccctacgaatgcgttgttggtgctgagggggcgccgttggcacgcggcgacgctttggccaaagcacaacgcggcagaacggcacgctttgaagtgtcgccgggcacaacgagcgcgtcgcgcgatttggacgtcgtcgtgacgagtgcgatttaggaaaaataaaatttagaaaaccaaaacttcaaatctatagagattttcaatagatttacattttgggaaaatcatttaattctgatgttatttcaattaattaattaattactttactaattaactaactacacaacaatttctttgttgtttgctttgccattttgttcagctaattgctttttttttgtgttaatttaactttttttaattgcttttgcaattgtcttttgtcccttttaatttaattaattctataccaattaattttgtattaattaatgcctttcattatgcaattaattttgcccaatttttagacccccagggcagtcctttgccggtccgttgctacaaacagcaggacgacagttattgggttgagttcactccggaaatttgtggtaaatttattttatatttattatacaattttataatatttattttatcattttattttttcgaatttattttcaatattttttaggtgcccattccatcgaagtgatgttcggcgatcagcccgtgcccggctcaccgttccattgcgaagttgtggacccacgaagagtccaagtgcacggtgcggacagaccattcacaatacgaacgatggccaattttgttggcaagtttaaaatttttttttcaacaattataatagaaattttgcttaattcattttaattttttatttttagtcagtcgaaaaggtgctggcaccggcccattggcagttgaattgacagaccctcagaacgagcccatcaagctggacagggtcgacaattgctttaaaatcacctgattatttttgctgtttttttcaggtactgaattcatccggcgatgagtcgttcacttttgtgcccactcgtcttgggcctcacaaattggcactcaaattggccggctttgctgtgcatggtttgaaatgatcgtagcttaaatttaaacatataatttcaggctcacccttttcgctggtggtcgaagagcagaaggagccgtgtgtttacggagcggcacttggttaagacaatcgccataaaaatcaaaatcccatttttattccggcatttttaacggaatcattttaaaattaatttttttaaaagttaatttttattaataattttaagattatgccattgagcgtggtcagcaagcatcgatgattttcgacccgaacaatcattcgggtgggctaaaggtcagtccgtgacaatttatgctgaaagtgacaaatttccaaaattacattttaaaaagcaatgcaattaaagtaatctttttaaatttcactttgttttcaggtcgatgtccatgacccgtccggtgcgaaggtcaaacacaacacaaaccgaaggcccgacgacagcaccgaaatttcgttcagaccccacgaagttggcatttacacggtggacgtacaattcaacaacagaacagtgcagg

SEQ ID NO: 46934 - DNA, 407 bp, Heterodera glycines
atggaaaaaagtgtcacagaatctttggtgtttcacgacgaagtggaaattgaagactttgaatttgatgatgagtttcagctgtatcacttcccatgtccgtgtggcgacaggtgagagacggatcaaatggcaaacaaatgccccgaatgattcagattcgaaattacgcgagagcaactcgagtcaggagaagatgtggcgacgtgtccgagctgctcgctaatgttgcgcgttatctacgacatggaacagttcgtcaaattggagacactgcgcttggaaccgacaaacgctgttgaagcggtcaaatgaatgaatgaatggaagttaatttattaacaaaaaccatatagttattatttaattaagtcatttatcattgataaaaaaaacaccggaataaa

SEQ ID NO: 46935 - DNA, 1401 bp, Heterodera glycines
atgtacaacgacctgttccagcaaatgctcaagttggaggaggagaagtacgacatcaacttcgtggtctcgcaaaaggacgcggaggtaaagcaaaagcatttacgaattggggacgaaagaagaaacgctaatttcaccgtttcagatcagcgaaataaccatttctgtgaatgatttgcgtggaaaattgtgagatttaaaaaaaataataatttatttatttatttatttttatacaatatttgatattaaagtgtgaaaccaacgctgaagaaagtgtccaaatatgacaacaaattccgcaaagcggcattaacggagggcgaaagtaccgcgccgaaggaggacttccgatcgaaactgaagacggtggagaagaagaacgtgatggaagagttggagagcaaggtgggacaaattgaggaggaaagggaaaaagggtgggggagaggcgacagcaaaaacggacagttcagcatcaaagctaaagtcggacttttcatcaatcaatgattgaagaatgaatgaattttgcaaaaaatgtgaggagtttggagaaatgcccgagtagcaaaacaagtttattttggtaacatcggccttattctgttttttttaatttggtggcgaaacgtccgattttgtctttggtggtcaaatgtccgggtggcaaaatgtcgtgtagccatagggtgacagtgaagaagagggatggcatttgcattttaccactatgatcatatactggcgggagtggactggcaactctgggatggattttgctgtgcatttattccccggttaacaatttgtctgtccgtcctttgtccgacgggcggacaaatgagagaattcggcctgtgtccagcaagagtcacgcggagacgtcgtttgtcccgcgtggacttttgctggacgccgtttggcatttcagcagaagaacaaggcggagaagccggaatggacgaagaaggtggaaaaggacgccacgggacgccgggcgagccaagcgagctcaaagggcggaggagccagcgaggcggagccaaccacgccaaagttggcgaaaccgacgccggaggaggcggaggaagaggaagagcgtaagtggagagggagaggagaagcaggggaaacgagtagggagggaccagggttaccgcggagaaagaaaaaaacgaatgggtttcgggtcgctgaaatccgggtttcgggtgtagcgtttcgggtaacgcgcggcacctctggtaggcataaccgaagaggagggcgcgggagaatcactggggaggggaagagggaagaagcataggagaatggggctggaaaccagcgaaaatccaaaaaaaaaactaatttttagctgaggttggcgacgaggaggaggacgaggagtga

SEQ ID NO: 46936 - DNA, 467 bp, Heterodera glycines
atgcagaaccattgggaaatcattttgcatttgccattgttgtgcgaagacaaaaacgtcccatatgtattcgtgaaaagcaaggtgattgactattttgaagttctaaaataagttaaatatttaggctgcacttgggcgtgcatgcggtgtgactcggccggtgggtttgctttgctttaatttaccgaacaaaaataaatgtcaatccatttttatttatgtatagagcaattaagaaaaacaccaaaaagataaccttttattttattaaatacctatgtatctagggttttataagactcgctgcgaatcctaaactttgaagaactcccttgtaaacagggaatttacttgttcgcttattcctttaggtgatcgcaacttcgatcattcaaaatgaaggatctcagttgaagtctcagattcagaagattaaagaagatgtggaaaagttacttatttga

SEQ ID NO: 46937 - DNA, 1770 bp, Heterodera glycines
atggctgacattaatgctattttggatggtactgacggtgatgaagcgctgaatttgaatgatttggatgaaaaagaggttcttggtgatgacgaggaggaccaacaccaaaatcaacacacaacgtatgtgaatgcgtccattgaccacttatttaatggcccgacggataaaacaaatgggatgccttttaaaaaagcactagatattatttacttatcaatgaaaaacactggcttctagttccattcagcagcatttgtatatactgtttagaaaagaagaagtggaagacctttacgacgaagccatggctccgtccggtgcactctctgaaaagcgcgagtcggctgaagttatttcgtcgttgccaagttcgattcagcacaaatcgtcgtttgccatgcctatgatgatcaaatctgagcccggcattgctggcgggtcgcaaagtggcaaacgctactgctgctacattggcaatatgacttggtggaccacagacgatcaactccaggtttaattaacatttgtttcggctttgttctgcttccattcgcactgtgttagttatttcactattcattttttaagaaactgattcaaaccctcggcgtcgacgatatgattgacgtgaaattctacgagaatcgcaacaacggacagagcaaaggttttgcgctggcagtgttcgccagtgaaccgtcggtgaaagcggtgatggagaaattgccaagcaaaaagctgcacgaacaatcgctggcggtgttgccgtacactaagcagtcgttggccaagttggaggaggccaccaaacgctacgaccaggtcccctcttgtttctgcaaaatgttatcctatggctcttctgcattctttgcatttctttgaactccgatcattgcttgtcgggacgtagccagtccaatcaatccttggcattttgtcaccccttacactttgcaaacaaaagaaacgtaaacaaaaaagggagacttgtgcccggcgtagtgcaataacctcttcttcctggctacgtcatttattgtcttatcctactcatttggaccaactttcgataacaatcctatgagttgcattttaatgtcatggaaaatggttggataaactcatttcgcttagccatagcctctaaaccatcaatacttactataatcagtcttaaaagatcgtctcataaaatttacgacattcaatttatttaacgctaactaagaaaggaaagcatttttatgagatgattgaaaatcctttctgacaatgagttaaatccacgagatttttattttcagttcagaatttacaaaagtttttcttccccaatattaatgtattacatttataaagcaaaaacaaattgtctaacttctatagtgcttataaaattgcaacttcctgtcacattttataaaaccatagaaaattaatgttttagatttgtcattttggttttccattccattttcgaaaaaattgtttattcatgagaaattgtatttaaatttcacacctgaatgaattttcaacaaaatttttgtgttttctcagtcatgatggataggaatctcataatttaaaataatgattgcattaaaattttaacattaatggaccaatcaaaaggtgttgggcttaaacacattcataagagcgggaattaattgatggacaacatttaatggaaaactgaaggaaaatccggtgaaagtattcgtcccgttttaagtccgttcacttctcaaaataaca

SEQ ID NO: 46938 - DNA, 1107 bp, Heterodera glycines
atgtcaattaaaaagctggattctgacaccaataaatatgttaatttgaaagtgaatgagcaagcggcaacaattaatatgattggtgcgacttggataaagaatttaaaaatcactgtgcagggacgtgagatttatgactctaactcactttatgcttataaagcatatttggatgccgaactttcttattccaaaaacgtaaaggagtcagacctacaggcgagcgggtattatgtggacagtgagaatcaggacggcacggatattactcagcagggttttgaactgagaagaaaattgttttcacaaagtcaaactgcacaatttattacaaaattggatgcagatatttttaatcaggacaaatatatggtgaatggcgttgagattgatatacaacttacccctaatgacaatgagtttatgataatggcagcgtcagacgataaatatagaatagaaattaccgcttgtaagttatatgttaaaactcttgaagttgttgatggtcttgcattagacatacagaaaaaacttgaaaacaaagaagcaaaatatgcccatagaaaaactttgatcaaatccacatttataagcgagaatcgaactgaatacaatggaacgctatttacgggtcaattgcctaaacgggtcattctcggaatggtggagaacgctgcatacgtaggcaaccaaaagaaaagcccatttaattttaaaccatttgatattcgatccgtcacattgatggcaaacgggaaacaatggcccgctgcgccttttgagcttaattttaacaaaaatttatataccagggcattccacgaaatgaatgaggcgttaggtatggccagttcaacagatagtaacggaatttctcttgagaagtatagaaaggggtggacaatttttgcgtttaatatgactaatagcatggaggacaacgagggtattgatcttattacagaagggacgactaccgtgtgcattcaatttagatcacctgtcccatcgggtgggatcaccctaatagccatgagtgaaatggactctattttgatattggataaaaatcgaacagtaatgaccgatacaaccatttaa

SEQ ID NO: 46939 - DNA, 2680 bp, Heterodera glycines
  unsure (1)..(2680): unsure at all n locations
atgggaacggaagcatggattcaggcgtatcgtgagatacgtcttgtctgccaatttaactatgacgtccatagaaatcgttttgtcctgaacaccgatccgcggtacgttaaaaaggttgaaatctcgcctcaacttgcctacattctcggcttcaacaacacggagtttatgcagcccgaaatcgaggcacaattcatgccggacatgagcggtggagtgtcatccttccacgtttacacgccagacctcattgaaccaatgatgattggtgacgtcacggcccccgtgttgcgcattgtaaccatacgcggagaccccgaccaagtgattgaagaacaattttttgccatacaatatcacaaaattttattaaaggaagtttctgaaattctgattgaaatccgtacaaatagcggaagtttgatgccattccaatacggaacttgtacattaactttacattttagaaaaatgtcctatttttaaaaaaatgaacacgttggaaattgacaaaacattggcaagaaacaacgtgactcgccactactatattggttgttttgcggcagaccaaataccagccggagcaattgtcaaatttccacattgtatggtggtgaatcttgaccccagcacctcgcgtggctctcattgggtatgcatttattgcgcttctcctttgcgtttggagtattatgactcattagggatgtggccaccacccagtgttcttattgtgaatcatttgtcacgctacaaacaaattcaatatagctctatcccccttcagtctgccaactcaagtgcgtgtgggcgtcatgtcattttctttttgtactgtcgatgtgttggaatgacctttgaaaaaattgtcagatttttgcactttggaaagcagcaaccggatacgctcgtaaacaattttgtaaaaggcataattttcaaagaatataaataatgaaaagaacaccaaaatgaattttttaaaaatgcatgttgattttgatcctcttcaagtggattggtccgcgttctcgtcctcgtgtgttcaatttggtggatacaacatttacaggggattaccctatcagcgtggagcgggagttggcgcagtgttccgaagccttatgagatacttgctgccgattggaaagcaaattggctccgcaattggacgtcaaggaatgcaaagcggaaatcgagtactcaccaatgtgctggagggaaaagacctcaaagagtcgctcgttagtgagagtaaggcgggactaaagaatcttcttgaaaaagcagccaacaacataaacactcaaaagggccaaggttttgattttaaacgttataaaaaagactcggctcccaaaattggaaaaataaggcgaaaaatataaataaacttcaatcctcctttgggccaccaatggttgtaaagaccaaaaataaacgtctgcgtgttgactcattaggaacttactaaaaatgacttgcccacaaaaaatcagcgacagcagtcccctagcaattaacagtggcctaaacattttctcagttccaccgaccaatgtgtctgttgtgcgttctttctttcgtcaagtgcttccgctagcaacaatcacacaagaatcaccgtacctgtttcgtctgtacagtgacaatttgtggacagatttgtctcggatctatctttatctcgaactgtccattgaaaaaccgggagcaaacgataaatgggttgcgatagatgatgcagatactagtgtctctgccattcaagggattggtcaaacatttgtccagcaactaaaagttacggttggtaacacggaagtatacgatagcggaaatttatacccatttaaggcatatatcaccaatgagttaagttttccaataaatgccaagaaaaattttcttggttcaacagggtattatcacaccgtaaatcaagatgattcaacagacgatgggttcaaagagcgttgtaaaatttttaagggtggaaaaaatgcgcaattcctctcttgcctcgactttgatctgngaaaccaggagctttatctcttanataatttggatttgctgttcacaaagcctctacaaaacacttgaaaaacaacccgccacatacgcagtacgcaagaccgaaatcaagtcgtcattcatcagtgtcggtcgatacgaatttgagtataatgtcttcagcgcgaccattcctcgacgcgtgacaatcgcgttagttggaaattcagcatttcatggtgactacaaactgagtccattcatgtttgagccgtttgatttgcgtgagatttcggtacatgctggtggcgtagtttacccagctgttccttataaacttattttttcaaatgatcactttgtcagcgcctttgttgacatgtatgaggcactcggaatggctaactcggaacgttcatttgacatttcaatggcccagttcaaaaaagggtggaccttttttgtcattccattgacttccacgcttgacgacagctgtggatttgagctgttgagaagtggtacgacaaacgtacgagcaacattcaattcaccaattccgcatggtggtgtagagatgattgtcttgggtgaattcgaccaaatgattatggttgattataaccggcacattgtgaccgactcaaagcttgggtaa

SEQ ID NO: 46940 - DNA, 613 bp, Heterodera glycines
atggcgcaacttccaccagaggacgtcgcaacaatgcccacgcagaaggtcgtcttcaacgccccgttcgacaacaaggccacctactacatgcgggtgcgtttggcgtggtgcacgtggcatgcggaataaccccccccccccctttttcaggtgatcaaccctgggacgaagcgcatcggctacgccttcaagaccaccaaaccgaagcgcatcaacatgaacccgccgaacggagtgctcggcccaaaggagtccgtcaacgtggccgtctcctgcgacgccttcgaccccggcagcgaggacaccaagggcgaccgtgtgaccgtggagtggaccaacacgccggacccagccgccaccgcgttcaagctcgagtggttccagggagacgggatggtgcgccgcaagaacttgccgatcgagtacaacgtctgatggaaggatgcttcgtcacctcaacatggacatgataggatcccaccgtcccaaaattgtcattttgtcccccatcatgtaaattgttgtatctgtatgtaaatttctgtgatcatcacttcaaatgaatgtatatttaattgttgcctatgtaattgtattgttgttgtgctta

SEQ ID NO: 46941 - DNA, 1826 bp, Heterodera glycines
aacaacgtttttccccagtgccatgttcccaatcgtgccgaggatattgaacatgtgctaagggagagagtggccttgttgcctggcgttaggtaaacataatttaaaatgcaaatttagaatttttcccaaaaaaaaacgctttttcagggatcgtgaaggtcgtccaattatttttgtgcccgcccgagaggtcaattctcaccccgatcacttacgcaaccttctcacgtatctctacgaagttacacagtgagtcggcttcatcatttaattgttttacaatttaattggtttatttaattacttgggtctttttagagacgatgcaaagactcgtggctttacttttgtcattgacatgcgtcgagggaccacttgggaaattgtcaaaccgatattaaaaatattacaggtgaatatcctgactttatttctacatattatatattcctgagtttcaggaatatttccccgctcttattaattgtgtgtacatagtgaagccggacaaaattctcgaaaaatataaaatttcaacgacaaaatacaaattcgacgtccaaatgatctctctggaagcaatgccaaaatacattgacttttgccaaattatccgcgagtttggcggctctttgccttatgatcacgacgaatggatcgaacttcgcaaggcgcttataattctgactattttattactatttaaaataaactacccttcaggacattgaaaggattttgcaaagaatgtgcgaaattctcaaaaatttggaccgaatttccaccgaaatggacaacgcggaaatgcccatcgatgttcaatcctcccaaacatcaattgcaaagcaccaagatttgtacccaattatcactgctgttccgatggatgagttcacttcggaaatccaatcgctgagggacagagtgataatttccggccataaacaaagtgtgggcagtcggaatggctccgtcctttccagtccaaaccccgaccttttgtcagtgtttccacaaatagaaatgctcaagcaaaatttagacaagcaaaggtgccaaaagcggaattgtcctccaataaagtagtttttcagaggcattgtttatgcgaaatgggactatcggaagaaggacctcgaccggtactttcagttgaaactgtttgagaaagatgcggaggaggcgagccaattcgcttttaattaactcgtcattttttgactttcgttcagttgtcaaaatggatttgctcccatttgaatgttctgagtcaccgatttgtgctcattggcgaaagtgaaacggaaacgaaccgactgctgaaggagcacaaagactttgcggactcagtgaatgtgagcagcccaaatgatttgaatgttttccatttctttgcagacatcccaagtcagttacgagcaagtgatcaccgtcagtcttcgccttctccaacaattccaatttatcggtgtcaatcgaattgagagcatttcgcaacaattgcaggccgattgggaccaatttgtgggaatgattgtgcaacgaaccgctcttttgcaaattacgctaaatatgcacagaaaatgcgacacggtccgttttgaattcgctaattttgcatttgaattattttcttatcattttatcgattcttgtaagtattttaggagttttgaagttaattacaatttttttggcttactttctattttattcgggtcagcttcttaaaaatgccaaacgttggctgcccaacgctggggtcgacccgaactccatccgctctgaggacgaattgcctaatgctatgcacaggcataacg

SEQ ID NO: 46942 - DNA, 751 bp, Heterodera glycines
tcattttattatgcttacgaattggtcttaatttaatcctttgaattagcatttctctgcataatttattccaatgctaataaaagtgaaaacgctgaccggaaaagaaattgagttggacattgagccgacagacaaagttgatcggatcaaagaaaaggtgctaatttgaaattaaaattcaaaataattctttatttgaccatttcttaggtggaagaaaaggagggcattccgccgccgcagcaacggctgatttttgcgggcaaacaaatgttggacgagaagacggcgcaagactacaaagttagtattcgtaattaattacctattgtgaaaaacaaaaggcgatcttttaaatttggccaaaaatgtactctaccttttgttcggattcgagttaagcattgattcaaaatggaaatcaactgattcgagatcagctaccccgtaacccagagaacgaattttcaagattttgacaataacaaaaatttggaaacccacgggtctcccctttggttttggtactttcctgttttatttatttatttattcagaagaaataaaaatatccaacgaaggggtgaccacttacacgttagattttagtaaagtaatataaagtccaaggagctcttttacagactttcttcggaaaacaatttctttttttgtatgtcctcccttttagatccagggtggctccgtgcttcatcttgttcttgcccttcgcggcggatgaatgttc

SEQ ID NO: 46943 - DNA, 3671 bp, Heterodera glycines; identical to SEQ ID NO: 11253
  unsure (1)..(3671): unsure at all n locations

SEQ ID NO: 46944 - DNA, 1206 bp, Heterodera glycines
  unsure (1)..(1206): unsure at all n locations
tcacatgcgcgataagcaaaaggcgaaggctgctgtgatcactgagcagcatcgaattccgacaaaagtgacagcgacggaggaggagacggaaaacggtgatagaaaatagcaaatgcataactttacatttgtttttcagtgtcttgtaaaggttcggacaatgacgaaacgactgcacttataaaggagccacaaacctcaaaggtacagacattccaagaccgttttgtttattcgatttggctttgcttctgtaaagtaaattaatcatttaagaaaaccgaacgcattcctcttcttggcaattctgtcaatgctcattcggaccgcgaaagttcgacttccgttcgtgtgacaacggattttcagccatcagacgaagaaatgcatcgcatttgtattatacattattttttaaagagattggcgttaacttcccatcatagtcaacgaacagtacggaagcacaagcggagaagacttcgccgcctgtctcgtcgaggcaatccgagccatcaatcgagggactaaccccgaacgaattcctcagggctcttcgggctcatattttgtcaaaaacttacaaggggtaatgcttcaacaaagaaacattcagtgataaatatttttgtttttcaggaagtgatcggtgtgttcaagccaaaaaatgaggagccttacgggtcattaaatccaaaatgggttaaatgggcgcacaaattgctctgtccctgctgttttggtcgttcgtgccttgtcccgaatcaggcaaacaatttacaacagtcttttgaccttttagcaattcagggttatctctcagaggcgggtgcttcgctggtggaccaaaaattgggcctggacattgtgccaaggactgcgattgtggcattggcagcacccaccttttactatggacgaattgataggacggtgacgaacacaaaagaacaaattgccaggaattatcccgacttgggccggcatttcaagcgcatcggattgccaccaaaggtggggatgactttcagtttatcatcttccattactcaagcagaaattcatttagcggggcagtttccagctgtttgtccgtggcttcaaagatgccaaatattggctcgaccaatgggaacagtctccggaaaagacattgccaaagccaagccgaagagaattgcaactcccaatttgagaaaantg

SEQ ID NO: 46945 - DNA, 1650 bp, Heterodera glycines
atggtccaccgcagcagctccagcggactcagtgtggcggtgatgggcaaagtgaggcgaataatttaaaattaatataaaaattcttttttagcaagccaacaaatacaatacacaggagggcactctgttgttggaatggatcaaaaaggtcaccggagcgaattgtatcaacacagacggaagtgctgacaattttgtggcacaattgaaggacggcatattgttgtgcaagtaatgataaaacagattataaatatttaagaattacaacttttatttaaataaaactttatttaaatataaataattaagagagtgaaaaattcagttgaaaaattaattgctcaaattgaggctggcaatgaagctggagcccaactcaatcaaaggggtgacggacaaggccagctccacgttccagcagatgagcaacttggagctgttcatccacttttgccgcaagcagggagtcatcacgcaggagttgttccgcgccgtggacctggtcgaggcgcgggacctctactcggtgtgcatgacgctcaactcgttgggccgaattgtgagcataaattaataattaaaatattattcttttatatgtaaaaatttaaagacgggaaatttttgaattttaattgctagatttcttggcattttttaattatggggaggggattcaaataaccaatgattgcttgtagtgttaagcgtgaattattttatttatttatttatttttgtctcatcatttccaaacagtctaagtataatttatcataaattatttaataaattaatagatggaaaagcacggcaaaacaggtcctcggcgtgtttctgtacatgaaattgtcaatattccgctggccgatcagctgcgtatccatgacataaaaacgttttgatcattttcactgctgattttcttttattaaattaactaaataaaaacataagctcttcgatttttgtatgaaaatagacaaatttagcttttacaattttaaaatgatataaaattattaaaatgatttcgttataaataaattcattttttaattgattgaaaattatccattttcctttttattactgaatttaaatttttggtaaaaaattttgtttccatttgtaatagattttaaagaaaaaaaattgccaatttgaaagatttcaagaaaatttttggagagctgactatcaatttgtaatattctgtatttttcttctacctgtatttttctgtacatttatactgggagtatggtacaggccattcttggaatacaggtacaggtacaagataaactcgaaaaacctcgatttcctggacaaagttttcgaatttattatttaagtgaccgatttttcttcaaaaaatttaaatagaattaaaacacattattattgtaaaattgttatttttagatatcataagcaattaattcaaacgttttttttttgctttttaaaacaaatttcaaaaaatccaggcatggatccaggtctcgaagagccttatttttcctgtatgtgaatttttctgtacttttagacagaaagtacaggaacaggcctttcttggaatacagatacagctacaggttttacctaaatgtcgatctctagtttggaccccaaata

SEQ ID NO: 46946 - DNA, 616 bp, Heterodera glycines
  unsure (1)..(616): unsure at all n locations
atgtcgtggatcctcgactggttttctggcgtgctcaactatttgggactaaccaaaaaaagcggcaaattggtatgcaatattaaagtttaaattctacttgtatttctaatagaatgaggatcattaaaacattaaaatggacaatttataggtgtttctcggccttgacaatgcgggaaagacgacgcttctccacatgctcaaagacgaccgtattgctcagcatgtacccactcttcacccaacgtccgaggaactttcactcggtggtattcgcttcaccactttcgatttgggtggtcatgtgcaagcgcgtcgtgtatggaagagttactttcccgcattggacgccatcgtttttttggtggacgctgccgatttggaacgcattcaggaggcacgagaagaactgtggagccttttacaagacgaacaagtccgaacgaatgcattaggctattttatgggttttttaaggttgccaatgctccactgctcatcctgggtaacaaaattgacaaaccgaatgcactcggagaagatcagctcaaatacntacttgngagtccaacaatattgcactggttggccaattagaaaatcattccaatag

SEQ ID NO: 46947 - DNA, 304 bp, Heterodera glycines
atggctgacgcagctgctcaagaacaaaaaaagaaacgcacttttcgtaaatttgtctatcgcggagttgacttagaacagcttctggaaatgaacgagtgagtctgagtcgtgcttccttttcaaggattaatgaccttttaggaagcaattcaaccaaatgattcccgcccgtcaacgtcggaagatgaaccgcggattgaaccgaaagcacaaatctttgctcgttcgtctgcgtaaggcaaaactcaattgtcccgagctgatgaaaccggagtgcgtgagactcatttgcgtgatatga

SEQ ID NO: 46948 - DNA, 567 bp, Heterodera glycines
atgaaaccagcacggtatgctgtacgaaagacaatgatgaaagcactgttcataagccctggacgctatgaatttaatgcaaatttattcatggaccaagttccacgccttgtaacaatgggacttgtcgcaaattcagattatgtggggaacaccaaaaggagcccattcaactttcagcactttaatgtacgggagttgagtgttgtggccaatggtcgctcttatccccaggccccgtatgacattgactatgaaaattggaaatttgttcgtccctacaatgacacgcaggaggcgcttggttttgccaactctacatatggaaatggaattgattacttttcatttttgcacactcactgtatttatgtgtttaatatgacaaacagcggagacgatcatggcggtttattcgatctgatcaaaaaggaatgtacagctgtaaacataaaattcaaaaaaccagtacccgatggtggaattacacttattgtgatgggtgaaacggactctatttactttttggataaaaacagaacgattgcaactgatacaaccatttga

SEQ ID NO: 46949 - DNA, 2820 bp, Heterodera glycines
  unsure (1)..(2820): unsure at all n locations
catcacactgtcaacgagctcagtgatctcattcgccaatggtgagtaaaatcatctttcaaattttgaacataatttttcggctttggtatactgtatctttttgggatacggtacttttggggtttatgtaaatgtgttatttttttaattgaaattcctttcagtgagctcaccacaattgctgcaacttcaacactgttaaagtcactcgccgatttgtgggaggctggtagatgatatgccaattaatttttattaaaatttcataattgagaaaataaaaattccaataaaatttaaattcaaattttggcaaaatgtacaagaattaattaacttgatatcggccgaaagcctattcatatatttttggaagccatctttcagctcttgctaacgaataagggcacaagcagaactcataaagttattattggtaccactaatagccattaatagctctaattagcgggccagttcatggattttttttatcataatgcatcctttttttattgcagtgccgggtcattttcaccgtttggcggatgttagccgctccaacgccccgggcgctgatttcttgtcttttcttcaatctttgccttctgccgattccttctcttcgtcctgctggtcagtcattctgatcactgattgatcagtccattctccgacccaaaaaaatttaaatcgactcattccaatatataagtaggctcaagctaaatgctgatcacaattaacccattttttgaccaatgttatttttatatcaaacgggttgctgatcacttaaattcgatcaaatacattaagcctaaagctcgatagagaatgtctatcgattctaccgtatatgtatcataatggaaaaaccacccttttcgatcgttagtgccacaatgtattatcgattgactcaaatgaaatgagcaatagcagatcactctgtctgttgatctgtacacccatttccttaactgatcaaaccagcattttgctcttaatcctctttttaaggcgtgaaagtgacgaggtgtcagccgccgcacccactgatcaccacgcccacccctactccaatcacaaccaattgcgcttgttgaacaacggcattggcacaacagcggctaaccaccacaatcataatcatcatcaccattatagccataataatcggcattattccgtcaacaacaataacagcaccgccacggcactaatgagcaacaacggcggcaacgcgtcgttgtcctcgagcagtgccgcctcctccaccgttgtgccaatgcggtccgccgccgcagcttcgtcgtccggcaccgtcacggacgctggcgctgtgccctcctcctctgtgccatcatcgtcggtgtgtcgtgtgcagcagcgccggaacgcgctcagctcgacggacgacgcgcctcctgccaagctgatgatgaccccgtcgcagcacaagcggaaaggcaaagcggcggaaatgagtgagttcagaggcgggagcggcgcaaggggcatgcgtggcacgcgcaaatttttgatcgatcgatcacttattatgccattataaatccgatcttgaatagaactgataagttgagagcaggtgataaaaaaatggcacaatttggaccagaatcaccaaaatttggcggcaaaaaaaatttctttttttcgaaacccaaaatggacaaactgggacactcttatataatttaaaaaaattaaatttttataaatntaaaatgaggacttaaaaccttttttttagctgctcgtctgttcgacatgcaatcatcctcgtcttcctcaacaccaatccaaccatcagacgcagcccggtgagtcatgttacaaatgataaagccatggagttcttttttcaaccaactaggagggaggcttaattgaagggggaggggtggttatttagaaggggagggcaatttaaaagaatacaggtaatttgccaaaaaatttttgtccttcttgtgccaaataatttggcaaaatgttcagatcccatcgacttgctcgtactcggcaagtgtcaaggtgttcacagtgcggacaattgttgatcttcgatgcagtcaagtgtcaatgctggtcagtctaatgacacttaatgatcaactaattagctatacataaatgaataaagcgtgaaactggccaaaaaatttggcgacagtgaggcattttttggtctcattgaccaaagcagatgttccaccattttttacatattttctataatattcgggatcattgactaggctaatcagagcgcttgatagtgttatttcatttctgatcagtcagtcacccattggttttggcgaatatatgatcaggaaattcaacacattgtccttatttcttgctgattagtttaattcagatcgttcagctcatttattgaaactaaaaaaaaacagacccactaaaacccggatcaatgacatgtacaaggattaggaatttttggaactccggcgagggggagggggaaatggcacatttttatatcccatgtcattaagacataaggaatttaaaaaccctaaaattagaaaaatttgaaggggcatgggcggaggggaaataatttttgccaaaaaatgcccctattttcagcggacttttgtcccacaaaaagtgccttggctcggtccaactttggtgtggcgaaaagacggccaaacggctaacggagtgcggtgccgaccggcgcatgtccatctttggcgtgccgttgtccgagtcgttgcgcacccagcacagaaaagtgccgttcattctggagcg

SEQ ID NO: 46950 - DNA, 1993 bp, Heterodera glycines
atgcctgatttaagcaatgaattgtggcaccgttttaaggttgtcaacttcaacggacaacatcacttcagtgtcacgccagcactacagcatacaccgcaggaggagaagacagaaccagcgaactcgtcgccaaccatcgcgaacttcttcactttcgtctatgacggaaacttcgatggcattggaagtgattactgtgacggtaaagagggaattggggggggggacacttgccccattttgccatttgcagcttaacatgaacacggtgaattttttgggcatttccattgttggtcagtcgtgtcctcgcggcgacagtgggatttatgtggtaagtcccgtcaagataagctctacccttcgcaatcccattttaggccaatgttatgcccggcggtgagttaatggaaaattgtttttcgtttttatttttgtttcaattataaggtgcggttgctttggacggtcgtattgagccgggggatatgattttgcaggtgaatgacatatccttcgagaacttcaagaacgaccaggcagtcgaagtgctcaaaagggcagtgaacacgagggggtaatcaaagtgaaagcacgaaacaacgccaaatctgaccacctttagtccgataaagctaacagtcgctaaaagcttcgatgccaaccgaacgaattatttttcggtgccatcgcgtgagccggtcagaccgattgacacccacgcgtgggttcagcacaccaacgcagtcaggggcatgaccagcactcttgtgaatgcgatgaacgcgattcccgagggtaatttgggtgggaattggtattgaacaacggacaacaattttggataggcattaagaatttttgttttccattgataatgaaactccaatttttgtcggaaaatacttataaattaggtaccaatgactataacagacgaattttgttgcttgggttgatttccattaagggcaaaataaaaaaggtggctcaaaactggttgattatgttaaactaaaataatatttatgtattgtagtaaatgaaagccaaaatttgtcaaagtgaactaatcatgagtatggtccctcgtgcagcaaaactttggggtttttgttcaaccattaaagcattggtaagttaaggttcggagggtacgccaacgcccattccgtctggccattttccgcctacgtcttcctcccttctgcacactttcgcaccgccgacttccgttcccagccaaaggcccgccagcagcagcacttcgacggggtccggcggcggtgcggctcaaacgatcgtcggcccgggcggagtcattctgtccatgcaacagcaacatcggctggacgtacacagtgacaaacgcaaagtgatccaaacattggctatgccggtacttttggcactgtcgccgcactttgtctccattttacctttattctttagaactccggcctcgacattcgcgatcgaacgtggctgaaaatccccattcccaggtcttttctcggtaggtttgacaaactttgtggcacaaaaacaagagcaatttccgtgtgtttaggcagtgctctcatcgattggcttattggaaatgtcgatggattggacgaccgaaaggaggcgaggaaatacgcctcggggctgctgaaggacaaattcattgcacatgtggtcaacaaggtcaccttcacggaacaatgttattacatttttggggaacaaagcgcaggtggtatttatttatttattacaatcgtactgattaattgcacttttcttttcagaattgctcaatttgcgtgcatcgtttcccgaagacggcacattgtccaacatgcaaaaccaattccaacacatggaaatagccaatccccaccaacaggggacagtcctttactcaaacagagcccaggaacaacccaatttcatccaaccaacgaatttggggaccggaacttctatggtatttttggcagaataa

SEQ ID NO: 46951 - DNA, 1623 bp, Heterodera glycines
gaaagcccaccgaatacggaggcggaagggacgccgcttcaattgtggcatggctaaagaagaaggctggcccagcggccaaggaactgaagagcgcggacgaattgaaggactacaaagactcggcggaagtcgttgtcgttgcctacttcaaggtttggactttcttcttctttccatcaattcaataaaaataagcttactgggtgctaaaccaaaggaaaataaaaggtattttcataaccaaatgtgaacctaaaatcggacaatttccaattaatggattaattttgggtttgttccagtctgctttactatacttccctaacttataaaatgacatttaagaacaaagaaagtgacgcggccaaagcttacttggaagttgctggtgccatcgatgacgttccctttggcattgtgtacgaggcggatgttgccaaggaggcggagttgaagaaggaggactccatcgctcttttcaaaaagttcgacgagggccgtgacgaatttgagggcaacccaactgaggtggacgacatcaagaagttcgtgcagtccaaccgtctgccgttggtctcggagttcagccaagagacggcgtcagtcattttcggtggagaaataaaatcgcacaatttgtaagtggacttgggaaggggacgtttggattttcttatttgtctcaatatgcaggttgtttgtgtccaaggagtcaagcgactttgagaagttggagagcgaatttcgcgccgctgccaaagagtttaagggcaaggtaaaactatctttaatttattattattttccaaattgtgtctgtttcaggttctcttcgtgtacattaacaccgacgtggaggacaacgcaaggattatggaattcttcgggctcaaaaaggaggaccttcctgcggttcgactgatttcgttggaggaggacatgaccaaatacaagccggaatggagcgacatcaccaccgagaacgtggtcaagttcacttccacttacgtggacggaaaactgaagccgcatttgatgagcgaagaagtgccagaagactggaacaaacagccggtgaaggtgctggtcggaaagaacttcgaacaggtcgcgcgggatgacaccaaaaatgtgctggtcgaattctacgcgccgtggtgcggtcactgcaaacaattggcacccatttgggacaaattgggcgagaaggtcagtgtaattctaacatatctgtgtaaccgaacgaggcgtttaagtacaaagaccacgagagcattgtcattgccaaaatggacgccacaggcaacgaagttgaggacgtgaaaattcagtcattcccaaccattaaatacttcccagcaaactccaaaaaggttgatttatcactaaaaattgccaaaacggttcaagtttcgtccaggccatcgactacacaggtgaacgcactttggaaggcttcaggtaaggaggaaaaccaagctggagccaatgaaaatttccaaaaaatttagcaaattcctcgagtcgggtggaaaggacggtgccggcccatcggaggaggagaaagcggccaaagaaggcgaggaggggggagacgaagagggacacaccgaactttga

SEQ ID NO: 46952 - DNA, 798 bp, Heterodera glycines
gaatttccaactccaatgggtggaaaacctttgagttcccaggattttgcggttatcgacgccgacattgacgccactgagaatttgcagtgcatttggtcggtttgggaagtgtccttcgccgtttttccctttctctttggacttatgttaaatgatttcactcttttgaggtgaaaggataaaacggagaaggcacagactgtttaatatttatttgcaaaataaataaacaaactttcttcaattaaggtgcggaatgtttctgtccaagttcgtttgtatttttgcgcaatttttccttatttgtcgatttcagcaaagaattgggcatgcatttccacgaggtgcaccctgaagaggtggaagtgcccaagtgcaacttgtgcatgcaagaactgttggtaaacgccagactcctggagaaatttggcgaagactttggcatcactttgcccaacgaacattcgtttcggagcattcgcttcaaaaaagacttaaaaagtgaaatggcaatggaaaacggtacggggcaaaataattacattgaaaagggtcggaaaaacaaaattcactgatttttgattatttgccattttgtttattaattattcatatatttagcgatttcgaggtatttacggagaatcagcgaaggtgcggatccgactttggtggacattgagagtttagacgaggaaagtggggacggggaggagcgggacgaagacggaccaatggtcggacaaacggtggccgcgtcgtgcgaagcattcgccaacagtcgaatgaattgtg

SEQ ID NO: 46953 - DNA, 2787 bp, Heterodera glycines
atcgaaaccagcgttccatgtcattgggtggaccagcacatgagtcactgttgtccaagcaacattcctcctcccctccacagacggtggagctgagccgggccgacaacggtgtgtttttctgtcgaccgcaggcctataaccagaaaaaaaatccgggaggggaagccggagagctttttattttatttttttactcttcggtccaaaatgaactatattttcggtgccgtagaaaaaaaaacgggaaattttggcaattttgagacctaattttggaaaaaaacatgcgaaaattgggacccggcggtgcttataggcgcccgccggggaaaatttagaaaattagggtcaaacatgaattcaatcgagtaaaattttaaaaaaaaacatttttcgcacaaaaaatttaatttttcatttggggaggggggctggtccactggcaaaaattctgacaaattttttttttaatttttactcatcccccctaggcgactgtgttgtgttggttgtggaaaacacgcggttcattgtgaacccggctttgctggtcgtcaaaccggacacaatgctgggacgaatgttctcgttgagggcacgcacgggcggcgggacaagtaaataaaaaacaaattaattcagtttatatataaaaaatatttagcgcattttaaaaaatggcaatgcatccctttttgaaaacaactaaaatttaaaaataggaaaaataaaaaaccactgggatttcaacaagaatttgtcgaagaaatttctcttttttacatttcgacccaaaattttgttagtgaatttttcaaaattttatcccatttacgaatataccaaaattcagagttgaaaaatctcctttttataaaattgttctaacattttgtcactgatttttatagaattcgacgcaattagaattaaacgattttaaaattagacactctgtccgtgccctcgtcgtcgtcgtcggccaatgaccccggcgccgaccgtggctcccccagtgatttggtgcgtcccaacgagcgcaatgagtacgacgtggcggagggactttccgccgcttgtttccgtgttgtcatggtaaacggagacggctttatagccccgatttgttacgcttgactcgcttttcaaggacttttaccaccgtggctttatgcacgtgccccagtccatttctgtggccgaacttcgcgaggtttgccatttgtatgggaagggccctaaaaatggcattttttgtttgattgagtatcctcactcactcaggaattaccctattgtcctaaaactaagatttttgactagcatcatgagtattcgatggaaaatttgattcggaggataattttcttggcattttgccgctgtcgcaataattacacttttttgcttccttaggcatgtgactatctgttggtgccgttcaatgtacacaatgtgaagtgccaagacctgcgcggtttgctgcacgagctgagcaatgagggggcccgggcacaattcgttgtgtatctggaggacatcattctgccacaattggtcatcagtgccgaggcaagttgtccgtgtccaactccgaggggtcaatatgtctccatgccatgctcaaagaaatttcagaggatgcctagaaatatgaagtcctttttctttccatagttagactcggttagttttttgtaaattttgacccagaaatacctaaccatttgagcagttttgggcatgtttccgagattaacgaaatgaggagggcgaattcaagtctttgttttttggtgtcaaaatctacgacgaaacgaagggcttttttgctccttggtccaaaatttttctcaaaaatttttcgtatcacgggagaaaaaaagaacacatttttcgcatatttatattcaataaatggggccatttttattaaaatttttaatattttaaagagttaaggagtccggtgctgcgtgccgattagcaaattttatatgattttaggaaatgtgttttgaaattgatgcaattcactcccccctcccccttggacattcacctgcccattgcaacaactttttacgtactttttctttcctttcagcgtggtgagcgtgagtgtcacattgtggtgttgctggacgaggacgtggtcgactgggacgaggagtacccgccacagatgggcgaagacgtgacccaagtggtgtacaggtaaacgccgagcgcggggcaccacccaatttgttattttactacactcgtgattatggattttcatttcgcaaaaaaaatccctgcatttgtagcactttccgattgcaccccaaaaaaccgtaaactttacatgaaaattttactaaaataaaatttttcgtgaaaaatggttatgaaccgaaaagtcatgtatttttggcactatgaaacaacaaattattaaaaaaaacattttttttattacgatattacagtacgccgctctacaaattcttcaaatatgccgaaaaccgcgatgtggccaagcgcgtgatgaaggaccgcgagctgaagaagatccggcttggcatcgaaggcgtaaaattttgttaaaacaaaaaaattcccgcgaaaactcttttttcccttgctgtaatacagtacccgacgcacaaggagaaaatcaagcggcgcttcaaccgttccgaagttgtttacaactatgtgcagcgtccatgtacgttttctggacggtgtaaaaattatttttgaattgttgcacttttttattggtgcatattttca

SEQ ID NO: 46954 - DNA, 1573 bp, Heterodera glycines
acaggtgaactgccattggagttggcctccgtgatgaaacatttgtgggccgacacaggcgtccaggagtgctttgagcgctcgcgtgagtaccaactgaacgactcggctgcctactacttgaactcgttggaccgggttgcacagcccggctatgtgccgacgcaggacgacgtactccgcacacgggtcaaaacgacgggcattgtggagacgcatttcacttataaggatctcaatttcaagtgggcgcaaaattttatttttaaatcgtggttttttcattttgattccttgcattcattttacaatggactgtaaattttccatttttctaacaaatttcattgtattctaaatacggttcgctgtaggaaaattgtctattgtcaattaattctattgggaaattttaaatgtgaaaaaactttccatttcgacgatcgacgtaaatttttcgctgtttcaccccctatttttataggcttttcagtccacggttcggacaagtaattaccaaccaatctcccatggttacgggcctggaatggattttttaaacatatccaaaattatagccctaaattgtttcaaaaattttgtcgccataaaaaataaatgcctccttttttggcagaatgttcgacgtcggagggcagagaagtgagcggaagaagtggattcactgctttgagggcgtcacggcgatcattttctgtgtggcactctccgaatatgacatggtgttggcggaggatgacgaaatggtagcaaattttttggaaattttttaaattttttttgactcctttttgtcccgccaagaatcggatgattgaaagcatgaagttgttcgactccatctgcaacaacaaatggtttctgaacacgtccatcattttgttcctgaacaagaaggacctgtttgaggagaaaattcgcaggtcaccgctcacgctgtgcttccccgaatacaccggtgagacaggcatcaagcaccaaaatttcctttttcaaccaaaattagtttaaaaaatacctaggttttcttcccgcgctgaactttcgaacaataaaactgaagaaaaaagttttagctcgaagagcaaaaaaaaagaaaagaaaaaagagacttcagatttgcaattaattaggcggcatttcagtgaactcattagcagacatttaaactcaagaatgctcagtttgaacgatttttgggtcaaatttaagcaaaaaatgtagggactcggggaaaactctttgtaaataaaattaagcaaaaaatttttatagaattcaaaaaatttgtccttcttattttataattaaaaaatagggtaattcgtctggatttttatttatttgttgtttcacccccaggctcaaacacttacgaggaggcggccacctacattcagtaccagttcgagtcgttgaacaagcggaaggacgggcagaaggaaatctacacgcacttcacctgcgccaccgacaccaacacatcaggtttgtgttcgacgcggtcaccgacatcattgtgaaggagaacctgcgccagtgtggcctgctg

SEQ ID NO: 46955 - DNA, 1077 bp, Heterodera glycines
tgcctttgacattttcgtgcgctttgtcggagaggcacacccagcgttgcgcttaaagaaactgatcgaacttaagcgatttgatgacgcattggcattcgcaaagtcatacaaccttccggcagatgtaatttaatttaacgcttttttattcttctaatttacatgtttcagtcggtgtacatcgaacttttgttatattatcaagagcaaattcaaaacggaaaggacggcacttatgaggaggaaacgtttaaagaactgttgcagactctgcggatgctaagcgatcacaatactgtaaatttttcttttgtgaactataattgtgtggtttatttttaattttacaggctgctgaccattgtgtagcaattctgaactttgtgaaccgatacgaacacatcaagacgattctggacttcgcaaaggcactcaagataacgggtgctaaattttgacgagtttgtacaatattcctttgcttacagatgagtacacacaaaaggaaattgcccgttttcgttatgaattggcctcctatcgcatgctcttcgaggcccatggtccaagctttgaacgcgactccccatggcctcaatttctgtcgagtggcagtcacaaggagttttttgacgcattttgcgaggccggccaaatgacgcaagcccggcttttgctctcccgctattccaacattgggcaggagttgcaagacgaaaaatcaatgaaaagattgctcacggttttcaaatctactcttataggcatgtgcctctttcaaattttttaaaatttgctttccgttcagaaaaaccgcatatcagtggagcaatcagtgaatttgtggaaattgagttggttccgctgcttttaacctcaaacaatgcgctcaacacgaagatcatctgctccactttctgcgatttcttcgtcgacatttcccttcttctcgaacgacttgagccaaagagtttccctgacgcatcgcttcattttgccgagactttcgaccgcgccatttctttgcttcgcgcagactgtcgtacttcggagaaacacgtcttatttgtctga

SEQ ID NO: 46956 - DNA, 650 bp, Heterodera glycines
atgcctccaaaaccatccggcaaaggagcgaagaaggcggtcaagtcgaccaaggcggtgcgcacgggagacaaaaagcggagaaaggcccgcaaggagtcttactcggtaggtttttttctgaattttttagggttttctgttttagttttccaatggcttaacaaaatgaaattataaatttaacccggctttccaggtgtacatctaccgtgtgctcaagcaggtccacccggacaccggcatttcctccaaagcgatgtccatcatgaactcgtaaggcccaatttggcgtttttccgtcccaagattctcaattttcccatttttaaggtttgtcaatgacgtgttcgagcgcattgcggcggaagcctcgcgattggcccattacaacaagcggtccaccatctcatcgcgcgaaattcagacggctgtccgactgattctgcccggcgagttggccaagcatgccgtgtccgaggggaccaaggcggtgacgaagtacacctcgtcaaaatgagcaggagatgatgaaagcggtggtgatcggacggaaaaaactatcccaaacggccctctttagggccacaatcactcaaatggacgcgaatgacactttttttcctgttttgtatttgaacgcaaataaa

SEQ ID NO: 46957 - DNA, 2271 bp, Heterodera glycines
atgacggacactgcaaatcgacagcaacgaagccgaggacgaggcgggagacgtccacgagcggtaagacagttagccggagaacacaattctgacatccatttctaacccctgacccggattcgaacaaaaacgcaaaatttcaattttcgacaaaattaaaattatgcaacaaaatgcacgagataaaacggagaacatgtttctgaacgcaagacatagtgtatttcaggcatatttgaactgtttttgttgcatgacttgaattttgccgaaaactgaattttcgagattgtttgagtccgagttagggattcgaaatggacttcatacagcgcccccgaaaacccccctaaagcatcacaaagccgctcattccttttttcctcttttatgggaccacttaaacttatgattaccaaaatttgacataaattttagtcaattttcagcatctgcgcgacagtgccaagaaaatcaccaaagcgtccattcttcgtctggcccgacgtgccggtgtcgcccgaatcaacgcaaaagtctacgacgaggtccgtgccgcgttgcgctcgtacttggaaaccatcattcgagacgcgccaaattttctgttccatcagggaattgaaccgaagagacaaataaagaaagtaaaaaggtttagccacttgaccacttatgatatgaacacatgctaaaaatgaaaataaataatttaatttatttttatcaaaaatttctgatccctcaccaattcccttctcttttctcacccagacccccattcttaccagtgcttatttagtcccgccgggaccgggactggcaaaaccgggaccgggatttctgtttttccaaaaaccgggaccgggatttctgtttttccaaaaaccgggaccgggacctgaaaaaaccgggatttcccgccccggtcccggtcagctcaactctacttaaaagaaataaattaataaaaaatagatataagaagcatataaaaatattttattaataaaaaagtaaataattagcttttaaatgtgattttaaacattttatatacaattagaattaattttaataatttttggaatttaatatgaatgataaaaataatttttacaaagctttgtcattataagaaacatattaaaatatttttcctattaattgttatattaaaaaaattttacctattaattgttattttaaatattttttgcatatagattaattatttttaataaagaaaattaaaaaacattaattgtaatattaattattaccaaaaatgtaccataatttattatttttacccagttgcaatgctgcgttttcctggacgaaagcctgtccgaccaacagccatgcttcgctttccgggtcgaaaaccaactcggcctgaaaaagtttttaaaattatttttttaaaattttattttaatttattgcctaatgcggctgttcgtttgcccattgcagattctcgaaggccaatctcggcaagatcattttcctgctcatttccagtctcgggcagaagactaaaaataataataataatttttaaaaattgtttaaaattttttaataaataattaatttgataaaatgaaaatgattaatgtttgaaaaatgtacatattaaaatgcactcattttatttaatttatttataattttcgattattgttttttgaaatttattcaaaattccaattaattttttgctactgttaattttgaccgttcctttattgttatatcaatatcgtactgagagatttaaaaagcattaataaaaaaaatttcatatttgtattgttttttaaataattaagtaatgtaattttattattataattaattatataattaattaaaggtactttttatcgttaattaaaaatgaattaattaatgggaatatttttcgttaattggttaattaattatttccattaccgaaaattgatgtgacggacgacattgggcttggcttgaattggcacattgtattccacttcagacggtgccaaaccatatgacggctgtttttcactgagcagcaacaaatcatagcgtctgttttgccgatcgtgtgcataagcaccggagacgggaaaggaccaacgttttcctaattttcattttttaaattttttaaaaattaaaaaaaaaatttaccaggccgaaatgacagacggccaagcgtcattgaacgcttttcaaagccgggctccacttcatattccgtctaaagcattttaa

SEQ ID NO: 46958 - DNA, 1092 bp, Heterodera glycines
atggccacggttcgaccgataaacaatgatgaagtaagaaacagctcaattcctgacccaattgcctttccattttcgatgcaccgaatggttgggatcatccaaaagaaattctccaccatccaagtgcagctgaagcaaagtacttgcgaaaatgtgatggtgcttcggtcgcgttttcttgacgcgaggtaattccattgttaagtttttgaatttaaatggacaacattgcagaagaaagcgtcggaacttcagcaaacaggcgacggaagtgctcaatgaatacttttactcccacctgagcaacccctacccaagcgaagaagtcaaggaggaattggcacggaaatgccaaatcaccgtgtcgcaggtgtccaattggttcggcaacaaacgcattcgctataaaaagaacatcgccaaggcacaggaggaggcgagcatgtacgcgcagaagaaggcacagcgtaagtggcctcgaaaaggcggattaaaatacattgcggtgaaacaacactatgtcccggctaattagctgcgactcagctaacatttcaatatattgcaagactatatgcaaccgcatgtcgcgaaaaaaaccataaaaaatattgataaatttagttgaatagcccattatttgtttctcaacccaatctgtctttcttttcagtgacccttttgcttattgtcgatgtttaaaaacgaagcagtggcgttaaattttaaaaaagaacaatgtcgtgactttgtcattaatttctcacatttcacttcttcagcttctccctacggcgttttgtccggcacttccgctggggccgttgccgtagcggccaattcgatgctgagtccgtacgcgagtatgctccacgccggccagaatgatctgcagcaccaagtgatcgccagtgggttcgacttggcatcttctgggtacaacccgcagttagtaagtttcccggatttggccgaagttgggactttattgtcaacattggcaaatttcagtttcaaatgggttacctcccatcacaacagacgtcgacttcgtcaccaagacaatgacgaagaatgtaactgaaagca

SEQ ID NO: 46959 - DNA, 862 bp, Heterodera glycines
atgattcaacagacgatggttcaaagagcgtgtaaaatttttaagggtgaaaaaaatgcgcaattcctctctcgtctcgactttgatctgggaaaccaggagctttatctcttaaataatttggatttgctgttcacaatttacaaagccaaagatgtttttcttttgcaaactttaaaagcaaatgatgtaaccaaatatcgtttgacagttcacgatgtcaagatttatgccaaaatggttgaggtccaaccctcactaaacatgagcctctacaaaacacttgaaaaacaacccgccacatacgcagtacgcaagaccgaaatcaagtcgtcattcatcagtgtcggtcgatacgaatttgagtataatgtcttcagcgcgaccattcctcggcgcgtgacaatcgcgttagttggaaattcagcatttcatggcgactacaaactgagtccattcatgtttgagccgtttgatttgcgtgaaatttcgatacattccggtggggtggtatacccagctgttccttataaacttaatttttcaaaggatcactttgtcagcgcctttgttgacatgtatgaggcactcggaatggccaattcagaacgttcatttgacatttcaatggcccagttcaagaaaggatggaccttttttctgatcccattgacatccacgcttgacgacagctgtggatttgagctgatgagaagcggtacgacaaacgtacgagcaacattcaattcaccaattccacttggtggcgtggagatgattgtcttgggtgaattcgaccaaatgattatggttgattataatcggcacattgtgaccgactcaaagcttggataaaatataa

SEQ ID NO: 46960 - DNA, 1753 bp, Heterodera glycines
cactgaaaaggacaaagtgttcgtgtacttctcggaccatggcgcggtcggagttatcggattcccagcagccgacgtactgtaaacaattaaatgaatttaccgtaatttgcgcgggaattttttaacaatgaattaggaataatttgcataacaactatctttgatatgtgcaaatgtctttaatttttcagttaacggttaaacaattgactcaaacactgaaggaaatgcatgccaaaaaaatgtacggcgaattgacattttatctcgaagcatgcgaatcgggctcaatgtttgaccacacattggcgcagagtttgaaaagtgtattttttaaattaaaaaatatttgaaaaccaataaataagatagactaattaaaatggtaataataatagtaataataattataatgatagtcaattaagtttacgcagtcaccgcggccaatggcgacgaatcgagctggggctgtttttgcgacaccaaatttttgcccggaaattgtttgggcgatcttttttcagtgaattggatgcaagactcggaccaggcatttcagtcattatttttgggggaaaatttcaaattttcaggaaaatttacgcaccgaaactctgcggaaacaatttggcattgtgcgcgaagaaacgaacaaaagccacgtgatgcactacggcgacttgcaaattcaggacgaacacgtttctgagtttatgggcaaagagcaggcgcaaaagcgcaacgaacgcccagtgaattaattaatgggcaatttaaaatttaatttgaactttttaaattaatttttaattaaaccattaatggaattgaaattttcgtttagccatcaccgcacaaatttccaatgtttccttctcgagacattcccatgttcatgatggcacgccgtcagaatgagtctaagcagattcagcacaatctccgcgtggcgtggaaagttggaaaacgcaaaatattaaataataaaatttaaaaaaaatttgcggaaaactaattaggttattaaaatttcaatcacatattgtatcacagaaaagaagctttctcgagcaaacgattaaacaaattgtgcaccaacttgtgcacgacatgaacaaccggcgacagattttgacgacgtatccgcaacaaattcgcgacttggactgtcacaatgaggtgaagcagaaagtgcaaagcaaatacaactcatataaaaaacttaaaaaacctaaaagaaaaacatagaaaaatcaattttcaataattattaaaggtaaaaaatcgcatttaaagcttttggcgagtcttgaggattttgaactttttttggataaattgttaattcaaaaatgatccaaaattagattttgtcaaacaattacgtataaatacattttgcttgggtccacctcaagcgattactggtgtttaaacgtcaaataaataattaatacactaattgtatttaattaactgaaaaacaaatcattaaattaaatttcaggtggtgcacacgttcagcaatttctgcttcaaatttagcgaagtattcattttttcctttttttcattaatactttgtcttcgttagaatccgtacgcgcttaaatatgcctatgttttggccaatttatgcgagcgacccgagttggacgccgaacgtatcaaaatggcactgattgaacagtgtgccgaagtcgaacttagcggtgtcatatgatcgaatttgaaaaacgcaatttga

SEQ ID NO: 46961 - DNA, 2702 bp, Heterodera glycines
atgacttccggcgaacaaccctgctttactttaattcatgtcgcgaacgatgttgaatttccatctgagggacaattgaaggacaaatttgagcatggtaagttatctaagtgcgaaattcaaaaagtatacttaaaatatgcgtttttagaaatttgaaaaataatttgaaaaggaaaaaacaattcaggtgacacaaagacgaagacggatgcattgaaaaagttaattttgatgattcaagcgggcgagaaggtcacaagtcagctgatgatgtacgtaattcgtttttgcctgccatcatccgaccattatctgaagaaattgctgctaatcttctgggaggtcgtgccgaaggtgctttttgttttttattagtttttgcttaaaattgtcgtatcatttgttcgtaaaatttgttaagacaaatcaagagggcaaacttttgcatgaaatgattttggtctgtgacgcgtaccgcaaggatttgcaacatccaaatgagtacatccgcggttcaacattacggtatttttacaatatgcaaaaaaataccgttgttttgaattataaataaaaatctcaaaaaaagtgcgctggcgcacctccttatgcatttgtgctcctcttcgttgctttcaaatgacaccacaaaggtgtaatttgtcctgtccccgcatacaaattccgatggagggttgcatatttcattaagaaaaattaggactataaatttcagaatattgaacctttttctttcgcattcagattcctatgtaaactcaaagagcctgaattgctcgagccgcttatgccttcaatacgaaagtgtctggaacatcgtcattcttacgttcggcgcaattccattttggccatctatacaatctacagtcagtttttttaactttccgtttttgcaatccttttttaaattatttccgtttttgtcgaatgcaatcctttttcatccaaaatatcttttgattttagaaaacttcgattttctgattcccgatgcgcctgaactcattcaacaattgttagagactgagcaggacgcctcctgcaagcgtaatgcgttcattatgcttttgcatgtcgaccgacagcgggcattggattatttgtcgggttgtatcgaacaagtcgcacaattcggcgatatcctccaactcgtaattgtggaactgatttacaaagttagcaacaaaataaacaccaaattttgcttctctacacaatccttttaaggtttgccataacaatccaggagagcgcaatcgcttcattcgctgtgtgtataatttacttcagtcgcagtcgggcgctgttcgttatgaggcggccggcactttagtcacactaagcacagcgccgacggcggtgaaagcggccgccaccgcatacatcgaactgatcgtcaaggaatcggacaacaacgtcaaagtctgtcttgggttgcgaaagtggtacattttttaaatttttcagctgattgtacttgatcgactggtcggtctgcgtgagatagtgccaaacgacaaagttctgcaagagttggtcatggacatccttcgcgttttgtccaccaatgactacgaagtgcggcggaagattctgcagttagcacttgagctcgtctcttcgcgtaacgtaagtcttttcagcaatttttcaattggcctatattaagtttaggtgcatgaaatggtgatgtttttacgaaaagaaatcgacaaaacgaacaatgacacgcaggaggacaccggacgatacaggtaaaaaacgcacttttcaaaaggaattctcagtgttgtgtccgtacacaaattaattcgacccggtcaactcttaggcaaagactggtttttggaaatttattaaaattcaaaaaggtttaaaagaaatgtgaaggttcaaaattaaataagcaaagtagagttaaaaggttttagtgagtttgatcgcttcaggcagggaacctgagatgggaaaattatgggtagaatgacctgcctttcgagatgggaagagttcttaaatagtgccacaaattgagaagaaaagagcagaaggacattacataggaaagggttgaatggcaatgcgaaggaaatgcaaaattaggccaatggaaagggaatggaattggttaggatgattgacggccagagggacaaaatgggaaaaggaatcaaaaataggaaagaaacaaaaatgcttttaaatcgaaaacgcagacacctcagagatcttagtaaaaaaaacaaaaatcattttgagatgacaaaaatgaaattattcccgttattctttttaattattattttaattgccaaaattggatcagcaaagaataaactgcaacaaaaatcatttgaggaaatatttggaggaaaatgggaagaaaacttggaagaaaaaaggcaaataattgaaaaattctataaaataaaagagaaaataaagcaaaaaggaagaaaacacacagcaaaagaatggagtaaaattgaaagaaaaatagtgaaacaattggggacaaatcggaattacattcaaaaatggattaaacaatttgttctacaaaaattcaaattaaaattggagtaagccatggaacaattaaaaaatggaagaaacaatttgacattcgatatatgagaataacggagaaagaaaaaatgaaaatttattggcaa

SEQ ID NO: 46962 - DNA, 2869 bp, Heterodera glycines
  unsure (1)..(2869): unsure at all n locations
tctggagatcaacgattgtttcagcgatttntcggatggaattctcttgatgaagttggtgatgatggcaacagcaaaaacnaaaatgtgatttaattgctcagatttctggagattatcagtggagaaaaattgggaaaaccgaaccagaggacgaatgagagttcagaagatcgaaaacctgaaccaggtaaaagaaaaaggagaacgaacggaaaacaacggaaaaacttctcagatgtttggattttctaaagtacaaacggattcaggtgaacaattagagagattaatcagcagaaattgggaggaatattctgttggtttttagttggaaaaccattggggcggaagatataacggacggaaacgaaagattgattttgggcttaatttggacaatcattctccgatttaccatcgaaaacatcgaaattgaggtgactgatcattctgtgcttttgatccgtccataaaaatgtaattttttgcagacgaaagaatcgggtgaacggaaacacgcgaaagaggcgcttttgctgtggtgccagcgcaaaacggccggctacccgaacgtgaaggtggacaacttcagctcgagctggcgcagcggactcgccttctgcgcactgatccacgcgcacaggtgctaaagggatggggcggcgactcattgggtttactttcgttggtcaggcccgaactgctcgacttcgacgcactgaacccgcaggaaacgatcggttggaccgggggggggggaattgggcatgcctttgtgatttaggcaatttgaacttggccttcgatgtggcggagaagcatttggacatttcgccactgctggacgcggaagatgtgaacgtgtcgcaccccgacgagaagtttctggcctggcattggccttagtttgaacttcccccaaaggtccatcatcacttacgtgtcgctgttctaccactttttcgccaaacaaaaaacggaaatgaccggcgcaaggcgagtggccaaagtgatcggagaattggtggagcaggacggcatgcaagaggagtacgagcagttggccagcgagctgatcagttgggtgcgacggtcgatcagctggttgtccgcccgacacttccccaacaatttgacggagttgcgagacgaattggcgcaattcaaccgattccgaaaggaggagaagccgccgaagtaccgggaaaagggcgaggtaaaaggcgtgcgaagggaagggcaaagtgacggacggaccaacgcaatttttggcattttgcgaaaaattggcacttttatgattcacatcatttcccttttcagttggaggcccttttcttcgctatccaaacaaagcgaaacgcttcgcgccgcagggcttacgcgccccccgaggggtttcttctgcacgatttggagggcgcgtggagcgaattggaaaaggcggagcacgcaaggcaaggcgcactgatcgaagagttgcagaggcaggagagattggaacaccgcgcccaactcttccacaaaaaggccgatgtacgggaagcgtggcttcgagaaatgtaagcgcaaaaggcaaatgaaagcgaaagcaatcggcggaaggcaccgaccgaattatcagtgataaaacagactgatcagtgatcaattcgttcagttccgtcgtcctcggacagttcaaatgttcgccgaatgcgcaaagtgttgagacggggaagcgaatgatgcgaaacatccaaacggaggcggcccccaagaaggaacgctttcagttgctgaaggaactcagcgcggaactgcaggcggaacgattccacggaagcgcagagattgcgcagagagaaagggaaatcatcggacgatggaacgcatttctgacgatgttggaagagcacgagttggagttggacaggtcgaccattctcatgaacacaatgccgagtccctctgatcgaaaatggcattgccattttgggagaaaatggcactttttagccgcagccatgaaagagtgaagagaagaggggaatgatcaatgcaaacactcgccataaatggccaattggaccctcctcttcttaggttggaagagctcagccttctcgtcgaggcattggacacattgggcgaggagttggacagtctcggggcgcaactaaaacttcgagaaaaaggacggcacatggccgaagtggacgaactgatgaaggggcaggaactggcggagacggacttatcggcaaaaggcgaaatgctgaggaaattgcgaagaaaggccgaacttagcagcaaaactcagccgccccacagagaggcggcgttggagatgctgcagctcagactgaacgcgatcggcaagcagtacgatcagctgcgaagggacgccagggaacggcgagtggcactgcaaaagacgcgcgagttttttcaggtaggaaaatggaaaagagactatgaacaacggggcgtccaagtaatggcattgcttaatgggccattgcttaatcattttggcattgcttaattggccattgcttttcccctaagttcgtccaacacttcgatgaattgtccggttggctttccgatcgcctctccgcctgcttcgcccttctccaattgcgcgacctttctgctttgcgcgactcgcaacgattgcacaaatctttggagactgaaatgcaaagccaatgggaaaggaccaaaaggctaatttcggatggggaaaagttgggagtgccgggggaagtgcaatggcgcgccgacactttgcaagggtgggaaaagggagggagggcaaggcacggacggattntgaggtcgtgggaanngagtgcgacgacaacgccgcgntgaccgattg

SEQ ID NO: 46963 - DNA, 2876 bp, Heterodera glycines
atgctttttacttcacttaaaaatttagtgctattttcgatgttctttgaactcgaacgcaaagacttggagttcgtcaaaggcgaaagccaagcagacattgagcaggtcgacgggaagagccaaaagtacaacggtttcttgatcaatctgatcgactcgcctggccacgtggacttctccagcgaagttactgctgcgttgcgcgtcactgacggtgctttggtggtggtcgactgtgtgtcaggtttgtcttgaaaactatgttttttgatttgcacaaacaaattcgcggttgcattttaatttcaagtgcactagagccactatttctacatccgctctttaggtgtttgcgtgcaaactgagacggtgttgcgtcaagcaattgccgagcgtatcaaaccggtgttgttcatgaacaagatggaccgtgcgctgctcgaacttcagcttggccaggaggaattgttccagacattccagcgcattgtggagaacatcaacgtgatcattgccacttacggagatgatgatggaccgatgggtccgatccaagtggacccgtccattggcaatgtcggctttggctctggacttcatggttgggctttcacattgaagcagtttgcggagatgtacgctgacaagtttggagtccaggtttgaacacagcttgatattttgttcaaatttgcttatttttagattgacaaattgatgaaaaatctgtggggcgatcgcttcttcaacatgaagaccaagaaatggaccaacaaccaagagcccgagaccaagcgaggcttctgccaatttgtgttggacccgatcttcaaagtgttcgacgctgtgatgaacatcaaaaaggacgaagtggcgaagttggtggagaagctgaacatcaaactgaccttggaagagaaggaacaggagggcaagccattgctgaaaacgatgatgcgcaaatggttgccagccggtgacactatgcttcaggtttgtatgggattagcccactttagtcttttttcgtcgggaatttcaaaataacagaattcggttgtaaatcctgtttttatgcagatgattgtcatgcatttgccatcgccagtcacggcgcaaagataccgcatggaaatgctatacgaagggccgcatgacgacgaggcggcggttgcaatgaaaaactgcgaccccaacgggccactgatgatgtacatctcgaagatggtgccaacctctgacaaagggcgcttctacgctttcggttttaccttttcacaaataatgaacaaacaattttatgaaaactcaggtcgcgtgtttgcgggcagagtcgccactgggatgaaagcgcgtatccaagggccaaattatgtggtcggcaaaaaggaggacctctacgagaagaccatccaacggcaagcaacaattcatttctggttttcatttacattcaatccccgttttctagcacaattctaatgatgggccgttacattgaaccgattgaggacattccggccggaaacattgccggactggtcggcgttgatcagtacctggtcaagggtgggaccatcaccacctacaaagacgcacacaacatgcgcgtgatgaaattctccgtgtcgcccgttgtccgtgtggcggtcgagccaaagaatgcgggcgatttgcccaagctggtccgacattttcatgtttcaacaaatttaatttcagatttaaggtcgaaggattgaagcgtttggccaagtcggacccgatggtccaatgcattttcgaggagtccggtgaacacatcattgccggcgcgggcgaactgcacttggagatctgcttgaaggacttggaggaggaccatgcttgcattccgctcaagaagtctgatccggtggtgtcctaccgtgagacggtcaccgaagaatccgaaattgtgtgcctgtccaaatcgcccaacaaacacaaccgtctgttctgcaaagctaggccgttgcctgatggactgccggaagccattgaacgcggcgacgtcaacccgacggacgacccgaaaaatcgtgccaaaatactcaccgagaaattcgaaatggacgcgaccgactcgcgcaaaatttggtgtttcggaccagagggcactggtgccaatttgctgattgacgtgacaaagggtgtgcagtacttgaacgaaattaaggtatgaaacgtttaaagaattcgattccttttttgctattactaattttaacggaaatttaggattcggtagtggccggcttccaatgggcaaccaaggagggcgtgctctgcgatgagaacatgcgcggtgttcgtttcgacatccacgacgtcacactgcacgccgatgccattcaccgtggcggtggtcaaatcattccgacggcgcgtcgtgttttctacgcttcggtgtgacggcaaaagtgcgtctattctccttacatatatgtattgcttccaatttttcaagtttgaaagctggtattatcgcttttttgggattgtactagattggttttttctaaaagtaaaacaaaatctatttttcatgggatgcaaatccatcctttacacaatgctttgacttcgcttaaaatttagtgctacgcaaagacttggagttcgtcaaaggcgaaagccaagctgacattgagaacagttcacacccctttttcttaatgtgcccattcagaaaacatattatttttgtatcagggactggaactccaacgctcgaaaattttcccgaattttctaaatccgatggtctgaattttttatttcagcagaattctgaccctaaaatggaaatctatttcatcgaacagcaaaatccactcttggaacaatattaa

SEQ ID NO: 46964 - DNA, 1095 bp, Heterodera glycines
tccgtctaaaattggccaaattttatgcaatttttttagtcgaaagaatgcgccgctgacgatggcccagtgcgtttccaaagggtctttcattaacattgcgcaaatgatcgccctggttggccaacagtccatctccggcaagcggccgtccgacggatttgaggtcggttttcggttgttcaattggattgacacaaattgtgggagtgcaaattaaatcattatcacctcatactaatttaaaaaaaaagttttttgagtccttcccaagttcggaatcttaattaattttttaaaataatcgccattaatcaaactgaaaattcaacgaattttttttgttgaaaattttggtgagttgttaagatttttcaacaaaaaaatttccaaaaaattgctgtaaagattttcgcaattattttttcgcggagtttctcgtaaaacaacgttttaagatttttttaaaattttataagctaaaaaatcttttttaaaaacatttctcggggggggggactggtatggggggaaacgagctgctcacaccaatcatataactctaaaaaaattccgtaaaaataacctttttaaaaaggtaaaaaatgatttatgatgctaaatgcaaacccatgatttattacgacggtgtgcgatgccatcaccaaaattttactcccattatcgcacatttaattaatggaattttgttacttcgccacagaatcgctccggcctgacgcccaccgagttcttcttccacacaatgggcggaagggagggcctcgtggacacggcggtgaaaacggcggagaccggatacatgcaacgacggctggtcaagtgcttggaagtgcgtttttttcgcaattttttttaaatttaatgcctcagcggatgggacacagacttcgatacaggaatgcttcaaatccgttttcgaccaatttttgatttccaaaacttttctgtccactaattgggcggagttttttgggtggtttgaaatagttgaatttttgtcaaccacttggttttatgcgattttcttttaaaaatttagtttttttttgtttgaaggataatgaaaatttt

SEQ ID NO: 46965 - DNA, 3302 bp, Heterodera glycines
atgcgcaagctgcaatttgttgggcccgagctgctgctgattcgaatggagcagccgaagggcgacggtaagggaaaacgaaaacgattttcatgtcctagtggtctgtggcgttggccaccaaaatgagggagattgggttccagtccccttcacgttgctcgcagaatatcatttgataattgcttgttttgttattcccgcctttcggttttttttttttttgatttttttatgtgtcaattttcgtcgatttaacaaatcttttatcatttcaaattagcatgcatttataactgtgattaaaattgaacaaatgtgcacataatcatttatagcattttactcaattattataaaatatactttacggaattttttttattcaattattaatgctaaaacattttacagatgattttgacgaccaccaattcgcttcctcctccttttgccctccctcttcatcatcatcgtattcgtcatcatttgctgctgctaatcaccaacatcatcatcatcattaccagcatatgtttgtgctgttcgagtggcgagtggggcgcattgtcggcgtgttcaaccgctcctccgaggcgttgttcggcgcgttcgagcggcacaacgagcagttccgcaacgggcacattgtgcgcacaatgttccccacttccatggagcattgcggtgcggaacgggcccaacacgaggcgctcaagcagtcttccctgcttaccggtccgtacatcagccagtccgtccggcatgccggaccggttcgaaaacccgaagtttttaagaaatcgaatatctgtgcttcgttgggcattctgtcacatcaatccatttgtccatgtacgattaatttaatgaatgcgcaccaattcagtacccgcttccgatgttcgccgacggtttttggcagctcttccctatccgaacacgcaatatttgctcacttcaccatatcttgacccaaatatgttcagctacgatgacaaattgctgaatatgaccgaaacgggtcgctaccctcctgatcagccattaaattaagattttttgtttcaataaaatgccatatgcttttaatcaaacaaaatgccaattgaatggggatgcttttttgctaaaatcccgaattggagtcaatgactcactttgagaatcccgggattaaaacttagtccagctactctggataattcgttttcgaatcggtcatttgttcctgccaaaacgttttcaacaattttttgtttcgactggtcctcgccattagttgagtccggcacccgtgttttgctaatctgtccggcattatcagccctaatgaacataaattgttgaaaatccaaaacatttcgttcccccattttcaggctgttcagtcgtcgcaccaaatgccttcacacccggctggactttcgcatcagtgccatccgaacactgtcctacgcccgtgtgctgttccatccggtggacccatttgtgatgtcgctgcacaagggcatccaaccggaaacactgatctcattccacacgctccccctttattaccagaagaagaagaaataatagtccaatataatttaatttggcaacccgggttttaatgtgattgccaattagataattttagttgttccttgtttgttttttaaatcaattccaaaaaatcaagttccccgcctgggtccatgccatgtcaagcgttttttgggatttttgtccagaaaacccaggctttttcaaaatgtcggactttaaagattaggcaattaaaacataattttttagttcgttttgtgaagcgctctcaggaggagtactacgacagtttgttgagctacagtcagcagcggatgatgctttacccctaccatttgtcggacattttggtgcgcgaacttcgcatcactccgttcacttattacacgtacggtttggtcaaaaatttttttttttttgtaaaaaattattttttaaatttttaagttcccgaaaagaaattttgcgctttttaatcgctttatgactcaaaagaaagactgtttaggaacatgattgtagaggtgatgcaagccgagaagagctacgattccatcccgaatttcactgccggtaaattttttttaaattgcactaaaaattgtgtgtttcagacaaaaatgacggaaattcataccatgtaaccccatttttcattcatttgtcacaaatttttcaaaatagggggtggtggagtctatttaaattgtttttccataaaaatttagcttttcatatcaagttttgctactccctttaacgattgattaacagttgacgtcatgcgcatgttgggcatcggtcgcaaccagtacattgacttgatgaaccaaaaccgggccaaccggcgactgtttcgacgggcaaagccagtgcgcgaaattctgccccaaaagccgtgcaattttgcgcccattgagccatggtttcagctgtgcttcggctgcattttggaggcggacattcgagtgaaaatttacaaaaattttttacgattttttttttgcaatttttcttaaaaaagtgaatttctaaaaaatatgtttaaatataatggatcacaattttggtttcattgaaattcaaaatccaagcagtcattagtcgaaaactaaaacggtttaatactttttcaaggagttcaaaaaatttttaccataaatttcaattcgattttttgatatttattttaatcattttgaatcaaaaaatgctttctgaagatgctcagttcgccggagcagttgatcatcgaccgactgcttgacgagggttccgtctgctgtggtctgttggacaaagccattgttctgcgcctgttgagccgtggcctcgtctatttggaagtgccaattgggtctgatgactacgtttttggcacgtcattttggttttgagtcaatattaaacaacccctcctccctttttttgtcatttatcatttctggtcgattttgtattttttatataacttaaaattttgtgggattagaattatggtggtggtctctccgaaaaaaaaaaaatttttttttgaaaaatacggttttttttatccacttttttgattttctataattttttcagtgccaactcttgacgggtttgtgatgaatcgggtccaaggcgactattttgagacattgttgtacaaaatttttgtcgccatcgatggacaaacatcagtgatggaggtgggttgggtccacaaattatatttcctcaatttttttaagtttttagttggctga

SEQ ID NO: 46966 - DNA, 2527 bp, Heterodera glycines
  unsure (1)..(2527): unsure at all n locations
tctanngagtcacgagaaggcaattaattttaaattaataattaattcataattgcccctcaccctccattaaggccttcgcactttggttgtggccaaaaaagtgttgaccgcggaacaattggccgattttgagcgggaatatcaccgggccaaaatgaatgtcaccgaccgcactgaacacatggcttcggtggtgcgacggcttgaaaacgacttgcaactgttgtgtttgacaggggtcgaagatcgactgcaggtccagccattatacaaaaacaaattgacagaaatttaattgtaattttttttgttaatacatatttttgaataaacacccctaggacttcggggctattcatgaaatacgtcatttttaatggcgatcccaaatttacaccccttcccttctttgaaggaccaagtcaccacttcgttggagctgttgcgcaacgcgggcatcaaaatttggatgctgaccggtgacaaaatggagaccgcaatttgcattgccaaatcgtccggcctcttctccaagacggacaatgtgcacgtgtttggccaagtgcgggaccgcaccgaggcacacaacgaactgaacgcattgcgcaagtgggtggtggacaatgtttagcattgttgtgcctttttcaaattgtggtacactttttcactgtttgtcttttgcacgccttcctttttctctcctttcctcctttttttctctccctgtctcgtctcctccgcattcccctctttctctctctctctctctctctctccctccctccctttttttctctccctttctcttccactcattccttcatctctctcctttccccctttctttcattctttctctccctattttcattcatttcctatactctgttaccccatttgtccttttacttcttctcacccgacgcctctctctacttctctcgctcttttcttctctttgtttctctccccctatctcccctctatcattttctctccctttttcttgttgttcgaatcttattatgttacacaacaggaaaagtgacgttgcactggtgatgtccggctctgcgctgaacatgtgcctgcagtactacgaggcggagttggccgagttggtctgctcgtgcaccgctgttgtgtgctgttgctgctcaccgtaacagaaagcgcaaattgtcaacgtgctcaagcgctaccgacggcccgcccgtgttgccgcggttggcgacgggggaaatgacgtgtcaatgatccaagcggcacacgccggcattggcatcgatgccaacgaaggtacttagattttttttaccgacgagtcgttttttaaccaatttttgggagtagtccccccccccaaaaaagaaattttttaaatttttcccattccaggaaaacaagcctcgctcgcggccgacttctccatcactcaattccatcacatttgtcgtctgttgcttgtgatgcatcgcggactaatcatctccaccatgcaggtaggtggtatttgtcgtgggttcgaattggatagaaattggatgccattttatttttcgttttttaaaaatttctttcaaattacatttgtcctggattaatggtgggaaatatgcatagttttgtttttatctattttgtaattgacaggctagttaattctcaatttgtaaaaattttttaggccattttctcctgcgtgttttatttcgcgtcggtgtctctgtaccggacattctgatggttgcgtaagttttgtttcttttttaaataaaaaattcataacatttttattattcaaatgtatccgatgtaaatacatgtattaaaactagagtgccacgggaccgggaccgggccgggaattcccggtcatccgaggtcccggttcccgggttttgaaaagctcaggtcccggtcccggtagggaaaccgggaattgggaaaaacaagcactggtaagaatgggggtctgagtgaaaaattagtgatgaaaattggagtcaaaggaaaaaattaaaaaataataattaatattctttaaaagtaacactgccagttgtgcaaatggcctactggctagtctccttgactttctcttcttctttcccattgttcaattcctctacagtaattaaaatattttgaattttctttttgtatactcatggctttcctatcgacaaaatatgattcctcatagtttttttttaaattaacacatttttatcattttttgttgaaaatctgttaataaattacactcaaattttcaaaattttccccggcggcgcctatcggcaccgccggacccctttcttcgccaaaagttttttggaaaaagcgcgccgaaaaaatttatgtgaaacgtaaatctgaatttctataatattcgatcatttagtccaaaatgattaattgtttgaaatgactgaagaaaatttgatgtgaaaattttcattaatttaatttagcttaaacgtttggagtttattcaataaaaaacaaagtaaaaatt

SEQ ID NO: 46967 - DNA, 472 bp, Heterodera glycines
ctgatgttaaacgtgttccttttgcaattcctaaaccaattcaagttttgtttatttatttttttgattctattttttaatttaagcgttcgccaactgacttgctaaaagcacttgcaggcactgttaaggaagatgaaacctcagttcactttggactagtcgatgatccgataatgattccaactggttttagagacaaacgactctatctgatgtcaaaggcatatttattttagatattcaaattaattacaaacgatgctttcaaatttgaggagcttggtcgccggactgctcgcaaaattgttgaggaatggccaacattatttatgctcgaccgtgatgttcccgaattgaaggctttcagaccgcagaaaccattggatcccactttggtacaaccgaacgaggaaaatttacaaaaaatgataatggaccgacgagtgtctgatgctataaagctttatca

SEQ ID NO: 46968 - DNA, 1018 bp, Heterodera glycines
gttaaagacgcgtgttgcgagaacgttgtcggctttgtgccgttgcccaccggtgtcgctggtccgctgtattttgacggaacttttgtccacctgccgttggccaccacggaaggcgcgctggtggccagtgtcagccggggatgtctcagcattaatgtatgagattttttaaggcaaattggggccattttttggattttttgattcggttaaatcctcgcccgaacttttttttgaacgtccactacccgagtcccggagaaaccctgacatttttccccgtcccgaatttgggagtcccgaggccgacatcgacaattttttcaacctacggaaaaaatattttgatttgaggaaattgtattgattattgaaattgcatccctaaaaaattcgaaatttcacccccccccccctcaaaaaacggacactaaattttttttataaataatgctaatatgtgccaggaagccatttccatgttgggcaacaacgcgttcagcgtgcacgtgttccgtgacggaatgagcagggcaccaatcatcgagtttccatgtgtgcgcgattccatgtatgtttcattttgtttaattttccaaaatggtatccaattgtggatttttggaaaaatttagcgtaattttttggtaaatttggatgactaattgtgagatcttggagaggaaaaatcgaaaattttagcaaaaaaacccaatttttcatttttctcgattatttccccccccctttttttacagtgaatgtttgcgctgggtccaacagaatcggacatttgtgcagcttaaacaaatttttgaggagaccagcaagtaaaaaaaaattttattaattttttcaaaaattttccaattagttacgcctgtctgcaacgcattgacgcccatttggagggcacctatttgtatttgcgctttgtcgcctcaaccggcgatgcgatgggcaaaaagatggtgaaccttttttgtcaatttttcttcgaaagttgggacctgca

SEQ ID NO: 46969 - DNA, 4972 bp, Heterodera glycines
gaaccaacaagggaaaataatattttagatttggtttttagtcaacccaaggaactcatttataatgtaaaagttggctcccctttttctaattctgatcataatactgtttggtttgatataaatcaaactattccaaaaacagatagtcaaaaaatttttatcagagatttacgccagaaaaattttactaaactcaaccaagaaattctttttaatgggccaaactccctcccaattacagtttcagacataaatgagaaatactgcatatttaccactgaattaaaaaagcgttttgataaaaatgtacccatgaaattgcttaaaacaactattaagaaaaaacatgatgaaaaaataaaaactttagtaagggaaaaagcccgaacccatagcatgctaaaaggaaaagctgagtgccgtgagcttaaaattaaatataaaatattatgcagggagtacaaaaaacatatccacaaattatattgtgaaaatgaagctaaatttatttcaaatggaagaaattctctctataaatttgttagaaatcggcttaaaactaacaccggaataccaacacttattgatgaacaagggcaaattatttttcggaatgaacaaaaatgtattttattggctgatgtctttcaaaagtcatttttgtacaaggaaaataacaatgacttactcagccatgaaaaccctaatcagatcacagacattgaatttaatgtctataatatttggaatttattaaaaaaactccctagaagaaattcgacatcgcctgatggcatcccttacatattattaaaagaatgcgcattacccttggcacccatactaactgaactctttagaataattttagattcatctaaaatccctgaaatatggaaaacgtccataattatccctgtcttcaaaaaaggagatacagataatcccataaattatcgccccatttcactaacttgtactttatgcagagtaatggaaaaaataataaagctagaaatacttaaatttttgaataaaaatcaattttttagtccatttcagtttggattcctgagacaaagatccaccacaacacaacttctatcaactttaaatgatttttatatatcgattgaaaataaaagttgtgttgatgtaatatatattgatatttctaaagcttttgatagtgttccaattaaattacttctacaaaagcttaaaaatatcggtattaatggtaagattcataaatttatcaaaaatttcttaaatgaccgttcattcagagttaaaatctctgaacagtattctaactcaaaaaacatttatagtggggtgccacaaggtagtgtcttaggccctttgctttttcttatttttattaatgatcttccgaataatttgcctaaaaatgttggtattaaaatgtttgccgatgatattaaaatttatattgagcataaaaatgataaaaatagagagaatttatcttccgcgcttgaggcaataaataaatggtcaaaaaataatggactaaaaatatcaatagaaaaaacaatggtcctttacttgggtgaaaataacacaaaatttatttattttcttgatggcgaaccattgccagaaacaaaatgtgtaagggatttgggcattttaattgatcaaaaactatccttttctgaccatattaataaaattttaaaaaattcatatttttcttgttatcagcttctccgagcgttaaaaactcggaggcttgaaacattaattttggcatataaaagctatatcagaccacagttagaatacgccacagaaatttggaatccattgaaaaaagaaaatgtccacaaaattgaagcagtccaaaaattttttacaagaaaagccttcaaaaaatgtgggcttgtccccatgccgtatgaaaaaagattaaagttttgcggaattaagacattggaaattaggcgcaaaattaatgatattacaactacttttaaaataataaaaaaacatacacatcttaaaccatctaacttttttgctgttgctaaacgggctattcgcaaaccctttttattacaaaataggatatatattacaaaaacaaaaaataatttttttaatagggttattaattcatggaatttattaccgaaaaatattatggaaataaatgaccccaaaaaattccgagaaattgcaaaagaaataattaagcaataatgcatattttccccattgagaggtgtgatttgtttcatttatgtctattgtttttaatttgacacctattctgtgatttgacacttatttttgtgatttttgactgccatttatgttttatttttattctcacttttttctttttacaccactgttagagtgcatagcaccttgtggtttgttcgataaataaataagtcatgaaaatacatttccaaaggttttcgggtacgctgatcacgaatccgcggcatccatttcgtccaaatccgaaccccagacccgaattcgaacaaaaatttaaattttaaaaattcacatttatgcaaccaaatgccattaaatgcacgaaataaataaaaaacatgcttattggcatggataaaattgcgaaacatgatagttcaaaaacttgcttagtcgacaattttgaaccttataatagaaccaatacacccaatgtgtatcttttgatcaagttaagaccttcaaaaaaagtcccaaccaagaggttagccgacatttgcggaccgacatttgcggaccactatttctgggttgaactgtcaaaaaaaacaaaaaaaaataattttttcaaaaattgagtgactaagtagttttatttgtgatttttaccaagttgaacatcgcccttcaagagtaatcgatcaactgtttgcaatcaacatcgaaagaacccatttttttaaagaagtttagtttccatagataaatatagtatgtagttgctcatttttaattttggacccatagttttaataacagcaaattacggacaatttttgagaaaaagaaaaactattttagtttttgtttgttaatttaattggtttggcatgccggaaaaaaattaagctctcggttaactaaagcgtggaagtgaaacacgataataatttttcttgctataaaattcttgaactgacttttatatttaatttagcgaatttttttcgccaattttcacagtttaattataagttagaaattctataaaaaagaaagaaaaaagttatgtcaaataagacttctctccaattgagacagatcgctttgcatcagcttaccttcactaattcaatttggaataatgaatttattaaaatttcttattatttttttctttatttagacagttctatcgagaaatagtggtccgcaaaagtcgcactacgaaccaagaaccctgtttttgcccgacaattccttgtagtgcaacgccaatttccaccaactgctacaatcgaagtatttccaccacatcaaggacatgagcgacgcgaatgcaagagtcccaaatgctcaagccattcgacaaaatcattgtcattcaaagccagtttttcatgcaattttttcaatgtaaaattttgaaactcttccaatacagccatttaggtatattaagcgctgaaaacatagttaaaagctcaacaatttacaaatgtgaatttttaaaatttaaaattttttgtttgaatccgcggatttggccgaaatgggatgacggactcgtgatcactgatcagcgtccccgaaaaccttgctcatcattgtgttttttgttcttttgtccatcactaattgccagcaaaagacggccaatttgtgatgctttgtcccgtttcttctgccggtggcggagacaaaggcctaaattaagcgcaaatctcaaatttggatatgtataaaaacaaatcccctttttattgctcacccaatgcaattagtggtaccgaaaagccaaaagaacacattgttacaattgttgtcccaatttccgtcttcccaattgaccgccgctgtctctccaattttgcatcgtttcattatccatcggttgtccaattcattttcatttgctttggccaatgtcagcttttcctttgtccattcgttcaccaattcaaatggcaccatttgtattgacggcacatgaacataaaaatgaatttcgtaactgacggaagaaatggcattggcacgaagaaaatgctaaacaatttggaaacaaaaatcagtgatttgtcgagattatgggccacacctccttgaaattgttgatccaatctaagtccgtttgttcgtagtaattatcgcaacgcaatcgcttgggttggccatcttttctcggattgtgcaaccatttggacaatgcttggccagcagaaattgttgaatttggcccatcaaaatcatcaccaaacgcagcgggcaacaaagcaccggaatagattgaattcaattggttgagatcggtgagaattgtcggcgaaatgcgacgacgcaaattgtccaaatgctcagcgtttgaaatggtcaaatgaccaatgtttggcgcaaaaatgggccaaatttcacgaccaaaaatgtcccaaattagttggccattcgtggtatgtgaaggaagccacaaatgtaaatcgatgcctcttttgtcgaaaatttggtgatttgaacgaagaaaagcgatgacggagtgatcaatgtacctgaaaatggaaagaatgcttttaatgtcatagctctgcttttaagtactcaatctgaatagaatcaaagcgaattttgctgggcaacggacggtcgggcaatggaaatggcacaaatttgtcaaattttctatccatttgtacataaagtttcggttctggtcctttgtccttgcgaatttcgattggtctccaaattgtcaattcgcttttgccattgaaatgtt

SEQ ID NO: 46970 - DNA, 1072 bp, Heterodera glycines; identical to SEQ ID NO: 11652
  unsure (1)..(1072): unsure at all n locations

SEQ ID NO: 46971 - DNA, 987 bp, Heterodera glycines
atggacgagccgcttctgcaggaaaacccaaatcgttttgtcattttccccatcaaataccatgacatatggcaattttacaagaaggcagttgcttcattttggacagttgaggaggtatttgcgtgaaatgtttgaataaaacgaatgaaattttaattttgcttttaggttgatttgtcaaaggatatttccgattggaaaagcttaactgataatgaacgattttttatttctcgagtacttgcattcttcgcagcttctgatgggattgtcaacgaaaatttagtaaaattcgtttgtttatttagaattttaattttgctaggtggagcgctttgctcaagaagttcaagttccagaggctcgctgtttttatggtttccaaatagccattgaaaacattcattctgaaatgtattcgctgttgattaactcttacgttaaggattcggatgaacggtattattttcatacattaatccctcctatttgtccttttagtgctaagctttttaatgccattttcgagttcgaatttatcaaaaagaaggccgactgggcccttcgttggatcgcaagttccgacgcttcttttgcggagagactcgttgcatttgctgcggttgaggggattttcttctcggggagttttgctgcaattttttggcttaaaaaacgaggccttttgcccggtctgacgcacagcaacgaattaatttcgcgtgacgaagtttgacttgctttggttttttttaaatatcaaaaaccgcatttccaagggcttacaccgtgactttgcctgtcttctctacacccacctcaaaaacacgccacccaaagaacgcatctacgaaatcatctcggacgcggtaaaaattgaacaggtaattgggcctttgctagacaataaatcgccgttttttgcaggaatacctaaccgacgcacttcctgtctatatgatcggcatgaattccgatttgtaa

SEQ ID NO: 46972 - DNA, 4108 bp, Heterodera glycines; identical to SEQ ID NO: 11663

SEQ ID NO: 46973 - DNA, 955 bp, Heterodera glycines
atgttcaccgtggacctcaactccgacaagggcttccgaacaatcgaacgattcgtcgacaattatctgcgcaccggagtttccgtcaccactgtaagtcaaacagcttgaaatctttttttttcattttcccttttcagcaacaatacgtcgctctcatcagggccgtgccccgcgcgcactgggagctgtcgcacacttcaatcatcctgggcaatgaacttggccgcggcacgttcggggtcgtcaagagtggcgtctacgtggatcagcaggggactcgagcggcggtggccatcaaagaggtgtctcagacgagcaccaaagagcaagtgaggaaagggggggggggggttggaagtctgcgtccgcatttattaattttcagatcaaggagttcatgaatgaggcgcgagtcatgcggcagctccgacaccccaatgtcatccagttctacggcgtcgcggttggccaggagcccctgatgatcgtcatggagctggcgacggacggcagcctcaccaactacttgaagcagcagcggcggagcgcgcgggtcaaactctacatgtgcctcggcgcagctggcggactggaccacatccactcgaagggcatcatccattgcgacgtcgctgccaggaactgcctctacacggacggcgtggtgggtgaaaaagcaccaaaaaaattttttttgtcatgaaacgtctaaatttgttcattttccccacaggtgaaaatctcggacttcggcatggcgatcaaggcactttcaaagcaaatcgagagaggcgcaaaactgcccgtcaaatggatgtcgccggatgctctgagggaccgcagcttcacccagaagagcgacacgtgggccttcggcgtgctgtgctgggaagtcttcaacaatggcgagacgccgttcgcgcagttgagcggaagcgaggtcgcggcagcg

SEQ ID NO: 46974 - DNA, 463 bp, Heterodera glycines
atgcagatcttcgtcaagacgctcaccgggaagaccatcactcttgaagtcgaggcgagtgacaccatcgagaacgtgaaagcgaagatccaggacaaggagggcatcccgccggaccagcagcgcctcatcttcgctggtacatcaactttcaagccgttgcaacattcaattttatacataacccttattttcagggaaacagctcgaggacggacgcactctggccgactacaacatccagaaggaatcaactcttcatctcgtcttgcgccttcgtggtggaaagaactagaacgacgaacggaagaaatgagtgatctgtatcgatccatatccgtatcttgagactgtcctgtattattgtgttccgttttattcatcatcatgaaatgtatttcaatgaccacggaacgataaatccatcaaaactctgccttaagttctcccgtcggaaaataaa

SEQ ID NO: 46975 - DNA, 1329 bp, Heterodera glycines
atggagccgggcatgtacttctacaaaattgaggacccggaagcggataccgactcgaaacatcgtcttcgtgacggcgttccgttgaattggccgggcgaaagcaatttggaaaaattgggatggtttcggtgggaaaagggccacggatgggcggtgcgcaagggactcgagaagataacgcaagcgcaggcaatgcgaaaagggcacggcaagaaaaaactcgcgccttattcagcacatcagcgtggaggactgcaaatcgcagcggtaccgcgccactttcaacgcggaacaatttgtgctgcgacggcactccccggccgaagaaatgccgactccaaagggagcaaatggggaggaagaagccgagggaacggcggaagagatgggcaacttcgacctgggcaatttggtggaggaggagccgtgggcgggggcagtgcggacgagcgaaagggaagttgtgctggaacatgccgagggagtggcactgacagtgagtgccggcaatcgctccgacgtaccaacgcactttcagctgactcttcggactgagtcatggcctcggattgtccaccattcgtccgaactgagcgacttctccggctcaaattgtcttggacagagagtccaacctgtttctgaacctcactttctttgttggtttggcatttgtcggaaaatgggaaacatttcggcacagaatgcgcgggggacactcatcggacagatattcagcagtcaagactcactctcggtgatggagagcatcttcagcattgacatcagcaaatccacgcaaagcaaagcccaacgagcggtggccacttccgtacggtccccgcgtttggtctgtttttatcccatgggaagcatcgaaaagcgaaagtgccatcggctggactttgttcgccaacccctccaggtacaaacaaaagtatagatataatgggtttagaatttttctttttgaggagaaacctccaatgactgatcattggcaaaggcaacgctcggagtgccaaggtaatggccgaacactttgccaacatttcaaatctgaaaatataatgaatggctttagggtgcaacgaacgcggaggttacttaaaaaaacgacgacgacttgcaattgtttcattttccacctcagttgagtcttttctgagcagtttggacccgcgccaatggctggacgggctgaattcgcccgcagagctgttcacatgtctcgtggaattggtgctgtgtctcgttctgctactgctcgctgtcctcctcctgaccaaatgtgtcttcccattgtgccgttgcgtccgatttgtg

SEQ ID NO: 46976 - DNA, 1268 bp, Heterodera glycines
atgaacaccgaagacggacgaattgcccattgtgcgtcttctgatcgcatcggacatccatgccgggttcgcggagaacaaagagcatatcagcaacgattcattcgaaacattccgcgaagtgctcaagattggggtcgactcgaaggtggactttgtccttttgggtatgttttgctcacatgatcaccattttctgttgagcagaaaattgttaggcggaaatggacgatcataaaaagaaattggaaaatcattggttttggaattggtcggtgtttgagtgaataatctccggttcttgaccggtattaattagccattaaatgtgtcagaattcagggggtgaccttttccatgagaatcacccgagccgtgaaacgcaactgaaggtggtccgtctgctacgaaaacactgtttccgcgagggtcgacttggcttggaattcgtttccgatccgaccgtcaatttccaacacagcaatttcccggtcgccaattatttggacgtgaatcttcacgtgaacatgcccattttcacaatccacggaaaccatgacgatttgtccggaaaagtgagtgaactcactgattatgcaaattttcatgttccaacttttcttttcagggtctttctgcgcttgacgtgctccacgaggccgggctcatcaacttgttcggcaagttttgtgatgtcgaccaaattgaagtcactccgattctgttgacgcggggcaacacaaaaattgctttgtacggcatcggaagtcagcgagacgaccgattggcacgatcatttgcaagtgggacaacgatggaacttgaacaacaattaacgattaattgtgttgggttttgcagagggtcgagtgaagttcaatcgccccgacggggatgacccggactcgtggttctccattttggtactccaccaaaatcgaccgccgcgaagcaaattgaggagcaccaaatcccatctctccttcaagcacatccctctcttttttgacttgggttagtcattgcaaatccctgccatttttatggttccaatttttcagtgatttggggccatgagcacgaatgtttgataggtatggaaaacagtttgtaattttgacttgtttcagtgattttcagagcccgatttcaaatacatggaccccaacgattcaaccaaaggcttttacataattcagcccgggagtacggtggcaaccgcactgagtgttgaggaggccaaaaagaagcagattgggattttgtga

SEQ ID NO: 46977 - DNA, 2340 bp, Heterodera glycines
aaattttcaaaaattttcgagctaggccccctagaaatttcaaaaatttttttggggtgaaaaagagggtgaaaaatatttttctggggtaaattagggtcctgagcacaaatatgatgtttattttaagtttcagattttttggaatattttaaaaattctttattttttggcaattttttggccctcgggattttggcctaatatttgaaaattcataacaaatcgaagggttgatcaattttacaggaataaagccttaaaaatagagaaaaatcaggagaattttatggactttatttggaatttctatctgtaaaatgaaaaaacttattccagaatttctggaaaaattcgaattttcagaaaaaaattcataactcggttctgaaaagatattctggaaaaataaaatactacaaaaatccgcagttttttgctctattatataaattttatttggcatttttatcacttttttaagaatttttataaaaataaaagtgattttgtgattcgggaccaaagggggtggacaggatttttgagtggaaaaatttttctcacaaaaatcttccaaaaatatgtatttaggtgttatttgggccgctgatcatgattacgtaatcagattttacttttaacatcgataagacctcagaatccctgtgtgattggggattctgagcatcattttgaggggggagggggcaggttcggatccggacggtgtaaattattttcgttatatttatggttatttttaatgtttttatttcatttaaaagagtgtttgttttataataaaaaataaattttttaatttaaattaaattatttttttatgaaaaattttattaaaattaattatttttttaattaaataatttcatatatatttttttatttgagtttttcagaaattaatttaatttcaatctaaataaatttaaattattataagcttcaaagttttttttaataataaaaataggcatttattttacaattttaaaaaattattaaagcatttttgtacctcttctaccatttgttgtacctcttcaaatcgctgttgtttttgggccaaaattcagaattttttaaatagggcaagttcgaacccggacggtaacacattatttttatatttatttttggcttattttaaatgtttttaattaaatgaaaaaccttttgtaaattataaattattttttgatgaataaaagtttaatttaaaaattaattactattttttaaataaagaatttcgtgtatttatataaattattttttgatgaatagattttaaaaaacgggcgcgaagcgcccgtttggccccaacaaaatttaaatgggtgcgaagcgcccgtctaagcccaacaaaatttagaaacgggcgcgaagcgcccgtctggccccaaaaagtctaaaaacgggcgcgaagcgcccgttcttcggccgcgaagcggccgaatgttccccacaaaattaaaaaacgggcgcgaagcgcccgtcccaaggccacgaagctgccgaaaattcccaacaaattaaaaaacgggtgtgaagcgcccgtctaagcccaacaaaatttagaaacgggcgcgaagcgcccgtctggccccacaaagtctaaaaacgggcgcgaagcgcccgttcttcggccgcgagcggccgaatgttccccacaaaatttaaaaaaacgggcgcgaagcgcccgtcctgaggccgcgaagcggccgaatgtcccccaaaaaattaaaaaacgtgcgcgacgcgcccgtcctgaggccgcgaagcggccgaatgtcccccaaaaaattaaaaaacgtgcgcgacgcgcccgtcctgaggacgcggagggggcgaatggcccccagaaagttaaaagactagcgcgacgcggccgttctgacggtgcgatttatcccaatgcttcagaataaaataacaaattttccttagagacattccatgcggtcgtcgtgcgctgtggagttgcccattttctgctctgtaagcacatcgccgccagcagtgaagtgaaagtgcttctctcaggtacgcttaactctcccaaagttcgcttcatcgcttttccaggcgaaggggcggacgaactgttcggctcttacgcttacatgcagcgggcgccgtccgcgccccttctccagcgtgagatcgtccgtcgtctccgactgctccaccaatacgacgttcttcgctgtgatcggtgcttcgcttgttccgctttacctttgctaatttgtcattcaggtgcccttcctgccatggtatttgaaattcggatccctatcctcgacaaaaaattcg

SEQ ID NO: 46978 - DNA, 1085 bp, Heterodera glycines
gtcgcaaattggacgctggagaaaggaatttggccattgtatggccatttgaacgtggacgtgcaacatttgaatcactaccgtatcgttacaataatcgttgagtcaatcaaatgcaaattgtgtcattcattttctgttgttcgttttgttcagcatgaaccgtacatccaattggtgtcagaaaacgcaactcaatcttcggccattgagaagcccaggccctgtgccagcacgaaacccgtctttctgaacacgggccaacgcgtggagggctattgcatcgatttgctaacgatgctaacagaagtgggctgaccaattaacaacgataattgcccactaattgactgattaaaacgttttaccccctttttcaattgtcttttttagtctctgaatttcacatttgaactgtatttggtcgaagatggcttattcggctcttttgacgaaaatggcaattgggatggaatgattggcgatttggtgttgggcaaagcggagttggcacttggcccaatttcgggtggggatttacggccaaacattcgcctgcctttctttacttttgccctttctttttgccaactttcagtgttggccgagcgtgaaaatgacattgactttacggtgcccttttacgatttggtcggccttggcattttgatgaagcgatcggacgttgaatattcaatgttcaaattcctcaaagtgatttgttgattctctctttccttttttatgtttaattcccaccaaaaggtgctcgaatggcccgtttggatgtgcattttgggttcgttttttggcattttccaactgtttgtcccccaggggcttatctgttcaccagcactttgctttgggtgttcgaccggttcagtccctactcgtacagaaacaacagcgaaaggtacgccgaggacgaggagaagcgcaacttcacatttaaagtgcgcatttgccattcgaatctgtccactccctcccccctttaggaatgcctttggttttgtatgacttcgctgaccccccaggggggcggcgaagcgccaaaaaatgttgcgggttgtttggcggcc

SEQ ID NO: 46979 - DNA, 1547 bp, Heterodera glycines
atgagtggttgggatgcgtacattcagtcattgacttccagttgtgcggagattactcgcgtggccataattggcaattcggacgcgagtgtttgggccaggactgaaggggagaacgaattcaaggtttgggcttacaattagtaagaatgcctgttctattatggttctctctaatctctggttgtgtttgttttagttaccgactttgttcggaaataaaactcgaaatatataaagggatagattaatttttgcaaataaatcaacaattattcattcaggcgagtgagcctgagctcaagaaacttgtcggccaattcgatgatctttcgcaagttccgtccgtcggtgccgacctcgagggtttgcccatgtgaaacttcggttctctattttgtactttcaggaattcattacattgtgccgcgaacggatgaaaatcttatctttgggaagagggacaaaacggggtttgtgcatttctaaaaataattttttttaccattctcaacccacaaaaatttattacttttccgcccaaattttatttttcccccattttggccatgtttttatgcttttcctcactttcattcagctttttcgctgtgaagaccaagtccgccattctgatcgccatttacaaggacgaggaaagtgtcgtcggcgccgacgtgcgaggggcggtggagaaaatggccaaataccttgaggacgccggttactgagccgttgctcggtttcctaaacgacttttgtgttgccaaacgaaaagtgctgagaatggctttgacttattcttccaaatgcattccttttccatcccaaatgatcacttattattttattattacacattctgtgaagtgcgcgtgccgatttcttttttattatttggcctttggatgtgaataataaaaaggtgtaacgctgagaaccaaaaactgcttttgcttttcgaaaaccttttccatcaatccgttggcgggcaaatgtctccgccaatccaattctgtaattgatacgggcagtccctttaattaatctgacccacaagtgccctgctttttgtttggcttggccttgcgtttgtaattcgagctcacctcgggggggggggggaggaatgtccgttcccttttgccttggcaacattcgccttatttcgcgatgctttttgtctcctttttcgtcttggcattgctttttccccttggtgactccgttctgtccgtcgttgcccctcctccgtctccgttgtctatcagtgcgtttcctccgtcactttccgccgatttcgtcacttttcagccattctcatcgatcgctttgatccgatcgcttccgttttcgtccaacatttgaacgtctctctgctctttttccgggaccactacaaaattgacgatgaaatgctccgtttggacacttttcacgtcgacaggaaaagtctgactttacacgccaacggcactttggactttggcaaaagcgcaatttattcgaaaagttggccaattaattcagtcaaatgctttcattaa

SEQ ID NO: 46980 - DNA, 545 bp, Heterodera glycines
  unsure (1)..(545): unsure at all n locations
actgtatttatattgattttcaaaaagcatttgactcagtgccccataatttacttttatacaaattggaaaaaattggtataaagggcaaacttttaatgtggataaagggctttttgagtaataggacttttcgagttaaaattggggattctttatcctcaagtaaaaaagttacctctggcgtcccccagggctctgtcctgggccctttattatttttgatttatattaacgatcttcctgatgctttgccatcaggagtgaaaataaaattatatgctgatgatgataaattatatatttgttataaagcaagaaccgacacagagattatgcataaagcattgcataatttattcgaatgggcaaataaatggcaaataaaagtttcaatgcaaaaaacttttgtattatatttgggttcaaaaaccccaaaagaaacatataaatttgatggaaatacaatnaatgctgtggatacaattagggatttaggagtaaacattgataacaaattacaattttccgatcatattaaccaa

SEQ ID NO: 46981 - DNA, 295 bp, Heterodera glycines
aagcattcgttcaccgcatttcattcgcggcggttttgcgcacggcgttcgcggcccgtgcacccaattttacatgctgcccaacactgtccgaattcacgggctccgcaccgcgttgaccctcaaacatgcgcaggacgacttggtcattgtggacagctacgacacgctgaacagcgcggacccacaagttggaggagggtggaaaaaaaaatttttttttttttactagtttttgaacgatttggccgacgcacgcaattggggctattccgtgctgtttgttgatctgtga

SEQ ID NO: 46982 - DNA, 1209 bp, Heterodera glycines
atgcgctttttcctcggctctcaacgcgacgaaaagccaaatgaggatggacaaaattcgtctgacgatgaaatggaaggaggagaggaaggcagccgtaaagagaccaagtcatttctaatcatttaaacatttttaaacgtattttatcttcattttaccattttagatcccttaaagaggtgctgcaaaagtttcgtcatgccaaaaaaacgcgtaaacgcaagaaaaatttggaccaggccaagaaggtcattgtcactgcacagcgcaagaaggaagagaagcgactgcccaaagacatgaagcaatgcaacatggaagccatcaatgccatctacgaccctcagaagttttgtggaccgtctcttcacgacggctggagggtcgtcagcggaacgagaaatacgcgattaggttgaatataatgtctccagataattacatcgaataattttaatttaaaacaattaaaaaaattttcttgcatcgccgttatagctcagtcggttagagcgtgggtctaataagcccaaggtcgcaggttcgacccctgctaacggcactcaattttttcatttttttaccagtttttagacttctccaaattgcactgtgtgctcgagtgattggtgttcatcaactacaaacgcttggtttttactcatatttgcatcgctatatacgaccaaaacagaaggaggtgacacgcattttgctatacgccgcgcaggcgtgccacccattggtgccgtcggatgtcattgaacaattggtaacatctttccttcaagtgtgattttggtgaaaagggtgccggaaagggaagacaactgagcgacaacccaattttctttttggtagaactcttcatagttgtccgaattgaatgaatttaatataattctgaacataacgatatttttttggaattttgcaggctaaaaaaattcaatttgtcaactaaaatgggttttatcttttatctaaaaaccggaagattagtcttattttttactttaatttttttaatgggttttcaaaaactttcagattcgagtggttgcacaaaattttgtttccgaccgcaacacaccggaggcaatcactgtcggcctgaatacaattcgtgaaatttacaagggttgccctgaggcagccactgaagagatggttcgggatttagcggcggtaaagttttcccagtaa

SEQ ID NO: 46983 - DNA, 1766 bp, Heterodera glycines
atgacacacgtatttttcgatcccgagtcggtcgattggtcatcttttatcactccccaacatggaagaggacagaaacaatattttgtcggaagcaagtatcaacggggattcggtttcctcggtaatgtggcacgtttcttgacccctattgcgaggaatattgcctcgagtgcaggacatgaggggctcgccgcggggcagagagttctgagtgacatcgcccagggtcgtgatttaagggatgccgtcagggaacattcaagacaggggctgactaaccttaccgacaagttacaacaatgtgggaaaggaaaaaggtctctgatcactaataagaaccggaaacaagtatatgatcagttaagtttcatctaaaggtataaatggaataaataatacaaaaagttaaaaatgacaactctcaagaaaatcgacacggcgagtgaggacggtctcgaggggggcctttcacttttcgacatccctccgacgaacgttgcaattaataaatccagtattcgggaattactccctctttcagcaataaatcaatctggaccgtatatctttagactttttcagataatcagttttgtgatctcaataaaacttttctttatttgtcaacttcaattgagagaaaagacaaaagcaattggattccgattaccaaggacagtgaagctgaccaacacgtcggtgtcattcaaaattttgggcagagctttgtcaaaacactaaaggtgtcaatttcaggtgttgagtcttatgattccggcatttactatgcgtttagggcatatatgatgaatgaattgggattttcagaagatgtcaaaaagggtctctgtgaagcgtcctgctattatgtcgacgatgtcgaccaggatgattatacaaatagcggctttaaaaacagagcgtcacgttttgctgatggggcgaaatgtgaaacaatggtgaaacttaattttgatctcgcccgtcagcccaatcttttgcttaataactctgatgtcatttttagcatacaccgtaacaccgatgattttctaattatggcaccgccatatgtttcaggaaatgcagtcatagcgaacccgcacacatatcgtattaacatacatgatattagaatttatgtaaaaacagtcgacattacccagtcattaaataacgtaataagcaatcagctacaaaccaccccagccaaatatcctatgagaaaaattgagatcaggagtcttttcatcccacgaggcacttctgatctctcacacaatgtttttacaagcattgttccgagacgtttaattgtcgggtttgtttcaaccggtgcgtataccggaaatcctaaagagtcacccttcgtctttgaacatgcaaaaatacgctctatcggtgtcgaagcgaatggaaacatattccccgggtcaccctattctcttaattttgatagaaacaaatacattcgagcatttgttgacatgtatacaggactcgggatggacgacggtgaaagaacaatgtcgatcaatatacaaaaatttgtaaacgggtggtgtttcttcgtcatcccgatgacctctactctagaggacacccccgggtttgaattgattcgaaacggaacgaccagcatcaaggtacaatttaatgagcctataaaggacggaggttatgagatgatcgttctgggggaatttgattcgattctatctattaatgctaatcgggtgctcagtagcgacggaagcatatga

SEQ ID NO: 46984 - DNA, 2239 bp, Heterodera glycines
atggacttgttttcaaacaacaacaataatagtgccaaaaaagctatttccattttccccgaagaaaatgtcaatgaggatgttattaacaaaagttctggcagttcaagcaactcttccgatggtgtgcctaccgaagaagatgtctttgaggttttataagattttattacattaagcagtacttaatgctaacacatcttaaggtggagaaaattattgcgcataaagtatgcgaagggaaagattattggaaagtgcgctgggttggttatggaccaagtgatgacacgtgggagccgcgggagaattttttggacaaaaaagtgttgaaaatgttgaaggactttgagactgaacagcatgccaaaaaggaaaagcgtaaagaaatcagccgtaaagtaatctttactagtctttcatttgttttaataaacttttagagcattgaatatactcgaagcaaacaggaagaagacgatcaggaggatgcaacagacgaaaagaacgaaagttggtttggcattaagccggatgaaggcacgctcgaacagaggcgactttttgtacctgaccgacgtctctccaagacagaaaaggtcgaatcattatatttttgacaattctgaagaaatgggtttctattttttggttaaaatttgcatatgatagttttccgggatgcttaactaaaaaatgaattcagatttgtgttcgatactccggaaaaagttgtatgccaatctttaacccaaaataaaattttaaattagaaactcatattctttggcgtattttattataattttccttttattatacagttattgaccgaaattggttcatcaccaggagtgcgaatattgcgaagacatttgaaagaacattctgttgaacgtttaatttcacctaaaattgaggaatcgtctccgcaaaaatgggaaattcataaaccaagaaagagtaaaaaattgaattattttatgaaacaatattatatcatttaggaagacgtaacgatgagatttttacatctgagtcgtcagcacaagaagtcttcgaaacaaatgaaaagggtgcagttgctatcccggaaaagcccaaaggaatatcccaaaaaatgccaaatgacaagcggattaaagaagaagtgggaactcatgagatgaaaatggtatttcacaaaaggccaaggcttggcgaggaggaaactcacaattccgaattgggcatcagtaaaagtctgaagccgaagaaattagccaaactcggtcaaaaattgaagttaaaagccgcttcaaaaagagaagacattattcacatgaagaagaccaaagaagagaaaaatgcatcaaaaaaacacgaattgtcgaaggaatcagtgccacacaaaaccaaggacaaacaattgagtaaattagccgtggtgagacttgaagagacagggctggtggttccgtttgcttccgagggagtaaatattgccgcggcattcgaacgtttggcagtggaaagacagacctctctttccctcattgataatccgtttttgatttctcaagaggtacaatgtctgtttatcatcaaaaaacaaagccgattttaggagtttgaggaaatggtaatggatggaaaggtcgagaaagtgcaacaattgctttatggccaagcagcgaacaacttcagcctgaaccgtgtagacgaatttggaaaaactttacttcacaaagttggtctatgtttactcttactgatttcggcttatttctttcagctttgcgagattaaatgtggcgtttctcacacgcaatgtgaattgattcatttgttggtcgcatgcggcggtcgtttaaacattatcgaaggtggaaacagtcaaattcctctccacgtaatatatttctgcaataaatattccttatatttaggcgaaaaattgaaggtaataattagggactggatttgtatggatttccatatttttttttgcacacttatttcggcctaaaaaaccacgtaaatagtatttttagcttggtttaatgcttctaggacacatttttatttccatatttcagatttttgtccatatttgacatccatatttcggcattttcacaaaaaatacacccctaaagatggacaatttttggaaatacaccctaaaatcgaaaaattttgggaaaatttacaaaattttgcttttttgttctaagaaaattcaattttttagtaaaga

SEQ ID NO: 46985 - DNA, 3451 bp, Heterodera glycines
  unsure (1)..(3451): unsure at all n locations
tatgggtatcgcacagtgggccaaccaacgcattgtggggccatgaaaaattggtgcccgaggaggaagtgtggcacgagaaaaacgacgagtaaaaaaaagatccaaattttacaaaattttaaaatattttatatgttttacagtcttcttactatccgtcatcataccgttatggttatgggtacggctacaacaactacggtagcagttacagtggctacagtggcggatatgcgccggatgtgtaccagcaaaactggatcaccagtgagcacaatcgctacagacgaatggtgggttcgatgtgataatttatttaaatgtttttaaattaatataaaaaaggtactaaaaaattttcaatttaaataattaaattttttttttaattttaataaaataaatttttttcactttaattataaaacgaaaaagttgaaagcatttttaaatcaattaattgattgtcttaatattttgggaaaaagcattattattttaaatttattttaattaattctagaaaaaaattttaattttaattaaaattttaatttttttttaaatttatttcttatattaattgaaactaatttagcctttgatcttttcttgggtttctataaatttagaacttttaaaacccaaaaaagttttttctccccaaattttacgcctttttctttgtcactccgcgcaattttcgcgcccaattagtgttcccaatttgtgcaattcatcaaataaatcaccgccccgctgtgacgtgaacacaatttcacgcattttgtgctctgatctttcccctcagtgttaatacaaatttatatttttcacgtgtcaaatttttgcaaaatttgtcacaaaataacaaaaaaaaagaaagaaagaaaaccagggaatttaaaattgaaatttagaaaataaatataactttttttttgtttaataaatacaataatttaaaaaattcaattaaaaaaaaaccaaaatatgttttattaatattaaaaaaaattaaattaatttaacagtgccattttcacaattttcattaattctttttttttaaattaataaaattaattaattgttagcaaaactttaaaatttaaaattttttattataaattatgaaataaaatttaataaatcaaacatatttatattaatttaaaattgatgttttcactgcttacaataagttttttcttggaaaacaaaataaaataaattatttgaataataattatgagcaaaattttatgacaaaaaaaattattaaataaaaaatttaaatgaaaataaattttaatcaggttccagcaacggacatgagaatggtgtattggaatcagcagttggccgcaagtgcgcaagcacatgccaacacctgcgattttcggtgactaattaaaagcaattaaaaagaaattaaaatttggtaaattattatttttagacactctcgaaaccgggcaaacatggcgaaaatatttggtgagtgaaacagaaagactaatttttgcggaaacttttaattaaaattttccatttttatagggccgctccctactacaattacacggacgcaattggacgatggtataatgaggtaaaaaccaaagcatattaattatgctaattaattaatttataaaatttggaaaaataaaaaatttattccaacggaaaatgttgttttatatttttacgaaatgccaaaacaggactaaaattggtaaggaagttcgaacctggcaaaaaggaagtctttttctaaacaaaatcattacaagaaataaaaataaaaacatcaaaaaatttatttttattttaataaattaaaaataaaaatgcatctagaatttcgtaggtgaaaatttatttttaatatttacgacatgccaaaatagacaaaaaaagggtataaaagttcgaacaaaaaatgaaaaaataaaaatcccaaaatgaaaaacaaatgcctgcctatttttcaggtgaacgacccgtggtgtggttgtggcaccgggtacaagcactgctgtggacattacactcaggtcaataaaattaaaatttaaaatgccataattaaatggaattaaataattaattggattcggaattatgtggaaatccaactattcttaaactgaggcctgaaaaccacgaatgatttcttcaaaaaataactgcattcctcgattaaagcggcccttttgagctctaaggatcggaataaatttaaaaaaaaaactttttttggggggattttatcttaaatattataagaaatataactttctaaaaaatttgaaatatatgccaaaaataatcaaaaaatgaaaattttcgaattttaactcaatattcatgaaaattaataaattttagctttattttgtattaatagatggtatgggccgagacaaatctgatcggctgtggatatgcgcaatgtaacggtgtgacgggcgtcggcggttatgcgaaagctgtgtaatgatggattttgaatttttattattttaaatatattttaattaaatagtatggtaaaaataatattgggcaaataattaattataaaaattgaaaaaaatgattatacaagaattaatagataaatgaattggctaggcaaaaataaatgaatatntaattgaaaacaaaattaaatttcattagaaagttatataattaatcgaattttaattagttttatgaaaaacattattttttaaagagatgaattaataaaatattttaaataaaatttactaaaaataatttaattactatgaataatttaaataagaaagtttcaaaaatttaataaaaatgtattaattgcttaaatgaatgtcttaaaatcaaattataaaattctaatttttatcttttcagatttgtctgccattacaacccccaaggcaacaaagtaatgtattacttcaatggaggggattatgcggtcagtagctatgctttttttgcaatttttaaaattttttttgaattttttgtaacccaattttttcaataggaattttttttttgctttattaattcgcatgagttgcttacaacacaatagtgtgaaatgaagtgcgcttttatactaataaataattttaaaaatattattaattattattaaatttaattggcacaaaaagtttaaatcttaattggcttccttttttaaaaagccattgaattgaaataattattaaaaattaaacaaaaagaccatttatttgatttaaatttattattgctgactgtttggcttttccttgctttttctttcgcttttatgtgtcataatttttctccctttattttgtaatttttaacaattaactaatgaggggcttaggtttttcagttcagtctggacctggctccaggccttgatattcctggacctggattttcctag

SEQ ID NO: 46986 - DNA, 619 bp, Heterodera glycines
atggcgcaacttccaccagaggacgtcgcaacaatgcccacgcagaaggtcgtcttcaacgccccgttcgacaacaaggccacctactacatgcgggtgcgtttggcgtggtgcacgtggcatgcggaataacccctccccctttttcaggtgatcaaccctgggacgaagcgcatcggctacgccttcaagaccaccaaaccgaagcgcatcaacatgaacccgccgaacggagtgctcggcccaaaggagtccgtcaacgtggccgtctcctgcgacgccttcgaccccggcagcgaggacaccaagggcgaccgtgtgaccgtggagtggaccaacacgccggacccagccgccaccgcgttcaagctcgagtggttccagggagacgggatggtgcgccgcaagaacttgccgatcgagtacaacgtctgatggaaggatgcttcgtcacctcaacatggacataataggatcccacccatcccaccgtcccaaaattgtcattttgtcccccatcatgtaaattgttgtacctgtatgtaaatttctgtgatcatcacttcaaatgaatgtatatttaattgttgcctatgtaattgtattgttgttgtgctta

SEQ ID NO: 46987 - DNA, 1955 bp, Heterodera glycines
tgaacttctccttctcttcggcccggcctttcttttcgtttttgtcgtttattggcgtcacatttcggtgctcaaaactttgctcgttggattttgttcgctgattatcgtcttgagtttgttttttatttattttgatttctttcttttcttcattctcttatcattggcagttttgtctgtgcttctcgactctctcatgtggcgtcgttgggtttggcctgagggggaagtgattcactttaatgtgtggcacaatcgtagcagcgagtacggcgtgagtttcacaaattggcccataaattcaaaaagggggggggggtggcgtagacaatttttgaaaaatgcaccaatggggggactttccccctcctgctcttactcgtttattgttttatgagggatacactggaagaaatccctcaacaaattctgttaaaatattcaaattttcccatttgtccctccctttcgtctcctcaggtgttgcccttttggtggtactttttctccgctttgcctcgtgccatgtttctctccgtctttttggtcccttttggccttctcatccatcaacgtgtccaattcgctttggtttcgctgtgtcttcccgcctttctttttgtgcttctcttctcctttttgccgcacaaggaactccgtttcattctctacgctgtcccattgttcaacacttccgttgctgttttttgcgcttggatgtaaaaaatgggagggggcagggacggtcccaggatttcggcttgggggcgagtgcctccccccgggcgacgacctttttgtttcacacccacttttttgcggcggtttttccaaaaacttttgggggacagggggtccggtggtgccgataggcgccgccagggaaattttttgcggttttaaatgcggtttgttaacagattttgtccaaaaaatgaccaaattttgtaattttgagccatctttagcagatttcatcaaaaatctaaaaaattttgatttgctatgggttattttgttttgattttgatgtttttgcattaattgcatttaaagatggaaaaaggctcgcgactcgtggttcttccgcttctgtgcctttttggttgcgttgcatttgctcgtcaatgccattttctccgtcagttttgtttatgcgagcgcacaaaactacccgggcggagttgcactgctcaaattgcaggtgaattctccaatttcaacaaagatttacttatgaagcattttcccgatcactcattattttaaacaattaattccaagcatacgcaatgtttttaatttaagtcagcattccaaaaaggccgcgcccttctggcgcccggccaatttttgggaccatcccggggcgcccgtttaaaagattcggtgtgcatttacgtattgttcagcataagcaccgcttccttcgggacaagccaatcgccgttcacatcgaccaattttcggctgagactgggatcagtcgctttttgcacctctatgacgcgtgggagtgagtgtattgtctaaatgtctcgttcaaggcgtacctttgattccctggcttcgctattgatctttattgccgataattagcaaacttctttacaatcaaatctcattatcagatacaacaaaactgagaatttggcgcaagaggagtttggtcgattcgattacattttggtcggcaattacgatggtcgtcttcgtgctgagatgacaaaaaacaatttgaatgaaacacacacgaaacatttcattgtcaaggcatttcataaggtccaaaaaatgcaattggtttttatgtttaatcaattgatttttagcaattttggaagaagccgactctccccaattggctcaattggtctccgctcaataaactgcaagtgcccgcttactcttacaagccaaaagtcatggtgatgaagcgaaaggacgagtga

SEQ ID NO: 46988 - DNA, 1050 bp, Heterodera glycines
atggacagaatccgcagcagaagatccaatacagcggcgacgcgtggcaaaacacaaaaacatttcgttcacgcgacgcgacgtggtcacggtatgttcaaggggaaaaaacagggagcaaattccggcgttttttgaatggcacctttctgtgtcccttcttccgctttcccaattgatgatccattgtcatcattttcccacagatacaccggcgttgacctccaatcgttggcgctgaccaaacaaattgcgcagtcgcattccggcattttgtaccgcggcaaatggcagaacaacgacattgtggcacgggtgctcaatgtgccgaatgtgacggagcgaatatcgcgcgattttgccaccgaatttttgcaactaaggcgagttcggaaatgaaaattcttgaagcttggcacgatgagagaggccctttcattcattttaaagaaatttatgccacattccgaatgtgtctttcaaaatcctaattttaaaaaaatgcccaatttttgccttttaaattttttttattggattggaaatatacttacaattatcaacttttttgaatttcccattttctcctttttaaatgggggtattgttttttgttaagaatattcgccagtgccttcgtcaaccccgtgttggccgtggtcaaccaaccgccccaactgattgtcatcagccaattcatgcctttcggctcgctttacaatgtgctacatgagcagtcatgtgagcaaaaacttaagcaaatatatgtaaattgatagatcttttgcaatttgaactaattaataagacaaatttttgcaaaattcagctgtggtcatcgaccaccaccaggccattcgttttgcgctggacctcgcccgtggcatgtccttcctgcactccttggaccagcccgtcctgcgatattatctgagctcaaagcacgtgctcatcgacgaggatttgtccgccaaaatttccatggccgacacaaagttctccttccaggaggtcggccgattaagtcgcccgcttggatggcgcccgagg

SEQ ID NO: 46989 - DNA, 1530 bp, Heterodera glycines
  unsure (1)..(1530): unsure at all n locations
attcttagccaaaatatttacaactttctcctaaaactcttaaaattntcggaataccaatttggttttgttagaaataggtctacgacaagtcaactaataacagttgtggaagattggtatgatgcaattattaatggaaaaaatgcggactgtatttatattgattttcagaaagcttttgactcagtgccccataacttacttttatacaaattggaaaaaattggtatacggggcaaacttttaatgtggataaaaagctttttgagtaataggacttttcgtgttaaaattggggatgctttatcctcaaataaaaaagttggctctggtgtcccccagggctctgtcctgggccctttactatttttgatttatattaacgatcttcctgatgctttgccatcaggagtgaaaataaaattatatgctgatgatgttaaattgtatatatgctataaagcaagagcagatacagaaattatgcataaagcattgcataatttatcagaatgggcaaataaatggcaaataaaagtttcagttcaaaaaacttttgtattatatttgggttcaaaaaacccaaaagaaacatataaatttgatggaaatacaataaatgctgtggatacaattagggatttaggagtaaacattgataataaattacaattttccgatcatgtaaacaaaataacaaggaatgcgtatttacgtatgcgttccttgtttcgaataattaaatccaaatcatctaagatttggattacgttatataaaacttatattaggcctttattggaatacgctccggaggtttggaatccgtctcttcaaaaaaatattaaaaaaatagaaaagtgtcaaaaatatttcaccaaacgggtattttttaaatgcagccttccgccaattccataccaaaatcgattaaaatacctgcaactgccgacacttgagaataggcgaaagctatttgatctgttcatggcgcataaaattgtttatggccgaacagatctgaaactattttcaatttttaatccatcgacacgctttaacatccccttttacagatttaacacaaaatataaaataggcaaaaaattcattccctttgccgggagggtaacaaaattatggaatcaacttgataaagaactaataaaaacaaattctttaaatcaatttaaaacaaaacttaaaaattcattagggtaataaccggaaaagcaaaaacagaattaattttttaagtgattttacatttgtgttatcgatctcaattgactttgacctcattttattcatatattttgattttattttttgatcatccatatatattatatcacttactctacgacatactatctgaacagtcgtcagagtaagtggttttttgcccttctgatgactttttattcacgaataaataaataaataaataaataaataaatttcatctaattacagatttaaagaattaagtttttttcttttatttaaattcattttttgtttttg

SEQ ID NO: 46990 - DNA, 839 bp, Heterodera glycines
atggtggagaaattggctacggtaaatactcgctgccccacggtgggagtgtactgtattttttagtagtaatatgagggaggcgcttttcctaaaagactaaaaaaagtttctcagagtttctcggttacttcaaaatgcttctctggacagatttctaccataacaaaatacagtagaccaaactgctaccgtaatcattgatttgccgactgtttttgtgccccttttttagctctattggttcaccgtggagttcggcatttgcattcaaaatggggcaaaaaaggcgtacggtgcgggactgttgagctcatttggcgaattggaatatgcgctcagcggacaggtgaataaaagacaatttaattttccatttttgtacggatttagtaaatcccggtttatataaatttttccactaacactgatttatctcctctctctattatctgcccccaatttgtagcccgaattggctgcgttcaacccgccggagacgtgccaaaccaaatacccgatcactagctaccaacccaaatattttgtggccgaatcgttcgcggatgccaaaaacaaactcgcgtactgtatttgtcgcgctcgcgttttgagcatttttaaccctccccgctcccgcagtacatggtcaacgagcataccaagacagttccaagtcaactacaacccatacacacaacgcatcgaaatgttggacaatgagagtgcagcaaacaagcttgtccgggatgtgaaaagtgagtcacaaccgtggtgagtcgaagtgacaaaagtgcgaatgagtggtgatcagaaggggcgggtcttttcagtacgga

SEQ ID NO: 46991 - DNA, 2123 bp, Heterodera glycines
  unsure (1)..(2123): unsure at all n locations
aagccattttgtcttattttgaaaaaaaaaatttgggagccntgataaaaacacaaatttttaagaaaatgcaattttattattaatattgntatttttattcataatcaattcaacggataaagctttgtctgttgatttggcaaaaaatgtaaaagtttggccatctttgnatgaactatttggccaaagatgggaaagtgaaaaaacggaaaatgaaactgatcaggccccaaattattatgaaagtgatcaaaatgaattaatttatccaattggcaatgatcagaacaacgaacaattcaaagatcagcaaaaaagtgaaattgtttataaattccatgcaataaaagatggaattaagaaaaaagaaaatattcgacaaaaatttggagtaaaattgagcaaaaaattgcagaaaatttgggaattggccaaacaaaaatttacgaatggaaaaaagaattaaaatttaagaaaaacaaaatgaatgataagaattattatgaaaagaaaaagaacgaatttattaaaagaataaacgaattttaaaaaatgccaaaatatggaaaacagaaacaatttgcggttaagagttgggcattgacaaaacaacactaagcagatggaaaaacaaatttggcataaaatgtatcgaatgtaaaattattttaatttaaatttttatttttctgttttagaaggaaatgcgtagttaaatgatcgaaaaatggccaatgaatttttattgtaagctaaagaaagaaaatccttttttaagttacaaagaaataattgttggattcttgaaaatctcaaaaggcaaatggaaaaaacaaaaaataaataaataatttttggctttattttaatatttattaattgttgatcaaatgctgttcattacccttaattattgtactccaatttttttttatgcaaaaattttgcatttgcgcatacgccagtgagaagtgcgagcggtccgcgcattaagttccgcggcttaatttttgtgtcaatgcatttttgggaagaagccgaagggtaattaactaataagccatggatttaatatataaattaatacttgaaatttaaaactgtaaaattattatttttaagttgaaattttgttatcacaagtttaattttttttaatggctttttgaattgattgattaaattgtttggtttaaaatgatattttaatttagttttaaaaatttttttgcctatttccaaaacgattattttcactaaagtaaaaaaatataattgtaatattaatttaaccatcaggagtgaatattaaattatatgctgatgatgttaaaatctatatttgttataaagcaagaacagaaacggaaattatgcataaagcattgcataatttattcgaatgggaaaataaatggcaaataaaagtttcaattcaaaaaacttttgtactttatttgggttcaaaaaacccaaaagaaacttataaattttatgggaatacaataaatgctgtggatacaattagggatttaggagtaaacattgataacaaattacaattttccgatcatgttaatcatataacaaggaatgcgtatttacgtatgcgttccttgttccgaataattaaatccaaatcatctaagatttggattacgttatataaaacttatattaggcctttattggaatacgctccggaggtttggaatccgtctcttcaaaaaaatattaaaaaaatcgaaaagtgtcaaaaatatttcaccaaaagagtattttttaaatgcagccttccgccaattccataccaaaatcgattagaatacctgcaactgccaacacttgagaaaaggcgaaagctatttgatctgttcttggcgcataaaattgtttatggccgaacagatctagatatattaaaaattttcaaaccttctaaacgctttaatgtccccttttataggtttaacacaaaatataaattaggcaaaaaatttattccctttgcggggagggctacaaaattgtggaatcagctggataaagaaatcattaaaataaattctttaaatcaatttaaaactaaaattaaactccttaacgtataaaatgaccgg

SEQ ID NO: 46992 - DNA, 898 bp, Heterodera glycines
actttgcgcagcaacgcaaagcgtccaagagaagaaaagtcaacgaaaccaccaccaaaactgcggcagatcaaaggcttggagggtgcagcaaaacaaagaaatgttcgattcgacccgcgcttttccgcttcctgcgggcaatttgacgaattcagatttcaccaagattactcctttattaacgaacttcggaagacggacatccaggtcaggaatgtgcttttcgttttgttttcatcagatgaaatttggacggaaaagaaacaaaaatatttacacccataagaaaagtttatttatttttttgttacaggaactgaaaaaggcttttcgacgcgcaaaaagggaaggaaactccgccctttccgacagaattcggtgtaatttgcttcgtttggagaatcaacaaaaggttctttaatcacggttacctattttataatttttatttattctaggctgaaatggagagacaaaaaatggagaacattcgattagaattgaggagggggaacattgaacgaatgaaccgaggagagcgcccgatttacctcaacaacggtcaataataattacccattgattctgggcaatttaaaaaaaaatcccgtttagccgaattgatggcccgtgcaaattgcgagaataatgtcgtagcgccaaattcatagaaaaagaaaagagggagagagggtaatgtgaagacgattattgactcttccttctgatccaaacaaaataatattgttcgagttgaaaaaagtataaattttgggtataagaagttgcccccacaaagagaaacgaaaaacgcactctcctttaaatgtgcctcatccaaatcgtttgcttaaaaaaaatcggcaattgtgtagaattgtggtcccgaccaaaa

SEQ ID NO: 46993 - DNA, 1934 bp, Heterodera glycines
atggttgaggttaagaaggaagtaagttaaacatgggttagttgaggtgggataacaacacttaagcgggggagtcgccatcgaaatgggaaaatgattttggtttgaatggtaacgaatttcgagaaacacttttgatgaagactctcacgctttaaaataattaatcgtatttaacggtaatttttatttcattgacaatttaaatccccgggttcctttgataattgaaggaaaatggcatcgaccgatcgcaccagcggagcggcaagtcgggaagtctcgagccggagcagttccgaaaactgttcattggcgggtctgtcaataaaatgttttatgattgttacatactgttttgtcgttttagtctgtcactaaatacaaccgacgagtcactgcatgctttctattcccaattcggaatgctcgtcgattgcattgtgatgcgtgacgcacaaacaaagcggtcgcgcggctttggttttgtttcgtttcaaacagccgacgaggttctagtgtttagcgaattgtttattttgaggtattatgttccttgaggttgatgcggcgatgtccgcgcgtccacacacaatcgacggcaaagtcgttgacccgaaacgagcggtcagtttttcatttatgatgaaagaatgccctttttctttattactaaatccgtatttcattcattatcattccattggaatctgccaattttcttctcatatcaggttcctcgtgaacaatcagcaaaagccgagtccaatgtgtccactaaacggctttacgtttcgggtgtccgagatgaacacgacgaagaatcgttcatgcattattttactgagtttggccccgtcgcaaaggtcagttttcattcctattcgcgagtttacttcgcatattgaaaattataggtggagataatacaggacaaaaacactaacaaagcgcgcggtttcgcttttgtcacattcgacgattacgaccctgtagataagtgagttagtcatgagaaatcccgtcaaaatgtgaaaaaatttcagatgcgtactcctcaagtctcatatgatcggcggttatcgttgtgacgttaaaaaggcgcttagccgcgaagaaatgcaaaaggcacaacagcacgacagagacagaatggagcgagggatgcgttcacgaggttttccagacccaagcgtcattgcatttatttgctggttcattggtttcaggtgtgccaccgcagtacgggggacgtggcggtggttacggtccacccccgcctgcctacgcacagtacggtggcggctacggcccgcctcagccgggctgggggccacccccgccccaatggggtaaggcttcggacatcgccacaaaaggaccatttcaaattggcatatgttttactagattaaaatatcctttttacaggtggttatggaggagggtatggcggctatggacaaggacctccagcagccgcttcgtggggcggtgcaccaccacaagcgcccgctgggccgcttcctgcggcgggtactgcagctgctgagcaggggcagtggggcgcagcggcgcaaggatggggccagcaaggaggtgcttcctggggaccgcagcaagcgggcgcatggggaggtggcggcgcggccggcggtggtcccgcggccagtggcgcctacggagataaaccacaacaggacgcaattggttgtttcttcatttgaaactgtgaaaacaatttctttttaagggggtggctggggtcagccttcaaccgcagttcctggcggcgtgccgccaccacagcagcagcagtggggagcgacgcgttactgattgtgagcaatggtggcacacgacgcttttgaatttaatgcagtcaatcatggaaaaacctttattattttttaatttcgatttatggaattaaa

SEQ ID NO: 46994 - DNA, 2196 bp, Heterodera glycines
atgaatgcttattcgaatcgtagctacggaatcaaatacgactacggctccatcatgcaatatgcgagcacaattgcttcaagtgccccgggcaaaaagacaatggtggccaaattgaagccgaccgaaaatgaacggctaatgggacagcgggaaggactgtccctttcggacgtggaagcggtgaagaaaatgtactgccaaccgagtgagagggaaagggcggcacacggacaaactaatcaatcaactaattacgcccaaatttgggcctttgttgctcaatttaaattaatcatctaaatatccctactgtaaccagcaacaattatttgttaaggttgtgacgacaaaataatcttttgtggcatttgggcgacgatgaatttgtgtgagttcagttgaaaatgattatctcaaaatattttatgctttcacatttggcgattattgcttaaggcgacccgcgaatgtggcggagagcggtggtgcacgcgtggattgtggaaaactgccaaaaatcatgcaataaatgcggggagaaagtgcaatcggtcaaagggcaggcggccattttaaagttggccaattgacgcggaaagcgacacaaaataacttttgaatggcattcattgcctttgttctcactccgtttggtgcttttgcttttcccttttttctttttcatatccaacattcgcaattgtctcttttgctcctttcgccccctcccctcctctccgtgttttcctttctctcttcctccttttcttccatcattccgtcctttctcaattccttgccaattgttctgttttcttttccatctttcgccgttacttttgccttcgcctcctttttgaccttaaatggaatggcaatgcttttgaaatgcattttaaattgaacggacaaagtgtcggagaaggacaacgacccaaacaattgctgaggcgacgaaaagtgtggcaatgaaaatgcgattgggctgaggctttttgtgctcaatgatagttcgagtcgtataataagaaaagactccaaatgaacgaaatatttccaaaaagggagcaaatttcctgaaaaatgatttccgacgcaataaaaatgccaaatttcccactttttgtcgaagaaagcgccgaaagactgcactaaaaggaaaccatttttacgaatgttttttgactttttgtcaaaggacttgtgcaaatgaagaaggcgattttcagtgtgaagtccaaatagcccaactgagccctgtcgtattcgaagtggaggaaaatgcaaaggagcagcagaaaatgggcgaggcaataggccttaagccaaacggaaagggacgggtcgtacttttggacaggcaattgcacctgaattagtgaagggttgggagggattagcacagggaacgaaaaataatgagaagccaaatacaaatgggagaagaaaagccatttgaatggaaattcaccgggggaactccgaaagagtggtcatccaacgaagtccagtggaagaagtggcgaatctgaggacaaaaggctgagcaaatcggaaaagtacacagattgccctgctaaacgcacttttgttccagggaaccaacccggagggaagaaaagcgccttcactttgtccgtccatttggggaacactttttgccccttttcgtcctttaagcgccatttgtcgcacaacaattccttgagagtgtgaaactaaaaacgaacgaaaactgattagaagcacaattggaagccgacaattcaggcctggagccacagctgatcaaagcttcgctcgggacggatcagcccgtagaccgggggctcttccttgcgctcggcctcgaaagtgcggaacatccggtcccaaatgatcaaaacaccttccgaatattaaaacagcagttagtacaagtgcttttttcaccgaccaccaaagttacggtcgatacagtatgcctggaaagggaatactcattaatttgctgctggagagagtggcaaagtgcggacattgcgtccgtggtgcacgcggtggtgggacggagtgttgaacacaaagccaagggggccgagagaaccgagcagggaagtgtgcatccaaaactggaagatttcggagaaatagcgatggacgaggaaaatggacggagggatgagaaaggcctgcattggaaggacaatggaa

SEQ ID NO: 46995 - DNA, 1168 bp, Heterodera glycines
atgtgctacaaaaagttttccaattttaaatgtgccggtgattaactttttgcgtttcccttccagcaacatcatttgggtgctccaggtggtggcggtggaggctttttctacgcgcatcaacagctgacaccgcccgtggcccctggccaacactcgccgggccagcaacggcactacgcaccgccgccgccacaaatgctccatcccggcatgatgtatcaccaccatcagcagcagcaacaggcacaacagcagcagcagcacatggcatcgccttatcaccagcagcaacaacaatacggagcagtacagcatcagcaacatcaacaggcaatggcagcggcggcggcggcgtattgggcacggacaaacggacagcagcaacaacaacaacaacaaatgccaaccccaccggcacaggttggacggacgggatgggatggaaatgacggcaaatctcaaaaacgagatataatttccctgtcgttcccccactcattttcttttgttcaggatgttggtggtggtgccgtgcctggcgcgtccacctcggctcggcacacgccgcagccttcgtcagtgccaccgcccaatccatcgcccgtcgcttctgccggcccaccgcagcagccggtggttcagtccagtccatctgtaacagctgcgacttcgtcggctccgggcaccgcgtacgatgaatgcggcatggccgacgtcggtactaccgactcggcgcagcgaccacggtcacggcaacagcagcagcaacaacaacaggctgtacatctacaacaacaacaacaaccgccgcaacaccacccgaacgctccgccgcagcaggcgatgatgctcacaccgcaggcggccgctgcccatttgcgttacgcgtccgccgtgccgccttcgcccggcatgatgatgatggtcggcccaccagggggaggaccaccgctgtcccatgggctgcccccgcaacagcagcaacaacatgcgtacgcaccgccgatgggcccgccgccgcatccctcgccgcacatggcgatgccgccgatgcaccaccatcattacgcgacggcgcaagggatgccgcctccgttcccgggtctgtcgtccggcagttttcccccacaattcataggtgtgcgagagggagggagggggccgg

SEQ ID NO: 46996 - DNA, 1269 bp, Heterodera glycines; identical to SEQ ID NO: 11888

SEQ ID NO: 46997 - DNA, 1348 bp, Heterodera glycines
atgtacatcaaagaagtgaatatcactggttttcgcagttacaaagagttgacaacagttcgcaatttttcacccaaacacaatgttgttgtgggccgaaatgggagcggcaaaagcaacttttttactgcaattcaatttgtgctgagcaacgatttttcctcattgactctgcaggacaaaaatgcctttttgcatgagggggtcggaagcagagctccaattgcaaaggtcgaaattgtctttgacaacacggacagacgaataccaactgacagtgacgaagttcggataatgcgacaggtcggccagaagaaggaccaatttttcatcgacaacaaaccagtgacacggactgaggtgagccgaatttgatccatgaaaatttgaattttataaactcgaattataaagattgtcaatctgatggaatctgccggattttcgcgctcaaatccctattacattgtcaagcaggggaaaatcactgaattagcaaccgcgtctgatccgtacagacttaagctcattaaggaggtgcgtgctttacacgatgacattggattaattgcatttttattaaaggtggccgggacacgcgtttttgatgagaaaaaggatgaaagcaccaaaatattgcatgaaactcagacgaaaattgagaagagtgttcaattgctcggttatattaatgaacggttgaaaaaattggaggaggagaaagaggacttgaaggagtaccaaaagtgggacaaaatgcgaaggtgcgattgcggtgtatggtgaggatttactactgaatattaagggcaattgagtacacaatttacgatttggaaatcaaagaggcgaggagcaaaaacgagaaactgacttcgcatagagagcgaataaacgcacagcaaaacgaagtcggcaatttgcaactgtccagcaatacaaataaaacgaagcacttaaggtggagacgaagctgatccaagccaaaatgtcaatccaagaggcggagatgcaaatccgtcgattggagacgcattacaaaggcgtgaaggaagagcgtgccaccctgctcaaggagcagacggaccttatggagcgcaagacgcagttggagttggccattagggacttggccgaagacgtagaccgtgagagaagcgggcgcgaaattgcggaacattcgctgcaacaactgaaacgcgacatcgcggagaaggagggccaattggaacagttgcagccccaatttgaacagttgctagaggaggagagtcagctgggctcggacattcgcattggcgagcaaaagtgtcgcgaattgtatgccaagcagggccatcgtgaacag

SEQ ID NO: 46998 - DNA, 3133 bp, Heterodera glycines
caccaaaatgtccgtctcttttcccgaagagattatgccgccatcctcaagtgataacccaaaacaaaatccattcaccggcaacaatttttcgtcaaaatattggcaattgctctctgaacgcaccaaactgccagtttggcgtcacagagacgaattcatttctgcgttggcaacgcaccgatgcattcttttggaggcggagacgggcagtgggaagaccacacaggtggacgacgagagaaaacaaatcccagaaattatttaatgcattttaaaatgtgtgcaatggttcatttaagagtgatgtccaaatccccctcccccacagattccccagtggtgcgtccaatggctccgaacccgcgacccccacaacaaatccatggtctgttgcacccaaccgcggcgattggccaccgtttgcgttgcgcagagagtggcggaagaaatggacgttatggtgaaaaaacacaaaaaatattatataaatattataaatagtataacatttgtaacattttgtttcagttgggcgaggaggtgggctattccattcgttttgaagaggccctggccacagcacacttttgaagtgggtattttcacaaaagtattaatgattgaattataattcaattattagttttattttatttgctaaataatacatcataatttagcttaaacttagtcaaattaattaaatttggtattgaaggaagttcttcgtaccctctactatataataactttttgaaataaaatttacaaaaagttgtttaagctaaattatgttgtattatttttaaacaaaataaaaataattattattttaaatatttctatcagtcacccttctcaggtattgcaccgacggaatgcttttggccgagtcgtcccgtgacgaattgctgaagagttacggcgtcattctgctggacgaagtgcacgaacggacgatgatcaccgacgtggtcatgggactcatcaaagtcagtttgccggatccaataatttgttgtgccaaaattgccagattaatttttgagattcttttccatttcgtttctcccttttctcgaccttttcaccatctccttccgttcgctaattatgccttttttagcgtatttccgaatttcgtcccgaattgcgtgtcgttgtgatgagtgcgacactgaaaaccggcaacttcgagcagtacttttacgggtgccatctcatgaaaatcagaggccggtcttaccccgtcgacataattgtaacaattgctgcgctttcccattttggtccattcattaagtaattgaaatgtccgtttagcattcagaaatcaacgcagtgatcgacggcgacaattacatcacaaaatccgtctccaaagccatcgaaattctccaaaagacggaaaggggcgacatattaatatttctttcgggattagaggtgcaaaaaacaacaaaaaataaacgaaaatggccatttaggacattgaaaaatgctgtgaaatggtggaaaatgaggcagagaaatgcggcggaagtggccgattggtaattcacagggaaattgggcgaaagttcaattagaatatatttatttttgttttcgattgtgattcctctctatggctcaatgcaaaacgaacaacaacaaattctgatggaaacacagcaaaaagacggtgggagagagtgaagatttggagagtgaagggggggggggcgattgaagaggtccgattgccgacagattttacattaatagtaaggctcaattttatgggtttatatgtgactgtaaatgccgacaatccgctgggagaatttcttaaagtattgtgatccaacggaatgaatcagccaatgtctcaatttaaacgacaattttccacatttaaacaaattccaatcgaaaaacaccgtttttcacaaatgtttaaggccctcgtcggtgtattgtggccacaaatgttgccgagacttccatggtaattctctttcgcgggaatgtccgaatttaccgctttcccgcgtcagaccatcgatggcgttgtgttcgtcatcgactcgggcttctgcaagcgcaaaatgtacaatgcgcggtccaagttggagtctctgctcgtccagcgcatttcgcgcgcctccgccacccaaagggcggggagggcgggccgaacgcaacccggcaaatgctttcggctgtacacggagcaatgctttagggaaacgatgaaggaaattgtgccggaggtgaaattgccgtgatttttgggggtttaatttgtgcctttctttgctcagataaaacacaccaatttggacagtgtgattctccgactcaaaaagtgcggcatcgacgacatttaccaattccatctgatcgacgcgccttcgcccgactccattcaccactccatccgacttttgacagacctcggagcattggaccgtaagtttaaggaaatagagaaatatttattgtccccacaaagattacccaaaaacggtgtgaatgaaatttaattaataaaattaagaaacagttataaaaaatgattgttccgcaggaattctacaatcgacagaaaattcgtctttgagccgctcaacccgacgaaattttatattttttgctaagttcacatttgataacgttggacaaagcgttttaatcactttttgaacaaatttaaaatcagaattatataaaatataaaataagcttcgtttaacaaagcagctagtcctatgagaattcttcccctgaacggggttaacacttcctctgaccttttaaaacggtcaaacccgaacatatttggtatcgttcgggtgctcttgatgagctatgtctataaattcgagaataaagtcgaacaacgccgtttgagcaccaattaactcgatgggcttttccaaattaaaaccgtttcaaattatgatgatgttctctaataattacatttgtctctcaatgtgtcagatttgggccgtatcactccgttgggtgaacacattaacattttgccggtcgacccgccgttggcccgaatgatgttggagtcggtcaaattgcgctgtaccaaagaggtgatttgcatttgcgcaatgctttccgcgccgaa

SEQ ID NO: 46999 - DNA, 616 bp, Heterodera glycines; identical to SEQ ID NO: 1707

SEQ ID NO: 47000 - DNA, 1602 bp, Heterodera glycines
atggaaaacgatgcattaatggaagaagatggtgagcagaatcaagaggatgagatgacattggaagactgttggaacatttgttggctcgattcagaacgatgcattgcgcataaaccaccgaagcggaagtaaataacactcaatcagtgttttcatttacttcctttggttaagagcacaaaactgcaaaaagaatccttattgcatccatcggcttggtttggagaagtttgacaaattattgaagactcaacaaacgtccaaagtgctggtacgccgtgaagagtcaaagcaaccgtgtgggttaaataacgccggcaacttttgctatgtgaatagctttctccaggtgtttcttgaaattgattaccttttaaatcatttcctaattttagatttggtttaacgatctcaaatttcgtcaatgcgtttacaactggcgttcctccacgaattggattatgccgcagaatgccaaattgaacattcagacggttatgaactgtctccagcaattattcctcacaatgcaattcactccatttgtaagtatttattctgcagcttgttcacactgcaaatttaaaggaagttaccgacgccaatgactttatcaagttgcttcggttggacaatcaacagcaggacgttcaggaattccatacactctttttcggaacgattgaacgcactctcgaggcgcatccgaacggccgaccagtccttgatgtcatccgccaactttttcaggttttaggaatttcctttctaatctgattatgcgtactcaatatgactgtcttattttagagtcgcatcagtcaaacaatttcctgtgcaaactgcttgcggaccagtgaaacggtcggtgaataccgttctctacagattggcattgatggccatagcactctcatctcggctatccaagctttttttgcgccagaaccgttagttttcacatttgacaactgaaaaagtaaatcgtattttgatgtctaaatataattttagactgagagactttcggtgtgaccagtgccgggagactaattgtgtgactcggtccagcagattcactcagcttcccgaattgctcattgttcagcttaaccgttatgttctagcaaggtccattgttatgcttgttttttaaacctgtctaaatttagcaatggaaaccttcgcaaattacaaaacgccgtgcattacccacgccttttgaccgaacttggaggcgagggaatcccggactatgagctgtgtgctgtgatgattcatgaagggaagagcactaattcaggacattactacgacgtcattcgtgacccggtcatcgaccgttggtttacctacaatgacgaagtacggattgtgtggtcttattatcccattttacgattgtgccccatacagacggtgaatcaaaagcgcacagctcccggctatttgggcagactgactcagaaaccacgcgcgagtgctgacacgacggggtgttatgcgctgatctaccgaagggtgggcagtggcttgagggggccggtgcaattgccgccagagaatattgtgacggaagcaaagaaaagggtcggttga

SEQ ID NO: 47001 - DNA, 1215 bp, Heterodera glycines
atgtcgcgcgtctacctgttcctcgagctgtccatccaaaaggaggatggcggcggacgttgggtgcccattgaagctgcagtggccgccgatcaactcgtcgcgcctgcccagtgcgttggacagacatttgtacaacaactcaaggtgggtgtccgtcacacagtccgtttgactataataatcaccaaatttgactaggttgaggtccaaaacacggagttatacgacagcggaaccctctacccctacaaggcgtacttgaccaacgaactgtcctttccgaacagtgcaaagggacactttatggccagcgcgggctaccacccatcaagaaagcacgacgacgcgacggacgccggttttctggcacgctgtgcgcgcttcgcgggcggccgtaaagcacgcttcctttcccggctggacttcgacctgggcaaccaggagctgtatctgttgaacaacatggacgtcctgttcaccatctatcgggcaaaggatgcgttcctgttacaaagtctagcggcggcggcagcagcagcagcggcagcccaacattacgcgctgtacctacacgacataaagctgtacgtgaagatggttgaggtgcaaccatcgctgaacctgtccatctacaagacgctggaaaagcagccggccacctacgcggtacggaagacggaggtgaagtccgtgtttctgaccgctggccgtaccgagatggaccacaacatattttccgccgccatcccgcgccggctgacaattgcattggtggcgaacggagcattcaacggccagctggcattgtcaccgttcaacttcaagccctacgcgatccgtgagatcagcgtgcacgctgccggtcatgtgtatccggcagtgccacaccgcatggacttctccggctgtgcctacattcgaccatttgttgacatgtacgaggcgctgggcatggccaactcggagcgctctatggacatcacgctggagcagttccacgacggatggaccatcttcgtggtgccaatgacatcgacgctggacgacagttgcggctttgaactgctccgctccggcaccaccagcattcggctcgcgttcaacgaagcgataccggcaggcggcgttgagatggtcgtgctcggggaattcgatcagttgatcatgattgactacaaccgccatattgtatccgactcaaaaattgcataa

SEQ ID NO: 47002 - DNA, 3061 bp, Heterodera glycines
  unsure (1)..(3061): unsure at all n locations
ataatttttttcttaaaatattttgaanttgaatttgcctttttaagtttttggctttaccgtgccacctattggaaacgacgcggcattccatgcccggatgggaagctgttcagtggcaatttggacaaaatgttttgggaggagcttcgcctgtttcagatggccaaatggacggaacagtacggaaaggtgcacaattaaaatataatttttattaaataatataaaagtattttttgatttggtttgttaggtgtacggtttgctcacgggcttccagccgatgttggtgatctccgacccgacaatggtccacgaattgctcacctccaaatttgaatatttccattcaagaatggtgctttctttatcaattcattaattattatcaaaaacgtaactacgaagtgaaaattaataaattgtttttttgtgtctttttgacttttcttttttttctttttttatttcttttaatatttaattattgatttctattacaaattttaatgatcatttaattatgctaatatcaaacttgaaaacatgaaaatctcatcaaattttcttaagccgtgccttctgtttccgtccacactgttcaaaaataagcacatattttccattttttttattaggtttcctccttggaaggcgatgttgacaagaatccccgaatgaatttggtcaatgcgcgcggcgcgcgatggaaacgcctcagagccatcgcaaatccggcattttcaattagcaatttgaaaaaggcaagtttaatcaaaaagaatcatttttatttttaattaaaaagaaataaatcagaacacattttcaagttaatgccaacaattgatgattcgatcaaagtggcaatcgaactgattgagaaagagcgccaagcgcagccaaatgcgccaataaatttacaccggtaaggccttcatttattggcatttcgatgaaatagttttgattaattatatttgagaggaatttttaaataaatttgttatgacaaattacgctttaaaataatatttcatatttaatttttagtttttttgtggagatgacttacgatgtgattgcacgcgtcgccatgggccagcgcgagtcgcgacaattccaatcggaggacgccaaattggccgtgcatgcgtttcaacgactacaaaacaattggtataattgcagagccgggattttattgtaaaaattcgaaggttcacatatccgtcccttaattctgcagcgatcagtttttctgtgggattaatgggaggaaatggggcgggcttgcccagattagagatgtttataaattaatagaaaaaatggcaaaaatgagtgcccttaattaatcgccaaaaattgtgttgctaaatgtttgagtgttgtctaaaaatgtcaaaatttttctcggcggcgcctatcggcactgccgccccccccccctttttccagtttttttagaaaaagcgcgccgaaaaagctcggttgaaaagcaaaaaaaaaaaaaaggtcatcgcgacggccgacgccccttcgcaaaaactttttcctgccctccctctatttaaaatatggtctaatccccacatttaattttaaaaaatatcgaatacatccggattcgagttaaaaagtgaaaaatttgaaccaaggtttgaatatttggccatgttgttcccatggcttggccccactgtgctccggcccatccttttgctgaccgtcaaaatgcgtcgcgatccgttacttctgctgacactcaaaatcagagagcaagtggcggaacgacggcgccaaaaacagcaacaacaacagaatgccaagcatagaaatgctgatcaaaccgaaagtgatcagcagcagcaacagagggtgcccgtcgatttcattgatatgtttttggactctgtgacggatgaggggagcattgagtacagggacgagttgggcgtgttcaacaaagctggcacaaaggtgggccagggagggttggccaaacactcaaaatcattggaaattagctccatttcagttaatgcatccaattatgaccttcctctgttcctaagccatgtttttttttgttaatgcgtacattcttggcatcaccgaaaccttaaagtctttagcttatacaatttaattctgggctaaagttaacaaacaaaaaattattcttgattgaaaaaagcagaattttcttgtttttcaatgtagttttttaggaatatctttatttgctcttttttcttacatttacaaattcatgagactttaagctttcgtttggtaccaagaatgtatggattaacgaagtaataacaaagttatggccaaagaaactgaggatagtcattgttggacgcataaacttaaatagagccgaaaaagttgtattcattattatttaggttttataaattaatgaatttgaaattgttttaagtttaaaaatggaatgccaacattaaggttgatcgaaccaacactgttgacgaaattgaaatgcaattgcaagtgtttcttttggctgggtaataataattaataataataataaaattttctgtttttaatttaattctttttaatttaattttcgcttcgacaccaccgccaattccctgggctttgtcagtttcaatttggcctgtcaccctgaagtacagttgcacctccaagaagagattgctaccgtatgcataagcgaagtgagtgccaaatataattattagctcatgggggattggctcccggtaaattggacaccagtgatcaatcgtcacccatttttggtgcattttgtggcacattgatcatcatttaacccatttattctactcaaatttattttcacctaattcttgattttttttaaaaaggaaatcttagtgtccaattttcctttagtgtccaaaattccggcggtgtccatttttccgcttggtgtccaattttctggtgtccaatttaccggtccccggaggattagaggtcgggaaaaagaatctgaggtcgggcatgcgcccgatttgccatattaaaaaag

SEQ ID NO: 47003 - DNA, 1744 bp, Heterodera glycines
  unsure (1)..(1744): unsure at all n locations
atgcatgctttttggtaaaatattcaaacaaaatnttatgcaaagaaattataccatgaattacgcaattaataacaaaatagatagcctaatagatatcgaattaaatgctgccttggtctggaaagcacttaggaagttaccaaacagaaactcgacatctccagacgggttaccttatatattgattaagcaatgcgcagatttattggcacctatcataagtgaactctttcgaataatcttagattatggggaaatcccaaacttatggcgtacatcttttatcattccaatttataaaaaggagacaaatcgaatccaaataattaccgtcccatctctctgacatgtactttatgtagggtttttgaacgactattagcatggaacattgttaaacatcttgagaaaaataaaattttaactgatgaacaatttgggttttaaatccaggtcgaccaccacacaattgttggtctccctggattatttttataaatcaatagaaaatggacaaaatattgatataatttttatagattttgaaaaagcatttgattcggtgccaataaatttgttaattgttaaacttcagaacataggtatctgtggaaaaattttgaagtttctccaaaattttcttatatgcaggtcatatcaagttaaaattggagaaaacttttccgaaagctttagaacttattcgggggttccacagggcagtgttcttgggcctcttcttttcttggtttttataaatgaccttactaattatataccagctgcagtcggaattaaattgtatgccgatgatgttaaactttacatttcgcatgataatgacacgaaaagggatttactctctttagcgttggctaacttagccaagtggtctaaagacaatggcatagccattgcgcatgagaaatgcgcagcattatatttaggaaaaaataattctagacatgagtataaaattggcgagaaagtaattttaagcgtagattgtgtccgtgatctgggggttttcgttgatcaaaagctctcatttaacaatcatatttcaaaaattttaaaggcggcctattacaaggcatatcaaattttaaaaatattaaaaacaaggaatatcaataccttaatcctagcatataaaagctatataaggcctcacctcgaatacgcaagcgaagtttggaatatctcctcaaaagaacagagtaaaagaatggaaacggttcaaaaatttttcacaagaatcgtatacaaaaaatgtggcctcaaggctgcatcatatgaaaaaagacttgagatttgcaaattggagaaattaagtaatcgaaggtcgctcactgatatgaatatgactttcaaaataattagaggcttaactcatttagacccaaaaaaatatttcgaattttcaacaagatcgcaacgaaaaacatttaggattcaaaataaaagattcagtaataaatctcggaataacttttttattcgtacaattaatccgtggaattgcttacccaaaacagctatggaaatcggaactttagctaaatttaaaaattttgtgaaagaattttattcagaaaataagtcctgagtggtaattcatccctttttattttttattttatgtatttttactgtattgaccatatcatatttttctaattgtattcattactttgttttccgctataagtgcaactatgttgccttgcggtttgttcaa

SEQ ID NO: 47004 - DNA, 1620 bp, Heterodera glycines
atgtcggttatcagcaaatgtcgtcgtccgcaaatgtcgggtaacctttagttcctagctcggttcgaacaaattttttttaaagtttttcatttttcctggaaattcagcaaatttagttttatactcaaaaaagctaaaatactttgaattttcttgaaattttgaaaaaattttcttttgtttgcggcgacgttttggggtgtacccgacgccccccccccccgccccttcgcacggaaagggcctcaaaatgggggaccctttgcaccgaaggggaggggggtgtaaaagttctggggggatgagtcgccggcgaatttcttaaatgatcaaattttcttaacaaattcattaaaaatcccaaaataatttattttctaggaattttttctttgataatttttgtttgagatttttttttcgggggcgaggggcgattgacgcacccattttttaaataaaaaattgaattataccgactctttcctacagcatcagttgaaaatggcacaccgccagcagttgcgggcaatgcgcaacaacaaaaacttcagcaattgtgcgtggcatgccgaagaatgtgtgcctacaattttccggtttgataatataatattttagaagttaatttaaaaaacagttaatttggttaaaaacaatgcagttgcttaattaaagcttggtgtttcgtacaaattggcagattctaccgtacttagatttcctaggctaagttttttttaattgtacgaactgcttctaattcttattcctgtcataaaattattgtaagatttatactattataccgtaccacttttacagtgtttcgtcgcggtgtttggcgaggaggcggacgtgttcagcgggcgactgttgcccattttggagcagttttgccgcgactcggacgacgaagtgcgcagcataattgcctcaggctttcacgaaattgttgcacaacgcaaaattgcgccaatgggaacaaaaaatgccaaaaactcttcgtcaatttcggcatctgtgccattgttgttgggcccatttgtggaccttttgtccagtggaaatgcggacattgtgcaacaattgactgccaatttgcatcgcattttgccaatgttatacgcggaaatcagtgccagcgcaacacaaaagcggacggtaaaatttaaaaatcattaaaatcatatctcaattttggcttttaaatttttttaatattttattttacgatattaagcaatacttttcgtttaaaatttatattaaatttttttttaatttttatttttgagagaaattaaattttttgccatttattacaattgaaattcttttctttcaaatattttttccattttattaattattttcccctttttagcatttgatatttgctaaattggatcgcattttggtcagttgcaacaatttgatgaaagggtccaccggctcatggcgagcccacgaggcgtatttgaatggcattgcagtgttgcgaaatttggtcagcaccaaggatttgctgtccaactttgtgccattgctcaagcagggagtgctaaccgcggtaattgccaaataaattatttattaattgagtacccaattaaa

SEQ ID NO: 47005 - DNA, 780 bp, Heterodera glycines
atggtgtggtctcgtggaaagcgaaagcgcattgccacggagaatccaaaaatgcacaattcggccatttctcgtcagttgggccaagagtggaaattgctgagcgatgttgagaagcgaccgttcattgacgaggccaaacggctcagacagcttcacctgtacgaaaaatcattaataaattaattggcaaaataatttgttaattacttggtcaaaaaattacaggcaattaaatatattttaattaggggggcggggtcctcttccggtcccgatgtccccgatcttcgattcccttgttccccgacattgccatccccgccttttgtgtccatgacggctcggggaggaaccctaattaattgtttatgataaataaataataatgattcattcctaaataaatccaaattgctaattacatataattaatgaggcattcattggaatttgatttctctttttcagttaaattataatggaaaaataattttttttagcctccaacacccaaattacaaatatcgcccaaggcgcaaaaccaaacatcccattgctgttgacaacatttgccagccgcataataattgtgccaatttgacaacaaaaattggcactttcggaatggaaaaacaacaacaccaccaacaacactttccaccattgaaaatcccgaaaatgaatggtgaaatatgcaataaattcgagattgaaatgccttttaattttttgattatttacttaatatttaatagatgcttaataattattgattga

SEQ ID NO: 47006 - DNA, 1324 bp, Heterodera glycines
atgtcccgttttgtgtgtgctatttctggaaatgagcccgaggtggctgtggcatcgcccgtctccggagaagtctttgagaaacggctgctcatcaagtacattgaggagaacggcaccgatccgatcaccggccacaaacttgacacttccaacgtttatgtttttgggtggagaattttcttgttatccatgcctaatttggcacttttgtcccttggacccgtgcctaatttctaccattgaaaccttttatggttaacttttctccacgtttttagttggtcgagctgaagcaggacccgggcattcgttctatgcaaaagtgagtccatttatagtgccgttatcaaagataggattacagccggaagagcctccgaatttgaaaatattgtcggaaattattgggattcttaacgaatttcccgtttaacaataattgttacttaaccaaatcggttgaatttttcaaaattttttcattaatttttttttgaaaatccgaaaggattttattatttaagacacaaaattcgcgatatttggattgactatttgataaaacaggattttccattttaaggtcgattacttctggtggtggctcttttttggcgtttgcaaagctattagctgagtggaagtggatagtggtgtgttttgctttacaacttgccttctaattgacactaaatatgacttttccagattaataagaaatttcaaggaaacaaatgaaaattttcactaattggaaaacattttcaaaaaaaaaatcataatgaatcttggaaaatcgctaaattacgattattttatgaaaattttcctgtttttttatttttctggggggacgaagcgcgtgaaacgtcctgctctgtaaatgaacacttaattgttttagattttgctgatcttgcaactcggcttgggtgttattgcggctgacatgtccaccgcgtcgtgcaattgggactggaaaattatcctgtctattgcagcgtttttcctcctgtcatgggtctctgttttggtattcattgctaactcagtgaaaggagaattgtccgcaaaaatagacggcgtgaagacagagctaagggacaaattagatgttgtgaaggcggagctcaacgagaaaatgaaggagatgaacgataaattcaacggagctcgtgtagaaatcaacggaaagttcgaaattatgaaaatcgaattgcgtggagacatgaaaggtctgagtggagagatgaacgccatgaagtctgagctcaatggacggatcgatgttttgaaagcagagatgaatggaaaaagatga

SEQ ID NO: 47007 - DNA, 1117 bp, Heterodera glycines
atgaaaccgaagaagcgtccgatgaagcatccctctgctcccttttcgcgcgactccccgcgctcaaaacggttgaaacaatcaacagacggtgccggcgggaaacggttgttcgttgtgattgaggactgcagtctcgaagtggccaaagtgtgtaatttttgttgcccgggggggggtgttatagctgtttttgtctaaaaaataattcttttactagtaatttgtgggtaaaatccatgcatatgataaaatgtgtgtccggcggcgttcttttttgtgctcccctcaaaaaatatggtttttctcgttggatgttgtaaaagtaggggttgtcggcaattgtgaagattattggtcccacaaaaaaaagaaaaaaaataataaaaaaaccatttttaggggttatttgatgcgctgagcacgaatatgacatccatttcgaccaatttcgaaccaggacccgaatacgaacaaaaagtcgaatattcaatttttcgatttcgcacttattctaaaattgattaaaactagcagaaataaatcacaggtagttttaacagcaaaaataagtcattttatgtagattcaaacatacataaagtaaaaattaaaaaaatttaaattttcgactttattcgaattctggtccggggttcgaaatggatatcttattcgtgatcagcgactttgaaaacctcaggaaagacttttatttagatgactttttataaaaatttatttttaagtaaaaaattaattaaaaaattgttcgaatcagggtttggggttcgaaaaaagtcaaaaaaagatcatattcgtgctcagcgcatcaaataacccctaaaaatggttttttttattatttttttcttttttttgtgggaccaataatctttcaccattgccggggttgtcattaaattaatttctgtcactgaaaaacagcctgtttttttgttaatgggtgaaattaggccataaatacaataaataagcaattggtaatttgtaggtcggcgccgaacacgtcgtgttgtgcagtgacaaacacgcgaattggctgcgcaaacagaacagggacccggcccagttcaggccggacattcttcaccag

SEQ ID NO: 47008 - DNA, 1224 bp, Heterodera glycines
aaagaagacatgaaaagtctgatagaactgatcgcccgcagacagccccatttagtggtcatcggaggcgaggacattgacgcgttacgcttaaccaccgatgttcggttgagtataaacgaggctgcccaacagaacttgaaaattcctttgcaactttccgtggaaattgcaaattccgacgccgcgagagtttacatgaacagtcgcatggcaatggtgtcgattagccaattaaaacatttggtctgaaagcaaattattgttttagcaagaatttccgaagtatccgccattgctcctcaaagcaatatcgctggccagatttacgcttgatccgttgatcgaaatttgccatctttgcaacgcggacgacgacattatgtacatgaagttccatccgctgcagaatgaagttccaaagcaagaacttcttttcgcgcttcaagttgagtgcatcaaccgtgttaacgaggttgaaaatatataataaattccattcacaaaatcttgaaattattattattattaggttggtgttgatatcaatcgctgtttggagtttccatacaccgccggcctcttacaattcgtgtgcggtcttggaccccgaaaagcatctcatttgttgaagattctaaaacaaaacgaaaacttattggaaagtcggacaaaattggttacatattgtcggatgggaccaaaggtgttcatgaacgcagcaggatttattaaaattgacacaacgaaagtggctgataggacggactcttatgtcgagtgagtccgtaatttcattattgtttagctttaaaagttttccgttaagaatgcctttgttaaatttagagttctggatggttctcgtgttcaccccgaaacctatgaatgggcaagaaaaatggcagtagacgccctcgaattagacgagccatctgaccaaacaatcgcaatcgaagaaattttgaaggcaccggaaagactcaaagaattggacctggacgcatttgcagaggaattgggcagacaggtctgccgaaccgaattctttgttagttagaagaaataaaaatgtttagggatttggaaacaaaagtatcactttgtacgacattcgggctgaactgaattaccggtacaaagaccttcgaaagcctcatcaggcgccgactggcgaagaattggcacaaatcttgctcaaggaggactgcagcaatttgcaaa

SEQ ID NO: 47009 - DNA, 3060 bp, Heterodera glycines
atgttaacaaattttccaaagttttgttgcgcccctccctatctaaaagtgatctcattgaccgtgcccgactcattacactgtgtaaatctcaacgtgaaaatgacccatcctgtgattatattgtctatgcggggcatgtgcttgcccgcgacgacattcccgcctttaaatctgacctcaattttaaatgtatttgtcataacaaatcttaatgtgttttgggtgaccactcacgaggcaataaccttaatttagctcttttacaaactaaatatagaaaattgaacaccccatagaaaattcgaaaactttactaaataaaaaacaaaattttttatactcaacatttatcaatatgcgatccctaaataataagcttaacgaatttactgcgattatagccctaaaagattttgaattagtttttgtaactgaaacgtgggcaaaagaaaaaatacctttccaaccatttattactaacaattacaaaatatatgaagctagcagaagcggaaaaaatggtggtggagtaatgattttgacaaaaacgagcgtaaattctttttctgtcttatcctgctctaaattcaattgtgaaatccaaattattcagataaatggagcaaaaaaattaagaatagcattacttttacagaccaccgaacacttctgctaatttcacaaaaaagattctgaacctcattggtaactattttgaagaagattttatattaatgggagactttaacctaaatgcaaaggacataacttggaccagtggaacgccttatgctaagtcggaaaaaggaaatattttttgtgaattttttaataagtatggcttattccttatgactaatggacccactcgtggtagtgcttggcttgatctgattctctcttctaaacctgattttgttaataatgttttaattgaggacatttttagttctgatcatctttccactaatttttcattgtcatttcctcagaataagagtaaggcaaatacatttacagtacgcaattataattctactaaacttaatctactaaatttaaacttatcttcaattttaccctacaaattactacaaaaatttaccattgaagataagtttaatcatttttaccttctttttagagaatatgtagaattatacttgcctaaaatcactgtcggtcaaaaatccagaaagcctaattacccattgagtcttaaactgtcaattaaggaaaaagccagactttataaactacaaaaaataaaccgtgataaatatatgcatttgtatgatagcatttcattacatataaaaattcaaataaataactttgttactaaaaatgaaaaaaattttctgaataaaggaaaaaatgctatctacaaatatataaataaatttacaaaaaattttgaacaaatccactctcttagttacgagaaccaaattatttttgatgattatttaaaagcagaaacttttgcaaaaattttccaagaatccttttcaaattcagatgttccgcaaattagcagttgtccttccaatcccaatgaaccatctatttctgatgttgaatttaatgccgatgaaatttctaaaattttaaaaaatttatcgaatcgagaatccacatcccccgatgaaatttcctttagaatcttacgtaattgccaccttactctttctcctgtaatttccgaacttttcagaatatcaatggacacaggcaaaattcctgaaaaaaaatctattgttatacctctctttaaaaaaggtgaccgaaatgatccacataattacagacccatttctcttacttgctgtctatgtagagttatggaaaaaataattgcaaaaagcatttataacttccttcatctgaataatttaatatccgaacatcagttcggttttgttaaacaccgatctgctaatactcaactaattacagtattagaagattggtacgacagcatatacggtaagaaaaatattgactgtatctatgtggactttcggaaagcttttgattcccttcctattaatattttaataaataaacttcataacattggcattaggggaaaactgctaagttggttatctgaatttttaaaggatagattttacagagttaaaattaacaacaaattttctaatttatatccgattcagtctggtgttccacagggttctgttcttggccctctgttatttttaatatacattaatgacctcccgcaggtaatccctccgggagttagcatcaagctttttgctgatgatgtcaaaatttatgtttcttacaaaactcgtgatgaaagaagcaaattaaatgttgctttagacaatattggaaaatgggctaatgcatttggtttaaacatctcccaaaataaaacatttatattatttctcggcaaaaataattcaaaacaacaatataaatttttcaacaatattattaatgaggttgaatctattagtgatttaggcattttaattgataataaattaagattttcaaatcattatactaaaattattaaagctgcttatttaaggattcgcaatattgccaaaattttaaaaacccgctctatacgtatttggaccaaagtattcaagacatacattcgtcctcttttagaatatgcacccgaaatttggaatccgacatacaaaaaagatataaataaattggaaagatgccaaaaatattttacaaaaattgctttatttaaatgtaggcttccgtatataccttacgaacaaagacttgatttattcaaactttagaagaaaggagaaaaacaattgatttagttcaggcattcaaaatcatcaatggtctcactcatcttaaaaaagacatattcccccaattttctggtcacatcccttacaatcttagacgtaaagttgtgttaaaaccacaatccagtaaaacttcaaattcttttatcaacagaacggccttaatatggtctaaactcaacaaagatataacagatgctccatctgttgacagtttcaaaaaacgaataaa

SEQ ID NO: 47010 - DNA, 3129 bp, Heterodera glycines
atgaccgaagaaagtgaagaatattgtttgggaggcagacctttatctgatctgaaggtggttgaattgagaaaggagctcgaaattcgcagcttgcctaaatctggcaacaaaaaagaacttgttgagcgtttgcaaaattttcttcgagatgaaaagtctgagcaaagaactggaggagagtctcatcaggcgcaaaaaacagcaccaacaatggaattgaaccaatctccgagtggggtttcagtgccgaatgttgtggcacaatatcttgcccagcagcaaattcagcttcaagcagccagacgaagtgccggtgatttctttgttaaataagttaattggtccgtaaatctctttggtctctattatattattattctgatattaaagttttgcttccctcagacagcaaaagtttattcagacaatgagaccgaaaatgttcaataagctctaatatactcttgcacatttcattttaacacccatgataaattattgtccttttttaattaaaaataaccaacgaaaaaatagtatttcccttcaaatacatattaaaacattttttgttcattgtcagataaaataagagccgacacttcactggacgattcagcagaaattatgccaatctcatcaccaactgaggaaatccaaccatcgcttgaacagcaaaaggaagaagaaagtcaagaccaaatcaagcaaagcagcgaatcggcacctgaactggtgaattctgatgtaaaggaaccttcggttgagaaaactgaagaatctgctgaggtattaaaacattattgggtccaaatagccataattaaaattcaacaaaattataacagttacaaaagggcgctgatcaacatttggaggtggaaactgataaatctcttgaggaagaaagaacaaatactgaagaaaaggaggggtcgggtgatggttcaacatcagaaaaggagcgcgaaataaagaaggaggaacggacggaagagaaaacgacggaaccgacgaaggacgaggaggagaggagcagccgaacagaggggacacaaggggaccagcaaatcgaagtcaaagccgagtcagacgaagacgaaactgagaaacccgtagagactgtgaaccgaaccgaaacggtggacacacacgccgaagaaatgtctcctgacaaaagtgccaaggcacgctcttcagttgtggaggaggaattggatttcgaggtttgcgaaagaaagatttggatagttattgttttttgcttcctttgttagaacgaggaagacgacgaagaggaacgcgaagaaccggcggatgacgggggaaagcgccgcgcgcatttgaaacagggctcaccagtgacgatgaaatcatttgagcacaaattgggaccggagcatatggagcagaaagtgaccgatgtcatttccaccagtaaaactgtcgcggtcagcgagtccgaagttgggcctttggtcggccaactgaccgcttcaatcaaagaggagtcgagcaaaccgccggagggacagcaggagaataccccggaggggttcatccggcgcagaccttcttcacccgcgaggcgggctaatcgcttaatgattggatttactcgctctgtttcagacaccctccgtcgcgttgggttcacatcagaaaccttaagcggccgttcacaaaggcggccctctttgatctgcttagtaagtttggcacggtggacactactcacttttggatggattccatcaagagcacctgcattgctacggtatgttgggttcagaatttaagaactgccttagattagaataattgtccttttagatttttttaactttggataaatttttaaaataggaacaagctcttccactttagtacgaaacggacgaacaagcccaattggcccgtgaacggcttcacaacgtcgtatggcccgtggcgagcgatttggcactttgtgtggaattttcaactgaggaaaaggtgatggattattggtgacaaatatacagaaacaaatctcattctgtcagctgaatcgacgaaaggcggaagaagagcaggaagcatcggcgaacaattcggcactcggcggaggattgggattgacaattgtggtggataacagggcatggattttaaaattgataattcacttaaactatggagatcttttccagggccgtgggcctgaaactgtgcccaactcgggccccacggtgctcattcagcacgacaaaaagcgacaaaaggacgcggaaaacagaaaaagaaaaggtgccttttgtgaaattaatggtgatttataaaacggattttagttgaggaattggaaaagtcacagaagactctcgacgaagtgttcaagaagacaaagactctgccggccatttactttttgcctttgtctgacgagggggtggtcattttgttttgttggtccatcggaatctgtgaaattaactccgaattcaggcggtgaaacgacgaaaaaagttgtcagtcgacaaacagcagtcacaacagaatagcacttccgaatcgcaccgaaattcgggcgggaatttgtcgcgaaaccgcccaagtgcgagtggaggaatgtcgcgaagaagcggtggtggcggggaaagcggaggacgaagtcgccagtcgcggcgataaacggaacggcgtgggaggggagggcatggaagttgtgaattcgacgtttgggtgggcagtgagtgagtgagtgcttatgacccaaactcagcgacctttagctgcttctcccctcccctcattcgaatatttctccccaattcgttcctttcgccaagatcaaatgtcactttttgtgtttgtttctatccgctttcagttccgctattttctcaattcgtcgctttattaaaggatttactcttccaagaaaagaacacccaccaattaaccaaattggctgattcaactgaacccgtctttgttgtcgccaaattcgaccaaagaatgctcttccattcattcgttggcattgtgtgaagaatggcatgcgcttgctgaccaacggaaatttatttaaacaatttatttgtttccgtgctgatgttcttttattttgtcttggaaagttaa

SEQ ID NO: 47011 - DNA, 1617 bp, Heterodera glycines
  unsure (1)..(1617): unsure at all n locations
aaagattatgctgttgtggtcgcacttatggtaatggtcaatatattctgtatggagggggagttgttaaaaagtgaccacagatgacttttttccgagttttagcgtgcacaaaacgagctttcttcatatcagcagaaagttttcaaattggacgatcatctcggcttgntctatgtctgggcttatttcagatggacgcattttggcgtgagttcgaatacagaaataaagcgaaaatttgagaaatattcataattgcgtgatgtcagtgggaccacaaatctcaaaataaactaactaaagtcgatgggcccaacttttatctattttttggcctagaaaattacacctgaatattaaatttatttatttcagacgctttatgcaaagtgaatgcgccgagtttcgctggaactatcataatccaatttcggttgaactgctcaaccgtaaattaggcttgagtaagtttgaaaatctaacaaattttgataaagagttcgtcaacccccccccttccattgcttgcaaagagagccaagactaattccttatattttatttttttgtcttcttgtaaccgacgccgctggcgaatatattcgacttttccagaacttcagtccaatacccaatattacggacgccgcccatttggtgtgggactgctcatcattggatatgatgttcgtctcttacagcttttccatgtatatttgctttttgacaggacaaagggcctcacgttgtgaaagccgaaccctcgggggacgtgtccgaaatgtttgctgcttcgattggtgctcggtcacaaagtgcgcgaacttatctcgaaaagaacctaccagaatttgagacggctgacagagacgcattgattcgccatgcgattcgctccctcaaagagacgctgcaggcggacgctggcagtttggatgagaatgtgaggcatagcaaaccagcggcaatgagcgaatattcgggtccttttctaatcccagtccagcacgcaaaagttaggaaaagaaatctcatagggtaacaaattgcactcactttcaaaaattttcccggcggcgcttattggcaccgccggacccccattttactttagtacaaatccctgtttttggctctcgggcgctgaattttttanaatagcactggtgtttttgcccgaaaagcaacaaaaaaaggtcttncagattccccccccccccgaanatttttttctggctacgggcttgctttggaaggtgtgcttcgcttcttcccctcccacacgtttctcctcgcaacgcttccttctcctatgatttttttgaaccaattttttgcttnnttttgtgtttngnccgnttccggnttcttnnctnntttncnnctttttgttgttcnngttctcgttngggntttggngtctttctcgnnttggtgcccgtgccgtcttctttttctgcgtccccgttnncttccctttngtcnncgtctnttgcgntcgtcggnttgggtctnccttttncctttttggggnncgtcgccncgcgggcgcntnttcgttcngttgnngnngcngcncncngggnttggnncgnntngnggggcncttttgtc

SEQ ID NO: 47012 - DNA, 1808 bp, Heterodera glycines
atggccgcggatgatagcaatagcgagaaggaatcaaactctttgagcattcgaactgacaaattgctttcggtccctttcaacggagaagagacttccgagaacacatcccaacagcaacaacagcaaacgcccgttgcccttccgacttcatcttctaaaattttatctaaacagcacccactcaagacgaaatggaatttctggtttttgaacaacaaaaagaaggacatggactggttggaaaggttgtcgaaagtttgcacagtttcgaccgtcgaggaattttgggcgtaggttttgtttctaaaaggacatttattatttggttttttagtttttttgacaacattcatcctccatctggcatgtacggctgcgattacaactttttcagagatggaattgaacctttgtgggaggtggcacagaacaaagatggtggtcgactggtcatccaagtaagtcatattccttttaagtcatttgatgaattctcctttaggttgacaagcagcgaaatgagctccttgatggttggtggatggagtttttgttggcatgcattggtgaacaatttggagacgattctgatcaagtttgtggcgccgtttgcaacatccgtaacaaagggtcgaaggtaaaaaacgaatgaattaatcctccactggactaattactttttatttttagatcagcatatggacgacaaatgcgtcggaagaagacaaaaacagacggatcgggtgagttttgttatattttttctgacctaagctgatcgtggaatatttctgtaggcacgtcttaaaagatcgtcttcaagcttccggtggattaaagcctattaagataaatttcgaaggtattatcttgctctattacattttaggcgtccaatcagtgactttcctcagtttcttaagccttaactcttttcggtactttccccttttggggcctatttgtattttaaaaagcaacaaatggagcgtagaattgcaatttttttctcattgcataaatccattgaggaaaacttcgcacaaattgtggcatttatgccctcaagtaactttggcgcgtaatttttggaattctgcgcttcctttgtttaaaaaataaataaaatttaggtcccaaaactgaaaagtaccctcttttcttacttggtcaatgccttctttctttgtatctaaacagctgaaagtatatgattttttaagataaaaatttcagtgctaaaggcaacagacaaaaaatcattcttcaatatattcgtaaaattgattggtcgcctaaaagtcgattgggtggtgcataaatagccttattttaaatgattttctttttccaatttcattttagaccatgaagtggtgcagcagaaggtttgttttttgcttaatttttcaggcatttattttggcttcagacttcgagtgccatcccctgccgcttcatgatttaatgctttgttgttgatttgaaattatattgttagaaacgaaggcaaaattttatggaccgcgccttatgttattggttcggatatgtaccgtgttttatttcattgttttctatttactcacgtatgttagactgataaacgctttatcgtttcacgaaaatttccttaaaccagcttaaaaacataacacacaagtattaataagatcatcaacattgtttgttgttttgacgtcagtttcttgattagcgcctaaaatggtcttagaaaagggtttcacgggatgatatttttatcgcggggggggggcataacggaaaatcaacgcccccctgaa

SEQ ID NO: 47013 - DNA, 884 bp, Heterodera glycines
tcctaggccctcttttattcttaatttatataaatgaccttcctgatgttataccatcaggagtgaatattaaattatatgctgatgatgttaaattgtatatatgctataaagcaagagcagatacagaaattatgcataaagcattgcataatttattcgaatgggcaaataaatggcaaataaaagtttcaattcaaaaaacttttgtattatatttgggttcaaaaaacccaaaagaaacatataaatttgatggaaatacaataaatgctgtggatacaattagggacttaggagtaaacattgataacaaattacaattttccgatcatattaaccaaataacaaggaatgcgtatttacgtatgcgttccttgtttagaataattaaatctaaatcttctaaaatttggattacattatataaaacttatattagacctttattggaatacgctccggaagtttggaatccgtctcttcaaaaaaatattaaaaaaattgagaagtgtcaaaaatatttcactaaaagagttttttttaaatgcaaccttccaccaattccataccaaaatcgattagagtaccttcagctgccaacacttgagaataggcgaaacttattcgatctgttcatggcacataaaattgtttatggccgaacagatctgaaacttttctccatttttagaccatcaacacgattcaatattcctttctaccgatttaatacaaaatataaattaggcaaaaaattcattccctttgctgggagggcaaccaaattgtggaatcaactcgataaagagctcattaaaacaaactcttttaacttattcaaaaataaaattaaaaattcttgagtaatgcttatgattgtg

SEQ ID NO: 47014 - DNA, 1579 bp, Heterodera glycines
atggatgaagaagacatcgctttggacttggttcgtgataggataaacattgatgtggaatcgggagaattcactgctttggacaaggttggcttgtagttaattaaagaaaatattcacataatcccaaattaggagagtgatgaagtaataggtgacaaaactgcagaaagtgataaacgccttattcttgacttggatgaccaacaagcggggccttcggagcaaaaagtcggcaggagagggcctggacggaagtcagcgaatccgttagtatttgtatatcgtcggcatcattcatccatttgttttcggattcaaggacattggacaatcttctgggccatgcaaacttagaacatgcccgagggcggacaaaggaggccatgacttttcttttcgaagtcatttatcccgttcatttcgactcatttcgaaatttaaggtagtcaagctggccccttaccatgtgcagacatacaaagaactttcggatttgtactcggaattgggccaaaaagagaagagctttgaattcaaaatgttggctgctcttttaaactctaagacaacagccgaagaatgggatgaaatagccgggactgctaagtcgtttaaccggttggaattggctgtcgcatgtttggccaaaggttgttctatgacgtcttcggcactttctttttaatttagcgattcgatgtgaccccgagaattggctttactacgaaaaacgcatccaaattcttgatgcatccggtgaaacggatcttgcaatgaagacacgactccaagctgcccaatcgatcaattgtcaaacttccaaaatcaacttcgcatggatcgataaattgataaaaacggtatttattttgggattttttaccgattgggaaggatacaacgccaacttttaaaatggatactgctcccacttctcccaccacctacattatgaatcagtcccaataaggcagccgattattattgcacgctgaaagacgaagaacgggcgaccgaagcattggaaacgttcattttacggagccgacaattcggacggtccattgatttcgagcatttggctttacttggtatgtggataagcaaaggtcgttttgaggactcagcaaagtcaattcttgcgatgcataacgaattggtcaaggcagtcgatgagaaaggcgacaacgcaatgactgtgaggaaatgggaattatgtgttcatgtgccgaattccaccaaattattatttgttccaggtgcattttacaaataccgattataaattgagcccatttccacctccgtccggttctcattgggtgatcaatgcaaaaatgaattcgcttttgctctcctatctgatcatttgctgggttcatcttggacgcctcgacctcgtcccccaacttattgactgcctcttggagagaccactcggctcttccgacgaagaaaatgcctttttggacattgctcggtcccttcattcaactcatcaacttgtattggccgttgaatatatgcagaaattgagaaaggaaaggcccgagtacaatgaaagcaccgatttttg

SEQ ID NO: 47015 - DNA, 321 bp, Heterodera glycines
atggacttttcccgctccgcctacattcgaccctttgttgacatgtacgaggcgctgggcatggccaactctgaacgctccatggacatcacgctggaccagttccgcgacggatggacaatttttgtggtgcccatgacctcgacgctggatgacagttgcggctttgaactgctccgctccggcactaccagcattcggctcgctttcaacgaagagattccggccggcggcgttgagatggttgtgctcggggaatttgatcagttgataatgatagactacaaccgtcacattgtgtctgactcaaaaattgcataa

SEQ ID NO: 47016 - DNA, 2689 bp, Heterodera glycines
atgccgcaacaacagcaacaggcttttccacctgtgccgcagcagcaccaggcttttcctcccatgccgcatcagcaatccgtgccgcaacagcaacagacttttccttccgtgccgcaacaccaacaacaggcttttccacccatgccgcaacagcaagccgtgccgcaacaacaacagaattttcctccaatgccgcaacaagacgcttttactcaaatgccgcaacaaccgcccacttttccacctgtgtcgcagcagcaacaggcttttcctcccatgccgcaacaacaacagcaggcttttcctcccatgccgcaacaacaacagcaggcttttcctcccatgccgcaacaacaacaacagggtttccctcccatgccgcaacaacaacaacaacagggtttccctcccatgccgcaacagccccaggcttttccttccatgccgcaacagcctcaggctttttcggttggattttacggtccaagtaatttggcttccgtttgctatgactaaaaacagattccggtctctaagttcccgagacttttgctttgtgaaaattcatggcctaggaaactgaggatttgtcattgattggatgcataaactgaattagagcctaaaaagccctttttggatgtacggaccgcaaacatcgagccgcaaaataaatgggaatttaaaaaaaatgttttttttaaagcagggcagcgcttttccacctggccaaccgccacagccgcaacgacagcgtcttgacccggacatgatgccaagccttgtaagtgttggaaatgctgcgcttcatttagtccacgttttttggaaaattcttgcgagggggggcaaggctcttaaatttgcgtcgtcgccattttcccggtttaaatttttttaaattggcgcttaaatttaggccgccattttttaaattgatcattttggttaggttcaagtggctgaggatgaccagagcacgcgttccggactgtttccgaccggctttccgcaagcggaaagcccaccgcttgtcagcacggaaatcatcgcacaggaccaaggttttttttgtggaaccctcggattttctaggcctatttttttacaaatttttgaattttacgccgggatggaaatgattttttaagtccattgatgtggtattggaggcgctaaaaatagtacactgatcgtttcaaatttaaaaaaaaaaattttggtataatttttgataaatttttttttttgaattttcccaaaagtctaacacatttccattgttttccacacggtttgatgggtccatcttggaccaaaaaaacaggctctttcccatttttctacctttttcttcccctcagggaatgccaatccgaaattcatgcgctcaacactgtatgccgtgccgcaaagccaggacatggtcaaggccacccaactgcccctgtcgttggccatctgtccgtttgccaagctgcaccagtccgaggtacgccgcgaaatcattcacttttttaacgccacgttctcgggtttaaatgaaaaaatttgtcagaaatcaatccgattcgattttttttacccaaaaaagtttcgaggataggaattcagagacaattcgacgaaaaataattcttttgaaaaaaaattccgcagtatccgccaccggtgatcgatttgggtgaaattgggccggtccggtgccagcgttgcaaggcgtacatgtgcccgttcatggagttcattgacggaggccgcaaatttcggtgtccattctgccgtgccagcacaccaggcatgttaattaatacaagggttcacccaacgattcaatattttgtgtgatgcttttaaagtggaggatggttattttgcgcatttggatcacaccggacgacgcactgacattcagcatcggcccgagctgtacctgggctcctacgagtttgtggccaccaaacagtactgcaaagtgagtacggagggggggggggctatttcacgctaatttggaccatttttgtcatttaattcaatttttggggccaatcaatttaaccataattgtaaatgtttgttgcagaatggcacgccgcccaagcagccggcatacattttcatgctggacgtgtcctacaacgcggtgcgcaccgggctggtcgagctgttctgccgcaacatcaaagacatcgctcagggagttgccgaggtgtgtggcggcagtgcactacgtttttcatacgaaaatttcaagaaaagaaaatgaaaaagtttaccgtttttcaaaaatttataatgaattttaacttttttaaaaaattttccaaaaaatcgctgaaatttcaaaaataaaattttctttagaattttttttttgggtttttaatgggaaaaagttctgttcggagggataaacgagctgctctctatgggttagaggaggagggggctgacagatttttttagcgattttttcaaaaaaaaatttcagggaaaatttccgcgccggcgcctcctccatgcgcattgggctggccacctatgaccagacggtgcacttctacaacctgagccagcccggtcgggccgaaatgctggtggtcagcgacattgcggaagtgtttgtcccgttcgtggacggcttcttggtcgagtttgaacaggccgagaatgcgctcaccgt

SEQ ID NO: 47017 - DNA, 1139 bp, Heterodera glycines
atgctttttaaggtgctttcaacgcctggcattgttgagcgtttctttacgggacccggggaagaagggatggcccaagcaattcgaaaagtgcaaataaaaggctggccaatcggtgccgacgaaaacattgaggaaggcatacgacaggcaaaacataattaaataaaaaatattaatttaatattaaaaattaaaaagtaaagtaaaattgaaattgaaaatttgaagatttttttataaactgcttgtttatatttagaaaaaatgtttttacacgaaatgattttcttagtaattttttaaattcacaaataaaatgaacaatacattttttaaatttttattcaaatttaaataaaaagacgctccacaaaaaaagattttaacattatttattttttatcatatatttgtcctatcatttattgcacattttttgcacctttttgatattttgcgtcatttatttattttgattatgtttttggaacactattaattaaatatttcttaattaaaatattgcagaaagctatggaaaatccacaagattatgtgctgaaggccaatgattgtggcccaacaggaatgtattttaatgaggacatggtaaagaaattgaaaagtatggcgcccgctgagcgcgatttttactacctcacggaaaagctgcgcccaacgaccgttaaggtgagcagcaaaaaaaccagaggattagttattttcttgtaaaaaaataatctcatgggtgtgagcttggctcaaaattcatggaatcgaaacgagtttttaaaaaaatgcaaccaagtacgacaattgccatattttcgactcaaaaaaccgttaaattttcaaaaaaaattttataatcaaaatactcgattcagttatttttaaatttaattttttaaattttcttgtagaatcactttgtccgtccaaatgccaaaccaatgctcaacgttaatgccaatcctgagcttggcatttttggctgcctggtaggcaacatgaaaactggccaagtgttcttcttttcccgaattggccatatgatgaaatccaaaatggacaatgtggacgagggcggagtatggcgcggaaacagtgtgtacgattcaccgtaccttgtctaa

SEQ ID NO: 47018 - DNA, 2474 bp, Heterodera glycines; identical to SEQ ID NO: 12203

SEQ ID NO: 47019 - DNA, 788 bp, Heterodera glycines
  unsure (1)..(788): unsure at all n locations
ctttntgggcatcaaagacctccacgccaaagtgcgaggcagcaccaccaattacatcgctttgacctacgccttcgtcgccggcctgctcaaccaggagacgcaccagcaattggccgaacgcacccgacttcacgtggtcgaactctcccccaatcggcaattctttccgcgaattgtcgcctcgccactgaccgcaccggtcaaagcggacgacgaagttgacacgaaagaggtgaacagcggttacggatttgaaaagctaaggagacaaaatgccaaaaacaatcgatgcccttttagcgaatgaaattggacgaatattacggcgaaggccgtttcccgttgaagaaggcagagccactgcctttctatgccaacagtcctggccatcttcacgccgagtggagaaaacatccgtaccgaaacatggaaaaggtaggcaagggatacgagggacgcccgccgggtacacccccatccaagccatgagggtcgtccccgagaagggcgaagtagacggcacaaatgggaatcttttgtttgggatggcgaattgtataactgtttttttcaagaaaatcatcagattgctcgctgatggagtggtcaatcgatggacacggaaagagcggtacaaatggtcccaaaggagtgtcgaaatggtggcctctgggcggaagccgattccgttgggactcggcctgtcagacgtaaatcccccggagggagaaaaagcattgatcggagggggacggacggccaacgaagcgacggaggccgattga

SEQ ID NO: 47020 - DNA, 1411 bp, Heterodera glycines
cgcgtaaagaacggagcatttcgaaggtgcacttttggaaaggatttccaaaaaaaacttaaaaagttaagaaagccattatcggatttatcgtcgattacgacgaaatgcgccagccgacggcatccgattaccaaaaggtggaggcattttttgatttttcggtttgacagtgaattcgagtttttgcttaagtattatcgccgcaagcgaagcacggagcaaaacacggcgacggaatacggtaaaagcgccggcgaatacggtgccaattccgactacggtaccagcggaggctacggaaaaacggacagcgaagtgaattacccgcgcaagccgaaggtcagtcaaagaaaaagcaccaaaagtcaaatcgttcaaagtttgacattttgcagaatgctcgctgcgtgtgttgcgcaccaaaagtgagaagggattttagtaactttaagctgttttgtgaatgggccaatttttgcaatcaaaattagcataatttattatatttttggctcattttagacatataaaccgtaccaatacggtggagcctatggtactgaaaatggcggatatggtggaaaggacgaatatgagaagagcgaatacagtagaaaggacggatatgataaaaagggatgtggtggatatgagcagagcggatacggcgaaaaggacggatatgataaaaagggatgcggtggacatgaacagagcggatacggtggaaaggagggatatggcggatacggtggaaagcagggatatgagaagagcgaatacagtagaaaggacggatatgataaaaagggatgtggtggatatgagcagagcggatacggagaaaaggacggatatgataaaaagggatgcggtggacatgaacagagcggatacggtggaaatgagaaaagcggatacggtggaaaggacggatacgaacagagcggttatggaggatatgcgcagagcggatatgagaaaagcggatacggtggaaaggacggatacgaacagagcggttatggaggatatgcgcagagcggatatgagaaaagcggatacggtgaaaaggacggatacgagaagagcggatacggtggaagtgacggatacgagaagagcggatacggtggaagggacggatatgagcagagcggatacggtggaagtgacggatacgagaagagcggatacggtggaagggacggatatgagcagagcggatacggcggatatgcgcaacgcggatacggtgaaaaggacggatacgagaagagtggatacggtggaaaggatggataccagaacgagtaccatgattattacaaaaacaatcgctgatcaatgacttatttatcttccgatctttgcagtgattaaagtgtatttttaaataattaataaa

SEQ ID NO: 47021 - DNA, 519 bp, Heterodera glycines
agggatgttgttcactttaaacatcaacggtcggtcatttgtcgccactttcgcaaaaccatgcaattttcatgccattgttaggctttttgattcgacagcgtttaaacggcgatgtggaaatcttctgccggcctcgccaaatcatttgttcgcctgaactcagcaccgtccacctgcgcaccgccaacgttgagatggaagttcaggtggtctctccctttgctttattttcctttcatccgatggtttctttccttttcagaccgacaaaaaggcctatgtgaagtacgggtcgaagcgtgtgcacgtgtcgcggagtgggatggtcgtgtcgaatgagaactgttccgcatcgatggaccacattggccgcattgtgtccgcctcttaacttaatgggccgtggtgccaaagtgtaattatgccataatgtgtctagtttctgctattcttttccttcccacaccgatgttaaagtgtactcatgtcctgaatttctgcgatctcattattttg

SEQ ID NO: 47022 - DNA, 3675 bp, Heterodera glycines
atgccttcatcaaactcattctatgtgatcgttccttccaacacaaatgttgaaggaaatcgcacaaactcttttcgagttcgactaccaagaaaacttcaatttaattcggaatgggatgtgggcttaggtgtgatcatatacccccattcgtggccctcactcggcacatcagaggaccaatttgttcaaattgaatggaaaattggagagaatgttcaaataccaattccatcctctaacgtgacaaaccccgttgagctgtggaaaagactttacaaactgcttgaagaaggcaacaaaccgttcgcagttaaagtggaaggcgtacagaaaaaattcactgaagcggccaatacagcacgtcaattgggcagagccgagtacatcaataaacaacaacaacaacaacaaagagacaaaagaaatgttaatgatgatgatgatgatgatgatgacgaaaacgaagaacaattattaaacgcccttttagcgggggttgacacgttgcttgacctttacggagcaaccagtggtggtctacttgagagagaaaaacgtgcagcaacaagcaaggtccccctgcggaattgggatgacactgaagaggaatatcaggaaaagcttgataaatattttttgcgtctacgtggccgtaatttagaacgcttagagggactgataacagaaaagttgaatgcggaaattgcactgatggatgacgaagaaaggaagattctcgatcaaaccaaagaattaggcatgacagcatggataaaagttttccaatcagcgtactctgcatgtttcctgcattttgacagtgcaacgaacagattttcgttgaaactggacgatcgttatgtgcagaaaataaaaatttcagaccaattggcctacattttgggttttaactcaaccgatttcactgaaaaagaaacgattgcaaaatttatgccagacatgagtggaggagttgcttcttttcatgtttatgcacctgatctaattgaaccaatgatgattggtgacgtgattgccccagttttgcgtatcgttacgattcggggaaaacctgacgaaattatagaggagcagtttctctccgtccaataccatcgcgtactagtcaaagaaataagtgaaattttcatcgaaatcagaacatccggtggtagcctaatgccatttcaatacggtacatgtacattaacgctacactttagaaaaagttcctacttttaaaaatgaacagtgttcaaataaataaaattcttgctcgaaacccagtcacgcgttcgacctttttagggtgttttccatcagatcaaattccagcagtagcagccacaccagctccttattcaatggtgattaacgttgatccgagcggttcacctggttcacattgggttgccgtgtattgcgagcagcaaaatcgggtggaatactacgattcgacaggaatttggccaccgctaagccctttcatccaaaaatttttaaagagttttgctcaaattcagtttcatcaactttcgctccaagcaccatactcacactcatgcggaaagcatgtgattttctttatatttggacggtgtatggggatgcactttgaagcaattttgcaactgctaaaacgcgcaaaaatatcaccagatttttttgtgaacaaatttatgcaaaaaatgtgtttaaacaaatataaataactagaaaactcaatttaaaaagcgcaaaaaaaaaaaagaaagaaaaatgcacgttgattttgatccttttaaagttgaatggtcagcattaacccaaatttctccagaagtagtcgtccaatacggtggttataatgtgttcagaggggttccataccagcgcggtagtggtatcgggtctgtttttaggagtctattgcgttacctaataccaatcgggaaagaaatcgggacggccatcgggcgccaaggacttgaatctggaaatcgagttctatccaatgtattagagggtagggacctcaaagagtcacttgtcagtgagggaaaaacggggctcaaaaatttgctagagaaagcagccaacaacataaatgcccaaaaaggtcaagggttcgactttaaacgatacacaaagagaaatgatgcaagagaaggtggtgcatttggtaaagcgaaaaaaggtataaataaactacaatcaaggttgggaccacacgatttcctaccagcaaacaccccagcaggtcggaagaaaaaacacactaaacagaaatcggtcaaacgccttcgtaccgatatacttggaacctattaataaaacacccccccccccccccccagaagcacaatcatgagttgttcacaaaaaattagcgaaagtagtccccttgccacaaatagtgctttgaacatattttcagtaccttcaacaaatgtgtcggttgtgcgctcatatttccgtgaagtcctccccctagtgacaataacgcaagaatctccgtatctttttcgcctgtacagtgacaatctttggaccgatctttcccggatttatctcttccttgacctttcaatagaaaaaccggatgtggacggtaactgggtgtcaatcgcagctaccgatgctcaagtcggcaccattcagggaattggtcaaacatttgttcaacaactaaaagtctcagttggaaacactgaaatttacgacagcggaaatttgtacccatataaggtttacattacgaacacactttcgtttccgatgaacgtcaaaaaaagcttcctcgcttcaactggtcactatgcgacacgcacacacgacagcgtcgctgatgagggctttaaagctcggtgtaaaatttttgagggtgggaagcgagcccaatttctttcacgtctggactttgacctgggaaaccaagaactttatttgttgaacaatttggatcttttatttacaatttacaaagctcgtgacacttttatcatgcagacattgaaagcaaacgatactaccagataccgcgttagagtccatgacgtaaaactgtatgctaaaatgattgatgttcagtcatctttgaatttaagtatctacaaaacgcttgaaaaacaaccagccacatatgcagtgcgaaaaactgaaatcaaatcatgctttataagtgaaggtaggtttgaaattgactacaatgtattcagtgcaacaattcctcgacgtatgacaatcgcacttgtcgcaaacggggcatttaacggaaattatgctctctctccatttaattttaaaccgtttgacatacgagacattgccgtgtacgctggcggcatgatttacccaattgttccatacaagcttgactttgccaaagatatttttgtccgtccttttgttgacatgtatgaggcacttggcatggctaattcagagcgttctttcgacatcacaaaagagcaattcaaatctggttggaccttttttgtaattccactcacatcgacgctcgacgatagcacagggtatgaactcttaagaagcgggacaactagcattcgcgcaacatttaatagtgcaattcctgagggcggagttgaaatgatagtgctgggtgaatttgaccaaatgataatgatagactacaaccgtcacattgtttccgattcaaagcttagttaa

SEQ ID NO: 47023 - DNA, 1151 bp, Heterodera glycines
atggcaaagaatatgaacagcagcggacacagcaacctgcccacttcggtggaaggtaaatggaattttttgaaaatatttttttgatctttgccagctgtcgaagtggagtttctcgccttcactgaccgactttcggcgacactcaccgaatgcgagggactgaccattcgggcactgaatcggatccctgcagagaatgacctcatccttggtccagaggtacattggacgggacgggatggtttcatcggattggtgcaattgccttccccatacatccattgatttcttttcctaccaaagagttccccaatcttccacttttttctttttagctttctgatcgtattctttccgcgattgctgcacttgaaaaatgcatgtgctgtctgaacgaatgctgcgcaatggccgtctcccaactgagcgccgtcgactcggaaggccttcccgcgcagcaactgctcgaatttctgcgaggtgaagtggaaaaattcgcaggacgtcttgacaatcagcaacaggtcgccttccatattttgtaagttctttccatttttcaattgtctttttccgttattcgtttaatttttgcctttatttcgtactaaattattatcggctgtcaattgcaattttaaagtgatgaacgtgagaggggccttgaacttgtcagaacggtgcttgacgagctcagtgtcgcgctggagaattcgtcgatggaacttccgccaagcgccaaagacggcgatccaacgcggaacggttcccccctgacaatcaatggaaatcccttcgttcctctaaacgaacgcgcgtatggacgtaaaaaggaagctgttgaggcggatggaatccgctggcaattggccaaaaaggacgaggaattgctcaatttgcagaaagcgctcaaagagcgcgacagtgaaattggcacaatgaaagtgggagaattctcaaaaatgtcgtctcaaatagcatttatttgttcagcttcgggtggaaatggcaaagactcagttggcagaaacgacggggaaaggcggcatttccgtggagatggaattgcttcggcagcgatgcaccggcttagagaacgacttgaagagacagaaggagtgcgtttttaaaaagtattatttaataaa

SEQ ID NO: 47024 - DNA, 1381 bp, Heterodera glycines; identical to SEQ ID NO: 12285
  unsure (1)..(1381): unsure at all n locations

SEQ ID NO: 47025 - DNA, 2687 bp, Heterodera glycines
atggaggatcaaccacaactttcacaaggatttttccaggtctttaaagtttttccttctcaaactaatcaatctcttctgtttttagacttttttggatgaaaaagtgccggccgactttcagccgattttgcaagtgcttgagactcgtaccattggctcatcgtcggcgatgggcggctatccgccacaggggcagcaaatgcgggctcgtctcagcgacagtttgtactcgtacagcggttgcgtcattccacagacggtgacgcggcggttccaagacgacgggctgagcacccacaacggcatcatccaagtgaccagttggaaacgggtcgacgggtaaaatcaaacactttgaatattccactttaacatcaaattgtaaggaaaaaataataattaaaatttatgaattggcaatattcgtagtgagatgataaaaagaaatagcaacagttatacatatttcagtggaaagctttgtttcttccaagtgttggattatacgctgtactcgcttgactttcctgtcattggcaacccgcaaccacacagtggaaacccggcggaatttcgccgagttgttcaggtggcgtaaattgtcaaatttattgtcaatttttgtttcgattactttcttattagcctcaaaaagattccgacactcagcagacagcggccgaaagtgtcgccctttggcgcggcacccaagtgaaagacgagcctgaaaacgcatggggcggcggtgggtccgcgaagagggggcgcggctcgtcaccctcagaccagcgacagccgttgcggaagcgccagccggatgcgggcgcgcaaatggcacggatgggcgttacaccgatcgaagcgatcaacccgtacatcaacaggcaggcggaaaatctataattaatacgggaatgcttcaagattagaaattgaaaattttggacggacccgtcggattttaccttgtttatttgattatcagatggcgcatctgtggcgtggtcagcggaaaggatgcttccatcaaagacctgacgagtccgcgtggttccttccgcgttttctctttcaatgttacggactcaaaaggcgttgcaattcgaatcgctgccttcggggaacaggcggacaaattctttccaatcgtcgaaaatgcgaacgtttgttttttttctattcgaattcgaaatattgaaactatttcgaaaatcccatttagcagtctctcttattatatattctttttcgtttaaggcctatttcattagcggcgccggtggccctcgttccgttcgggcggccaacaaaagattcaattcgactggacacgactacgaattggtgttggaccgtgactctgaggtccgtttgcttttagttacaataagttttattttattttagctaatatttctttaggttgtctattgtgaggagcaaatcgaagtgccagaagtgaagctgaaaccgatttcattgaaagatttgccgaaccatgtgaacgaatgtgtggacgtacaagccattgtggacagagtgggcgaaattgcacaggtttgagataacagacacttttaagacggctcctctacggtttatgctaaatcccttccgaagaatacaaaaaagagaaaatctttttggccttgttattcaggtgacttcgcgcaaggacatgcgtcaattggacaaacgcgacattttcctgctcgactcaactggcaccgaagtgtgcctcactctgtggaacgaagaggcggtggcattccatgcgacgaccgggacggttttattttcgatcctttcctttctcggaatgtgccccgaggcaatgaaattcgcatttttgaggccctgtaacttttgaaggaggcaaaatgcaccgctaaaattaaaaattcacaatagaagtcgaccctcctctatccaatggtatatcatttatatgcattttctgactgacagctcggaatgttcccttgttagaaaattctatgaaaaaaattttcaggcgatttttttttgaaaattcttagaattcgtcattaaattttgaaaaatcgcctgaaaatttttcatagaattttctaacaaaaaattttctaagaacaaatttctaagattttttttttgaaaatttcagatgaaatttttttacaaatttattccacggctggattatgtctcggctgtgttttggggtgtaccgctgggatgtagtccacttggccgagtggactacattccagtcacaacaataatttattaggcatttccatattttatctccttttttagccggcttttccgtctccacaacttcgtccacttcgctgctgtttaaccccgagggaaaaaagtctgagaatctttgtctttggtaccgcgagtataggccggacgccaacatcaaatcgctgagcattgggtccgcctctgacacgcaagcgaactttggttggtctgcagttgattttttatattttaatttaaataaacaattttcttttctgtgctaaattcataataattcagagcgcgactttcggatgattggaattatccgacgggacggagtcagccgagacaatgacaagggcgagtacttttcgatcaaggcgatggtcgtcactgtgaagagtgaccaggccatctatcaggtcagacccaacaacaaatag

SEQ ID NO: 47026 - DNA, 625 bp, Heterodera glycines
gggctcaattgacggcaatcagtgtttaattgtcaagggcaagttccaacagaaacactttgagaatgtgctgcgcggttacatcagtgagccaatttctagtcatttatctcatgatcattgaaatttttgatatgaaaaattcgggtgtccttaattacactttcaccggcgatgggaggagtcgcaaaatgaacagaccctacctaaagcgccaaatttaattaccgatacgtttttaaactgtggcaaacaataatatttgtttttttgacactgagagggcttggttgtgtttgtatgttccggaaatggcgggcgtcaatttacaaaattttgtaccacctcggattctatgtatttttttgagcttggctcgactccgttccttgccataccattcgggcctaaatctaaatctcgggctgtccaacaaatatccattattgggacagaaggacataacccgttttgatcgtgttctcaaaaatttgccatttttagaattatttgataaccctcttcccctgctttcagatgaatacgtccgctgtcacacgtgccgctcctcggacaccgagttgaccaaggatgtgtcccgcctgttcttcatccaatgcaaacg

SEQ ID NO: 47027 - DNA, 1991 bp, Heterodera glycines
tggagaggtcagtgataataccagaattcttttttccatttcagttttgcgagtttttattttaaaatttttactttttcaaaatattattttagatagaaattttttggtttcttatccaaaaagacgatttaaaaatacattacttataaaatacgtttcgaattttcaaagcaaaaagtagtaacttactttgaaaaaagagttactcaggtttggtcgcaattttattcaatgaaagaattcttataacaaatatatacacaatttttaaatcgaagaaaaaacgtcgcattttccagtttcgcatttttatggaatcattacaaatccccgaatggcatgccatgaattgggcgggttgaaattcaattccacccagattagctgattattcactgaccttctctggccaactcaatgctccacaggtcgcttcatcgtcggcttcgtttgacgacaataaggagaatggtacggacagctgggccaagttgaagaccgaccccgtactttggctcgacagaatcgccgacgtgtggcgtaccctccgtccatggcagcaacaactcgcctataaacaggtgttaacacctatggtccctgattcattcaaaatggtcgaaaaatggcttagttttccgtgttttcccaagtgaccaaaagcggcaaaaagaggaaaaatggatttacagctttgcacttttataacttgtaatttatttgtttttttaatttgaacataatgtagcttttcattggaagcgttctgccccctaaaagaggcaaatcgcatactcttacattttcaattcacagatggccaatgaacagcaacagattcccccggagtgcccttggctttcgctctgttcaaatgcgatggaatgttctcttaccacgctgcagcgccaccaatcgcagcaaagtgaataaatgactcatcttcggccattcattcatttcccaaggggtcgttgaacacgcgtgccgtacaattcgttttttgatccgttcgatgggtgcacagtccgtcgtgttcattgagccggtggcaagccaaattatgctcaccttcagccaatttccacattcatgtcttctctacttgtccagcattatggtggatgagtacggctcaatggctcaccttcagcccggaatgctccaattgttggacgtgagatcgaaggcatggcttagcaagtcctttcgttacttcagaatttggcgaatcggtccctctctcttttggcgactgactcggagaacggactgcgcgaccatccggacacggtggacgacctgtacagattggccatccgtttcattcaggtgatgatgttctgtgttgtaaacgatgccaaatgaatattctgtgaatacagcgttctccgtccactctcttttctcatcccatcgtggtccaactcttccaaggcgcaatccatggactcgtccttaaccaccaagatgccaacagatcggttacaaaatttgtgatggaaataattgcagcagcgaaaggaaaacgcgtaatttttttttctttattttatacaaaaatattatttctgcgccatttttacaaaaagatgttttttggtgttttagagtcagtcactttcgaaggagcaaactgaaagagtgcgccaaatgcttgccgagaacggcccccaactgatgttggcatgtgtaagtgccgcgctgttccatctctccaattcgctgtgcaaagaaatggccgaaattgtccatgcgttactcaagacagacaaaatggtccaataatttctcaccgatgcttaaatgctttttttatcttaaagaaagcagaacaatggctccattttgtctgtgtccaattgccgcacgacgggggacacagcgcaaccccgcaacaattgaacgactttcgcatgaaaattctggagtaaccttcctttgatcgggttattgtgctaatgcatgttttcaggtcggttcgtcct

SEQ ID NO: 47028 - DNA, 656 bp, Heterodera glycines
atgcacgagcaggcgcaagaatttttgaagcgggcgattaaattgtgcccgacaaatgcgtccatttgggtgcttttgggacacgaatatttggagacgaaaaaccaccaattggcctcaacggcgtacaaaaaggcaacaggtgggcgattgattggtcaatctttgcccatttttacttttttttacgacgcccttttaactgttttgtttgtcattgtcagagatcgattccgtttgttaccgcggatggtacggactcggccaactttacgaaatactgaaacaatcggagaccgccctttactattaccaaaaggcgcacaaatgtcggccagcggactcgagaattttgatcgcattaggcgagactttttcggattaattttccttttcttcggatgtcattttaaatttcttttttaggtgtgattttctccaaaatcgaccggaaatcggatgcagaaaaatgctttaaaaaggcatttcaaattggcgacgtggagggaaatgcgctgacgcatttggccaagtaaaataaagcaaagtccgccaattgaaggtgacttctcttcagactttacgaagaacaggaaaaccagcaaaacgccgccaaagcatatgaagcttatttgacgctttacacggaggaattg

SEQ ID NO: 47029 - DNA, 564 bp, Heterodera glycines
atggcattccataaaatttacaatgacagtgtgaactccatcaccaacgccttggactttttccgcatcccgccaaccaacatcagcgtctcatcctccaaagtgtttgaactgctcccaagtaaccctttgaccgacaccccctaccacttcaaacttcactccagccaaaattacattgatctctccaaatgctatttgctgtctgagtttcgaattcgtaaagaaaatgcaaatggccaactggttgaccttgcagctgatgaggttgctccgattcaactgattggacacacattcatccgtaacatcaaaatgagcatcaatggccgtgaagtgttcaacgcaaattctctgatggcctacaaatcgtatttttcacacgaactctccattccacgaccgcgagactcgcatttgaatgctgcaggttattaccgtgacactggtggtgtgcttgaggtgggagacggatgcactgcacgacgcaacctgtttgtaggcagcagaacagcacaattcattgccaaaattgacgccgatttgtttaaccagcctcgctga

SEQ ID NO: 47030 - DNA, 1963 bp, Heterodera glycines
  unsure (1)..(1963): unsure at all n locations
attcactgtntcattctntatgaatcggattccatntaggtaaaaaataataattatttcaaatattttatttcaaataatttctaaacaaaataaattttatttntaaaacaattttatatttatatttttgatttttttttataaagctttcgccattttttggcgtgctcacttcaagccatttcttttctactgatcggcttttccacaacaatgtcaatggcacttgttggcgttgcgtttggctctgccgccgcgggatttggcgaaatttgttttttggcactttcttcattttatgacaggcaaccggaataatccacaaaaaatcattcaaaatataagccaaaaattttaaatttaagcaatgttttagatcaacagtttcggcgtggtgttttggcactggcgggtccggaattgtcagcgctaccgcttacgccgcactgactgagccaaaactgctgggaatgtctccccaaaatgccattttgacaatgctaattgtgccaactgtttattttttgacgtaagtttacttatgactttaatcataagtattcatgagctaatgacttaatgatatattttttacctttttataatttatttattaaattttaaatgatttttatgcttttcttattaagatattggttcgttttggtccattctccgcggatgcataaagcacaactcttgcggccatcatcatggattgtgccggcaatccgacggccaaattgttctggccaagtttatataacggaaaatgccatttcggactcaaaaaacggcaccaccggcggaggaacgcacgaattcacatttttgcaaaagctcaaattgattaaggcaataattacaatgactaactattttatgatcccaattggtcttaagaaacaaaccgattttaaaataagaaaacaaattaacatttaattggttcagccgcttcttcgctacatgctcccaattagcagtgtctatgttttggactttctaatcaactcaggattggtgaagcatccaaatactttttttataattattaaatatttttttacagggtaacaattaatcattagggggtcctgagatggagacataaatgtgccaacaaaaattttgcagatggcactgaactcacggatcaaattttggcaattttccggagaaatgcttaatgaaaataaacattttttggttttgtgaccccccccccctgaaattttcaaataaagtcatttatagggtaatttggggcgctgatcacgaatatgacatttatttttcaaaattacgaatcccgaacccgaattcaaacaaaattcgaaattcctaaattacaaggaaaacaaaaggactactcgagataatgtatacctttcgagatttaagaatgttaaaagtgggacattacttaatttgtcactctgtatttttgacaaaatgaatttttattttaccaattaaaataaatttttattttctcaaaatccattttgtcagctgcaacacgtcaaattcgattgtgctcgcagttttggcttgtcgttggccagccaattccgttggctccaaactttccatgtgatcggtcttttccttgctcggctaagtgccatttttgtcgaaatgccatcgctcattttgtactcacttcctattcttatggtatttttacatctaaaatttttaaattaaatttattttagttagcaaatttggcaattttctttggccaggctctgttcagttttgttccgcacattttgttcgtttttgcaattattttcttcgaaggaatgctcttcggctcgggctacaccttttttggcaaaatccatagaaaggtcatttttactaattttatttgtgaaagtccgctttagcacaaactgtgggcgtaagagtattttctagagatcgacttggacctgtatataggcccgga

SEQ ID NO: 47031 - DNA, 917 bp, Heterodera glycines
atggcctcttcacgtcccgaatattcgggtccacctgaacaatattatgacaacacagaagcacgcaaatacacggcaaattcacgcatacaaaaagtatggcagcaaatgaatttagaaattacatttcatggttttcacccctatttaaatttataaatttgtgaaatgtacggcaattttttgaaattttcgatttaacgcaaaatgaaaaattttctcattactaggaaaagtggtcagagttggctaccccaagatttcttgcaaatataggtctatgctagagtctggtgtgaccaggattcccgcaggatttgggggattttacgtaaatcccgatcccgtacttttagaccaaatttttatcctttcatccaacagatccagcgtgagcttgcccagcgtgcctatgaactgcttgaattgccggcattggacgacagtgcggcggcggccagttcggcgcggtcgcctgcgctcctgttggacattggctgcggttcgggcctcagcggcgctgtgttggctgaacatggccaccactgggtgggcctggacatcagcagggcaatgctcagttagtttgtccggcttttttgacatgtttagaccagtccaatttttttccaatcgtgtttggtgactggcggaatatttatttccaaaaatttggcttattttccgtcaaattttttctggatcgatccatgcccagaaaagccttgtccatgtcaaatatgaaaaaaaaccaggtccagattaggcacgaaaacccagggattttctggaaaagaaatttttcaattttctttaggcgttgcacatgaggacaccgaatcgaatggacaattgttgctggctgacatgggcgccggtcttccatttcggccggcttgtttcgatggagcaatttg

SEQ ID NO: 47032 - DNA, 1573 bp, Heterodera glycines
atgtccggatgtggaaaaggaggaaagggacttggaaagggaggcgcaaaacgctatcgtaaagtgagtacaaaatagaataatttacaaaaaatagaaaataaaatcgggaaaatacatccctaagaaaagacccgaaaaatttcagaaatacaccattaagacttggaatttttttcaaaaattgatcgccaaattttgatctttttgcttgaaaaaaaaatttcttattcgaaaaagctataaatatattaataaacatttaaatacccaaatttgaattttttgcttacgttttaagtctcttcataaaatttaaatgccttttttgcgattttttggtgcttttttcgagacaattaatacttatgataaataaattatgtaattaaatgtaaaatgacgttttcgtttttttaaatttttcccaaaataactgttgtctgttcctattttccagactggtctccataacatccaatgcatcaccaagcctgtcatccgcagactggcacgttgcggaggtctgaagcgcattcccggtctggattacgaagaaatttcaatggtattgtttttttggctgtcataatttttctaaattctttgatatttgttaatttttttccaaagtggatttaatatataagcttattgaaatttcattcaaaaaataagccattttagaattttctgaaaattaatttttactaaacacataaatcttttcaggcacaccatgacaacatccaaggcatcaccaagaatgattttgcccgtaatgaaggagtcaagggcacctccggcgggatcaatgaaatttggccaaacgatttcagaatggtaaatattaaatcaaaaacagaataattataattaattaacaaaaaatatattaatttggtaaatcttaacaaattcatgtagacacgacaggtcaaatctcaaagtattaataaaactaagtaattaaaaatattttgtatagggagatcgaaggcgctaccggtttttggagattaggtccaattttaaatgatttcaaaaaaaatctttcaacgtattattaattttgttaaggccgagggggtcaggccagagaaaatttgagcaaaaatgtcgatcgaaaaagaaattaaacgaaattttacgcaaaaaaatctcataggcaatacgattggtttttttagataatcaaattatgatcgatcaatctcgatttgtgaggaaaattggtcgaatcgtaggaatagacggtagaaagaacggctaaaatttgttttttttaattccaaaaatttcatgctcgtccataaattctttatttttcttaaaaatttgctaggacttagaaattttattgaaaatctgttaacaaatagcttttcaacaaatgatcttgagctggaaatttgttcaggacaacgaaagtaacacaattgtcgaaaatttccaaatcgatgagaccgaagagcaaattgactgggaccctgacgcaaattcggcatttctcgacattggtgcaactgttgaacttgttggtgccgagtctgacattgatgatgggaattga

SEQ ID NO: 47033 - DNA, 382 bp, Heterodera glycines
agaaagaaattgtcacaaatgcgcgcgaggattggtttcaacgaggtggccaagtgcacatcacaatttactgcaaggtatttacagcgattatgaccaattttataatttgatttcaattacgattttcgacttttttccagggagcacttccgagcgaaacatccgccaaatcggacggtctgacattggaagtgaccatcaacgggtccaccaaacggtacgaactgttcggggaaattgcgccgtccgaaagtgtggtaatgcaacagtttttgaggggaaacacttaattttggcatttgtgcaacaggtcattatcagcgaacgcaaagtggaaattgtgttgaagcaagtggccaaaattgggtggccaaaactt

SEQ ID NO: 47034 - DNA, 465 bp, Heterodera glycines
ttagtgctgcgaaggcgcgcattttccatattttattatctgctgtaaacgtttcacaacagaaaaagcgatgattccgctcaatttgcaaattgctgaggtatcccatattttctctgttttcattcctttttttggtttccgtttttagtctgctctgaaggtcctccaaacaaaaacgcccgggggagaaattgagcaaagtgcgacggcgggagctcactgtacaaacaatacgtgcaaaaaagtagaatcaaattagtaatttaaaaaattctaattgttttcccattttatgtgttcaccggtcccgagagcgatgccgaagagtgcgttttccacccgggcaatgccgtttttcacgaagggctcaaatactggtcgtgttgtgggcgcaaaaccaccgattttaccacatttttggaccaattgggttgcactcggggcaaacactgctggaaaaag

SEQ ID NO: 47035 - DNA, 1970 bp, Heterodera glycines
gtcgcccttttggtcggtctctccggtgcctttcactttggcattcaaattaccatcacaaatccgtcccaacaaacctttcttttgtttctcaactcatcgcttcacataaattatgggaagagaatggacacaaaacaattggaggtacgaaatcgaaatttggcatattttccagagggatttctttttttctcctttggtagtgacccacaattatcccccccccctctttccgcaaaaggtcttttggagtttgatcgtctcaatgcttttcctcggtgccatctttggctctctttccatccgtccgttggctgaccgctttgggcgtcttcgagttcttttcttcagcaatttgttgtgcaccttcggccttttctgcagtgccttttcctattttgtatgccaatgccttttattcattttttttttgtttgctttaagctgaatcggttcgaattgctgtgcctttctcgttttgccattggctttttattggctttatgtctcgggttggctggcattttcttggccgagtgcaggtgctttcccgtggttctgtcaatggcatcccttttcgaattttaagtcccaaatattgccgtggttttgtttcgatgagcaccggcgcattgcttcagctcggcactgtttttggctctttcgtggcaattccgcgcgttttgggctcttcaaatttgtggtgggtaatgttcacaatcgaaggcactcaacttttggccacaacaatcattttgacaatggtggcagaagaaagtccgaggtttgccaattcacattccaataaaactctttttgagttcagttttcttttgcttcgtaataatgaaacactcgcgcgacattctttggcattttatcataattgttcgggccaaattttggaagagcgaatgggcgaactgagaagagaaactctgcgaagtgttcggcaccgttccatcggactttttcggctggcaaagcaaaagggagccaaccgaaagggcactttttaagtcacccattataagtgtcaattctcacttgggtttttcattttcagaattggcagcgtcgtctcattgtccatgggattcagcggaattgccggtcttaaatttgccttgtgataatgccttttccccttccgttagtgatcaatgcttttgctgtggagcttttccgtaccactggtgtctctgagtattgggcttccattgacaatgttggccttgccctgctcagtttggtaccaattcttttgattccttccccgctaattaccacattaattattctcattagatctccaacatcgcctccgcccttctgatcgaccgttttggacgacgtcgtctgcttcttgtcacgttaacggccattctcttgatgaacatcgtaatcagtggccttatgtatgcttatgcgaagacggaagttggtgggaagggaagccatcgccggggcaattgaaaaaggaatatcaaataaattaaatgctatcggctttctgatcaaattgtttccgatcagctgagttggctcggcctctgtctgatcgtggccatttcgcttttcaccgtcgcttttgcctttggccccggtcccatctgttactttttggcctctgaactcgtcgagcaaagtgcgcgttcggctgcccaagggtgggctaatctctgccaaatgatcaggtatttctgtccacttccgatcacttcggtttccatctgatcagtcgtacctttcttctcgctattttcctccccctccgcgcttccattggcgttgcctccgcttactttttgctttttgttacggtcagtcattaaaaaaaaagcaaaaattaaaagtgaaaataacgtaaaagcaattcagcccattttgatcgctcttctctttttgtttttcaatttaccggagaccaaaagacgcgacatttgcgaagtgcggcacggaatgcg

SEQ ID NO: 47036 - DNA, 3377 bp, Heterodera glycines
acaatgtccgttcctattgttctcctttgtgaaggcacacaatctaagcagggacgtgaccaaattttaagcaacatcaacgcgtgttgcgctgtcgcggacaacattcgcacaacacttgggccacgagggttggacaaattgttagtggacagaaagggtaactaaagacattttctccaaggcgcggctttcagcgttcactttcattttccctgatttatttaaatataatttagggcaaacaacgatatctaacgatggagctacaattttgaaaaaacttgacattgtttttcctgctgctgtcatgatttgtgacattgcaaaaagccaagatgccgaagtcggcgatggcacgaccagtggtatgcaagtcttcttgacaatgctcttttttccttttcctgagttttataaccggtttatattttttttgtttaattttgcaaatatttaattatcaccacgtcaattctcttacaaaaacaaataattcttaattgaaaatacattatttttaggggctctagtgcactttatgagtccaatcaattgacaatcccgggtttctatacaataactttgttcatgttcgaacaaatcctatctttttggtatcattcgaatgcacaaagtctgaataatgtaattatacgagaaaacaacagaattctaacattccaagaaagttacaaacgaaaataatcagcaattacttaattaatcaaatcttttttggtaattgcctgaacgctgcgattttatatattttagcttcgttagactttgtgctttcgaatgatgccaaaaagattagggtttgttcgaaacatggacgagtataaaaaccaggtattgtcaattgattggactcacaaagtgcattagagccatttttagttgtgatattggcagctgaactgcttaaatccgctaagccttttattgaggagggtgtgagtccgcaattaatcatcaaagcatttaacgcagcctcacgagaagtttgagggtggaccgaggcgggaaaagggattttatttgtttaaggcaattagcaaattgcgcgagttgtctgtgaaagtgacgggcaccgaagagagtcgcgagatgctaatccgttgtgcagctacaacacttagcagcaaattggtagtgcaccaaaagaaacggcgagttaatatttacttcagctcaaacaagaacgtcatcactttgcgagtatggtggtcaatgcggtggattacttagacgttgatttgccactgaatatgatcggagtcaaaaaagtcagcggtggctcaataaaggtgaattcggtattacacatcgccaaacttgacaatcatcgttcaggattcgcgacttgttaagggagttgcattcaaaaaggcgttcagttatgctggtttcgaaatgcaaccgaagcattacaaagaacctctgatcgccattcttaacatcgagttggaactgaaggccgaacgcgacaacgccgaattgcgaattggcaatgttgcggattatcaggaagtccgaaatgaaacccagacaaaaacaaaacccaccgaagtatagccaacccccgtaaaaatgcacaattggtatactaaccgattcgtctcgacaagcacgaaaaatagatttcaagatatgaaaattggtttaaaccgatttaaattaaaaaattacttatcactaactttaaactctgactagttcgtatcattcaaaggctctttgacaagaaaaggagcataaaagatgggtgtgcgctggtttttgtgcaacaaacaaaatttcaattttcgttcatttcattaatttttttgggttttgaaccggctcaaaaacctcattgtcagaagagttgtgtatttcatcctttgatttttctacttatcaacagctttgggataatacttactcggggtttgagcgtcttaaaaagttagaagtgcgtggttttcttcattttggttttttaaaaacccgatttataaatcttgtgggtggttggctatactacatccaaaacccattaaaattgtggctcttcttttgcttaggtggttaatgcggaatggactattctttaccaaaaattggagaaaatacatgaaagtggtgccaaaattgttctgtctaaattgccgattggggatgttgctacccaatggtttgcggatcggtaatagcatttagccaaaattacaaatgatttattctctcaaacctagcgatatgttttgtgctggacggattcaggaagacgatctcggtgtgttatttttgtgattgctattttatgttcctttttgtttttaggtcgtataatggctgcttgtggtggctcaacactgactacggtctctcagatcgacaaaattgttttgggaaaatgcgctgaattctatgaacaacaagttgggagtgaacggtaattaaaaaaatacaaaggctcgatatttttaaaaagacacttttagctacaattttttcattgatgggtctaaacacaaatcgtgcactttgcttttgcgaggaggcgccgagcaattcattgcggagactgagcgatccctccacgacgcgattatgatcgtgagacgtgccaagaaaaacgactcaatcgttgccggttggtggatctttggattagtattttgaattcgtgtcaaatataattgatttaggtggaggggcaattgaaatggaattggcaaaacatttgcttgggttggcaaacactcgtgaaatgaaggaccaattcttttggaaggcttttgctaaatcatttgaggtttattttttctggttttctttatttcgatccatgtttttgctttttccccattttcagatgatcccacaacaactttgtcagaatgctggtttggactccatttctatgcttggcgaacttcgcgctgcccatcaacggggcgaaaagtgggcgggtgtcgacattcagcgggaatgcgtcgcagataacatggagggatgtgtttgggaacccgcacttgtcaaagaggtgcaaataataaaagtgtattatggttaattcatgggggaggggttcaatcgcctatttcccacaaaaatcgaagcaatttaaaaataaaaaactatcaatgaagaaagtatttatttgaatgagaaaacaggtatcaaaactgccacaccacaaaccttgaatcgaaatttttgcaaaaaaaaacgatagggtaggggaaattcacaaaaccgtactcatttaattcctgcagaatgcaattgtatcggcaaccgaagcagcttgtcttgttctgagcattgaccaaaccatcaaaaatccaaagaacaagaatgaaatgccgggattgcctggtcag

SEQ ID NO: 47037 - DNA, 1531 bp, Heterodera glycines
atgtctgaaggtttggtacaaaggcgacggaaagcagccgagtcgaacaattcgtcaaacggtggtcaacaattggatgtgtgtaattttaatgccaaatttacactttttggacttttcctttcagaatgatgacaaatcggcgggtacttacagacagacaaccgactcaaatggtgctggtgatgaggacaacgacaaaatgcaacggctaacactgatggaggaaattctgctgcttgggctcaaggacagagaggtgggggatggctatttgtcaatctttaacttattctgtattttttgtcccctcctaaaatttttcaaaaacttaggggtacacttccttttggaatgactgcatcagcagcggactgcgtggctgtgtgctcatcgaattggcgttgcgcggacggattgagttggaaagggcggggatgcgaaaaaagggcttttcctctcggaaggtcccattttgggacgtcctttctttaacacgaaaaggcatttaaggtgattttgaagaatgagaaaatgaccggcgatgttattttggacgaagcacttaaacacatcaaagagacaccacaaaaagagacggtggtcagttggattgaatatctgaggtgggccaaaaacgcgaaaatgcattgttaagatgtttttttttacatttagtggcgaaacgtggaaccctttgaagctgcggtatcaaatcagaaacttacgagaaaggcaattgcaatttattcataaattcgtgttaaaaaacttatcttttaaggcttgcaaaaaatcttgtggaaaagggcgtgctgactacggagaagcagaatttcctccttttcgacatgaccacgcatccattgaacgatggaaatgcaaaggcaaaacttgtcaaagtgcgttttactcaaattgtgaaccgaaaatgcccaaattcagcttaggtgacatttccctaaattagtaattttgtaaccaatgaatttgtttaccgatcaagccctatccaggggaaagaggggggtgggagaggaggtaattgccccctcccattcgaaatgaaaaatacgagggaaaatgggctttaacaaattaacaaaaatgcagttttttgtcagaaggtcttcgttttaattatgctttcaaagtatttttttgttcaaatgtttcagagagtacaagaggcggtcctctccaaatggacgaacgatttccaacggatggacaagaaaatgctttctctgctcattttggcacatgccagcgacgtgctcgagaatgccttttccccactgaatgaccagggtattcggggattatctgctcaattgttttccatttgtttatcccaccgtttccataagactacgaattggcgatgaaacgcgtgcggactttgctggagacggactatgaggcggagagtgtgaaaagcagcaaattgcaggccaacggcggaggcgaaagttccgctggctccgccttcgatgtgatatacgccgtgttcgaggcgttttcaaagtga

SEQ ID NO: 47038 - DNA, 1317 bp, Heterodera glycines
atggcattccacaaaattgacaatgacagtgtgaactccatcaccaacgccttggactttttccgcatcccgccaaccaacgtcagtgtctcatcctccaaagtgtttgaactgctcccaagtaaccctctgacggacaccccctatcacttcaagcttcactccagccaaaattatattgatctctccaaatgctatttgctatctgagtttcgaattcgtaaagaaaatgcaaatggtcaactggttgacctcgcagctgatgaggttgctccgattcaactgattggacacacattcatccgtaacatcaaaatgagcatcaatggccgtgaagtgttcaacgcaaattctctgatggcctacaaatcgtatttttcacacgaactctcctattcaacagcggccaaggactcgcatttgaatgctgccggttactaccgtgacactggtggtgtgcttgaggtgggagacggatgcactgcacgacgcaacctgtttgtaggcagcagaacagcacaattcatggccaaaattgacgccgatttgtttaaccagcctctctacttgatcaacttttgtgagctggacattgaaattttgcccaacgacaacgaatttgtcctaatcacaccacccggtgttgctgcagccactcgctaccatttcgaagttgtcggtctgaaaatgtatgtgaagaaggtgtccctgatggacggattggcgttggacattgcgcgaaaacttgagttgaaaccggcacgatatgcagtgaggaaaacgctgatgaagtcgctgttcatcagtcatgggcgttttgaatttacgtctaatttgttcatggatcaaattccccggcgcatcacaatgggattggtggccaatgctgactatgttggcaccgtttcacgcagccccttcaactttcagccatttaatgtgcgtgaaatttctataattgccaatgggcgctcctaccctcaagcagcctacgacttggactacccaaacggaaagtatgtgcgccccttcaacgacatgaacgaagcggtgggattcgccaactcatcggaaagcaacgggattacactagcacaattcggtactacgcattgcatttacgtgttcaacttgacaagcagtggagacgaccaagcgacgctttttgatctgataaggaacggaaccacagcagtgagcatcaaatttaatcaggcggtgcccgctggaggaataatgctggtggtgatgggcgagtgcgactcgctggtgatgttggataaaaatcgatcgatcagcactgacatcactatttaa

SEQ ID NO: 47039 - DNA, 577 bp, Heterodera glycines
agaaatcaaagactttggagtgctccgtgcgttgccaattggcacggactgtgccgacggcgcggtctcttcaaaagcggcggcgtccaacaacagcaaaaggggcccactgagcatgttctcgcgcaacagttcaccacggaacagtttggcggcatctatccaaattccgttacatctgcgaaatgagggcgaatgttcagcaaatttgacatccaaggaaatatttcagtagggacttttaaattacaattacttatagacaataaattagttgttacatagacaattaattaataggtaccatttattccctgtttgatgccttgagttttgacaaattatcataattaagcactaattatacgcctctgttaatttaatttatatattttgaaaacagaaaagatcccacaaatgctgactttttggtggtccattcgaccaccccccattatgtgtcgtggcggaacagtgcaaacggcgcttggttcgtgcagagtttgtgcaaagtgttcagtgaaatggccccgaagcattgtgaaatttttgaaatgctaacgacagttaattatga

SEQ ID NO: 47040 - DNA, 1757 bp, Heterodera glycines; identical to SEQ ID NO: 12472

SEQ ID NO: 47041 - DNA, 1678 bp, Heterodera glycines
atgattactctttgcatgccacgccgtaagttctgtctcccattttccatttttgcatttgtccgaatgtcttttgttttcagttcgtgcgtttcctttggacaattcgctcggatgatgggtttcggggccaagcagcagctgaacgtcaattacgggaacagtgtcgtgaatttcaagcacatcctcggacgcactttcaatgacaaagtcgtgcagacatttcgtcagcacattccctgcggacttatggggaagttcaccgatgaccaaattgagataaaagtgtgccaaagcgtcacaaatcattttgtaattaggaaatgtgttttcttaggtcactcatttgggcacgacgcgagtgctttccccggaacaggtggtcgcctgtctgttgacacatttgcgggttcagctcagccgttctctcgggacggatgccactgaatgcgtcattaatgtgagatctttcttttcggtaccaaaaaggatgggcggataggaatagttttgggtgttaaaaatgctcttcaataacccaacagtttgttctccttcaggtcccgtttttctacgaggaaaaccaacgccgcgctttgctgaatgcgggtcgaattgctggcctttcacttcgtctgatcactgacccggccgcgttggcctattgttacggcatgtataacggggcaaagtgagtgagggacaggccatcaccaaaaaagttggagtgggacctggcaacttttttatcggcattaattcttttttggctttgataaacataagaaaatgaaatttaaaacttaccttgtattatataaatttgattatttttccaacttttccaattgtaaaaccctctttttaacacgcatttttcattctcctctttcagtcttcctccacctgaacagcccgctcggcttgttgcgtttgtcgatgtcggccattcgtctgttcaagccagtcttattgcattcagcgccggcaaagcggaggtcagcaggcgaatgttttaaactccttaattatttccattttaggtgctcgccgcctctttcgatttgaccgttgggggcgtccatttcgatgcgttgttgcgcgactatttcaatgaggactttggcaaacgcttcaaaatcgacgcgaggaaaaccccgcgggcgtggctccgtttgttggatgaatgcgaaaaggcattgacaatgaaaggcacaaacgaattagaactttcagatcaaaaagcaaatgtcggcaaacagtcagcccattccctttgcaatcgaatgctttgtgaaagacaccgacgtcaacggagtgatgcaaaggtgggtggtgggacagtacctgagttgttttaggatgtatgaaagtccatgggacgcgtaagcgttttccccctctgctgaattttgaaacaaaaattgtcatcaaataattacaaattagggaccaattcgaacaattggcggagaaactcttccaaaaagtgcaggcactgctccaacagctcattagtgacgcgaatgtgaaggtaaacaaaaacagtcaattaaaaataacaagtttttaggtcggcgatattttcgacgtcgaattggtcggggggtcgtcgcgaattccgcgcatcaaacaaattgtggcaggtagtaaatttggaaaatcattaaaaggatga

SEQ ID NO: 47042 - DNA, 2939 bp, Heterodera glycines
ctgctgctgaagaaattcacagcgtttataaagcgattgaatgaattgtctttgtgccggactttgttcggcttccaccatttgagtgagggagaggacattatcacccgtctcgaccgacttgaaaagttgctagaagggtcagggaaccccactctggtcacaatcatcgaacgactagaaaagttagaaaagctggtagaacggctaatcgcgggcgagaatcgatatggaaatcgatttgctgaccctcaacacacctcccacacttcggcctccaccaacaacaacggcaatgttcaatggggtcaaccgccgccttttgctggcactggcgccgtttcgcagatgattaccgaggcaatcatcaactccgaacaactgaaagagaagtccactcgtgcggtcatcaaaaaattgccggaggcgatggaccaacaggcagtggtggagcaaattgcagaacaatgcggtgtcaaagacaaattgtcgcccgacattcaccgccacccaaggacacggcctgaaggaggggtaaaaagggatcggattttaaaagtgccgtttttggacaaattttcacgtgacaaatttctctttaatttccgtaatgctgtgaaaaaattgcccaatgtgccccaacatatcaaagtccgaagggatatgacccaaagtgagctcaaaatcttatactcccttcggcaacaagcctatcaggccaatattgccgcaggtgagtataagtattttgtggttgacttggagatcagatctctgaaagacccccgcccgctcagaactcgctagggatacgcgagcaaatcaaacaaaaatattgggaatacgggaaagaaaaatccttggatttcttgcctattaataaacgcccgatcgataacaaataaaatagctgacttagaacatataacccaaaaatacgatccttttataattataataaatgagacctggttaaactccagaaacacattagaatcagaacttaaagtaaatggtcaatatcaaataatccttgcaagccgaaatgataaaaagggcggaggatcggcaattttattaaaatcaaacatcccttatcagacacttttctctgaaattccaaagcgaaattattcacataaaattactttttaaaaaacctatttaaattataaatatatatcgtccaccaaattgtacagttcagaatactaaaaactactcaaattcatttctgaccagagcgattctgaaaataccatattctgtggtgattttaatatcccaaatatattgtgggatgaaaataaggtaaaaaaaataaatgatccggcgtctaattctctaattgagtttatgcaccaaagacaattgatacagcatgttaaggaaccaaccagagaaaaaacaattttagatttagtaattactagtgaattagaattaattaatgaattgacagttctagaaaatttttcaacttccgatccgaaaatggttggatttaaaataaaagtaaaattcagtcataaaaatcctaaaatttacagaagagattttaaaaatatcaatttttcgaaattaagtcaggcgatacttgaaaatcgaattgatttatcaataaactcagtgttcaccgttgaacagaaatataaagaatttttaaataaagttctgaaattatatgatatttttatacccaataggcctctaaaatcgataataaaacaatcgtatcctcaaaaaataagagacttattttcagagaaattacgtttgcataagcttgtaaaaaaattccctgaaaaaagtgatctcattttaaattacaaaattatttctagggaaatgaaaaaacaattgtacaaattaagaaatgaaaaagagtcaaaaattatttcccaagggcaaaactcagttaacaaatttattcgaaataaattatcaaaagttaatgaaattcctacgttaattgataatgctggaaatatgttttccagcaatgttcaaaaatgtaagatattagcagaaatatttcaaaagtcttttttaagaaaatcaattgttaatggtccacaaactcaatcgacacagaataagactaaactttctgacattgaattgaatgcgggaataatttggaatatattaagaagacttccccggcgtaattccacttcaccggataatgttccttacattttattaaaaaattgtgcagaaccaattacaaaaatattagcagatatatttaggctaattttggattccggtcaaattccggaaatatggcgaacatcattggtggtaccaattttcaaaaaaggcgaaaaaactgatccattaaattacaggccggtgtcattaaccagcactgtctgtagagtttttgaacgaattttgagtagcaaaattttagaatttctgaacagtacaagattctttgataaagaacaatttgggtttttaaaaaatagatcgactacaacccaaatattaaaaatgatggacgatatatataattctatacaaaagaatcaacaaattgacataatctatattgattttgtcaaggcgtttgattctgttccaattgatttattacttcaaaaaatcaaaaagattggaattgaaggaaaaattcataattttttaactaactttttaaaaaatcggagttttaaggttaaaattggcgaagaattgtcagaaagtttcagaatattttcaggagtgccccagggaagtgtcttagggccattactctttttaatttttataaatgatctgccgtcctttattgcaaatgaagcggcatcagttggcataaaaatgtatgccgatgatgttaaattatattatacacatgaaaacgatgaccattcgaatcagttggataaagcaattgaggctttggaaaaatggtcaaaaataaatgg

SEQ ID NO: 47043 - DNA, 1570 bp, Heterodera glycines
ttccaaattttcgtcaaaactctcaccgggaagaccatcacccttgaagtcgaggcgagcgaccccatcgagaatgtgaaagcgaagatccatgacaaggagggaattccgccggaccaacagcgcatcattttcgcgggtacatccgcttgatatgccaggatattaaatgtttcacgtaatccttgtttttagggaaacagctcgaggacgcacgcaccatggccgactacaacatccagaaggagtcgacgcttcagctttgtctgaagcttttcgggggcgcaaggacgggcaaaacagcacactactctcggagcgtaagtcatgatatcacctccaaaagccctcttccccccccccccctccacaccgccgatcaggcggtcacctccttcaccgctgataagcggtccccctccacaccgccgatcaggcggtcacctccttcaccgctgataagcggtccccctccacaccgccgatcaggcggtcacctccttcaccgctgataagcggtccccctccacaccgccgatcaggcggtcacctccttcaccgctgataagcggtccccctccacaccgccgatcaggcggtcacctccttcaccgctgataagcggtccccctccacaccgccgatcaggcggtcacctccttcaccgctgataagcggtccccctccacaccgccgatcaggcggtcacctccttcaccgctgataagcggtccccctccacaccgccgatcaggcggtcacctccaaaaccccaacgaaaaattaaattttacatatttagctatgaatgaaacttttttggagtaaaaaataaggccacagaagaattggaaactctcgcctctcgccgaactctcgctctcgtctttttggggactctcgcctctcgccaaactctcgctctcgtctttttggggactctcgcctctcgccaaactctcgctctcgtctttttggggactctcgcctctcgcctaactctcactctcgtcttttcagaaacaagttacacccttggggtatatgccctgcggcaaggaaagaattgggtatatgcccaatggggaggagtcattgggtatatgtccaatgggaggagtcattgggtatatgcccaatgggagggagtcattgggtatatccccaatagggagtaaagtcattgattttttcattttttaatttatttttacaaaaaaaaacaaatttttaataatattattttgtaatttagttagtatacaatatttttttttgcatgttttcgttgttatttgggaattaacccaaagagacaccgtactgatgaggcccggtctctttcggttaaatttgcacgtttcgcgaagtgcccatttttgcactgtcgcgaaacgccccatttttacaccatttttgcactgtcgcgaagtgcccaatttttgcatttttcgcgaagtgcccaatttttgcactgtcgcgaagtgccctttttgcacttgtcgcgaaatgacgtagcaccgagcggtcgagaaagtagtgtttagaggagccggtttcagttttgtcc

SEQ ID NO: 47044 - DNA, 695 bp, Heterodera glycines
atggagagcaacagggaattaatcttgtatcgtgccaaactagcggatcaagccgttcgttactacgacatgggacagttgatgaagaaggtggttttgatcattgtatagcttaatgaataacaaattatatcccttttcctttcccatttcaggtggttgagttggacaacgtcttgaacgaagaggagcggaacatgctgtcgattgcgtacaaagctgtcatccgtccgcttcgcttcgccttacgggagatctctccgatcgaatggacgcaggatgggacggaaaagcagctgcaaatgctcaagcgatatcgcgaaaagttggtcaaggagttgcacgacacatgcaacgagctcgtggtgagaggatggaccaatttattagttttaaaattcaattttaaggagttattggacaagttgatctcgagggccgacgaccccgaagtgaaggtgttctacctaaagatgaaggctgacgtctaccgttacatggcggcggaggcaatcggaggtgttgttgacaagtctcgccaagcataccaagaggcgttcgacatagccaaggacaaactacggccagcaaatgctacacggcttgggctcggactgaacttctgcatcttctactacgacaatttggacatggaagaaaccgcaatcgatttcgccaaaaaggctagggattaa

SEQ ID NO: 47045 - DNA, 2160 bp, Heterodera glycines
gaaattgttgaatgatccgcgtgcaattattttatttgtggtcgtcaaagacttaagcacttggcatttctccaaacgatatgatgaatatgagttggaaagattgtccggtggacgtgccaaaattgttcacctaacaactgtggaatgctttgaaaagtggggcaagggcgaaaatttcaaaaaaaaaaattaaaatattaatattaaatttaataaaggtctcgatcgagacattgatgttacatatttctgtaaaaattaaatcatcgtaccgaatgaataaatttacaaatatattaatggaaatatttattcataaatttatcatgcaaaaaaaaaattatttttttagacaatttcttaattttacaaaatgatgcacaaattttggtctattcacatgcaaaaaatcgatgagtatattaaaaaataaacataataatcagaaaaaataacaattttaaaacccaacaaattttgtaaattatcgctttacgaattatgctaatcttttcgggcttttctttcgaaatcatttgcttaaaagccaataatcgcatttgccattcactattaagcacagaatttatttaaataaataaataaattttttttttcagtttaaagcttgacgatgatttaacgcttcgattggacggtcgtccaattggcgttgcatattggaatctcgtgcgacttggcagcgacgcatttgggcctaaatcttgggcagcattgcgaatgattgaacgctcaacagcaattgtaattattaaattaattaattcgtaatttatttggtatattttcagaaagcgacttcgttgttctttgaattgagcacatcgaaaaaaattcaacaagtatttttttaattaattttttttaatttaaattaattttgttcaattaaaaatttcagttgcttgccaagcccgggatggttgaacgatttttcacagatcccagcgaacaacaaatggttgacgcaattcgtgcaacatttgctaaactgtggggattggagaataaggacgaggaaacgcaaaaaattattcaggtaattatgcaattaacgcattaacgataattaacagttaaaagaaaattaataaaacataaaattaatctattttagttaatctattttactattatcgttgcaaataattctttaaaatttcgcatcgattaaacaatagaattttatttttctaaattcctaatcctatgcaattcttttttacttttatatttttaaattattcaaattcatttttatttgcattttcgatttatttggtaattaagtataattaaggatgcaattgcccatcccgagcgttatgtgctaaagccaaacaaggagggcggtggagggaatatttggggcgaagaaatttctcaaaaattacgcaaattttctcgaagtgaacttgcggcacatattttgatggagcgcattaatccggtgacagtaaaggtaattttgataaaattggaattttaaagaaaaatttaaaagagtgtttatcaaggcgtcaattaaaaaagtgagggacccttttggattaaatttttgaaatatcgaattgtttcgaattctcggtttaaggaatttagagtttgtagaaatagatgctatagtgattgatcagagaccctgaaaaatccagtaacaaatttttttccttattttaggagaaatattcttcatctaattaaataaatttaatttttcataacatttctttctaattttgaatattattataaattgcaaaaaaaaaatgtctttaataattatgaacagcaggtagacagacttaaaacattaataaaatttttaaaattttacaaagtaatttgacttcttcattaatgagttcaaatatttttgtttccgatttctcttttttattatttattgtcacacattttttacagaattttatggtctggccctttaaaagggccgagtttgccgaagttatcaatgagcttggcatttacggatacctcattggcaacatgaacaccggggaagtgctggagtatgaacagcctggtaacatggtccgtaccaagaacatgcacaacaatgagggcggcgtttcatcgggcaacggagtgttggacacgccatttctatactga

SEQ ID NO: 47046 - DNA, 1495 bp, Heterodera glycines
atggcctataaagatgtgattgaatcagatacgtctgttcggacgctgctgggtattttggaagatattaaaaaggaagggatcaaacagccaatttccatctttttgcaacgatcggtcagttcaaatttaaattcacataatttgagtttcaacaaaattttataaataaagtactaaaattgttcatcaaaacagacacacccaaatggattttaaatatacaatttaaatgaggtattccgagttttgtaattacttttgtcactgactgatcagatcagtgataactaagctattttaatattttttttttaaattttttttaagtttaagtaatatttatataataataattatataatttattttatttctctattttaggattatatgataacagctgaaactaattcaaagtccaatcaaccaaactaccaactaaagcaggtcgaccaaacgataatttattatttcacgaaacaaatttaaaaatattataaatatttttgccaaattttttcagattgaagttaatggtggctcaattggcagtgcgggatgccaagatcggcttttgagcattcatcagcgaatgctcaaacacacaggttgttccgaccaaatgatcagcaatgcattgcccgaaaatcgttcgggcgcggcaattgccaaaataatttacaaggcttggtcagtcattttattaaaatatattttttgattttttttattgcttttaattagtcatgattatgcagaaaaatgaataatttgtattttagcgatggtcgaagaagtccaattgaataatgaaaatttttctaaaaataaaattatatgttttttatattagccacaaaacaagatgaggctaaaatgaaaatttgaaccagcaatggtttttgatttatttattaataaattcgaaaatccgttaaaattttctttgatttaaaaaacatttgcataaaaataatattttatgtatattctaatgttttttctttaatcttttcactcccgagtagagttgtacgggaccgggacctagacacggacaactgagtacaactgagtatctaggtcccggttttgaccgggaccgggaaattcccgggtttttcagccaaaaggtcccggttttttaaccaaaaaagtcccggtcacggttttgccaaagattcccggtcccgaccaaccttactctcaagttgtctattttgttggattaacctttgacatttctattgaaaaatatgaaatttttccctgccgcctctggcgctccattaattattatttaattaatttttcattcttttttaataaccaggaaattgttgaatgatccgcgtgcaattattttatttgtggtcgtcaaagacttaagcacttggcatttctccaaacgatatgatgaatatgagttggaaagattgtccggtggacgtgccaaaattgttcacctaacaactgtggaatgctttgaaaa

SEQ ID NO: 47047 - DNA, 1993 bp, Heterodera glycines
aaaaagagggaagatagataggaaaggaggaggagagtggcagaaagacagacaaacagagggaaaagaaacgagccaagtgatgacgaggagggcaggcagagaaaagggggtgcgaagagtgccgccggtgcggcgacggattggggaagggttcgtcctcggggtcggaccattcgtcgacctcagccgactgggccaatccatcctggggactgctcggaagcaaaggacgagtcgaagacgacgatggaaaaggagcgaccggagggacaaacgccgtcggaacccacggggcacagccgacgccggcgggcgaaaagtacagcagcgccttgaagttctcctcggcaccgcagtaattctcggccaaccactgaattgtgccatttagcgattgtcaaaataatccaaaattggcaattaatttgtatttttggccgtctcctgcgtccgattcacctgctcctcctccggtgcgttgatcatccattggagtgcgcatgagcagtgcagcgtattgtccgcaaattcgaatcgctgtgcgccgtcgtgccgaaggcattctggcgacaccatcggctcacgcacggtgttgtaagtgaacaccaatttgccaacattgtccatgccggaagaccaaccgggcgacagtcgcacaatttggttggactgaagttggacagagccgaccgtgaacagtccccgagggcaccctcgtcaatgcggccaatccggcactcgcgaatttggagctgaaaggcaaatgcaaaatgaaatttcggacagaattaaacaaaattggcattccctattttaggcatttgtccccccgccaacggaaagcaatcggataaaggccaaaaggacagtttaaagttgatatttcaactttgttgtgtaataaaaagtgaaattcgagtaggaaaaatcgaaggaatttaaaaaaaggcccagtgactgtggtgaccagcaaaaagagacgggtgaccttttttgaagtgccaaatgacataaatgccatggtcgacgcagcaaaaattgccgatttggtcggtttttgtggatatttggataaagaattctttcgattttctaggccctcattctcatcgacgcctctttcggctttgaaatggaagtgttcgagttcatcaacatttgccaagtgcacggcatgccaaaagtgattggagtactcactcacatggacaatgtgccgaaacggagtcaattgaagtccataaagaagcaattgaaaaatcgcttttggtccgaactttaccaagtgcgaaatgtctaccatgcgaatgtaaccgattgttaatcacttttagggtgccaaattgttttacctcaccgggatgcaaaagcagcgttaccttcaacacgaaatcaaaaaccttggccgtttcatttctgtggccaagttaaggccaattttgtggcgcaattcccatccctacgtgttttgtgaccgatttgaggatatcactgaccccgaggtggaactcacattcattttttatacgaatgcttttcctttattaagcttattcgttcggaccccaaagtgtcgcgttcggtttctctttacggttatgttcgcggggttcacctgaagaacaattcggctgttcagttaatattttacatttttatttcctcattaaatcattttttaaatccttctccagaccggtgggaagcaaattacgaatttttgcattttgatccaatggaattcagcggaacagagacgaattcatcgaagcactcgaaggaatcaaagagccgttggattcgaaaatgggaaaggcgactcttaagcttctgaaggaaaatcccgacttggaattggtgcgtttaatccttacaagggaacctcgcgaactgttagtcggaaaatgcatatgtattatataccattggatggatagaggagggtagacttctattgtgaatttttaattttacgggccgatagcgaaaa

SEQ ID NO: 47048 - DNA, 2886 bp, Heterodera glycines
ctgttcgtctgtggcaccggtgacgcgcgggtggaggcgtgggaccagcggtgccgacgacgcgtggcaatgctggactgtgtgctgaacaaggccatcgagttggagctggacctggacagcggcggcgggtcagttttagccattttttaaatttttattgcattttttctttttttaaggtctcagattgaagtgtccagcatttgctttaaggacgcattgcatttggcggttgggctcagcaacggttatgtgagtggcaaaaaaaaaaaaaaaaaattcgacgtttttaaatttcttaaaaatttgcccttttactgcttttttcctcttgaattttcttttaccaatattttttataatttttttttttactttttgcgcaaaaccaaaaaaaattttttttttttttttgaatttgtaagggctctaaattatttttgaaattttgtagggagtcaaattttttttgtccaccaacccatccttccattttcaggtgttgctgtacgatgtccgttcgtccaagccatatttgagcaaaaatcacaatttcggcctgcccatcacccgactacagtttgcacctgaacaggaactggtgctcagcatggacggacgggcactgaaagtaaattaaaaaagtgaaaattcaaattcactctcatttagcttcacatttcacaaattagcttacaattagccttgcacaaaaaatacaaacaaaaataattttctaattttttaaaaatagaaaagtcgttgtaaattataattttcacttttttattttttaaaatatattttctggtataaaaatcaaattttatggcaaattttattttgaaaattcgtgagaaaaaattttcccatttttttgctgccaggcttggaacgaacacaacggccagccgttcaccagcattgagccgggcatggacctgcgcgactttgcccgttatcccaactcgggtgggttcgttcgacggcaccacatccattccatttaaaaaccatttttaatttatttgattttaattatatccccccccccttctttttcaggcatcatcatgttcgcaaatgatgagccaaaaatacaacaattttttgtgccttcattggggcccgccccgcgctggtgctcccatttggtcagcgacaattttttttatggcagattaaaaatgaattttttctccttttaaaatcccccccccctcctaaataatttaaatattttaaaaattattatatttcaggaatcgatcactgaagaattggaggccgaaaaaccttccggtatgcatttaaaaaaacatttcttatttccttatttaattggagtcttccattcatcgttttttggcttagtggtctgtgcgtttgtcactttccccatttgttgtcgttggttcaattccgcgccgatgcgcacgccccaatttgtagaatttgccagcacaataactgtgctgctggcgagtgtggataaattgggcaaaaaattgtttcgctcgcttttatccgccacagtcgaatgtactgcttcaaaagcacactgtgcatgttggcttccagattcaagcgacaatttttttttaaatttaacaatagtgcaagttggagaactgaaaaaattttgcgtaaaattttatgggataggggtctcccacacgagaacccactaaaaaatttcgttcacccccgtcccttggcacatttatgccattgaattttaatgttccttccaatctaagcattccaaaaaaaaaattttaattgcctccttttgtgtttttttctggaaataactcaaaattcaagacaaaaaaaaattcaataaaaaatatgcctccaatcaaaaattttttcaaaaaacaataaattgaaaacctttacaatttcttggttgatttttggcactttaagccaattaatgactgactaattattgactaattaagaaaatgagtctccttcccttgaaagcgctgttttaaacaaaaaaaaagatggttaatcccacaaaaaatcactttgcccccatttttctcagtgtacgacgacttcaaatttgtgaccaagtcgcagttggaggagctgggcttgtccaaactgattggcaccaatgcgctgcgtgcctacatgcacggcttcttcgtggacatgggcacgtacaaaaaggcgcgcagtcagtgccaactgagcgcattcgaagcgtaccgggagaaaaaggtgggagggagtggtgatgacagagggatgaaccagaaaacatttatagtatttttaagaaattgattagcgattttggaaaaatttttatttaaaaaatcgtttttcaaatattttcggggcggaaaaactgattttttaattggtttcccgttgtttcaccaaactttttttttcaaattttcggtttttaaccgaaaaattccgtttgaaaccaaaaattttattgttttttaaccttttctcttttgttgttcagctgcaacatcagttggagcaggagcgctcagtgcaatttgtgaagcggaacgacgctggcggcgcggcgggccaacgctcgcgcaaattgcccaaggtcaaccgcgagttgccgcccgtctgcaagccgaactgtccatcaacgaaacggcgacgatgacgccgcacacaacggatattgacggcaaaaccggtgccaacgatgaggacggcacttttgctggtgaaggtggtggtggagacggggacgaagcggcttcgtcatcatccaaatcattggcagcagctgaacaaccatcgttggcggcaccaacaacagcgacaaaagacgcagtttctgctgaccatggcactgccatagctgctgctgtgacaaaaccgaaaaag

SEQ ID NO: 47049 - DNA, 829 bp, Heterodera glycines
atggacgtgcaagtcgtcgtggcaccgccgtcaaaggcccgtgccaaccccttcagctccatcttccgtgccaagcgtcaattgcccggccattgccattgcggtcccccacaacggccaaactgccctcctggcccacctggtccgtccggaccgcctggccaacccggacagccgggaggcgcaggactgcccggacagccgggagcacctggccaacctggtgagcaatcgctacgcgttccataattatcatggctaatatcacacagctcctccgtgcccgccccagaacatcccgtgcccactctgtccggctggcccacccggcagccccggagcacagggactgcccggacagcaaggagcccctggccaacctggtgcgcccgctccgggcggaggacaaggaccgcctggcgcgtccggaccccaaggacagcctgggcaaccaggacgcagcggaacacccggccaacccggacagcctggaaataacgctgttatttagtaagcagtttattgaataagtaattaggattacatattttttagtaacaccattcctggcccgaggggagctcccggtgcgcctggccaaccgggaagtcccggcagtcaaggccaacccggacaggccggaggcgagggaccgcctgggccctcctggtgcgcctgggactgcccggcctgtctggcaacattggtcagcctgggcagcccggggcacccggccaaccgggcaaagacagcggctactgcccgtgcccgcctcgctcttccgcgatggcactcaaaaagaaaatgggcggcggtcaaaaaagcataa

SEQ ID NO: 47050 - DNA, 2188 bp, Heterodera glycines
atggtttgtcggatttgagattccgtttggcacccggaactctagctttttggatgtctgttgattagattgaaggacggacagggattttgaaacaaattctagctttttttgatcaacctgatcagaatagaacattcgcattaattaattttacgattttaataatatttcctaattatttttaaggcttttctccaaaacgacgacctcggtgattcgctggacgcggttgagtcgctgctgaagaaacacgaggactttgagaaatcgttggccgcccaggaggagaaaatccatgctttggacgaatttgccaccaaactgatcgagggcggacattacgcagcggaagatgtggccaaacggcgtgaaaaggtggccaaattaaattttaattaataacatcgaaagttatttttctaaattttatccttttattaaatcccctatgccttttcagttgctcgcccgtcgtcgccatctgatggatcggatggcacagcgccgggagcgtctcaaggagtcctaccgcctgcacagctttgaccgcgactgtgacgaaatgctgggctggatccaggagaagctgaagacggccaaagaccaggtcaataaaaaaaataaagaccaaaatttctgatccgaatatatgatgaccaaagtaattgcgttgttcttgagttgtccttactttggatatttattattaattaggtccttgatttccgatcacttattagtctgaactgatcaagcggtccctaatctattctctttaaacccacaatcaattggatcacaccttaacttctggtttgagtttgtcagatcaaaccagaaagtaactgctttaaccgatcaagcaatcataaccatttaaacctaaaatgattattcttcctttttttacagagctatttggacccgacaaacattcgcggaaagttacaaaagcacggcaactttgagcaggagttgcgcgcaaatcgcaaccggctggatgagatcaaagccacggggcaagaactgatccaatctgggcactatgccaacgaacacattcaggtggggaaagcaaaaataaaactttttaaagaaaaggaatgcctaaatttttgaaaatttgttaaagaccgaaaaaatatatatttcccgctccctaattaggactgctcattgcaattaatcgttttagaatttctaatttgtatcatgggcctatttctttttttacaattacgattacgccatcgctaaattaaaatttgttttctgatcatatagacccgtctcaacgaggtggaacagttgtggaccgagctggctgatgccagcgggctaaagggtgccaagctgcaggaggccaaccaggagcaattgtacaaccgcaacattgaagacgtggagctgtggctcagcgaattggagggccaattggccagcgaggacttcggcaaggacctgatctcggtgcaaaatctgcagaagaaacttggccttgtcgaaagtgactacaacgcgcaccaggtgggactaacggggaaaatgatcaatgggtgagaaatgatcaatgtgagggatgggaaaaataataggagaaacggggaaaatgatcaatgggagggaagggagaaaagtaaaggaatatagaaaaagtttcgagactcgactcgggttttttctgggaaataattggtatagttttatcgaaactggtgaaatctttgggttgagacccctatttttcttttctcattttgagtgaataaattgaatattttgttctaaaaataattgtttgccaataagatcaaaaatgtcaattcaggaggcccgactttgatttactagtctaaaattgtatttaataattttaatttttaaacatttatcactatcagagcgaactttttcgacatttcaggaacgcattgacgcgatcgggcatcagacgcgcgagtttcatgacacgggccacttcaacgcaccgttgatcggtaaaaagttcgaggcgttacgcgcccgcttcgaggcgttgcgcgagccgttgcagcgccggaagcaaaagttggccgagtcgctgcttggccaccagctgttccgcgacatcgacgacgaattggcatggattcgagagaaggaacaaattgcagcgtcgacaaaccgtggccgcgacttggtcggc

SEQ ID NO: 47051 - DNA, 1710 bp, Heterodera glycines
  unsure (1)..(1710): unsure at all n locations
cgctcctttcccccgtgtcttctgcgacggagtgcctcttcattcacgtgggctttcaatccatcgatgtttacaaacattgactacttgtgagtttcgctttagaggcctcacttcggaacagttcatgaagagcccaaccaatgagccggtgctcgaatatcgcaagggaagcgcggaaagcgacgctttggagaaggaactgcagaaactgtgggcagagcccatggaagtgccgttggccattggcggggagaagacatttcgcaaggaaaaagcaattagacagcccatggcgagtgcatttgaataggttcacaaaaacagaaaacctttaatttgagatgtcagtaaaggatagactttttcatttgttttcagccctttgaccacaaccgtcccattgcgttgtttaaccatgcgacaacggaagacattcaaaatgccatttcaattgggttggcagcgcgtcatcaatgggagcgacttccgcttatgtttgtgcaactatgttgatttttcaatacgattttaattcagaaagagggctgatatttttctgcatgccgccgacctcgtggcaggaaaatatcggatgttgataaacgcggccacaatgcttggccaagcgaagaacattcaacaagccgaaattggtctcaaaatttgtctcttttttgccattgctttgaatttagacgcggcctgtgaattggcggattttctgcgtttcaatgcgtatttcgcacttcaaaattcaaagtatcagccgatcagtggcaagggttacgagaacagcatgcttctcagaggacttgaggtgctgtttcagtataattagcccttaatcattcatattatttcaaagggttttgtcgcagcgattgctccgttcaatttcaccgcaattggcggtaatttggcttctgcacccgcacttatggtatacggaaacattgttctaaacacaaaatgatgactaattaggggaatgtcgtcatgtggaaaccgtcggacaccgcagtggcgagcaattatgtggcttacaaagtcttcgaagaggctggttggtcaaaatacataaccatcaaacattgtggctaaatttaaggactttcatccggcgtcatttcttttttgccatccgatgggcccacttttggtaatgccgtcacgaacagtaaagatttggcgggcatcaacttcacgggtttgtgaagcactcaaatcaacaacctttagcattaaatatttttgatacaatttggggaagaaccgggaaactggttgggagcccaaaccaagttattcaaacccagaaaaactccaaccatttgtgcacggatagtgcatgatcattggaaaataaaatctttacaggctctgttccgacgttccaacacctatggaaacagatttctgagaatttgactacttatgccactttccctcgtctcatcggaggtgcttttcatggtgttctaataaaattcgggtttattcagaatgtggcggcaaaaactttcattttgtccatccgtccgccgatgttccatcagtcgtcgcttgtacgcatcgcgcggctttcgaatatcaaggacagaaatgcagcgcatggtcagataaacttacgccttttgngcttcactatccnaatttagctcgcggatggtcgtgcccgaaagtctgtggncatccatccaaaaagga

SEQ ID NO: 47052 - DNA, 833 bp, Heterodera glycines
atgttcgacttccctttgctcacttttctcgccactcgcgcccttctcgagtggacgcaaggggaacgaaaactcgatgagcaaatccatccgaaaatggcaccttctctggaggacgagactaacttcaatgaggagaacgtggtcagtccgtttttggcactccgtccgtcccatttccctcctcccccaaacttcccatttcagcgcctttttcgctacccttttctgaagaaccctttttgggatggacacttcgatgagaatgactccgaccgaatggcaggcaaagccctcgaatggctttcataccatttgaaattggcaaaaaatgacgaaacgaattacgacgagacactgatcagagtgatcagacttttggggttgagcatacagcggaaatggacggaagcgaagtcattggcggaagagatgtttatcacagttgctccatcggacaatgcgcggcaaatgatttattcctccatggaacaaatgcagcaatttttgaattttgacgaacagattgaagcggcggagaagcaaacggaaagagaaaaagacgaccaaaattcggaggaatcggagaaaatggcactgaaagtgataatggcaaaaaattatcattcgcacgattgcctattcagaaattatttgagcaaaaaagtgccgaatttgaaattaacaaagcaaaagcaaccgaaaaactttccgagatgttggcagtacgatttgagccaattttgcagaaggaggaggaacgaatgatggaagtgcaaaggaaacacttttgggaatgggccgaacgcagaaagcgactcattcacagtcag

SEQ ID NO: 47053 - DNA, 1352 bp, Heterodera glycines
caaaacatcacgatttggatttggttctcattcgtgaaaacactgaaggagaatacagtggactcgaacacgaatctgtcaaaggcatcgtggagagcattaaagtgtttggctggaggtcttttgtttaaaagagtagatttagattgtaactcgtcgcaacatcgaaaaaatagctcgttttgcatttgattatgcggttttgaacaatcggcctcagataaccgccattcataaggcaaacattcagaagcttggtgacgggctttttcttcaggtgaacaaccttttaagtaaaaaaagcgtgttgattttaggtatgtaaagaagttgctgaaactgaatacaaaaatgcaggtctccaattcaattctatgattggtatgtatctttgttttggggggggagtattttttagggatgggagggatgcgctgacatcataaattgtgaattttcctttattattcattttacattacatatgacacattagccctcccattgtttgtttccttattcagtggacaacgcgtgcatgcaattggtcagctttcctcaacagttcaataacgggattcttctgatgccaaatctttacggaaatattgtaaataaagacactgctcttccaggtggaacgtacaatataatcgtcgtctttttaaagatatcgaacattgcttgcggtcttgtcggaggaccgggccttgtctctggaatgtgagttttcactcggctacgaaatttttttactgaaacttaaggaatattggagaagaatatgccgtgtttgaaacagtaagttagggatttactgcatttgctaggtcggaaagttaaatattgccttacaagttggagatggattttatgagtttactttattcatgcatttttagaatactttcattaaagggcacacgaaacacgggaacctcattggctggcaaagacattgccaacccaactgccttcatcagagcttccatcgacatgctgcgttaccttgagctccacgattatgctgacaaactttctgatgccctttacaaagcattgacggagcagagaacgcatactcccgacattggagtaagttattcctgtgcctgcccacaaccatggaaaactaaaaaaggaatggaaattcaatgccaaaaataaagaaacccatttcacttacaattaatgttgaggttcattagagattaattgttcatttcacctgaaatcctcaattaattaatacaaaatggtttcacatttattttttgcagggcacgaatcatagtacagaagttgttcaagcagtcattaacaactacagcgagacaatcagtaacgcttga

SEQ ID NO: 47054 - DNA, 1671 bp, Heterodera glycines
agcttgctgcctgcggtctccaagcggctcacccggcttccaactggggctactggctttggactgtacagtccaaaaaatgagtcagacttccgtcagatcatttccagcagtgcaccaacttcgtgtgacattgagtatgtggagaaaggacagttggaaccaaaaatgggtgggggtgtgaacttttgacaatgagaatggaaattataatgtgttagggttagatttcagtaatgatttaggaatttcatccgtcggggaaatgtcgtaaattcgcaaaatgcacaactgacaaatggaggaggaaatggtcagcacggcttaacggaggcggaaatttacaaagacaggcgcaagaaagacattcacaacatgagttagtttaagggagagctgaaagaggggagggcataacgaaaagcaaattcagtcgaaaggcggaggaggtacaacatcaacgaccggatcaaggagttgggactgatgctcccaaagtcgacttccgagtaagaaataggccgtacaaattaaataaataacgaaaccgaacacagggagatgaaactgaacaaaggcactattctgaaggcgtcctgtgactacattcgtcagctgcaaaaagacagagagatcatgatcaggtcaatcagtcagcatgggttggttgaataagtggattaggttgtttatttcttttgttttctctacaggcaacagcagcaaaccgcaaggttggaggacctgacacgacagtattttcagcgggttcaggttcgggtctggaatgctctcttcttccacgggattgtatctttaaggaattggaacaccaattggagaagaatggcatcaacgtgcctccgtccaatctacccgttttgggctctttatcgccactttcagtgaacggcagtaacaagtcgataaaaaaagagcctccagaggacagcgtcaacagtaactgtgctcagcaatcggtgtctttttcgccttctagcacgcctcaggcaaccaaaattgcaacgagtctgcaagacatgcaaattgccagccccattggaacggccaaccagcaacaacacgtgacactgcttaaaatgacgcattccgggccaacccacaatcatcatcatggctttatgatcggaaatgcgtccaatgaggtggccaattatctcagccaacactccaacgcaaataacaccaacgaaggcaacaacggcggcggcaacaacatggaccttttgcaacagcagcaacaacaatcgatggaatatggtgaggaacagttttgcggcggtagtggtagtgagtgccgtgtagaagcgaccacaattggaggcaatgcttttttgatgccagttccaggcgggtgcctgaactggccctcggcacagacccagttaggccaaatgttcaacgcggtgaattacgcagagctgagcatggaggagtttcccttccaggtcattcaaacacaaccacggaaatttaatgaccgctaattccgttcagaacagagggccacttcaagggcaggatccgctgattggctcctcacttaacaatcagctgtcgcccataatccaatgggaccagtcgggcttttcacctggcaacgacaccaacccgtgaaagaagaatgttgtacaaaatattgaactgtta

SEQ ID NO: 47055 - DNA, 625 bp, Heterodera glycines
atggcgcaacttccaccagaggacgtcgcaacaatgcccacgcagaaggtcgtcttcaacgcacctttcgaccacaaggtcacctgccacatgcgggtgcgtttgggctttgggcgtggtgccgtggtatgcggaataacctcccccccccctttttcaggtgatcaaccctgggacgaagcgcatcggctacgccttcaagactaccaaaccgaagcgcatcaatgtgaacccgccgaccggagtgctcggcccaaaggagtccgtcaacgtggccgtctcctgcgacgccttcgaccccggcagcgaggacaccaagaacgaccgcgtgaccgtgcagtggaccaacgcgccggacccagccgccgcgttcaagctcgagtggttccagggagaccggaaggtgcgccgcaaggccttgccgatcaagtacaacgtctgatggaaggatgcttcgtcacctcaacatggacatgataggatcccatcccaccgtcccaaaattgtcattttgtcccccatcatgtaaattgttgtatctgtatgtaaatttctgtgatcatcatttcaaatgaatgtatatttaattgtactatgtaattgtattgttgttgtgcttaataaa

SEQ ID NO: 47056 - DNA, 624 bp, Heterodera glycines
atggcgcaacttccaccagaggacgtcgcaacaatgcccacgcagaaggtcgtcttcaacgccccgttcgacaacaaggccacctactacatgcgggtgcgtttggcgtggtgcacgtggcatgcggaataacccctccccctttttcaggtgatcaaccctgggacgaagcgcatcggctacgccttcaagaccaccaaaccgaagcgcatcaacatgaacccgccgaacggagtgctcggcccaaaggagtccgtcaacgtggccgtctcctgcgacgccttcgaccccggcagcgaggacaccaagggcgaccgtgtgaccgtggagtggaccaacacgccggacccagccgccaccgcgttcaagctcgagtggttccagggagacgggatggtgcgccgcaagaacttgccgatcgagtacaacgtctgatggaaggatgcttcgtcacctcaacatggacatgataggatcccacccatcccaccgtcccaaaattgtcattttgtcccccatcatgtaaattgttgtatctgtatgtaaatttctgtgatcatcacttcaaatgaatgtatatttaattgttgcctatgtaattgtattgttgttgtgcttaataaa

SEQ ID NO: 47057 - DNA, 170 bp, Heterodera glycines
tggccgtctcctgcgacgccttcgaccccggcagcgactcctccaagggcgaccgtgtgaccgtggagtggaccaacacgtcggacccagccgccaccgcgttcaagctcgagtggttccagggagacgggatggtgcgccgcaagaacttgccgatcgagtacaacgtc

SEQ ID NO: 47058 - DNA, 2007 bp, Heterodera glycines
atgggcgtggaacttccgccgacgataaccgagcgactgagcactttgaaggtgccgaaattggggacgaaatggaaaacagagacaaatcatagagcgattgggtagtaattcgacattgcagaaggatgtgatcgatgctttgctggacaaaaacgcggtgccccccgaactgatcacttcgctgatggccggcgtcggcggctcggctttcagcaaagcgctcgaattggtcccgtcgtacaaccaaaacttgcagaagatggccaagtattacttcacggcaaaaggcggcaaactcatccgaccaacagtttcgctgctgatgagtgccgcgtgcaatcaatgcgcgaaaaggccaacgacgccggcggacaccgccccgggcaggcaagcgaaatcacaaagagtgtgatcggaaagggaaaatagggacaggaaatcccggaaaacccctcaattatttccaataaaaataaataaattaggacaccaaccagcattgtcaatgagtcggaagaacagccaattgagatcagtatgaatcagtacaggatagcgatggtggccgaaatgattcacaacgccactttggtgggtgggggcaatgatgtgttggtaaaagaactattttcggaatattcaggtgcatgacgatgtgattgatgaatcgaacacgcgacggggacagccgacggcgaacgcccggtggggcaacaaacaggtggagaacgaacaaaccacccaatatcaggggacggggaatgggcaaaccacccaatatcagggaacggggaatggacaaaccacccaatatcagggaacggggaatggacaaaccacccaatatcagggaacggggaatggacaaaccacccaatatcagggaacggggaatggacaaaccatccaacatttggtgagaaatggacaaagcacccaaaaaatattaggacgggggaacggacaaagcatctatcgtcaatcaaacgcgcaacttttctttaggctgttttggtcggagattttattttggcacgcgcaacaaaagttttgtgcagcatcggagagccgcccgtcattgagacaatggctgagattgtggaggatttggtgaagggcgaactgctccaactcaacgggccatgtaatttcgcttttttcatggaaaataagtaattcgtgccccttacgaatttctgttcagccacttcgactggcaatgcacggttcaaccattacatggtgaagaccttttacaagacgggcagtctttttgctaacagttgccgttcggtggcaatgctttcaggtcagtacattttgtttcgcgttttcatcctttcgtttttgttgacgtttatcggaatatttttttggaatctgtgcatttaagaaaattgcaatggactccttttggagttgaccaccgaattcggtcgaaatttgggcctcgcttttcaactcgtcgacgacattttggactattgcgccactgaggaagccatgggcaaaccgacggccaccgaccttcgccttgggttagccacctgccccgtgctattcgcagccgaagaattcccggacgcgttgaatccgatgatcgaacggcgcttttccgccgacggggacgtgcagagggcgttggaattggtccaacggtcggacggattgacccaatcgcggcggttagccaaagagcagggcgagaaggccattcaatgtgtgagtgaaggagcaacgtttccatcccttcgctgtgaaaatgaattttaaggaaaaattgctgtctttttaaaaatgtataaaaataaaaattttgtagccaactacgcttataattttgaaaaattaaccttgtgaaaaagtcttcggattttggggtcgaattgtcacttttctaccataactgatcaaatgcaggctgaacagctgttgccggagggtgggctcgtgcgcgactgtttggtggacattgtgcagcgtcagttgtccagagaacggtga

SEQ ID NO: 47059 - DNA, 2631 bp, Heterodera glycines
  unsure (1)..(2631): unsure at all n locations
gtcaaaaagttcgcttctcagcatttactgcagctgaaacaccttttgggcggtaagtccttctgcaattgatcattttgtgctttttcctttcattttcgctttgtttttcttaaggacgcggttttttgaagttcaaacgattgtatcgcctaaagggcgcgcttggccacggcggattcggaattgtttaccgcgcggtacgaataagcgaccaattaccagtggccgttaagtgaggcaacaattggcgatgcctaaaattgtgaatttgcagattcatcgaaagacgcaatgtccgcgagtggggaaaggtgagcaaatatcgacgccgaggaggcgggaattgtgatttatttttggatggtattccgaattcggcaatttttcgaattcttctctccccccccccttttctcctcctttttgttccttgcaccttttgttctcccttttcctcctcttcgccattgtcttctcctccattctctctttcttctgttccacttgtgatttcctttcttcccacagattgatgaccacaaagtgcccatggaaattgctttgttagcgcgttgttccaatgtttcgggagtgattgcgctgatcgattggttctctttgcccgagggttttctgatcgttatggagcgcccaattccctgcatggatttgttcgatttcatccaccaccagaaaatgttggatgaaaatgtcagccctttttagcaatgcccttcctttttttggcattttctatttgttttcagttggcccgtttccttttcctgccaattgtcaaagccgtcatcgaattgaccgaacggaaggtgttgcatcgcgatttgaaggtgttgttgttcactttcgagcttttgggtcggataatcgtttataataaatttaggatgaaaacattctgattaatttggccaacggtcaaataaaactgtgcgttcttttgccttcccccttaacggtgccttcttttttgttcagcattgacttcggtgcagcgacagtgttcacgcgcaatcggtgccacgacttccagggcacgcgtttgtactgtccgcccgaggtgccctttcatttggcactttttaattaccatttgatcatttttactctttgatcactccttccccctctccagtggtttctccattcgctttatttgggccgcgaggccaccgtttggtcgctgggcgttcttctctttaatatgctcaacggacgactgccctttctgaacgagaaggacatctgcacggcacatctgcttggcccattgccattcttcacaactctctccaaaggttggaaggcattggcgtaatgccatagccaatgccaaattcgattattatttgatggaatatttcaacttttcagcggctcgtgatcttttggcacaatgtctcagtttcgagtcagtgccctcctccttttttcctcccacccaatttaaattgtcttccttacaaattagggcgtcttctcgcccgtctctccaccaaattttggcacatcaatggctaaatgatgcgtctgccccaattaattggtgccaactgagtgcagcatgctgtagccaatgggttgtgggaaaagtggaggaaacggaggagcaaagggcagtgaccggcatttgccatcgaaacaaaaacgaaggaaaggacggcgaaggaagaaaacgaggagagacggcattggcactgagttacgacgagcgaactttgataagcgggaaagaaaactgcgcatcattttcacaacaacaaagtcagtccttccaaaaagcgaagggacgatgggaaattcgccaaatgaaattccattttcattcattggcaggacgaattcgccactcatcagcacaacgaatcgtttcacgctctttgcacacaacggcactgtccccgagaaacagtcacaaaacacttaacacaatcagacccacacaaacaacagacattgcccagtgaatatgaaaattgaaattagaacccaaaactaagacgtttccagtcactggaataagcggtttatagtaaaagttttaataatgtaataagtttattttattaaaataaatttgcaattgaaaatatttgagaaaattgcgctttcaaaaaaagctaaagcggtgccgataaaaaaataatgtattttaatcatgaagaaaatatgacttttaagctcgaaaagcggaatttcatttttgatttcgttaactgttctccgttcgttgggcttcgttctgctgttgttcctttgcgtcctccgccttttcctggcgatatttctgcaaaagatcacacgcatctttcaaggaacgcttcaaatcctcaatttcgccaataatctcctgaacaattaaaaaaaggattatttaattatacattccaattacgaaaatcaaacaattattttgccttgttttgtgagtcgagcaattccttcaactgatggcgcgtatgttcaacttaagagggatacattagacaaaaacaagaaagaaaattgagtttttttcaaaactgacaagatgggctcttcttataactatgnaaagtcatcagcgcggcatacattggctcagtcggctcattaaacacaatttcgtcg

SEQ ID NO: 47060 - DNA, 748 bp, Heterodera glycines
atgtcaacccatcgtttgctcccgtccctcccgcgtttaaaagtgccaatcggacatcggccgcaacggcttaaacttccgtacattcccaacccgcgtgggcacttggaattggtgcgcaagttggtgaacagagtgatcagagaagaacggtgcgaattgaagtacaatcgagcggaagagtgccgtcagtacgtggagagggtcagtggcacttggcaactatttgctgatggtttcaaaaatttcacagctcatccaactcggcatttaccgtggcccgaactgtgcctacaccgcggaaatgtttcagtggtggttcattgagcaggatttggtcgacaaaatgtggtctattttggtgccccgtttttcgcattatccaatcgatcagtcgtacaccgaaatctatcgattgccgaccattcgactcaagtcgaaagtcaacaaagagacagagttctggaaccgttactcaattgccgttctagaactgaaaggtcgagaaactccctcatcatcagagtttccatcataattctgattgtgttttatttagagaacccttttccgccaatggatgacttagaaaaattgcgcaagaaaaatctggtcgattatgtggagaaggaattgctgaggactgaagaataataatagacgtcaatcggaatattttattgtttcctttccatcgattattatgcttgtttccttttttggatatacatatatccgaccggaaaaa

SEQ ID NO: 47061 - DNA, 1016 bp, Heterodera glycines
atgaaaagttttgtcaaggacagatttttcgtgtttaatctggacctgggcctgtattttttttcatatttgatctacatacctaaatttcctgggcaaaaacaaggaaaacccagctgtcgaaaaatagcatgtaccagaaaaaatcaaggcctggatccaggtcctggtcaatctctagttttcattggtttgggggttcgctgcaaaagcaaaaacatgagattgaattgaaacctttcttaaaattttattctgtcaatcttaaatttatacgcacaattattatttaacgaatttatgtttacatacataattacatactttttcagtttatggattccttaatagtaacttctcttgtatttgacatcgattcattcgctagaaaattttcggccgaacaaagtgacttcactctaagtcgcttttcagaaatttttatggaaatggaactttcaagcatatttcttggtcgcttttctttttctgacttggttgaggtatggaatgcgttctctttcaaagtttgtataatatgacattgtcgaggggttttcgcgaaatccggaaaatctgaatttgcgacttttttaattgaaactttacttcctttttacagttttctgaaaatctgttcatctattgctcacgttttatgttcaccccattttcgagcactggttctgttggaaatggtgatcagattcatttcaactcagatggaatgtcatccggtagaattgcggaccgaaattacaaagtattttttccaagtaatctttcacaataaaaattttcagcaacgattatttggactttttctgtgctacagtttttactttcttcaaccttcgcaatacgttgttccgatttctgttacttcttctcagttggatgatttctatgaatttactagctccgttcttttacctgaagagaatttcgaggctctttattgtttttaccgtcttctcaacgcaaacgcattctcaattgcccctgttttgggaaat

SEQ ID NO: 47062 - DNA, 1860 bp, Heterodera glycines
ggcggttccgtatggacaaaggactggcgcagcggcaaatgctgttgtgttggccaaggcatccggcaaattccgctggacatggccgggccgggacgcgcaaaggcagtgagcacaatgtgagtgggggacaaacacggtggtgatgatcagagtggccagatcagtgtttaaaattttgatctggtcccacagttttgatgttgatcagtttacgtgttttatccgtgataaggccttcatttttaaaactgacataatctgatcataattggttatttaaaaatgattactgacactaatagtatgaattttattctgatcaaaacaatggatgttcactgatctgacacgaatgatcacttggcacatcaagtcataaatgttcacccgttttcagttatttcttcgacgtttcattgggtcgtctaacgcccgcttcattcgccgcttttcctaatttggaagagattttcttggaccgcgcttctctgttggcacacgttgacagtcgggcattttctggactcaaaaaactgagaaaaatgtaattttaattcaaaattggcattttcccttttcgttcctcgttttttttggaaaattgcccataaattaaaaaagagttctggcatcatgttcatgctcgagttttacgcccctccccttttcagcacaatttcaaactgccccgcactggtcagctggactggcgttatgttgcgcgaaaacccgcaaattcaaacactgtcagtgggcgcccaactctcgagactttaccccgaaactaagaatagagagcaacaaaaaaaaccagtctttcccgagtcgagatcatgaagaaacaccgattctcgattgcagtgcggtgctgaacagcggcgcgttgcgcgagttgccactgctcgagatgggcccgcagcattcgctgcccatggaacgcatcgatttcagtggtgggtggtagagagcggaaatttctaattttctgatcccgctgcgggacttgaactcatcacgcgctttaatccacaaaatcccgaaatcctgcgtttttcaaaaaaaaatgcgggattgtggattgggattcccaaaaatcccgcgtttgatccagtcccactccgccggtctggagtaggtagtaaaagtgtttaaaatctcctctcattttgtcattgtttattttttgtttcaggcaattgcattgcacaaattggagaaggtaataaataaatatacacacatagacacatcgggaaattgtcggaatgcccttttttgattgccggtttcttacgaagttttttggtgccatcggaacccggtttccgatttctgaaactttttgagggcgtcggttattttcactgatttgcttagatttaatgtttaaatttcaaattgcacaaatactatgtgaaacgccgcccgcttaaggtgcgctgcgcaatgtgcaggccaaaacggtgtcatttgcggacaatgcgccatgccttcgcgcaatcaccggaaacgcattcccggcatccaaatttgtggagctgtgcgtttttttttatttagaattgggaaagagttccgccagctgccattatcattagctgatgtgctcgagagtcttctcgagccgaagatgaacagacagtccaaccgctcgcaaccattttggcacttttttccatcatttccaggcatttgtcggcaaatccgagcctggactacattgccgagactgcatttgccggcctggcacacattgagcatttggacatgtcccagaccgacatcacggcactgcccttcattggacttcgttcgttgaagcaactcacattgaaggtgtttaaccttgttagctga

SEQ ID NO: 47063 - DNA, 815 bp, Heterodera glycines
atgttcaaatcaaatgcttcttcctctgtcccttcagcgcgtgatcccaattatgcaactcttggccaattggacccaaacatttttgtgaagaataatgcaccaacaaaagcaacgtcaaatcagcagaagcagcagacaaaggaaggacagatgatattcgtttcgagtaaaaccattttttgatcagagaatgttcaattcaaatgctttatctctttttcagcgcgcaatcccaattatccgacgctggccaagcttgacccggacatttttgtgaagaataatgcaccaacaaaaacagcgccaatcaaacagcaggcgaaaggagggggacggggttatgcgacaagtaaaaaatgatggataaattcgttggatttacctaataattctttttcttttcagcaactgatcctgattatgcgacgcttggccaagtggattcgaaaatctttgacaagaataatgagaaggatgagaagactggtaccgacgacgacagcgaaagcagctaggcacgccactgatgtgtctttattatgaggaaatcggatggaatgatcaatgttatatatgctgtgtatttgtcatgttattgtctgtctttgtcgaaacagtattaaaaaaagttcaattaacggataatttatcgaaggggggaggggtggatttggttttatgcgctggatctgcaatcgcaaaaaatttgctaaattttaccgaccaattaattcaacacataaaacattgtgtaagaaatttgcacaaagagaaattttcctttatcttggaaaacgcaagcaaaaaataaa

SEQ ID NO: 47064 - DNA, 570 bp, Heterodera glycines
atgtccgatgctaaaatggaaattgaggagagtgcgacgtctacttctgttgcttcattatcagcgattaagaagcgttttgaagtagattgatacaaaattcgatttggttaataaaatatattaaggtcaaaaaatggaacgcagttgcactttgggcatgggacattgttgttgatacatgtgccatctgccgtaaccacataatggtattcaaattttgctaagttatttctgacattttacatttaaggatttgtgcatcgagtgtcaggcaaatcaggttattatatatcaacaataataattataacaattattggtaatcatcggttttactggtcccataaaaaagaggtaaaaaagagattttgaggtgctcttgggggttttcgggggcgctgaacacgaatatgacatccatttcgacctatttcgaaacccggacccgaattccaacaatttttttttgcatttttcactcggaatttgcgtaaaccttctttattgtatgtaaaaacaaactgtctatgcgctaatataatccaaatgtaaacaaaagatgaagaa

SEQ ID NO: 47065 - DNA, 3256 bp, Heterodera glycines
cctcgttcgaaaaaaaaattcaaaatttttttctcgaagcagtcatttaactcgctttgaaaattaagcggaaataagttttttttgcgctcctctcgataagtgctacccacagaaaaatagataaccccagttattagtcctaaaggtacctaaccaactcacatccgtcacgggattgtattcttgaaagtattttttgtgcaattccgaggggacgtcagtattatccatttacattcaaggcagataaaagcaacctgacgagtacgaagccaacgcgaaatgcaatggaaatggaaagcgtggttgcagacgccccaagcaacagtacactcctcattggttgaagaagccttaacgtgtacataatttaaatatattttatgttacaaaaactagaccaaataagtaattttgaatcgaaaaccccagaatctattgcactttttcttcaaaaaacaccatctatagtattaccccgactttgttttagtttgttataaattgtgctttaaaaaaaactcaggggtggattggttagattcataaaatgtgattggaattatagtgcaatagaatcgaatgtggggggaggaagacagagtcgcacattgtgttaataattgggtaatcatcggttttactggtcccataaaaagaggtaaaaaagagattttgagcgattttgaggcgctcttgggggttttcgggggctctgaacacgaatatgacatccatttcgacctatttcgaaacccggacccgaattcgaacaattttttttgcatttttcactcggaatttgcgtcaaccttcttaaaaattagctaaacttagttaaaaaatgaggacgggtgggtggtcaaagtgtaggtgaggtgattgagtcgtcgacgctgcattcaaatgaccgacaacccccccccccagctacagtcgatgtttttgtttattccgctacatgaaagtcaatcaacaaatcttcattcgtatttatttcttcatcttttgtttacatttggattatattaacgcatagacaaagtttgtttttacatataataaagaaggttgacgcaaattcctagtgaaaaatgcaaaaaaaaaaaaaaaaaaattgttcgaattcgggtccgggtttcgaaataggttgaaatggatggcatattcgtgttcagcgccccgaaaacccccaagaacacctcaaaatctcttttttacctcttttttatgggaccagtaaaaccgatgattaccaaaagtcgcatttggaatttgggtggaattccttgcaatgggaattcggatttagaagaaagagtcggctggtgactccgatgccattccggaaggacaaatcaaatcacttgcagaactgaaaatggatgacatcaaagtaaaatgactgaacctttctttgtaccgactgattttatttggtattttaggaaatgaaaatttcgcaaattaaaacagtcaagggaatggtggacgaagaagtcagacggaccaaactcagaatggaaacgcttgagggggacagaaatgagcatttggccaaaattgggaatttgctgcataattcggtgcccatcagtgacaatgaagacgaaaatcgagtcgaacggacatttggcgactgcgcaagcagaaaaagttattctcatgtcagtgatttgactcatggttcagtcattttcctcttttccaattgaaaaacaggttgacctcgtggtgatgtgcgacggatttgacggagagagaggcaccaatgtggcgggaggacgaggctattttctgaaaggaccgttggtgttccttgaacaagcgctcatcgcattggcattgcaaatgctcaacaaaaagggcttcacgccgctttacacgcccttttttatgcgcaaagacgtaatgcaggaggtggcacaactcagccaattcgacgaagagctttacaaggtgtacaaaaggttcaaaatgttcggattccttctttactattgagattgaccaaccagggagggcataacgaaatttttgaaacaaaattttagattttggctgtgtttcttacccattttaagcccgagccattactagagaaattatgagttaagtctattttaagaaaattttggcttttcaaaatcaccttctttcactttgcttgtaacttttatgggtaagtataagtttcttttaggtgaccaccgcaaaaaagacggacgcagccaatgaagacggctctcccgacgagaaatatctaatcgcaacttctgagcagccaatcgccgcctttcatcgtacatttttatccgtttattctgctcccctcaactttgccatttgtaaggtgacgaatggcttaacccatcggatttgccaatcaaatatgccggaatgtccacctgttttcggcaggaggtttgtatattctgccaatatttgtttctttaatcccgtggcatcgtcaccttttattttcacttttttaaggtcggaagccatgggagagacacccgcgggattttccgtgtgcaccaattcgagaagatcgaacaatttgtcatctgttcaccatttgacaacgaatcgtggaagcacatggacgaagttagtggacttttgaaaatatagtccattaaatttaattctttttaaaattcagatgattggcaatgctgaagagttttgcaaagtgctcggccttccctaccgaattgtggccattgtttcggccgaactgaacaacgcggcggcaaagaaattggacctcgaggcgtggttcccgggcagcggtgcatttcgggagctggtttcatgctccaactgtacagattaccagtcgagacggttacgaatacggtacggacagacgaagaaaatggacggagaggtaaaaagtgatttgaaacgaaaggatcagccggcaatcaattaataaaacggataatgcccttcatccttgaccatttgtcctgttcttgggttcagcttttctgcggtttcttatttgcatttcttctcttttaggtctttattaatgtcaattccaggtcaattatgtgcacatgctgaacgcaacaatgtgtgccaccacgcgagtgatctgtgccattctggagaacaatcagacggaggatggcattgtcgtgccggaacccctgcggccgtttatgccatcgcaatattcgcaacgaattccctttgtaaagccggcgccaattgagcaggaaaaagtgcagaaaaagaa

SEQ ID NO: 47066 - DNA, 288 bp, Heterodera glycines
atggacaagccaatcaaactcgcgaaagtcacgcgtatccttggttcgttttataacatttagctgatgtactctctttttaggacgtactggtagccaaggccagtgcacgccagttcgtgttgagtttttggatgacacaaatcgttcgatcattagaaatgtgaagggccctgttcgggagggcgacattcttaccttgcttgtgagcaattaaatttgttttcgtctaatgtttaacactgaaatttttaggaagctgagcgtgaagcacgtcgcccccgataa

SEQ ID NO: 47067 - DNA, 800 bp, Heterodera glycines
ggcttcttcaaccaatgaggagtgtactgttgcttggggcgtctgcaaccacgctttccatttccattgcatttcgcgttggcttcgtactcgtcaggttgcttttatctgccttgaatgtaaatggataatactgacgtcccctcggaattgcacaaaaaatactttcaagaatacaatcccgtgacggatgtgagttggttaggtacctttaggactaataactggggttatctatttttctgtgggtagcacttatcgagaggagcgcaaaaaaaacttatttccgcttaattttcaaagcgagttaaatgactgcttcgagaaaaaaattttgaatttttttttcgaacgaggaggggggggggtggcaccatcggcactgtaaccttttagatttttcacgtaaaacatacacgttatggctaaaaataaaggtcagattcttgatcagcatcaaaaattagcctagaaaaaattattagagaaaaaatttcaagggggtgacaaaacccggaagtacccaattttattcactttcccgaatgtatacattgaaatattttgaaatataatttcttcaggtttgtccgttggacaatcgcgactggtaagttcgtattctttgttcctaaaatttttgtaaattattagggagttccaaagatatggacattgagttgccttgcggttattgcacacggctgaatatttgggatcacgatcattatttaaatatgtgttttgttaggtacttgacaaaatcatgactttgttttttctatgaaagtattaaaaag

SEQ ID NO: 47068 - DNA, 1348 bp, Heterodera glycines
atgtcagcgcaaaaaatcgccagcgattcggagtggaagaaaacggtgggttttgggggatttggccggaaattttttatttttaaaattaattcatttatttttcagcccatcggacaaactggccttttcaacatgggaaacacgtgcttcatgaacgccactcttcagccactgttccatacgcccggattttctcaactgttccaagaaaagagcgcgcagcgattcgtcaatgggtgcgtccgcagtgccggggccgtcttcgaattttcataaaattcacaatttgttttctttttcaaggaacaactcgtttggcacgaaaatgtcttattttaaaagtaaggcaaaaatgccttaagtactaagtattttcaaaattagagccgaaaagaaaaaaagtaaagccaaaaatctttctttttcaaggaacaactcgtttggcacgaatggggtgatctccggctcattctctgcgctcaacgacctgatctggtctggcaagttcaacgcacttcggcccaccgccttcctggtgagtgactctgtgcctttgatcaatccattctaatcaaatttttcctttttttcccaaaggaattctttgctcgccgtgtcaacgccgaaatggccaaccgacagcagcacgacgcccaagaatttcaactctatctgctggatgcgcttcacgaggacaccaaccgggagagttttgccattttatgttccatttttcacgctccccccctccccattttcaggtcaacaagcgacaatcgtttgaacagaactacgacgacaccgacttgggcgccagcgcttcggatttcaatgagagggcgaaactgttctcttcgtcgccggtcaacgatctgttcaacgtgagtttggagccataattcattttgtttttccgccgccaatttctaatcattttcccctttgtttcagctgacaaacatctacagggtccaatgcagcacgtgcaatacgacgagtgctcgcttcgaggtcgtcaaccaactaaggtgggtttgagtcacagacccaaagaaaattccctaatttgaatttccctttgaatttttcagcctcgaaatgctgaccaacatcgacggcctgacgctcaaggactgcctggaggcgcacttttcatcagcagtgagcagcaccacagcctgaatttgtgtctgatcccattttcccctccctttttcagagtctcgaggataaatgggagggattgtccgaagtgcaaaaacaaacagccggcgacacggagcacaaaaatttgggagattccgaaggtgctgatcgtccatttgaagagattttcgctgattga

SEQ ID NO: 47069 - DNA, 1315 bp, Heterodera glycines
atggagtcggaaaatgggaaggaggaggggccatcttcgaccaccacaaagcccgccgttctcccatatgggcaattcccaaaaaatgtgtggtttttgcgcgaaaattacgtgctcgactgtgacgagttccttgaaatggttggtccatattggtttggtatcatatttttatcataataattagctaattgtaaccttctttgaaagtccggtacccaatttaaaaaaaccaagccttctcttggtctatgtatcataggcgtaactgaatttcacatgttacttttaatcatcgacatttttcgggaatgccatgggtttttattggttgacagaaattcgaatgttccccaacgggtcattaattgtcaatcaaatttgatattagaaaacattttcagtgtttgtttttttctaattttctccgccccaaaggttcgcgaggagtacgacgtgattttggcgctgagcatcaccaaatgggtacatttgaactggggcgacgatgggctgaaacggttcttgcgtcgcacctttttgaaccttcggccgggcggacgactgctgttggaagcgcagccattccccagctattacaaaaaggcaaaaatgacggtgagtaattggagaatttgccactaattggtggcatttgttttttgaaggcttgtcagtatgtttgattttttacaaattggtattttcattacagtctgatatgttcgagacgtacaaggccatccagttcaagccgtaccagttcaaggacttcctgctgtccgacacggttggcttcagcgagtgcgaagagttgggcacaccgacggcaattagcaaaggtaaagaagaggagacagtgtttagtgcataatcattgtcaattgggcgtcttttaagttcttgggttcggcacttttagaagcgcgggaattggttttgcaaattgctcattcgaaagcgctcctcctctccgcttaaaacttgaaattactatgactaaaatagtcaaatttgttacaggttttgaacggccaattttggtgttcaagaaggcgtcatcgtcgactacaccaacaacaacaaagcggaaaagggagagatgtcttcgtccgtaaagggcggcgccgagtagttcatcttctgcagacgatcagacacgggaattgtgacgaatttatttcacgaattggacatggatttttctcccgcctcaaatcgatgtgtgccaaaactccattccatcccatttattttgtttgtttgttaaacactttgttcattttaccatcaccatttttctatttttatttga

SEQ ID NO: 47070 - DNA, 1010 bp, Heterodera glycines
atgaaaaaagaatattttattaactcacaaaggatttcagaatcggataatgttcgtgacttgggaattataattgactcgaaactgaatttttcagaacatattagaaaaattgtacgaaatgcatatcttagaattttccaaattttgagagtgttgaaaagcagggaaataaaaactctaacagcagcctataaaacttttgtacgacctcaattaaaatatgctactgaagtttggaaccctaatcttaaaaaagacatagataaaattgaacgcgttcaaaagtttttcacgagaaaagcatttagaaaattcggtttttgtacaaaaaatatggggaaagactaaaaatcacgggtttacacaaattggaagaaagaagaaaaatcaattatttaacaacatcttttaaaataatcaaagggttcaccagcctcgattctgggaaaagtttctttttctcaaaaaggctcaggaggcctttacttttacgggtaaagcgccacacggccaaaactcaaaataattttttcaatagaatagtaaaaaactggaataatcttccagtggtagcggtacaaattaataaggcaaaggaattcagggatttactaaaagcaatgagttctgagtaggattttccatgttgccatatttacactatatttttatcacctgtgaatttttaacaattgattgaattattttattcatttttattacggtattcattttgtatttttaatttgatcaaatttatttgttgttttctttttggcaccatataagagcactaatgtgcctttggtttgctcgataaattaaattatttatttaaaaaacacaggattttttttcctcactttcatcactttttgtcgaagattttctctaaattattttcttttcattattttataaatgcaaaattgcatttttcacctcattcatttcgagcaactcgcaaaagcgtctttttctgcacaaatttgcacattataattaaa

SEQ ID NO: 47071 - DNA, 2511 bp, Heterodera glycines
atgaattcttcagcagcaattaatgcaaaccccagcatgagtgtgccatttcatctccaaaaacagatctcgatcatcaacaaacgggagcccgaaaagcggtacgacacccaaaaaaaaaaaatgacccatgaaaattttttaaaaaaaatgcgtttctttacggcaccgccgtagccttcgcttcaacttttttgggcctaatttaatctatgacaattttttctcccaattttcattcaatttccccttttccaaattgcagaatattcgtcaaccggacggttcggcttgagaaaattcaattgtttggctttgacatggactacacattggctggtaaggcgacgttttttttaattagaaaatttcattattttttttacaatatacccagcgtcggtgagaaaaaatggaattcgtaacccttttttactcgtccgaaatgattattttggctgggggaattcacccctccccactaattttaaatacatttatcccaaattcataaaaaggtaaattattttcgaaaaaattgggtactaatactgtgctcatttcggacaagttcgaagcctggacacgaattcgaactaaaatttttgttcgagtttgggtctgggattggaattggtcgaaatggatgccgattcttgattttggaatttgtttttttttttgaaaaatcgaggggacaacccataaaattacgcaaaaaattctaattttgtcaaatttttcagagtacaagtcgccaatcatggaggccgaaacgttcaagttttgcatcgactatctgatccgaattgggttcatcaaattctaatttttttgattttttttgaatttttaaattttagttaccccagagaaattgctgaattcgaatacgacccgatgttttccattcgtggcctttggtttgacatcaagttcggcaacctgttgaaggtggacggtttcggcaacattttgcgcgcgtcccatggccgccgattcttgacatggtttttcacacaaatttttcaaaaaaaaatttttttaattgcaatcaatcgatgtgattgtaaaagaactttgttgttgttttttttttcaaatcctcaaaaaaaattggctctattccattttaggggtccaatcggtgacggtttttaggtcataacttttgtttcttaaacacctcatcatttttaagtgtttcatggatttttattttaagaccataaattttagcgttttatgcctttttaagtgtcgcgaaaatttttttagatttttttttgtaagaaaatctcatgattataggaaaatcgcatggcgctaaaaaaaaaatttcttgaaattttctaattttgaaaattttttaaaaaattcgtcggcaaaattttggggtgcacccgatttttttcatgtaataaaagttatgcctacgatattaacgctgaaattggaattttttttttttgaaaattattaaattaaaatttcaatgcatatttcggtccaaaaatttttttcaggaaagaggttgaggattgctacccgaacaaatttgtgcaattgtcggaacgccaaatttacgtgctcaacacattgttcaacctgccggatgcatacctgatcacacggcttgtcgactttttcgacaaattcgaacagtgcgttgtagtttttgtttgtgttagggtttttcgccatggcaaaaaggggacggaaaggaggcaaattctaaaaaattgtatgattgcccttaattttagaaattctttgaatctatccctcgtttccaagccgaagcaggaacaaatgttgcaagaaaattattttcttggcttccttacctgaatccggttacccgacattttattcaaaacttcgaataaattttttgtttaatttttttaaacaatttttcggcgagttttttttttaaataacagtcctatttttagaacgccagacagaacgggcgtccgatacagtgacgtgacaatgtcgtacaacgcaatttaccaggtacacattttgattatttttcgataagaggttgcatggacggtcccagttttcgcggtgccgtcggtgacacgaaaatattaaaaaaaaaaaaaattgggagctgcctgccataggtttatttaatttttttgctgaaattccaaaaaaaatccatgacggtgtttgcccttataaattttctttcaaaaatatataaaatctgttttgatgaaaaatgtacggcatttttgccaagcggcgtgaaaaattcgattttggctgtcccattattattttttcatttattttatcattttgtaggacattcgtgccgcaatggaccatgtgcacggcggcatcagtgtggggcaattgaagaaaaaaattttgacccgaattggcgattttgtggagaaagacgaacgcattggcgttctgttggcccaactgcgggccaccggacggaagacatttctgttgaccaacagtgactacgagtacaccaag

SEQ ID NO: 47072 - DNA, 2143 bp, Heterodera glycines
atgaacagtgccaacgatgtgggcaagcgtctgttgccgttgggcattcgttcggcattcactgaattttttgttgccgaaacgagcgccgctgaccaactgcggttgatcatccgtggccaaatttctacaatgggcgaacaattggtggaatccgttctccaattttacaccgatgttcgggcacaattccctggcaaattcaagtgggttgaattttatgtataattttttcgcaaatttttaaatatatattttttgtcatggatgacgccaaccctccaaataatttagggcatccaataagaattccgctatcttaactttattggtattacaccactttactaccacgccaaacttaccgggttcaaaattcgagtccgattgtccaccgtaccaagctgtagccagaaaaaaaaattcggatggttgaatccaaagattactaatttttgccattttaggatcaatttaaaaaaacgaaaattctttgacgacttgacttattgcctgactaaaatttttttgtaagttgtatttttttttagtttacgcacattgagccgcgcactggcggttgcgaatgatcagctacagcaacgtcactacggcactgctcgacattgtctttgccgtgcatgttcagttgcatttgtctctcaattggacattgaacaacgcaaccgaatgcaattggtggtgaccaaatggcttggcgctgtgccgtccactgcgcgcaatggcaaactgagcgaggacgatgcgcgaaaatttgtgtaagcaatttgttgagttcgattcaagaaaaaccttgacatggatttcctgggcataaatccaggcctgggttcaggtcctggtcgaactctagcattttggtacaaaaccagttccatttcatttttttaaattgtcatgcatatatattcccttttttacataattttttttgaaaaattgccaattctattatttttttagtttaatcgaaggccacaaaattcctcgtggccccctgcctgtgctcacaaatgatgacaatgaacagcaacaaaaacaacaatacattttcacgcagtctgtccgtgccaacatggctcttttggccagcgtggtggccaccgggcattttcccgtgctgatggagggcgaaacatcggctggcaaaacatccatggtgatgcagttggccaaaatgagtggcaaccagtgctttcgaatcaacaaccatgagcacactgatgtccaggttttgattttttgatcttatctctcacctcaaagaaagtaactcgacaattaaaaaataactggaccaacaccctaacaaagagtactaaaaaatcgccggaaatttagaaaaaaaatttacaataaatttcaaatatcaaaaaaaaaccttcgggaaggaaatgatatcggggggggggggagagaagaagcttctcctattatagttaagcataaaataaggcattttatgtcagtatctgctatactcttaaacaaatacatattttaggaatacattggcagttatgcgccagatgcgtctggtcgtctcgaatttgtggaaggcgttctgttgcgtgcggtccgcaacggtgattggattatcctggacgagttgaacttggcgccaagcgcagtgcttgaagcactcaaccgggtaatgctttcggggtgcacactttaaaaccttgaaaattattaaaaaaaaattgggcgattttttggaaatcctttgaaaacttagaaatcatcataaagttgagaaaatcgctgaattttcttctggttgcataaaaacaattattaagttgcttgacgacaaccgcgagctgtttgtgtccgagttgaacattactgtgcgagcccatccccggtttcgtctgttcgccacccaaaacccggtcggcacgtacgcgggccgtaagcgtctgtcgcgcgccttcctctcccgcttcatgtgcctgcaatgggacgcgttgccacacgccgagttgcccaacattgtgcagcgacggtgcggcgtgtcgccccgtatggccgaactgatggccgccgtgcttgccgagctgaaagtgcggcgtgcaattggtggcatttttgcttcgtcggacggtttaatgactctgag

SEQ ID NO: 47073 - DNA, 563 bp, Heterodera glycines
  unsure (1)..(563): unsure at all n locations
atgacgttgtttttcaatttgaaaaagtcattcttggcggcatctcatgaatctaatcaaaatccgatcaaatccaataaaaatgcaaattttttcggagtttatgcaactgccaaaaagcgaaatttttcggaaattgtaattccgaggcccaaaaattccctggaaatctgttcttccagggcaggactgtctgtcatccaatgctgatttcttttttccttttccaggaactcaaggacatggagaagaacccactgcctgagggatgcactgcacggccacttgatcaacggaccatgaccccctggacggttaccatccgaggccgggccggcacaccgtacgaaaacggcaacttccaactgagcatggcatttccgagggactacccgttcaaagcgccgcaagtcacgttcaccacgcgcatcttccacccgaacatcgacacacggggcaaagtgtgtctggacattctgcaaacgtactgggcaccgacgctgaccatcgaaaaaggtggcgtggatttggtggtggatttgatcatgttttanatggattga

SEQ ID NO: 47074 - DNA, 1500 bp, Heterodera glycines
atggtcttcaagaaaattgacaaggaatcggtaaattctataacttcagctttgtcaatatttactcttccaccaactaatgtgtcagtgagtagttcttcagtgcgggaatatttaccgctcaatcctttaacggacattccttttcattttaaaattctccctaccgccagtttctttgatttgaacaaatgttacatcttaaccgaaatgtcaattaaaaagctggattttgacacaaataaatatgttaatttgaaagtgaatgagcaagcggcaacaattaatatgattggtgcgacttggataaagaatttaaaaatcactgtgcagggacgtgagatttatgactctaactcactttatgcttataaagcatacttggatgccgaactttcttattccaaaaacgtaaaggagtcagacctacaggcgagcgggtattatgtggacagtgagaatcaggacggcacggatattactcagcagggttttgaactgagaagaaaattgttttcacaaagtcaaactgcacaatttattacaaaattggatgcagatatttttaatcaggacagatatatggtgaatggagttgagattgatatacaacttacccctaatgacaatgagtttatggtaatggcagcggccgacgataaatatagaatagaaattaccgcttgtaaattatatgttaaaactcttgaagttgttgatggttttgcattagacatacagaaaaaacttgaaaacaaagaagcaaaatatgcccatagattaactatgatcaaatccatatttataagcgagaatcgaactgaatacaatggaacgctatttacgggtcaattacctaaacgagtcattctcggaatggtggagaacgctgcatacgtaggcaaccaaaagaaaagcccatttaattttaaaccatttgatattcgatccgtcacattgatagcaaacgggaaacaatggcccgcagcgccatttgagcttaatttcagtaaaaacttatatacccgggcattccacgaaatgaatgaggcattaggtatggccagttcaacagacagtaacggaatttctcttgagaagtatagaaagggttggacaatttttgcgtttaatatgactaatagcatggaggacaacgagggtattgatcttattacagaagggacgactaccgtgtgcattcaatttagatcacctgtcccatcgggtgggatcaccctaatagccatgagtgaaatggactctattttgatattggataaaaatcgaacagtaatgaccgatacaaccatttaatgtatttaaagtgatttattatttatattttataattttttaaaatgtttattttgtttgttttatttttgataaatttttcttcgagttataatagccctattctctaccctgaacgatccagggacaccgaaatgactgacatttattataaaatagcctcctttgaccattcctacttga

SEQ ID NO: 47075 - DNA, 814 bp, Heterodera glycines
atggtttatttgtcttcgcgtgccattggacagtcccactacacgaaaacgtacctgcagaacttcgcccaggggtccaggactttgcccgacggacccgtccttctctcgccttcttccgttctgatggcattcagaaagtactgtctcattatttacttacatttcacattgaattgtatatccagggaggtcattgaacggaaacccgaggagttcaaaatcgcatgtctcaccgacctgaaatcgctgttccccgtaggacagccattctttgccggatttggcaatcgcgaaacggtcggcagtttgacaaagggactaaactcactcactcccccctcccctttcaggacgttaaatcgtatcttgcggtccaaattcccccggaaaggatcatgattattgacccgcaagggtcgctcagaagggcggacaacaaagcgggtggttacgtgtccgattacccaaccttggccatggacagtgtcgactacgtgttcccgcctcgggtggacatggacggcatcgacattaggacgaaagaggacggcattttgaggtgggcaaatttccttcgtccggcttatctttttgagccttcaattacaccccctgatgaattcttttctcgtgcagtgaattcgtcgcatggcgaactgacgctgaacaattcgatgcgctggtggacgcggaattggaacagtacgaagaaaggagcaaacgagcgaaagcaattgtcgcggggacgacggatggacgaggggcggacggaaagaagaaaatgtataggaacggaagacgggcaaagtga

SEQ ID NO: 47076 - DNA, 1171 bp, Heterodera glycines
atgttcggatggattaacatttaccttttcttccacaccgccttttcgttgtgagttggggaaggccattctgatttatttgagtgtaaactgaactgaagaggtatttttagctagattttccttatttgtgatattaacttgaattcttcaaattggagtttagcggtataccgacatcgcgttttattttaaaaaccaaaacctttttaaatatctttcaagtcggaaacgttaaattgaaatatgtgtttgtttttcattctaagagttattaaacattttataaaggttaatttcatcttcaaattttcagttcttcaaataaaatcatacataagattagtttgataatttgttcaaattctttagataaatttgaaaagtacgtatacaaagttacccgtgaacgatttggcaaaatgaaggcttacattgacaatgaattgaaggaagccatcgagttccgcaaggttagcaagtttattacaaagccataaacgctcacaacaaactgttaaaaacaaacattgtcgtgcgaaatttttgctgcagcattaagaaaccgagcaaaaataaatggtaaattttaagacttcaaaggagcaggccgactcgttgaaagcagtgcatgaaaactttcccacaattttccaagagaatttggcgctgcaacttgaagcgacctaccgaaaaaatgtggactacgcctggcaagagatgaagcgtcggttggattacctgcaggaagtgcaagcaatcaaagaccgattcagcaaggaaatgatggtcaaactgatcactgatggcgtaagtaccgacattcttactacaaatcccccccccccccccccctctttgcttaattttcattctttatttttttaaatcatagattggttttaagcttttaattttgaaaacaaactcatgtccccgattgaatcgaattcctttaggtacgaaaacaaattgaaatgaatgagggcggaattcgcgacaaatatttggaccaatgtatcgaacaacttcgcgttctgtcagcgaaataggatttaatttggatactttaattataatagaaagagaaagacagccatttctatgcacaatttgttgtaatagggaaaattcatttgtttggtttgactatgactataaagccgaccga

SEQ ID NO: 47077 - DNA, 3059 bp, Heterodera glycines
  unsure (1)..(3059): unsure at all n locations
atgaaatttggggaacaattagctagtcacttgacgccagagtggcgcaagcagtacatccgttatgaggagctcaaatccatgctttacgatttgatgttggaggcgccaacggaagcggacgcgcgtgatcagtaaaaatggcctaaaacatttaattgggaattaatgttcaccatttntaggtacgttacccaaatggacgagacattttttgcggaatgcgagaaggaattgacgaagatcagcctgttctttagccaaaaaatagcggaggcccagggaaagtaccacgagctgagcgcggagctgaaccttttcaaggagtcggtcgaccaccggcaaacgcccctcactcagcgcaaaagtgtgcgggtgcgcttcaattcggccacgaaattggccccgtccagcaaattgcaaaaggaacaggcgaagacggcgcagcaattgaaactcgcgttcagtgaattttacctcaatttggtgctgctgcagaactaccaggtcataatttttggaaaaatcaaacaattatatgacagaactcaacagttaaaccgttaaagtattttttaaagaattttcctggatataatggtccaagactaacctatttgcggtgtcaaaccttcacccgaaattaaaaaaaaagttgctgttgacaaaattcttttttttaaaatttcgttttgatgttaaattgttttggttttagcaattgaatgccaccggattccgcaaaattttgaagaaacacgacaaattaatgctgaatgaccgtgggatggcttggcgaataaatcgggtggaaaagtcgacgttctttctgaacgctgacatcgagtcacttatcaacaatgtggagacgactgtgatcaacgaattggaggggggcaacagacaagcggggatgaagcggttgaaagtcccgcctctgagcgaaaaggtcggcccggaaagagttttataattgggcatcttttagcaaagtgccggaacaaccttttcgcttggcatgttcatgggcattttcatcgttttggcgattgccatcgttttgtccctggtcggactgcagccaaaggacaataaccagccaaaatgggtcgctgttcgactcttccgtggcttcttcctcttcttcctttcgatatttctttgtggtttaaacatgtgtgtattttataattgggtttcccttcatttttacctttaaaggtacgggtgggctgctgcaggggttaatcatgtgctcattttcgaggtacatttaaatcggtcatcaaaatataaaccaaataaattttttgaaaactctttcacttttacaatatggaattcgttaaattgaatacttccaatttgaaatgctttgcaaatttaatttttttaaaggttttcaactcccctccttcaaattgcaggtcgacccccgcaatcacctcacctatcagaccatcatgcaaatctcctcctttctgatgatgctttgggctttggccgttctcggctttctgtacgcccattggcttcttctgccgcccttccttttccccctgctgttgatgttcgtctgtgtgctgtttctgctcgcccccttcaaccgtcccactcagttattccaccgcaattcgcgcttttggtttctcaagcattgtttcaactgtttcaccgccccttttcattttgtcactttctccgacttttggctgggcgatcaaatgaattcgctgacgttcgtttttctatttttcatcaaaattgcatgcctttttctaccatttagtacttgttttctcgacttacagtatttcatttgcttttacgccaccgaagttgactattccggcgcccaacttcacgtccgcacgctgaatgttaccgaggggtcaatcccttggggttttgtcgacgtgaacaccggccaggacatgtgcatgtcttccgttggcattcgatccgtcgtctctgtgctgcctgcgctcgtccgttttttgcagtgccttcgtcgctaccgggacagtcgggcgtggcacccacatttggtgaacgcgggcaagtacgcgaccacctttttggttggtttccacttttaatgtcgactttaaattgtttcaaattcataatgtctttgttttcggtcgtcgccacgaattcgctcagcaaatggtgggcagtggaaaagccgtctgacaccacctcacttttcttctatctgtggattgcctcgtacataatcagcttcacatacacatttttggtacagaatcgagggcaaaatcagcttcaatctcaatttcccagtgggacattttcatggattggggcttaatcgacccgacggcaccgaaggaggcgccttttttacgcgaggaaatgatttatggaagcaaatggtattattacttcgcaatcctggaagactttgtgctccgactctcctgggttatgaatgtttcgctggctgaagcatggtcggcatattttgtatcatcttttttttatcttttcggtttttcaggactttgcaaggcgactttctggtgtgcattatggctccgttggaagtgatcagaaggtattttcggtgcattttgatcattaatctttcgataccctccgatgccattcaatctggatttactttatgaaataaactgcaccgataagtatcacgtcattttttaatcttcaggtttatctggaactattttcggctcgagaatgaacacgtgaataattgtaatgctttgtccatgctgccaaaaacatttcaatttgatcatttacaatcccctaaaggtggccaattccgtgccgttcgcgacattagcgtaaagccaatccgaaagggcgacttggagtcccttttggccaagatggaccagcaggacggggtcacccatcggggccaggacttgcgcgacagagtgaagaagcagaagaaggcggcccgggacaaaaagcaaattctgaaaaagaaccgaatcacgcggatcagtctgcctgcaattcatccccaaccgagcaacacactgctggagacgatgcattga

SEQ ID NO: 47078 - DNA, 2175 bp, Heterodera glycines
aaggtcccataatttacgtcgtcgaatgaaacaggcaaaacctgaagaaagcaccaaagaaatcgtcgttggcacggacgacgagacacagcgccggatgaaggaacaaaacgcgaagaaggccgagtcggcacgtcaacgttaccaccgaatggttttagtcgctgtataattgatgctttcctaactaatttaacaaccgtttgcagagcaccgaggagaaaaagctgtacaaccagcggagaacggaggcattccgacgtcgccgaatggaggaggaggcactgttggcaatgccaattgggtgagcgacgaaggagaagaagcgcattactcctaattaaacaaattcagaagaattaatggcgaagcgcttgaccgagcccaacaaattgtcatccgaaacgccaaacgggcggaggctgcgcggttgcgctatcagagaatggtgagaaagactaattgtaagtaatgagtttttcctttcattatcagacgccggaacagcgtcgagcatacaatcagaagaggtatatgccgaagcggaagagagacatggacatgatgatgagcatggattcgccgcttgggattgacaagaccgacaaaatggaacgtgaggaggacgaatttggtaggttatgcgattcaattgtccattgtttttggaaccaaaatgtaattctgtgtgcaatttaagacgctctctcgtcattggaacgcgacgtgcagagacgaacacaacaggcgcaacagacactgcgtcaacgccagtgggtggtgcaacagcagacgccgagcgcaacgacgggacaccattgaaatacctaataaagcaatgttgctgcatacaaagcattcgtcattataattcactgtttattttctgagaaattcatctttaaaaagtaatttgcgttttaattacacttaaatcgcattcgaattccgtattatgtggctcttcaatatttgtatttttgtttgttgatttaatgttattttttgtccactaattattgctttagtcgacctatgagttcaagcaaccgtcagcaaatttactaccaaagccgtcaccatccgcagccccaccgtgtccccggcttgtcattgccaattgcttcgtcctctcaccacgacattggctccatcagtcctcgacatgaccatcggcagatggtcatcgtgtccgggagtgactcgtgcacggattgcgtggccgattaccattcgtcgtgcgactgtcccgcttgcgaatcgaaaaatgtattttgtaatgttacaatgtttattcaagtcatccttttaatttttgcagcttgcttcggtcggacatgacgctgggctggacgaccaccagctgtactcgtactcactggaaccgacacagttggaggacgacgacgaggggtaagcaaacaacgaacgaatgtgatacttagtttattgaaatggaaatgccattcaaaacaggattgtgcacgaattcacaacggactctggcgaacgccatgtggtgatcatgacgaagaatgatgagcatttccaggagggcatcaccattcaagaaaggcaagttttgaagttgttttgatctgcttacatcgaattgattgcttgttataaaccgcatcaccaaactagtggaacattgcctctcgccctcccaactaacaatttttgtcccaccattttatagagttcgtcgtcagaaattgtctgaagccgcccgtagccgatacgctcagctcagcgatgaggagaaacgagcggtcaccgaacggagaatcatcatgcgacaacgacggaagcagaaggaacgcgagatggaggagttggaggcgatactccgcgcaagcaatggtgtgacaaaaagcaacgatttacatattaaatatcatttattaaagtaacacagtgtttaaataaatttgtcattgctcatattgtttgaatatttagacatcaccgacgatttgattcccctggatgaggtggttgcccaacggaagcgtgccaaaacgagtcgttaccagagcatgagcttggaagagcgtcgtgagtacaaccagaagaggcgtctgcgacagttgggagtgtcgtccgagaattttaaccaaattgagcccatcaaattggataatatccggagacaaattgcggatgtaaacg

SEQ ID NO: 47079 - DNA, 1517 bp, Heterodera glycines
atgcgcgagttcgcgacaagtcgcgcccggcaaaccatcgtcgactttttcgtccatgacattggccaccattcgagttgctatcgccggcgccttctgttggacattgtaccgttgcttctacagtacttcagccgtgaattttttatcgacaaatttttgcccgcggtgctcaaactgtccgctgacccaatctcaaacatacggttggtatactgtacatttacagcacacaaataaaaaaaattaaaaaaactaaaaatgttagattctgttagaattaataatataattgattcttttgaaattttatgcttgttcccttttttattagtttaaaaatgcaaattgctaaaaaatattcagtgaaaattcccccccccccctccatcattcgtattttgtctttattacaccttttttgtaattttttttttactaattttaatttccataattttaaggctccaactgtgccggacactgccgaagatcaagcagtatttgatgttcccgaacaatgacgagtcgttgtccaacttggagcgtgttgtgcgcgaattgctggcatccgaacagaacgcactttcacgacaactcatccaacaggtgggctaaaattgactcttttttttaataatttcggtggaaaattcgtgataacctccgatccaaaaatgcttatcatattcaattccattttcgtcctgtttcagttcgcttgtgaactgtcgaggacagaaatggacaagaaggagtgccgtgcaaaccgtgccaaattggccgaggaaaagcgactgtggaccgagcatgaggaatccacggacgaaactgatgaggctgaggcgggccagcagtacagtactgagcatacagtaaccgggagcgatgcgataggctcgcccgaaagcggcatcttcttcgaggaggactgttggcttggcactgtggtcggaaacggtgccagacctaacaaccaccagcagatgggcggtcgcctgtgccgttcggctaccaccacaagcatatcgcaacacatggagacggaggtggacaaaatattcaaataaaaatatattggcaaaatgataccattaaatttttttaaaaactgaaaggaagcgattaacagaacccaaaatcaaaaaataaaaaaggtgaacggaactaaaaaataatgataaagataaaggaaggaaaaaatattgttcgatttcgaccattaattaacgtatttttgagagaaattaaattttttgccatttattacaattgaaattcttttctttcaaatattttttccattttatttaattatttcccctttttagcatttgatatttgctaaattggatcgcattttggtcagttgcaacaatttgatgaaagggtccaccggctcatggcgagcccacgaggcgtatttgaatggcattgcagtgttgcgaaatttggtcagcaccaaggatttgctgtccaactttgtgccattgctcaagcaggaagtgctaaccgcg

SEQ ID NO: 47080 - DNA, 1176 bp, Heterodera glycines
gttactaccgtgacactggtggtgtgcttgaggtgggagacggatgcactgcacgacgcaacctgtttgtaggcagcagaacagcacaattcattgccaaaattgacgccgatttgtttaaccagcctctctacttgatcaacttttgtgagttggacattgaaattttgcccaacgacaacgactttgtcctaatcacaccacccggtgttgctgcagccactcgctaccatttcgaagttgtcggtctgaaaatgtatgtgaagaaggtgtccctgatggacggattggcgttggacattgcgcgaaagcttgagttgaagccggcacgatatgcagtgaggaaaacgctgatgaagtcgctgttcatcagtcatgggcgttttgaatttacgtctaatttgttcatggatcaaattccccggcgcatcacaatgggattggtggccaatgctgactatgttggcaccgtttcacgcagccccttcaactttcagccatttaatgtgcgtgaaatttctataattgccaatgggcgctcctaccctcaagcagcctacgacttggactacccaaacggaaagtatgtgcgccccttcaacgacatgaacgaagcggtgggattcgccaactcatcggaaagcaacgggattacactagcacaattcggcactacgcattgcatttacgtgttcaacttgacgagcagtggagacgaccaagcggcgctttttgatctgataaggaacgggaccacagcagtgagcatcaaatttaatcaggcggtgcccgctggaggaataatgttggtggtgatgggcgagtgcgactcgctggtgatgttggataaaaatcgatcgatcagcactgacatcactatttaaggcacttttgttttcattttttgcaataataaacatgtattccaaaaaagttggcgttattttattccttcttcggatttctcttcccgtagtgtcatgtagagaggaaattcctgagtattcagaatatataagaagaaaggcaatgcttacatcgacaacaactaaaacaattccgtctacaacaagcacatcaacaaccaccacctcctctcccccaaaaagtgacaagttaattgaagagcaagtgtcagctggtctcacgccactcatccaattgtgcaaagactaa

SEQ ID NO: 47081 - DNA, 923 bp, Heterodera glycines
atgcctcgttatgatgcgaccgatgacctgtcaggagctgaatatttggccagtatttacggcacagaaaaggacaaagtgaattgctcattcttcttcaaggttgataacattttttcaattttaaaatgccaaaaaaaaatttttggttttttttagattggcgcctgtcgacacggggacaactgtttgcgggcccaccacagacctaccttctcaaatacagtgctgctcaagcacttctaccagagtcccattgtgaacccggcacaggcggacgctttcgacagtaagcaattcggaaccaaaattttgaaaaaattggagtgggaaaggtccgggctttgatgacggtccggtaacggggaaaccaagcaaaattggcacgttttattggcccaaagtccctgggttttccccaaaaatggcttttccgggaagtccccggcggtacgccatccgttttccattattaacttgaagagcccagacgggatcggtttcgatgatcctatgatcctgacaatcccggccaatccgggatttggtcctggtaaccccatctcgacctttttcctgatgccgactatttcaaaattccttactctagtggactattaataaaacattcattgattctttgtgactaaatttcataacttttcagaggtcggtaaaaaggatgagcttgagcagcgccattttgatgagttttacgaggaagtattcaccgaacttcaacgcacttatggtcggcaattcaaaattgcttttttctgagattacaattttttattttcaggtcccgtggaagaattgaacgtaaattgggaacgaattttcgcttaatttacgaaattttacttttaggtttgtgaaaacattggcgaacacatggtaaaaattggcaggttcacaataaa

SEQ ID NO: 47082 - DNA, 1189 bp, Heterodera glycines
atgacttgcccacaaaaaatcagcgacagcagtccactagcaattaacactggtctgaacattttcttagttccaccgaccaatgtttctgttgtacgttcattctttcgtcaggtgcttccgctagcaacaatcacgcaagaatcaccgtacctgtttcgactgtacagtgacaatttgtggactgatttatctcggatatatctttatctcgaactgtccattgaaaaaccgggagcaaacgataaatgggttgcgatagatgatgcggatactagtgtctctgccattcaagggattggtcaaacatttgtccagcaactaaaagttacggttggcaatacggaagtatacgatagcggaaacctatacccattcaaggcctatatcaccaatgagttaagctttccaataaatgccaagaaaaattttcttggttcaacagggtattatcacaccataaaccaagatgactcaacagacgaggggttcaaagagcgttgtaaaattttcaagggtggaaaaaatgcacaattcctctctcgtctcgactttgatctgggaaaccaggagctttatcttttaaacaatttggatttgctgttcacaatttacaaggctaaagatgtctttcttttgcaaactttaaaagcaaatgattcaaccaaatatcgtttgacagtttacgatgtcaagatttatgccaaaatggttgaggtccaaccctcactaaacatgaacctttacaaaaaccttgaaaaacaacccgccacgtacgcagtacgcaagaccgaaatcaagtcgtcattcatcagtgttggtcgatacgaatttgagtacaatgtattcagtgcaaccattcctcgacgtgtgacaatagcgttggtaggaaattcagcatttcatggtgattacaaactgagtcccttcatgtttgagccgtttgatttgcgtgagatttcggtacatgctggtggcgtagtttacccagctgttccttataaactaaatttttcaaatgatcactttgtcagcgcctttgttgacatgtatgaggcactcggaatggctaactcggaacgttcatttgacatttcaatggcccagttcaaaaaagggtggatcttttttgtcattccattgacttccacgcttgacgacagttgtggatttgagctgttgagaagcg

SEQ ID NO: 47083 - DNA, 1440 bp, Heterodera glycines
atgctttttgcagattatcgctacgaaaatgagcaccgcgacttgcgccgcgtgatgggcgttggcattgcgatcactcgaggggcggctgcggcattgtctgttgatctggcattaattttgctgaccgtgtgccgaaatctgctgacaatgcttcgcgagacatttgttggcgaagtgaaaattcggaaatttaaattattttggtttttgctttatttatacagtatttaccgctcgactcggcaattactttccacaaaattgtggccatcaccgccggcactttcgctgccattcacacaattggacattgcgtcaacttttaccatgtggccacccaaagtcaggagggcatcgcgtgcctctttcaggaagtacacaaattatttaattaagattaaaaactttgaaaccataaatgtccaaaatgttgcgatggggagggcgaaaatcatgctccaaaaatgaccaattttgtgggatttaactgtgttttcgggggtccgggatgccgacagggttttaccgagttaaaaattgaatttttactcatcaattagttctcatccacctaccatccttatcccccccccccccccccccccaggcggtgttcggctccaactttttgccatccatctcatattggttcttcggcacattgaccggaatcaccggcattttgcttgtcgctgtcatgtccatgtatgatgtgatttttattgaaattgtttttgttaataatgtattaaaattattattataaattaaattttagaatttacgttttctctgcgcctgctgtgatgaagcgagcctatcatgcatttcgcataacgcatctgctcaatgtgttactgtatgctcttaccatactccacgggcttcccaaactgttggacgtgagttgacagagtcaaatacaggagccccccttgaattagagccccccctctgaaataaagccctccttttgtgaaaaatagagccaccaagggctctattacaataaatacggtaatgaataaaaacataataattaaaattctggttttcagtcacccaaattttggtacattgtgcttggcccggtgattatttttattattgatcgtattattggcatgcgcaaacactacaaacagttgagaatcgttgatgccgccattttaccatcaggtcgaattttctacaacaaatttaatttttaattgattataattaagttttgtctaatttattttccaatttcttttcgttatctgcccccgttcagatatcatctacatccaattcaagcgtcctcattcgttcaaatttcgttctggccaatgggtgcgcatctcgtgccccgccttctcctgcactttcaacgagtcccatgctttttcattggcatccgcgccacaatcgccaactcttgagttattcattaag

SEQ ID NO: 47084 - DNA, 1191 bp, Heterodera glycines
  unsure (1)..(1191): unsure at all n locations
atggngctgtggaatacggggcgttcaacgggaatccaaaattggaccccttttaacttcaagcactttgacataagagacattgcggtgcacgctggcggtttcatatacccaatggtaccgtacaaattggctttcaaaaaggacgcatttatgcgagcgtatgttgatttgtatgaggcgctcggcatggcaaactcagacagatcttgtgatattacgcgccagcaattcaaaaatggatggacattgttcgtcatccccctcacatcaacactggatgacagtgtgggctatgaactgttgcgaagcggcaccacaaccatacgtgctagcttcaacacagcaataccaggtggtggggttgaaatgattgtgctcggcgaatttgatcaaatgataatgattgactacaaccgtcatattgtttcagactctaaactgggttagtttttgcctatacaaatatataaatatattggtgtgtgtaaatggaagtcgttaaatgacaatgaacattacaaccaacacgacaaaaaaaccccttgtccaaattttgaatggatatgatgttgatggaccatcatcatcacttgaaatgacaaattttgaaaaaattatcttattttttggtctctaccttataatatttccgatgtttcttctctgctggttttcgttaattaattttttaaagcgctttggccatattagtcaaagtgaagcaaacggtatggtcaatggactgcaaaacatacctttaccaagaatacgatagtttacaagggaaaaataattctgaatgttcatttcatcattatcattattatcatcatcatcatcatcatcatcatcatttattagtcagaaagtgtctgctcaaacctgaaggaaaacaatcattagcctgtagaagtggggtggtatttaccccacaaacgcataaggtcccatgctttccaacaaattttcatgaactgatttgagcagtgcctctctatcattgttctcacttgggcatagtgccaagaacgtgacttttcgctgatttcggcatatcatcaatacacattgcagacgctgggtaaaagcttttagaaaaaacaaaattgctgttacatcttccacacattgtagtttatggtggtacatctctgttaattaaatttatctcaaaaaatgctacaaaaa

SEQ ID NO: 47085 - DNA, 2411 bp, Heterodera glycines
gcaaaatatgacgcattccgtcgccgacatccgctggcacacatgaaagtcaacgtgaacgattatgaactgctgccaatgcattgcgaatatttgatcatcggcgggggactgaccggctcagcggccgcttattggcttaagcagggctttcgtgacgaaaacttaacggtcacagtgttggaaagcaccgaaaatgtattcgttttcgtttatttttttgggtaatattatcgacagggttcgtaagttttttttttcaaaaaaaggacaaacgatgctaaaacaaagatttttagcatttttatcagcgaaataaataattaagcacaaaaaaatttaaaaagtttagggaagcctaaaataaaggacaaatctttaaaaaaaggacacttacgaaccctgattatcgatgaaagcccccattttcgagaaaaaaattgttgaaattttttcttaaaataaagttgttttataggttttcggggccggagaaaacggttctggcattcattttgactaaattcgtaaccacagaacccggatttgaacaaaaactcgaaaatttaattttcggcaaactacaaaatattcaacaaacccggttcaaatgcatgaaatattcgaaaaggatgccaaagaaacattaaaaattgaaatggattgggtcacaatcacttttaattacgcgataaatctaatgtgaattcatatcccaaatttcagtttgccaaaacgcgttcattgcttggcagtggtgtgatcactcagcaattttctacgcccgaaatgatcgatatggcaatgttttcctcagaatttttgcgacatgccggggaacatctaaaaattttaggttcaatttaatacagaaaggtgttttaatccattttcaaaactatttattttttagacaacgaacccccggatattcatttgcttccctgtggtgttatgcatttggcccggacggaggaggacgccgagcagttcagaaatgcttggaaacttcaagtgtaatattcaatttttttttcttaaattacaactactcgaagtttttgattcaattttagtactttttttataaaatttaactatgttttgttttttaagtgatcgtggggcaaatgtgattctcatcggcagagaggagctgtccagcagatttccgttcatgaattttgacgatgttgtgcttggaacagtcggtatttaattgcaattttgcaaattattatgaaaagtcagtgctcgcaattttttccagataaaaatagaataagtcaaaaataggattttggacccaaaaaaagcatttttaaattgctttttgcaggaatattaaaaaaattaaatagtaaggctcggggtaagtgcagccgaagaaaaaattctcgagcaaatggttactagcaaagttaatccaaaaaaaaagaaaaggacatttttgaggaaaaataagggggagtcgaaaggcgccgtttgaaatttttttaaagaattttggcgcaaatagttgcttcaatgggtatttcaggcctcgaaaatgagggcattttcgacacttggcaactgttgtccgcgctgcgcgagaagaacatgacgttgggtgtgcgctatttgaagggcgacatggagggcacagtgacgtaccggcaccgcggcatgcaggagcacgggcgcaccaccgacacggccgatgcggacgcggcggagcagtccatgcagaccattcgcggggccattgtatgtgccatttttggggttttttaaagtggtacccgtctaaaatattgaaaatttggacaaattttttttttttgatgttggagggaaaaaagtttttcttgcagaacttataaaacgaaaaaagctctatccacgccctggcattgtgttttattcattccttttattttggcttttgtcgcaaaacaacaaaaattagcaatgcattttttgttttgccttaagttttgatggaattacatttcccacttccttttttatgcttttgttgtttaggtgcggccccaaatgactggcgcaacgcctcgtcgcatccaaagcttcagactcattgttagttgcttttctttcaaattcttggttgagaatccaaggatgacttctaaacgacatttttttttattttagtgggtccaactgaaaaaccgcacgaagacggaccctttcgatttgaaatttcatcggaccctcttattacactagtaaaacaaaaataatgccacaaaaatcccaatattccgcaaatcttttatttgttgtacttttcattacattgtcaacatttgtttgtttgttttcagaatgccgctggtccatgggctggtgaggttgccagacgggctggacttggttcgtttttgtgcataagaccatattaa

SEQ ID NO: 47086 - DNA, 681 bp, Heterodera glycines
atgacggattcattggtggagctcagcccgggagcgctcgtctccggccgttggactgtcatcaagaagcttggagcgggcgcgttcggtgccgtctacttgtgccaagaccaagatgggattacaaagggagcactgaaaaccgagccaatcaacgcgccattcccacttctcgcgctggaggtagagtttgagtttgaggggggaacacaaaatttggtgtaatttttgtttccctttatttcaggccatcgtgttgcgcagctttgacacacttcgagcgagcagtggaaagcatttttgccgttgcatggaccttggacgcgaccaacagccggatgctgcttctggacgtacgctggagttcaacttcattgtgtgagctttgacagggccggatgtgtggagtacataaatctttgtccccccattttcagcatgtccctggttggccgtccattcgacaagcttttgcaagaatccggcgactgcttcagccccggcactgccatcggcgccgcactccaactgctcaaagcgctccaggccctgcacgatgttggctatcttcaccgtgacatcaaaccagcaaattttgccatcggactgccggaaacgaacgagcagcggcttctctacctcctcgacttcggcatggcgcgcaaatacctcaaagacgac

SEQ ID NO: 47087 - DNA, 1238 bp, Heterodera glycines
atgatcacaattgacggaaaacaaatcaaattgcaaatttgggacactgcaggtcagcgagacaactttttgactgggtaagttgactttgcttcttaaggccaggaatcctttcgctccatcacccgttcctattaccggggcgcggctggcgctttgctcgtttacgacatcactcggtccaagaaataccaaattagttggtttcatttttacccttttcagacgcgacacgttcaaccatttgacctcgtggctggaagacgctcgtcaacactccaattccaacatggtgataatgctgattggcaacaaaaggttttgaaaatgcaatccgtcaactaaaaacatgcttttaatatttgcttgattttaagtgatctcgaagcgaggcgtgaggtcaaaaaggaggagggggagcagttcgctcgcgagaatggacttgtctttatggaaacgtcggcgaaaacggctgccaatgtggaggaggcattcattgatacggccaaggaaatttacaggaagatccaggagggcgtgtttgacattaacaatgaggtgaactatcattatcaataggtgatcgatccccattttctttgagaatccgctttgaaattcgattttttaaatttattttcttttttgtaactttaaaaaggaattttcaatcgtaggccaacggcatcaaactcggtcctcaacacccgcccagttcgccaagctctcccggtggtgcgccgttaggacgtgcgagcaactgttgctgaatttgaccaacggaatgcgaaagtgaaaaaagaccgcaccgtcagaaactcacgccccttccccccccccctcccctccctctgtggataaatcaaagatttctcacaaatctgtatctttgacaaatttgtcgatcaagtcagcatcataaatacctattaaagaaaacataatctaatttctgaccctttgaatattatctgcttctgtcagcctacctaatcaatttttttccattcgatactttttctttggctttcagttttgcactctatggcatcggctttatataaaactttgtgtaaattgggtgataatgtgagtactttactatttctccatgctgtgttcgatgagccttgaatggtttttcagctcgtctatccgattctgccagcctttgccaaacccgcgtggaatcacccagcagggccaaaaacggtgttcttttggtcccccacaataaa

SEQ ID NO: 47088 - DNA, 2255 bp, Heterodera glycines
  unsure (1)..(2255): unsure at all n locations
atgctgacgaagatcgccgggagcgggacaggggacgagaacagcgggagcaacaccaccatcatcaccatgaacatcgacggaaaagtggacggagaggaggaggagagggagagccaccgccgggcggctgggacaagccgaaatggggacgacacggtcaaaaaggaggaggaggggggaggagaagaagcggagaagcagcaaaagcgcaggggagaaggggaggaggagaaggaaaatccgtcatttgtgcccagcgggaagttggccaaggacaccaacacgtacaaaggagtgttgatcaaggtcaggggcgtatctagaaaaatttttcgggggggggggacgacccgacctgagaccgttttttttttgctcttcaactgaagacctttctatttacccaatgaaaaaaaaaattttcccgctgctgggtaaaaaaatccactttttcactaaaaatgacggaccgggtcgactgggccccgccgactgggccccaagggccggtcacattttccatttcatactgtcaaaaattatttgatctctcaaaaatttattcataaaattctaagcatccatctgataatttacagataaaaacatttttaagccattttcccttggattcctgtactttttggatgctcggttttcgacctttcatttctccatgtagaaaagttgtagagacatggaatcttttgcttttgtaacaaattttgcgccctttctgtctgtcatatttgcctttcatgaaaaatttttccaaccccctaggatggtttcaagccattttacggttttcaggtcaccccgaatgagtgatctgatcacgttggtgcaatggactttttttgataaacatcaaaagttatacttacatgaattttttcagattttttcttgccctataaaaagttacatgttttcaatttttgaacgtataattttggaacagactgtataactaacagtgaaatgaaacatttgctgaagaaatattaaatatgtatttacataaatttgcacccttaattatcataattgttgagtatttgacaatttgaaaagaaaaatgtgaccggcccttggggcccagttgacccccaccgaaaaatgacccaattttggccgttttacggcaaaaaaacatgtaaaaaatagtgcaaaatggaggtacggcggtgccgataggcgccgccgggaaaaattttgaaaatctaagtgctatttgttacgaaaatagcctataaaatttttaaattttcgtttggggggggaaattcgaaaaaattttccattatttgttggaaaattttgtaaaattttcatttcgggggggggggcaagatccatctcctattcatcataaaattatgcaaaattcgttgaaaaattaaaaaaaaaaaattcttggaatttttttaatgaaaaattttagacttttttaaatttttgacaattgtaaaaaacaggaaaaagtacactcaacttgagtttggaccgaccaacccaaaaatgggtttccccatttgtttttttttgtatccgacaattcagtctcgccagacttggacactccatcccgctgccaaaactcaaattgacgcaaatgccgtttcgtatccaggaaaaaatttttcgtggctgggtggacgataaatagacactnnaagacaataatggtccgctggagtcgaaatataccgctttggaaaatttccgaaatattgggaatttcatggaatctttaaaaagacttggtttatctccatatgcaaaatttaggtctccctgttatttgtggtctattaatttcacttttttcagtacaatgaaccaccggaagccaaatttcccaaactccgctggcgcttatatccgtttaaggtaaaaacaatgcgttttcattttgaaattcagccagtttttttcaaaaataaattcaatcccatggattggcacaattttacatttctcaaaaaaaaaaaatttcgctgatttttcctgcctcctaaatttgtgggtctggtgacaatcggtgctctgtcacttattcattcacttctccccagggtgacgatactttaccggtgttttacatacatcgtcagtccgcttatctgatcggtcgtgatcgcaaaattgccgacttccccgtcgaccatcccagctgctccaagcagcacgccgcgctgcagtaccgctcattgcaatacgagcgctcggacgggtccatcggacgg

SEQ ID NO: 47089 - DNA, 1538 bp, Heterodera glycines
atggttgagcgctttttcccgaaccctgaagatgcgccaatggtcacagcaattcgcaaaacattcgccaaaatgtggggactggaaaatcctgatgatgaggaaacgaaaagagtgattcaggtggttaaaataaatggataatttcatcaatttaacaaaaaaatttaaatgcatatttaggctaaaataccaaataaattgctttattaaaaattatgaaaagaaaattcccattaatatgtgctttatatgaaaattattaaaatcaattatcattaaattgaatgcatttgataaattagacaaatatgttattaagaattattgcaatgaatcataattagaattacggcattcgcccctttttccaaaattcgcaaaaaacaaaagtaaaatataatttctatgaaatcagtaatgttaaattaaagaaaaagcatttttaaaaaaggtccaaaaatttggtggcattttatgttgcctttacccaattaattaaggatgccattgcccaccccgagcgttatgtgatgaagccgaacaaagaaggcggtggcaagaatttttgggaacaagaaattgtggacagattgaaaaaattcacgtcaaaacaacgtgccgcttacattctgatggaacgattgaatcctctggttgctcaggtgtgaacaattaaaaagaaaattgattttaataatttaaatttcctttaaaatgcgtgatttattggaaatttatccaaaatgtaaaaactaacataagctaacgagttttttgatgacaattcaacgcatttgagcacaaattatcgtactttaaaaaataaaatataattttttcatttaaattaactcacaaaaaaagaatattgcaaaatatcattttttagctaccaattttttaaaattatttttcttacaaaaaaaaaaattctaaaataattatacaatcattaaagttaataaaaatacaaattatacaattaataacaaaaaaaattaatgcaatattattttttaattttcagaattatttgatttgggccaatgaaaagccgatcttcagcgatgtgatcacggagttgggcgtgtacacctactgtgtttatgacaccaaggcaggcaccctggtagagtacacacagcctggccagatgatccgtaccaagtgcgcatccagcaacgagggcggcatcggggcgggtcttggcgtgttcgattcgctttatctctactagacgacgagcattatcattttcattattatgaaatcattattatgaataattatttatggcatattctaggccaaaaatttttgggtttaaatcaaaacaaacaaacaaaaaaaaaatccgaatgttaaaattttgttttaaaaaagggaatgtttctatttttggaattttaatggtttaaattttttaggaattttgtttatgaatttttggcccaaaatttgttttatattttattcatattatcatgtagaaattagagctccctttgtaatacacaaattttatttcaaataaa

SEQ ID NO: 47090 - DNA, 1279 bp, Heterodera glycines
atgtattcacttttgcacgagaccgatggtgccacatcagtgaatttcagtgcctggggtaattttttgccgggtcctggcaagcagctggtcactgtttgtgcaaaatgcatcaaattctaccgactgaacccattttttgtgccaacggatggtttcgctggtcaaccaccaacagtccgtttggaatgccttctttccttcactctgatggcacctgtgcgcagtttggctgttgtgcgattaaaatgtgtgtgctctaataacttgagagaattggtcgagaaattgtgttaaatggcggccaaattcatagaattcgttttggatattgaaaaagttggaattttttacaggtcttcagaaagtttcattcattttttcctgtttttagtcagtgccgattgttacgactcgttggcgatgacttttgatgatgccaaactgtcaattgttggcgtgaacccggccacaatggcactgacaaccatttcgctgcattccattgaggacgaatttttgcgcgacggttacaccgatgagaacattcatcagcccgaacttcgtgccgaccctgaacatcggtgttgtgcatttacaggtgcttaaattattgtgtttttcaaaactgaaatgtctagaggcttttaggggacgacgatttaataaatgtgtcaaaattcgaacaaattcgaattcttatgaaatactaatcttttcatcgtttttttaatccgtattgactgacaaattatacaattctggcttttcacattatttgaatacatgggttctttacgaatataaaattttcaatccaagattcgtccgaactttgatttccaagggtttattttgctaaaatttcaaatatcaacattttccaaattttttggggtgttcgtttttggtgttttgtcaacccccagtctcatctctataaatttcatggactaattggacatgattggatacgtttttttttcgtatactcctaacttacatctccctgttcagtgtatggacgtcatttggctgttgtgccgtttaacatcgtcgaattggtgcgccaacaatcgtctgcagtcagcagcagggaggaggccaagctgtacaaccagcagcaacaacagcaacaaatgttgttgcaaagttacaccatcaaaatgcgtttgttggacgaacggttggacaatgtgctggacatgtgctttttgcatggttattatgaaccaacattgttgttcctctacgagcccatccaaacaaccgcgggacg

SEQ ID NO: 47091 - DNA, 2025 bp, Heterodera glycines
  unsure (1)..(2025): unsure at all n locations
atgactgattgtcgctggatggcgtcggtgccaatggcatttgagcagaaagtgtcgatggcacaaccacaacaatccatggcatatctcccggacatcgaaactctgaggaagggaaaagtcagtccgacgattctcaagtcagtcgggggtggaattaaaaatgtaactgaagttcgaatcggcaccaatgggttaacccatttggtacggtttccctggtcttaacaaaacaaattcagaccttacattgacccgactctgtgctcttccgacccaaattccttttgagagtgaagtgaccgtcggaagaatgcttgacgcgcgtgtccatttgggccataaagtaatttcatccttcaaatgcttaaaattaactaaactttactaatttccaaaaaaagcagaacattttgcagaataacatttccgttctttttgatgttgtaaattcataaatttttatgaaaatctcaatcattcgctgatattcggacattcgattaaggaattgttgatgtgtcgatggactaaaagttggttttttaggttggcactctcaacgataatatgaaatgggcattgtatggaggtaaatggcatcgaaagaatgggaaattaaaagggacatatctgtaattagccatttgtcataaattcttaaaaatttacagttagtcgggaaaaaaataaagcgccgaacaaatgagttcggaaataccaattagcccctattttaggttatcccatcggatcatttttgggtataaattgttttccgattttttccttttcagaacgtcttggcatttgcgtctttgacttggaaatcactcggcattatctgctaaaggcgttggaatttgtccgatctgtggcttttttgggcggtcgctttctcttcgtctcgaccaataagtgctgcttcccgatgggctttccatttggtggcatttgccttttcaggtcctcaatgctaatggtggagacaatggccgacgaattgggacagtacgcccacacgcgccattggcagcccggcacattcaccaacacaaagagcgtcttcggagggcccattcggctgcccgacactgtgattctgttgaacacgctgactagcgcgatggaagcacatccggcactggtcgattcggccaaaatgtgcattccaaccgtggcgatcgtcgactcgaacagcggtgagtggcaataggaaatgaaagaatttgtccaataatccgtgcatcagagcccaactacgtgtgctacccaatccctggcaacgacgactcggttgaatccgtcaactttttcatggaaatgtttgcaaaagcaatccaaaagggccgagcggagagcgacacttttctggagggcgcgaaagagaagaagcatcagcagaaaaggacgatgggccagcggaggcactgaacgaacaaacggagggcgacgaatgatcggagggggggggggcgaagacggactgattcctctgcttattctttgtttctgtccactttctatgtttaggttttctgaatacacttttacccttttaaattattttgagtgttttcccataaaagtccgctgctatttctccttatttctttttttttttgattcaatttgttttctgttcgatgtcttctccgcttggtgtgaatgtgtttatcaccggcgccaaccgaggcattgggctcggattggtgaaggaaatgttggcggttggtggactgaaaaatgtgttcgccggttgtagggacgtcgattcggctgcggtcagtggacgaacccttaggggaaattgaaatttttaacctcacaaatcagaccaaaaagggaaaaagagctttaaggaattgcaacaactgcacgacaaaaatggaccattgcgactgatcagaattgacgtcagcgacgaccgaagcattcggacggcatttggccaagtccaaaagcaattgctggacaaaggcggactgaacttgctgatcaacaacgcgggcattcttctcaaan

SEQ ID NO: 47092 - DNA, 1005 bp, Heterodera glycines
atgttttatcaaacggtgtgccttcttttgctgttgagcgcatcgaatgatgttgcggtttttggacaggaagaaacaaccacaacatcgactagtagtacaagtacgagcacaactagttcaaccagtacatcgaccacaccaactacaacatcttcaaccagtacatcaactacaccgagcacaacaacttcttcaaccagcacatctacatcaactacgccaactacaacttcgtcgactagtacatcaactaccccgacaacaacttcttcaaccagtacatcgaccactcccactacaacttcttcaaccagtacttcaaccacacccactacaacttcttcaactagtacatcgaccacgcccactactacttcttcaaccagtacatcgaccactcccactactacttcatcaaccagtacatcgaccactcccactactacttcttcaaccagtacatcaaccacacccactacaacttcgtcgactagtacttcaactacatcgagtacgacttcgtcaaccagtacatcgtctacatccagtacaacttcatctaccagtacatcaactactccgagtacaacttcttcagcaagtacatcaaccagcagttcatcatcaaccacgaccaaaccatcgtctggcgatagtggttctggagcgtccaccagctgtaccaacgcggctggggacagagcttgcaatgcttacaaaaatagatgcggccaattttcggcatggctgaaaaagaattgtgccaaaatgtgcaatgcatgcacgtcatcggacagcagcacttcaactacaacctcaacgtcgacgtcgacttcaacaagtacctcgtcaactacgaccaagtcatcgtcaggtggcggttcttccagcagctgtaccaactcggctggtgacagagcgtgtaacttttacaaaaatcggtgcaatactttggcgggatgggtgaaaaagcattgtgccaaagcatgcaacgcgtgctga

SEQ ID NO: 47093 - DNA, 456 bp, Heterodera glycines
accagtcattacatgagaaattcgccctccatgaggagcacattcctctcaggtgaagtgttaatccaatgcgtaaaaaatgggtttttatttgtataagctaaatcgtttcagactcacgcgtagcaaaaaacttcttgccacaatcaacaagaacttcgggactttggcattttgtcgccggtggttggaccgactgggcgaaaccaaatatttgatgtcactcagagacctttgcggtttgtaatagcttctattgcacactttggcaacaaaaacttttcagagaaggacattgttgcgccttatcctccgctctgtgatcaggtccaaatcccatggcaaattaacgcctttttcacttttctacagaaaggctgttacacggctcaatgggagcacaccattctcttacggccgacatgcaaagaagtggtgagccgtggcgaagattat

SEQ ID NO: 47094 - DNA, 1880 bp, Heterodera glycines
atggcatttcacaaaaacgacaacgactccgtgaactcaatcaccaatgctttggactttttccgtattctgccgaccaatgtgagtgtgtcgtcatcgaaagtgtttgagcttctgcccagcaaccctctgaccgacacaccataccacttcaaacttcattcaagtcaaaactatattgatctgtccaaatgctatttgctcactgagtttcgaatccggaaggaaaacgctaatggacaactcattaacctaaatgctgatgatataaatattgcgccaattcaaatgatcggacaaaccttcattcgcaacgtaaaaatgagtattaatgggcgcgaaattttcaatgccaacgctttaatggcctacaaaacatatttctcgcatgaactctcctattcaacgacagcaaaagactcccatctgaatgcaatgggctattatagggacacggatgatacattggagatgggaggcggatgcacagcgcgacgagatttgtttgcgggtagcaacgtagctcaattcattgccaaaatagacactgacctattcaatcagccattgtatctgatcaatttttgtgaattggacattgaaattttgcccaacgacaacgactttatgttaatttcgcctatcgcgggtgcaccccgctaccatttcgagattcttggactgaaattatatgtgaagaaggtgtctctgatggatgggttggcgctggacattgcgagaaagttggaggtgaagcctgcccgttatgcagtaaggaagacaatgatgaagtcaatgttcatcagtcagggccgttatgagtttacatctaatctgttcatggaccaaatcccccgtcgtgtgacaatgggtctggtggccaatgctgactatgttgggacaattaggcgcagcccgttcaattttcaaccatttaatgtgcgcgaaatttccattgttgctaatggacgatcgtacccccaagcgccctatgacctggattacccaagtgggaaatatgttcgcccattcaatgacatgaacgaagcggttgggttcgctaactcatcggagagcaacgggataactttttcccaatacggtaaaacacattgcatttacgttttcaatttgaccaatagcggggacgatcaggcggcattgtttgatctgataaagaatgggaccacagcggtgagcataaaatttaatcacccagtgcccgacggaggaataatgcttgttgtgatgggagaatgtgactcactggtgatgttggacaaaaaccgatcaataagcacagacaccactatttaaagtccgcttgtcatatcattttgttccataaaataaataaaatgttctctaaaaaattgggccttattttattcttgctccgagtttctcttcccattgtttcatcatcatcatcatcattgcgagaacaacataccgaaaacacatactctggttatctaaaaaatttgactttgtctcgacatcaacacgagccagattattaatactcggaatatttaagaagattgtctttattcaaacgtaccactgccattgtcagtacaacaactgcaccattaacaattacctcaccaaaaagcgacagattaattgatgaacatgttgctgctgttcttccaccacttatccaattgtgtaaagatagaccagaagaggaaaactttttccatcaagctgtttgttgggccctcttcactctctatttaatgcttatcatcagtcttgtgttgcaccaactttgctcaattttttggttgaaaaatggacagcatacaaatcacaaagattttgagcgaaaatcgtcggacagagcgagcatttcggggctgcttcgcctgtga

SEQ ID NO: 47095 - DNA, 3079 bp, Heterodera glycines; identical to SEQ ID NO: 13000

SEQ ID NO: 47096 - DNA, 1823 bp, Heterodera glycines
tgaatttttcgagaaggactttggcgcttgcacgttcgactttgtcaaagtgtcccctgaccgtaccaagttgtacattgcagtccgatttgacagcaaagcggcggcacgtaaagtcatggaaaagtcggcacaattcctcactgattagcgtctctatttccacacaatttcagcttttccactgacggagaattactcggcttcaaggttgagatgacatggttccgtgacattcgccgctatttggcccattgtgctaaacaaggttatattgtttgctgtcccttcttttgctctcacactctaaacgcgttccgttttgaggaattcgtccaagccgttttcgtggccgttccgactatcgccgggatgacgagcagtacaaagggcgcgggcgttcaaggcaagttggaggcacaaacggggacgtgctgcgtcatccaaaaatatttaaaaaccgaatttggctgctgaaaattttttccagcggaggccccctccaagtcccaaaaatactcattgtcaaacctgcgggttcgtcacatttccagacaaaaattagctggcaattaactcaattttgattctgatgcactcgttcaggtcacctactcggtcccccgagcgtgaagagggcgcgcgcagtcgctccgcgtcggccgcttcgcgccattccaacgccaaccgccgtcgttcgcagagccgttcacactccgcccactcacactcgcacagtcgttccctctcgtcgggcggcgaagtgcgcggggctcgcgacggaaatgcgtcgcattcggagcgcgagaaatctttggactacagcgacattgaagaggcatattttgaaattctgtttttttttggcaaactttccccccattttttgtagaaaaaggtccgtctttcgccgccgcgcgttctttcgccctctccgccgcccctaaaaaagtcgaagaaagagaagcgaaagaaggagaagcggcagcgccgcagcaagcacatgtcgccttcgttggccgtccaccgccagccccactcgggctcggacatggaaatgggcggggaggaggaggacggactgtccaacggcggagggcgcaaaatgctcaaaatggagtcatcgtcgcccgtcaacaacagcaaggcatgtggtcaactgggggaaaacgagccgaaccgcggaatgggtggagaataccctcttgcgttttcagatgattttcattggtccggtcaagcccattgtccaacagtcgccgactgcaccacaaaagctgcccaaggtggagctgcgcaaccagtccatcatgttggacctttccgatgttggttgggctaggggagtggaacagactttattaattggcatacaaaatcaatacggacaaacccctaaaaaattaaggccaattggtcacaaaaacagctacttaaaaaaaagtttttgccagggtcactttttgccgatttttttctttactttttaaaagtaaactccccgtctgaaaatgttgcactttccaataaactttttccagccaaggactgtttcgccaccgaaattcaaaccgattggcgaactgtcggactatcagcagcaaatcaacggatcaaaaggcatgcaaggtttgtctattctttttagtactttgtactatttttcttgaattttagaactttccaacattcgattggccactcctccgccacaaccgccgccggtgcttcgcaatgttccgttgcctcccgtgacgtcgaataacaacgaaatgatggtggaccgcaattacattgcaaaggtgccgttgccacttttctaa

SEQ ID NO: 47097 - DNA, 1118 bp, Heterodera glycines
atgaacatggtacagcccaaatgcccaccggggcctcctggaccacccgggccagccggtacgcctgggcttccgggaagccctggaaacgcgggagagccgggccaaccgggacagcaaagcgggccatgcccacctgccgcagcggtcggctgtcaagtatggtaaaatgaatattttagcaataaaattaaattaaattttgtaagaaatgccctgccggaccgacgggacagccgggagcccaaggacagcctggcacactgggcaatgacggcacgcctggccaaccgggacaatccgctggaccaggagcagccggaccgccgggtgcgcctggcccagcgggagtgccgggcccaccaggatcgcctggtcagccgggacaacccggtgcatcggcaacacaaaggtagggagtgaggggactagggatgttagccggcgcctaatcccaaattttcactataaaaaccttttgttaagcacttttgtgcctggaccacccggactgcctggcaatgccggacctccgggccaacccggcgcgcctggacagccaggaaaccccggtggccagggactgcccggcgtgccgggtgcgcctggtcagcccggcactgccggcacgccgggacagccgggtcagccaggcctgcccggacagccgggccacgacggtgcctattgccagtgcccgccacggactgcacttttgttgcaccggttccatgcttaattgagtgttgagcagagaaatgacgaaacaaagaacccattttgcagagagatagtgcaaatttctattatttttttctttttcttttcattttattttttaaattttatttatgttaacaaaatttttttttagttggatttaaaatgttttcatattttaattcctaatcttggacggtttgtctgttaggtattagtccaatttttaatgaaggcaaataatcaaaaatataattattgttttaatcacttaaacaatttaaaaattatgttttgtatagaattcaaatgctttattaatatttcttaacaaaaaaaaattagtttaaatttggataattaaaaaattaatcaattattagtgatgtcaaaataaa

SEQ ID NO: 47098 - DNA, 1974 bp, Heterodera glycines
atgaacccatccaacaccgtgttcgacgccaaacgtctcatcggacgcaagttcgacgacccggcggtgcagtcggacatgaagcactggccgttcaaagtggtgcagggagagggtgctcgtccgaaagtgatggtggaagtcaaaggcgaggacaaagcgttcttccctgaggtttgtgctgtttgctaaactgctccatccccccgccccagttgaaaattttgaatggaggcaatttcgtatgcttgattctttttcggaaaatctacaatctgaggaattaaagctttcagaaaaatgaaatttgggagggaagaggactctaaaagcaaccaaaattggcgtttgttgagtgtttgcttgttgtacttaaatgtgtttttttttttgcaggaggtttcgtccatggtgcttatcaagatgaaggagacggccgaggccttccttggccagactgtcacggatgcggtggtcacagtgcccgcttacttcaacgactcgcagcgtcaggccaccaaggacgcggggaccatcgccgggctgaacgtgttgcgcatcatcaacgagccgacagccgccgcgattgcctacggcttggacaagaaggggcagggtgagcgccatgtgctcattttcgacttgggcggtggcactttcgacgtgtccatccttaccatcgaggacggcatcttcgaggtgaaatcgaccgccggtgacactcatctcggtggcgaggacttcgacaatcgaatggtttgattttcgaatttgccagcaattcaaaatggttcgaactaaggtttaagaaaaatgaaaaagatagtttggtcgaaccaacacttaaaatgaatgaaaagcattttcttttgcttgtttgaatttaaactgcttttccttcaggtcaaccactttgtcgcggagttcaagcgcaagcacaagaaggacctcagttcgaaccctcgtgcgttgcgtcgtttgcgtacggcctgcgagcgcgccaagcgcactctgtccggttccacccaggccaggtttgtttctttccctttttggcgggtcatttcacaaactcatttgccccatgtaaaactaattccttcaatttcagcatcgaaattgactctctcttcgacggcatcgacttctacaccaacatcacgcgcgcccgcttcgaggagctttgcgccgaccttttccgcaacaccatggaccctgtggagaaggctttgcgcgacgcgaagatggacaagtcccagatccacgacattgtgttggtcggcggctcgactcgaattccgaaggtgcagaagcttctctccgactttttctccggcaaggagctgaacaaaagcatcaacccggacgaggcggtggcctacggagcggctgtccaggcggccattctttccggcgacaagtcggaaactgttcaggtgaacgattaagcctacctatcttaaatttcgaattaaattttgtttttcttgtttgttttttttgactgttgtgtattcctttctttttaggacttgctgctgcttgacgttgcccctctctccctgggcattgaaacggccggcggcgtgatgacttcactcatcaagcgcaacacgaccattccgacaaagacgtcgcagacattcaccacctattcggacaatcagcctggtgtgctgattcaggtaaagcaacggcatttccccttttgattgtttctgtgtgaaaactgttcaatttgaggtctacgaaggcgagcgcgcgatgaccaaggacaacaacctgctgggcaagttcgagctcagcggcattccgccggcgccacgaggagtgcctcaaatcgaagtcactttcgacatcgacgccaacggcattttgaacgtgtcggcccaggacaagtctaccgggaaacagaacaagatcaccatcaccaacgacaaaggccgcctttacaaggaggaaattgagcgcatg

SEQ ID NO: 47099 - DNA, 1834 bp, Heterodera glycines
atggaggaattggtcggcaacatccccggcgcacggcaagtgttcgaacggtggatggagtgggagccggatgagcaggcgtggctgacattcatcaacttcgaaatgcgctacaaagaagtggacagagcgagggacctttaccaggtgaagagggagcaaagggaacggaaaccgaacaaacagaacaacgcgaggaattcagcgttatttgcatgtccatgggcacgacttcaaaaattgggtacggtacgcaaagttcgaagagcgcaacggattcactggaaatgcaagggcaatttacgaacaaatgttggagttttttggggaggagaatctgacagaaaacattttgatcgcctttgcgcaattcgaagagcggcaaaaggaattcgaaagggcgcgcgtgatttatcaattcggcatcggtacgaatttgggagggggaggggggtaaatggtcctaccgttttgaattccttttttgcccccttttcagaccatttgccaactactcgcaccactgaactgttcaaatgtctcacaatgcatgaaaaaaaatttggcgaacgattgcgaattgagggagtcattttctcaaaacgccgtcaccaatacgaagaggtcggagtggtggcccatcacttggccaaatgtcccttttcagcaagtcaaggagaacccattcaattacgacgcgtggttcaattatgtgcgactgttgatggcggaggaggccgaccgggccgaagtggaggaatgttttgagagggccatttccaatgtgccgccttatgtggtaggtgggctaaataatagacatttcgggtaactggtttctgtgaccaagaccctgacgaattttttaatttacaaaaataagatttaacagaatggtgggcttacatccgaatgcattttcttttcaacctttaggaaaaacggttttggcgtcgttacatttggctgtgggtgtattacgccatttacgaagagctcgatgttgaggacgtgggaaagtgtcgtgaagtgtggcgtgcctgtttggacatcgtcccccacaagcagttcaccttcgccttcacttggctgatgttcgcccaatttgagctcagacaactcaatttaggctccgctcgtaagattttgggcacggcaattggaaaatgtccaaagaagaagcttttccgcgagtacattggagatggagttgcagctgagggagttcgaccggtgcgttggcacttcaaaacgaatttattgttttttttcacagatgtcgaaaactctacgaaaaattcctcgagttctcacctgacaacagtatcagctggatgaaatatgccgagttggaaactctgttgggcgatgagcagcgggcacgtgccgtctttcaaatagccgtccaacagcccagtttggacatgcccgaagtgctgtggaaggcgtacattgacttcgaaattgagcagggcgaacccgaaagagcgcgcattttgtacgaaagtttgcttcgacgtacccaacacttaaaggcatttccgggggggagggctgtgccaatgcatttcgatgtccttttgctaggtttggatcagttgggtcgaatgggaggcgagcaacggcgaattcgaccgcgcccgtgcactttacaaacgcgcgaaccaagcacttgagggagcgccggcggaggaacgtcttttgttgttggagcagtggcgcgactttgaggcacagcacgggacggaagcggaacgaagtgccgtcgaacgaatgatgccaaaacgggtgaagaagcgccgacagataaccgcgacggatgggacggacgccg

SEQ ID NO: 47100 - DNA, 1802 bp, Heterodera glycines
  unsure (1)..(1802): unsure at all n locations
aaggccaanacagcgccaaaacgcgcgnggcacgaaaaaaacacgccgnnancaanaaancggcactgctgcgtcggcatcctccgccgaagaagagggaaatgaagaatttggtagaggaaacctacaaaaagtcggagaacatttgccaatattcgttcaattaaggtggacaaatgcgccctcctcggcatcaaaatcaattcaattagctccaaaacgttggccgactcgttgaaagtgtacgagcaccgggaggagtacaggtgaataaattataagatccgggcatggagtaaatgggagactgatgaatcttgggagtgcactttttcaaggacagggcgagaaaattaccaaatatgcacccaattcattagttttatacctgctttctgtcacaggtacggcgtgattccggcgctgaaccaaatgctgatgaagtgcatgcacttggcccagtacttttgcaccggtctggtggagtcggagcgcgagtttcggcactacgcactcagcgtcgatttgtaagttcggtagtttaacatggaaaattgggtttcttacggacaaacccgaagacatagccattgatgggtttacccccctcccccttaaaattttgtttttgtgccaatacctcttcaaaaatgccaccatttctctgttcagttacacacatttcacgtcgcccattcgtcgttaccccgacgtggtcgtccaccgattgttggccgcctgcctcggctacgccgcgtcgcccgactattccacggaacaagtggacaaaatcgcgggccgtgccaacagcaccaaaacgggcgccaaagtgtgcagcgaattgagcggcgaaattttcttcggcgccattgtgcgggtgcgtgaagaaaaacggaatggaaatagatttaatgccaaaagtgtggcattttcagggctccgagggccatttcgaagcgcttggcattgtgatgggcatttatgacggctgctttgatgtgctgttgctcaaatacgcaatcatcaaacgcgtttatttgaaggtgcttgcttacacatctttcctccggaccatttggtgtacaaactcggataattcccataaaatgttggtggtaaccctctttttccgttaaaatttcggttttttgaaaatggggttataaagcccgctctcaatcagtcgccccggcttgcccttgccaagatggacaattcatccgaccgtgttttcttttcttaaagcggcaaaaggcggtggtgcgcacttactacggcaagttggacagtgaaggaccgctcactttggtgctgctgctggcgaatgacaacgacgggacggagacggacagtggcaaaaacaaaggcggagacgcaacagaagcaatggaaaatgggaacgaggaccaagcggacaacgacgaagaagaagaggaggaggacgaccgaatggaggttcgattattacgacgatttctaattcgtgaaatttcccgggtttttttgagggcgttttcccggtaaaagggcattttcgcacattacactccttctccctcgccatgtcacaggtggacgaacttccagcagagattggcgaccaggagggcgccgtaattgcgccggacgcgcagttggacgtgcccacgtgggtgagcagcagcgaggaggaacagcggcaaacggtgcgcatgatgagcattgtgtcggtacgacttgtgcccgtcaaaaacacagtcaaatacgaggtgagaatgggggacggtggaatgaatgccttgtcgggttgcattaaaaagttt

SEQ ID NO: 47101 - DNA, 1656 bp, Heterodera glycines
atgaccccaaaatatccggggataaaagccgaaagtgcgggaacaatcaaatcggacgaaggaccagcgaaacggtaggccaagtaaagctgaaaagggaaaacgcaaaaatttttaatttttagcctaatttttataaccttgactaatagtaccaaataaactaattgataattgaaaagcaataaattcccattaaagtttccattcggcaaaatcccaaatttcggcatcaattaacacaattaacgtgtgtttatttttgcgagcattaatttttaaaaattttattaaacctttttgaataaatttatgatgcttttaacgagggacaaatatttatgagataacccaaaatagaatttgaatttctttaccggaaaatcggagctggtgttaatggacatcaaattttggaaggaagtcatattaaaatttaaaaagtgaattgataagaatatcctttttatctatgaaagaaatgaaaacataataaaaattgaattggattttttattaccatgtcgcttaaggaaaaattaaatgctttcataaaacgaattggcacaaacaaaaaccgggaaataaattttcaaaatccgggaccgggaaccgggaccggacctcagaggaacgggaattcccggcccggtcccggtcccgctcaactctactttaaactttaaaatgtacaaatttatatatttaaaattatgctattttttaaactgattgatttaataattttttcaatttttttttcttgattttcagattgtcccattttcatgatcaatttacaaaaatcttatgatttgcatgacattttcatgctttgctcttctgccgtctgttttcacttttttgcatccgatcggatatcctttttatatgcgtaatttctcaaaaatattatcatttgtttatcggataattgattttcaattaaaaaagaattataaatgcttaaatgaaattaaaattttttattttattttaggcttttcaataaaatgttccccataaaactgattcgcctcagtgttttgctggtaattctcttcgaatttgtttttattggtgtcaaatgtaacgcgccaaaagagactaatgaaggtcattaatttatttttgaaaattaaatattaacgaattttcgtatttaaaataattcagacgtaaaaaataaacaaaatgaatatttggacacaaaagcattggtggaagacgcaattgactgggcccaaaagatttcattagtttggcttccaaagcaacacatgggaaggttgctgctaaattaatgactattaattaattaaaaagggagtattaaaaaacttttagaagcgatgtgactgagatagtgccattcactcttttcccgtcaccctttccacgaaaaatgtttgaatttggacaaaaagtgcaaatagttagtttgaaaaaaaacattatttaaattcataaatttaatcctttccttaggcttataatttgttgtacttccgagtttcgaatgattatgagttcataacaaaagcatatgaaaaagtggcggaaacaaatatagcaattcgacgactgcttacgattttgaaggccgtaacagcggaagggattaagcagacgaaatcactggtattggcacgttcg

SEQ ID NO: 47102 - DNA, 3701 bp, Heterodera glycines
atgtcacgtgtgtttgccacacaaagtcgctttctgcggcacattttgccggatggacaacaacaacagcaggaagatggtgatgatgatgttggctgccagcggatagaggaaggaatgtgcggcaccggtgggactccgctggcgaacatcgaccagcaacagccttttgcctggcgcaaaattggtacgctgtccaaaaaactggcagtggataagttccgctaattggggcctatttcagttccaaaaatgctatttttttcataatgacccatttaataaatttgaatgcattttcggcttttttatagtttaaacgacaccacaatttaatacttcgcaacttttttatagaatcacccaaatcaatcatttctgatctccattttcagtagttcggagtaatccgttgagcggtggcgactgttcgtccggttcggccagcattgacatgggcaacacccgggtgatgtgcacagtgtacgtaattgtcactaattatcaaaaaaaaacttggaaaatttactttttattgcacggatcggtgggggagaaaaatgcgattggcctagcataaaccagctccacttttgcaggaatgggccgcgtgaactgcagcaacagtcggtgtccagctcggcggacgcggccgcctccatggaggagggtgtgctgtgcgtcacactgcgcggctgtgacattgacgcatcgctgcgctacagtgtcgagcgcgcactgcaggcggcggtctgtctgcgcaaattggcacgggtcagtggcccggcatcaaattttgtgacaaaattcatcaattttttgggtgaatttttatagaaattgtccccctataatttagaccgaaactgcgattgagctgaatgtgctgtcggatgatggcggcgcatttgccgcctgtttggtcgccgccggtgtcgcaattgcgtcggctaacattgaaatgtaataattcccaatacttcttcgacatttacgaatccggaatagttccccctccccctcgaccatcctattcagaaaaccatttgttttatgtgccaggatggaattcaaacgcccaaaaatttttctggattttctgaaatccgatgctccaaatttttaagtttcaccggaattacgaccctaaaaatgttggaaaatctatttcatctctgataaggatagcaaaatccacaaatcttgggacactatcaagttgaatatgtttattaatcaaatctttttaaaggctcgacgttctgttggcttgtaatgtgttgctgattccgtccaattcgttgacggcaccgcttcgaattgtgttcgacccggacaaggccacaattgctgcacacgttggcaaagcatccgccctaacaatgggcgtcataccaaccattggccaggcaaataattcaatttttggcatttttaaaaattgtttttgtacgaaatatcgattaaaatcatttgcgggcacgcgggtttgaaccaccactgtttgtggtgtagtggtctatactctgggttcctcgttgtgccagcgtgggttcgagttcgcgtgtctgccaatgatttattttttgctcgtctaatggatccaaataccggattcctaattagacaaaattaatgcgaatttgtgattgatatgttaatcccatctaaaaaaaatttctgttttaatccaaaaaagaataccccccaaagaaaaggaatatgaattttatcgtctacattcgattacagccatcccagccattttataaatataaatttcgtccttttccacaggtggtctgtgccgaactgagtggcgacgcgtgtccgttgcccgcccatcagttgcgcggtgcgctttccgacgtgtacgagcactgtttgacactgtacggcacagtgcgagcggcactgttaaaaagcgtcaccgagggggcactttgacgggcaaaataaaaatcactttgttgttgttttttgtttttgtatattttttcttttattatctgttatttttgacatggaattccgacaaaactcattgacggatctcgtcgaataaaaataaaatgttggcgattggcacagccaccaaataaattttgtgtggcatttgtcgttgaacattcaattaattacctaattatttatttattttgttgtgtccattacatttctgtttgttatttgtttgtatattatacattgaaattgcgatggacactttgtttgacgtgcgaaacaacttttatttgggcgctttccaacaatgcatcaacgaagcacaggtttttgttttataatggggggaaaaggccgatttatagggaccgaaaaacgaaaaaatggtgttggaatgtgcaaaaaattggtcacaaaaatgtgttccttgtgacccatgttttaaattcagtaattcatatggtaaagtgcaatatcctgtcccgccctcttttttcactcaaatttgatgaaaatcattcattttaaactcatttttggttgcatggtttacatttttttacaaaagtatgattttacacttcagaaggtcaaatgcaagtcggaagaggagaaggagctcaaggacgcgttcatgtaccgcgcttacattggcctgaacaaatgttccgtgccgttgggcgaaattgacgccaccgatggcaatgggtcggccgcccttatggcaatccgacggttcgccacgtttatgagcggtgcgccggagaagaggtcgtttagggaattaagtggggttttccaattgtttagtaaggggtccgtcccctgttttttttttttttggatttccgtttcaattgtggcattttaatttaggtcagagattgttgaccaggtggccaaagaatttgaaacgaaaaagtacgctgacaacgaaatttgcctgctgatcagcacactcattttcatgcacggagaagtacggttttcaaaaaatagggttccgactttcgactcgtttgcgccatatttctgtcgatttctttacgttttatctaacaagcagcaccaatttttgaaaaatcaattctcgactcgaaagtctcgaacctaattgcactctcgagcagtactcaatagacacaaaagcaaaggtaaaattgtcaattccgtcacagaaaattgaggaggcattgcgcgtgctgaaccgcacggcgtccgattcgttggagtgcgccgcgttgcgcgtccaatgtttgctgaagctgaacaggggcgacctggcggccaaggaggtgaagcgaatgcaggagatggacgaggatgccaccatcacgcagttggctcaggcgtggctgaacatggccatggcgagtgaccaccggggaaagggcggggcaaaaatggatcactttttttgtaaattaagtgatcgaagtggtaggatttaatggggttaggtggtccggtatcattgtaaataccataattcggtatgaaatgtgtactaccgagaaaaggaaatttcaacaacaaaaaaaaaatggaaaaattttctaacgcttttacagggtcgtgacaagctgaaggacgccttctacatttaccaggaaatgttggacaaatacggggccaccccactgctgctcacttcgcaggccgcctgtctgatcatgcaacaaaaatatgaggaggcggagaaattgctcttggtactacaaaaaaaaaaacactga

SEQ ID NO: 47103 - DNA, 1758 bp, Heterodera glycines
atgggcgattttggcgagtggtatcgttccattccgttaatcaccagatattggttcaccggatcaacagtgatcccattgttgggccgactgggcattttccagtgagtttttgttttcgttttattacttttaatttgcatttttcttttcagtccgtatttgatgttgctcagttgggagctgttcttctacaaattgcaggtgattgtcaaaatttgataaaatcatttggcgatgggtcaggcaaggggtcggacagattgaaaaatgagtcccattttgcgattgaattttataaatatttttcattcaaatgcctctataatctggccatccattcagaaggagtttttcactttttcattaaaaacttatggccatcgaggggggggggggcataattttctttaaatatccccggaaaatgggatttttccaggaattccggtcccgttcatttcaaattctgattttgtgattttgaaaaaatcgtgtccatggctgctttagcaagacaaaaatcccatttacttttcccagtctggtcccctcccattgcctaaaaaatggacaaattccctggtccgattctcgcttttcccagttttgactcctgtttttaaaactcaaaatccaaagattgttttacatttgccccctgccaatctctccccatcttttcagttatggcgtcctctcagcgcactgttctactacccggtcaccccacagacgggcttccactggatgttgatgtgttatttcctgtacaattactctaaagatttggagaccagtcaatttgatggacggccagccgactttttgtttatgctgattttcaattggatttgttgcacggtttgtgaaacaatttttgtgtaaagcagagcacccgccaatttgggtgtctaaaaatgacaatttagaaaccggaattaccggaaattcgttagcctttacaaaaaaccatgacatattttttgggtttttttggtacactaaattacgatattttttcaaaatacggcgtttcaattccgtccatccgtttcaattggccttttttcaacctaaaaacaaatttttttttttttttgcgtcgaatcaaaattgattttaaagaggcattttataaatgtagtcatctttcacagattgtgtgtttcgttgccgaaatttacttcttgctcgaaccgatggtgctcagtgttctgtacgtgtggtgtcagttcaacaaggaccggactgttcagttttggttcggcatgcagttcaaggtttgcacagtggacggtccaaagtttttttggccatttaagagtggattttgatgtcatgaaattgtgccggttcatgagtcaatttaagactttgccgaatttgtttcatgagtcgaaattgatcggaatagatgccgaattcgttcgacgacctcaaaactcctccccatccccgagtttcacgacttaaaattaccgtagaattttttaagctgaaatttctccaaaaatggcaaaagcaaacaaaaaaatctaaacgattgatacttgtaacccgtaccataatcaatcaaaacccatttaggccatctatttgccatggattctggtcgcgttcagcatggtgttgcgtggtggcggaatcaacgaattggttggcattcttgtcggccacacctactacttcctggcattccaatacgcacttgactatggtggctcggtgctgttgcggacaccgcaattcttgtaa

SEQ ID NO: 47104 - DNA, 2269 bp, Heterodera glycines
caaatgggatcaaaatctaacgcaaaattcgacttctgcaattttttgttacgtaagaaaatcaatcattaaaaaaaagttagcttaaattttcttcattaattaatgatataatttaaataaacaagtatgatttatgataactaatttacaaaaatagaaaccattgtactaaatgctttttaaaaattttcatcactctaattaaagaatcagagaatgagaacataattttatgattagctaatattctgctcttttaataaataaaattttgaggtctgattcatttagaagagatcagagtgatgaaattttactaatgaaaggtgcctaggtagggattttaattaattaatgattcattaataatattaatcttaagcatttataggtaaaattcaaaaaaagcaacaataatattttaaataatatttttaatgttttttttgacaatactttattttaatcaataaacaatatatttttatttctaaaaaaatgcgagttttagccagttttaccaaaaccacgttgtcatatcacatcaactggcgcaattttattggctgacatcattccatcacttatcatcaaattgttttctccctttattattgaccgagtgccatttgggtttataattttatttttatcaatcattaatttattaactctaacgctaattaattaatttatttattagttttcgacatttacttgtgtgcataatgcaggcactcagctttgtcattgtggcattttcccaatcattcacactgtcattaattggcattatttttgcatcattaggcaatggtttgggcgaaaattgcttgctggccctctcatctcattacaaacggtaaaaaaattcatatgggtaaaattcatgaatttatgatgtttaattaattaatgattattagatcaacaatttcggcatggtcatccggcacgggcggtgccggaattgttggctcagtggcatacgctgcacttacagagccaaaattgttcggattgtcaccacgaaatgccctactttccatgctaattgtgccaatcatttttgcaattgcgtcagttattgaattttaaaaataaaaatttaatttagtttaatatcttaaaattttatttggctgtctttgcggggtgataaagaaagaaaaatgttgaagaaaatattaaatatttcggttaattaggaaaactcattaccacgaattggtcggggaagtactctaatttttttttgaaattcattttatttaaaaaatttagttattgggggcttctgactccttcaccaactgttcacagaacaaaattattaaacccatcaacgtggattatacaagtaaaaagaaaaaaaaacattcagaatttaatttaaatttttttaatgttaaaattttatagatgaataatagcgaaatctctgatggaagtgtgaaagttacaagtgaactgaactttggttccaaaatgcgtcaaattattgtccgtttgaataacaaaaaaataaaaaattattaaattcatttagcttttgcttcatctgatggtcccattgggaattgtgtattttgctgaatatctgatcaactctgggcttgtaagtttgatttcacatttactaaattaattttagcttataataaaattgaattcttttaagtgttttccaaaaatattttttaagcaaaaaagcaattatttgtttaattttgaaaataaattaattgatttaaattatttaaagcatcaattgctgcatttcgactgtgcccatgggttcggactcagtgaggccagtcaattccgttggtaccaaacactttaccagctgggcgtgttcatctcccgatcatcggttactgtgcttgcactgcccacttatgtactttatctgcttgctgtactccaggcaatcaataataattaagctaattagggtaattaaattatttgttcatttttagtgcgggaatattctgatcttttatttccaatcgctgttcaattacattccgcacattggcattgtgttcattgtgatttttgtcgaaggtctgctcggaggtgcctcatatgtgaacacattcgacaagattcacaaaaaggtaaattattttaaaaaataataatttgacattttatcttttttgatcagcaattttcatttttccaccgattttccattttttatttccttcttccaataataaatgtttatgatatttgtgtccaaatgttttttttc

SEQ ID NO: 47105 - DNA, 767 bp, Heterodera glycines
atggtttactacaacaacgcctccagctacattcaggtaaggaacggtacacagcttgttttgtgctttatcatttgttttttcagtggcaagtcatccgcaaaaacagtgccttcctcaaacgtcagcgtggcatcccgaaacacttcagcaccgagccgttcaacatggcgcgtctgaacagcattcgacacaacggaatgatcaacaaaaaggcggtggacatttctgctgcgaaggacggcaaaggagtggttatgagtgtaaagaagcacaaaaatgtggcgaaaccattgcaggtgaggctgaatttacttttccggtttattgttggctctagtcattgattggacgtgtcttattgcgtttaacatcaaacaggcagttgccagcacagcgttgacaagagacagtcgccgggtgatctctgccgtcggaaatgcggtgaccgcctacaaaccgtcgcacgcgaagctggcgcagcgacgcgcctcgcaaatcctccgctcgcaaaaaaccaaggccaaaccagcgacagtgcgcaaaggaaaggccgaatgaacgaggggattttgtggctgaaagacctttaaatgatcgaaaaatgttgttgtttttgttgaaattaattggaaaagaaccattcccgtgggaaatctttgttagttttattttttggcatttaatgagattgttatctattcgatgattgacaatggggagggactccggttggggtcaactggctccatagaatgcaaattaaa

SEQ ID NO: 47106 - DNA, 760 bp, Heterodera glycines
atgtgccgatttggccaatttgtggaggaaaactgcaacaacggacatcgcttcaacccaacagtcagtggacaaattgccgagataaaacgaaaagtcattggggtgggggagaaaaagccaagcaaagccatgggaaaaatgcgagcggtgaataaatcgcttatccaacggatttggaaagtgttcatctccctttacgttttgaagatcggccgttgcgatccgtccttcgcttgcccggaacatcaaaagccgccgtgttttgagggtcaaatgcgtgtcacggaaacgccgtccgccgcgccaacggccaaatgcacgacggaatatgagctgtgccgtgacggacgatttaagcgcatcagttgcccttacggagaacatttcgctggggggcgttgtgtcgcggggaattgcaacggtgggcaaagcggcagtggccaaggccaaaccgatcgaacggcgatgtgtaaggtgagaaggcatgtgctaattagtggcatttgccttgattatgcccaggaatcgcccggtccgcaaggctttcgatctgacagcaaaaattgtgccaagttttaccaatgtgccaatggaaaatgggtgccaaaggactgtgccaaaggcactgtgttcaatccggcattggccgtctgcgattggcctgccaatgtgccgggatgctaagaaatggcaaacggagaaaggaacagacgattttaaatcatcggcacaaagacaaaacgccaaaatttaaaaa

SEQ ID NO: 47107 - DNA, 186 bp, Heterodera glycines
gaaatgcaagaagcgttcgaaacacagagcatggcaaagatatttgaagtggcgaagagcatggactccgaggtgttcaagtaccatttggatcgctgcactgcctccggactttggattccaaacgcaaaggaagccgagggacatggacaagaggaggaggagaaggaaacggaggagaaatga

SEQ ID NO: 47108 - DNA, 2666 bp, Heterodera glycines
  unsure (1)..(2666): unsure at all n locations
attttttggaaaaattttccaaaaaacttagtaattcatcataatttntggaaaaatttcgagtttttaaaattcttttttgctaacagattttgctgaaaaattgcattaatttagaataaattaaataggtaacttacaaatcggagaagaaagtaagttgagggaaccactaacatattatttaacatagcggccaaaaaacgacggcgaacatttggcagataactgaaaatgagataaatgtccaaaaataaaaataaaactggcaaaactaaagaaccaagggcacccggtgaaggacttgacaaaatactttcatcaaatgttctttagctttgcctaacttaaaaaatactcgcgagaatgttgtcggttatcaaacgcgtaaataaagcccacataactgagtggcatcaaaatggcactgcccacatagatgagacattcttgcatagaaagtacctgtacggcaggaactagctcaagtattaaaatataaatatatgaaaattatttttataaaaatgcgggaaaacagactttttaatttccgatacagagtcaatttatataatacacatactgtatgtacatatgtataggtaaacgaagcaatttttcgccagtattttgccatttgccacaaaaatcctagccctagggattagtaatcccgcggcatctcgtccacaaaaaatttgagttccattccagccagtgatcctcaagtttgaactacctatccgggctccatctaatacttaattacttaacagcagagtcaagcaattatttatatgtattaacacaccgtttcaatttatcttggtatcattcgaaagcccttgatggggagaagctttttctaagcaaatgctaagcaattggattgattaggaaaaaatatgagggttcgaaattttgtttctcgaataactttttagttaaccctttttttgcttttaaaaacccttacattttgttcgtaatttttttctctatcggtgtgcaaaatttgaagaagatttaacatcagagaaaaaagttaaacatcacgaagtgaattcggtttttctctattaacagagataaagaaatagtacgccaaaaagagagatgtttttttctctgcgctctctctttattggttcatctctcgttttttgaaacggtgttaatttgacatttccaatggttgaaccaaaaattccaacaacaagcgattttaacgaagaaaaccctgtaaaatcgacgccagaatcacattcgttaatcaagaatggattttttatgagtgaagaatatgggatgacaacgaaaagtgtctacacttcacaaatttcacaatctgtgataaaagctggactttattctaagaaaaatctgggagtgcatgtttctgcggcgggtaagtaatatttttggttgatggtgtggcacttcacctttcaggtagtctggaaaatgctatttggaatgcaattgaaatgggttgtcgttcatttgcgttgtttgtccggaatcagcgtcgttggaatgcaaagcctatggatgagtcagttgttgagcggtggaattgtgcaattaaagtatggcaaattcgtagacaaagtgaccaattgagagtgggcggttaagcaaatttaagcgcataaattcccaaaaatatattttccattctttttatttatttatattttttaaggtgggatatggaattccccgggtccgttccctgaaatggtacagaaataaaatttattcagaagacaaaattcccgttgcaccaaatcgtcccacatggctcgtatttgctgaatgccgggtcacccgaccaaaaaaaattggagatgacacggaaagcgatgctggacgaatgtcagcggtgtgaaaggctgggaattcaattttacaatttccatcccggtatgattttgaattcccaactttcaaagaattaattaaataagcagtaaattgaaggctccacaactggaaagtgcacgagggagcaaagcatcagcacaattgcggacaccataaattatgtgctggaaaatacgcatcttattacgctcggtaaattgggttttgttagtatttttatttttaaatttaaaagtcgtggagacaatggcgggcagtgggaacacaatcggtgcgacatttgccgaacttcggtcgatcattgacggagtgcagaacaaagaaagagtcggcgtttgcttggacacgtgccatctttttgctgctggtagcgctttgtttttttttggtcgccttccctattttttataaaggctatgacattgccaataattataagggcgtaatggaagagttcgcttcaacggttggcttgccttttttaaaggcgcttcaccttaatgattcgaagggtatttggtaaaataaataatttttgacctttcatttttagagtgttgctcatcaaagctcgaccgtcatgaaaatattgggaaagggaaattgggcacaaaagcatttgagcaaataatgggggacgaacggttagacggcatcccaatgattcttgaaacgcccgaagggaaataccccgaggttttttgtttataattaaggtttgaattattttaatttataaccaggaaatgtcacttctttacgaattggaacgaatt

SEQ ID NO: 47109 - DNA, 636 bp, Heterodera glycines
atttttaatatatatatatttattgagcaaaccacaggcacattagtgctcttatgtggcgcataaaaaaaatcaaaataaataatgtcaaaaaatacaacaatatgaaatgtaaagtaaaataaaataaaatggaatgaatgtcaatgcaaatgtcaataaatcccttagaactcatacatagcttttagcaatgccctgaattgatttgccttatctgcctgaattggaacaattggtaatttgttccaattcttggctatacggttaaaaaaattattcttactttttgtggttgtgcgccgcattctcaaaagtaatggcctacgagtgggtcgatcagaaaaagtaaaaagtttactagcatcaagactcgtaaaacccttcataattttaaaagcggtagttaagtcagcaatatttcttcgcttggctaattctataagctgacaaatttcaagtctttctgaatatgatctatgtaaaagtccgcattttttaaaggcttttctcgtgaaaaatttctggactttttctattctttctatatctttttttaagttagggttccaaatttcaacagcatattctaattgaggtctgacataagtcttatacattcttataatagttttt

SEQ ID NO: 47110 - DNA, 2918 bp, Heterodera glycines
atgccttggattaattccatattaataaatgcccgttcaatcgcaaacaaaatagctgatttagaatatctaattgagacaaataaacatcaaataattttgataaatgagacttggttaaataccaggaatacaattacaactgagttaacacttaatggtaaatttcaaactgttctagcaaatagggacaataagagaggcggcggatgtgctattttggttagcaatgaaattccatttaaaataattttatcagaaagcagaaaccaatgtgaaatcattcatattattttatctttaaaaagtccaatacatattataaatgtttacagacccccaaattgcacaacacaaaacactaaaaaaatgctaaaatatttaacaagtgtaaatgaatcaaatagaataatttactgcggtgattttaacgccccaaatattgattggaacacaaataaattattagcaaaaaatgacccagttgcaaatgctttcattgactttattgaccaaaatcaattattacagcacgtaaaagaaccaactcgagaaaagtcaattttggatttgattttttctggaaagccttccattgttaatgatattaaggttttagaacatttttctacatctgatcacaaaatgatcagctttaaagtttctcaagaaataaataaaacccgtgaacccaaaatttttgtaagggactttagctacaaaaactttcaaaaattaaatcaaatgatcttactaaataggcttagttgtgtcattaatacgaaattttatttagaagaaaaatataacacacttttgatagagttaatgaaagcatttaatcatactattcccaaaaaaccacttaaacaaatagttaagcaatcttatccacaaaaaattagagatttatacgatgaaaagcttaaactacacaagcttatcaagaactgcaaggggaatgaaaagtataaattaagttacaaaattgtttccagggtgcataaaaagcatttaaagcaattttgggataaaagggaaaataatattatctcttcagggcaaaaagcattaacaaattatgtaagaaaaaaattaaatccaaaaaactccattccttacttaatcgataacagtgggaatatttgctttgatgaaaaggaaaaaagtaagctattagcagaaacattccaaaaagtatttattaaaaacaatcaaattttcgattattctgaaaataattctccaagggaaaagcttctgatatagaaattaatgtgggaattgtatggaatttactcagaaaactgcctgggcgaaattccacgtctccagataatattccatatattctacttaaaaactgctcggaaacactagcagtaatattaagtgatatattcagactaacacttgattctggtcaaattcccaaaatttggagaacttctatcattgttccaatatataaaaagggtgaaaaatctaatcctgaaaattacagacctatctcacttacgagtacggtctgtagggtatttgaaagaattttggcaaggaaaataattgaatttttgaataaaaataatttcttttcgaaagagcagtttgggttcttaaaaaacagatccacgacaacccaactattacagacattacatgatttttacgaagccatacaaaatcaaaaagaggttgatgtcatttatatcgatttttccaaagcattcgattctgttcctattgatttgttacttgcaaaaattaaaaatgctggaatagttgggaaaattttggtgtttttacgtaacttcttgtcacaaagaagttttagggtaaaaattgaagaccattattctgaaagctataatacttatacaggggtaccacaagggagcgttttgggtccattattattcctaatatttatcaacgatttaccggcaaatatacctaaaaatgtaaaaattaaaatgtatgcggacgatgttaaattgtatattttccatcaaaatgattcaaatacaaatgatctatctgaagctataaaaattcttgaaaaatggtccaaatctaacggccttgaaatatcggtcgaaaagagtcaaacattgtatattggcaaaaataattcaaaaaaagagtattttctcaatggaaaaattattccaagcttagaaaaagtcaaagatttaggagtaataattgactctaaattatcttttgctgagcatataaataaaataataaaaaatgcttacttaaaggcataccatattttgagaataatgaagactagagagctaaaaactattataagaatgtataagacttatgtcagacctcaattagaatatgctgttgaaatttggaaccctaacttaaaaaaagatatagaaagaatagaaaaagtccagaaatttttcacgagaaaagcctttaaaaaatgcggacttttacatagatcatattcagaaagacttgaaatttgtcagcttatagaattagccaagcgaagaaatattgctgacttaactaccgcttttaaaattatgaagggttttacgagtcttgatgctagtaaactttttactttttctgatcgacccactcgtaggccattacttttgagaatgcggcgcacaaccacaaaaagtaagaataatttttttaaccgtatagccaagaattggaacaaattaccaattgttccaattcaggcagataaggcaaatcaattcagggcattgctaaaagctatgtatgagttctaagggatttattgacatttgcattgacattcattccattttattttattttactttacatttcatattgttgtattttttgacattatttattttgattttttttatgcgccacataagagcactaatgtgcctgtggtttgctca

SEQ ID NO: 47111 - DNA, 381 bp, Heterodera glycines
  unsure (1)..(381): unsure at all n locations
ggctcactctttccattttgtgttcacgacaactttcattgctctctctccaaatggcacgaaccaagcaaactgctcgcaagtcaacgggaggaaaggcgcctcggaagcagctcgcgaccaaggccgctcgcaagtcggcaccggccaccggtggagtcaagaagccgcatcgttaccgccctggtgagaaaaaaagacaaagttgatttaaaaatcctattttgattgggtgggctaacctttgaaattttgtattcattttaattcatgtgcttttcccacataattttgtgtcatttcccttcgcaggtaccgttgcgcttcgcganattcgccgttaccaaaaatcaacggaattgctgatccgcaaactgccat

SEQ ID NO: 47112 - DNA, 821 bp, Heterodera glycines
atgacgatttttgggaattatttttggaggtttttaccaaccaaattggtccatcatggtatcattcgaaagctcctggtgaggagaagctttttctaagcggatgctaaccattttgaagcattagaaaaaagttatgggcgtttgatttttgttttttgaataacttttctaatcgacccattttcaaattaatctgacctatcattagatgcagaaaatttttctctatcgatatataaaatttggttggatttaacaagtagaaaaaattttaaacaggatgaagcaaattcggtttttctctattaatagagatgaagaaatagtacgccaaaaagagagatatctttttctctgcactctctatttattggtacacatctcgctttttcggacggtgtgtggaggaatcatatcattcttaaaaaatcaaaattcccaggtccgtgtgctgatcgcttgtgatgtcctttcacggggcatcgatgttttggacgtcgattgcgtgatcaattacgacctgccgataaacgaacgcattttcgttcaccgagctggtcgtactgccagagcaatgaaagaaggactactcgtttcactgacaacaaaagaagaagtgtgctaagtgactacattttcacattttactttcccacatttttttccctttagaaaatgaaacttaaaaagttgctgtctccgcacaacctttgggagagcattcaagaaacaaagtccaatgactcggactttaacgaagaatgcatacagttgtatgaaaacgcgctaagaaagttgaaaaaacgatttgaacaaaa

SEQ ID NO: 47113 - DNA, 1637 bp, Heterodera glycines
accttttcaatttgcgcttcgcctccaaagaattgagcagaaatgccaaaaaatgtgacaagcaggaaaaggaggaaaaggtgaagctgaccaatgcgctgaaggtttgctttttgatttgcgtttggtcagattttgttaaagtctccgacaaatttctaaattttgtattttttcattttggggtgtcgtctttaatgccaatgcattttttcgcagaaaggcaatcgcgaggtggcgcaagtgcacgcggagaattccattcggaagaaaaacgaggcgctcaattatttgcggatgagtgcgcgcattgacgcggtggcggcacgcgtgcagacggacgcgacacaaaagcgggtgtccagcagcatgcaggggggtaagacggggagagggggcggggaaggaaaatggaaaaagagggggggacggaaatgggatgaaatgcgtacagaattcggcctatcaccaaagacatgccaactttctcatatttgacggactttgtgctgctgtttacactgctatatctgagatggaataaataaatgaatgaaactggtttttgggacttcacaaaagaaaatggggagggtaacccgaaaactgactaattcatcgttgcctctccttttccccattttggaaaactaaggaattggctaactggcggaaacgcatcggagaaacaaaaaaagggacggagtaaacatttttgtttagcattttttgcactttaattttattttttcatctgcacttttcagttgttaaagcgatggagtcggcaatgaaatccatgaacttggagaaagtgcagaatctgatggaccgattcgagaaggactttgaggaccttggttggtccattctcgttaattgaattgtgttcatcttcacaaagcacttttttgcagatgtccaatcggcgacgatggagggatcggtgagtgggcagagagtaattcattcaaacacaaataatggagtttttataaatacatgaagtcgcgaatttccttaaactaacccaaattccttcaaaattccacatttataaaaacgtttcattttttggccccccctttgcctgttcatgttccctttgaggagatgttttgatttattgcttaaaatccatctttgccatcttacagatgaatgccaccaccacactgaacgcaccgcgaagcgaagttgacgcactgattcaggaagcggcggacaaagccgggctcgaactcggtgagaaaacacacatacttttaaatataaaaccttgtttgattttaatttttattaattgatgaattggaaaacaaacaattaaaatcggaactctcaccgaatgcacactttaaaaatttgtcatttttctcgttttcctttttaggcatggaaatgccggcggcgcaaactggccaattggacacggtcagctcaaaggcatccgttgcggacaacgacgacctgtccaaggtggacaattggagttgttagaaagacaaataacaaaaattttgcccatttattatctctttgttgtaattttcaaaatttcagcgtttggccgccctgaggcaaacttaacaagcgaatggaccgacagaatgacgccatttgctaaatcattatga

SEQ ID NO: 47114 - DNA, 1815 bp, Heterodera glycines
atgcagtttcagcggtggataaacggggaggtggaggtgtcaaaggacggcactgatttgagtgatgagggcgaggacgagtcggacactttgcgcaacatcgccagacttgtcattgctggtgattttgcgcgttttgcacagaatgtgcggtgtttacgaataattacaatattcccagaaaatttcacaggacattgaaactcagcgagtttcgatgattggcgccgaacttgactcggacatggactctttttcgcaatttgacaaatttttggccactcttttggtaataattcttctctagcattttaaaattaaaaggtttagcaaaatttgagagttgacttaatgccaggagccagtgatcccgtccagtgcatgatcccccaacagccaattccccccgcggtgttcactttggcggcgccgttccaaccaatgcttaacacagtgaccaatccctacagtttcgagctcaacggagtccgttttttggggacatcaggtaatttggcaaataccttcacaaaccatttttaaaataaaggtcaaaacatcaatgatttgcggcggttgacacgcggaaaggacacattagcattgatggaacgcacgttggaaatgggctatattttcccgacagtccccgacactcttcccggatttcctttttctggacgcgacccgcttgttttggaccaaattccgcacatttatttcgtcgggaatcagccaacctttgaaaaacgaatcgttgaatttggcggaaaaccaacgaaaaggtagccaatgaagcaccaatcattttcatgtttaatggtcaatttaagatgttgccttttggctgttcctaagttttgcaagacaaaatcagttattctgctgaatttacggactcttgaatccaatgaatactgttttggtgcaaatttcaatgaatcgggtcaatagaagttcgagaagggtcatttgatctcaattttatgtttgcatttatttaaaaacgattggccaattactccaaacgtgactttcattgataaacacataaaattgcattattattattattaataataacgacatggattttccatttattatattttcattttcaaaaatgactgattttatcaactttatttttcagtcagaaaatgccatttgttaagtttaagcccggaaagcagtttggtcgctacaacaccaggctgttcaaggagattgtcaagagcaagaacaaagagccaattcctcgcatagttcccactgattcaatagaatcgatgggatttgacgtgttggacccacaggatgcggggtttctccaaaaaatggctggtggtccaaaacagccgaattttcaattgccgccgcatttgcgaaaaccggaaaaaatggttattttggttgaaaatttattaggagcgtttggctggttcttgataattaattatgttttgttagctccgagtgtttgactattagttgtaagtccttttcttttcaggagcatccgttgttcaaatcggaggaatgtttcgccttcgagggcattaccggaatgactgatgggattgacgaggcttgtgctcttatccgggcgacgaaggcacagcccgtgccggaccgtgtttggaattcgcttcctcgggattttttaccggctgatttcgagcatagcgttgaggatgctatttgggcaggcgaacgttttgacccgacattggagaaattgccgaggaaattcgaccccattcttttttggatcaaatacaaaatgtgttatggaacgccagtgacaaaaagatg

SEQ ID NO: 47115 - DNA, 1255 bp, Heterodera glycines
atggcttcttcagtaaatggaactgaatctccaacatcggtgagaagaaataattgggaatcggacggtgaagagggcgacaattggaatgttttggcacgaacggaagccgaagaccggcaatggcgtaggtcggtggtccatttgctgaacaattggtcgatgtggtgttggcttttaccttggctttcccttcagtcgtcgggaggagcgcgaacggctcggggcggtcggagtacggcacatttggggctattcgccaactcacaacgaattggagcgagtgtttgaggaacatcgaatcgcagaacgaatgctcaaggaggagctgaagcgggacgtgatttcggaaaagaatagaagtgagaagaaaaggaagcgaaaggaagcgagggaagagcaaaatgatcagtccacgaaagaggaaacatccgacgagacgacggaagagtcatcgaaggacagcgaatcgtcggaagacaaaaagcgaaaacggaagaggggcagaaaagagagggggaagaagaggaaggaggaaagcaagcggagaaagaagcacaaaaagtcaaagcgaaagagcagcacaacgaggtgagagagcgaaaagggagggatcggtgacatcaaaggggtaattaatggacagagaaaggggttatcagagggaggcgatatttagcataattgaaagataccacctaaaagtgttgaagggattcctctcctcttttagtgggtcttctgacgaaacttcaaagggtggaggaaagggcgacgaatgggtcgaattcacgaaagaaatgcaagtgaagaagagcaagaaagaggaggcagcgatgattggcccccaaattcccgaagatttgctgcagaaactcaacccgacgatggcacccgaaatgaaattggacgcgaggtgaaaatggagcgcaaattcaaccaaacattgctgttcagtgcccgtaacaatatgttgcgcggggaggccgcagcgatggccgcgtacgcggcgcagggaaagcgcattccgcgccgtggtgaaattggactgtcttccaatgaaatctcaacgttcgaatcggtcggttacgtaatgagcggaacgcggcacaaagccatggaagcgactcggctgaggaaggagaaccaaattctgactgcggaggagaagcgattgctcagcacgttcactgacgaacagcggacgaggcgcgaggacacggtgttgaagcagttcaaggacctaatcacgtga

SEQ ID NO: 47116 - DNA, 1285 bp, Heterodera glycines
atcaaacccgagctgatcagagacaagtgggagatatatttcactgaaatttcacctttcgtgagcgaatttctcaggacgatgtgggagaagagcgtggacaaagggcggggaaatggtcatttatggggatacgatttttaggtgctaaaaatgcgaaaataggtggtgaaaatgggaaaataggtaaaaactaaaatcatttcattccctcgccccctctctcgctgcttttctcccccgcgtccttttttaaaagcaattcatttttcgaatgaatgtttggataaaattgttcgggggtaggcccacttcccattcacgcttaactcgtccaaaggaccggcctctcattggacgggcgaatggtcgttgcgttgttggcatggcccactgaatgggttgtcctggtcgggtccttcctgtccactttcggtgctgctcttcaatgtctttgcagtatggaaatgttttttgctcgtcaccatttgtccatcccaaataggtgcgcctcgtcttttgcagagcattgccaaagatgacgtcattcccttcctccagccattcgccaaagtgaccaagaaaaatgaggcatgccgattgcccgggttgtcttccacttggacagttttagcccttcttcggcttgctgctcaccactctcatcgccgaacttggcattttgatgggcgcaatggacactatcgcggctgtgctcgactttttctttctgatgtgttacgccttcgttaacatcatttgtgctttgcattccattttgggtgctcctaattggcgtcctcgtttcgtttactatcactggtcccatattagccaaaattggcgacactttcttttcttttaggtcgttgtccgtcctcggggccgctctttgcttcttcattatgttcagcacacattggcactatgccattttgtctattgttttttgcattgtcatttacaaatatgtcgaatggaaagggtaattcgtttggttgatagttcaattttctaattccgattacccccaagtgccaaaaaagaatggggcgatggcattcgcggtttggcactgagtacggcacaatacagtctcatgcagattcccgagaaggacccgcatccgaagaattggaggttcgggatgcgtgccatcacacaatcggacattgccgtttcatttagaccgcaactgctcatccttcagtcgatgccctggtcaaaggaattggtcgacctgcgttacctgaaattgtgggactttgcgtcgcaactgaaggcg

SEQ ID NO: 47117 - DNA, 617 bp, Heterodera glycines
atgtctttttcccatgccgcactgcttttcatcgtgttcgccatttttgctggaaaatccggggaaacctttgcgtttcaatcggatatcgcgcagttgatgccaaagttggacaacactacgggcaaggtttgtttgacagaattggtggctaattttttacataatttttgtgaaactttttttaaaggcgcatgacatcgaaaacgacccgagcaaagccgataaaacatggaccatcattgacactggcattggcatgaccaaagccgacctcgtcaacaatcttggcgccatcgccaaatccggaacgaaggcgttcatggaggctcttcaggttttgtttttcgtttgatccccccccccaaatctaaaaaacacttttgtttcttaagactggcattggcgctttaatgcccgggcattttggcgccgctttctactcggctttctctgtggccgaccgcgtcacatcaaagcacaatgacgacgattgctaccaatgggagagctcagctggtggctcgttcatcattcgcaattgtgccgatcctgaagtcacccgcgggacaaagatcgtcctccacctgcaggaagaccaaacggcatatttggag

SEQ ID NO: 47118 - DNA, 2955 bp, Heterodera glycines
atgagggtctcttgttgaatggccattttgtgcgtttagcacttttgtcggaatgccctgcgggcgattcgcctgttttcctcctccaccacaacacttccgtcgcctccggcactgtccctctccgatcggcgcccgtccccggagggtttctcgaatgtaccgaactttgttccgtcgcaaatgtatgtttaatccactggcgtaagttcattgttttgtttgtccctctttaggattgcgttggcgtccgttacacccaattggccgccggcgggggaggacaatgccaattggtcggtccgaagtcggcatctgaaggtgccgtggcagaatttggtgaagaaatgacgacacggacggtgacgaagaattgtgtgaaggtgggtgaaagtgccaaaataccaagggaaattgccaaatggtattaatgggaagggccatgccattccatccctggggcgtttgttttggttttggcagagtcccctcggtcacatctcaatccgttttcattatgccactgattcctcccccaaattttctgcagagtgagcgcatctgttcctcgcctttccatttcgacgttcatgaacaaaagattttggtgggtttcgcgcgtgaggtggtctccgccgactcagtccaccgctgtctgtccgcttgtctgaatgcgttcgatacgttcggcttcgaatgcgagtcggtcatgtattaccctgtggacgcggaatgcattttgaacacggaggaccgattggatcggcctgaccttttcgtggacgagcacgaggacacggtcatctacttggacaacaattgcgccggatgtgagtgccattggcattttgacaatttcaaaacaagcggcattttgaacgaccaacaattcgcaattgcagcacaatgttacgcaccgtacgtaacgcaatacgtggcggtggaaggacgccaattgtcggacgaattggaccacagttttgaagggttggagctgagcgaatgtgaagagttgtgcacgcaacggttaagtgttacggtaacaaaaaaaccgaaaaatggacgaaaaaagagaaaaaggaacaaaaaacggacaattgggcgaaaagagagaaaaagcaacgaaaaacggacaaacgaatcaatgaaaatggacaaatgaggaagtgttggatgaccccttccctcaaaaggcaaacgacttcaactgcaaatcgttcatgtacagtaacttgacgcgcagttgcgttttgtcggacgaacgctcgcgccctttgggccgtgccaatttggccgaagtgccgggatggacttatttcgagaagaaatgctttgcctgtgagttcgctattcccagcctcaaatgcgctcctttcttagccccgcgtacgtgccgcggcgttccgtcgtttacgcgagtgccgcaaatgcttttggtgggctttgcctcttttgtgatggaaaatgtgccgtcagtgacaatgtgtttggaccaatgcacaaagtcagccaatgaatattcattaattaattgacgagtcgaagctgttcattgttcagccctcctcctgagacgggacaaaactttgtgtgtaaatcggtgatgtattattacaacgagtgagtccgtcccccgcccccccccctcctttcctcttccaatttgtccccctaggcaagaatgcattttgaacgcggagtcgcgccattctaagccggacctgttcattcctgaggaggacgactttgtggtcgactatttcgacataaactgtcgcttggagtcggaacagtgcagcgccggagagggggcgcgaagtccgaaaatcgtgcggacattaaatgcagcactgcccgaaggggacggtgccattcacgtagtggaaacggtgcaggcgaatgtgcgcgaatgtgcccaaaagtgagtgaatgaccggcactttctccggccaacgaatgatttgcctttcttagatgtgccgctcactctcccgacaaatgccgttccttcaacttcgacaaatcgtccggcatttgcaatttgctttatttggacggccgcggttcgctgcgccccgagccgaagggacaggtgggctggccaagtgctgactggtcgagattgatcatgctttgttctgctgaaggtcgatctttatgacctccactgtttggagacatcgcccgagggccaatcaatgggatgcgtcgaccccgagggggccgcgttcaggtgacaatttccaatttcggaaatgacaaactataccaattttacccacaaagtcgccatttgtattcccaatgggtcgggggcgaactgagcaaagaattgcattctgtgcctctctccaaatgtttgaatttgtgtgccggtgccggacaacggtttttgattaaaaacattaaaatttatgaaatacatttcagttgtgaaggacttaattacaatcggcgaaatggcacatgcgcagtgatcggacaattgggcacagtgtcgggggcgatgcagaagagtgaacaagtggacttttatcggaatgtttgtgcactgaaagaagtccaatcggaggaatcaagcgcagcgaatgtgccaaaaagcaaagtgagaaagaaaagaaagacaaactgagatagaagagagagaaagagagataatgagggagaggagagagagaaagaggagagagagagagagaaagagagataatgagggagaggagagagagaaagaggagagagagagagagaaagaaaggagggagaggtgagagaataaggggaagagggatatgggatgaggagaaatgaaagggatcaaatcaaaaattgggaaattaatgtaaaaaaaggaaaaaaaggcattggtgagcggcacttctgaaggaaaaggcgcaaaagaggacaaaaaagttggactgaacgaacgaacgaacggcgcacttaacaaaaagg

SEQ ID NO: 47119 - DNA, 1218 bp, Heterodera glycines
atgtcaaatctcgacaacccgcgcattttctaccaagaccgtgtgttcagcaatgatgcagcggacaatgtgttggatggagcacgtgaaatggtcgctgagtataagcgactcgatgaaatttaccaacgctttattcgcgagtttagcatcggtggattaaacttcaaatatcggtccatttagtttgtctttgcatttgaatgcctaaatattcgcttacagtgaagaattgaagctcaattacactctgggcaattattcgctgattgtcgactttaatgacctcgcaactttcgacgaagatgccgcgggcaaaatcaaacgctacccaaccacatttttaccagcggtttttacccatcagaaaattgaaaagataacggttcaattacagctcgagtctgccgtgaaaagagtcgtcgacgacattacacacccgcgtccgcctggagaggaggaaatccacgacatccaagtcattgtgaacctcagcgacaaagcactcggaattcgcaaaattaaggtactctctcatcatcctttattcgttttattacaatgccatgttcagtcctcagatgtctctcaactcgtcaaagtttcgggcattgttgtggctgcgtctcaagcgcgttcccgagccaccaaagtcacgttgcaatgccggacctgccgacatacaattgtggaccgcgaaattcgtgccggtctcgagggctttcaattgccacggcaatgtcaatcagcgtaaaaactgaccaaaaaaaattacttacacgtcttcgacttgcattcttagcaatcagcaggctgccgtgggtggccaacgatgtccgctcgatccgtacatggtgttgccagacaaatgccgctgcatcgatttccaaactctgaagcttcaggaattgcctgaggacgtgccgcacagcgaaatgccacggcacatgcaaatttatgtggataggtaaatttggaaattgtgcagttttacggctttgattataaaacgcattttgcagatatttaacggacaaagtttctcccggcaatcgcatcacagtcactggcatttactcaatcaaaagagttactggagggaaaaaggtcaattgtgtgtcattacgatttgtcgttattcaattcttaaatgtttagggcggtaaagaagacggaaaggcgggcatgtccggcattcgaactccgtacattcgagcg

SEQ ID NO: 47120 - DNA, 1235 bp, Heterodera glycines
atggaggcacaaaattcgaatttgcctctggtcgggacaaatgttggtacatccgagcatctcgagccgagtattgctcgttttggtgattggcgaattgtgaatgcattcggtgatttgagtcccgaaccggaaactcgtttcgatttggccgttcattgtttcggttaagctgcgaattcacaaacacgcgagggttataaatatatcgcgccggatcttggcgattatgattatgatcgagtcccaaaacccccaagtaccgaagtttctttctgaagacacaatttgatgataatggaaaaatccaatttaattttttcacatcaccgatggtggaatttttctcgatatgaaataactaaaaaattccaaaaattaaaaaaaaaatgggggcaatggccgtggagggtgaataaaacacagccctaatttttagtctaaatttctaaattttttttggttcctccaattcaaagtttcatttcagcaacgcttcgtcgcctttttcgagaagaaggagcgcggcgtggacatgcacgcgagcatcaaacggcgcaaggactacatcaacccggcactgtacgaggcgttgcgcaacgcgtacggcatcgacgagaagggcacctgcttcgcccgcgccgtgtacgacccgaacgcattcgccgctgacgacttttacgacgcattgggtgagagagcgtaggacgtgtgtgataatattgcccttaacggattcgaaaaatcggacccggaagcacttctttaccgcttatcccccccccccccccgaaaaaattaattgaaaaaattttttctaagtttttttaatttgttttcttgctctttcaaccgcaaataaaatttaaattttataattgggctaatatcttcgaaaacagctgaaaaattttggattcgattctaggcccaaaaaacgcaaatgttttgaagtatcactattacaaattcatccctaaatgtaccttgggttttttgagggtgtgacatgaacaaaaatcaaattccatttttttttttgcgttttaatggattttaaaattattttttgtccaatttgaaggcgatcaccaggcggtgctagagcaacgccggaaaaagatggtccagcaacaacagcagcaggagcaacaccaacacagcagcagcaaaaggcccgcctcttttccgaccggcggaggaaaagcgaaatgatgccgaaaagaagcgaatga

SEQ ID NO: 47121 - DNA, 1917 bp, Heterodera glycines
atgaactctttgttggcctacggctcggacagtgacgaggaggggcagcaccagcaaagccgacatggccaacctgaacctgatcaacaaccgcgggaggagcagaaacagcgaggaaatgggggtgggtatttgggccagggtggcacgggtcgagtcagccgggcacgcttccgggtgccgcaagtcctaaaaagattggcaaaattttagaattggcatttttaaagagggaaaatcccgatagaaatgaaaaatttaaaaatggccgccatcgggagaggggggaggggtctattggcagttaaaattttaaaaaatccaaaacttcatttactttccaggccttgctggccaattgtcttcatcgtcttcgtcgtcagcgcttgcggcggcggcggtgccgttggaggagccgtgtcccccgcggcgtcagtcggacatgttcgacgaggacgacgacgaggcggacgtgttcggcagtgaacgacggcggaacgatgaggacgacgaggaggaggagttggacctgttgctggagaaaggggccaaattttcggtaaattttcagcaatttttgttgggaatgatgaaaaattttcatttgaaatttcccaacatgtcctcctcaatttttgggcaaattttgtaccatttaatgggaaattttttacttacctttgacaacgactgcaattagcataatgatgatgctttcgttgacattttggctcaaatagcgacttttatgccacataaacaattgtgcgcgctaccattggcgccttttttctcttttttaaaatttggaggggtgtggccgcataaccgaaaagtacccaaaaaaatttcaaatttttttttgtgttcttgaaattttgcaaattttattttcagtaacaccatttaggtttttggattatgaaattattaaagaaatttttttatttttttttgtggcgaaattttgttctgcatccctaagacaccgatcctaataaaacaataaaatacatttttctcaatttaaattgtttttcaaggactccgccatgctcgacgtcggcggcagcagtggcggcggcggttcaacgccgggccccggctacacgccccggtcggtgtgctcggcggacgagccgatggatgaagacatggcggccgagtcgtcggccgatgccattcagcaccgcgacttgccgccctcaccccgcggcgagtgcgaccccgaattggcggttcgttggacaaaaaacatgggaattttgggtttttgtgggctattaagtgtgcgagggcttagaaatgacgatgcgtttttttaaaaatcgaatccgactgaaaaaaaaatttttttttttgcttcggcccaaaatgcgacgtgtttttcataatttttcatataggatatacaaaatttttcttagttgcatctgctgcttttgacccaaaatgaataatttgcgggtttttgagtcgattttgatgataatggaaaaatccaatttatttttttcacatcaccgatggtggaatttttctcgatatgaaataactaaaaaattccaaaaattaaaaaaaaaatgggggcaatggccgtggggggcgaataaaacacagccctaatttttagtctaaatttcgaaatttttttgggttcctccaattcaaatcattgcactggtaaaataataattcaaaaagtttcatttcagcaacgcttcgtcgcctttttcgagaagaaggagcgcggtgtggacatgcacgcgagcatcaaacggcgcaaggactacatcaacccggcactgtacgaggcgttgcgcaacgcgtacggcatcgacgagaagggcacctgcttcgcccgcgccgtgtacgacccgaacgcgttcgctgccgacgacttttacgacgcattgg

SEQ ID NO: 47122 - DNA, 4055 bp, Heterodera glycines
atggaccatcatcgcttcgcccctcctatcaaccattcccattcctcgtccaaaaccgcgctttctcctcccatttcatcggcgatcacatcttccgatacagcttctgtagcggcaccgtccttttcatcgctttcaattcgaatccatggcgatcagcaggcgcaacaacaacaactcagacattcttctcatctgttacttttggatgacggccttagggcaatttcaaatattaaaaaggcgaaagtgccaggcaaaaccgcgctgtccatcgcttcgacatttcacgagctgtcagagcttaagcagaacatcgctttgccttctcccaaacctcagccgcactctccgtcagcatcaactgtttcggcattcgctgtctcagaaggaggaagcgatgtttccggtgcgcttttccctccgtcgtcgtccgctactgtccgtgtcgttgagtcggctgctgctgtcatttacccaatttcctcgtcggcacattcgtttcagtcatcgacggaattgaataataaattgcgacaacttgacaatgccgcgcaaattgccgagtcggccaaacataggccaaagtgttccccgacggtattgcccgggggagtgttgtccacaacttacagaaaaaagtccaacgaacgcattgtgcacccgggaggacccggcgaggaacgtgcgtatttcatgggaaagcacagaattaccccataaatgattagcaatgggtgtgcttatttatcagtaaaattgccctttgggattctcccgttttttattattaaaatccgattttttttgtgcattttttagtttcaattctgttggttttttccacttaaattcatcttcctaacaataagtgcatatgtaaatagttttaaatatttagcgcaaattgaagtgatcccatgcaaagtttgcggcgacaaatcctccggcgtccattacggcgtcatcacttgcgaaggatgcaaagtgcggaactttatttaaattggcataatattcccttactttgaatgacctcatcaatattaattgtctcttcattactgatttgtcaacttttcagggctttttccgtcgttctcaaaatgccccggtgaattaccaatgcgcgcggcaaaagtgctgcacggtggacagagtcagtcgcaaccgatgtcagttctgtcggcttaaaaaatgtttggagttgggaatgagccgggaggcggtcaaattcggccgaatgtccaaaaaacagcgggaaaaggtcgaagatgaggtgagtgagtgataagcgaacgatagctttaaagatttgtcgcattcgtggcaatgatttccattcatttgcttttacattggtaaattttcatcccaaatggtttaggtccgtctccataaacagcgaaacggcgaattctgtgctctgtccacgttgccggccggttcttccgtcattgccccgcccggtgcttttcctccccaacagtcccacccaaatttgtccgctcctccgtctgtcggaccgagtacacccgttggttcatcttccgccagttcggctggttgcagggatttcaaagtgagtgatcattttcaaattcatattgcaacattcctttgctttgcttattttcatgttttattttagcaggaatttaaatattcgccgccctcaaacaatgcgcagaatgtttcctccgcttctttgcctctgccgttgtattacggccatcccccgggcacccatccccaccacgcccaccaccaactgcaacaacatcaacaacaacagttggtccatcagtccaacgcgtaccacgaggaggaaatgccctctttccacacaatggacggtcagtgcgaaaatggcgtccttttggccttatttttgccactgtccaggccaatccagctcctccgccatgccactgctctaccaacagcagccccatcatgcgttggcgcccatttcgtattcgccaaatgcggcagtgttttcccagtccggtgccatccatcactccgctgccgtaccatcgagcaggtcagcgcgtcggcatttttttaatcttttgctatcatttgcatatttttcgtctgattaagtggggggtatccggtgactgctgattcgtcgattgcttccgctccgttgaacaaccaaagtttggtctcctcaactgtggacgacgatctgatcaaacgcgtggacttcgcctacgagcaggcgtattccgcctatttgaaccaccatttgccgattgatgacgaccctttcggcacaatggtcgacccgcaacagttggaccggctgatgaacatggtcagttggtccgtttggccgtttttctattttcatttttgtttgtcttttgccaattcgtattttttgtcatttttgaatttgcatgcgattcgatttgtttgatttgtgttgttttgcttgtggtggtggggggtgattttggcggcggttttcgctgtttgagggcggcgttggtgataaccatcattcaaaggtgcgctttggatgggcccagagtgagtgagttccagtgcgtgacagagcccttttggcagtgggagatcagacagcgcgaagggataaatgcgttttgggaaggggaattgtcgcgccaccctccgactgttggtgtccttgggcggcaattttggagagatttcgatgagttgagctggagaggcgaagcgggggatgtagggggggggggtgagttcgatcttgtggggatgcgtttatgtgatgaatggaggcgggcgaagggtgcggttggaaaggcgccttctcttaggggggggggggggggtcttatcgtttacagagggaaaggcaactgcaagcaaagattctttttcaaaacatattgtagtccaaatgactaaattctgcaggagcaactctttccccccccccttgccattttccccgaaaaattaaaaaaaaattcaagaaaagcgctttttcaaaatttatgataaattactaaattttttcaagttccaaaagatcgctgcattgtttttctattttttttatttttcagaaccgtgccgatgggtggctgaagttcgccaatgagttgaccaatgttaccaaatgtatcatcgaattcgccaaaatggtcaaagagtttctggagttggagcaggaccacaaaatacacgcattgaaaaagacaacgttcgacttggcaatcattgcaatggcacaagtggggaaagggggaaattgcgtaaaaaattaaatgaaacgggacggaaattcagcactatcatcagcaaagtcaaacattgcatgtgaacaatttggtgctgcccgtgtaccaatttcgctgttcggacagaaaggacgaggaatttggcaaagaggtgggaaaagcgactcgcaaatgttcaaatgttgttgtccatgggtcaatggcagttttcgaacaatgggcaacacacacaatttttaaatttcaattaaaaccattctaaaaaacaacaatgtattttttttcgaaaaagctaaaatttatatgatttttcaaccttctggagaaaaaatccatccctaattttttggaaaaattctagattttaattgaaattattaaaaaaacaaactatacgaattggcatttttacaaacacaccgttgtccaatatgccatttgtttctttggcgtttgtccttccctttttgtcatcccatttatttttttcctccttttcagcttatcagtcggcttcagtacctcagctcattccaattgacttccactgaaaccgcccttttgtccgcctttgtgctgatggaccaatcccaggcgcccggcatggaagcgtttgtgggacagttgaagagctgtttggggggtcagttgcaccagcggatgccggacggggacgaggcattgcgccaactgctcgagttccttccgcgcctgcgggaattggcaaaaacgcatcgcaaatgtttgggacgcttccgattacaaatggtggaccagcaaagcgaacaccaaacggacagaggcgccgcggag

SEQ ID NO: 47123 - DNA, 539 bp, Heterodera glycines
  unsure (1)..(539): unsure at all n locations
cgaagaanattatttgcggaccttcgctccgattatcccgcattgattgggcagaatttcgatgtgaaatttgtgcgcgacttgacgacaggtgggccatttgaggagaacgaattgccaaaacaaaaccacggaagggtatttttgcaggttatgacaacgctcaaccggatgacagggccattctgccgctgagcacctcctccgaaatggtgacgttcactttggtcgacggaagtgcggtgacactgcgggcgagcggaacggagccgaaagtgaaatattacatcgaactgcgcaccgaaccgggcaaagaagaaaagtgaggcggacggagagaaagccgaaacagtgccaatttagaagagagcggaaaaaacaataaacggaagaagaaagggcaattagctaattaaccaacgcacttgttatgccaattaagggatctgagttcggtgcttgagcagctcgaccaattggaatccgacgtggtggacactctcctccagccgaccaaatacggactgatcagtcgaatt

SEQ ID NO: 47124 - DNA, 3343 bp, Heterodera glycines
atgggcatgaaggaaggcgagcacaagaagaaaattgtcaagtccatgggcatcctgggctctcaaagtattcaatggcaaaggaaagattcaaaacggacttgcgaatggttggacttttggaaattggtggtgagttgggtagtcgggttttcgaacaaattttaattatctcataacgccggggtttttttggagggcaaatacagcaaagacctgaagatggaaggagtgatggaaaatctccaccggggtcggccacttcaacgcacagcccgccttttatctgatgtgggccgaacatggggccgcactgtacaaccgagccaactttgacaagatcttggccatgtgtgaaagcaattgcaatgtcaatgcttttgaatgcgtggaattgttcaggttgcaatttcgaacatttacatttattacttgctcctaattttgtttagaccgctgagcagcaagtactttggcgaatcttccgacgagactgacacagtggcactgatcaaagtgatcgcggatcgtccggaggatgtgcgcaggactctgacaatgttcccggctaaactacaggagcagcaacaacaccaccatttgcatgtcagtcctcgggacgaattgccccaagagcagcagcagccaaaccctttgcccacctgccgcgaagagtttcctcaggagcagcagcagcctttgcccgtctgtcgggaggagttttccatcttccgcgacccggccaaatccatggtccatctcctcataatgctgccctttcatcggctccccaatgttcagatttgttgcgaccttgacgacgtcactctcgctggtgcgcatggaaaatttgctcccacagttttcacttcgacgcctcgtcgttcagtggctttttgcgccttcgaaccgccaatgatggaaatggacaacgatgggctgatggggcctgcaccgtccgaagacagagaggaacgggttggcggattgtttgcaccggtacccgagacgggcgtgtccaaattgcagcgtcggcttagtctggttgggtggatgttccaattgtttaatgcgtttttccctttcgtccaggtgggcgattttccgacacacgcagaaaagggctcacaatcggcgaagaaaaataccggagtcagttcaatggggttactgtaaatccgatggtcgttggctgtttttctgatttgaatagagcataaataaatatatagcgtatcactttttctgcctatttatcccttaattatggggtgggcggtggtccgtcagcataggcttatttccgtattaattatttcctatgccatttcaggggaagaaaatgactacgaatgacattgtgaaggcgttgccgaatttgaagatcggctcgaccattatggaggagacggaagaagacgaaaaggaaaattctttcgcttcgccccaccggaaaaaggcgcgccagggaacgaatgcttcgcatccgccttcacttgttcactcatcaaaacagacatcgcaactgaatgacgtttctcacaaccagccaaaggccgtttcggcagaaacgccgacagaagagggacagcccgaccccgacaccacccatttgggcattgtgtgagacataccttttcatactattgtttgatttttggaattggaaaagataaatttgaaccaattgtgtaaattaccatttagcgaacaaatcaaaactgggactgagaacccatgggacgaagaaaagcgcaatcagattctccaaaccgcacatgtgatggtcgaaagtcacgcatttatggtaactcaaatggtccccatttaaagctttatttttcttcgattttattagacggaaaagtgtcctcgtttcgagttgaaccgaacaatccatttgggaggtgaatcattctcgattgaagacctgttgggccaaggcggatttgcgcgtgtttacagggccaattcacgtgaagatggttgcacttatgccatcaaggtgaattggatttttagtgtatataggatggacataaggacaaatataattttaaatccgtacggaaataccggtcttaaaaaaaattcaaattcgttttaatttctcatgcaaattactcctccatttcagtacgaatccccggcttgcccatgggaagtgtacatttgtagcgcactcaaaagacgcattccatcccaattcgctgcttatctaatggaagtgagagacgcgtacattttcaaaaatgccagtgccattgtttacgaatatttcccaaaagggacacttttggtagggtgaaaggcattcggatgacctgatgagaattttcaggatcttaccaatgtctacaaaaagaacggaacggtggtgggcggtcttcttgctacttttttcggcattcatttggcacgtgcgctgcgccaagtccacgagacggccaacataattcacgcggatgtcaagccggacaacgtcatgctgttgacggcgtatgtttcggattgaaaattgtgattcatttctctcttggccccattaaatgtcccattttggcacatttattcgattttagtcaaatacagtgcacctatttttacagtgccttgaatgcacatgattcgctggacaatttgctcaaaacccccgtgctgaagctaatcgactgggggcgatccatcgacatgaaccatttccaaggagtcgaatttcacggaaaagcgggcaccgaaaatttcgattgtgtcgaaatgaaggtggttaacatcatgaatttaaaaaaccgccttacttatagacgggcatgccatggactttccagactgatttctacggtttctgtgccacaatgtacgtgatgatgaatggcgaatatctggtgaccttcaaatactcacaaacggacaaagttgttcccgtgaagcagctgaagaggtgaggttgccattttacaacttgattttcggtgcttttctttaatcaattgttccttccgattctttttccccctaatttttccactttgaggcgcatggctctgtacgacgtgtggacgcagttgttcgatcagttcctgaacattcccaactgcaaacagctgccaaaatggttaaatacattggaccaaatggaaagccgactggccgaggctgtgaaaacggagcctttggagtggaaaagagcgatcgaacggttcaacgaattcgtcaaacaacgggggtgaaagaaaagggacaagacattggatcggacttttgtgcaaatgatataacctatcccaaaatgcttttctgcttcatttataaaaataactgtccaccccacatcaataaatga

SEQ ID NO: 47125 - DNA, 1563 bp, Heterodera glycines
atgtgcattgaattggagaattttatgtgccataacaaactcagggtaagaagaattagcaaaagaaaagataaaacaaaatcagcacgcttttcccccattcagctgaattttgacgtggacagcaacaactgtttctacattattggcccaaatggaagtggcaaaagtgcgttgtttgccggacttaacattggccttggcggcaccgggcgctccaatgaacggggtaaaacgttgcacagttacatcaaagacgggaagaggtcggttattatttgaattccaacaattttgtggttttaaattattattttgtttcaccggcatttagtttatttaatttgagctgtttttagcgatgctcatatacgtatttatctgtctaatgaggggccttttgcctgtgccaactttgacgaagtggtcgtggtcgaacgccacatcaccgagaaggcgactaattttacgctgaagacgagtgccaaattcggcggtcgggaacgcgttgtcagcaggaaaagggccgagttggacgcattgctcgaacagttcggcattgagttggacaatccgttggcctggctttcccaggacagatccagacaatttctgcaacaaatgaaaccggaaaagttgtaccaggtacttttcaaatatcttaccataaaaatgctcagcattttgtcaaaagtcggtccttcggattagtcaaatcccggactctaaaagcaatgcaatattcgaatttctcctaaaattgtaatcaagtttatacaaaaacaccattctttttcctttgatcattttagctgtacaggaaaaccgccgagatggacagcaccgatttgatgttccaaagcattgaagcgcattttgacgaattttgcagagtttttgattcgctcgctgcagaaaaaaaagcgcgtgaggagtgagtgacggactgatcaaattaacaattcatgatcactttaaaaattgaaatttgccagaaattatattcaaatgaaaaaccggcacaaagcgtcgcgagagatcaaagacaaaaaagtggagcgacaacgccttttgtggtacaacttttgggccccaattcgggacaatatcaccgtgagcagagacttacaaaattaaaaacccattaaacgcccttttcaaattttcagagagtgaatgggaatcgtgccgaagttggaacactttcaacggaaaaggtcgaccttttggaacagattcagcaacacatggtaaaacatttacaagtttttttcaaccttaataaaagtcaccaaaaactgcaaaaaaaaaattcgttgaaattaaggcccaaaaggacaaactgatccaaaagcaacagagccttttgccacaaaaggaggaggaagtgaagaagtgcaaacaacaacatgagaaaatcatggaaatgaagaggaaagtgcgtgaattggagtttgaaatcaccgatttgaaacgcgaccttcataagagaacacaccaaaagatggcatttgacaaggacattggggaggcgaacgcgaaattggcagccattattggcga

SEQ ID NO: 47126 - DNA, 666 bp, Heterodera glycines
atgaaaactcgtctcatttgccagcggtccgaacgtcgaaaatggatacactgttttgaaaatgtgacgtccattatgttcctggtcgccttgtccgagtatgaccaagtgttggtggagtgtgataatgaggttggtggttcttcgtgcctagcattatacatttttattttataaaaagcgtattttcagaaccggatggaagagtccaaagcgttattccgcaccatcatcacctacccatggttccaaaactcttcggtgattcttttcctcaacaaaaaggacctgttggcggaaaagattctctactcgcatttggccgattacttccccgaatatgacggttcgttgtgccgtgtgccttgttttcacattgcattttcccacttcttcttaggcccgcctcgagacgagatcaccgcgcgagagttcatcctcaaaatgttcgtggacttgaacccggacgcggaaaagataatttattcgcatttcacttgtgccacaggtgggcttttacatcagtaattctccaccggcttcccctgatcgactcgtgaatgaattgtgcccttttgttcagacacggagaacattcgcttcgtattcgcagcagtcaaggacacaattctgcagcacaatctgagagagtataatctcgtgtga

SEQ ID NO: 47127 - DNA, 1692 bp, Heterodera glycines
caacgcgttgagtccgcaaagcgtcgcgttgtgctgtccgccctctatttgggcaccgacgcgttggagcagcgattggtccatcggttggcggtcgcggcaaaaactgtggcgaccaaacgccccgtcaaagttcgcattttgctcgactttttccgtgccacacgcggcgcaaccgccgacggcaaatcgtccacgacaatgctggcaccgctgtgcatctacgacaatgtggaggtgtgtaaattttcatttgctaccctcccccccccccttttcctttttttgaaaaatttgctgaattttttttgaacgctccgcataaaagtagagtgaaaagcaaaaaatataaacgaccaccaaggaccagggggttcactacatttcaccctgttacccgacatttgcgcctatgacccaaaaacgggttcaaacttaagtttttttcaatccctaatggaataaactgctttaaatactatcagcagaaggggttgaaaaaatgtgagttttttttggttttaatcaaaaattcctcaatgcttttagcattcattagtttttatgccttaactccgcgaattttcaagttttgctctaacaaaattgcttcttttttgtattgacattcagtgcattctttggggatgatagttgcgtttttgggctacgaaattgcatcaaaaaaagttgaaaaatttcataaaatttcaaaacgctcacatttttatcgttggaaattattttttcgacatttctcaggtccgtctctttcatacgcccaaattgcgcggcctcctcaaaagtgcgttgcccgaacggaccaacgaaattgtggggttacagcacatgaaattcttcgtcttcgacaactctgtgctcatcaccgggttcgtttttgccctatttttgggttgtgttatattttttacaccccctaaaaagaaaagttaaaaatcaaagattttattccaaatttctgacggcaaattcggaaatggcacctccgagtttcctaaagtttagttttggtttaaaaaattaatttcataaattttttgttttcaagtttttctgtggtttacgaggttttttcgagtccaacgggaaaacacaagggaaaatttaaaatttttgaggccccataactttttagttttactttacacctcgctataaaaaattcaaagtcgaaatcgacctgcgctatccagtaatacatatgtattctccaacttataattcgggtggtttttttgttggtcttaaattcgaaaaaaaattagaaaagaattttccgaaaaatgggtgaccaaaaaatagtcccgacccattaggctttcgaatgacaccacgtatggcaagaaaagtctgaaaatttcaaagacaatatttatgaaacgacctaacgctttggttttttgaaaatttgccaaaattcctctctcttttttttgattttccatcgaatttttccaaaatctccccattgttttttcagtgccaatttgtccgaccaatactttgtcaaccgtcgtgatcgctatttgctgatcgaagactgtccattgttggccgacttcttcgtcgacctgttccacctcgtcggagacaattccttccgtcttttggcggacggacgcgtcgaattcaccgccggcggaacgctttcgccgatacacccggagacag

SEQ ID NO: 47128 - DNA, 1007 bp, Heterodera glycines
atggtcgattttgacaaaaatgctgcccagcgcgaggcggagtcgctgcgcacattggcattcttcggcgtttgcctgtcaaccgtggccacggtgatcgctgtgctgtccgtgccgttcgcctaccagcacttccagcagattggcgcccaaatgcaaaacgatgtggacttctgcaaaatgcgctccggcaacatgtggcgcgaggtaaaatcaacgaaggcgaagggcggaaagacccggaaaatttcaaacaaaaaattctaaaaacttaggtcacccgcacccaggcctactccaaggtgacgcacgacagccgtcacaagcgtcaagtgggcggctgctgtggttgcggagtgtcgccgccgggcctgcccggtccccctggcccacagggacagcccggcggggatggccaacccggaggctcaggacaacccggtgcaccaggtccacaaagggtttacttggaatttcatgaaaccgtaaattcttctctaggccaggcagcgcctcgcccgtacccgcccagtggcggatgcgtgccgcaatgtgatgctgcccagcccggactccccggtccgcctggaccccctggtcccgagggacagcctggccaacctggacagtcggcaccgcccgcatcgcctggccgccccggacaacctgtcagcatttcctgaataatttatgcatgcttttgtaaatcccccgctgtttttagggacctcctggacccgacggacagcccggaaatcccggcgagtccgggcaactcggtcagcccggcaaactcagccagggtccgcccgtcgtcggaccgcctggcccacaaggaccccctggccagcctggacagcccggcgagaatggacagcccggccagcctggcggcccgggccctcaaggataccctggcgacggcggaaaccccggcgcacccggcaacccgggaggcgttggcgagcccggacagctcggagcacagggagccagtggccaatgct

SEQ ID NO: 47129 - DNA, 787 bp, Heterodera glycines
cgttgctgctgctgctgctgctgctgttgttgatgttgctgctgttgcttgttggccccggtgttcggatgttccgtctccaaatgccgttccaacttttggtaggaggtgcaacggtatgagcacacatcacagcttcaaaaaaaaccacaggaatgattagagtgtcgttttatttttatttttatcaacgaatgatgcatttaatttgcttgcccattcgtcgagcgccacccctcggtttttccaaaaaaaataaataatattttttttttggaaattccgtttctaacattcaaaaaaaaaaaattttttgttatttatgtgaattaattttcaaccattttgtttgaacaacacacgccaaccaacctgtacattatttctgctgagcaaagcttaaaaaaggaagaaaatgtatttggaaagccaatttactaaaagcaattaaataaattaaattatttgcaattataaacatgtaattagcatactttaatctggtgatcggagaccaaatgttgcaaaatgttgaaggcgtactgcttgctgcacagcttacaccgtcccgagtccgccttgcgctgcgcttttgccaacaaatcggcagtgacgagcccatggaccatgaccaaatgccgttccaaacctaataatgtgtagatgatgtacaattgtaatcaagggagtaggacatgatggacaattatagatttaaatcgcggagcaagtcgtttaccgccctattttttttaaatttttaaaacagaaaattgaaagaaaagga

SEQ ID NO: 47130 - DNA, 1221 bp, Heterodera glycines
tgccattaaaaaattgtaattcattttagctaaaggcaacatccgccgccgccgccgctgcgcactcggccgccaccgccgttggtggtggtgctgctgctccgaccagccacccgcaccaacaccaacaccattatgtgtgcgaaatttgcgacttggcacagttgaccgaccgcgagcagtaccgggtgcatttgcagtccgcacatcgtcaactgttggggaagaacaacgcggaaatggccagcggtgcaccgttggcgtgctcacgctgcagagaccgtttctggacatacgaaggtgctgctgctgaaggatgaacttctttttctccctgtcgcttctccccaaaaattaaaaaataataaaaaatttagcgctttagaaaaattttttttggaaaaatgctggaaattttaaaaaaatccttttctttcaattttctgttttaaaaatttaaaaaaaatagggcggtaaacgacttgctccgcgatttaaatctataattgtccatcatgtcctactcccttgattacaattgtacatcatctacacattattaggtttggaacggcatttggtcatggtccatgggctcgtcactgccgatttgttggcaaaagcgcagcgcaaggcggactcgggacggtgtaagctgtgcagcaagcagtacgccttcaacattttgcaacatttggtctccgatcaccagattaaagtatgctaattacatgtttataattgcaaataatttaatttatttaattgcttttagtaaattggctttccaaatacattttcttccttttttaagctttgctcagcagaaataatgtacaggttggttggcgtgtgttgttcaaacaaaatggttgaaaattaattcacataaataacaaaaaattttttttttttgaatgttagaaacggaatttccaaaaaaaaaatattatttattttttttggaaaaaccgaggggtggcgctcgacgaatgggcaagcaaattaaatgcatcattcgttgataaaaataaaaataaaacgacactctaatcattcctgtggttttttttgaagctgtgatgtgtgctcataccgttgcacctcctaccaaaagttggaacggcatttggagacggaacatccgaacaccggggccaacaagcaacagcagcaacatcaacaacagcagcagcagcagcagcagcaacgctaggaaaa

SEQ ID NO: 47131 - DNA, 721 bp, Heterodera glycines
atgttgcgcattgctgacccgtacattgcgtggggctacccgagtcagaagatcattcgccagttggtgtacaagcgtggttatgccaaggagagtgggcagcgcattccgatcacggacaatgccattgttgagcgaaacatgggcaaatcggacgtgatctgtgtggaggacatgattcaccaggtgaacaaacaactatgggtttttttcactgtttttttttgtttgaaaaagttttttataaaaaatttcatggggagcggggcggggaatgaatcgcaccaatataccaaatttgaaatttctttaatagcccgggcggttgtgtatcaattgtgaaacactgtttgatgcatgtctcgtgtcttttagttcaaatgttttgtctcggttcagatttggacagtcgggccccacttcaagcaagtgaccaactttttgtggcccttcaaactcagcaaccccgtgggcgggttcaagaagaagtccaaccattttgtggagggaggcgactacggaaaccgcgaggaccaaatcaacaaattgcttgaaaaaatgatctaatttcggaaacaattgcgatgagttgatgtgcagcggacggcacgcttttgttgttgttattttacagataaactttttttgtttgttgtgtttgaatattttacttcgagtcgaaggagaaatataaaaagaaaaatgcatttatttcaataaa

SEQ ID NO: 47132 - DNA, 768 bp, Heterodera glycines
gatctcattctcgaataaaaaagtttgctctggcgtcccccagggctctgtcctgggccctttattatttttgatctatattaacgatcttcctgatgctttgccatcaggagtgagaattaaattatatgctgatgatgttaaattgtatatttgttataaagcgagagctgacacagaaattatgcataaagcattgcataatttatcagaatgggcaaataaatggcaaatcagaatctcaattaaaaaaacttttgtacttcatttagggaacaaaaaccccaaagaaatatataaaattgatggaaatataataaatgttgtggatacaattagggatttaggcataaatattgataataaattgcaattttccaatcatgtcgcacaaataataaagaatgcatatttacgtatgcgttctttatttcgggttattaaatcaaaatcttctaggatttggattattttgtacaaaacttatgttagaccgttattggaatatgctcctgaggtttggaatccatctcttctaaaaaatattaaaaaaattgaaaaatgtcaaaaatatttcaccaaaagagttcttttcaaatgcagccttccacccattccataccaacaaagattagaataccttcaactgccgacacttgaaagcaggcgaaagctgtctgatctgttcatggctcataaaataatttatggccgaacagatctgaatcccaatgaaatattcaaaccttctgaacgctttaacattcc

SEQ ID NO: 47133 - DNA, 1103 bp, Heterodera glycines
atggcagaagctccgagaccattccccgacaatttgatccaaaaaattgtacggtcgaaacaaatggagtttccgaaagaggtgaaaaagcgagttttgcattgtcaatttcatccctttttgcaggtttccagcggagaaattcaacaactgtgcgctgccgcaactgacgccttcaaacgccaaccatcgctggtcgaaatccttccgcctgttatggtctgcggcgacgtccacggccaatttcctgacttgatgagaatcttcaactgcctcgggaccccgccggagaagaaatacctgttcctgggcgactacgtggaccgtggtgcgcaatccgtggagaccatcatgctgctgctttgctacaaggtgtggtttggctttttcagccaatactaaagaaacgtttccatttttaggtcaaatatccgacatcgattgtgctgctgagagggaaccacgagacgagcaacatcaacgcaacgtgggttttttttctcacacttattcatatttaaattttcccccctctttttttaggtacggcttcaaaaaggaactggaggaacgctatccggcccattcgcaagccctgttcgacagcttcaatgacaccttcgcgtggatgccgctgaccgggctaatcggccaaaaaatattatgtgagatgctcttttttttgttcattctccacctttcaattttcaggcatgcatggaggcatcagcgagaaaattcgaagcattgaacagctcaaacaattggaacgcccgatgctgctaccgccgaccgatagtctgcacattgaccttatgtgggccgacccgatggaagcgcaaggacaactaccgaatccacgaggcgcaggtgtcctgttcggcgaagatgtggttatcagaacttgccagctgctgaagatttcgtgcatcatccgagcgcaccaagtgagtttaagcggccttcgttttaatcagaaattaatgtttccccatttgcagttcatccaatccggatttgagccaatgttcaaccaacgactcatcaccgttttctctgcacccgcctacacaggccaaacaaacacgggcgcggtactggaa

SEQ ID NO: 47134 - DNA, 965 bp, Heterodera glycines
ggtggtgggggtaacagacgtcatcaatacaatgttttctgcactttctattttagatttttactattttttcaaattttcaaaatgaccgactccatgttcaagtatgaccagcgggagcagcgaatgatacgcaatgttaagcaatgggagcaggacccgcactatttcaaggttttactgcgggttttcatttttatggggcggcactccgacattcaatgcctttggaaaactacaaaatgtttagtgactttttaaggcatttgtgtacaattgtggttttcacattttccaaaaaatttttaaaagaggggcctaccaacggaggaattattaccaattttttaaaattttttggggtcaatttacgatttctgtcattttacgctcaatttgttcaaattttaggaagtctaaatttcggccttgatcctgctcaaaatggtgatgcacggcgcagcggcgggaacatcgaaattatgggtctgatgaactgccgggtggacgccaacacaatcattgtgctggacgcttttgcgctgccggttaaaggtttctttagaggaatggaaaatggaaattttttaagcaattgttaagcttctgaatctcttttttaaaaaattggagttttaaaaggtcgttgattgcggggttttttggtaactgaacaaagtgtaatagttttttcacaaattttctaacaaattccgtatggtttgtgggttgaatatcactaacccttgaccctttttactctattttaaagcccggaaaaaattacaaacaaatacaaattattttttgaaaaaaaaaattagattttttgtctaatgttcaaatttttggcacaggtgttcagctggtaccacctccatccgggctacgccttgtggctgagcggcattgacgtgaacacgcagtccatcaaccagcaattccaggttaggagctcacacaca

SEQ ID NO: 47135 - DNA, 882 bp, Heterodera glycines
atggcgaacattttcgaattttacgggcttttacttcccatttcagcgactgatccgaactacgggaccctcaagaacttggacgccgacatcttcacgaagaatgcgccagcaaaaccggcagcggcaccaaaggcgggaccggcgccacatggaggcggcggacaggcactgacaccaagtgaaaaaaatggcgaacattttcgaattttacgggcttttacttcccatttcagcgactgatccgaactacgggaccctcaagaacttggacgccgacatcttcacgaagaacgcgccagcaaaaccggcagcggcaccaaaggcgggaccggcgccacatggaggcggcggacaggcactgacaccaagtgaaaaaaatggcgaacattttcaaattttacgggcttttccttcccatttcagcgactgatccgaactacgggaccctcaagaacttggacgccgacatcttcacgaagaacgcgccagcaaaaccggcagcggcaccaaaggcgggaccggcgccacatggaggaggcggacaggcactgacaccaagtgaaaaaaatggcgaaaatttcaaattttaattcctttttaatccccttttcagcgaccgatccgaactacgggacgcttcagaacttggacgcggaaatttttgtgaagaagtagtgccatcgacagcgttcaccccggcaaggcgtaccgatgtgtgatattatgaggaaattggattgattgatgttaaatgtttgcctgtattaattattgtaatctgttgttgccgtatattcgctgttgtacatatgtatgtatattgtgttgtacacactgtaagttctcatcatactgtaaatttcaccgccgaaaaataaa

SEQ ID NO: 47136 - DNA, 1530 bp, Heterodera glycines
cccaaagccggagcagcggtgccaacgccacaaacatcggcagtgggcggaccaccgggagcagcggaagcgccctcgtcagtgaaatcgtcagagaaaagcggcggctcaaaaaaaggtggacgaacgaacgactttttaaataaacaaatttgccggctttaaggaccagcaccgaagaaaggcgccgctgcaaaaaaaggtggcacaaaacgcgaacaattttgggattcaagaagaatgctaattgtttttcaggacctccggcagccgccgctaagaagccgtcgcccaaaggaaaagcgccgccaccgcagaagaaatcgggcaaagggtcggcgaaggggccaatgcctcccgcagcatcgaaggaactcgtcccacgtaaacaaatgaatccgaaatggcttagacaaatgattcattgctttttccccccatttcagaatccgagccgaactacggaacgcttgtcggtttggacaaggaaattttcgcgaaggaacagcaggcgaaaggtgggggtcggaaacgaacgaacggcacggcgcaatcgcaaatccattgaaattcccccatttcaggaggcatgccaccgccaccgatgggagccccacagccgcaacagcaggcgcccggaccggcaatgactccaagtgaaatgaaaaagctgaaatcttcaattaattgccttttccccccatttcagcgactgatccgaactacgggaccctcaagaacttggacgccgacatcttcacgaagaacgcgccagcaaaaccggcagcggcaccaaaggcgggaccggcgccacatggaggcggcggacaggcactgacaccaagtgaaaaaaatggcgaacattttcgaattttacgggcttttacttcccatttcagcgactgatccgaactacgggaccctcaagaacttggacgccgacatcttcacgaagaatgcgccagcaaaaccggcagcggcaccaaaggcgggaccggcgccacatggaggcggcggacaggcactgacaccaagtgaaaaaaatggcgaacattttcgaattttacgggcttttacttcccatttcagcgactgatccgaactacgggaccctcaagaacttggacgccgacatcttcacgaagaacgcgccagcaaaaccggcagcggcaccaaaggcgggaccggcgccacatggaggcggcggacaggcactgacaccaagtgaaaaaaatggcgaactttttcgaattttacgggcttttacttcccatttcagcgactgatccgaactacgggaccctcaagaacttggacgccgacatcttcacgaagaatgcgccagcaaaaccggcagcggcaccaaaggcgggaccggcgccacatggaggaggcggacaggcactgacaccaagtgaaaaaatggcgaaaatttcaaattttaattcctttttaatccccttttcagcgaccgatccgaactacgggacgcttcagaacttggacgcggaaatttttgtgaagaagtag

SEQ ID NO: 47137 - DNA, 1378 bp, Heterodera glycines
atgacttgtgcgaagcgcatcagtcagcagagtgcgctagcgttcaacagtgcgctcaacatttttgcggtaccacccaccaacgtgtcggtggcgcgctccttttttcgcgaactccttccattgtcaacgatcagccaagagggaccgtacctattccgcatgtacaatgatagcctgtgggccgacctgtcccgtgtgtacctgtacctcgaactgtccgttgagaaggcaaatgcgcagggcatcatggagccaattgacagtgtggtggacaaggaagtcggcgtatgccagagcatcgggcaaacatttgtacaacaactaaaggtgggtaacagcagaagccctcgcagacgcacccatcagtattcaggttgaagtgcaaaacatggagctgtacgacagcgggacactgtacccgttcaaagcgtacatctccaacgagctgtcatttcccgcaaatgcaaagagccatttcatggcttccaacggctactacgtaagccggacacacgatgacgcaaatgatgatgggttcaagaaacggtgtgcacgattttcgggcggttgtaaggcggagtttatctcgcgcctcgactttgacttgggcaaccaagaactgtacctgctcaacaacatggacgtcctgttcaccatctaccgttccaaggacgcattcctggtccacagtctgggcgccggggctgccggcacttcgtacgcactccgagtgcacgacatcaaactgtacgtgaaggtcatcgaggtgcagccgtcgctcaacatctccatctacaagaccctcgaaaaacagccggccacctatgctgtacgacgcacggaggtcaaatcctgctttctgaccgctggccgcacggaaatggaccacaacatattctcggcagccatcccacgccgactcaccatcgcccttgtggcgaaccgagccttcaacggcgcctacgcccacacaccgttcaacttccgtccatacgacatacgtgcaatcagtgtacatgctggtggaaacacgtatcccgccatccctcaccgtatgaacttcgtcggagctgcctacgtacgcccgtttgtcgacatgtacgaggcgttgggcatggcaaactcggaacgctccatggacatcacgctggagcagttccgagacggatggaccttctttgtcgtaccgatgacctcgacgctggacgacagctgtggctttgaactgctccgctcgggcaccacaagtgtacgccttcagttcaacagagagataccgcagggcggcgttgaaatgatttgtcttggcgaattcgatcaactaatcatgattgattacaaccgtcatattgtgaccgattcaaaaattgcataa

SEQ ID NO: 47138 - DNA, 1607 bp, Heterodera glycines
tcgcatttcacaattctttcaaatcccttcaattgtcaattattccatcagtgcttttgatgcaaaagtcagcaaatttagcattataagaaaggtttcacgatgtttaggcaattatccgcaaattgttggttgaggcggtcgaaaagaggctaatgggcaatcgccaatttggctttatgctctccggggggttggactcgtcgctaatcgccggtaattgtgccatttgtccgcttcttcaacttccgttcccttcagcgttggcaactcgcttcctccactcgaatgacttttgcgcttctccgatcgcattttcagttggctttgaggactctcccgaccttgtgaatgctcgtaaagtggccgagtatttgggcatttgccacagagtgttggtgatcagtgctcgagagtgtgtcgaggctatccccggtccgctttttgctctgtccgctttatccccccccttccgttcagaagtcgtcttttccttagagacattcgatccgctcgtcgtgcgctgtggagttgcccattttctgctctgtaagcacatcgccgccagcagtgaagtgaaagtgcttctctcaggtacgcttaactctcccaaagttcgcttcatcgcttttccaggcgaaggggcggacgaactgttcggctcttacgcttacatgcagcgggcgccgtccgcgccccttctccagcgtgagatcgtccgtcgtctccgactgctccaccaatacgacgtccttcgctgtgatcggtgcttcgtttgttccgctttccctttgctaatttgtcattcagttgcacttcctgccatgggcttgaaattcgggtccctttcctcgacaaaaaattcgtttcttttgttgcccaacttccgccaaggtttttccatcaatttgtccttcatttgcccttaaatttcagtttcaagctcatcccgggcaaaactgagaagtttcttctgcgcaatgcctttcaaaaccttttgccgggggaagtgctttggagaagcaaagaaggctttagtgaagcattggggaaggtgttaatgctatccgaagagtcccgtgctgtttaaccgatgtttcttcaggttgatcttggcgaacttctgggaaagcacgcagaaggactcattggggtaaaagttaaccgttcaaatcatttggccatttccgcttttgggacacaaacttcgcaaatcggacaatgcttttcccactccaaacaccgcaaacgaaggaggagttttggtatcggatgatatttgagcagagattcaatttacggaagctgaacaacgtaattcacaccaaagtgtacaggtgaagaacaaattgagcataaaaagagaaattgaaacaattgaaacgtttagaacggccgcttggcaaattggcgccggtagtttggactcatctttgagcacatcggacgaagaacggacatcgacggaagacaacggaagtggagacgaaagcaaagaaaaccaccgcccattgggagaggaaagaagggaaagggaggaaaagcaagagcgaaagggggaagagaaaaggatcagacggaggtcgacgggaagtgccaaattggcg

SEQ ID NO: 47139 - DNA, 1474 bp, Heterodera glycines
atttgttacagattttcaacaaaaaaaggttggtttttgggattagtaggctcaatttgtatggattttcatttaaaaaatgataaaatatgtgttgattaaaactatgagtaatcatattttctctataggaaacccacgagtatacaaaaagaaaattcaaaataatttaatttctgtagagggattgaactaggggaaagaagaagggaaagtcaaggagactagccattaggccatttgcacacttgggcaatgttacttttaaagaatatataacaataaaatttcagaatcccaatttggttttgtaagaaataggtcaacgacaaatcaattaataacagttgtcgaagattggtacgaagcaattattaacggaaaaaatgttgattgtatttatattgactttcaaaaagcatttgattcggtacctcataatttgcttttggataaattgaaaaaaattggtatacagggtaaattattaaattggataaaatcatttttaagtaacagaacttttcgtgttaaaataggggatactctatcctctgttaaaaaagttggctctggcgtcccccagggctctgtcctaggccctcttttattcttaatttatataaatgaccttcctgatgttataccatcaggagtgaatattaaattatatgctgatgatgttaaaatatatatatgctataaagcaagagctgatacagaaattatgcataaaacattgcataatttattcgaatgggcaaataaatggcaaataaaagtttcaattcaaaaaacttttgtattatatttgggttcaaaaaacccaaaagaaacttataaatttgatgggaatacaataaatgctgtggatacaattagggacttaggagtaaacattgataacaaactacaattttccgatcatgtaaatcaaataacaaggaatgcgtatttacgtatgcgttccttgtttagaataattaaatctaaatcttctaaaatttggattacattatataaaacttatattagacctttattggaatacgctccggaagtttggaatccgtctcttcaaaaaaatattaaaaaaattgagaagtgtcaaaaatatttcactaaaagagttttttttaaatgcaaccttccaccaattccataccaaaatcgattagagtaccttcagctgccaacacttgagaataggcgaaacttattcgatctgttcatggcacataaaattgtttatggccgaacagatctgaaacttttctccatttttagaccatcaacacgattcaatattcctttctaccgatttaatacaaaatataaattaggcaaaaaattcattccctttgctgggagggcaaccaaattgtggaatcaactcgataaagagctcattaaaacaaactcttttaacttattcaaaaataaaattaaaaattcttgagtaatgcttatgatt

SEQ ID NO: 47140 - DNA, 653 bp, Heterodera glycines
caattttcacgcagattcgagagtgaccgcagttattccgtggtccctctgttcaatgggtcgcgtattcattcttatttgaaattgatacgtgcagacaagccgattggtcggttcaatttcctagggatcaatcaatttaaaaaatttgcatctgtaatatattaattaccacttcttccaagtttaggtacttggctactctattggccatgtgcctggtcaattgcattcgctgctcctccgggttgtcttccaagtccatattttttggctctcttcggaggcggagcatttttgatgagaagtgccggatgcattcttaacgatctttgggaccaagacatcgataaacgggtaagtagctattcgagcaaccaaattggtataggtttatcatcctatagcttcagcaagtccgtaaccagaaatactcgtaagggatgagaatctgaagccctttttttcttattcgcatcactaaacttaaacaattccaatgaattatcggcattttcattactgaaactcaaatctgacaattctcttcgattttcttcatctggattcaaatctcgtcaattattctgctttttcatcatcggtattcaaaacaatgcattacaattaggcacaagcatatgtgatggagg

SEQ ID NO: 47141 - DNA, 269 bp, Heterodera glycines
atgtcgaagcttcgaaattacacagaggaccaattgcagaatttgttacaggatgagtcaagattgaatgcgatggtggatagtatgccgcaggtgaattagttatgaagtcaacggtcatttaagttcataatttctaggtttcgtctcttcctaatgacaaagagatcaaattggcccagagcaaatccttggccgagtacaatctgtccattgagccacaactgaataaggctcttagtcatttgcgcgaaacgcatgccaatgcc

SEQ ID NO: 47142 - DNA, 2294 bp, Heterodera glycines
atacaaagcaattaattaattacccaaagagagcgatgccgactttgaaacgatagtgcaagaggccgtcgattgggcacacactgtcagtttggtgaacagagtcaaggaccaattggaacggtgagcaaaacaaagcacgggaagagagggaggagagggaggagggaccttttaatttttaaaatttaatcattttttagttaactttcgatttggcttttatgtttttctcggctttgaatattcagtcttttgagttgcaatttgaccatttgcttttcctttttacagaagcgatgtcgttgagattgttcccttcgctttgtttccttcgccttttccgcgccgtctctttgaagaagcaaaagctgttcaaaaagtatttacacaatttaataaatataattaaattgaaaaaagcggaaacatttaagacgttccaattgctttactttcgcgtgtctcagaactacgaatttttgaagagaacgctcggagaggcgggcaaaggcgacgcttacattggccaccttttggacattttggacgacgttcagcagaggggcaacaaacagccgatcagtctgattttgcaacgagcggtcaataattattaattaaaaataaatttaattaattaaaaaggcacctttacctctaagatataataaattccctcaatttttaggattatatgtgccatttgaatgcggaaagcggagaatatgaactgaagcaggcaaacacacaaaaccaaattgtttgttcgaactaattgttgtcttaaggtcgaagtgaatatgggcgcaattggcggaaacgcgcggacggagggcgtcagcaaagtgcacaggcgcgtgttctcgaagttgggactgtccaccgccaatttgccgccgaatgagtcatgcgcaggcgcagcggaagcactggtcaaagcatggtcagtaaaatggacataataataatagagtaattaaacacttaattcattagttattaaaaatcaggaaacaattcaacgaccctttgtccgtcattgtgtttatgagttacacaaaagtgcagagcatttttgaccaacggctcgtacaatacgaaattgaacggatttcgggaaataaaatcgaaattgtgcgccttacattgcaggaatgtggcgaaaagtaaacagacagacatacaaaatagacaaaatgccaaacaaatccaatagactcagttgactgatcagaatttggttgattttttcttcttaagactgattttggacccaaatgattcatcactttcgtacaaagggagaaaagtggcgataatttatcaacgaaattttctgtttgagaaggattggcagacggaaaaggaatgggacattcgacgaaagttggagcgatcaaatgccattgtaagaaaaagtgttaaatggactaaattaataataattcaataaatgccattggcaaatataataaaaataataaaatattcatagggacaaaattgaataaaattgctttcagttgacaacaaatgtccgcatcgatttggctggaacaaaaaaagtccaacaggtcgaatggcacaaaaagaaacagctgtttagcaattagttcagactttggcactgccgggaatgttggagcactttttgcccgaccaaaaagctgaaacaatcgccgccgtccgcaaaactttcgccggtctttggggcctggacaaagacgacaaagaaacccgtgcgataattaaggtggatttctaaaaagattttaaaacaaatacaatttacaggaagccatcgaaaagcccgagagatttgtgctaaaaacgaaccgagacggaggggggaacaatttctgggacgaacaactcgcggacaaattgcgaacgatgacgcggaaggaacgcgggggactcattctgatggagaaattggagatgccccaagtgacggtaaaacaattcaagtgttaaatttaaatatcaaaatcaaatttgatccgcttttcccttcagaattattcaattcgcgcgagggaaaagccgaaaatgtacgccatggtaagtgaaatcattgaattaattggtgacaaaccaattaatggttcttttccatttcaatttagaccagcgaattgggcatcgtcggttactttttgggcaatgccaaaacaatggccaccattgacaatgtgcagcgtggccatatgctgcgctcgaaggcggccgaggcgcgggagggcggcgttgggatcggcattggtctacacgactcgccctatctgttc

SEQ ID NO: 47143 - DNA, 2171 bp, Heterodera glycines
atggaatcgaggaattggcaatctcaagatggtgaagaacacccacacaaaacgcaccagtcagggtgtcgtgcaagcttggacatcgtgacaattacgtccggtgatgcaaacactgacagcgaatgggtcgaagagattgtcgttgaacggcctcccggattggcagcgcattgtccggaagagtcgttgaagcgcatctttcccaatgataagcaagctccacgctatggcatcgaagaaatgatacgcgatgcattccacaaaaaccttatcagcgatgcttacaacacgcggaggatgtcccaggccaggggagtcggccaacccattccaaaggcaccgattggacgtccgaacgcaaatggaccctcctgtttgatgcggcgacctgacgaacacgtcagcgtgtttggagtccaggagattgacagggcgtacaagaacaaagacatggacacagcgtttaaggtttgaaaattggaatctatggaaatgaaagtgccttttaagctatttatcgtcacccgatgcattgatgagtcgaatgagaagaacgttctgttggccgagcaacacattgccgccactcgacagaaacaggcacaaaaggacaaggagaagtcgaacaaaatggagcaaagacagcggaagctcggcccgacttcgtccgcgactgctcaatctgtcggccacttggactcaggcagtttaactctcgcagattctccccatggtaactgaactgcttagttcccttggagttgcttttctcctgtttcagcaagttgctcctcctcctcgtccatcgccgtttcgtcctgtgcttcgtcactttcttcccagtcgcagctgacggcgacggattcggcgtcgacttctctccacaatttgtgttttccgaattcgctggaactccgccgttccaacgaagacccgcggctgagtgacccgcacttgcggaagtttttcttcaggcaaaggctctcttctcagtctcgacatccgcatattcaccaccagtgcgtttgttcaatgacttaacaatttataacatcttccaagtttcagttgttcattacgttcacctgacccgcgcatttgtgccaaatttgcttgtgatggcaccactgatccaatcagaaatggccaatcatcgctgtttcaacaacgaagaaattatgagaatgtaaattcaacaacattttgtgcaccagcaacggaagaaattgaggaagatggaatttgcaaaacggacgatgactctttcaatgactacgaatttttccatccacgacaaacgacgtgcagcacaattcggggcgaagaagcggaggcgaaaagagagaagaaggggacggaggacaacaacaatttgtcatcgtcatcttcggtcagcacaatcaccgcaatgacacggacaaaaacattgccaaatggggcgaaacaacacgaagaagggcacaagaaacggtctctccaccaggaacccctttcccggaaaaaggtcggagactaatactgtataaggcacacggacgttttctttttaagagcagcaaccaagttttggaaaggagttcgctcatatcttcgccgtcctccgatcacacagagctcgaagtgttccacccctccgactgtagcttggcaccctcaagttcttcatgttcctcgtcagatgtaaagaaaatcccgaatatgtttgtattccaatcacacctttatttgtttagagccttgaaaaccaccggcagtcccggcattgtcccgagttggcgaacaatttgcagtcccagtcccaccatcagcaccaccggcacagtcataaacatagaaaccatagcagtcacaaaagtggggacagtgggagccgaagcagcagagaaaggaagtgacaggcaaactctcgcatttccacgtttatttgtcgccaataacctctccttacacttcacattcagtcagccatccacaaaaagttctccaaattgtcgtcgttgttttgtttataattatttgtatatttgcatttaattctctcttctctcacatatcgaaaatcacccactcatttcgatggcaaattgtttgtctcgtaaattcagttcgcaaactttttaggtataggtacactacaaaatattaatttgtgtacatatatttataaa

SEQ ID NO: 47144 - DNA, 2372 bp, Heterodera glycines
atgccgagcacagccattcaaaaacttttgttggccgtttccatttttctgatcatcgccggcatcgttttgacagtcgccggtgttttttcgcccgcttggcaaggcaatgccaaaaaaacatttggcccattgattcaaattaatctaattaatcatttatctttagttgttgacattcgcgaattccgagctgaacatcaggcaattctaattaattaaaagataattttaaattaagggcactctatttaaagcttgatgagatttattgcttaatccatttgaagatttttttcattgaacaaaaaaggcacagtttaaaagaattacctattaattttaagaaataattaaatttattcgaaatattgaagtaaacaataagcacatttagtaagaattcgtttttcttaaacatgaaagggtttttcggtaataaattgttgaaattatatcccccgagggggatttccccgccctccaccgacttttcccctcatttatttattcccccattttttgctttagcacggcctttggtgggattgcattcgtgccgaaaaggttggctccgttttagctgatcaaattgcctttcgatgttcgtttgccattctttttcagcatgtggtggcggtgggcgacttttacgaggaagcgccgctccattgcatgtacaaattcgacgagtccgcggcattagtcatcgaaagagcgctggtcgggtgggagagggcacggcaaaacaaagcaaaaaacggcatggcattcactttcagaaccatgtcgacgaggacggggcagctggagaagctgagcaccaccgattctggtaggaaaagcattggccatctctgctggtctttccatttgcccccaggggatcaatgacgttgcctggggggggggggctatgtggtccaccctttgtttgttagctcttttgctatgtctttgccggggatgacatttgcttgtgccgtctctgatcatcccattcgtccccaggggatggcataaggtcgtcctttcgctgatccttctctcccaattggctgcgtttgtcgccgtttgcaccggcgtttgtgcgccttgttttgccccgtccaccttctgtttcgccatttctctgttcatcgccatgcttttgtcggtgctcgccgatggcattttcttcttctccgctaatcgcgtcgacattcgcttcgtcaccggtaaaaaggcacaaaataaatgccaaattcgaaagcattaattaattgagggggggggggggagggtgaccattcaacatcgggtgatgagtaattaaatatatttttgctcttaaggaatggtcggcacttatgtaagtttttcacacattctaccgtggcttgtcctaccgtatttgtttgccgaatcggtcgactccttctacagtacccttccacccttaggagcaagtgatcggctacgccttttacctccatttgggcggtactctctgctgggcgttcgcttttgtctgtgccattgcaaccacttacaaatttctcacttccaatggacagcaaaggtacggtattctccgtggtacggtagtgggagttttcccttttttctgtcctttcttttcactttttctctcctcagttttctgttgctttgccttaattttgtgtttcgcaattgtgcacaaattgcactttaacaaagcactttttaaatatttatattattattattattatatatgtttttatttattaccgaaattcgtttttggttttgtttttcgtttgtttaattttcccccgtcattttaaacaattcaaattttatttgtccctttcatctgtcataattgcctaattagccatacgctattaaaatgaattgatcaattttgagggaggggggggggggaaagtgttcaagcggacattctgataacattaatcattttactccctttcctttccatttttcactcttttcctcttctctacagtatcccttttgctattacctacagtactcttcccctctaccgtatgaatttccattttctcatcacagaaaactgttcgatgacggcccacggctccactcggccaacctcgcctcggtctaccgacgacccgtggtcgaatggtccagcgatccctccggcgaaatgccacaaaaggcagcgggcagaggcggggggacgacgcgactgatcggggcgaatacgcaagtgtgaccgatcaatcgataactgatcgatggccattgattatttttgatcgccgattcagccaccgccaattcgttctttcattttgccattttcacttcaaacacaaaaactctcccttcgttttcttcttttttgattgtttatc

SEQ ID NO: 47145 - DNA, 3647 bp, Heterodera glycines
aatccgagtcgaagagattggggaaaatgcggaagaaacattcgtcttggccatcttctgagtcggaagccatcgaagcacaaagcgactcataaagaacatcactcggatcaaattggaactcattcatctgaaaaatgcgtcaatttgttggttattcaacggatggatcatgccctggcaattagtcgcttcagaagtgccctgaaccattcactctttggcgggaagcgaacactcgccggagaacggaagaccaacgcgtccaaattcgggaattgttgcatttgtttcaaaaatttgtccagtttttccacggtgatcggcgaagaagcaaaaaaggaggaaagaaacgcacggaaagtgacattttcagtgagttcagtcggaagagtttccgcgagaagcggcggacggaaggaatttggaagagatcggagagcggtgaagagtccgctgtttggccgacttggaagatgagtcgacatctgacgggcaaaaagcgatgctcaattccaaaaacggactaaaaccgaccgaaggaagaacgaggaggcaaataaaagggacggtcgtagggaatttggtaatgacaggcgatttccagacgcttttcggcttccttcagcaattcactaatcttttcagggtccttctccttaagatgatacgattgggttttttagtctttatttctctttaattacgtttttgtacgctttgaaccctttttgggcctcttctctgatgtatttttgttcttcgtttgtgttcgtcggttcttgggccacccaatcctttgaaaggcgaattatgcgtcggtataatcgtaaaacttcacttcttttgttcatagaaaatcttaaaagataaaaactctattagcatatccagattcacaaagatttgactacctgcaaaaaaaaagttataaaaaatgaaaatattttgactttttttcggcgctacttgcccgcctgtttttaatgttttttctctttggcgtaaaaaacaaattcccactttttttatattcgaatttttttttactaaaaaattgataatttaataattttaataatacataatccttctttcatttccaagcctaacaaaattatttgatattttatgggctttcatttgctttagcatcgtttgctcttcgattgttggccatattttgtttgatgagattcgatttctcgagtgttttcacccattttaacccatagtttcactgtcatgaaaattggacatcggaccccgccgaggcagaaaagagccactgaccctcccccacagttcgattcttccgatttgggctctccgcaaaaggttcttaacttgaataatttgaatgcatataacaaaataataataattgcatcaacaaattaaggtttggtcactgttatgcgagaaggacgagaaattgcgccgagatccgcacgtattttcgcgccagaagaaaataaacgccaaaatgcgtgccatgctgctcgactggctgatggacgtgagcggaattgtcattaattagcagtcaattaacgcgagaccaaattgaaaaggtctgtgccgacaaacagctccaccgcgaaactttccatctttgcatcgattacatcgaccgtttcatcgcattgagtgaccaccaaatgcagccccagcgattgcaactgttcggctccaccgccctggtaattgcgagcaaagtcgaggtccgtttgtcttttccgaagctttttcccaacgacgaaatttccaggaaatttatcctccgaaaattgcggagattgccgaatacacggacgggtcagtccctcattttgttgggattgaattccgaattgtattcagctgttgttctgaggctgacattcgaggcatcgaagagattatgctggagaagttggattggacgtgttatccggtgaccgctgtccattggctcgcacttttcatgcagctgatgaacacggacgaagtgatccccgcccagcgagtggtcatttcagccggttggtcgtcttctaacagacaaaaatgattaacacattggaaataattgggcctaatggccgtttgcctttgtgtcgctcgtattttccttttattggcactttctctcattgtcaggcaaacggccgctagacactccgtcactcaacggcgactcttcgttcgtcatcggtaaaccgtcgctggaggtgagcattgagtcggcactgcccaacgacgagaacaatcagccggacgatgcccagcgggcggagtcgcgtccttccgtgccgtccgtttcgtccccgtgcccttcgccctcttcttgcgcagttggcgaagatgttcagctcgaggttggagtgttcgtccatttattgtttgttcctctacaaatgtgcccatttccaggtttcgtccgtcgttttcgccggtgcgtcgcgcgtccgtcgcatttccttcagttgcgcctatccgcggatgcaactttgccacattggctcctccccacgcgtgctgctgcacaccacgctagcggacattagttacgtcggccataattcgtacagcagtggccacatttacccggaccagcgctgcaccgtgccgaaacttatgcggggcgaattcgtccgaatggccgcggtaaaatcttgcaattttttccgcttttccatggcgaaatcatagtttaagtaacaaaaagggggagtttgtacagtttcgtggtgatgtttcagattttggacttggccatgctcgactcgggctgtcttcgcttccgttacagtgaattggccactgctgtggtcctttgctgctatgagcccgaacatttgatttgccaactcaccggtgccgccccgaccgattgattgcccttcataaatatttctttcctttaggtttttcgcctgaaaaggtgcgcgatgcccgcgcttacattgagccgttcgtccgcgtgttcgacctcagcgagcccaccggcacagccattccttgcctggcggacgtgccccacggcgaccgacacaacattcaaacgtacacatcgaagtgtctcgaacatttggtgagcgaaaaccccttatggagatgggaccttccgaaaaacttttttgtaaccaaaaagaggcctggtccgttactattagcctggtctactctttggcaatctttttttcgttgctccgttttttacctataatttatcatttttaggagactgtgcagcaaattcgaaaagagactgagtcgcgtcgcaaggcggtggaattacgggtcgcggctcgggtgcgcaaacgcaaattcggctcggcaatgaatctctaatgatattcatcaataaatatctaatttattctcttatttcatctctttctcacacggaaaaatttgccatgtgtaaattgtttgtctgcgattgttttggatcgaactttcgctactggcttttgattccaatcccacagctacggaaattgtcaggctcacaaccagcagttttttattagtaaaatgcggtgattacaaaataaaatttacacaagaaaaaatggtaatttcgtgacttatacgttttgagcaaggatgactgagaaaaaaaatgagtgggtgtaaacggacataaaatcagcacaaat

SEQ ID NO: 47146 - DNA, 922 bp, Heterodera glycines
atgtctggtgacaattcggcacttattgcagcggagcaagcggcgtatggcccattttttggctcacttggcgtcactgcggcgatgattttcaccgcggccgggtcggcctatggcacggcaaaatccggcaagttttttccgcgcgggagggggagggttggaattttgaaaatttgtgagcgcttgacgcagccctatacctgaaaaacttgcgattttctttcgccagattttgccttccaaaattgtttttagagcttttttgttgagaaaaaagaatttaaattattatgaaatgggcattaattacggagctgatttatgcgccttagggaaatatcaaaaaatcatccaaaaacttaagctccctctcaaatttttaaatcttcatgaattttttaaattttactaaattacattccaatttttgtgcctaatttgacgccccctcctttttttcaggtactggcattgcgtgtatggctgtagcaaggcctgacctcgtgatgaaggcgatcattcctggtactctgtgcattttttgtttaccaataatgtccatttaaattttttttccgaaactttactggatttttttttggtgttatggcagcgaaaagagagagagaattcattttttccaaacgaaatttacaaaaaaaaattgcgatttaccaaatgttatacttgaaatttgttaaaaactacgggccggtacgactgggggcataaaagtcatcagagacacccctaaccaatcataaaatgcaattttcgtgcttatctgtgcgtatcaagtgtgcagaaatttatgtattatcgcatccctaataatgactatggctgcgaaaaatatgtacaaaaagtggtccaaatatgtacataaatatgtaagaaaatcccaaaatatgtaaataaa

SEQ ID NO: 47147 - DNA, 2372 bp, Heterodera glycines
atgggggctagtaaaccaatagaagaagaaattgaaggtgtgaaaacacgtggagaatcattaaaggatttaattgtttcaaaacaaattgaaacagtcttatttaaatatttgaaggagcggcggaaattttcaattgattttaatgaccaaagaattgactttattgaattgtcggctcaactcggctacattctaggattcgaagacccgacaaaaattctgagtggagctatagcaaagtattattgtgacttgaaaggtggtatagacagcctttgtgtgtacattaatggaatcactgagaatgtaatagtaggggaccaactcgcttcacttttgcgaattgttgtcgttgaaggaaaatttggagacgtgattgagaagatttataacacaccaatgtacattaaggtggtagtaaaggaaattaatgagattgaaattgaaattaggactagggagggaaggcttattccattccaatggggtacaacattacttgtattagcatttaaaaaatctattgtattttagtatttaaatattcattttcacattatagtatatattaataattgaataaatatggtgcatcaaatatttgatccaaactcagttagttttgatgattttgttgtagtagagcagattggctcgggagaagcctttaattattttcgcgggatacctccataccaacgaggatatggaagacagcgaggtggaggagtaggagatgtgttgaggtttttatggagagcacttttaccaaaattaaaatcggctggtacattattaggtagagaggcattagacactggaacacgtgtattggatacaatagagaaagctgaaacaccaaacaaacaagtaataattaatgaagtaaagaagggaatggataatgtactcgaaaaaggtggggttgggcgtcaattcggaacgggaagaaaaaagagtattaaaaggaaaagaattattggaaaaactatacctaagacagtaataaaaaaggcgaaaaagatcagacgtatttggaaaattattttaaaatggtcttcaagaaaattgacaaggaatcggtaaattctataacttcagctttgtcaatatttacccttccaccaactaatgtgtcagtgagtagttcttcagtgcgggaatatttaccgctcaatcctttaacggacattccttttcattttaaaattcaccctaccgccagtttctttgatttgaacaaatgttacatcttaaccgaaatgtcaattaaaaagctggattcttacacaaataaatatgttaatttaaaagtgaatgagcaagcggcaacaattaatatgattggtgcgacttggataaagaatttaaaaatcactgtgcagggacgtgagatttatgactcaaactcactttatgcttataaagcatacttggatgccgaactttcttattccaaaaacgtaaaggagtcagacctgcaggcgagcggatattatgtggacagtgaaaatcaggacggaacggatattactcagcagggttttgaactgagaagaaaattgttttcacaaagtcaaactgcacaatttattacaaaattggatgcagatatttttaatcaggacagatatatggtgaatggagttgagattgatatacaacttacccctaatgacaatgagtttatggtaatggcagcgtcagacgataaatatagaatagaaattaccgcttgtaaattatatgttaaaactcttgaagttgttgatggtcttgcattagacatacagaaaaaacttgaaagcaaagaagcaaaatatgcccatagaaaaacattgatcaaatccacatttataagcgagaatcgaactgaatacaatggaacgctatttacgggtcaattacctaaacgagttattattggaatggtggagaacgctgcatacgtaggcaaccaaaagaaaagcccatttaattttaaaccttttgatgtacgatccgttacattgatggcaaacgggaaacaatggcccgcagcgccatttgagcttaatttcaacaaaaacttatatacccgggcattccacgaaatgaatgaggcgttaggtatggccagttcaacagacagtaacggaatttctcttgagaagtatagaaagggttggacaatttttgcgtttaatatgactaatagcatggaggacaacgagggtattgatcttattacagaagggacgactaccgtgtgcattcaatttagatcacctgtcccatcgggtgggatcaccctaatagccatgagtgaaatggattcaattttgattctagataaaaatcgtacagtaatgaccgataataccatttaa

SEQ ID NO: 47148 - DNA, 2789 bp, Heterodera glycines
atgaaaaaataccaaggagtaacagatggtagaacaattcaggctctgaatgaggaagcattaagaatgagaacagcaatgaaacacagaagaaaaaatttgaatgcttttaacaaggctgtattgaaaaaagatttacaaatatcagctgaagaatatgagaggacgagctatgaacaaaataaggattacgttgagccattttttgatagtcatccaacagattactgggaacatattcataaaaaatatgaagggcttcaagacgattacaaaaaaattcgcgaattaagagaacaacaacaatttttgactgatgaacagaaaaaacagtcaattcaggatgaaattgatcaacttcgtcgtcttgtcgattataggaaaaaaagatttgcagcgctagagtatgaagctaaaaagagggacgcactccaacaacaaccaatggctttagccttgactcatggtgaagcactgaaggaacggataggaaaaatagagggaactaccaccacagcagacggggaagagacaaaaactcatggaaaatctttggtagagttaatagaacaggtacagaaagaaagagatgatagcaaggccaaaactgagggtaagacacgaggagaaattttaggagataaattaaaagccaaaattgatgaacaagacagtagtgcagatggtgcaacccatggtgaagtactaaaaaataaaccagaaacaactattggtgaaaaagtaatgacaagaggagaaattttaggcgaaaagttaaaatctaaagatgaagaaaagaaagaagaaagaataacccatggcgaagcattgaaaaatagaattgaacaaattcccgaagaagaaaaaacaaaaggaaaaacaagaggcgaaatattaaaagaaaaaattggggctagtaaaccaatagaggaagaaaaaacagaaggaaaaacaagaggtgaaatattaaaagaaaaaattggggctagtaaaccaatagaagaagaaaaaacagaaggaaaaacaagaggtgaaatattaaaagaaaaaattggggctagtaaaccaatagaggaagaaattgtaggtgtcaaaacacgtggggaatcattaaaggatttaattgtttcaaaacaaattgaaacaattttatttaaatatttgaaggagcggcggaaattttcaattgattttaatgaccaaagaattgacttcattgaattgtcagctcaattagggtacattctcgggttcgaagacccgacaaaaattctgagtggagctatagcaaagtattattgtgacttaaagggtggtatagacagcctttgtgtgtacattaatggaataactgagaatgtaatagtaggggaccaactcgcttcacttttgcgaattgttgtcgttgaaggaaaatttggagacgtgattgagaagatttataacacaccaatgtacattaaggtggcagtaaaggaaattaatgagattgaaattgaaattaggactagggagggaaggcttattccattccaatggggtacaacattacttgtattagcatttaaaaaatctattgtattttagtatttaaatattcattttcacattatagtatatattaataattgaataaatatggtgcatcaaatatttgatccaaactcagttagttttgatgattttgttgtagtagagcagattggctcgggagaagcctttaattattttcgcgggatacctccataccaacgaggatatggaagacagcgaggtggaggagtaggagatgtgttgaggtttttatggagagcacttttaccaaaattaaaatcggctggtacattattaggtagagaggcattagacactggaacacgtgtattggatacaatagagaaagctgaaacaccaaacaaacaagcaataattaatgaagtaaagaagggaatggataatgtactcgaaaaaggtggggttgggcgtcaattcggaacgggaagaaaaaagagtattaaaaggaaaataattattggaaaaactatacctaagacagtaataaagaagagaaaaagatcagacgtatttggaaaattattttaaaatggtcttcaagaaaattgacaaggaatcggtaaattctataacttcagctttgtcaatatttactcttccaccaactaatgtgtctgtgagtagttcctcagtgcgggaatatttaccgctcaatcctttaacggacattccttttcattttaaaattcaccctaccgccagtttctttgatttgaacaaatgttacatcttaaccgaaatgtcaattaaaaagctagattctgacacaaataaatatgttaatttgaaagtgaatgagcaagcggcaacaattaatatgattggtgcgacttggataaagaatttaaaaatcactgtgcagggacgtgaaatttatgactcaaactcactttatgcttataaagcatacttggatgccgaactttcttattccaaaaacgtaaaggagtcagacctgcaggcgagcgggtattatgtggacagtgaaaatcaggacggcacggatattactcacggaggttttgaactgagaagaaaattgttttcacaaagtcaaactgcacaatttattacaaaattggatgcagatatttttaatcaggacagatatatggtgaatggagttgagattgatatacaacttacccctaatgacaatgagtttatggtaatggcagcgtcagacgataaatataagattgaaattaccgctt

SEQ ID NO: 47149 - DNA, 2577 bp, Heterodera glycines
  unsure (1)..(2577): unsure at all n locations
cgcaaattgtgctctcaagtgctcggttcgctgcgccgccttcctaagggggagannngnnanattnnnggaaggngantccccctaaagacaatccccacacaacgcaaatcggacgtaaaaacattggacgcggcaatagatcaggtggggaatgacagagggattaccgtataccggggagatactgtaattgaaattcggagaatggcgaaatagtctctgaatcatttaatgggcgaaatcgatttaaataattaatattatttgttctgtcaacagtcattcctttagttttccgagcctttggtcaaatttgccactggcgccactccgtccagctccgacgtcggcaaaatgctttcttcaatccccgatttggtggtcaatatccccggctttggcacaatggacgcaagcaaagtgagtgatccacggctttgcttataattcaatgcatttgattttcacttctttcagctccatccttctctggttgaacacgtgctgaaagggggtcaaatccccggcattcccaaggagacgttggaccacattgtcaagcagtacatgcagcgtttgtatgtcgctgcctccaacttgcaaggccgtccaacaacggaattgccaccccttccgccgggcactgaccccaccaaattgcttcggccaatttccgaattgcccaacgaaatggtggagaaagttgtccagaacaaaccgttgccgcaccttacgcaggaacaaacggaagtgatcaaagtaaggggaaaattggcataaatggttcattaatttcaattttgcaatgcttctcttttagcaatattacatgcagcaaatgccatcctcttcgggtggcgacatcggcaaaactttcggcatcgccgtcaatggcaacgcctctgagccgctcaatctgacaggccttttgccaccgaaagtcttccaaatgatgaagcttttgcctcccaattacaatctgagcaaacttccgccggagctcactcagcaagtgatgcgcggtgaaatgcccgacttgaccaagttgccgttggatttgcagcagtggatcaaagataactttgaccggcttgttgcttcgttggagaacaatgtcagtctcacaatcagtcattcgtcgcaaataattaggagacattttttccttttgttcagcccgatctgagcattgacgaaatcatgaagaagttgcccacgttcgagcacccgcccatgtccaccttctccccctacgacatcaacaaggtcgacgccgatttggtggtccaacagcgcaacgaggaggaggccaaccaccgtttctggcgcattttcgccgccagcgccttggctttggctggtgccgtgacgctgggcgttctcagtgccttcttctggtacctgaaacggagcagacgcctggcggacccgccgatggcgccgccgattggcattgacgggggccccgagctgccctcggtgattcgtgagcagtacttcagaccgtctgcctcttcaacgctcaagtgatcactgatcagtcgcgatgttcttgttcgggtgtgattgattagacttttatttagtttccgctttttatttccttaacattcctaaaaagtcatctgttcattcctgtgccgacttccataatttatttcccatttccatttttttgcttttttttctcaatacattccttaatcatttgatcagcaattattgtgaatcgaatacatgtaaaataaaaataattagtatatgtagtactgttgttaaataattcagttttagtataatctatcttgacatacatatcctgtgtttaatcagttttatcataaaaattaaaatagttcaaattggcaaaaatggttcaatttcggcgtttgagggaatgcgtcaaaacggcaaaatttgctcataccagtttgggtttttaagaactttcaacgcatttcattttcaatacaaatgtcaaacagagttagtggcattaaatttaaatcttaaaatgaaaaaacgaatggaattgcacgaaaaagaatgaattgcgggaaggaaattctgtctgaatatattcacgtgagagagagagaaagagaaataaaaaaactaaaatatgtgcaaacatttaaagctgaaccagagaaagagaaaagggcgagagagagtgttaatcagcggcaacagcaaaatcaaagaacaaaatccctttcgagtggagtgactcatcgcactttaccccccctcccccggcgacctttctttcaattcgtccgatcactctgtgtctgtctgtcctctgtcatacggtgcttttggctgatcgctgatcatccgccgccctttccgacccttctgatcaccgtccgtccctcggcttcctcctcctctcgtctttgctgctgctgctggtgaatcagttgggcctgcaactgggcaaacagtgccattgggtggcaattgaacgcggccatttgttgtgccgtcgaagaggcagcacaattcgctgctgctcccgccgctttgcatttggccgtcgcttcgtccgctacggagggcccctcgtcg

SEQ ID NO: 47150 - DNA, 1172 bp, Heterodera glycines
atggccgacgaaagtgccacgaatgcaggaggagccggcgccgctggtggtgctcagcccgccgagtacatcaaactgaaggtggttgaccaggtctgtttttgcattatgtgatggcgcgacttcaccgtcttaattgtacatttttaggactcaaacgcggagcggactggcgtacaggtattaacaaatttgggattgggtgttgggttttttgactgacaaaatcttgtattgaaggggcaatttgttgtggacgagtttatttttttggttgtaaacacaaacgccattcttttcaccccatttcaggtgacttctctgcgctttttgtttgatggccgctccgtcaaagacgaccacactcccagatcactggaaatagaggacgacaacatcatcgaagtgtgtggggtgatgggttggaaaacattcccggggggtggggtttcggggtcatatacacgactgaattttttcctattttcaacgatcagcggatagtttttttgcactttaaagtagcattattgtattttaggtgtatcaaggacagatcgtaggctccattttggatgattgaagaagattttgttcctcgtgtttctttttttgaccgatcattatatgatctgataattgcccctcacatttatttgttgcttctttcgtttgataatttaatttttgttttggaaaaaatggaaaatcttcaaaatttcattattttttcccaacgaggaataataatatgtagagatatcttatctctatatatttttttcgtcataaattaaactgaattttcgtaaatagtctaaaaattaaattttaagatttaaaaaagagaacgaaatattgagaatttttatgcgcattggcaagtttttctctatgagaaaatttaaatttctgtcagaaatgcaacatagaaaatagaaaaaaagaaaaacttaaagaaaaacttttctcattgaattaaatattttctgcggttcaacaattattttttattgtttttctatgcaagcaataagtgcaagcagttcggtaacgacacatggatatattaatacaaaaaaaccttttccgaaaaaagcgaagaagaaaataattaatattgatatatcaaaaattgggaacttttctggtaaaatatttttacttaatta

SEQ ID NO: 47151 - DNA, 304 bp, Heterodera glycines
atggtcatcaaatccaattcggtcatttcacgttcgcattctgatcattttcaagaagcttctggctcattgtcagcaacttccggttccgaagatgcaattaagcactggggttggtggaggcattttgtcgcaggtgccactgctggttgtgtcagccgatcagtgacggcaccgctcgaccggctaaaagttttccttcaggtaaatatttttgcttttctcgctttgtttttttagtgtaatttgtaggttaacgccaaccataagactccacacactttgccatccgcagtcgattatt

SEQ ID NO: 47152 - DNA, 1339 bp, Heterodera glycines
ccattcccaaacgccggtggtcaaagcatcggggagggagctgagctatgtcctgttgttctcctgcttgctctgctattcaatgacttttgtccttctgtccaagccgagttggacagtttgtaccattcgaagaacaggtgaacttggaggggagggagggattgggaagaaagcccccgggggagagaaatgggcagagggaaggaaaagccaaaatgggggggggatcggaaagtttgttgtctgttgacttcatcacttgctcatgttaaggcatcggcctcgctttctcctgtctgtactccgcccttctggtcaaaactaaccgaatccatcgcatattttcccaggtgttctcactgctaatgaattccttttaattactaattaattgactcattaattgccctctgtccatttcctcctctaaggccactcggactcgacgtgcccctccgctgatctctcccatctctcaactgttgctcacttccgcctttattggctccaaaatgatcttctcattggtttggcttatcattcagccgccgggtaattccgctgggtgtccattcattaagccctaattggcaacatttaattacgcaactgtccttccctcaggcactcgccactttcatcccacccgtgccgaagttgtgctcacttgcattgtgcccgaccaccactttctctattccctcgcctatgaaagccttctgttaattatgtgcacagtttacgccgtgaaaacacgaaaagtgccggaaaatttcaacgagacgcgttacattggcttttgcatgtattttaatttttgtgtgatttggcgtccgttcgctttttcaatttttcccttaaggtacacaacgtgtgttctgtggggctgtctgattctgttctttttcggcaccggcagtgacttccaattgcgcacaaccgcactttgcatgtccacttcgatgagtgccaacgtggtgacaaatgggagaaaggcggggaaagggacggaccaatgccaatgccaatggcaaatttggggctgcaaatgccaatgtccaaaagatcaattccctctcttttcaaggcgttggtgtgcattttttctccaaaaatttacgtgattttgttcgaaaaggacaaaaatgtacgcaaagaaggaagtgggagcatgctgaacaaaaagagaatggggtcgaggtgagcgaagaatgaccactcatccattggctaatcgggggtaattaacgcactaattagggacggtgattaaggaaggagtggtggggactgggccattccgttgatcacattcagttattacgccaacaatttg

SEQ ID NO: 47153 - DNA, 895 bp, Heterodera glycines
atgccaacaactcaggaggagcgaaaggccaagtcggaagcgaataaggcaaagcgcgaagaggagaagcgcaagcggcagaatatgatggcgggtgcgtttgtcggagggttcggcgaagaaaagccgtcgggacgcaatttcgtcgttcaaaaaagggaggagggcagcgacgcattgggacagaacgcggagtcgggcggggggccaaagctgcgcggaggcccaaacaaagcgcagcagcaagaggccaaggtgggtaaggggagggaggggtggggataagcaagggatatatgggattaccatgaggaggacatccaattcagcgcaattacatgtccattgtgaaccgaccggtggacgtgtcgaacatgttgcccaatgacatcaaggcaaagatcaagcagttgcacgcgcgcattgtcaaattggagggcgaaaagtacgacttggagaagcagaacgagcgccaacaatacgatgttggcattggcacacaaataaatgccaacagatttgggccccctcttttaattcagttgaaagaattgggcgaacgtcagaagcaattcgcgcgtcagaaggccttggaaagcggaatggacccgagcgaaatggaggagaattcatcgcttccgcccaaagtgcgcgtggcgtccaaatttgatcggcagacggacagacgcggctatggggagagacgcaacaaattcgaacacgtaggacagcctgcgccggattgaattttgtaaaacaatttcagcctccgccgaagccggagccaaaaattgcgcacggcagcggacgaccgccgccggaatggggccgcaaagagttggaagagttggagaacatccggaagaatttggaaccgccaaagtaccaagagcag

SEQ ID NO: 47154 - DNA, 437 bp, Heterodera glycines
cgttgaggacacttcatctgcacgtaatcttgacgctgatgaaccatttgatgagctcaacgaggacgacaccgacttggacgaagactctgataacgaggccgaacttatggcggaactcgagcgcattcgcaaagaaagagctgcggaaagggcctcaaaagaggcgaaagaacgcgaagaacaggtgagacacaaataacctcaaaaagaaattgaactcccaggaacgcattcgagaagagaacattctccatgggaatccgctgctgaaccccgcatcgtcggagtttaaggtcaaacgccgttgggatgacgatgtcgtcttcaagaattgtgcacgaggaattgacgaaaggaagaaaacgccttcattcataaatgacgcaattcgatcggagttccatcgcaaattcatggagaaatacattaaatga

SEQ ID NO: 47155 - DNA, 2155 bp, Heterodera glycines
atgttgacgagtgtcttctcctcgttgacgactgtgccgagacgcaacggtgtctgaatacggtaggacagtttttgttattggattttaaagttgcatttagcccggaggattcaaatgtattaggactcagtcatgtaaataaccaaatgcattgtttcggtgattttaaattttgaggcggcacgggctatgccatggacagcgaaacggagcaatgcgtcggtgtgtctttatcatataaaaaatttcggcacctcgggtattgtccccctatcaattgttgacattgcatttaccattttactcccccccccggcgattgtcccatttgtcctggtcggttcagatgtcgacgagtgcgccctcggggcacacgactgtggaccgatgtaccaatgccgtaacacccagggcagcttccgttgtgtgccgaagcgatgcgcagcggacgaagcgatggacccgaacagcggagaatgcaaagtgacggagcaaagggaaagccgaggaaagggttcggaaatattcagtcggtgaattgcccggtcgggtacaaagccatcgacggacgctgcgaagacatcgacgagtgccgggaggagacacgccattgtgccatcttcgaagagtgtggggaaaggggaggataatggcatggtttaaatgaaccgcgcaggtgtcaacaccccgggcagtttccggtgccaagagcagggcaatgtgtggtcaaatgggtaccacatggacaaggacagcggcttttgcttaggtaaaacgaaaagcattcgaaaattaaaccgaaccgaacacaaaaatggaagacaccgacgaatgcgcacggaaaacgcactcgtgcgaaacggacgaacagtgcacgaatctcccgggcacatatcgctgcaattgtggggcgggtttcgaattcaatgagttgacaatgtgaggagggaacggtgggtcgaacggtaggcagagacagatactgtaagggacagacagcctactgtatcgcagcagcaaatacgcatttgccatagattagcaaaacgggcgaagggcggtggaggggaggcgtttcggggagggggggagggaagggcgggttcgttcccccccgaggaccgctcttttgccaggcgttgtgaggacgtggacgaatgcgtcaagttcggagcgcacgcgtgctccctccaggcgcaatgtgtgaacactttcgggtcgcatgagtgcctttgtgggcccggctttaagttgggcgccgacaatcgcagctgcgacggtctgtgaaagtgttaaatggcaaagcactcaaaaagatccgcttttagtcggcccgtttttgctgtttttttgtttttgtgcatttttaccctttgagtgccttttcagacatcgacgagtgcgcctcgggggtcgctcgatgtcagcaaaaagtgagcgaagggctgcaattcggccctttccaactcagtcccaatcggtgcctctctcaattagtgcattaattcgcccggctcctaccaatgcatttgcgagaggggctttcagctgggcattgacgaggtcacctgcgaggacatcgacgagtgcgcaatttgggcaaagtcaggtgccgtgccatgccattccctgtattagttcaaccattttttggcatttcaggcaatgatttgtgcatgggccaatgcgtcaatttgcccggctctttcgcctgcacgtgtccgcttggctacgaaataatggcggatggcatcacttgcaaaggcactaaaaataattgctaattttgaaatttattcgggtctctccccttgagacatcgacgagtgccaatcggagaacatttgcgcccctgggcatttgtgcattaatttattgggcaattatcgctgccagcgaatcgaatgtccacgaaattattttcccgacagaaattacaaaaagttcgccttttctttcattaattccttttgccgtgccaaaagtgtttttgtttaacaacaaaaactaaccaaattttgtcagtcgttgtgtgaaaaggcccgggttttgtgagaatttgctgctggaacggtgcaaaaagttgccaattcacatctcatggcaaaacatcaccattccgaaggtaaattaacgcgaaaaagggaaaagg

SEQ ID NO: 47156 - DNA, 488 bp, Heterodera glycines
atgctgtatcaaaatctaagaaaaattgtgccatcagcagattctcaaccgttatcctccttcattcatgatttattacgacggaagttattaagctgcactcatcccgaatttccatacaaacaacagggtgtataatacattattgtgttctttaaacctttcatttttaaataccttacagatataactgcatattcttcgacattgccaaacgtgctttacgcgggtgttgatccaacagctgacagccttcaccttgggaatctcctcgtgctcaattccctgattagagcttccttttttggttgttctcctattttattaattggaaaagcaacagcttccgtcggagatccgagcgggcacaaaagaggtgccagacaaaacatctaatgaattattgataattttaattagacaggaaattgttattacatgaatttatctatgcgaattcaaaggcgttgcaaatacaggtggagaaa

SEQ ID NO: 47157 - DNA, 3364 bp, Heterodera glycines
agttggtttttgaggtttattcttaataatctcacccttatgaatgataaattcattcgaattttaattggtttaaaaatgcattctttgcttaaagataggccttaatttcaaaaatttaaagattttcaaaaaaaaaactgccgttgcccctccctcctttttggtagaaatttttttagggtgttgtaaaatgtgaaagcatgtttagggggatttttggagcgcctcacggatttgacatttatttttgccctttccgaatcacgaatttttaaaaattgaatttctggcattttttgttcgaattcgggtctgggaatttggaataagccaaaatgaatatcagattcatgaccagcgaccccgaaaacaaccataaacatgttttcacgacttttaaagcaacttttaacaaaaacgggggggggggggctccgcagtattaccaaaaccggttctaccgtaaataattaacagacctaagggcctacatgaccgaattttggtgctttagtccaattttgaaaaaaccaattaatttggtcggttcagtgcgcccaaaatttgcaaaatttttcaaaaaaattttttttttttcagttttacccccgttggttggcccccaatgtgctgacatttgccggtgcactgattgtgatgtgttgctatgggctcgtggtgtgctttgaccccgggctgagcgccaattcggccaccgggccggccgagctgaacatcccgcgctgggtgtggctggtgtgcggggttggcactttcttggcccacttgttggacggcacggacgggaagcaggcacgacgggtgggtgccagtggaccgaccggggaactatgtaagtacgccgtgctgtggtggacggggtcggtacccggtcaggttacaagatcccgaaccccggaatccgggcgggtttttaaatgatgaaacggatcggggtcccgcaaaaatcaggttttaatttcaaaatcctgtccggggcatccagaattgtcaaaattccggtctcaaggcgaatttttttaatttttttttttttttggttttatttttccctcattgaatttttcaaggcttggtaaattgtggccggttcggcccaggattgaaccccaatttttcattccatgaatttttattaaaattgctgcccttcctgaaacaaaattgggtggttgccagagatttatagaatgccaaagaccggcggggcacttaaaattactttccgggctattgaggccaaaaattcggctcgaaaaagccaaattggtatcagatggggctagggggcccggttttgaaattccacgagatcagaaatctctggcggcttaacccgacacttttttttacaaatatctattttttcttaaaaatccaattgattttcaccggagtttcgtaaaatcctggaatttttacgaaattttctaaataaatttatttaattctctgagatttacctaatttttgccttcccaacatttcgagttgaccacggattcggtgagcgtttgtctgctaacaaaacgcattttgccaattgtttttaacgcgttccccgcacttttcggtctctcctcgccacagattcatggtcaaccgtcccatttacgatcaccattttctcactttttggacggggccaattcaggtaacaactaattagctgattgccgaccgacggtactaaaaaaaaaaaaattcaagccctttttataagaaaatctcgaggaaaaaaattgtaaatatctaaaagatttaaaaaatcagaaaatttctttccctaaaaatttttaacaataagttcgaaaagtaaaaatggttgcatcttaaatgaacttggaaacacaaaaacattttctcccagagtttttctgtcaagaaatcgttaacggaatgttttgatacgaaatagaaaaaaaattcttagccagatttccaataattttttttttaattctagagtggtaaggccaccagaaaattttttagaattttgccctttttaaggttttttcaaaaattgccgattttgggtaaaatttaaaaaatgcttttcaggagtttcccattttcatttaaatttttcatttcgggaggaggcttaagccccctcagcccctccccctgcctacgcctttgataactgcaacatttctaagtataaaaatgctatatttttccccacagtgttgagccgctcactttgctctccgttctgatcgcggtccaactcgtgttcattgccagccactgggagaagtacaacacgggcgttctgttcctctcctggggctacgatgccagccaatatgtacggtacagtacagtacaaactgtccatgattttccggtttagaatacgaaaccaattcatttctttgtaacttgttttcgaggaaggtgcactacgccttccccccccccagaaatttttttatgagaaaatttacaagaaaaaaattcgaaaaattttttctatagcaatttttttttgcaaaatttgtgatgaattgctaacaaaaagttttttttcaaaaaattgttgaaatttttttcactttttttcttgtgattttcatcatttttttttagttttttaaaaaatttgggaggtagaactgattcggggggagggatgagctgcatacatgtacaaggggtgtcaaaattcaaaaattttcccggcggctatcggcccgcccgccccacccccttcctaaaagtttttttttggaaaaaacgcgtcgcaaaaaaggtactttgaatagcaaaaaaaaaaaaggtgtcgacgccggagaaaaatttggaccttcgtatggaaaatcggtcccgagacacctccccccctgtcccaatcgtctgtcgtatggcccttgggctgagacaccccttgtgcatgtatgcttctgatcagtactgttgtgatcactgggcgccttttccctttccctcattttcgctgtttttctcttccgtaccttccactaaaattgtgtctccgccccgccgttctctctccgcctcgtcgtcttccgtctcttcgtctccttccgcatttacagtaccctccatcgttgtttgaataccataccgccttttgaaattgttcagccaccgttccgagaattggcaccgctctttccctccctctgcttctctgtcctcccctctctgttcctcgtccattcgctctttttccctctctttttctttgtcctctttcatccgttttccattggcattctctgtacccactgttgtcaatttctttaccatttttcgtatccatttgttcgacgcgcattcccccgccgtcaattggtgctgcaccaat

SEQ ID NO: 47158 - DNA, 3900 bp, Heterodera glycines
cctaagaatcgaccgaaaattttttcaaaaaatatacccttaagaatcgactcgaaaatttcaaaaatatacctatgaacaaagaaaaatttctcaaaaatcattccaaaatttatttgtttattttcttggcgagaattttttattttgaaaattatctatctcattaatgatttggcataatatttttgctttttgaagaaaattttcgattttacaccccaaattcggaactttttggctcctattttcccatttttagcacctattttgggggttttttagactgaagcattcgttttaaaaattaaattttcaaatatattcatttcttagggtggaaatttcgcatttcgcgccaaaaagcgaaatgcgaaaagcgaaacctcggcccatccctggaaagtatcctttttcttcactctctcttttttttgtcagtgtctctgtttttcactgttttttctctctccttcactctcttttttgatcactttctcttccataattttctgatcgttccctcccattttcacttcccccatttttcccttttcaccttcagaccgtgccattctgttcgactttgcccgtgattacgatgtgatgttggtatgtctctttcggcattcccttagtcccaattgccttttgctttcctttgtcgggattcgtctcttgggtcggctttcttgtcgtttttgtcggtgccgccgctttggtctgcaaatacgtctccgcccaagcgatcggtcgtttgctccgtccattttggcattacaatcgcccgcttttgttcagggtccggcatccccgagatcaaagtgatcatgaatgggttcatgctgcagaattacctctccttccgcactttggtcgccaaaatgctttctctgacgctcactttgggctcagggcttcccgttggcaaagaagtgggtggtctttgattcttcaatttcttggtaatgaaatgccaatgccaaagggtcccttcgttcacatgggcgccattgtcggcactttgctgtccaaagtgacgcgtgcctggcagagcagcgccttcttctccaacgaaggccgcgagttcgaaattctctcgtccggctgttccgtgggcattgcgtgcacctttagcagtccggcgggcggtgagtgccaccaaaatcggccgatgccaaagcgttaccgtaccccgtgtcaattggcagccgtcctttacggtatcgagtgcacccacaaatattttgctgtgaaaaattattggcgcgccttcttcgccaccacatgcgccgcgctgatcttccgcttcgccaacgcggtgatcattccgccgcacatcgcaggtgacgcggggaaggaacggatggacaatccatgacaaatgcggttaatttggaccattttgattgattgattgtttggaatgggcaagtgataagaccagtcacattggacggtctgccgatcgcaacttttgaggatgagtgatcagattattcacattggccagactcaatccggtcggcttttgcttaatcatctaacggatcactacggtcacattgattaggatgtcccatggatcacacacgtaatggggcttctggttttttgatcactttaggctgagtcactgatcagtccgttgatcagttgtttcataactctcttttccgttcctttaaggcaccatcactgcttactaccagaccagcttccccaatgaagtgtttctggtggaggaaatccccgtcttcggttagctttcgtccgcttttccctcccaaccccacggaaatgccttctcttgcagttttggttggccttctcagcggtcttttcggtgctttgtttgtcgtcgtccatcgtcgtattgcctatttcaaacggcgaaatcgcacttttcgtgccatttttggcaaaaagtctgtccatttgggtccgctttgtcccatctcccactatccttggcatttagctctatgtccttcaccattttcatggcactgattgttggtattgtcactttcccggatggttttggccgtttcattgccggaaaggcaatttttattagtgccttttgaccgcttggaaattagccgtccatttcagtacactttccgcgaaacgttgggcgatttcatctccaactgtaccatgactctgtacaatgtcacgtcgatgggctgcggtgggaaggtcatccaacggtggaccattgaggacctttgggaggaggagggtccccgcagaagtaattgcaacattttaccagcgtatcatgggaatcatttggataattggcctattacgttagttctttttcctttaccatactttgccgttacagaatccgttttggactccatcgacgaaagtaccgacaccaccgcttttatgtgtgcctttcttgcccaccccgcccccgcccaaattaatgccaatgttttccaagtttaggcccaaccctttccctgttctgttcggctatttgctggtcaatgttcgtctcttttgcctttccccctccctaatttgttcttccatttgtcagtttttcctcgtcgctatttgcataactttggcacttcccgccggcattttcgtcccctcttttgtcatcggcgcgtgcggcggacgaatcattggcgaattggtcgactaatgcgtgcgacgactgattatgttttggcactttttgttcagatggtcgttgtgtttcccgagggcattcgcggttcggacggcccccaaatttaccccggcctttacgccgtcgtcggtcagttctaaaaggcaaaatgcaactttgtaatgaacaattctctgctctggcattttcccaggcgccgccgcgtacaccggcgccgtgacgcattcgctttccattgcggtgatcgtctgcgagaccaccggtcagttgtgcgcccttctgcccgtcctcgtcgctttaatggtccgttccgatcgcttgaggaaaattgatcaaagggtggcggtggcaaagctacaccgaatgtccccagttaaggtggcaaatgcggtcagttcatttctccagccgagcatttacgagtccatcatcaacatccgaaagttgccccatttggccgaattgcccccctctcggattaggtgtgccgtggcattgcttttgcaacttttaatttgcttttttccctttttcagtgtccacactttgaaggttgaacaggtggacaacaattgaaacagcttatctgtggaaaattgtaatgacattttgccattttagattatggtccgtgacgttgtgttcgtcaccaaactgaccacttacaaagagttgcgcgagttgctcatttgcacaccgcacctccgctcctacccattggtcaccgacgaaggcaatgccaaatcagtcccatcagaacactaattgttactaatccaattcaaatcatgcctgatctgaccattgtttgatcaatatattgacttttatgctgggtaattgattaggtgtgaccaaatttaaaattgattgtgagctgatcagattcattattctgatcacttaaccgtccaacttaacattgctcactttgaatgcctaaaattaagaggagcgcattttgttgggctccgtggcgcgcaaatatctgcactatctgctgaccagtcacctcgggcccgacccggcacttcttttgcacgggagcagacggcgcaaaagtcggacaatgagcggcttctccgagggcactttccatcgcaatcccacgccgaataacacattggctacgactgcggtgccggcaaattataaaatgtcgatgatcaatgatcggaatttgtttggcaacactttgctgtccatcagtccgttgcacgacgaccaaagcagtgagttgg

SEQ ID NO: 47159 - DNA, 2178 bp, Heterodera glycines
atgtcattgaacttttggatcttgaagagcaacaggaagaggaaggagcaaacattgaccttgatgcccacaaaaccaaagtgtgccgtcatcaaaacatccacgcgtgccacttactttctgcccgttgttggtcttgtggacccggaagaaatgaaaccgtccgatttggttggcgttaacaaggactcttatctcatcctggaaaaactgccacccgagtacgactcacgcgtgaaggccatggaagtggacgagcgtccgaaagaaacgtactcagacattggcggatgcgatagtcaaatcagagaattggttgaagcaattgtaagccgaatttcacatgccgtatcaacacaattactttttaaggttcttccgatgactaaaaaagatctcttcataaacattggcattcagccgcctaagggcgttcttatgtatggaccaccaggtgttgtctatttgttgttcgaaatttaaagccaatttccaaggtacgggtaaaacgatgttggcacgtgccgttgccgctcaaaccaagtccacttttctgaagctggctggtccgcaacttgtccaaatgttcatcggagacggcgccaaattggttcgagatgcttttgcactggccaaagagaaagcaccgtccattattttcattgacgaattggacgcaattggtagtgcattttgacaattatctaacttgggcatttttctattcagggacaaaacgattcagttcggagaaggccggcgatagggaagtgcagcgaacgatgttggaattgcttaaccaactcgacggcttccagccaaatgacgacataaaagtgggtggcgaataatgaggagaatttgtcgatttcgatttgatttttcaggttattgctgcgacaaaccgtgtcgatgtgctcgacccggctctgctccgttccggcagattggaccgcaaaattgaactgccagcgccaaacgagaaggcccgggcgcacatcgtccgcattcactcccggaatatgaacgttgagtaagttgttacgactcggaaccaatcgaatgccatttttgcagtaaggatgttaatttcgatgagttggcacgttgtaccgacgattttaatggtgctcaatgcaaagctgtttgtgtggaggcggtgggaccaattttttttaagaccttttactgcttcgattatcagggtatgatcgcgcttcgtcgtgaatctcacatcattctgcacgaagattttatggacgctatccttgaggttaattgccgcttaaattttgattggtaccagaaaaaatttaggtgcaagccaagaagaaaacgagtctgaattattatgcctgatcctttgtccgaacctgccctaaatggcgaaatataattgtttttttttgtgatttggcgaaaatgaatttgataaagcgtttaattattttacaaacagaaaattatacacaaatatttgctttttaaaaaacataagaagattttggaactggccttttgtattcgtccgttagtttttgtctgcattttgtaagcaatgcttttgaacagcagttcgcttgtctcattaatttcggataaaaattatgagcggagaatccacggctatgtcagtgttcttcaggtgcgttttgtggtcggtttaccattaaattttattccctttttaattaggacgagcgatggcgcagattatacgccgttttgaaggccaatttgttatttttatttgagtcgtccgaacgccttgaaatccccgtgctgttaattgtaatggaagactttgtggtcgaattggccgatgacaatacgatgggaaggcaaaattcgttctccatcaaattcaacacgtaatttggagaaggggcacaaataatcattggaatttcctcttttaaattctcatttttttcagcaccggccacaattacataatggcggccaccgattatgacgctttgcagaattggatttctgttttgacttcgtgctcatttgagtttatggaggcgacacgacagtcgctagagagtgtagaggaaaagggtacggaaaaagaagaaaaggaaggggagaagagcgaagagagcacggaaaagggcgggacagagaaaaatgactgatcacaacattggcacatctgtgcttaaaattaaa

SEQ ID NO: 47160 - DNA, 2493 bp, Heterodera glycines
ggacggctcctgctattggacgtatacgcttgagcaggtgctatcaccaacaccgccgccctcgccaccgctaccaacagccgttgaagggacgccgcagcagcaaaacggaccggtgccaattggtgagaagctgacgacggacaacaacaacgaacgccaaattggacaacagcaaattcttctcggccaaacattcgattgggcacaattcaaagtgagtggaaaattgggggaaataaatgaaaatgaaacatttttcgaaaacgggtttgcgatctggaaatttttgctcgatttggaaaagcgcagtaaaaaattaaaaattttgtcgtccaaccaaaattcttcactgctgtgtcaaaattttaaatattaaaatttcttcttaaaattcatccagaaaatcgctcatttttttgaaaaatttgtaaaaaatagaaaattccctccccgttttgtcagaatcgtctcgcgttggatcgctgcgtgtgcatgggccacagttttggcgccgcctcgtcgctgtccgcatgtgccgaatatccgtcgctgttcaacgcctgtgtgctgctcgacgcctggctgtacccggtggaacgacgaatgtatccggcgactgtgcaggtgtgtgaaatgcgattttttggaaaaaaattttgaggaacggcggaagggtgccgataggcgccactggaaatttttaattttgttaaatttgttcaaattcaaaatttgtcttctttccccccttcatcggcacacacacccaatgggattcgaacccgcgccaataaaacccatttttgtgcaaaaaataaatttggcccgtttccagaaaatttcgggttttttttttttgctcatcacctttccccacttttttagcccgtgctgatgctcaacgccagcaaatggcaatggccacacaatgtgcgacgaatgcagcgactgttagcgaaggcgaccactgccaccaatgacgacaaaacagcaacggagacgacaacaacgacggcaccgcagcaacagtcgcaggacggcgccgcaacgacagcagcaactgcacagccgagtgtcaccaacacggacagccgaatgatgttcacgataaagtgagtggtcgaagaagcggtgggaaaagcaaaaatatacatattttcttggttagaaacaaaaaattttctgttatttttaatttttttgctaccctgttctttgcaaattggtccgtgtaaaaacaaagaattcacccactctttttggcattccccgaattgcttgctcatatttatttgaacatttgtttcctttgcaggggcattgtgcaccaatcgttcagcgactttggcttcctggtgcctggccgtgtcgcccgttacatcggcgttcagagcgacttggacccgctgttgaccggcacagccgtattcgagatggttctgcagttcttggagtcgcaatttctgcaccagcaacaacagaaggaggacgaggaggacacggaagatgaagaaggagaagaagacgagtcggaagaggaagaaaaggaagaggaaggagagaaggagtcaaaagagagggaggaggagggcaaagcgatgtgcggactgagcaaggggagcaggacgaagtggcgagaaggtgaaaaacggcattacctttaatttggagttcattatgtttcctccccaccccccgaaaaaatcaacaaattttcaaacttaagagaatttttcggaaaaaaacaaaaaaaaaatttccagcgatttcttgaaaaaatttagtaatgcatcataaaagtaaaaaaatcactgaaaaattttcgtttttttgaaattttattagaaaaaaattttcgggcgggaaacgagctctgctctccctaatttgtaaggtggagggggagtttgaatccaaaactaacaatttttgatacaatttgaccaataatatgggaaatccatgcattttgtcaaattttccccaaatttacagcaatgcctccgcgttggaccgtttgcgtcgtttggtggcggagaaatacgcggcttttgtggtggaagggacggacattccgcaggtgaattggggtcgtgggcatattggatggccatttggggcgcctttaacaattttggaaaaattgttttcacactaacatgttttcaaaaaataaaaaatattttttcttaatttccccaccttttattaatgtttttttattttcgccgaaaattttaagaaattgcaatttttcaccgtctaaacactgtgccctaattcaggccaaattggacgaggtggccccccttgtggaagcggaacaacagcaggcggtgtccgcggaggaggagcgcaaagtggccaatgacagcggcgtggacacaccgccgacgactgagacaacgacggaggaggcggccgagaataataatcagcccagtatttaaagaatgaagtgccaacagtgtgatattgaattcaaataaa

SEQ ID NO: 47161 - DNA, 1088 bp, Heterodera glycines
attttatttttgttcgagttcgggtcaggggttcgatattggcaaaaatgggtgctatattcgtgatcagcgaccttgaaaaccccttaaaacttattttcattaatttctaaaacacatttataggaatctgaaaatgtatgtttaaaataccctgtaaacttaaaaagtacccatttttctcatacaaatcccaaattggggcattttctcatccaaatccatagtttcgacatttttctcctccgattcctgcatttttcacatccaaatcccgaattcctgcatttttcacatccaaatcccgaattcctgcatttttcacatccaaatcccgaattttttttgtctcttcccttgcggcaacactgttgttttggcacccatcgcaggtgttgcgcaaagggtccggcacactgtgcgaggcgttgctgatggtgcaggcgcagcgcagcaacatcattttccccaacaaacagacggccaaggagcagcggatgaccgacgccggacacttgattctcagcgatacatacgtggtgagagttgacaaatgatgagcaaaacgagccgaggaatgggaggggggacctgaaaagcgaaaaactaaattaaaaattttcgtcccattcggtgcttggacattactcaaaaaccatcaaaaagggcattgttcagaaaaccatcaaatggaaaatttttgacaaaaaactcttcattaccttgcttaagggtaaccaaatttttaaaaactcttggtatcattcgatagctttaagtgttctttattagcctgcaaattttcaaaaatgttcgttaactttcaaaaagttatggctagaggaaccaaaaaaaaacaaaacaggtttttcgaacatttttgggaacttacaattagctaaattttttgaaatttggcgaacaattgaaaatattaataacaccgaaacatccttcgggcagtgcataaaattgaaaattgctttccttaaaagggtggccatgtggaggcggtggagtcgggcgtgttccgagcggacatcccatgccgattcaagctggacgtggaggcattggcccaactcgtg

SEQ ID NO: 47162 - DNA, 1716 bp, Heterodera glycines
ataagaaacaacaatttgattttggtaaaagcgaacagaaacaatgaccacgcaactaaaggtaattgattggattcaaaaagatggaaaattaactttttacatagattttgaaaagattatgctggataattcctcacaaacagcggaacgcattaatagccatattaacaaacatttaacttctcatgaaaatgaagaaagtgacacttcggaggacgaagaggaggaggaggaggaccaaggggacagcgatgtcagtgaagaaaggtgggattggacatatttcaggaagggacttagggattttggaaaatgcaatttatgggttaaattcggatatttaagcctgtgaaatataggaaccctgaagatctgatcaactctgagctttctgcggttaaattgcccgactctgagcagcagcgaccggacgacgccgtgtcgattataaacagtgcattcagcaacagaaaatcgttcagctgtccaaaaactaaaagcgaccttctaaccggtataaaaattaaaatatttgtccaaaaattcattcaataaaatgacttcaaatgaaggcacttcgacggcaaatttaagtcccgaggacattggcattatcgcatcaatgggcgactcattggccaccggtgccgggctttggccgcggacggacatcgaattccgcggtgccgcctttcccattgggggtgatgcgacaattggtgggaaagaaaacaaatattgaatcattcattgttgccctaaggaagatacaaataaatataaattattagcccattaaaaaacgatttggtcaagaattggtagattttgggcaataagaaaattattttttacttaatcctgtaaaaaataataaaatttcacaaacttgccaaattaatgttcaaaatgggctgaatgataatactttttcggattgtttggctaattataaggtagttgcttcttttttaaagcttcgcttgcattatttcctaatatatttcattcataaaagatggtctcgtcaccgtccccaacattctgcgcgagttcatcgactccaatttgctcttcggagtttctcacggaatgggccaacgcgaccaattgcccgaaaaccaactgaatgtggcagtcagtggggcgagcagttcttcgatgcctggacaggtccaagttgacgacgcaccgtgttttatatggaattcttccgtgtttaggccgtcgaattggtgagacggatgaagcgacttcgggaattggatgtgttcaacacttgggctttgattattgtcaccattggaaccgaagaggtgggtaaaattagccatttttgcaaaaaaaaaaaagaattagattttcaaaaggtctgcaaaaattgcacgggtccaaatacaaaggcactcgtccaggcattggacattttgaaccgtgggattcacaaagcactggtgattttgttgggtattagtgccattcactgcaatttagacattttgaaaatgactttcaggcccaattcacgtcacttcgctgtaccaacaaaagttcaatttgctcaagtccgtttaaatattttattgtcttttttgaatttttccaaggttttttaaggacgcgttgtttatgctctcagaataaagacgacaaatttatgagtgcactgagcgaagaatgggtaaaggcatttgaggagattcagacgcacat

SEQ ID NO: 47163 - DNA, 1208 bp, Heterodera glycines
atgacttgcctacaaaaaatcagcgacagcagtcctctagcaattaacagtggcctaaacattttctcagttccaccgaccaatgtgtccgttgttcgctcattctttcgtcaggtgcttccactcgcaacaatcacgcaagaatcgccttacctatttcggctttacagtgacaatttgtggactgatttatctcggatatatctttatctcgaactgtccattgaaaaaccgggagcaaacgataaatgggttgcgatagaggacgcggatactagtgtctctgccattcaagggattggtcaaacatttgtccagcaactaaaagttacggttggcaacacggaagtatacgatagcggaaacctatacccattcaaggcctatatcaccaatgagttaagctttccaataaatgccaagaaaaattttcttggttcaacagggtattatcacaccgtaaaccaagatgactcaacagacgaggggttcaaagagcgttgtaaaattttttaagggtggaaaaaatgcgcaatttttctcccgtctcgactttgatttgggaaaccaagagctttatctcttaaataatttggacttgctcttcacaatttacaaggccaaagatgtctttcttttgcaaacattaaaagcaaatgattccaccaaatatcgtttgacagttcacgatgtcaagatttatgccaaacgaatttgagtacaatgtattcagcgcaaccattcctcgacgtgtgacaatagcgttggttggcaattcagcatttcatggtgactacaaactgagtcccttcatgtttgaaccgtttgatttgcgtgagatttcggtacatgctggtggcgtagtttacccagctgttccttataaactaaatttttcaaatgatcactttgtcacagcctttgttgacatgtatgaggcactcggaatggctaactctgaacgttcatttgacatttcaatggcccagttcaaaaaagggtggaccttttttgtcattcgaatgacatccacgcttgacgacagctgtggatttgagctgttgagaagcggtacgacaaacgtacgagcaacattcaattcaccaattccgcttggtggtgtagagatgattgtcttgggtgaattcgaccaaatgattatggttgattataaccggcacattgttaccgattcaaagcttggataa

SEQ ID NO: 47164 - DNA, 796 bp, Heterodera glycines
catgggacagtgctcacaaaaatccaaagtggagagggcaaagtttgaaatgaaaggcgaattcgaccgacccaaaaagcgaaggcgtctcaccggggcacagaaaaagcgcttcttcgaaaaacagcaaaagtaacaaaaaatcgataaaacgcaaaaagaaaaaatttgtaaaagaaatcaatcaaatgcaacgttttaaggattttcgagtggaagccggaaaaaccgcggaactatcggccgccctgcgagtgcactttggtacttcgcggaatgttcaatttggaggaaattgacgcgaacgcacagcgaattttcacgcttaaagaggcaaatttccgttggatttgaggaggaataatgccaaaggattaaggacactcaaaaactatgcgaacgctttgggccggtgaaaaaagtgacggtttacgatgtgagcagaaaatatcaaatcgaaccaaaacgaaagttaattccattttcagaccaatccggacggagttgtgacggtcacttttgacaacgtcgaacacactgacgccgctgttcaagcaatcgacggacgaattgtggctgggcgtgttgtgcaggtaaccgacggccaaataaatttaaattacaaaatacattttacgtatttaaggctaaacactgggacggtaaagaaaagtttaaaagggctgaaactgcgcaagagaaagagagaagggaaaacgcatgggaagaatttttgggaaacgatgaagatgaaaaggaaatggaggaggacaaaaaggaaacggaggaggacaaa

SEQ ID NO: 47165 - DNA, 1200 bp, Heterodera glycines
atggcatttcgcgcactttctttcgcccgtcgtccgtttacaacttcgtccatttgccgtaaagaaattgacctggtcgccggtgtttatctgaacaaagttcgggaagtggttggcaaacaaaggttcgttattatgtaaaaagtgggttctaatcgacttctgggagtctaatcaatgaccgtcatcagtttctttgaccattaatcttttcttatccagtcaatgcttgcttacatttttgggcataaaacggaagcttaaagcctacggaatttgtttttttataactaaattatgggctaataacactagacaaaaagttgaaaatttggtgttttctcattgtaacttctttcttgatttcaactttttctctcttcttttatttataaattcaagagactataagctttagtttgataccaataatgtatactttgtcaaagtaaaaaaatttatggccacaaaaacaggatggttattgtttggacgtaaaaaggtagtcggagaatggacctttttttgcaaatttcaattgaaaaaggaataacctggaactgggttttttttatactgcctaggacctgcattttttacacaaaaacccaagaaaatccagccgaactgggctgacaatgaacctggaaccagaagaattctgttttggatccagacccgccgaattttggtttttggcggaaaaaaccaattgtctccacccccctcaagcgggccttgattttttttttttttgtaaattttcgaatccctttacaaaattaattgtttcatgtttcagtgagattctcaattcgcctcagttgaagaaggagttgaacgaccaactgaaccgtttggcccaaaaattccatttgccggatgccgacgcggttgccaagttgggccttcagtttaaggttcgttggtacctcggcgacttagagacaaagacttttgaacaaatcgggatcgtttactgatccctgcctttatcaaaatagtcgggatcggggtctcgatacccccccccccgacttttgtcgaatatttccaacaaatttttgcatttttgaaaaattcgttttttattggtttttacttttcatctagtaccagggtggctatattataggaaatacggtaagtgccaaattttaggttttctcgggtttggggggacgtcgacctactctcgaa

SEQ ID NO: 47166 - DNA, 1327 bp, Heterodera glycines
ttcaggggtggcgggatgcaaaaccctgacttttgatgccgcatttaattgttttaaaaacgccatccttttaggcgccatggaaaattggggtctgatcaccgcgcgggagagcagcgttctgtacgacccggcaaagagttcctcctcccacagacagtggctgaccacagtgatgtcgcacgaagtggcccacttttggttcggtaacctcgtgacaatggtcagtcagtcaatccgttggggggggggagagaatttttctcgaaaaaaggggacaaatgggcgacaatccgagattttttgggatataactcctttaataattgtccgaattgaaccaaattgtttaaaaatatttttaaattttttgagaatgctttaatttattggaaatatttcttgaaatctcttaaggagtaacattgaatgaatttattttttatttgagttttttttgcatttttgctccctcaactcacccctgctgaaatttttataagtaaatttcaagaaaaaaaagtttaattttttttatggtcaatttttgacaattcatcaaaaaaattttgtcaaaaattggtaaaaattttttttttaattttcattttgttgttgtacatcatatctaattattgtatataataaaataatctatttttcgtcgtgttcagaagtggtggcaggacctttggctgaaggagggcttcgcctgcttcatggagtctctgttcaccgccaaaaaataccccgagttcaaagtgtggtccacctttgtggacaacacggtggtccgagccatgggcatggattcattgcgcaattcgcacccaatcgaggtaaattttcaaaaaaaaattttttttttgttgttacgaacctgaaaaaacttgttttccaaataattttgtatacaaacagagaaatttgccaattcggaaaatgcggccacctaaaatgacttaaaaaaaaaaaatttttttttccaattaatttttgcccttttttattgaaaggtgcccatcgaaaatccgaacgaacttgacgagatttacgacgaggtcacctacgagaagtcctgctcggtgctgcgcatgttgttcaactacttgggcgagtccaccttccaaaaggcactgcgcgcctatctgaagaagcaccaatacgccaacgcggacactgacgacctgtggcactgcatgagcgaggcttcggacggcacagtgcgtttttcaaaaaacccgctagaaaattatcagaattttttttccttgaaattttaacacaaaaaatttgaacttaaaattataaatttaaaaaaactgga

SEQ ID NO: 47167 - DNA, 519 bp, Heterodera glycines
tctctccatgaacaccactgaaatcgaccgacatttacccactgcgatgactttgcttcaacctttcgacggcgtccctttccgcgaattgcccgtcgttcacatcaaagcgtcgtccaacaacacaatcattcacgcgttcaatttcattacggtttcgcctcgccttttctccttcaaagcttcgctcccttcagaagagggccattatctatacttcgtgccgcaaggagggatttaaaaacaccaaaaagaagtcgccgttggccggccaaacgacgggcgtagcggcaggtcaaaagctgttgaggcgaggcgtttcgactgtccgcgtgatcattaagggcattgggccgggacggatcagttcggtgaggggattggcgttggctggtgtaaatgtagtttcggtgagtgtggtggcatttggccaaatcttcggaggaatgtctttttcagatttcggatgtgacgccaatccccgaattggggcctcggcctaagaaaatccgaagggtg

SEQ ID NO: 47168 - DNA, 2748 bp, Heterodera glycines
atgcactcgtcctcatttacgctgccgttgcgcagcaacaatagcaacagcggcggcggaagcataatgaatttgcaccagacatcgggcagcgaggacttcggcacgcgacggagtgccatcaccgccggctccgcggggggaggcggcggaagcagacagataagcgttggcagtgccgggggcccaacaatcagcggcacgtcgacaatcagtgccggaagcggaatgaccaccatcggacggaagggcattttctttgcgcgggtaaaaaggacaaaaaaaaattaatgatttaattgagtcactccttttgctttggctattaaccaattaattaattatttgtttaatttcaggaaaaattgactttcgcccatttggaaaaaatttatgcgcaagcgatcgcaaatcgcagcaacgatttgagcattttggagttggaagcacattggacaaattttgtgcacatcaacaaactgttgaacaaaagacagagcgatcagcaagaagcaatttgggagattattgtaattaatgcaaaatgaatgaaaaacgaaaataataattaaaaaataatttttaatcgaatttaatttaattccagacaaccgaacgccgttacattttgcagctgcaaagtttggaggacatggagtggtgctttgtggagctgcaaaagcaaggctttatgcgtgatgtgaatcggcagtgtgtgttcctgaattattcacagcttttgcgttgcaacttggcattttggcaatgtgccattgtgccaatgctggagcgatcgcggtgtgcatttaggaggagggaaaattaaagaaattattaaagacgggaaaagtgtttaataactcttcattttattacctaaaatcggtgatactgtctgctgggctttagccaataggaaaagcataaaaagctgtgcccataaaacgaaatcacaaaattggcaaattcaggcaaagccatgagccgctgaacgcgctgctgatgcagcccgggttcgactccatcccggactggtccttctgctacatcgacttcaacattggtcacgcggacagtcacgcgtatgtgcagaagcggcagaaggacaacgaagtgttcgcggagtttgttaaatgggcggagcagcacacgatgctgaaccggcagaagctagtggacgtgctcagctcgccgatgcaacggatgacgcgctattcgctgctgctgaaggcggtccaacgctgcgcggcggacacggaggagaaaatcggcattcaggtacggtttgtacttctttggcacaactttgcccatttcatcccctcagggcatgatagaatgcgcggagacggccacaattcggttgaattacgagctgaacaacaacgacttgcgcctccaattgtccgagatcatgaagaccatcgagagttacgacgtggtggacagcgacgagttcgaacggcttttccctttgcccacggcgccggcgcccgtccaacagttggcccagcagagcaaccagcaccaacaattgctggccgctatgagccgtccgccgccccacttcaacctgatgctgccaatgccgttcatcggcgggcagccccggttcaggcggatgtacacgcggggcgacctgaaaatgcgcgagggccgacagagtcccaaggtgggacagcgccgtagggcagccattaggggcaattaattaataagtccattggtacaaagccatttgcccagcatttgaacgcgctgaatttcatggaaaaatatttttccattacagcaagaagtgcattgcattttgttcacggacatgctgctcatttgtcgaatggtctcccgaagaaatgaccgactccgtgtcaccaaacccccaatgcacatctccaacctccgtttccaccacttcagcgaaggaagtgggcatttatcatttatccactcacttaaatgctccttaattagcttccacttggtttaattgcctaattatctctccccgttttctttattaatcctaattaatcttaatttacttgtctcatttcccaaaaaaggcggcttctacttgatttgcatgaacgagttcgaatcgccgtcccaatttctgttgatgttcaccgcaagtgttgaggaaacgaggcgctggttggaaatgatggtgatggcacaggaggaatttcgctccctgcgcacagccaatgcgcagaacaacagctattattatggtaagcccaagtgattaacattaattcattattggttaagcctcgagaaaagcctctagggcttttgagtcagtctcgactcattcattcccgagtttcggataatttccattttttattggcatattattatatattctcgagtctcgagataactttctcatgcatcgtttgtaaaagcaatcaatggcattcagcagaaggctgtttcggaagcgttgaacggctcgtggcgcaaccgccgagttgcaacaaatgctgtggtggtggtggtcacaatgctacacaccgaaatgccaccagcgtcgacatttgtgcatcgcatttgcgacggggcgaaacgctgcgcacaatgcccgtccatcagaaacaattggcacaaaaaaatacagcattggcacagtgcaaagggtgtgccgaagcggggccgaacaacggcgattttgagggggtggtccatcggaagagcagaagcatggactcacaggtggccatttggggtgctgtatag

SEQ ID NO: 47169 - DNA, 868 bp, Heterodera glycines
atgaagcagccagaaccaataattaacaaagaaaatcttcgcccagccaatcagccaagcaataaaatgcatgaaggaataaattattcggagttcggaaaggaatggaagtaggtgatctttaactaaccttgtaataaattaacactagcgaaaaacaatggaccctttctgactttgacattggacgtccgctcggcaaaggaaaattcggaaatgtttatttggcgcgcgaccgaaagtatcgcattccggtggcgcttaaggtaagagaaaacatattttaacacaaaatggatgaaaaaatcctttgagaacagttccatggatttgcagttaatttgtctttgggcatgtgccatttattgcactttttccctcagattctcttcaaatctcagctggtcaaagggaatgtggagcaccaattggtccgtgagatagaaattcatgcccacctcaggtgagttcatttcttttgttagctgaggtcactaaccctctctgagctgatcactttttgaaaaaatggttattattatgtatcatggcctggttttttgcggaagcaagaaatctttgctgttctttcagacacccgaacattttgcggatgttcaactattttcacgacgataagaaagtgtacctcatattggagtacgctcttcatggcgaattgttcaaagttttgcaaaaaagtcgtcggttctctgagtcaacttctgcccaggtaatcacaccgaagctgttcattgtcagttatgttcttctgtctgttttctattcattgtttcagtacatctttcaagtgtccgatgcgctcaattattgtcactcaaaaaaggtcatccatcgtgacatcaaa

SEQ ID NO: 47170 - DNA, 2461 bp, Heterodera glycines
  unsure (1)..(2461): unsure at all n locations
atggaaaatcaaagcaacaagggattgttcgcaatatttggactgtttttaatgcgtttttcgctccctttccaggccaaactcgagcgcgtgttcggcacccccgcatgctccagctccttgtcggtcgaccccatttccggcctcgtcgcttaccctgccggttccattgttgtggtgctcaacccgcgaacactttctcaagcgcatttggtctgtgccagcaaaaatcaggtggttgaattattgtaatttaagcacaaattttttctcgaaaatctcaaaaaaagagggaaaatcttcaaaaaaatccagcggcgcatatcggcatctccggactcctttttcctaattttttttttttttttgaaaagccgtaataaaaaggcgtgaaaagcaaaaaataccccgcatgccgaaatcctaggaccgtcccttgaaaataaatattcaaaaataaattcgaatttaaaattgatgaaaatgttttcatggtttcttttatttatcatggttccttgtgttttttctttttgtagcaaaaaatgctttaaattgtatggtttttaattcaagcaattactttcagctgaccagtttggccttttcgcccaatgggcgttacattgtcaccggagaatttggtggtgacccaaaagtgcgtgtgtgggaattacggcacgagaagcacacgcacggggagcaacgagttgaattggaaggccatcggcttggcatcagttgcgtggtcagtttaaaagaaattttataataaaaatcgtgcattctacggattcgtcactaatttaatgtttcagagcttcacaaaggattccgaccaggtcatctctattggcaatcagcacgacaagtccgtttgcgtgtgggattggcggacgagaaaaaaattggccgaaaccagactgacttgtcaggtggggaacattcaccttttgtttacaaaatgtaccaacaaacatcacctcctttgccaggttaatgcgatggatgtgagtgaatcggggcggatgttcgtcaccgtcggtgtgcggcacgtcaaattttggtatttgggaagcaattccaacggtgaaaacggcagcgccggtgttgttttgcacggtcggtccgccatcctcgccgaccaacgcaacaacactttcgtggacgtttgctgtgcctcgaacaatcgaaccttctcaattacggtgagcggacgaaataaaaaaacatggcaattttattcaattgcagatctcaaagttactggttgaatttgttgataagaagcttacgaatatttatgagctcggcggtgaggtataaaatatacacttttatttttaatcttaaaactttaaaaaaaattttttttgtttatttttaggtgcctttctcattgtcaattggcgcctctcaccaattgttcatgggtttcggaaatggtgcaatccgtgccatgaatttggaacgaatggagcccgaacttgagttgtgccgtcctcatgccttacattgtgacatttgtgcgatgggcgatggcacggggacggaagaaaaccaagcgaaaaagtgggagtgattttgttgacagggcttagagtgcattccccaaaaattcattttttgaaaaagcaaaaaaaaaaaagaccttcggttccagctctcagatttttttggatacgggcttgcttagtttattaataaatactttttttgattatatcaattgttgcatttttcagattcccggatgtccattcaattgtcttccattctcattccaaaacactcactgctctctacaggtattctcaaaaattccataaaaatctgctttgcaatttgcgattgatcttgtaaattatttatcacaatacaacaaattgatcgtgttcagtgatcgttccatttaccattggtctgtccaaaacgcgtcttccaaaacgaaggtcttcaaaataaagttggtcatttgtcttttcgcaatgagttttccttcattttcttttttctgttcagttcccaacttttccatgttggccctgtgttcgatattgaggtgaatatcaaatagatttttacgaatttctctaaaattcccattttaggtctctaaatcacagccccaactgtttttcaccgccggagccgacgaaactgtccgcatttggtgcatgaacaacagtgacaccgccacggcacattcagtgacgacggtaacggacagcaacgggtcgccttcgcctcccattttggacattgggccgcccaatcatttctcattggaattgcgcaaaattttataccttaatccgggcactgacacgctcagcgaacagccggacagtgagtttatttaatctaattaacataattattccgtgactcatttacagaaaattttggcggcattatgtcggacaccctcgnactccactacgggagtgcgttgcattan

SEQ ID NO: 47171 - DNA, 1843 bp, Heterodera glycines
atgcctcgcatttggatcgactattgcatgttgatgattcgtcgtggccaaataacggaaacgcgtcgcgtgttcgaccgtgccattcgtgcacttccaataacccaacatatgcgcatttggcccctgtatattgactttgccacacgacacaacgttcccgagacagccattcgcgtgtaccgtcgctttctgaaggtataccccggcgggcgagaagactttgtggagtatttgaaaagtatcgacaaattggacgaagcggcacaacagttggtcatcttggtgaacgaagacagaccgatcagcgagaagggcaagactggccaccaggtcgaataaatttttatatttaggcccgtatccaggggagatgaggggcgcgcactcccattcctaaaatgaaaatatttttttttagaagaaaatgcagttttgaaattttcagccattttcttaataaatatctcgttaaacatgactaattcctttaaaatggtaagaattttaaactaaaaagatagccatttagtcgttctgtaaaaaatggtgctacttttaattttggacaaattacgctgaaaaaaaaattgtgagactgaagagcgaaaacaaaacaaacttttcgtccgttggtgcctcctcaaaaattattttctgaatacgggcgacacgtttataaaatatcgatactttacaatgtgcagttacttttagctttggactgagctgtgtgatttgatctccaaaaacccaaataaaattttcacgcttcgcgtcgagccgatcattcgccaagggatcggccgttacactgaccaagtgggcggactttggctggcactcgctgagtattatattcgaatgccgaactttgagaaggtcatcatcaatttggccaacaaataataattggtttcatttaggctcgtgacatcttcgaagaagcattgggtgtggtgaagacagtccgcgacttcacccaattgtttgacgcctattcaaaattcatggaacgactgacctcactgaaaatggacgcgttgtcctccgcccggccaacccaagttgatgagcgcgagttggagttggaattggttatgacacgctttgagcatctgatgaaccgacggccattgcttctgaacagtgtgttgctgcgccaaaacccgcataatgtgcacgaatgggtgaaccgagtgcaaatttacgagggcgaccccgaaaatgtaagaaattggcgtatgggaaaattgaaaaacatcgaaggaaatggcatcaaaaacaaaaaaaaaagaagttattattttatttgactcttgcgccaaattccaaagctctcaaaatttggtctgttttagtcattattttaattcatttttacaatcattatattttaaaaacatttcgttgtattttttttctcttgctgctgaatttgtgttaaataatcctagcggaattattttagcaaattgcaactttcgaaaaagcggtggctaccgtggacccgaagcaacaagtcggccgactcggtcagctgtggattgagtttggcaagctgtacgaaaagttagacaaattggacgaggcacggaaggtgttcgacagagcggtgcaggcaaattttgttcgtgtggacgaattggcccaagtatggtgtgaatatgccgagatggagcttcggcacaggtttggcattttttttatttcgataaaaaataaattgctttccattgttcagcaattacgaattggcaactgctttgcttcgtcgtgccactacgcctccaccagtgcgtcgtgacagttactttgatgattcggcaaagtgcagaaccgc

SEQ ID NO: 47172 - DNA, 1578 bp, Heterodera glycines
gcttcgcttcgttgtttggcacagcacggacgctttttggaaattggaaaggtcgacttggcacaaaactcggccttgggcatgtcgctattcttgaaaaacgttactttccacggcattctgttggatgccatcatggaccaatcggtgggcgacatggaggactggatggagtgcgcaaggctctttgagcagggcatccaccggggggtggtacgaccactcgacgccaccgtattcccttctgacaaatgcgaggaggcattccggtaagaggagccgttccgccgccggcgacacaatcaaaaattttaattgacctctttttctaaggtttatgtcggccggcaaacacaaaggcaaagtgctgatccaaatccgcgaggaggaacaacaactgttgtgcgcgccgtctccgatgcgcgtgagggccgtgtgcaggacactgtgcaatccagaacatgtttatctgatcactggggggctgggcgggttcggattggaattggcgcagtggctgatcaacaggggcgcgcgtaagctcgtgctcacctctcgatcgggaattcggactggtgagtacctttgggaagactttcaccacaactaaagccccccccccttaggctatcagtcgcgatgtgttcacttttggcgacgtatgaaagtgtcagtcgcggtcagcacacttaacatagccaaaaaagtgaggagggaaagggtttttgtcggcactcactgatcactcaccgccacaggaggacgcggtcgagctggtcagaagttgtcttgagattgggccgttgggcggagtgtttcacttggccatggtgctaagggactgtctgttcgagaatcagaaccagcaaaacttcaaagacgcggcggaggcgaagtatttcggcacgattagtcttgacgaggcgacgcgcaaaggctgcgagcagttacgatggttcgtcgtgttctcctccatcacttcgggacgaggaaatgccggacagaccaattacgggtggtccaactcgacaatggtcagtcatgggaaaggatttggctttcgctagagtgccattggcgtcgaaagtgtcgagaagactcgttttttgagtggcattgtgttgtaccctttcacctcctcccttttaaggagcgaatcatcgaacagcgccgtgcggatggtttccccggcattgccatccaatggggcgccatcggagacgtgggcgtaatccttgagaacatgggcgacaataacactgtggtgggcgggacactgccgcagagaatgccgagctgtttggggtctttggacctgtttctctcgtggaaccatcctattgtttcgaggcaaaacgcgggcaaagcggcgaatgacttactctttctgcttgttcagttacatcaaagcggacaccagtggaaagaagcagtcgggcggcggcaatttgttgcagacgatcgcccacattttgggtgtcaacgacgtctctcagctgaacccggacgccaatttgggcgatttgggcctggactcgctgatgggtgtggaaataaacaggcactggaacgcgacta

SEQ ID NO: 47173 - DNA, 811 bp, Heterodera glycines
atggacgccgaagatgcgaacggaaaacgcgaggctgaatcgttgcgcgttatcgccttcttcggcgtgtgtctgtccacaatgtgagggggaataaaatttgtttattttttttaattttctatattaatttcctttaattttatgttttatttagaaaaagcaaataaataagaccaataaagaaaatataattaatattaaactctttttcatttttttaaattaacaaatttttatatcaaaatattatttcattgtttgtttttaaaattaattttcagctccatgatgatctgtgtggtcactgtgccgttggcgtaccaacactttcaacagattggttcgctgatgcaaaatgagctggacttttgccagtcacggtccggcaacatttggcgagaggtccaccgataagcgaaagaaatgattaatttataaaataataattttatttttctttgtttcaataaaattattcttttactccattaattaattcatatacacaaaatccctttaatttaattatgcaaatttaatttgaaattcccataataatcaattaataataataaccaatttaagattgcccgtacacaagcttattcccatgcgtccggcggtgtacggtacacgcgtcaagccgctgcttcgggttacggtgccgctccacctccaccagcggcaccttcgtccgcaaccgctggaggcggttacggtggcactgctgctgtctcagccccggcgccgtctcctccacccgctagttatggtggcattgcgccggccgccagtgcaaagccatcat

SEQ ID NO: 47174 - DNA, 456 bp, Heterodera glycines
ccgctttttgtgctgctgctccatttgctacttgctgctgttgttcggtcccaggacagctgctacgtgaccgattcggggcacacgtgctgtgacaaggcactcggtgagtcatccattgccattggcacggaaagtgacgacaaatcactctttggcggcacactatcctaaacaatcgcagaatcggccatgaaatcggcgatgagcggcaaagatttgttgtcctcggccgatcggatccaaaagtcggcggagggagcaatcggcggaaaattcgaaaccgtaagaaaaaacgaaacaaaacattgaaacaaaggcatcaaaacgatactttccatgcatccgccaaaaaaggtagtggcatttgacgactttgcgcacaaatcgcacttcaaagacggcaaatcgtgcaaagtggagaaggacggacaagtggcattggcatggcaaccg

SEQ ID NO: 47175 - DNA, 4207 bp, Heterodera glycines
atggaaatggcatcagaatcagcagttacaacgacgacctcagcaaatttattgcttgatcagcagcacttaaaaaacagcacaaaacgtgagaccattgccaatgcaagtgccgactcagtcagcgaagactcggaagaacaagtggggagagcagactcaacagtgccaagcaacgacgaagaggaggaaatgcgagggtacaatttaataccacccgaagcacggccaagctcaacattggagaaagtggaatttgagcgggtaattctcaaatcatttaaatgcaatgcttaataactgagcctggtataggggtcgcacaaccgagtgaaactttacgtgctttgcgaccaaaggtcgtgggatgaccgagggactggacacgtcgcgtgtttgcaatcgttggaaaacaacaacacttggtgcataattgtccgtttggaaacaaatggtatgctttttatagacaattcggaaaaaacgtaatattgcatttgagtttatttagaaaagaatgtgttggagtcaaaaatacaactggacacagtgtaccaaaagcagcaaggcactttgattgtgtggtcggagtcggacacttgcgacttggcactcagcttccaagaaaaggccggctgcactgagctgtgggagaaatatgcagaatacagggcaaagaccccgagaccgacgctgaggtgggtaatgaatgcttaatgccaatttgggtatttctgattttttaggaagagaatgagagcgaggagaatgagccgagcgacagcaggtaaattcgagaatttggcaggttatcagtttgaggtcttacaattagcacttcgggcatttcaaatgcgtgctctacgtcaagcgtcagcataccgccgtgcaccttgcaaaacttgggcgatttggagcaggccttgtcgaacaacatgttcgcgaacagtttgcgcgagaagatggccaccgcaattctgcagaatgggcaagcgaaatgaatgaattacaatttttttaaatttggttgttcaacagttacattaacaaactttgcgaattgttcgaactctgtgaagatttggagaacacaaaaatgctcaaccaattggcttccatcgctaagaatttgtttcttctgaataacaattccattttgaatgaacttattgaagacaaatatttcaagtgggtggcctttcatttctaaactctttgctttcgtcgtcacatttattcaatttcaggggcattgtcggaatgctcgaatatgacgcatcattcgatgagccaaaaaaacatcgtgaattcctttgggaacgttcaaagttcagagaagttctgcccatcagttctgaagaactaaaagccaaaatccatcaaacttttcgactccaatacgtccaggtgcattctttcttctcatctttgataagatttcttaattttcccattttaattaggatgtttgtttgccggccccttcaatttttgaggagaatcttctgacggtgttaaacagccatttgtttttcattagagccgaaattgtcaactcacttttggtcagtgaattgtttatttgggatgccttctaaatttctgaattgcaaagcacatttttaagaatgacaaggatttgctgcagcaactttttgaggaattgcgcaactcgtcaattaaccccgaaaggcagagagacctcactaactttctgaaggagttttgttcctttgcccattcgcttcagccgagtgggccgcaggggaaggaccaattctttaaagtgcgataaataaatcttcaaaaatttgaattctttgtttagacactaatcgataacaatgttctcggaacgatcgacccgtgcattagcagcccgttgccctccactcggacagccactgtcgaattgctgaccatcgtcgtcgacttcaacccgcaattgttccgtgattttctcatgaaacagtcgcgacaggaggggagaaatgtaccagtgcttttgaattgtgggttaatgcttatgcttttccattttcccaaaggattctctgctcatcaacaaactcgtcaaacacatgctcagtgaccgcgatgccgagttcactgctggcagccaaatgtctcaagttctgcgcgttctgttggaccccgagggcgttttggcggtttgtaatgaatttggagcgcaaaattaatccattcaaattagaaagagaaaggcgaatttcttcaaatgttttacaaacgcgcaattcaaacgatttatgcgccgattgttgacaatgtgaaggacgggcgactgatttgcggtgattttcttttatttgaatggaaatccaatggaatttaattcattttcaattttcagacacttattatatagcgaataggaccagtcaaatcatcgatttgctttgcttttttgtggaacatcatggcttcaatatgcgaacttgtaccatccagaagaatttgctccattctgtgcttatgaatttgcaaagcaagcatcacttcttggcattatgtattttattttttttgcttgggtcaagtttcttgaaaaacattggcgtttctctttgaggtgcgttgcgattgataagacggatcatcggtttgaaggacgacacgtacattcgacacatttgtgacaagggcactttggaccaaattgtgcagtgtttcgtcgccaatgggcagcgttacaatttactcaattcgtctctcattgaacttttcgaatttataaaaagggtcatcggcatattgttgattttttaattgtttaaataattccttttaaggaacggatttatccgctcattgagtacctaatcaacaaccattgggagaacacattcagcaaagtggactatgtgcaaacttttgtcaaaatgcacgacatttgggaggctcatttggccaacaaatctgacgagggcgaaaaagtgaaagaaaatggccagacgacgccattggccatgactccgccgaatgcccaatggcgcaaagagagagaacatgacgacgaggaattgttcttcagcaaggacgatgatgacgaaatggtgtgtcgagttggccctggcatttcatttttttactctgtttagccgaccgctcagtgtcgaaagtcgggcgtcgaccccctcttcccgtctcttctcagaaagcggaaaggtcatctctgaatggcactcttcccctcgtacttttacattgtgtttcagctaatgatgaggacggaattgccagtgttttcggtgggaatatcactccgccagcgggcggcgcagtgtccgtcagcaggatatccaaaatagtgattcgaatgagcagcaaagagccatcgtccgccgctgtcccattggtaaacggcgatggcggcagtccaagcgcagcacatacaaatgaccaaaatgtttggcttcaataattttggcattttgttgtgacttctttcttcagcttccttccacgtccgtcggccgatcgtccgaaaatgcttctgctgtggcggatggaccattggtgaaacgacctttggtggactacgacgacaggtcaaataattaattacacagaggaaacagaattttataattattatttttttaatttagcgatgacgaagaagaagaatctgaaaatgggcccagcagagaggacaatgcgaagggttcgccggaaaaggagcagaggagaggagaagcggagaatgggccgagcaatcggacgggtgactgaaggcggacggacgaccgactgtttatttccatcctttcggtctctcctttctttcacccattttcttgtgatttcgttcgaatgatcgtatcttggagatgtcgagaactcctttttgtccacctcttcccaatttaactatcgaagtgcctgaacatgcattttccatttatttgtggtcgtgtccggttgaaaggaatctcggattttggcattgtcaaaacattttcttttctttttttgcgatctccgtacaaacgaaaaatttaatattgtttctttattctttgtgattttattctgtaattaatatgcttttgtatgttatttacaattaatacaactaacagcggaaggtccaattacctatttaaaaaagaattcttttggaacccaaaaatactttgaacaaattgcattttctgtgttttggttttagtgacacaataaa

SEQ ID NO: 47176 - DNA, 1079 bp, Heterodera glycines
atgggcaccagacaacgttgccatttcctaacgttttgttgcgtcgcctttgtcacaattgtctttcttttgttccttttcccgagcgatgaccagcggagagaggccgctgacagtcgaacatacgcccaaaaaaggcattccgccgacggcggtgcgtcgtctgccgccgaggtggacaatttggccccgttcattttcattggtggcattccccgttcgggcaccacactgatgcgggcgatgttggacgcgcatccggaggtgcgctggtgagagggcattggaggagggaagggtaaatgcgtctcaatttttgtggtacagcggagaggaaacgagagtaatcccgcgaattttggcacttcgagcccagtggaagaaaagcgagaaggagtggcgcaggctgcaggtgaacccttttgaatggcggagacacactttcgaattggcctatccaaaaaacaaataattgcctttttcgtcgtctccgaatttcactgctggtttttaaatattttattttttggtgtccaatttgtgtttacgattaattttgctaaaggaagcgggcgtcggtgacgaagtgctcaactcggccatttccgccttcattgtcaatgtcatcgtcggacatggcgccgctgcgccgcggctgtgcaacaaagacccattcacactgaagtcgaccatttatttggcgcagctgttcccgaaggccaagttcattctgatgatcagagatgggcgcgccactgttcattcgatcatttcccgaaaagtgaccatcaccgggttcgacctgaacaatttccggcaatgtatgcagaaatggaatgccgggattcaggtaacggacaaaaaaaaatcgagtcgaatttgcaatggttttgtactttttcagataatgtacgaacagtgcaacgcggtgggccaagccaagtgtttgcccgtctattatgaacaggttggcctaccgtttggaataaatttctctatttcagctgatttcagttggttttgcatcccatgcgggaaatgaaacggttactgaacttcttggatttgccgtggaatga

SEQ ID NO: 47177 - DNA, 2662 bp, Heterodera glycines
atgcgactggtccacggcaaggacctgacccccgacgttcattatctgcacgagaaggatgattatcactttgtgaatgctgtgcacaagtacattgtgcgacatccggaacttccgtgggactcgccggagtttaacccatcagcaaacattcaacaaaacatcgcagaattccgggaaatctttgagcgcgaagttttcgacgaaaattatgagctaaagacaagagaggagaagaatgagctgatagagctggtcaagggatttcgattctatttcgcggacgagcttggacgttttatgctaaggattttcagcgacaaaatatcacacatcactttgacggatcagctggcctacgtgttgggctacgaacagcagcaagaaattcataacgaagaccaagccaagtacgctgttgacttggccggtggtgtcagtcacctgtgcatctacttaaacagcggaataatcgagagcatgatttttggcaactccttcgccaatctcctccaagtgattgcggtcgagggtacgtcgggcagtgtggtcgagaaggactttaagtcaccgttgttccacaaaattgtggctagagaggtggacgtactggacgttgagattcgtacgctcacaggacggtagtgttgtgattttcaaaatattttccctacttttttttttggtttaagagaggtgccttttgaatttggccaagttgtgctgactcttcagtttaaaaaagtcgtaactttctgatacaatggtccgagttatattcaacgggtcgaacttgcggttggagaattatcatcagcagggtggaagcatttcgtactttgagggagctccgaccttccagcgtggctatggctacttccttggaattccacggcagaagggagcgggggtgggagccgtactgcggaacctttggcgttatctccgccctatgatcgctgcggcgaagccctacgcaaccaacatagcagctgaagttggcaaagaggggcttgagcggggcgcgcgagtgcttgctgaggcagccaaaggcggcgacgtaaaggaagcgctactcgcagagggaagagaaggcatgaaaaccttgctggacaaggcgtccgcatcgctacagaagggcagagggagaagaaggaggaagagagggacgaaagccgagatcattttaaaacccacagacattgttggacaaactgttccccagagagctctgttgaaaaagaaaagatttgattcccttggctattattaatcctcatgttgtataaaaaagttgatgttgcgagtgcagaggtggtcaatagcggattggacttcttcagtacgccgccaacaaactgtgcggtgtccaactccagctatcgggagtacttgacgctgaacccgatcagctcaaggcctttccattttaaggcaaatattgggcaatgtataactcttatcagtgtttgttcagattcatccgatcaccagctacatagacctcagcaaagtgtttgtgtgcacggaattcaagctcaagaaaatcgcagaagacggagtggtagttgacgtaccagccaacgcggctgttggccttatacaaatgcccggtgcaactttcatccgcaatctgaaggtgcacatcaaccagcgtgaggtgtacgactccaaccagctgtacagctacaaggtgtacctggacaccgagctcagttaccctgcggcggcaaaggatgcctactttggcgtggcgggctattttcgagacagtgatccgacaaaagtgaacgaaaaacggaaaaaagcggtggaggagagcaagagcttccaaacgataagcaagctgagtgccgacatattcaaccaggacttgtacatgatcagcaacgtcgagattgacattgagctcgcactgcagtcggacgactttatggtccaccaggacgctgcgaataaggacaagtacacgcttgaaattgtcgactgtaggctgatcgtgaagactgtcgatttgatggacgggctgagtcttgacattgccaggaagttggacactgaacccgccagatacggtatccggaagtcgttcatgaaatcgctctttgtcactggcggtcgctatgacttctctgccaacctattcacggaggaggtgccacgaagagttgtcattggactggtgtccaatcagaattacattggccataatcagaagaatcccttctattttaatcaccacaacgtgagtggcaaatggcaactgcttgtgaatcagattattcaggtgcgggacattgagcttacggcctctggcaggacatatccccagtacccgtacaacctggactacaagaacaacaggtacgcaagggcatatcacgatgcccaagagcacctcggcatggcgtgcacaacggagagcaacggaatcagctacagcatgttcaagactgcctattgcctctatgtcttccaaatgaccaacgcgcaggaggactcgccaggatttgagctgatcaaagagggctgtactgcagtgaacatccgattcactgaagcagtacccaacgagggagttacattgattgcgtacggagaggcagacgggctcattcttattgatcgtaaccgttcgatcactagtgacctcacagtatga

SEQ ID NO: 47178 - DNA, 2552 bp, Heterodera glycines
tttgatggacaatccggggaaacctttgcgtttcaagcggagattgcgcagttgatgtacaatatggacaacgccacgaccaaggtttgtttgacagaattggtgactaattttttacataatttttgtgaaactttttttaaaggcgcatgacatcgaaaacgacccgagcaaagccgataaaacatggaccatcattgacactggcattggcatgaccaaagccgacctcgtcaacaaccttggaaccatcgccaaatccggaacgaaggcgttcatggaggctcttcaggttttgtttttcgtttggtcaacccccccccccccaatctaaaaaacacttgttacttaagaccggcattgtcgctttaatgcccgggcattttggcgccggtttctactcggctttctctgtggccgaccgcgtcacatcaaagcacaatgacgacgattgctaccaatgggagagctcagctggtggctcgttcatcattcgcaattgtgccgatcctgaagtcacccgcgggacaaagatcgtcctccacctgaaggaagaccaaacggcatatttgcaggtttgttgtactttggttcaaaaagtgcgtttttgacgctcaaaaattttacatttttctttcgcagtaaatgcgcaattgtcaacaaattatatttttaattaaaaatcatcaaatttttattgagttcaggtgttggtgctggtgttgtgcgtgttcatctgtgaatgcggtgtggggagaaagggcggccaagcagatggtgaaaggagcagccgcggacgaccaaacaatgacggcggggggacaagcggcggagcgggacagaaacggggaggaggacgtgtcggcggtcgcggtggtggaaaaggcaatggccgcggtggtggacgaggcggcggcgggcggggagggcggtcgccgcagcccccacaggaggctgatgaggaagaggtgggggcaaggatgagaaatcaaatctcatcaatttgaattgaagaaatggtttttttacaatgtgccgtattttcccataaaaaatcgttttatgaatatggttaatttggtaatcggtgagggacggggggggggggggggttatcgagggtgctgatcccgaatctcgggttatcgagggtgctgatcacgaatctcgggttatcgagggttctgatcacgaatctcgggttatcgagggttctgatcccgaatctggggttatcgagggtgctgatcccgaatcttgggttatcgagggtgctgatcacgaatctcgggttatcgagggttctgatcccgaatctggggttatcgaggtgctgatcacgaatctgacatctcatttgcaatattttaattgtatctattattttcgcagtacctaacatgctaattctgtaggtatgataacaatgatatgttaaagttaacatggtaaatgaatgaggaacaaaaagagaaacgactttcccatgtgcccttttatatgagacgggagcgtggccatctgtgtagcgaaggtccgacgcttcggtgaccgatgcgaacggggtcagattaaataacaaagggatgtgcggcatttctgcatcggcacaaaagagaaactaatgcatcatgctgctaaccggcgatgcgctttcacatttacgggtatattcaaacaccaaaggggattaaagaaatttaaagcacacgaattaatattttattagaacaatatgaaatggtgattaaatgcaatatttagcaaaatgattagtctgttataaaataagtaatcaattcatccatccggcattgttgttatgtaccatttgtccactttcattaccattgttgtatgggttgttttggttagtcccagcgctggaggagcacaagtcaaagtgcgtgcgattgtttccgaaattgccaaaagttgagctattattagtaaagctgcttctaaagccattgttgttgtaatcgttgtttttatttgcacaattcatgtcgctcaacctcatattaagcgaaacacacccactgcacatatcaaattgcacttttacccctcataaggagtcgaactcaaaagcataattaccgccgctgttgttgttattgttttttgttgaattgaacaattattgtgagtagcaatgacaaagattgaaagttagaatatacttttttcgtaaaagtttccataactgagcattagcattgacgctgttattgttgctggtggtgttgttgttgtttttgttctgttctgctggcgcgttttgttgattattaaaagtattcatttttatattgcaaaaaaaaatttcttgtgattaaaatgaaattttgcgtcatatttgcgtgcttttatatagcggaaatgtacagtgcgcgcttagagaaggattaagttacggtgctcttacgaacatactaaagcgcttaaaatgagcacaaaatctcacttgcgcgcaatgcatttgcttatcgcattctctcgcattttgggctgtccccctggtgaagtgggtgcgcgaatttgctgta

SEQ ID NO: 47179 - DNA, 2232 bp, Heterodera glycines
atgaataatcatccggtcagattcgacacgatttggagggatctttcgcccggccttgagtccatcttcaagacgcaggagagaatggcaccgcagcgctacatggagtattacacgtgagtttgagcagaggtgtaactgttatgtaagacttcccttccctctgttttcagattggtcttcaaccactgcacgacgagtcagcagagcagcaacttcacgcacgaaacaacgaacaatcgggcgcgtcggggcaaccgcgggacgccggcagcggcggctggtgcagagtttgtcggcgaggagctctacacgcgactgcgccacttcgtcgaagagtacgcaaggaaattgctgcaggtagttaatggggggaggggcggaattttgtccaggaaaccgaactcaaattttgcttttgtttcaggaatgccagcgtctgtccggtgaccagctgctggactactacaccgagcagtggaccaaattccagttctcctccaccgtggcgaacggcattttctcctacttgaaccgtcattggatcaaacggaacatcgacgaggcgacgcgtcccggcattttggaagtgtacaatgtgagtttgtggggacggtcgtacacgaagggggatgagtttcatttttaaattttccccgaatttcagctggctgtctccatctggaaatcggtgatctttgacgaactgcaccacaacatcacgtccgctgcgctggcgctggtggagaaggaccgcaacggggaacgcatcaccacgcgactgatcagcggcgtggtcgcctcatacagtcagacttttgcttcgtcaccccaaaaatttgttgatttttgtcgtttccagttgaacttggcatcaacgagctcgacccggcgccggcggtgggccagcagcagaattcggtggtgcatcgtccgagcgtcaaataccaagtgtaccgcaacaactttgagcagcgcttccttgaggtcggttggatgggtttttgtgcatttcaaaatttttacatttcccacacaaacaggacactcgcaacttctacacaacggagtcgaacaattttctgcagtcgaacagtgccaatgtgcaggactatatgaaaaaggtgggtggtgaacaggggggagtctcgtttacgagcgcaactttcttcatgtttttctctttttttcaggttgaacaacggcttagcgaagagcgggaccggtgccaaatttacctggacaacacaacaatggactcgctgatggaggcatgtgacacggcgttgatcaagcagcacctcgagctcttccacgacaaatttgaggtagcagaaagagaattgtccattttattatattacacttttttcagtcattgctcactcgtcaacagaatgaccatcttggacggatggtgagatttgcagaatgtcaccacttttctcacaatttttgcataaattcgtttttttttcagtacacactttgttcgcgtgtgcccaacgggttggccaagctcaaggagatcctgaaggcgtacatcgaacaggagggcaaggcggccattcagcaaattgcgcgtgaagcgtccaacaatccgaagcagtacatcgactgtatcctcaaaaagtgagtagcgggtgggtttttggaaatactgaaccattttaaaggcacaaactctacaatcgcttggtggtggactccttcaaaactgaccatggctttgtgcaatcaatggactgcgccttccgcaagttcatcaacaacaacgaaattacggcgatggctcggaatgcgtccaaatcgtcgcagctgttggtcctctactgtgatcagcttttgcgcaaaagtgcacgcaacacggaggacgagaagatggatgagtacctggaccaagtggtgggtttgtttggttctttaaagtttgaaattttccataatttctgttttcttaaaaatgagaatataatatccccattgtcacagatgaccgtcttcaaatacatcgacgacaaggacatgttccacgcgtttttccacaagtttttgtgcaagcgcctcgtctacgacacgtcggccagcgaggagcaggagcggtgcatgatcgcaaagctgaagcacatgtgcgggttcgagtacacctcaaagttggagcgtctgctgactgatgtcgcgctgagcagggaccattccgagcagtacaagcaggtggctaacgaaatttaa

SEQ ID NO: 47180 - DNA, 1371 bp, Heterodera glycines
atgagcgtaatcaaaaaaattgacaaagacagtgttgaaggcttggagggtagtctgtcactgttttcgcttccgccaacaaatgtagccataaacaaaaccagcgttcgagagttgctgccactgtccgcgttgaatcagaccgggccatatttgttccgattgttctcggacagtcaatactgtgacttgagcaaaacatacatgtacctgctcagttcaattgagcgcaagaatgccgcgggcgaatgggtaccgatcagtgacgctgaaccggatgataagcgtgtgagtgtagtgcagaactatggcagcagttttgtccgcgcgttgaaggtcaacatctcgggcattgaggtgtttgacagctccatctattatcattacagggactacataatgaatgagctgggctactcccatgaaattcgcaaagctttccacgaggcggcctgttactatgccgatgaggatgatggtcaagacagtgccactaacgagggcttcatcgcccgggcatcccgattttcaaacggaaagcagtgtgagacgatggtgaagctgaactttgaccttgctcatcagagtgcactgatgctgaacaaccaagacgtagtgttcacgattcaccgcaacaacgatgccttcctcctgctcacgccccattggaagaaagcggacggtacaatgcaggaaaatacgaaggaatatcgtgttcgtgtgcacgatatgcggctctatgttcgcacggtggacgttacgccaagccttaacctggcaataagtcgtcagttggagtccgcctcggccaaataccctctgcgcaagattgagatgagctccatttttttgggaaaaggaagaactgagctggcccataacgtgttcacttcaacactgccgcgtcgtctgatttgctgttttgtttcaactgacgcttattcaggcaaccgaaaactgtcacccttcaaatttgagcatgcaaatgtgcgagcaattagtgccgaggcgaacggtcaatcttttcccagcaccccgtacctgctgtcgtttgatgctgcgcagcaacgttttatgcgcgcgtttgtggacatgtatgccggtcttgggttggatgactcggacacaaaaacggtgtccattggactccaacgtttcctaaacggatgggctttcttcgtcatcccaatgacctcaacgctggatgatacagatgggtttgagctgatccgacagggtacgtgcacgcttaaagtccaatttgagaagcctataaaagatgacggttacgaaatgttgatcctcggcgagtttgattccgtcctttccattaacgctgaccgtgtgttgagcacagacggaagtgtttaa

SEQ ID NO: 47181 - DNA, 979 bp, Heterodera glycines
caaacgatgggaatgactttcgaattgagtgagaaaaatgagtgcgaactgcgcgatatcgtggcgagaatgcttcagccgggcaaaggcattttggcagcggacgacccggcaggtcgaatgaatgggggcggagaggaggggggggggggggtaattagctaattatggcaaattcggacggtaatgagtaatacaccacacacacctttgattacttgccttttcagttgctctcgactcgcgattgaccctttttggcatggaaaattccgcagagaatcgccgtcgctttcgacaattgttgttcaccactcccaatattcacaagcacattagcgcagtcattgttcaggatgaggtgtcgccctccttttaatctgtttcagcaatttcaaagttttcggattggcagaaccaattattggagattaatttcaaattattctaattccctgcctaattgttagacttatcggcaaatgactgatcaaggcgatcagctggtggaccttctcagacggacgggcatcgctgtgggggttaaagttgacgaggacacaattccgctgttcccaatgccaacggaagacattgagaagagcaacaaaagttggaaaggggagacaatcacgcaaggtggggaaaagggagggattatgaattattaccctaaatgatcattaataattacaattattaggcctcgacggattggccgcgcgttgcgctgagtacaaaaaggggggctgctcttttgcgaagtttcgttgtgcttatcgcatttcgcaacgaacaccttccaaatgggcacttgagcaaaatgcgatggtttcgcagattgcttttaaaccattcgaaaaacatttaaaggtaatggcccgttttgcggtgacctgccggacgttttgggctggtgcccattgtggagccggacttaaacggtgaaggcactcacggcatgagaaatgccaacagg

SEQ ID NO: 47182 - DNA, 633 bp, Heterodera glycines
cacattttctcttgtgacgatgcctcatacactctcagtccggtggactccttcccgacgttggagaaggcaatcaacgaccatgtcagacaggccaagaacattgtgctggttaattgcatcggctcgcggtctgtcagcgaattgagcattgcccgactgacggacgaagtcacaaaaaatatgaaatttttaataaaatgatccatctttaggtgacattttgggtgttggagtcgcggagaccgctcaatttggaggacatttacaacgcgaactctgtgcgcgtgttggccccagcagcggaagttgcggaatggacactgcccgaagcgagtgccatttttgaaacaatggtggagcaggaggacgaagacgacgacgacgaagcgagcgacggggacgaggaaaaccgaccgccgtcggtgggcgacggggaaaaaagtccatttaagaaacaaatagctgagctaaaaaaaaaatagcaaaattcggtgatttttcaaaatcttaccgaggaaaaattggggccttatttgaatagtggtggtgtttatgacttatgaaggcgtaaatttaggacgaccgcgaagaagcggaggacggagaagcggcgatggcgggcgattccga

SEQ ID NO: 47183 - DNA, 2427 bp, Heterodera glycines
atggacagcatttcgcgcggggagcactgcgagaagttgctgggcgacttcaagaagaagacggcgacagaattgacccgtttattgctctcaataaacccaaaaaggttggtgccgaaacggattttttatcggggatggttacgtttctgaaaaaattgtcctccctgatttacacaagttgttataataccaattgttttgtcttggtttttaggtctcacagtcagtccttacctaaatctttttttcaaaaaaacaacaaaggacgtttttgtttttgcataagtaaacgatcaaattgtggcatttggtgccttcaaaccaatagcaatggtttagtgcgttttgttagtttattctacgtgacatttgcaaaaaacaaaaaaacaccgcaatttttaaatgtttttttcgtcttttacgtcatctcccgcatgacttacaaaaataaaaaaaatttctatttttttctgggaggacgacacgagccccaccccctccataattacgaatttaaccatttggttgatgaaccgctgaactccttgccaaggtccgcaatttaaaacaacccctactcaccctcccttaattttttggcttcaggcttgccctagcggcgattgaggccggaatgaatttaatggtgctgccgttgccataagcaggtggcttatgccgcggtgaagtggtgacgacgagcaacactttcccgttcaaatactcatttttggtaagcaattccgacattaaaagttgggtttcctcgtaaaaataaatgtttttcttttccagtgcaacacgcaacaaattgtcatcctcatgcagtacaacgaacgcaacacgtacacacttggcgagctgcacgtcactcttggcaccgactttcccgctgatcagctgtgcgccgttgttcaatccttggtcaagacgaatctgctgaagctcaccagcgccgatgggacagctttgaccgagacgaaactcaatgacaacgagcagaaattcacctttaactcggaattccagaggtgaatttgaaaatgaacgggggtaattaaattttaaaaatgaatgtaaaataccgttagttctaaattatttttcaatttcccgtcttttcagccgcaagctcaaagtcgacttggtccgtgccatgtcctctgccagggagacaaacaaggagagtgaggacgtgcagaagacggtggacgaggacaggaagttggtcatccaggtgagaaaattgacaaatcaattttaatgacccctttcttctccctcattaaggctgccattgtccgtattatgaaaatgcgcaaatcgttgaagcatcagctgttggtggccgaggtgctcaaccaattgacaacgcgtttccagccaaaggtgggggagaatgattttgggtgcaaatgaatgcctttcctttccttttaaggtgccgatcatcaagaagtgcatcgactcgctgattgagaaagaatatttgaagcgctcggaggaggatcgcgatttgtatgaatatttggcatgaggacaccattatatgtgtattgtattggatgtttgtccgcgttataattgtattattgtatttctctgaataaatgctaaataccaaaattgggagatcagaattgcaagcggctgattgcatcacttttgcaggctaattagaggatacttagggagactgaaggcattggtcgattttaatacatttataaagagagaaagagtaaagatttaagcatttgcttctacgttttcattttcgtttttcgtgactataaaaatgtttgttttttcgattggtttctcattgtgtaaaaatatttctaacataattattattgtgcccctttgtgacgttcttcgtaattgtgctaatttccaacaaaatgaaccgccggtaaaataatatttagacaaagttttccattgccctgatttgattttccacaatttcagttggctttacaccgacgtgtggatggacatgttcccattttttgaccgtcttcaactcggactcaaattggcacttctttcgccacgtttcgaatttttggtcgacaaacatttcgatggcacaagcgaattgccaattttgaaaaatatcgtattgcgcaagaacaaagtgacagcggtgccagaattgcgcgtgtttattgacaatgccaattatgtgccctttccggtgcccgaccattcgctgcccaagaaaattcgttttaagcatcttcggatttggtaattcaaattccgacatggattaacggatacaatgttcctattttcagctacatcgaccattctttcatcgcatttatccgtgccaatcagcaaatgttcgacaaaggaacaaacttggagttctctgtgtcatggaacgaaaccttttttgctcagccaatttaa

SEQ ID NO: 47184 - DNA, 1170 bp, Heterodera glycines
  unsure (1)..(1170): unsure at all n locations
atcacaaatgagctcatccgctttggtaaagataaagttggatcaggaagtgtgtgctgatgctgagaaattagtgcgcctttacactgaattggcagatgttcaccggaccagnaatttgtatcttttaaaattcctttttttccctacaatcctaaggaattgtgtccttaatttaatttttttattattattaaacctgatcattcattttcaatgaaactgcacaaaaataccaaaaaaaaaaaattaaaataagagaactggatccgcaaatttgatttttgtgcgggatccggcctgatccgctttaggtaaaacaaaaaaggtttaaattaggggatcacaccccccgccccgctcattctttacaattgtcatttccatttaagcaaaattatattcggcgcatgatcctcaaatcgtatggaacggaaatccttacaaagggatgccagaaattgaaacattttggcggaatttacccgaaacttcgcatgagtaagcaatatttgcctttgttagttaatcaaaaacgagtagcaagtttaagcgtcgcttgtttggatgctcatcgaattgacccaaccagcgatgacatgtcattggtcgtgttggcgatgggcacagtcataatcgggtttggtgttttcctaatatgtctgcataaactttcccgcactttttcttagcgatttatttttggaattatgcacttttattgattaaactcttccatttgtgcctacgcctcaaaatttaaaaaaggcaacaaaggtgctcgttcctttggcgcaaggactgcaagagacgcaatcttcacccatttgttggagttttagcgtcgattgtcgtcttaacgagttaccggcacatttttttggtaccaaaaaatttcctgatgaatcattaggtatattcaaaaaaaatacatttggcaaaaacagtgaaggaagtgcgggaatttttatcgcgctctgtattgctaacaatatcacgttttttaaccaatttcagcggattgagccacgcctacaatcagtcccttttgctagttcttgaaggaagtacttacaaaatcaaaagtgacaattacagggtgatcgactgaatttaccacattgataatttgttcaaatctctatcaaagcgagtaaagcaaagaatgca

SEQ ID NO: 47185 - DNA, 2594 bp, Heterodera glycines
  unsure (1)..(2594): unsure at all n locations
atgatttagaggcttcaaaaatcgagctccgcgagcgatcaaagaagtgaaaaagttcgctgagcagcagatgggcacacccgacgtacgcgttgacacgcgtctgaataaatttctctggtctcgaggcgttcggtatgtatttataattaactctacaaatacaagttgtagaaaatgacatacaaaattgcaaaagcactgttttatgcttttttctacctatgcctgtagtaatgttccattccgcgttcgcgtccgactttcacgcagacgcaatgacgacgaagactctccgcacaaattatacactttggtgactaatggaagaacaattacactagttaaatctgttttgtttaggtgacgcatgtgcctgttacttcgttcaaaaggttgacaacggtcaatgtggagagtgaggagtgatagatggagaaaggatccggactgagtaaatggctgttttttgttgcgttatattgttgcggattttttgaaataaaagaatcgttgacaacccatgttcgattttatatcattaataatattcgttgtcgtgaaagaagggaatcatagacccatatttgaaaaataggtttttggtgcgttcccacttccccggacattagctgtcaagtgtgtattgttttatgttaatccggaaaatctcaatgaaatacaaagtaaaatgaatgcattctttgctttactcgctttgatagagatttgaacaaattatcaatgtggtaaattcagtcgatcaccctgtaattgtcacttttgattttgtaagtacttccttcaagaactagcaaaagggactgattgtaggcgtggctcaatccgctgaaattggttaaaaaacgtgatattgttagcaatacagagcgcgataaaaattcccgcacttccttcactgtttttgccaaatgtattttttttgaatatacctaatgattcatcaggaaattttttggtaccaaaaaaatgtgccggtaactcgttaagacgacaatcgacgctaaaactccaacaaatgggtgaagattgcgtctcttgcagtccttgcgccaaaggaacgagcacctttgttgccttttttaaattttgaggcgtaggcacaaatggaagagtttaatcaataaaagtgcataattccaaaaataaatcgctaagaaaaagtgcgggaaagtttatgcagacatattaggaaaacaccaaacccgattatgactgtgcccatcgccaacacgaccaatgacatgtcatcgctggttgggtcaattcgatgagcatccaaacaagcgacgcttaaacttgctactcgtttttgattaactaacaaaggcaaatattgcttactcatgcgaagtttcgggtaaattccgccaaaatgtttcaatttctggcatccctttgtaaggatttccgttccatacgatttgaggatcatgcgccgaatataattttgcttaaatggaaatgacaattgtaaagaatgagcggggcggggggtgtgatcccctaatttaaaccttttttgttttacctaaagcggatcaggccggatcccgcacaaaaatcaaatttgcggatccagttctcttattttaattttttttttttggtatttttgtgcagtttcattgaaaatgaatgatcaggtttaataataataaaaaaattaaattaaggacacaattccttaggattgtagggaaaaaaaggaattttaaaagatacaaattnctggtccggtgaacatctgccaattcagtgtaaaggcgcactaatttctcagcatcagcacacacttcctgatccaactttatctttaccaaagcggatgagctcatttgtgattttggcgataaaatgaattataatctgtaaaaaaaatacaaccagaaatatataaattacaatttttcacattcgttagtcgcagatagaggcctggacggggtcgggaataagggacccagacaaagcgcggtacggaattgacaatagaaaattgacatgtgtggcatattttaaatattttgaagcgggaaattacaaatacaaatataaagcgaaaaaataagatattgaactttccattgctaccttttctaatttcgccaatatttttcattcttcgtttaaatttgctagggttttgacgatggcccaggaaacggtcttacgctttgttagaatttccgataaggccagtccaaacaaaatattagataaattaaaaatttttaatgtttttgagtttaggctcatccgccaactttcgggtctgaaaattctgctggagctgacctctatagtgccgaaagttatgtggtgccagcaaaaggtactaaattttataattgtatgacacatgaccaaactacctaattaaggccaagtgctaatctcaaccggactcagtgtggccattccggaggggcactacggacgagtggcacctcgttcgggattggcagttaaacattcaatcgatgttggcgccggtgtcattgactcggattatcgcggagaattgagggtgaacttatattgctttgtgggaaataactgagaaatttggt

SEQ ID NO: 47186 - DNA, 15461 bp, Heterodera glycines
tatattcagaatgaattaacgcaatggcttgacgaattacggcgaatcaaaaaacccggcgaaagggatggacgaaaactcggcccacttgagaagtctctaggtaaatgatttgcagggtgcagtacgacatttgaagcagaacattgaaataccagaagttgtgcttgaattcgattccaatattcaacagattgtggatgtggcaagaaaggaaaacagaaaaccatttcctcaacaatctgcagaatcatatcaatatttggattaaagcaattcaaaaaatgacgaaattagaccgagacccgacgtcaggcacagcacttcaagaagtgacattttgggtcaatttggagcgtgcgttgttgcaaattcaagagatttgcgaatctgacgaatttattgtcacaatggaagcgttgaaactcggaaagcgttttcatgcaactgttgcattcgaatcaaacacaggtttttttgtgtaattttacagttttttaaatttgattatttaaagggctgaaagagatgctggttactgcccaggattacaaccaaatgatgaaggatgttcaaatcaatgaccttctgtgtgctttcgatttggctgcagttaaaacggccgtttcaacaattttgggaagtatcaaaaaaatgcgaagcaccaaatacccattgaaacgtgcttatggctttattacgacaatttcaacggacctttgcgaaaggcttgttcaggttattcgtggaggagcaaaaaaaaaccacgcttattttatacttttagcttttgaagccacgtcttttgatgcatgcgcctatgtccgaattggaggaaataatggatcagtgcaaaaaaatttttactgcttgggacgaagaagcggacaaagtgatgatgatgtttcgtgaccttgccaagaaacagcggccagcagatgcgaagccaatgttgcgaatgatatatcgacacaaattactggaacttcggctcgaacaactctaccgatttcgaacgcaacatgaacagctcagcaatatgatatcccgcgttttgcgctttgctggtccaacttcgcttgaaagttttggtgtcatcgattcagacccggagaaggaggttgaagataatggaataaattgttcttttaaaatattttgcagattggaaaagcctatgatgcagtgaaagagctggattatttggacatgggtcagcagggccagcaagcgtgggaaagtgccatgcaatactacagggaccacatcagtcgagtggaggcggaactcgcgtcccgactgcgtgaccagctcggaggtgccaaaaacgcagatgaaatgttcaccatattctcgcgatacaacgcccttttggtccggccgcacattcactcagcaattcgagaatatcaaaccgcactgattgacggagtgaaggcggacattgtcgagttgcaagagaccattttggacacaaagaagagagagctggcgatcagatgtgctgaccggtatgagaagaattaagcaattcacagttttaaatcgaatcagatatgacattcctgctttctcggcttcaatgatgtgggtcagacagattgagtctcaactgaacatgaacatcaaacggattgaaaatgttcttggagagggatgggccaatcatttggaaggtaataccgacaacagtccattcaagcattcaattattagaaaaacgacggacaaattggagttttttaggcaaagaattgagcaaagagtgtgaactgcttcgacaaaaattggacacatcgcatttgcacaaggaatggaccgataaaatgttggcaaaatgtgaagtccaaaacgacagactgttcattgttgacaaacttcaacgtgatgggaaaataatacatcgaattcgcgttaattactcgccggactcaattcgcatcactaaggaggtaaaaatggataaataatagctgtcatgcgacttcgaacataaaatgaaattatgtttttaatccactttgtgtcccttttaggtccgtaacttgaaaaacttgggttatcggatcccattcaaaattatgagccactctcatacgattagcacatactacccaaatgcgatttccctcatcgagtcaatgcgtatttacgagtcgacaaatgaaattgttttgaatcgccagtcgatcgatcaactcattgcaagctatcgaaacatcattcataatctgttgaatgaggtgacgaattctcaaaatacaaaaagtaatttcgtcaccaataaattccagggtgtcaaaactgaatggacaaactttaaattggaatcatttgttgtcaaattggccgatgctgtcggaaattatcaagagaaagtctcagatctgattgaatggctggacaaaattgagctggaaatgtcatcaatggacaagtgtcaattcaagcaagaaatcatcgcccaaattctcggctccattcaaaagattgttgaccaaatggccttgaacaattattcaaacttgaaaaaatggattgaaaatttggataaaacggtcaacctttgatttcactaatttttaagccaatcgttttctcatttcagctggaaaacaaaatggctcgtcgtcttgaagaagcaattcgtgtttggattaagctgcttaaacaaagtcgggatgagctggaggatgaaagggaagtcagcattgtgcccgaaattcacccaattccactggaaatccgaatcatatcgcaatgcattgtggttgtccctacactggaaaaggcgcgccttagcctgttcaaccagttttcgtcgtggcatggaattgtgacaaaccagacaagaatttcatgcaatcgtttccaggtttttttcctcgtactatggttcactatcacttcgggttggtttaaggtccttcaaaacaacgccgacacacaaacatacaaaagtgttttgttgaaaatgccacacagtcagcagataatacaagaaactcactttgcaatcgaagacatcatgatgaaattaggcgactatgtcagccaatggacgcgttaccaggcactttgggactttcaacaggaaatgttttttgagcgacttggaacggacttgtgcaattggatgaaggtgcttttggacatcaaaaaagctcgaacaatggtcgactctccggaaacgcgccacaatatttttccgtttgtggtcgacttcactcgggtccaatcaaaagtgtccataaaatacgacttctggcaacgtgaagttctcaataaatttggaagcgcattgggtattgtatttcttttcatacattttcaaaatttaacccctcacttgtcaggctcatcaatgcagcagtttttttccgacatctcaaaagacagacatgagttggagtcgcaaagcattgattcgaccaacaccagttccaccgtggctttgattatgcacgtgcaatcattgaaaaagcgaataaaagcctctcaagaacaggtaatagcttgtttagttggcctatattttaatattttgacaatttgaatgggtgcaacagattttcttaaaaacaggttgacactttcttgtccggacaaaagcttctgactgtgcatcgttatccgtttcctcaatcatggctatatgctgaaaatgtcgagggtgaatggtctgcacttttggacgtcttaaatcgaaaggatgtcgcgattcaatctcaagtaatcaattacttatttttatcccgttttaaaatgcattttaaggttgccaatcttcaaacgcgcattttggaggaagacaagttgctggagaagcacatcaacgatttagttgctgaatggaacaaatcaaaaccggttcatggcgctcagagaccaaaagaggcgttgattttgctgagtggcttcgaagacaaatttaagcgcctcagagatgaacgatctaatgttttgaatgcaaaaaacacattggaaatcagcgattcgctgattcacatttccaaccaaacaacaaacaaattggaaattgccattgaagagctgaacgacttgactggttttatttattttttgttttctttgcatttatttaatcaaaaggtgtttgggattctcttttgcccgtgtacaacaacatcgacgaattgaaggagatcccctggctttcggtccagtcgagaaaattgcgtcaaaaccttgaagagcttttggcaaaactgaagagtcttccctcacagtaccggtcttacgagtcatacgattacgctaagcgattgctgcagaactatttgaaggcaattgtttatgatcctgtttcatattatcttatgtttttaagatgaacagtttgatcattgagttgaagtcggattcattgaaggagagacattggagaagtgactttttattcatttttaacgtattacgtttaattcactcaagatttgactcgggaaatgcatgttaattgggtgctcagcgaactcactttgggccaagtgtgggacatcgatttgtcacgacatgaagagaccatcaagaaaattatgattgtggcacatggcgaaagagtgctggaagattatttgcgccaagtcaaagaatactggacggattatgcagttgacttagtcaactaccaacaaaaagcaaagctgatcagaggatgggacgacctttttaacaaactcaaggagcacatgagcagtttgggtcagatgaagctgtcactctattacaagcaattcgaggaggacgcgctttcgtgggaagagaagctcaacaaaatgaacacgatttttgactcttggattgatgtgcagcgaagatgggtctacttggagggattgttcaccggttctgctgacatcgcccatttattaccatccgagtcaaaccgtttcaacatggtctccaacgagttcttgggattgatgagaaaggtgcttatattacttaatttcgattaatctttagtaaatttactttccctttgttgttaaggtttccacttcaccccgaattcttgatgtcatccacattcaaggcgtccagaaaatccttgagcgtcttgcagacatgctgtcgaagatacaaaaggcacttggggagtacttggagcgtgaacgcaattccttcccgcggttttactttgtcggtgatgaagacctgcttgagattctggggaactcaaaggatttgatgcgtgttcaaaaacatctcaagaaaatgttcgccggaattatggccgttgagttcaatgaacaaagccgcacaatttctgcgattatttcacgagagggcgaatccgtcacattgaaatgtccggtggacctaaagcaactaccaaaaattgatgaatggctgcgtgggctcgagcgcgaaatgcaatcaaccttggccactctcttgggcgagtcactctcgtctttctccaaattggtcatcgaaaacattcaacatgaagaacttatggagttgatggatctttatccggtattaatcaaactattttatttttgattttttgttaatttaggctcaaatcatcgggatttgtgttgatgtgtggtggagcagtgcagttgaatcttgtctgtcaaagcatggaagtgcggaaaatgtgctgcagactgttgaaaaatggttgtccatgctttgtgaaagtgttctgcgtgaccaaacggcaattagacgcaaaaaaatatcgaatttggtgattccagactaaatagtttttttattgcgttttctttttagataactgaatttgtgcacaaaaagaatgtctgccgacaacttgtcaaaaacaatgtgaaaaacagtcaagacttttggtggcttcaggtttaccgaacacatttgctcctaacaattctgatttatttttagaatttgcgcatttacttcaattccaacgagaaagatccacgcaaatcctgcttcatcaaaatggccaatgccgaatttttttacggtttcgaatatttggggattcaagagaagcttgtccaaacccctctcaccgatcgttgttatctcaccatgacgcacgcattgcactgtcgtcttggagggagtccttttggcccagctggaacaggaaaaacggaatcggtgaaggcacttggccaccaacttggtcgttttgttttggtgttcaattgcgacgagactttcgattttcaagtgctccaaattttttttcgtttataaaattcatgacttaacaggctgttggacggattcttgccggtctctgccaagttggagcttggggatgttttgatgagttcaatcgtctcgaggaacgcatgttgtctgctgtttctcagcaaatccaaatgatccaggaaacagtgcgtgcagactctgacatgaaggtggaccttgtcggcaaaagcctcactgttaatccgaacatggccatcttcatcacaatgaatccggggtattctggacggtccaacttaccggacaatctcaagcaactgttccgttctcttgcgatgacatctcctgatcgtgggctaatcgctgaagtcatgcttttttctcaaggatttcaatctgccgagatactcgcaaacaaaattgtcccattatttacgtaatattcatttttcaacttaaattgcatggttgctttagtctctgcaaggaacagctttcgaaccaatgtcattacgactttggcttacgtgctttgaaatatgtgcttgtttcggccgggaatatcaaacgcgatgcgattcaacgttcttacgatgaaccaagccaaagcggggatggagctggagaacaggcagtggcaagccaaatgtctgaacaacaaatgctcatccaatccgtgtgcgagactttgacaccgaagcttgtctctgaggatatcactcttcttcaatcacttttgcatgacgttttccctgacatcagttacagcccaaaacaagtggaaaggtgcaaatttctgggttttttaagaaaaaaattgtttgttttattttcagcctcaagaacgaagttttgaacatttgcaaaaccgaacacttctcatgttcacctatcactggggagaagggaaatctttggctggagaaagttcttcaggtttaccaaatcaccaatctcaatcatggcctgatgcttgtcggcgcgagtggatcgggcaaaaccactgcgtggaagacacttttgaaggcgttggaaaatcatgagctcgttgaaggcgtgtctcatgttattgatgccaaatctatcagcaaagacacgctctacggcactctcgacccgaacacacgtgaatggactgatggattatttacgcatattattcgaaagtcaatttattattaatttttaataggttgacacaattgtttagaatcattgacaatgttcgtggagaattggataagcggcaatggatcatctttgatggagatgttgatccggaatgggttgaaaatctgaattccgtacttgatgacaacaaattgcttactctgcctaacggggaacggctttctattccaccaaatgtgaggcaatattaatttcaaacttatttcttttatattaggttcggatcattttcgaagttgctgatctcaaatttgctacgatggcaacagtttcgcgttgtggcatggtctggttcagcgaggatgttgtcacccccgaaatgcttttcgaaagctttttgctccgaattaaaaatgagccgcttatctccgggaatgcgaatcgactgctgaatattcaaatcatttgtgaaaacacgctttccatgcacatggacgcaaatgggctcgttccgctctgtttggaattcgctgttgagcaattggaacacattatggagccaacccgacaacgccttctgctgacctttttctcaatgcttaatttctctgtcaaacaattgctgcaatacgattcagatcaccctgattttccaccatctgtaagttattatgttgtgaatcaactatgaaaaaatttcaaggaggaacaaattgccaatttcatcagccgttcattgcttgtcaatttgatttgggcttttgctggtgatgggagttggaagaaccgaaaaagcttgagcgattttgtccgcgcttccactacaattcagctaccgccggaccaatcggtattttgatttatattttaaaaattgccttctttgtcctagctcccaattactgattactttgtgaccacggatggcgattgggaatcttggctgacaaaagtgccacaaattgaaattgaaccgcaacggatcactgatacacttaccgtaattcccactctcgacacagtccgccacgagatgctgctgaacacttggctcaacgaacggaagccacttgtgctgtgtgggcctccgggatcaggaaaaacaatgacattgttggcggcattgcggttgatttacttttctatttgttttcatatgatgaattttttttatttgttaggtcactgcctgacatggacgtcattaatgtcaatttttcttcatctactacccccgaattactgatgaagaacttcgaccattactgcgaataccggaaaacaccgaccggcgtcgtacttgccccagtacagatcacgcgatggcttgtgattttctgtgacgaaataaatttgccacagccggacaaatacggaacacagagggtcatttcctttatgcgacagttggttgaacaggttcaacgccgacgttgtgcaatgcttttactcttgttttttagaacggcttctaccgcacgaccgaccgcacttgggtgacacttgagcgtatccaattcgtcggggcatgcaatccgccaactgatccgggcagaaacccattgtctgcacgttttcttcgccatgtgccagtcatttacgttgactaccctggacgtacatcgctcaaccaaatttacggcacttttgctcgagcaatgcttcgtcaaacaatgcaaatacgaggaatggctgaaccgctcactgaagcgatgactgatttttacctgcagagccaggcattacatatttcatctatttgtaaattacagtaaatatttaggagcattttactcaagatgatcaaccccattacgtgtactcacctcgagaattgactagatgggtgcgagggataagcgaggcgattatgcccctggattccgtttctcatgaagagcttgttcggctttgggctcatgaagcacttcgtctgttccatgacaggcttgtgcgggacgacgaacgagtttggaccaatgaactggtggatcaagtcgcgcacaaatattttgctgcttcctgtaatttggacgcggcactcgaaagaccattgttgtattcatgctggttgaagaaggtttagtccgtctttttcagcattaaaaattgtttggtttagcattattcgccagtgtccagtaaagaattggaggactatgtcatgcacagaatgcgacagtttgctgaagaggaattggatgtgaagctcgttcttttcgaccaaatattggaccatgtgttgcgcattgatcgcgtattccgacagccacagggccatcttctgttaatcggagtgtccgggtcgggcaaaacaactctgtctcgtttcgtcgcttggttgaatggattcacgacaatgcaggtagtttttttttggtttactgttcgttttcaattttactttatattattatttttcagcttaaagtgcattccaaatacaaagctgccgactttgatgaggacattcgacacgttcttcgccgagctggctgcagaaatgaaaagatatgctttatcatggacgaatcgaatatgatggagactggctttttggagcggttaaacacgttattggcaaatggaaaagtgcccgggcttttcgaaggcgacgatttcaatacacttctcagtcaaatcaaagaaggagcacagcgccaagggtttatgcttgactcacacgaggagctatacaaatggttcacggcacaggttttaaatttaaaactttgctgtatatatatcaaatataaaaagatcgttcaaaacctgcacgtcgttttcacgatgaatccctctggagatggactccgtgaacgggcttcaacatcgcccgcactgttcaacagatgcgtccttgactggttcggcgactggtccaactcggcactcttccaggttggccatgaactgaccagcatgtgcgagatcgacaagtccgactacactccgcctgccgcgctggagcattgttgcgatcgtttgcccactgaaattgcctatcgcgacgcggtggtgaattcattcgtgcacattcataacattgtccggaagacaaatgttaccgagtcgcgcaaaggtcaccgcgtgatggccattactccccgtcatttcctcgacttgatcaaacattatgtgacaatgagcaaggagaagcgtgatgtgattctgcatttagtttaatttgtatcataacaaatatttaggaacttgcggatgaacaaatccatctgaacaacggattgagaaaaattaacgagacggagcagcaagtcaaggagttgcagaagtcgctgaatgagaaagaagtcgacctcaggaagaaacaaggggaagccaatgcgaagttgcaactaatgctgggggaccaacgcgaggcggaaaacgagaaacgcacctccgaaacgttgcagaagcaaatccgagaggaaaaacaatgcattgatcgaaaaaaggacgaagtgaaacgggaattggccgaggtttgttcagttaacaataaaaaaacttattcattgaatggacacgaggggagggtgaaaaaccttcctaaaaattccaggttaaacctgccgttgaggaagcgaagagcgcggtttcgggaatcaaaaaagctcaattggtagaagtgcgctcaatggcatcgcctccaaatgcggtgaaaattgccatggaagccatctgtttgttgttgggcgaaaaacaaacggaatggaagtcaatccgcgcaatattggttaaagacgacttcatcccgcacattcttcaattcaacacggattcaataacaccggaaataacggagaaaatgaagcagtatgaaggcaaccctgactgggaatttgagaaggtccgttattacaatatattaataaaataagaaatccaacaattcaaggtcaatcgggcatctgtcgcttgtggaccaatggttaaatgggcaagggctcaactttcctacgcaaaaatgctgaacaaaatcgaaccgttgaacaatgaattgaagcgtctggagaaagatgcggaagaaaaaacagtgaaaggcgaagaattgaagcacaaaatagaagcgctcgagaaccgaattcaggaactgaaggtaactgccaactgaattacaggtacaaaatattttcttaattgcaggatgaatacgcacaactcatcggagaagcggaacacatcaaacaggacctgcaagttgtgcaggaaaaagtcaacaggagcatccatctgttgaaatctttgcgggtggaatgcgatcgttgggagacaggcagagaacgatttgctcagcaaaatgagacattggtgggcgatgttcttctttctgccgcctttctttcctactctggctactatgatcaactgctgcgcgacacaattttccaaaaatggatgggaatattggattcctcacaaattatgttccgtcatgagcttgctcgcattgagtatctgtcaactgcggacgagcgcttacaatggaacaataatggaatgccgaaggacgaattatgcacggagaatgccattatgctcaggcggttcaaccgtttcccattgatcatcgaccccagcggacaatccatcgaattcatttgcaaagaattttccacagcatctggcaaggaacatcaaaagggaggctcggtggcaacaacggttcaactgactagttttaatgataattcgttcaggtataaagtgagaaaaataccaaattctttattttaaattttagaaagaatcttgagtcagcgcttcggtttggcacaactttgcttgtgcaagatgttgagtcctatgatccgatcctcaatcctgtgttgaataaggaggttaagcgaactggcggacgtgtactgatcacaattggtgaccaagacattgacttgtctccagctttcaaaatatttctctttacgcgcgattcttcggtaatttaaaatttcgttaaaacaattgaatttttcacctaaaccccaaaggttgaattcccggcggatgtgtgctcacgtgtaacttttgtgaactttacgataactcgtgctagtcttgagacgcaatgccttcaccaagtgctgcgcagtgaacggccggacatcgacaagaaacgaaatgatcttctgaaattgcaaggagaatttgcagttcgactgcgacatcttgaaaaggctttgctaaacgcactgaacgagtccaagggtaaaatactggacgatgactccgtgatcgcgacgctggaaaaactgaagaatgaagcacaggaagtagcaaagaaatctgccgaaactgaccaagtcatgaaagaggtatagacgttttttaatgatcgtttcgaatcgattcttctaaattctaccgccaattcccataggtcgaaattgtctcacaaaaatactacaagttggctaatgcgtgttcgctcatctatctcatgttgcatcgtttggacgagattcatttgctctacaattattctctggactttttgctggacattttcacaactgttctcaagtcaccacaacttgggaatgtgaaagactacgatgctcgcctgtcaatcattcttcaaaatctcttttcggtcttttttctttactttactgctacaatagttcctcttgcttaaggtgatgtactctcgtgtttccataggaatgcttcacaatgatcaaattctgctcgcttctcttttgctccggatctattctcgctgttgcggtgcagagaatgcctacgagcaggaattggagcagctcacagcccttcctcctgagcaggtgctttcctcggcacacatgcttatgacgaaggcgtttggttcggaattcatgcaacaggacaaagtggttaacctccgtgaaataattttgaatgaggtcagacaaaatgtaagataccacttgcttataaaacatctcttattaaaggttcaatgtaaagtgcccgttttgttgtgttcagcgacaggctatgacgtctctaatcgcgtggaggaccttgcatttgagctgaaaatggacattttgtcaattgcacttgggtcagccgaaggatttgaacaagcggacaaagcgttgcaatcgacaagccgatcaggaagatggattctgctgaaaaatgtgcatttggcaaccgaatggttgactcaacttgagaagaaatttcgccttcacaatccacacccacattttcgtctgattttgacagctgaaattggctccgctctgccaatttctatgatccaggtgtataatttaaaaatttacttttttcaagttccaactattttttcaggcttcacgtgtacttattttcgaaccatccacagggctgaaggcgaatctgttgcgttctctttcctccatttccccggcacgaattgcgaaggcaccagcggagcgagctcgtctgtacttcattatttgctggttccatgccattgtgcaagaacggctccgctatcagccactcgggtgggccaattcgtacgagttcaccgacgcagacttccgagtcgcgtgcgatactctcgattccactgttgacatggtcgcacaggtcattctttgtttttcgtgatgatggttttctttttctatttagaacagggcgaatgttaagccggataaattaccatggctggctctccggactctgctctctcagtgcatttacggaggaaaaatcgacaatgattttgatcaggcaagtatacagtgggtttataagggaaagaaataatataaattttcatagtattataaatgtttgggtttgaaaatcttttcgccattttctcacctatctcgctagatgcattatttcacatttaatataatttaggtgcttctcgatactcttctcgacaaactgttcacatcaaattcatttgacgctgactttattctcattgaaaacatcggagtgaacgccttgaacatgccagacgaaactaactcaaaggatggtttgatcaactgggttattaacatcaaagccttacaaaagcctaattggattggacttccaaacaacgcagaaaaagtgcttatcgccgaaagaggtactgctttcacaaaccgaaatgccatcatgaagaaatcatttatttatcaattatagggcaagaatttatacggaagatgatcaaaatgtcggacgatgaacttgcatacgaagcggatgatttggaacgtaacaagcaagcccctacctggatggttcaattttctggacagtgcaaatcttggctcgatgctttgccacaagtataccttctttccctctgaaaagaattgacattcatttaattgttttcgtttattgtttcctattctatttttttagcaactacagcgtcttcgacggactaaagaaaatgtgcgcgatccgttgttccgattctttgaacgtgaaatcaacttgggcgccagacttttgtccgatattcgacgtgacctcaacgaattgttgtccatttgtcatggggatcagaagcagaacaatcacagccgtgaattaatagctgcattggtcaagagaaaacgtgtgccagacaattggctccaattttccgtgccaaaagacgtaacagcacttgaatggatgcgagactttgtgcaaaggatggaacaactaaagcgcttgtcactttcggaaaatctgagatatgaggaagtctggctgggtgggatgttctttcctgaagcgtatataacggctacgcgtcagctgatagcccaaacgaatggctggtcgctcgaacagatgtacatgcatatcacaaaaacggaggaaggacaattaaaatcaacagcattcacattgacaggtggttgatgatgatgaacttcgttttcatcgcacatttatttatagaccttcgcgcaattggcgttctttgtgaggccgacgaaattaagctgacagatgaagtgcatgttggagtgccacggcttcagttcacgtggaccttggaaggacattctccagcgagtgttgtggtgcctgtttatctgtactccaacagggccaaatttttgttcggacttaatttgttaccaattggatttgatcattctatgctaagccagcgaggggtcgcctttgtctccaattgttcgctttga

SEQ ID NO: 47187 - DNA, 971 bp, Heterodera glycines
atgaacattggcagtgtggtgggctcggcgatgggccctcggacagccgaaatgcaccgtcgaatgctgcaaaggatgcgcatggacgcgtcgaatgtgccggaaaatcgagcatttaatacactggcacggggacttttccaagcctggtaagtgcaaaagagagcacagaaaagtgtcacttttatagaaatttcttagaattttcattaaaatcgatacaattttttcttcgttggtgccaatcttccgacccatcaaatattcagaaacttacttaaaatccaaagattcaaatcaatcatgcatgatggaaaaaataatcctaattaacacaagctgaacgtaactgcatttcatcacagacaatccctgatcacggacaaccaaaaacgttgtgattcgcttgatccgtgatcatgtccactccgcccagaaattaattattttcacttgatttttctaagtttaaaaccctatttaattgacccctttgctaagagaaaagtccagggcgatttttttttctcttataatttattacacagatttaaaaagcatttatttttaaggctccgattcggcgatccgaatgccgtggtcgtttttgccgttttccaagggtcaatgcaccgtttcgatgagcgcgccgtcgaatatgagctgcagcgaatttctgattggcaagtgaaagttgtgcgcttatcgtcgaaagaggcctattcaaagtgagttggtttcgatctacgataaatccggcgcctttgacagttggcatttaacggtgatcccggtaacatccaggggaagtggccggcgccgggtttttacccatattaaaaaattcacagccctttttcttgaaaaataaattcaatttcggaaaatttatcagccattttcgaagatacatccacatgatttctaacgcaattggccctgaaagttctcaacaccaattcgctttttag

SEQ ID NO: 47188 - DNA, 801 bp, Heterodera glycines
atgagggcgtcgttgttacggcccggcacagcgctggcgaagggaatgtcggaagaggacgcgaaattgagacaacggatgctggaagtggccaagaccaaactcaaaaacttgacgatgttcgtctcaccaaatcgacttgtggtcagccaaaaggggcaaatcagcggagaaacgtttaaagtttttactgctttctcagatacacaacattcccttctcgtggaaggacgaccaactgaaaagcgtttgttcggaagcggccggcgattgtcccgcgacggccatctcagagtgccggataatgcggcaactgaagggccaaaacgaaaagggacgcgccattttgggaaaatccagcggattcggctttgtcaccttcaccgaacacactttggcgctgaactgcctgaggaagttgaacaacaatccgacgacattctctgacgaaagggttggtgaacgattggaatgccaacttggagaaaacatttttaattaaagaggccaatcgtcgaattttcaattgaaaatttgaatgcgttgagagtgaaggaaagacggcagcaaaaagaaacgaaaagcgaagaaaatgaggaggaaaaacaacaaacaaagaatagagtcggaaatgccgaggcattggagaaaacgaagcgcgaaatgatggccggcgggaagaaatggctgccgaaaaaattagggacgaaaattcggcacaaaaagccgcagaatggactcagcacgacgcctggcaaacgccgaggacagttcgtcgaacaaagggcggggatggtttaa

SEQ ID NO: 47189 - DNA, 2551 bp, Heterodera glycines
tggacctggacctggattccatgttggacctggaccttgatttcctggacaaaaatccaggaaaatccaggtccaggaaaaatccaggctcctcgagacctggatccaggcctggactggatttttttaaatttattttaaaaatcaaaaaaatgtttgaaaaaattaattatttgcttagaagcatctaaaaatatctaattaataataataatgtgtttttaaatttatttaatctgttttcgaaaacttgaaaaaacatcggtcacttgaaaaaataaattctaaaattttgtccaggaaaatccaggttttttcctgttttgcctggacctggacctggattttttttcacatttgacctggaccttgatttcctggacaaaaatccaggaaaatccaggtccaggaaaaatccaggatgccgaaaaatggcctggacctggacctggatccaggaaaaatccaggcctggattcaggtccaggtcgatctctaaaaattatccaatttataaattaacgaacgggactgaaataaaaccaaatttaatacacaaaaaattaaaattcaaaaaatatcctattcaatttggtctttccttaatgtctttgaatttcaaattccttaatatcgtacaattttcaataatcgctcaagagtacgaaaagtcgacaatgaggtctaaaattttaaagttgaaaaattaacacaacatcggcctaccttaatttttaaaaacataaaagtgagtaaaaagccaatagaaaacttttttaatgtgacgggaaaattagcaaaatgcattctttaggaacattgactaacaccattcgacagcatttgcaaagacatattttcggaacattgttgaacggaagcctcttccagcaagccatggttttaaaaaattcaaaaaaaaaattccaaattttcatttttccccctttttcaaggttaggcccatcatcatttctggtccttccggttgtgggaagagcacaattttggcccgcgcaatgaaagaatatcccgaagcatttgcttttagcatttctcgtacgctttttcgtggcaattttttttcatatttttgacagagcaagaaatgcgtttaatttaggctcgtaaccagcaataattcgggtttgaaatggaaatttattttagaccgttaattatctggcaaaaatgctaaattttagataatttttaggcaagttttggaaaaaaattatttattgtggaaaataatgaaaatttagcgattttgacaaggaagttaataggacttttcctggttactggcctaaatttctccatttatttgtggaaaattaactttaaaaaattttaaaatcaaaattttaaagcaattttttgtgtcaattaaaaaaaaattgttttggttttttagataccacgcgaaagccgcgggatggcgaattggaccagcaggttgttgaaaatatcaaatgttggacttacattgttgatgccgagtattttctggcacttttacgcttttaacgggccgattttcataaaaaccgaaatgaggagaggaccctttaatttgctttttttttttgaaaaaatggtcccaaattcttgcaaaattctcaaatttctgttacaataagggtaaaattcggtggccctcccaaccgaaaaaactcaaaaattgtgtgtgtccccacaattccatttataattttccagcactattattttgtggaccgacgcgaaatggaacaaatgattgatgccggacaattccttgaacacgccgaatttggcggcaatttgtacgggacgagcaaaaaggcggtggacgacgtgcaaagcagcggcaaaatttgcgttttggacgtggagctgaacggcgtgcgcaacttcaaagcgctgcaatttgacgccaaatttgtgctcgtccgacccccgtccatcgaagtgttggtccgttactcaaaaaagggagaaaaaaaacagcaacttttagaaaaaagtgaacggcgcctctgactttaggatctatgggaccaagccaagggggggggggaggaattccaacccccatgccccacccctaaaaaatattttgttttcctagaaaaatagggaaatttaaacaatttcttatccaggagtgggttacttgctccccaaatttttttaaagagaaattaaattccaaaatttacccctccggcacacatttaatcatcgtggactcacatttaccatattttgaaactgaccacacaacattttgtttttggcgaaaagggctaaaaaatatattttttcctcggcgctagaaaacgtttaaatatttttcccaggtaaaatctggcctcatttttagggaagtttaccaaaatattcggggaaaaaattgggtttataataagcgggccataagaaaccgtactggattttcaaacagaatcgaaaattcaggaacaacgacttcgtcagcgcggaagcgaaactgaagagacaattgcgaagcggctgaagcacgccaaggaggacatggaagccggtg

SEQ ID NO: 47190 - DNA, 3895 bp, Heterodera glycines
  unsure (1)..(3895): unsure at all n locations
aaaccaggagatgtttatttgctggcgtacaatgccatccaatttttggggtttgtttttatttaaatttaaaaaattaatattttggtcaaaacattcagtctggaagaaattttttttgccttttccaattcttttttcccatcctttgcctgtgatttctgttttggttttcttgccttttgtttaaaagttttatcattaaaaattggcaatcctaaatttgaagtaattaatcccttttcaagatggggttccattcttgtgaagactgtgctttggttggccagcggacactcctttcccgaactgtaccaaaacgtggagatggaattgaaaatcttccaaacggctgccattttggaagtgagttttctcagtgaaaatgtgagggttggcatttaccgcttttgggggttctgtcggctttttgcattgactttggcaccaattatttcttctgtttgtttttcagattgttcacagtgtcgtcggtttggtccgttcgccggtgttcaccacaattgtccaggtaagcttacaattaccagcatttggcttccaatgccaagaaatgctgggaattaattcgtttattgttttgttgtcggcacttttttttttgcttaaggccccagaaacaaatttatagcacaaatagtggaattgagcctaaaaaagtaataatttgcaatttcgtaagaattttttaatcatttaaaaaaaattttgtccaaatattctccatcaaaatttttcaaagaactgttccctgttgtcattggttttcaatcttttcattgtacagctaagtgactgtcgataatttttcggaataatttttcgaaaaattttagaaatttttcgataaaaatgatcttttttaaatttcggcaatttatgattttctctttttgttcaaacccctccgttctcccaaattcctccttcgttatttctgtgtcggtcatacatcaaagcaattgctactttctgctcataaatcaatccttttttgtccaggttttctcccgtgtcactgttgtttggatgattttgcacaaagttgcctcggtatgatttattacaattgcatttaaagaattagtgaccgatggagggggggggaaagcaaatttttgatttaattttcggctcttcacccccaccacatgtttataatgccaatttttgggttttcatggccactgatcacgaattaggcatccatctttgaccattttcgaatgcgcgaaattcgtaacgaatgaggagaataacagaaaaaaacacgaatcttgagaaaaaagtggtcaagatgaatgtcggattcgtgggcagcggnccatgaaacccccaaaaaattggcgtttttaattttgaaaaaagtggggaaaaattgtggggatgaaactgcataagagcccttttggtttttcaatttatttcccattttaggcccgtctcagttttggtgtgccaatgcttttgctcgcctggtccatcactgaagttgtccgctattcgttctatgcgctcaatttgctgaacgctgtgccctacgcattgacgtggatgaggtgtgaattaaaaagcaaaaaaaaaaaaaaaatgccgtaatttcgtggaccattcacatggggggggcaaaaggtacgccattttgcgaactccttagaatgtttctgtttttccaagaatgcctaactatggttgattttgctcacatttggccatttaaaaaaaaaattgaataaattccataaaattctgccttcttaagttttatatttatccgaattacatcccatctgtcctttcaggtacacttttttcattgcgctttatccgatgggtgccggcggagaagtgctgacaatggtcgccgcattgggcgaaattgcacgacgcaaacattttacaattgaaatggtcagcaaacgcttttgaaaaaagcatggacccggattccctgttggaactggatttcccggacaaaattcaaattgttgaaaaatggactggaaaagcccaggcgtgggtccgcaggtcgggctctagaaattatttattgtcctcaaaataagaattctttgcttttatatttgtttatttattaattcacattatcttttttggctttagcccaattcgtggaacatgagcttcaacttttactacattatcatcgctctgtgtctcatttatttgccgggttttccaaaactttacgggtaatttaattgtgaatttaatctttttaaaaaatgtgaattctgctttttcaggtacatgttcatccagcggaagaaggtgctcggcggaggagggaaaagttcgaaaacgacgacggaaggggccaaaaaattggaatgaagcgaaagaaaagaaaactaaaagggcgaagaagccaaccttaattttgtttgttataaattagacaatttcttatttattgaaagaaaaatctctgaatgcttggagatacctaattaatttttgattttaccttaatcctcaaaaattagttaagaaagtccaaaccttaaaatttattttatgagatcccaataaaaatggctaaatgaatggtaaaatgataaatatagtacaatagaagataacataaaaaagagaaatgactagaatttaaaattacaatttgctggttgtcagcagtcgatcacttcgtttatgcttttcttccatgtcggcgaccgtttgtccaacaattgttcatgggatggatgccgtctgttgagcaactgtaattgagaaagcacttttgtaaaagcgtcggatatttcaatagcagtgataatcttatttatgttcttatagcatggtaacgaaaaccaaatggggaattatttttccaaaaactaatttttcgaattttgttttaattgtccaaaaccaatttatgcaattacccaaaaccacaacataaatgggggtcagtcaaatttgactaattgtaaaaatatcaaattagttgtgaaagcttttttggagggttttctatcggcttggctgaagataaatacgggcacctattttgaccaatgtaaaaccccgaaagcaaatttgaataaatgttgaaaaagggagacaaccatattaccagtctaaaataagtttggaaatataaaagtgagttcctcttttgattttaatgctcctaaacccgaataatttcctcatttgtctcactaaaatttaaatgggtgtaagaaactaacgccagtcgaacggcgattcaaaattccaccaattgtcacttcgggtctgtcgtcacttccacaaaaacctgtatcattttcgtcgtctgacgactgatcactgcccaccagcgcaagggtaagaagcaaaaccaaaataatactgaaaattggggaagttagactagaaaaaataaggtttgaaaaccctatcaaagtgaaaaagaacggttggttgaagccgaacacagacaaagcaaaagtcatcggaaaaggaggcaatttgtaaaagtaatcaaaattaggagtaaatacctaaaaattagggtgtaagttacagtcaacaatctaatgataattatgatggtaatggttacttttactggtccctaaaaaaaagaaaaaaaggcgtttttatgatattttgttctactcgggggttatcggggacgctgatcacgaatatgacatcatctaatacagggctgccatcgtccatcctccgtttccaaggacgggtatgccgattttcaaggacatagtggggaaaattcatgaaatccaaggacatttaaaatttttattatatgcaatgaaaaatggttaatattagtagttaccccccaagattttggcccttaattttcagccccgccatttcagtcccaatggaa

SEQ ID NO: 47191 - DNA, 1703 bp, Heterodera glycines
atgcatacccatccgttatctgttgatcatggccgaccaacgacacaacgacttccaacacatcagacctgtgcttttgcgttatgttgtgttgagcatgccccatcttttgccggaacaagaccatttcgacgcgttcagaaggtcgacaaaaagggcaagtggggatcactggatgttgatggtctcgtattttatttttgtctcatttttctcgatttttcatccattgttgttacccttccccttctttttcgtgcgggtctttttgttttttgcaatttgtgctttttgtccttttctttcatctcccattcattgtcagtgcccaccaaaagggtgcctttgcttcttcgccccgtcgtcctctgctcatttccatcgacgaatgctccgtcgctttggaggaggccagcatttcgcacaatttcagtcgcctttccaagtcactcgacattctcttgggccgtgcaactgtggagcagcaattctgctactacgagctgatcctcaaggcgatgagtctctctttggacggaaaatggccacgggcactcgtcgacaaattgcaattggcctgggaacgttttgacaggtgggccaaggcagtgtcgaggattttgtacaatttgcttcggcagcgttattccccgtcgtcttcacgaggattctgtccgtctttggttgtcctccgctaatgccgccaaaatcagtgggctcgaccagcgcgacaactcctttctcattgcccacacgccgttggttctgttccgcgttgactcacgcattttccgcagtcccccgcacttgcgttgcttttgtcgttcgttgtctttttatttggccgcttcacgcgacatgaacacgctgcagttggtccgttcttctctgaacagctccaaaaggtccctccctttcatttttcattttaaagtcatttttaaacagcgaaattgaggagaaagaagctctgctccgttcttttggtggcactcaacgattggccgttgttcaaacatacattgaactttgtgacgacgaggacggcaccgaaattgatgacattgaggagattcggcagattttatgctcacaaatccaccaattgtttattgcggacacccatcttccaaagctcgtccatttcaatgttcttttatcatcgcccgattgatttggcattttcctattttcagatgtatcccctcaggcttgtccctgtcattgtgcaacgtgtaccctcagcgcatgtgctgatcaattccatcaacgagctgatcactggcagcaatttggagaggcgtatttttgcgattgtgctaatcactgaactgcttgaacttgtcagttcccacagctttgtgtcaactttaaccttttatgttttcatttttcagtataaaattccgagcgccttcgctgctctgtcgctgatttctgacatgttagatgccatgttggtcagcttggtcaccgacgaatttattgtcctgatgctaaacgtcgtcccgtctttggctcgcctcgttctcctgtcaccattccatgccgaacagtttttgaccattttggaacgcacgcggaaactcgcattcagtcggatggccatttatagcagtttaagccaggcaagaaaatcgccagaacggaaactgtttgaaatggtcaacaggacaatggaagatctcccaaaattgacataa

SEQ ID NO: 47192 - DNA, 1673 bp, Heterodera glycines
cccttaatcagaccaaattcgtccattcatttggtttttctcttcagaagccctccctcaacgccacaaattcggccggaattcgtccgagtgccgtaaaaggcgccatcgaatttaaagacgttcactttgcctatccctcgcgcccccaactcaaagtgctgaagagcgtttcattgcgcatcgatgcgggcgaatcggtggcattaatcggacacagtggaagtggaaagtcaacgatagtggcactgctgatgcgattctacgaagccacaaaggtaatctgctgctgatgctgcagggtacggtagacacagtaacggtccgaacgatacggtagaaagctaaaaggttctctttgttcttttagggctgcgtttcgctcgacggcgttcctttgagcgatttgaatgtgccgtggctgcgccaaaccattggccttgtgcagcaggaacccgttctgttcgcggcaacggtggaggacaatttgcgcatgggaagagaagaagcgaccaaggtggaggacgaaaagcggggaaaacatttcataaaagggaaatgaaggaggaaatggagacggcgtgtcggatggcaaatgccatcggatttatcaacaaattgccccaaggcttcaaaacgctggtgggccaaggcggcattcaattgtccggaggacaaaagcaacggtcagcgaagagcacaaatggattgcccatcccattttgtaaatgttttacaattagcttggccattgcgcgtgttttgctgcgcaacccgcgcattttgttgttggacgaggccacttccgcgttggatgccgaaagtgaacaaattgtgcaggaagccattggtcggttggcattttgccatttccgaattgtgccaatgtgcacctgataaatgcgaatggcaccactcaaattggcattttttcccttcttcagacaatgcttcctcgggacggacgaccattaccattgcccatcgcctttcgacagtgcgaaatgcggacagaatagtcgtttttgagcatggccgaattgtagaaatgggcaaccacgagaaactgatgggaaggcccaactccgtttacaagcaaatggtgccgaataaaaatgaaaaagggttaaagtgggggggggggggacaaaagaacagagaaagagcgaaattcaattgggccaattaaatggcattttaggtaatggcccaacaaattgaaaaagaaaagccaaagggagccgaggcgggagaagccgcttttggtaataattggaagattatgaaatttggccatgactttgacagacgtcgaaactcagtgcaaaatcagcgaaaacgcatcggaacgcaaaatggcgcggatgtcggagagaatgcgccgttcgattagttcagtgaaatccgttgggctgacgagcaccgccggaggggacgaagaagcgaaattggaggagtaatgaccaaacatagcacagcacagaacactttgttcttgtttgacagattggacgacgaactgcacgagatgggagctcgacctgcgtctccgctggacattttgcgatatgctgggcccgaaatgccctttgtattcttcggtgtggtcagtcggccatttggccagccaacaaaacgtcgccggacgagaaaaatagccaaaaaataagact

SEQ ID NO: 47193 - DNA, 572 bp, Heterodera glycines
agcggttctcgtcatgccgtggccatcaaaatggagccgccgtccaatgggccgttgttcaccgaaatgcacgtgtacatgcgcgtgctgaagcctgaacacttggacaaatggaagaaggacaaaggtggggttggccgcagatttttgaggaaaattaaggtatttttagatttgtggaattttttggtttcttaactaaaactttgacttgtctataatttttggacttgtatttgttaggcataggcttacggatccgtttgacgccttgcggaacttttgtatttaaaaagtgcggaatttggaaagaaatctcccaattttgggtagcattttacccccccccccatttttagggcttaaattcctcggcttgccccacttcatcagcaacggctccttcacttacgaaggccaacaaattcgctacttggtcatcccaaagttcgccctttccttggaatccgtccgcgcggcgcgcactccgtcggcggtgctcagttggaccgaagtgtccgccgtggccaaaacggtggtgcacgcgttggcgtacctccacgaccagggga

SEQ ID NO: 47194 - DNA, 2797 bp, Heterodera glycines
ggctcaaattcctcggcttgccctacttcatcagcaacggctccttcacttacgaaggccaacaaattcgctacttggtcatcccaaagttcgccctttcattggagtccgtccgcgcggcgcgcactccgtcggcggtgctcagttggaccgaagtgtccgccgtggccaaaacggtggtgcactcgttggcgtacctccacgaccaggggagttgggctctgttgtaaaatggaaaaacaatttttttaatgctatctctttgggcgcttttgcattttctttttaatttttttattatcattttttaaatgtctcatttcctcctccattttgaatttcatttcttcagaattatgtgcacggcgatgtgaaggcggccaatctgatgatggagtccaaaagtgatttttcccgggtcgtgctcatcgacttcggcctggccaggcgattgcccgacgcactggtggagaaagagaacaaaaagcaaggcgaggagagcagttgccattgtgaatttccaattcgcctgaattggaaattcacaatggcattttatgccatttaaatgccggcattttcattttcgattttggcatttatttgtttcttttggctgttcagctcacaacggcactccgctgttcacttcctgcgacgcccaccgcggctgtctgccctctttccgtggcgatttggagattttggtgcacaacatgttctactggacgaccggcacattgccgtgggaagtgagcacaaaacgggcacaatttgaattttcctaaaaatattttgagtctttatacctcctttaaaaactttttaaactttttttgccggagaattcgattttaaattatgaaaattaaaaatttcaaattttgaaagaatttccgcggcggtggggcgggggaaggggaggcaaaatagaaagagcactaaaaatttaaaaaatcttaaattcttcattccaaattcacaatttaatctccattttccgcagtctgtcgagcaaaatttggacgccgtgtacgaggcgaagaagtcgctggtggcgaacgcgcgccgggaggtgccgcgactgatggccagcagcagcggcagcaccgagcagagccaaacgcagcaaaagcgacgggcgaccgccgccacggccattgcggcactgtacgcacactgtgccggcatggaattcggcgagaagatggagctggacacggtgctgcacgcgctggacggacgatgatttttgatggcatttttatggctggcagcggcggtcgacgggaaaaaccaatcattgaattttgatgattgattgcattgaaaaataccacaatttttattttatttattgtttaatttgttttatttatgtatgactctcttttttggtgtatctcaacatggaaggaaaggggcgacgctttctttcctcccctaacaatttgagcattgtttttttttcatttcctttatttttctttttgtttatctctgttgtgtatgataaatgacgtcatatcccctaaatttcaactaaatacagttaaaatacttaattttaatatctccaaaagattttgggggctaattatcatctttatagtgtttttattgttttggcattagtttttgatatatgtttataatttgccttcaattcattctcatttacaaccaacccaattttgccttttgcccttcccaacaaatccctcccccggggggtcaacttccttccgcccccccccaagggctgaaatttatgcgggagaaatggggcggcaatgaatggattggatgtgtggtgccggtgattaatggcatttatctttttgccgggagggcgcccttcccggcaaaatgtcggaagagtccggcacaaatatttgtgtgtttggtgcccgtttccctcccaccgcaggcggccgattatttggccctattcgaatttatgcggcggcggtggcccaaagacgccgccaaataaactgtgaaaatgacctcaagaagggcatcatcggaaaagccaattcgaagtcgaagggggtggtcaatttgggggacggcataattcggaaattatagaaatttgacagtctttggactacatacctaattgagctaataacggaatcctaaatcctgttcatggttgaattggatcaacggattgccgagatcagtccgagactctcggtcctggcacttttccataaaaaagtgccggaagttcgggtaaattcacagtcattggactgtttacctaattgagctaataatggactcataattctgctcctgcttgactggatcaacggaatgccgggaccagttcgagactctcgaccttggcacttttccattaaaaaaatgccggaagttccggcaaaatgccattgtgagtgtctgtatgccttctcctttgcccgggtccaccgttctctccgaattatataattacaatttatttctcatccaatttcaacatcaaaaatggtgttaaatttgctttttattccccccccctcaattggtccccattttcaattgttcttcaaaatgttcctctgtcgtcgtcgtcgtcaaatcaaattcctttcccctcaattaatttttcacttcccatttctcctgatcacattccgtccaatttgatttgattaaaaaaagttgtgtgaaactcaattttattccgtccgaacaaatcacagagcccaaagcccgcaaaaaaagagagagaagggaagtgaggagatagcgatatgaaccccaaaatgaaattcaaaat

SEQ ID NO: 47195 - DNA, 1173 bp, Heterodera glycines
atgccctcaaacacaaaattgaaaccagcaaatttaaagcatcccgaggtcgccgaattattctcattgaaggaccccgagcagcgttatgaagacctccgcgaaattgggcatggcgcattcggatcagtgttttatgtgtgtgttcgcaattaagtacgttaccgaaacaaatttcttcgatttttaggcacttgacaaagacacgcaagaaacggtggcgataaaagtaacaacaaattcttgggatttgggacgttttctgaatgaattcagaaaatgaatttctctgggaaacaatcggtcgagaaatggaacgatatcatcagagaagtgcgctttctgaagtcggttcggcacccgaacattgtctgttacaaggcctcctttctcaaggagcactcttgctggtatttgcctgcgaaaattcctttggctcgtcactcactaaatattattttcaggttggtcatggaatattgtgtcgggtcgactgccgatattttaaaggtttttggtgattctctcccccttaaatccaatttaataatttttccattaaatttgaggtgtacaaaaaggctttcctggaagtggaaattgcagcgatttgcgagcaaactttgaacgccattgcacatttgcacagtttgaagaggatacaccgcgacataaaggcaagcgaacaccaaacaattgagaatgagcaccgtttgttttcgaatggacacggacttataaattaggctcattttgggtgacaaaattgcccattattcgcaatatttgttcggtttaaaaaatgatctgtccaatagaacccattgaacatgtattatatcttcaaaatgctcaaataaactgatttaggctggtaatattctgctcaccgagtcgggtgttgtcaaattggccgacttgggcagtgcgtctctcagttcgccagcccaaacatttgttggaagtccatattggtaggcatttaaaaagcaaaacccacttaaattctcggaaattgggtttaggatggcaccggaagtgataatcgcacaagacactggcggtgtttacgatgaacgtgccgacatttggtcctttggcatcacctgcattgaacttggtccaactttaataataattggtttttaaaataccgacaaaaattacatttca

SEQ ID NO: 47196 - DNA, 1827 bp, Heterodera glycines
atgttggtcagcatttacgggagtaaggacctgttcgtcaaggagtatcagcacttgctggcggagcgactcgtgcacaacggatgggaccgctatttgcagtcggagttcaattatttggagacaatgaaacggcgcttcaccgacggagagctgaaccattgcgaggtcagtctctttgcacacctcgggatgactgcggttggtggaatttctgttcattttggtaggttatgctgcgtgacattcgcgagtcgtgtaaaatggcaagtcatgcgaatgcatctttgccattttccgtttgtccacggatcatttcattcaattattggcctgaaattgttgccaatgatggccagcagagcgagacgccatttcggcccgtctttaaggaagcagttagtcgttacactgaaatttttatccaacacaaaccggcaaggtccataaattggcacacaaacaatgcccaagtaaacggaacgtaaatactaacaaaagtaaatgtttaattgaggtggaattggagcttgaacttgatgggagaaatgttcaaattgttgcaccattaacccaagcccaaattatccttcttttcacggaaaagggtaagtggacttgttttgaatttgtgaagcaacttaatgctagtggggtgcattaagttctcacggagaagaacaaaacttcgccgggacaaaacattagcaaagaaaatcaatttcagttgaaaaaaatctggattccagcgaattttgcgatttggacagatgatcttgataggggtacctacaagaaatatcgaaaattttcatcttttttaagaattttttattttaatttttaaaatattcttttccaaatagctctttaaatagttgtagtaataactgtctaactcattttcagagatttgggacgtcgcatcacttgccgaggcaaccgaactggaaatattggacctaaggaagcggttggactggtggacatccaaaggacttctctcccaagggcccagtgacccgataactctcgaggacacattctatttagtctcgacaacggaagccattgaaaactatttgaagcaggtattaaggggtggtataaattcaattatattatttttagagcaatttgcatagaatctaatctttctcagagcgctgtccatcagagcggcactttttacgaatacatgtacagtgacgaggaggaggaggagaagccgttggttgaggatgtggccgaggaattggagcagtattggaactacacaaagggtttggtaagcggttgcctcgttgtttcttctgcaagctcaatatttgccttttctttcagcttatgcacagggcaacttgtgaacctctgactgcccaatttttgcatcggatgttcaaaaacttcacaagtcccggaaaaatggcaccctcgttggaagctgtccaaatatttatgcagagaaaaatcaaacagaatttggttgtttttgaaaacggagtttacaaggcgaccaaagagctcaaatcacaaagcaataacaccaaatgatgttttttgataaaagtttgaatcttttatgaactcatttcatttcgttaataagtaatgctatctttactattttcatttgtttaacttaaaaaattttcaaacttcgaattagttttttagagcctggaattttgaaatccgggtcgggattagggaaacggtcccattttacaagggtccaaacgaagggcaaaatttttaaaaatattataggtttgttaagaacgatatataatttttagtctatttttaagggagaaacgaaataaa

SEQ ID NO: 47197 - DNA, 1403 bp, Heterodera glycines
atgagttgtccaaaaaagatcagcgagcagagtgcgcttgcgttcaacagtgcgctgaacgtgttcaccgttccgcccacaaatgtgtcggtgtcgcgttccttcttccgagaactgttgccattgtccactatcagccaggaggggccctacctgttccgcttgttcaatgacaacctgtgggcggacatgtcgcgcgtctacctgttcctcgagctgtccatccaaaaggaggatggcggcggacgttgggtgcccattgaagctgcagtggccgccgatcaactcgtcgcgcccgcccaatgcgtaggacagacatttgtacaacaactcaaggttgatgtcccatagtcctcatgattgcaataaccagcaccaaatttaatcaggttgaggttcaaaacacggagttatacgacagcggaaccctctacccctacaaggcgtacttgaccaacgaactgtcctttccgaacagtgcaaagggacactttatggccagcgcgggctaccacccatcaaggaagcacgacgacgcgacggacgccggttttctggcacgctgtgcgcgcttcgcgggcggtcgtaaagcacgcttcctttcccggctggacttcgacctgggcaaccaggagctgtatctgttgaacaacatggacgtcctgttcaccatctatcgggcaaaagatgcgttcctgttacaaagtctagcggcggcggcagcagcagcagcggcggcccaacattacgcgctgtacctacacgacataaagctgtacgtgaagatggttgaggtgcaaccgtcgctgaacctgtccatctacaagacgctggaaaagcagccggccacctacgcggtacggaagacggaggtgaagtccgtgtttctgaccgccggccgtaccgagatggaccacaacatattttccgccgccatcccgcgccggctgacaattgcattggtggcgaacggagcgttcaacggccagctggcattgtcaccgttcaacttcaagccttacgcgatccgtgagatcagcgtgcacgctgccggtcatgtgtatccagcagtgccacaccgcatggacttctccggctgtgcctacattcgaccatttgttgacatgtacgaggcgttgggcatggccaactcggagcgctctatggacatcacgctggagcagttccacgacggatggaccatcttcgtggtgccaatgacatcgacgctggacgatagttgcggctttgaactgctccgctccggcaccaccagcattcggctcgcgttcaacgaagcgataccggcaggcggcgttgagatggtcgtgctcggggaattcgatcagttgatcatgatcgactacaaccgccatattgtatccgactcaaaaattgcataa

SEQ ID NO: 47198 - DNA, 1595 bp, Heterodera glycines
atgcgtgaaattgtccatattcaagctggtcaatgtggaaatcagatcggttcgaaggttagtttattgttttggaaattgcttttcacacaaccaaatttcagttctgggaagtgatttctgatgagcatggaattcaaccggacgggacttacaaaggcgaaacggacctccaacttgaacggattaatgtctactataacgaggcccatggttactaattataatgttattttgtaatgcatacttttcttcgaatttaggtggcaagtacgtgccccgcgctgtgcttgtggacctcgagccgggcacaatggactcaatccgggccggaccttacggtcagcttttccgtcccgacaacttcgtgttcggacaaagcggagcgggcaacaactgggccaagggccattacaccgagggagccgaattggtggacaatgtgttggacgttgtgcggaaggaggcggaggggtgcgactgtctgcaaggctttcagctcactcattcgctcgggggaggcaccggttcaggaatgggaactctgttgatctcaaagattcgggaagaatacccggaccgtattatgtcttcgttttctgtcgtcccttcgccaaaagtattacaatagtttttcaaatttctttcgacctttacgaattccaggtttctgacactgtggtcgagccttacaacgccactctttccgtccaccaactcgtcgagaacactgatgagactttttgcattgacaatgaagcgctttacgacatctgtttccgcactttgaagcttcaaaaccccacatacggggatctcaatcatctcggtttttggattttcatctacatttgtctttgttttaattcattgcttttttagtttccgtgacaatgtccggagtgacgacttgtcttcgttttcctggacaactcaatgccgaccttcgcaaacttgccgttaacatggtccccttcccgcgtctgcacttcttcatgcccggctttgcgccgctttctgcgaagggagcggctgcatatcaagcgtgttccgtggcagaactgaccaaacaaatgttcgacgcaaagaacatgatggcggcgtgtgacccgcgccacggccgttatttgacagttgcggcaatgttccgtggtcgaatgtcgatgagggaagtggatgaccaaatgatgtcggtgcagaacaagaactcctcgtacttcgtcgaatggattccgaacaacgtgaagaccgctgtctgtgacattccgccccgtggcctcaaaatgtcggcaactttcgtcggaaactccacagccattcaagaacttttcaaacgcatttcggaacagttcactggttagtaaaaacgaactattagttatcgtccttcaaaacgttttttagctatgttccgtcgcaaggctttcctccattggtacaccggtgagggcatggacgagatggaattcacggaagccgagtccaacatgaacgatttgatctccgagtatcagcagtaccaagatgccaccgttgacgatgagggcgaatacgaggctgaggacaccacccaacccaccgctgaagtcgaatga

SEQ ID NO: 47199 - DNA, 1061 bp, Heterodera glycines
atgcttcacggaaacatttctgacatttacattacgattgaccagaggaagggcccccagggcggactgtccgtttttatttattttaattttacaaatatatatttgttttaaagatctcccggctttggaatcttcttgacggctgaaaccaccgaaggcgtatttttccatggagaagcgatgtcgcgccctaagggccaaaacgaagaccaaacagtgccggaagaaattggggaacaggcggcaagacgtttgctggatgaaattcatatggtaagtgctttctcttatcatgggttcgaactgttcatttttacacatatatcttgtttttttctaatcattccaaagaggtcaacaaaaacctacaccgctaccttttccagggattttttaaatatttttaaaattatttttctctcgattttctgattttaaatatttatttactaatcaggacgggaccgctcctttcttctctaccgttttccgcgcccctggaaagttattttttaaatttttatgaaaatttttgagtcaaaaaagtcgactaggtttttttgttttcatctggtcagaatccgaatttcaaaaattatgttatattcgtgaaaggagaggccctgacaagctactgacatatggaatctagattatgcccataaacggaaaaatattgtattatagtgtgataagaaagaaagctttagggaggctgtgcagattcgtcctgtcaatctttggccgccactttcatgactctctgcgacagagatgtttcgaaatttctccttggtccactcacaattaacaggtgcatttttcaattctttgtctttttattactcgtttttagcgtacacacccttcggaatttgcaaatgtttttcgagcaaatgtttaaattggaggaatggtggaaggttatgaaagaaatcgtcggaaaaggcggaaatgcgatgaaaaacggaagtgaggacaaatgtttgatgacctgtgttggggttgggtttcttcaacatcaacaaagaccaactttaattgttcttttttgttaa

SEQ ID NO: 47200 - DNA, 1934 bp, Heterodera glycines
ttgagacgcaggctgcgacaacaactgcgcgtgaacattacccggcaacagtttcctatgaaggaccgctgagcgcaacaacacggaaatgggagctggaaggcgctccgctgaactcacatgtgactgtgtaccatcatggccgctctgatttggcagcacctgagcaacaacaaccagtcgctgagaaagtcacaacgaagataagctcattgttcaagaggaagccacaccatgaggacttcccagtctcggagcccttcactggccaattggatgagacggcaagggtttcggagctgttccacgaaccaatcgacgcaagtgtcagcgtctactcggccggaagatctgatgagcatgtcgttgtccagccaacaacaattgctgaggcggagcccgtaccgctcgttgagtacccgcgcacgacagcatatgatggtccactgcaaagcacatcgaaaggagcagaaatggaggggcagccgttggatgcacatgtttccgcctatcaccatgggcgctccgacatggcacccccagcagcaccgaaggagacaatcacaacaaagctcacttcaattttcaagaagacaaccgctcaagaagacgagtacccgcccaagactgagcctttcctgggaccggtggcacaaacgaatcgccaacgggagttggaagccgttccggtggtggacaggattgaacggatacccaaagggttggtgaagtgcgaaaatagtcataataaaaaaagaaaacctttttttggtttatccatgttggggtggggtggtctcgacaactaacacgggaaaaagccggccagcttttatgttaaaaatgcaaatgttctggcaaaatagacttcgactaatggggaatgttagagccatagaattttgaaaaattttttgatcacgacaatcaatttccagcttctacgaggaaggcgaactgcatccagtggtggtccatgaggagaaggaattgactccgtctgaggcggagaaaaggccaggaacattggagcgaattacgcacttgttcaagcggacagccacagagggagagtggccaatggtcaccgagccgttcactggaccgcatgctgagacatcccgaaagggggagcttgaagcacgcccgcttggcgaactcgtggctgcctatgcttccggccgttctgacgaagtcggtccaatgcaaacgattgagacgcaggctgcgacaacaactgcgcgtgaacattacccggcaacagtttcctatgaaggaccgctgagcgcaacaacacggaaatgggagctggaaggcgctccgctgaactcacatgtgactgtgtaccatcatggccgctctgatttggcagcacttgagcaacaacaaccagtcgctgagaaagtcacaacgaagataagctcattgttcaagaggaagccacaccatgaggacttcccagtctcggagcccttcactggccaattggatgagacggcaagggtttcggagctgttccacgaaccaatcgacgcaagtgtcagcgtctactcggccggaagatctgatgagcatgtcgttgtccagccaacaacaattgctgaggcggagcccgtaccgctcgttgagtacccgcgcacgacagcatatgatggtccactgcaaagcacatcgaaaggagcagaaatggaggggcagccgttggatgcacatgtttccgcctatcaccatgggcgctccgacatggcacccccagcagcaccgaaggagacaatcacaacaaagctcacttcaattttcaagaagacaaccgctcatgaagacgagtacccgcccaagactgagcctttcctgggaccggtggcacaaacgaatcgccaacgggagttggaagccgttccggtggtggacaggattgaacggatacccaaagg

SEQ ID NO: 47201 - DNA, 950 bp, Heterodera glycines
cgactcgatacatcgaactctgtttgtctcttccagccaacataagttgtgtttttaagcattgaaggaactgttcgtttggcgcttcatgcaggtcgtaactccgttgggttcggtttgttagctcaaaattcagactgatccgaattggtccaactttctttttgctccaaacccctccatggaccgttaccaattggttctgcttgatttcggctcgactcgtagtttcagcaaaactttcattgacaaatacatgcgcatcctcaaagcggcttatgccgctgatcgtgaagaggtaccatttcatttccgtcagcttgacgggagcagcccctttcccccggcctggattagtggtttcagttcccccactcttcgaccctcccgaaaactttttaattttcaaaaaacatagaattttttttcaggttttcttatagaaaattttcggggccaacctatacgagggaactgatacggggagagggggggggggggtggggaaatgtagtgcactcctgtttgacgcccctcccccttctccgcagatgctaaaatggtcgcgtgagattggctttctcaccggttatgagaccaaaacgatggaacaagcccattgcgaagccatcgccatcatcggcgagacactgacctgtaccgatgcttatgacttttcagaacaggcacctcacatacgatttgataaattaattggttctatttaagagtgtgaccccacgcatcaataaactcgtccccgtgatgttggagcatcgtctgacggcgccgcctgacgaaatttattcgcttcatcggaagttggccggttcatttctgacggctgctaaactcaaagcatcggtcgcatgtggtcggttattaatttggcttgaattacttcgctaattagcatctattttacctgatcctttattttatttgtcgat

SEQ ID NO: 47202 - DNA, 1081 bp, Heterodera glycines
atgggttcggctaagcgtcatggtactcgcaatgcgcgtatgccagagaaagtgatctggatgcgtcgaatgcgtgtgcttcgtcatctatcgaagcgttatcgtgatgctaaaaaaatcgacaaacacctttaccatgagctctacctcaaagcaaaaggaaatgcgttcaagaacaagcgcaacctcatggaatacatctttaagaaaaaaaccgaaaaccaacgttctaaacagcttgcgtatggtttttgggtccaactgaattcggctcaacccgttatattgtgtttcagagaacaggccgaggcacgtcgcaacaagaacaaggaaacccgcaaacgtcgcgaggagcgtttggttcagaagcgaaaggaacttttgcacaaaatttcggagagcgagaaagagaagacacctcagcccctagtgacaaagccagccgagaaagagcaaccgaagccacaacctgtcgctgcacggaccgctgataaggaacagcccaagacacaacctgccgcggtaaaaactgcagagaaggagcagccgaagtcaaaaacggaaactgtgggcaaaagggtattagtcggtgtaagcttaattgaggtctaatgggtttaattgcttaaaggaaactgttggtcccaagaaaaagaaaggaggcaagtaaatgacaacaagcggacgatcggatttgagacaatcgatcgcattcattgttttgccacatcatatttgttgaagaattgttattattcaaattggttttttgatttaaatgttttgctgcttttttattttgttacattttatgtttcaacgtcttttaattaggcggttcttaaggtatacaacagttttcactcggatcggaccgctttggcgtcttcctccatcgtttgtcgtaaacagtgtggactttgacggacctggtctttattttgagaaaggtatcgtggtaggatgtgttagtggaataatatgcactatgtagtctgggttccgaaattggttgggttaaatcttaaaaatattaatgactaacagcaaactaatttaacttatatttgcgacaaataaa

SEQ ID NO: 47203 - DNA, 888 bp, Heterodera glycines
cttggacctttattatttttgatttatattaacgatcttcctgatgctttgccatcaggagtaagaattaaattatatgctgatgatgttaaattgtatatttgttataaagcaagaaccgaaacagaaattatgcataaagcattgcataatttatcagaatgggaaaataaatggcagatcagaatctcaattaaaaaaacttttgtattcatttggggaataaaaaccccaaagaaatatataaaattgatggaaatataataaatgttgtggatacaattagggatttaggcataaatattgataataaattgcaattttccaatcatgtcacacaagtaataaagaatgcatatttacgtatgcgttctttatttcgggttattaaatcaaaatcttctaggatttggattattttgtacaaaacttatgttagaccgttattggaatatgctcctgaggtttggaatccatctcttctaaaaaatatttaaaaaattgaaaaatgtcaaaaatatttcaccaaaagagttcttttcaaatgcagccttccacccattccataccaacaaagattagaataccttcaactgccaacacttgaaagcaggccgaaagctttctgatctgttcatggctcataaaataatttatggccgaacagatctgaatccctttgaaatacttaaaccttctaaacgctttaacattcccttttatagacttaactcgaaagataaattaggcaaaaaaattataccttttgcggggcgggtaacaaaaatttggaaccaactcgataaaaagcttattgaaataaactcattaaatcaatttaaaaataaaattaaaactttcatttctgtaagattgaccggaaaaata

SEQ ID NO: 47204 - DNA, 1210 bp, Heterodera glycines
atgtctcgtgtctacctgtttctggagttgtccatccaaaaggaggacgctggcggacgatgggtaccaattgaagcggcagaccaacttgtcggacctatccaatgcattggacaaacgtttgttcaacaactcaaggtcacacatacaacatccgaacactcttcacttgcagaaaattaccaatatttaggttgaagtgcaaaacactgagttgtatgacagcggcacattgtacccctacaaggcgtatctgaccaatgagctgtccttcccaaacagtgcaaagggtcatttcatggccagcgcgggctaccatccctcactgaagcatgacagcgcgacggatgccggcttcatggcacgctgtgctcgctttgagggaggacgaaaggctcgcttcctgtcccgcctggactttgacctgggcaaccaggagctgtacctattaaacaacatggacgtcctgttcaccatctaccgtgcaaagaacacttttctgttgcaaaacctggcgccagcgccggcggcaggagcagcggccaggcagcagtatgccttgtatctgcacgacataaagctgtacatgaaggtggtggaggtgcaaccctcgctgaacctgtccatctacaaaacgctggagaagcagccggccacctacgcggtacggaagacggaggtgaagtccgtgttcctgaccgccggccgtaccgagatggaccacaacatattttccgccgccatcccccgtcggttgaccattgcgctggtggcaaacggggcgttcaacggacagctggcgcagtcaccgttcaacttcaagccatactccatccgtgagatcagcgtgcacgccggcggtcaaatgtacccggcagtgccgcatcgcatggacttttccggcgccgcctacattcgaccctttgttgacatgtacgaggcgctgggcatggccaactctgaacgctccatggacatcacgctggaccagttccgcgacggatggacaatttttgtggtgcccatgacctcgacgctggatgacagctgcggctttgaactgctccgctccggcactaccagcattcggctcgctttcaacgaagagattccggccggcggcgttgagatggttgtgctcggggaatttgatcagttgataatgatagactacaaccgtcacattgtgtctgactcaaaaattgcataa

SEQ ID NO: 47205 - DNA, 2705 bp, Heterodera glycines
atgcaattgctttacttccgcgtcggctgcgatttcgactttttgttcgaagcgtacaaagacgtggtgaaaacagacaaacaaataaaacagatggtgcacattttgcgagaagtgcaaaagcagggcataaaacagccgcagacattgctgataatgagatcggcaagcaaattaattattgttgattaattaattattagctaatttgggatgaaaatggtcaattaaatataatagcaatttcattttttgtttttgtataggattatatgctgaacaaagtggggagcaacacagagaatggaaatgatcactacgagattaaacaggcaaaaaatattgagttaaaattaaaaaaaaattaaatttgaaatttattttcggatcgaagcgaacaccggcgccatcggcggattgggaaatgatcggcggacaagcgaattgcaccagagactgttaaaacgcattggcatggacccgacaaatgcaccacaaaatgagggcgacgcacatctgatcaactcactgtttatggcatggtaaagggggcgaaacagctgaaaatgctcggaaaggatttaaaaattattatttgtaatggcacattttcaggaaattgtataaatcgggaaattttttgaaatttaaggaaggcttttgacaattgcgacgctcttttggtcattttgacgcatgtcaaattctcctacaaatacgaactgcgcaaaattgaagatgaattggaccgattgtctggtggacaattgcgtgttgcttacgtttcgctgaatgacggatattatgagtaaaagcatttaaatattagtaaattaatattttcaaaggtttatttggtaatagtaccgatggtagtccgtcccgtccgtccccctttttcggaaaatgaaattttagaatttttttttcgagaaaagaccgtataagggggtttaagggtcgaagaatccgaatctgacagaaatttcgacctatatctaaccccgaacccggattcgaacaaaagtcgaattcaaattttaaaatttctctttgttcctttaaaaatggtttaaatgatctttttttaaaggaatgttgacttttagtttgtctcccttccaaatccaacattgttggtatcattcgaaagcttaatctatttagaagtttttccaagatattgcgttgcgattagacaattgttaaaaaaagttatacatgaaaactgcgaaaaagtcgaaatttttgaagttttttcttaataatttttttccaggctttaaaatcttttcgctttttgtaaggctaatagagcctgatgagcttccgaatgataccaagattgtcggatttgttcgacaaagaaaaaaatcctagtggaaaaacatgctggggccctaacatgccggctcaaccgtgccgaccaactgagctactccgctccctatatgtcagccattttaagatcaaaaatgaaaattcgaaaattttcattttcgactttttgttaaaacccggcttcggggttcgaaataggtcgaaaattatgtcagattcggattctccgacccttaaaaccccttagacggtcttttctcgcgaaaaaaattcattttctgaaaaagggggacttacccccttcggtactattaccgtttattttacacatttactcactttcactatgaccgaattaaagacaaaatttttagttttaaattggccgctgattcttcgcttttgttaaatggcaaagttgttggcgttgtgtattccttgatttccgcacttggctataaagcaaatgaagaagcaatggaagcacggaaaatgattgaattgtcgacagcaattgtaaaaataaataaataaaataaatcaattaaaataaaatggaaaaactcagtgaatttttatagtctcactgacaacaacaaacttaatctaaacaatgtcatttgaaagtgctcaatttgctttaatttttagaaggcgccgtcgttggcaattgcaattagcagttcgaagaaaatccaacaggtgacagcaataaaagtccattaaaataacaattaatttaattgttcagcttctcgcctcgcctggcggtgttgagagatttttccccgaccccgcagaagcggacaaagtgaaggcaatccgcgaaattttcaccggcttatggggcctcgaagggcatgacgagaaaaccgaacggatcattgcggtagaggtgaacggcaataaacaataattaattaattgtttaggatgccatcgaaaatccgtcaaattacgtgctgaagccaaacggcgaatgcggcggaaataattactacgacgaccaattggttgaaaaactgcgcacaatgaccaacaatcaggaagaacgagctgctcacattttgatgcaaaagttacacccaatgatcacaaaggtgagagacacaaaacggtggtgtactgtaagagtgaatcgttgaaaatctaatacggtaccggaaaactgaagtacagttgctattctttttgaatgttttgttgaaatttagaactattttcttcgtccaaccattttgccacggttgggcgtcgttgtcagcgaattgggcgtgtacggtactctgatgggaaatatgctcgaccgtaccgtatcgtacaatgcgcagagtgggcatttgctgcgtacaaaattggccggg

SEQ ID NO: 47206 - DNA, 530 bp, Heterodera glycines
  unsure (1)..(530): unsure at all n locations
atggcacttcgacgcatcaaacaggtggcgaaatgacaactctctgatcagccaatgctttaaatgttttgatccatttgcaggaactggcggagctgaagcaggaaccgatcacgggttgcaccgcggcaccgatggatgacggcaaagacatgttccactggaaggccaccatcaaaggaccgcccgagtcgccgtacgagggaggcaccttcaacatggacatcgttttccgtcgcgactacccattcactccgccaattgtcaaattcgaaacgcccgtttaccatccgaacgtcaacaagcagggtggcatttgtctggacgtcctgaagacgacgcattgggcgccgtcgttgaccatttcgaaaggtgaaagcgacgcgggaaagagcagacaaaacgccgacaaaatattgagacgacaaaacgatccaattcaaaacgaccaccaaaaccggactttttggaaaagtgtcgatattttgtcgtgtgaatgggatttttcnaattcggaaatgccgttttaa

SEQ ID NO: 47207 - DNA, 601 bp, Heterodera glycines
atgcgactgatgttagcaggaggggacgaagcgatggaggaaaatggacgaatggaggaaagcacggggaaagggatggcgagggaatggccgagcgatgcgcaagcggacgaaggcggacggatgtcgctgggcaatggggcgactgcggaagacgaagcggtggaggagcatccgtacgctgaggaattggcacaattcgaaccgaccgaacacagtcaaatgatggcactgcccgaaactgtcaaagtcagtgtttttcacttgtatacatttatgcaattgttttttctctttaagaaaccgactccattggagagttctccgccaatttgggtccgtcagttaaaggacttggaggcattgatcgacacactaaacgaagttcacgagttttcctttgatgtcgaggtttgaataatccccccttcctctgaaattgccaattttgtttcagcaccattcgttccgctcttttctcggcctctcctgtctcctgcaaatctccactcgttccgccgattacctcgtcgatcccttccctttatggccgcacttgcatttgctcaacgaaccattcacaaacccaaacattgtcaaa

SEQ ID NO: 47208 - DNA, 5367 bp, Heterodera glycines
tttttcaatttttccatttgtcagaccgccattctgttgaccaccaacttgttcggcattttcttcatttacccggcattcattgcgttggatttgaagcggcgcaaggcgggccgacgcgacttggaatttctgtgctattactgcctttgtgtggacgacgacgacaacgtcgacgcggaaacggcgcacaaaattcggcgttccgacgtaataaaaaaacagatcgggaaattgttgtgccatcttaccataattaggcattttgaaaaagcctgggcttggacttgggttccatgttgcgcatgaatttcttggacaaaaatataggaaaatccatgcttggttcattgcccacgtggatttattcaaacagagactgtttttgatacagtacttgtggtccatgacagtaatcaggacaagaacatgtccaaaatggacatgaaaatggccaaaaatgatgataaaaacccactctaaactttaatatagttgtttattgtgtgcagcatttatggccaaaaattacgaggaataacactttccatggagtgcccgtcaatgcacctttccatggtcttacagttccaacaaaatattaatttaaatacaattgaaaaccaaatataaattattttcttcaatttcgccgacgaattaaaaaaaaaatttcaaacttagaaaaaatttcttcggcgaaattttgtttcggcaaaacttttcataaaaaatacatatccctttgttttccccaagtgccaaaaaggggtggtgcacaaattgatggcggagacggcggacgacgaccacaagccggacaaaaagcgtgtgcccgcggagccacggtttggcacaacggcggaggaggaggacggcacggagccggaggatgagcaccacccgcaccatggccagcagaagccgtactttgcccgctgctcgttcaagccgatggtcattggacggacggcgccgagtgccgtcaaatatgtgcagcagccgaacggaaatcccaccggcgacggcactgtcattgtgcaaatgccaggggttagtacaaacggatggaaaatgtggcaaaattagtggtgtaacgatgcccgaaacaaaaaatttgggaatttgttaaaagatatatcaaattgattagtcgccactgttggtcaaacaaccaattaattagttttgccataaatgatttaaaatttatccattgttggcaaatatttaaatttaagcttgtcggtacatcccaaaaacgtcaccgcaaaaaaaaaaacaaacaaactttttaaaaattgttttaaaagttattttcaaaaatctaggtgttatttaaagaaacttgctatatttcaagggagaaaaacgaaaattggttcatttccgattaataatcgaccatgaacagcctttaaatatattttttaccaaaataactattttctattatttacaattgcttcaaaaatttcagtctcacaaaacgcgacgccgacgcccagcgcagaaacagtacaaaatttacactttgcacggttttttgcacattgtgtacattccgttgctgaggcgaagggctgtcaaagtgagtttggatgtcataaatttttttttaacaaattcatccttttggaatttgaaaattcagatttttaaattacaatttaaaaaaaaacgaaaatgacttttatctaagaaaattcaaaaaacaaaataaacaaatttcagcgatctgttgaaaattttttgaaaacagtaactcattcattatacagtaaaaacttgaaaaaatagttggaaacatttttttttaatttatggccctttccatccaattttaaaaattttctaattatttcttcggttttttttactaattacccccctcccaaaattgtgcccagtttgccattctcgtcacgatggtggcactgttcgctctcggcatttacggcctcagccgttcgaccatcggtctcgagctcagcgacgtgttgccggacaacacggcgccggccgccttcctgaaaacgcgcgacaaattattctccttctacccaatggcggtggtcattcgcggggcaaacgtcgattttgcagcgcaacagcaccaaattgacctgctgagacgggacattggtggggaaacggacggacggaataaattacaaaaatttgaattttggcatagaaaaacatttttaaaaacctaaaaacaaaaaggtttaactattgagtgcattctaaaatatcgtcgcccgaatgccgagaagaaatctcgccaccaatttaaaaaaaaaattatatttttgaatttttttctggaaaatttttttttgaaaatttttcaaaaaaaaattcagtgacgagatttttttcccgtatacgaaataatgcaatttttctaatttaaaataagaaattaatttggcattttcaggcttgtcaccatttgtggtcaaactgccggacggcgagccgagtgagtttttttttttaatttttacatattaaaatgttttttaattaatttcattcaaaaataataaaaaaatgaaataaaaatgggggatggcactttcgcccttcattcctttccctgaaatttaaaaagatttccaaaaattcgattaaaatttgtgcattttgccgtgccgttcaggtgaacgctattggctccagttgttccgcgattggctgcgcggtatgcaacagcggctggacgtggcgaagcgggacggactgttggacaattttgacggggatggcacaacgccaatgacggcgacaacaaatgcaagcagtacatccgcagcagcaacgacaccgaaggcgaaacatcattcgcccgacctgcaaattgcctattcgttggcctgctcctacgggcagaactacgactgtgctagggtgagtttttcaaaaaaaaaaaaccttgggatttttagtaaattttttgcctacaaaaaaaaattttaaaaaattgcggctaatgattcgaaaccatgttttttaatgacttttcgtccatgcttttgaaaaaatgaaatttccatgtagagctgctatcttctgttaaattggttgcatttggaaaaaatttacgaatttttcattgttaccgaaataaaaaaaaaaattccagaatcaaaattgcctccttttttttcctgtaaggccggcacagtgcgtctgattgatgagagcggcacaatcaacacggaaggcttctacaactatttgtatggatggcacgaatacgaacaaatggtatggggttgccctcctaattttactgtttttttctcgaatttttttatgaaaattttgaaaattaatcaaaaaatgtagaaaatttcccttcctttcagttctattccgtctctcaggccagcttctacccccgtcttcgcaagttgcgccagggaccgcctgggcctatgaaatatgtgcgttttagcagtttcaatcttaaaaaggactatttcgtgattttaattacgaaaattagtgctccgactttaaaaatttaagaaaattgccagaaaattcttccaaaaattaccattaaaaaactcattgtcgggcctcaattaatattttacactttataataatttatttttaaattttttttcccaatttgtccctcccatttcagcgctattttcattccgccggcgccgaagccgttgttcagccgaattccgttttactgtgacgggttgcgcgacacgccgaccatcatgcgcatgatccgcgagatcagggcaatcagcgaaaattacagccgcgcgggcctgccaaattacccggaaggtgtttttttggaaatttgggaaatttttaggggaaaacaccaaattttattaatttttcaaggcgtcgcttttaccttttgggagcagtatttgcacttggactactacttggtgttggctattggtgtaagtttttctttcttttttgatgaacaattattataagaaaaataaaatattcgactaaaagttaaaggagtttttcataacttttgcttgattatttcttaattaaaaagcaaaaaaaaaaatttttttatttaattttttaaaaatttttacaatttaatcacgtaaaaaatgaaaacaataagtcgctgaatacttcaaaagtttcttattgaaatatattaattgatgcatttattttagatcatttccgtgtccgtcttctgcgttatctccaccatcattttcaacccgtgggcgccgctttggtttgttacaaaaaaaaaaaaaagttttttttttgtctggccgaggccccaaccccattctcctgtatacaatttgttaaattttttggtcattcaaattctccaaacctttctaaatgtgtttctgacaaataaatcatattttgtttattttgacatggtcgatcttttgttcgctaattacttttccgcttttccgatcacttcttctgatcacatcatttcatgtccactttttaacttatttctgattatttctctcgtctctaatcactttccccattccaccatccgatcacatcactgacatcaaatcatacaatttcctttttctgatcgttcccgctcattcagagcacttcctaatcatttgtttctttgctttgctttttcctttttctgatcacttaccatttatccccaaacaacacaggtcacctgcgttgtggccagcatgaccgtggagttggccggcttcatgggccttgcgggcgtcaagctgaacccgatttcgtccgtcactctgatcaccgctgtcggcatcggtgtcgagttcactgcacatgttgcgctcgcatttctcacctcgttgggcacccgggaggagcggatggtcaatgcttgcagcacatgttcgtgccggtcatccacggcggcatgtccaccctgctggtcagtcagtcattcaatcagcaggctgaaagtgggaaatgccagaaaattaaaaatttcaataaaaatgaaaaaattttctctatttttaaaaattttagaaaaaaacctgccagaaaatttttttaaagtcgctgaaaatattttccattttttttgaaaattctttgaaaattcgggcgcctttgattttgaacacattcatttgcttgtattgaatttaccaaatatggtttaaaacagagtgaccaattacggttttaattaatctcttctttttcttccagggcatcatcatgttggcgttttccgactttgattttgtcgtccaatacttctttgttgtgctgactgcgctcgtcatcattggcctgttcaacggacttgctgttctgcctgtactgcttgcctatgtgggcccgccttgcgag

SEQ ID NO: 47209 - DNA, 1707 bp, Heterodera glycines
atggacgaggacatggaagaagtcgaaattgtttttgctcaacgattggccagcggtgaaccaacggcacgacaaagggccatgaaacacttgcgaacgcacataagagaaaggacgaaaactgatgcaaagggtgcactttcttccacttccaacactttttgttgacattcccttttcttttcttaggcttttcctctgtttcgttagcgcgactttgcaaagggttgcattatgcgctttggatgcaggacaaaatgactttgcaggaggaacttgcggatgaaatctgcgctctttgcaactattttcgcaccgacgagcaactgcttgaatttgtcgttgttctgttcactacgctttctaaggaatggccgcacatcgaccggtggcgaatggacaaatttctcatggttatcgcaatttcttatggctgatctgtcacttattccgctggtttatattcagttggtccgtcgtttggttcgcactttgttccgtcaattgtcctcccaccgctgggacccgccattgtgtgaccaatttttgcaaatgtttcgctcttcgctgctcagtgccaattcgcctttatgcgagtctttgaaattccattgcgcgtccgtttggttggacgaattggacacagcggcaacagcgaaagtgacgccgagcgaagggaacgccggcaaaaattgcgaagcctttccattggatgaacagcgctcgttggactttgtttggccttatgttcaactgttgcaggagcaaatttcgtgggaaataaacaaattggtgttaaatggaaatattgccaattaattcagtgactcttttttccgcacaatttgttccgacattttcgatgcgatactttgcgattttgagcaacgaaaagcggagaaaatggacgaacattgcgacgagaaacagcaaaatgtaacagtggaagaagaagaaaaggtggacaaagcatttggggctgaagtttccgaaattaatgccaaacattggaaaatttacagaagaaaactgaagaaaaatcgtcgtcttttgaatttgactacaagcgaattggggaattactttttgaggttggaaaacaacagaaagtgccaagtcggaggaggaagcgaatttacgcattgtgtaagaagtaagtgaacgaagcaaaagaggggaagggacaaaaccgggaaaatttgaaattgattgcaatatcttttttttctggaattcaacaaatttttgttttcaataacacataggttttcaaaaaaacaagctaacaataaaacaattttttaattcatgaaatttttgaaaaacaaaaattttttttttgctaagacgttttttccggccacgttttgggttgtgcccgggggggggggggtatgtaccccgggtagccttccccctgggaccgtccttgctgtggtgtaagtggtcgcctcttcgttaaatctttatttcttctgaatgaaataaattagattatgttcctataataaatttttgggttgcaaattaagtgcgaattcatgttttttgtcactttatcccatgaaactcaaaatgtatttacagattcgaatgtgcggcccaaggcgatgaccctttcccggtgccaaatttggagggcgtgaaaatacgtaagaaaaagcgacgccgaaaaaacagcagctcttgacaagtcgccattgttat

SEQ ID NO: 47210 - DNA, 888 bp, Heterodera glycines
atggtgaccggagagtacggatggtctgccaacatggaacggatcatgaaggcccaggcattgcgtgactcctccacaatgggatacatggcgtccaaaaagaacctggagattaaccctgaccattcaatcatcaagtgagcgcattcaagatgaaattgagatcatgatgtaattttttgacagtttttcgtttttaggtctttgcgcgaccgtgttgagaaggagcaggacgacaaaactgcaaaggacctcgttgtgctgctgtacgaaacttctctgctcacctccggcttttcattggaggacccgcaacagcatgcgtcgcgaatttaccgaatggtgaaacttggacttgacatccccgacgaggaggagccggccgagcaacagccgagcacttcgggcgagccgacaattgcggagaaaattgctggtgccgaagaggaggcctcgagaatggaggaagttgactgaatggtgacatcgtctatccattcttggatctcggctattcaatattttgattcattgtttttttgttttcttgtttgacataaatttgaattaaattttccgtttcgaaaccaaattatatatggaaattgggcagtaagtagcttcctgggcatgctttgcttgttaattggatacaaattaacaattttcgtcttacaaattagtctaccgccttataaatagagatgggatttttaggtttttacctattttttgtggcttagctatgatgagagaagcctaaaaatagcattttctccgaacaattttcgatttagagcgactttttagcacctaaaattacctaaaactggattttcggtcaatagcacctattttggcattttcccatagcaaaaatgcaataaa

SEQ ID NO: 47211 - DNA, 940 bp, Heterodera glycines
tcccttttgctctgcgaaatccatctcgcctttctgcgcctgttttttcgcgaggaggacagcgaacacacaattttcgcggccacagagaccaccgtttccgtcaacattctcatccaactgatggactcgatgagttttgccgaggttatttttacatttgaattgcttttttttgctaaatgtgatttttaaatctatttttttgtgataaaaaccataatgatggagtctaaattggacatattttaggcgtctaggcactcaaaaatgtgatttaaggacttaaaaaactttttgcttccgcaaactttaattgtactccaaaatgcagaaaagtaacgaaacatgaacaaacgaactccttttcccttaaggtgttgcgccattacgtggaaagtgacgcccatttccccgtcgatgtgttgcacattttgcagcacagcaactacccatttgtggagctggacaagcggttacgtgtgctgaaatggatgtgcgaacgcttcttccaattcgatttgatcaaacgcattgtgggcggaacgcacaaaaccgtggtttgtttatttaatatttaatcctttggcaattcctcaaaatacaaatttaattgtccatttttaagcatgacgagcagtgccgcagctgtggcaaagcgggcggtggcttcggcaaactgttggcatgcgccgagtgcgaggcggtctaccacgtgcactgtgacgcggacttggtgcccggaccgacaccgccaccccaaccacaagcaccaccaccaaatccacaaacggtgccgtcctccgcctctgatccgacgacggcaacatcgaacggcggaggtggtgctggaggcggtgttgccgtaacaacagcaccagcaactcccgtggcggcagaggacgacccgaactggcgctgtccgttgtgccgaatttat

SEQ ID NO: 47212 - DNA, 1400 bp, Heterodera glycines
atgacatttcacaaaattgacgcgagtagcatcgattcgattaccaacgccgtggattttttcagtataccccctacaaatgttacagtatcatcgtcaaaggttttcgagattttgccgagtaatcccctcaccgacacaccttaccattttaaaatacactcgagccaaaactacattgacctgtcaaagtgttaccttttgaccgaatttcgaatgcgaaaattgacagcaccaaatggtgaatggggatatttggatgccactgatcaggttgtaccgatacaactaatcggacacactttcatacgagacatgaaaattgcaattaatggtcgcgaaattttcaactctaattctctgatggcatacaaaacttatctctctcatgaactttcacaatcacttgaagctaaagtttcgcatttaactgctgctggatacgaccgtgaagatgctagtaatctacaaaacgcaaattctgaagggttcaaaagtagaagacaacggtatttgggaggtcgaacagcacaatacattgcaaaaatcgatgctgatcttttcaatgtaccccaatatttgattaatcattgtgaaattgacataacgatacaaccccatgacgacaattttttgttaattgacaccttagacccacccggtcagccatataatattgagcttgttggattgaaactctactgcaaaaaagtcagtcttatggatggcttggctcttgagttggcgaaaaaattggaaatgaaaccagcacggtatgctgtacgaaagacaatgatgaaagcactgttcataagcccgggacgctatgaatttaatgcaaacttgttcatggaccaagttccacgccgcgtaacaatgggacttgtcgcaaattcagattatgtggggaacaccaaaaggagcccattcaactttcaacattttaatgtacgggaattgagtgttgtggccaatggtcgctcttatccccaagccccgtatgatattgactatgaaaattggaaatttgtccgtccctacaatgacacgcaggaggcgcttggttttgccaactctacatatggaaatggaattgattacttttcttttttgcacactcactgtatttatgtgtttaacatgactaatagtggagatgatcatggcggtttatttgacctgattaagaagggatgtacagcagtgaacataaaattcaaaaagccagtgcccgatgggggaattacattgattgttatgggagaagcagactccatctactttttggataaaaacagaacgatcgcgaccgatacaaccatttgattataaaaatgtttaatttattctttattgtcttattttttcaaccaattgtttcattgattgttgaagaagga

SEQ ID NO: 47213 - DNA, 1917 bp, Heterodera glycines
atgacggacactgcaaatcgacagcgacgcggccgaggcgagagacgcacacgagtggtaagacagttggatggtgaacacgattctgacttctatttggaacccctgacccggattcgaaccaaaactcgaaatttcaattttcgacaaaattaaaattatgcaacaaaatgcacgaaataaaacggaaaatacgattctgaaggcaagacagtgtatttcaggcatatttgaactgtttttgttgcatgacttgaattttgccgaaaactgaattttcgagtttgtttgagtccgggttagggattcgaaatggacttcatacagcgcccccgaaaacccccctaaagcatcacaaagccgctcattccttttttactcttttatgggaccacaaacggattttgacattaattttagtcaattttcagcttctacgcgacagtgccaagaaaatcaccaaagcgtccattcttcgtctggcccgacgtgccggtgtcgcccgaatcaacgcagaagtctacgacgaggtccgtgccgcgctgcgctcgtacttggaaaccatcattcgagacgcggtaagttttcaaaaaatgattaatcccgatatatcacatcacccaatgctttcaggccatctactgtcagcatgagaggcgcaagaccatgaagagccgggacgtggtacacgcactgaagcgccagggcaatttgatgtacggcttcgaacaataagcgcaaggaagaggaggacggatatatttggaaccggcaccatatgacattttcatggataatatattatcattgtacatatgtgtgtatatgcctatattgtattgtatattgttttgtcatttatcagtgcaattcagggttgttccgggtcgagaaaaatatcgggtcgggtttcgggtcggccgaaaaatcatcgggtcgggtttcgggtcgagaaaaaggccgggtttcgggtcaattgacaaatttttaatttgtttaaaaatcaaatggcactgcaatatttgcagcgaattgcgccatttataggacgatggaaataaaaccaaatggaatcaggtttttcagccatctgctttgcttaaattcaagaaattcatacaaaatatctttagaaaaaggataataattagggacgtgaattttagtgaagaaaaatcccgaaatagttaactaaaatagtgagtaaaaatgccaaaatagtgaagaaatagtgacgaatagtgacataattttcagccaaaaattgagcaaaactaatttttattcactatttgcagttgcaaatgagttggactgggatttttaagaccaaaaaacccaaaatagttacctaaaaaattttttaaattaaaaatttttgccaagaaagtaaatttttgagaaaatttttttttgatttcttaggagtattttttgaaatttttttagctcgattcttaggggtgtattttttgattttattgcatttttgttaacaaattttccaaaaaatgtagaaatagtgaaaaatagtgacaaaacgccaaaaaagtgaattttcatttaagtgacgaaacgccaaaatagtgatttctagtgacgaaaaatgacgtccaaatgaaaaaattttaatgcataaatgcgttttttgagcacctttcttcaaatcaatcgagcaaaaaaaagtttttccactagaaatcgcgtccctagtaataaattgataattaattaatttgcagacaaggattagggttcatatcttttggcccggaccaggccgttttcgcgtgggcccagtttttgaactataattttttttttattgtcaactaaacccacgaacttgatacattcgaaagccctaagtgccctctattagccatcatttcaaaaaatttcgtttggttttaaaaa

SEQ ID NO: 47214 - DNA, 1196 bp, Heterodera glycines
gcaaaaaccaccaaatgcttggctttgtgatcagaagcagcggacggcgcgagaaggccgaaagtcgagcgatggtcagtaagaaacgcttttttcgttaattgattgatttgactaccttctttatactctccctcctctttttaaggcttgtgccccgcttcttcgatggactcccaatgcttacactaatggtgagttgtaaaatgatggtttaattgatacattagtgaatgaaaaactaaagaaaattgcttcccaatgcaggagtgtgctatttgctcaattccgaacttaacaacaccgttgtgatcaacccgtgcgattcgttgccgaaaaaagatagggtcggcacttaatacaaatgttctgctgatcagtcacgctctagaaattgcctaattagtctctatttagcataatgactacggtgcgtgtgaacaaggcttttccggtttcgttgacaatgtgatgaatgctcatactttctcctcattctcttacatcgcatttcaataattttccatcattttcagcacatcattttgactggtctcccgggggcacggaaatggacaggcggagttttcggtaatttttatcagtccatatttctatccatgcctgtttgtaccattgggaataattgtgtgacattttcatcagctcgatacgaattcactgattccgatggttttactgatttggtggaccggcggacgatggacgtgagcaaagaacagcgggggatcatcaacgttttgacttcgcacgactatttgggatactccgtccgttatgggcgcttcggcttttggtatgagcacaccgaggcgggcgaggaggccgccaatttcacggtggtcagtggcgcgactcggtacaatcagacgggtcagtcgacgatcaaatgttgcgattttcttggcattttcattttgcctttttcgcaggtgccgtcgtctttttgccattctggcgacatgttcaggcggagaatcagcgacagttgggcctttccgacgacttctttctgttagccggccatcagcttggctccgggttcggctccgctttggaagtgctcgatttgaatgccgacggcttcgacgaccttttggtcggcgctccctttgaatttcacctccgctccgatggcgcgtcgggtggtgccgtttacgtattttattccgcgg

SEQ ID NO: 47215 - DNA, 1260 bp, Heterodera glycines
ctataaaaggcgttgaattttgcaaaaactttcattgccttaccctaattaattaactattataattctctctatatcgtcgtcgccgtcaacctcaatttgaggtgttttcactccattcataattttttaatctccgtttttcttacagcagtcatcacgatgtccgggagaagtggccgcagtgggaaacgccgacaggacggaccgggccgcccctcacgttcacgtcagcagcagcacacccagcgcggcgttcagtctgcatatcaaggtccacgagagccgccggagcaaccaacagtccgaggctgggaggacacgcacgacttcagctcagccctgaaaatcttcgtcaacgagacaacgcgacgcaacgtgaaggagctggtcaacgaatacacggagctgaacgccatgccacggccggagacttcgccggaattcacacggtcagtttggctgtttcgattttcaaacacaaataaaataggtaatttctttacagccacatggactgcaaccgctaccgggacgtcatctgcgccgagcagggccgcgtgcgactcgacaacggacgatacatccacgccaactggatcacggcccttggcgaacagcgcttcatctgcacacaaggcccgctcgagacgacctgcgccgacttctggacaatgatcgtgcaggagaacatcgaaagcattgtgatgctctgcgacaccgtcgaacaaaacaagaccaagtgccaccagtactggccgacaccggacaaaaaggtgggtttttccattttttccccttgcagcaattgcacttcgccaacaagacgatcaccgtgcacttcatcgaagagactgcgctggagccggacctctacaggacaaagctggcggtgctctttcccaacggctccatgcgcgtccatcacttccactggcgccggtggcccgaccgcggtgtgccccagaacgacttggcgcctcttcgtttgctgttccacgtgcagcagtttcggcgctcggtggtccaccgttcagcgggtgagtttgtgccaagttggaaagtaaaaattcaataaatttcccatttttaggaatcggacggaccggaacactcggtggcgctgcacatcgcctacgatactctgcagcgtggacatcgactcaacatcctctcgttggcgcgcaacctccgtcagcatcgggcccagagtgtgcagacgccggaccaatacctctacatatacttcgtgatgttgcg

SEQ ID NO: 47216 - DNA, 359 bp, Heterodera glycines
atggcagacaatttgcgctcggaggacatgtggcgcgtcaatgcaatcatcggcggctttgattcaacggacaagaaagcgtatctcaccatgattgattatcttgcgacaaatattcctccccaagtagaaacccctttcaaactacggagttttttgtggtagaaaatttcacatttttagaatttcatcttctacggctttcctggtgcatttgcttactccatcatggacagtttctaccgtacaggtttattttttaaatttatattgatggcgttattttatttgatttttagacctaactgaacaggaaggattgggattggtgcagcgcatgattgaccaggtgaagcgtc

SEQ ID NO: 47217 - DNA, 673 bp, Heterodera glycines
atggaccgtgacaaccgatgggagcgaattaaggcactcattttcgaaaaaaacatcgtttttggacttgcatttttccttaaggttgcctacgaggcattggttgccggagagggcgaaaagtgcgaaccggcgaatgctgtacaattggtgaacgagcgctacgcaaaccaacagactgacgaattcctgacgcccatcgtgttttcggacgaagcgcgtgtgaaaggtatgaaaaattgctgtttttatccatttggaattttggggggggggtagatttttttcaagcaaaaaataatatggagaattatttgtttgaaaaaacgaacatattcatgatcaacgaccatgaaaatatgtaattgtactattttcaaaaataaataggaaataaataaataaacccaaaagggtataccaattttttagaaaataaatattgctccctccacccaaaaaagcaaaacgccgaaaaaaaaatttttttttgtgctcagcctttttgctgtaccggctctaaagatgcttattgttagtcattcattttcaatcacaatttacaatttcagacaatgacacattggtctttttcaattatcgtgctgatcggatgcgtgagattaccagtgcatgggtggtctgcaaaacttgcaggatttgggcaccaatg

SEQ ID NO: 47218 - DNA, 830 bp, Heterodera glycines
tgccatcacgagtgaaaataaaattatatgctgatgatgttaaattgtatatatgttataaagcaagagcagatacagaaattatgcataaagcattgcataatttatcagaatgggcaaataaatggcaaatcagagtctcaattaaaaaaacttttgtacttcatttggggaataaaaaccccaaagaaatatataaaattgatggaaatataataaatgttgtggatacaattagggatttaggcataaatattgataataaattgcaattttccaatcatgtcacgcaaataataaagaatgcatatttacgtatgcgttctttatttcgggttattaaatcaaaatcttctaggatttggattattttgtataaaacttatgttagaccgttattggaatatgctcctgaggtttggaatccatctctgctaaaaaatattaaaaaaattgaaaaatgtcaaaaatatttcaccaaaagagttctttttaaatgcagccttccacccattccataccaacaaagattagaataccttcaactgccgacacttgaaagcaggcgaaagctgtctgatctgttcatggctcataaaataatttatggccgaacagatcttaatccctttgaaatattcaaaccttctgaacgctttaacattcccttttatagacttaactcgaaatataaattaggcaaaaaatttataccttttgcggggcgggtaactaaaatttggaaccaactcgataaaaggctcattgaaataaactcattaaatcaatttaaaaataaaattaaaactatctctattcccgtaaaatag

SEQ ID NO: 47219 - DNA, 1480 bp, Heterodera glycines
atggaatacgtccccggaggcgatatgatgcaacttctggttggtccacccaaactgccctctctacacacagatcattttcagattaacatgggcattttccccgaaagtctcgccaggcaattcagactaaattcacttctttgaatgtttaacgccaaacattacagattttacattgccgagttgactttggccgtggaatatgtccattcccttggctttattcatcgtgacataaaagtgcaaattatttgatttcaaagtttcaaatgcatttaaatcgtttagccggataacattctgatcgaccggagtggccatattaaactgactgattttggactttgcaccggactcagatggacccatgacaaaaggcattacgtagtctacgacgaacaatcaaacggagcacccattggccatgtccgggacgactccttctcgttgccccctgggttggaccagcgcgtcaaagtgttggagatgcggcaccaccggaagagggacagagcgcattcggtggtcggcacgggcaattacatggcacccgaagtggtgcagaaaattggtgagaaaaacggaaaaaatgtcaaaaaaggggggaatggacattcagcggatgcttttgatgtttaagtaggatggtccatcatgacaaagttgttcagggcatacccaattgtgcgactggtggagtgtcggcgttattctctacgaaatggtctacggacgaccgccgtttttgtcgcagcgcgacgacccggcggaaacgcaatttatgatagtgcattggagacgctttttggacttgcgaaacgcgatgggtgtgcgtttgtccaaacagtgcgtggattgtgtggccaaattgtgctgtgaccaggagaaccgactgggacatcgcaacggggccaaggacatcaaagcacacccgtggttcaaggtgggcattgcaaattgcgaattagcagtgccaaaatggaaagagcattcactcccttcccgcagggcatcgattttgccaatttgcgcaacactttccccgaatatgtgccacgagtgcagaatcccgaggacacgtcaaactttgacacctttgaagtggagaacgaggaattgatcagaacaaatggaaatggaaacgaccgattaaaatgcgcggcgtacggcggcggaaagccattgggaccgaatttcatcgatttcacttttcggcacttctttagcgagggaatgtgccctccggcacggggccggtctccgcaagtcaggccaagtttggccccgcttatggagagttcgactgaagggggaaacgcagcaaaatcgccggcgggcgaagtcttcgccaaaccgaaacaaattgtgacgattacgggtaaagcaaaagtggtgccattcacatcatcaaaacgtgtgccggcaccttcgattccttctgattcgtctaaagcaacaacagttcaaatcggaggaa

SEQ ID NO: 47220 - DNA, 1512 bp, Heterodera glycines
tggcaaaagagttgctgatttgccattcttcctctcccactgcatcgcctcaaccgagcggatgtttcttaacgtccgccaatgtcgtagcggaattggacagaattcgaagggaacagaacagaagcggggccggagaagcggacggacaaagcaccgccgcaacgacaccgaacgcatcgcgaaggccgagcaattcatccgctgccgcggtgattagctaataaatcattattagtgaatgactcatttaaatttcaattttgtaggtcagtggaagcgttgaagacgaattggccaaaatcaaagtggtcttacgacagcacgagaggaggatccgattgcttgaggtgaatggcatttatacggaaaaactaaaaaaacaattcaggaccaattggcggatgccaacatggccaatgcttatggattatgaaaattaatacggacagaaatattgtgattgaagaaatgacgaaaggaaaatatttgaaaatttatagcaaacaaatgcaatttgttcatcacaaaaaatggaatatccgccagctttttgtaaatgagcttcaaatgtttggtggttgtatttataaaagtcgctaataaactcatctaaaaatgaagggcaaatattgccaattgtgcagaatggtggtcccttttccttttttttattttgggataaaaattctggagttaaaagcctgctgcttattgttatgtaacgaccggggcgggaattcccggtcccggcttctcaggtcccggttttgcccaaaattcccggtaacgaccaactctagttataggatttaccaaaattaccaattttgcaatttcgggtcaatttttttaagaaaaataggaattattggggtccggcggcgctgataggcgccgtattgtttcaaacgaaaaatatgacagttaactgactttgttcgcaattttatgatgttttaaaaatgaggatttctcatgccaaatgaggatttttttgaggtattttagtggcaaatgaggattttttatggctgaaatgaggattttcaaaattttgagatagaagtcctggcataatgtcaacaagaatttcgcatcgtattttcgaaaatttatgaattctaagattcggacttattaagccaattcattctaccccgattcgtactaaattttcccaaacatgtaaaatgtgttgagtgttcatccaaatttttcaaccaaaattccccatttctcgcttctttacaattttatttctataccattattcgacttcaaacagagtttattaacgacatggtaattttaaacaaaataaaagacaaaattctccgcttttagccaggcaatgaaacaattcgaggccatttggaaaaacggaaggattggatccgacggacgagggaccatcaggaaaagtcggcggatatcaaaaagttgaagagaagcgcacgggaacggaaccccgacgaattccattttcatatgttgcggagtcaaatcgga

SEQ ID NO: 47221 - DNA, 462 bp, Heterodera glycines
acatatttgttttcacagcattccttgatggttcgtcatgtgactgcctcctgctttcgtgcgccatggccttttgaaaaaaagggctcaactggatggcggaagaatgggccggttgttattgaatcgcacaaatggcccggtcaacaaaaggaattccccgagctctcgccaaaatttctaggagcaaactttaaacagctatggagtaagcgaaccggaattggaagctaacctatgagtggagattatctttaggatacaccggagtggcgcccacaggatttaatgaccccaaaactgacgattttgttcatgttcccgaaatggtgcccgaattggtcgtgccggacctagcaaatttcgagctgaagccatacgtctcttacaaaacagatgcaaaaattgaagaaaggtaaaaaaaatttaagacaacaaatatttctattgcattaggctacg

SEQ ID NO: 47222 - DNA, 1061 bp, Heterodera glycines
atgtccacctgttttcggcaggaggtttgtatattctgccaatatttgtttctttaatcccatggcatcgttaccttttattttcacttttttaaggtcggaagccatgggagagacacccgcgggattttccgtgtgcaccaattcgagaagatcgaacaatttgtcatctgttccccatttgacaacgaatcgtggaagcacatggacgaagttagtggacttttggaaatatagtccagtaaatttaattctttttaaaattcagatgattgacaatgctgaagagttttgcaaagtgctcggccttccctaccgaattgtggccattgtttcggccgaactgaacaacgcggcggcaaagaaattggacctcgaggcgtggttcccgggcagcggtgcatttcgggagctggtttcatgctccaactgtacagattaccagtcgagtcggttacgaatacggtacggacagacgaagaaaatggacggagaggtaaaaagtgatttgaaacgaaaggatcagccggcaatcaattaataaaacggataatgcccttcatccttgaccatttgtcctgttcttgggttcagcttttctgcggtttcttatttgcatttcttctcttttaggtctttattaatgtcaattccaggtcaattatgtgctcatgctgaacgcaacaatgtgtgacaccacgcgagtgatctgtgccattctggagaacaatcagacggaggatggcattgtcgtgccggaacccctgcggccgtttatgccatcgcaatattcgcaacgaattccctttgtaaagccggcgccaattgagcaggaaaaagtgcagaaaaagaagaaatagtctttcgcagacgctgatattcggaggcattctttgctttggcatttgttgacccatttttatttataagtgaatttgttaattgatggcaatggctttacaactttcgctgtttgttttttgttggtttattcattcattcgtttgtttcgaaaatggcatcagtttcattttgattgggtttagtgttagtcaaataaa

SEQ ID NO: 47223 - DNA, 2240 bp, Heterodera glycines
atgtatcaactgttccgggcattggggtacatttttttcttcatctttattttaatttcatcatcccccttcaattttttagttacattcacagcattggcatttgtcatcgggacataaaaccgcagaatttgttgctcaatccgcaaacatcagtattgaaagtggggcatttaaaaaaaaattatttttaatttttcaccactttttagctttgtgatttcgggtccgcaaaaacgttggtccagggtgagccgaacgtcgcctacatttgttcacggtcagttaacattttggcgttataagggtttttgcgtaacaaaaaaaatcaaaatagttagctatttttctgccaaatttcaggtattatcgcgcgccagaactgatttttggcgccaccgattatacgaccaaaattggtacaagcaaaccaaatattattgtagttttagcatatattttttaccaacacataaaaagggtgcaattttttcagatgtttggtccgcgggcacaggtaaaaactaaaaattaaaaaaaagtttttgtttctacggttttattaaattttcagtgcttgctgaacttttgcttggtcagcccttcttccccggcgactcgggtgtgtttgtactactactatttgaattgtttattagttttgtaaaagcattttgggttttatgggaaaaccccatattttttaatttccgagattggtctgggtcaatttcgtcccgacaaaccccgtaccagtcaagattagggcgcgacatgatcttttgctttattggaaaaccaaatccagcaaaaacctggtgtcatttgaaatttttgcatgtttgggagccaaccattaagctattatttacaattagcactagacattttaaaaagtagcttacagcatgacaaccataaaatgcagcttttgcatttgtattttttagagagtatcaaaaaacaacaaatttctatttgatttttggtattactatattatctatataaagtcttttacactaagcgctttcgacttttatatttatgttttatatattttgagcaggtgttgatcagctggtggagatcatcaaagtgttgggcacaccgtcgcgcgatgaaatccaacacatgaaccccaactacaccgaatttcgcttcccgatgattcgaccgcatccctggcaccgggttagttcaaccttcattcattttcgtgataagagaactacaaaaatatacactaaaactcgagaaaaaattacgcatcatttccagttatcaaaaaattagttttcaagaatttatccattttcccgcaactaatttttattttggagatttgtgttgtggtacagtgagcaaaaaattatttgtactgtggactggtacaaaaaaaaacaatccgatactcttcattagtctaaccaaaaaaaatatattctggtatgggtcgatccgaagattttttgcttgacatctcattggcataagttttccagaccaattttcaaaaaaaaaaatcgttggcacgaaaataataatgaatgtgtttggttctgctgtttcagccaggaaaaaaatttttactttcgagagttatggggacactcattcatttttggatttttttttaggtgttccgtgctcgtacgccccaggaagccatcgatttggtttcccatctgctcaagtacacgccgagcgttcgtccttctccgttcgaggcgttggcacacgacttctttgacgagttgcgctcgccgacctgcaaaatgccgtcaaccggtggcccgttgccgccactgttcgacttcacggagcacgagctccagattgagccccgtctgaacgaaaaattggtgccaaagtgtcagtctgcttccgcctcctcctcattgtcggcgacgatgccaaagacgtcgacggcgccggacggtggtggtgccaaacagcaggagggggtcggtggtggagtggtgaaaacggacgaatcagacagcaaacagcaggtgagcacattgggggagcatttgtggtattactaaccatatttaataataaatccccccgagagttcaatttttcaggggctttattagaggggggcgggtcactaaaacattttttattagtcattaaaaagtgacttaggtttttggttgtttttctatttataaggtatagggtccaatgaaaattgaaatatacaaaaaaaatgttttaatactaaagaa

SEQ ID NO: 47224 - DNA, 3195 bp, Heterodera glycines
  unsure (1)..(3195): unsure at all n locations
agcgaaatttttcgacccgaaaacgtaaaactttcgcctccacaggcctctccattcttagtgtttggnccgtccatcctctgagagggcaaggaaaatttgaaaaaaccctttcatttaaaaccctttaaatttgagtcacaatttctggctcttggaattatttttaatcatttccacacatttttccaccaggattgttcgctacgaagtgtaccagactcagccggttagtgcctttcttcagttttcattattggcacatttagaattatcccaatcttttcagagtgccatcgcctcatatttgcacgaaaatgtgagactgctcgctcgctgatcagtgatcaatttttctcttttttctgatcagggcaatgcccaacgctacctggacctgttttgtcgccatcagcgcaatttgggtgcccgagagtgggaccatgcgctgatgttgaccggttttgacatccaccggggctacggtgccacatcaatttccggcattgccaggcttggtaagtagttcaggatgttgcgaaattataaaaactttaaattttccacccaaatttaacagtcgtcagagtaagtggttttcgcctttctgatgacttttttatttttacgaataaacaatatttttgccctcttccatatggttcatctaaaaattatttggtgccgaattttcggtacccaattttctcgtctaattacccccctccgtcccccgctctcggggctgagtattccaccgaataattaaattatggcactcatatgtatattggcaccattctccctttagatggaatgtgcgattcatggaattcttggtaaattaaaacacggccaaatgagtcccacgagggcacaaatttaaaattcagtacgcttgccgaaggcctggacttcacatcggctttcatcggcacacatgagcttggccacgcggtcggcatgcgccatgatgagccctactgtcccggcacgcacataatgagcgcatcacttggccccggcaaagtgacatggtcaagctgttcaacacgtgattatcagatgttcatccaacgcctcgagtgggttgccctgctgggtggaattcattgatcaccaagaaatcggacaggatttagggctgatcacaaagagaaataatcgccataaaaaatagggacagggcctgggattgatcaccatgaaaaattggacaacgtttgggactggttaccaagaaaaataggggaagagtttgggactgatcagtaatcaccatgaaaaatagggacaaagtttgggactgatcagtaagcacgaagaaaatcggggccggtcttgggactgatcaccacgaaaaagggcagtttaaatttcaaaaatggcattaggtcacccctcaaattcaagggcgtagccagacccttggcttcggagggagctgaagctcgattttaaaatttcaaaaaaatttactgaaaatttttactttttgggtttcgggggggggccttagccccctcagccggaacgggccaactccgtctggccaactccgtctgagccaactttgagtcaatataactcttgaagttattgaccgaatcaaacaatcttgatatcattggaaagctcttcacaggctctattagcctactaaaaattacagaaaatttcgaactataaaaaaagatagaaataaaaaactttgaaaattctgccttttttgcggttttaaactgacaacttttttgagagctgattaatcactgagaaatagcttataaatatcttctaaacatctagggctttcgaatgataccatgattgtgaagtttggccaacaaagaaaaaagttatagctttttgaacattgctgagacggagttgacccctaccgccctcagccccccccccccgccctgcctacgcccttgctcaaattgccatttctccccatgtttacagtgcacgtcaaaacaactgcatgcgaagctcactgctgcgtgaacagcttccaatcaccgaatcgctgaagcctggccaagtttacgatgcccacggtcaaaattttaagaatattttatatttaaggactccaaagcgggctcataatcccttttttctggattttacaaaatttttgatcgctttttctgattaaacactgatcaaacattgaattttgttggcaattcgtacaataaatttttaaatttaatttttttttattattaaaatgtacaaattgtcagataaccaaatttaagtgtttcttctttcagagcagtgccggctgatgcatggaccatcgtatgtgcaagtgtcgccacggcatgaccattacggtaaagcagaatgccaaaaaagaattttccttacgccgaatttaaattacccaaattttacccaagatggcgtctgtcacatgatgtggtgcggtcagagcaactacggacgcatcatcacttctcatcccgctttggagggcactgtttgtggcacaaatcaatggtccgtttttggcattttgcataagtcgattttaaatttttttttttttgaattttaaatgggattttttaccagaaaaaaaatcgttccgatattttcaaaaggcgtaaaaatatggcaaatacaaaaatatgagttttgaaaaaatggcaccgactctaaaaatatggcaaataccgtacagatatagtattactgtcaccatgacgaaattattttttagcaatgaaaaaataaataaagaaattttcaaatgttttaatattttgcaaacaaaattacaaaattctcaaaaagcataaaattttcatatcagaaaaaattcttggaaaatttatttaaaaaataattcatgctaggggggaaggaatgtaagaaatgccgttgttttgttgccctttcggcactcagtccgcgcttttccccctgcgcaggtgttcgcttggccgttgcatgccatggggcagcagcggtggctctggcgtcgccgttggcaccgcgaccgccactccaaccgcaaccggtggccaccgtgccaatgctgacaacagtcatgcncagcaacgacggtcagttctaatgcggcatggaacgcgcggcaggaggaaatccgtgccaaatacatgcgtacgctggccgagtggcgagcgcggacggagcgcgagcgggccgactatg

SEQ ID NO: 47225 - DNA, 1344 bp, Heterodera glycines
atgacatttcacaaaatcgacaacgactcagtgaactcaatcaccaatgctcttgactttttccgtatacccccgacaaatgtgagcgtctcatcttcaaaggtattcgagcttctgcccagcaatccgcttaccgacacaccctaccacttcaaacttcactccagtcaaaattacattgacctctccaaatgctatttgctcaccgagtttcgaatccgcaaggaaaacgttaatggtcaactcattaacctaggcattgatgacataaatattgcaccaattcaaatgatcggacaaaccttcatccgtaacatcaaaatgagcatcaatgggcgcgaaatttttaatgcaaacgccctgatggcctacaaatcatatttctcacatgaactctcctattcaacgaccgcaaaagactcccatctgaatgcagctgggtactaccgggacacgggcgatacattggagatgggaggcggatgcacagcgcgacgcgatttatttgcgggtagcaacgtagctcaattcattgcaaaaattgacacagacctattcaatcagccgttgtatctgatcaatttttgtgaattggacattgaaattttgcccaacgacaacgactttgtgctaatttcaccagtcgtaggtgcacccaaataccattttgaggtcatgggtttgaaaatgtatgtgaagaaagtgtctttgatggacggattggcgctggacattgcgcgaaagttggagttgaaacctgcgcgttatgcagtgaggaagacaatgatgaaatcgatgttcatcagtcaaggacgatatgagtttacagccaatttgttcatggatcaaatcccccgccgtatcacaatgggtttggtggctaatactgactatgttggcacaattaggcgcagcccattcaactttcaaccatttaatgtgcgcgaaatttcgattattgccaatgggcgctcttacccacaagcaccctacgacttgaattacccaaacggtaaatttgttcgtccattcaatgacatgaatgaagcggtggggttttcgaattcatcagagagtaatgggattacttttgcccaatatggaagaactcattgcatttacgttttcaatatgaccaacagcggggacgatcaggcggcattgtttgatctgataaagaatgggaccaccgcggtgagcatcaaatttaaccacccagtacccgatggaggaataatgttggtggtaatgggagagtgtgactctctggtgatgttagacaaaaaccgatcaataagcactgacaccactatttaaaccaccccgcattgtcatttcattaaa

SEQ ID NO: 47226 - DNA, 1635 bp, Heterodera glycines
atgaatcagcaaaaggaagaaaagaaggcgtccaagggggagagggaggaggacgtcaaagtgttgttggccgaagcggaacgcttcaaaaggctggccttcctcggggtgatggtgtgcaccggtgggtgacccgtggaccattcattggcacttcgaatttgccgttgtctctttcagtggcaactttgaccgcctcaatgtgcgtgccgatgctctattcctacacgcagtacatccaattgtcgcttcgggatgaaatcggcttttgtgtgcatagaacacaaaatttgtacagcgaattcgcaaaagtccgttcccccccgttgcccatggcatttcctttcaattttcagtatgaaattgttcgacggcctaaacggtccccaatggtcagtcagtttctcatctccaaccacggcagtctctccgcggcacagttcactccaaacacagcccaacgccgcaaatcgcgacagggaggctatgagcaagtgatcgccggctacgccgccgccgggtcccaagtggcgccccctccggcgccgccggcacccgccaacgcttacccagggaacaattcgcctcctccgcctgcccaagaagtaccgcaagctccgccttcttcgcccgctccatccgctgctaattacgcggcaggggcacaagcgccttcggccggtgctcagcaggtgccattagtcagtgcccattagaaaatgatcaaaacacagcaggaacaggcggtggaggagcaatgttgctcatgcgcggttggcgccgccggaatgccggggccgccaggcgaagatggaacggatgggaaggacggacttcctggccagtccgggctggacggggcggacgcgccggagcaaggggcgaccggagggtacgacgagttctgcttcgactgcccgggtttcgaaacattttctcggttgggtttctgtaccatttgcttattcagctgcttaccccggaccgcccggcgggatgggccccaaagggccacccggacagccaggactgccaggccaacccggaattccgggagcgcccgggcctcaaggccccccgggcccacccggccccggcggagcgaatggaccgcccggacagccgggaccaagaggtaaaagagaagggagcggagcaaatgcaagcatacacttcagggttggacggacagctttcggatgtgcccggcgttcaagggcctccgggccccgttggcccaccggggcccccgggagtgccgggagagccaggccaacaggggcaaagccaagtaatgagggggagggctgaaaataatcatgctaatggccattaagccgggcccgcctgggcctcctggcgatgcggggctgccaggactgccgggacagccaggcgcacccgggcaaagcgcggcggacggcgaacccggaggaaagggcggctgcgaccattgccccgccccacggaccgccccgggctattagtcggattttggctccattcctcaaagcattgtccttttctttttctgtctgctcaatctcagtttctttccttatttacaatttcttcctcttgaaagcatttattttgtgcataaaatgcagaattgtcaaatttgttgttaaggaa

SEQ ID NO: 47227 - DNA, 2076 bp, Heterodera glycines
gaatatgtggacgaagaattgaagaagtacggcgccattctggagaatgcgcacgagagtgccaagcaggtgaccgagctgcgcaaccgggactggctggactcgccgtgggacgactttttccgtggcaaaaacccatcccaattgttgcccaccggcattgagcgcgactcgctggagcacattgtgaacaaaatctcgcaagtgcccgacgggttcaacctgcaccggggactgcttcgactgctcaaaggtgagctggccagtggaatataaaaagtgaagaatttgtttctttatgggttcgttcttggaattttttttgcatcagaattccattggtcttacaattaatcagtactaatccatttttactaatttgttaacatttttttttgtaggacgaaaagaaatgctgagcgaaaacaatttggactggtccattggcgagtcgttggcgtacgggtcgttgctgatggaaggtatgtgggtttcctgttttttttggatttggttggagtaaattccgtcttaaattgtgccaggaattcacgtgcggttgtctggtgaggatgtggagcgtggcaccttctcccatcgtcaccatgtgctccatgatcagaaaattgaccaaaaaacgtacaatccgctcaacgacctttctgaggttggaattttttattttttgagcatttttatcattaaacttttttctatgccagacccaagcggagtacacggtgtgcaattcgtcgttgagtgagtacgctgtgctcggcttcgagttgggctactccgtggtcaaccccaactcattggtcagtcagtcctgtatcggggttgtcatgggactagaaaaaagacgtgggacgatacgacctaaagcctggatcgaaatccgggacgaccgaatttgaaatcgggtcaggatggtcaaaatttcggcattggaatttgggacgataaaaaatgtttgaattcagtggtaaccctggtcaatctgtaaaacgtcattatattaatcaaaaaaaaaatttgctaaggtcatttgggaggcccaatttggcgactttgccaacaccgcgcagtgcatcattgaccagttcatctccagcggacaagccaagtggattcggcagaccaatttgacactgttgttgccgcacggttctgagggcatgggaccggagcacagcagcgcacggccgggtgagtacagcttacttgtatttgtgcatcggatggaggttgaacggcgggttccgaactaaggaaatcccagacatttcaaggttcggaattccacattttttgggcgaggggcttaaaatggacatgatttggatgggttaatccacacaattacactatgtttaaggacaacaaaaattttgtccacaaatttcccaaaattaaaaaatatatattttcagagcgtttcctgcaaatgtgcaacgaagatgatggcatcgacttgaaggtgtgaaaaatggaatttaataaaaatttaaagaaaattcagagtgtcgctttggacgaggcatttgtggcccgtcagctgaacgagaccaattggattgtggccaactgtacaacaccggccaacttcttccatctgttgcgtcggcaaatttatttgccattccgcaagccgttgattgtgttcacgcccaaagtacgtgcatgaaaaaatgaataactaaaaaatttggaatttttttatgcctagtaatcctacgattttttctaaataaaataatcaaattaagttgaaatttgattaattaaaatttccagtctctgctccgccatccgttggccaaatcgccggtggacgactttttgcccggcacatcgtttcgccgtgccatccccgaggagggcagtgccaccaacaacccggcggccgtggagcgactcgtcttctgttccggtaagaaagcgttgattgatcaatcaagagtaaagttgttttactataaaactttgtggcgtgttattacggaaatgtttttttcaggaaaagtttactacgaaattttgaccgagcgcagaaaccaaggcctggatgataag

SEQ ID NO: 47228 - DNA, 403 bp, Heterodera glycines
atggcaccgctggccaagacatttttgggccccgaattggcacggggactgaaggagggactgccgtacccgctaaaggtgagcaaaccggacggaacggaagaagaagcaactgatcgaatggggaaagggtcgatcaatcgtaagacaaccgcaaagtgaatcgagcgaataactgtccgatcagccattgatcaatgggcaattaattaaaaggcatttaatttgtttgttttttaaggatacaattcgcttcatccgtcctaagctgacccttcatgaaggctacatccgtttggccactgatttcgaactcagcgagcagcacatgcgccagagagttgcagaagcatttgagaggatcaaaaacgaacatgaaccaccgggccaatttagaaattaa

SEQ ID NO: 47229 - DNA, 616 bp, Heterodera glycines
atggaatccactcgcataagtgaagcggagattaagcgcagggaggcgcagatgatggagggggcgcgtcctttcaatgtgttcgacccgttcacctggtcatttccgggcaaaatagccgctacgagcaccggaattttgacttgctcggtgggttttgcctatgaaattgagaatgagtacctaattgcttaaggtgacttattacatgttgtggtaccgaaagccttggtacgccggtaagtcatcgatatttttttttggcctttttaacgtaactgaatattgtccgtttttaattcctgtcaaattttttttttcagcgcttaacatgaaaattctaatttttgcggccgggatcagcggtgcttatttcattgcaaagtctcgcgcccgagtgatggccgatcgcgacgccgtcgtctcgcattacgttcagacgcaccccgaagactttgagcatttgaccttgaacaattgtgagccattcaacctttgatcttttttgttattttgaaaattcttttcagtctatggtcgtccctacagagaccttctcctcccatgggtgccaattcgtgctcagtacaacaaacttgaaaaggaagcgaattga

SEQ ID NO: 47230 - DNA, 1508 bp, Heterodera glycines
tttatttgttatttcaggcgaatgctccggaaacttaagcatagtgctagttttccgctaatttctgcttttacacgcagatttagtaaaaatgtttccggctacaaaattgttgaccacactttcgatgccattgtggtgggcgcaggtaatcaacaacccctcaagttattcaaccttttatttatatattatttaaggcggcgctggtcttcgagctgcgatgggtctttcggaggggggaatgaaaacaggtcaatttgggtgtggggttcgcgtaatgtatttttttgtggttcagctgttattaccaaactgttcccgactcgttcacacactgtggcggcccaaggcgggataaatgccgcattgggaaacatgaacccggatgattggcgatggcacttttatgacactgtcaaaggcattcgatttgagggtctcccatgtcagtaattttcttttaggaagcgattggcttggtgatcaggacgctatccattatatgaccagggaagcgccccgggcggtcatcgaattggaaaactacggaatgcctttttcgcgcacggaggagggaaagatttaccaacgcgcatttggaggacaaagcaatgattttggacgcggtggtcaggcgcacaggcaagaaaaaaggacactttgggaagaatggacggggggtttcacttttgagtttaaagggtaggagattcccttcgggcactggggagccttcgccccccccaaccctcgcatttcctctcgcatcgtttccctgaaattttttaaaggtttttttaattaataattaagtttttttaaaagaatttattttccttttccggtgattttcaaagatttttttcagaaacccaagttttccaaaaagattttttattttctcctagaaaaaatcagtaaaaaatttccgtccaaattttctgtccgtatttcgtcccctcctcctcaggacgtgttgtgtcgcggatcggaccggtcattctctgctgcacactctttacggcgcttccctccaatataattgcaattacttcgtcgaatattttgcgctggaccttttgatgtcgcgagaagggcactgtgtgggggtggtggccataaatttggaggatgggtccatccaccgttttcgggctgccaacactgtcctcgcgacgggcggctacggcagggcgtacttcagctgcacttcggcccacacctgcacaggggacggaacggcgcttgtcgcccgggccgggctttgcaattcggacatggaatttgtgcaatttcaccccacgggaatttatggcgcgggatgtctgataaccgaaggatgccgaggtgagctttgagttgtccaaattctaaaaatcttggtacaggcgagggcggttttctgatcaataacgaaggggaacgcttcatggaacgctacgccccggtggcgaaggacctcgcctctcgggacgtcgtctcccggtcgatgaccatcgaaataa

SEQ ID NO: 47231 - DNA, 3053 bp, Heterodera glycines
ggaagaaaaagaaggacaaaaagcattcgtcctcctcgggccaccatcggtcgccgagccgaaaggacgtcaaaacggagagacggagcagcgaacgagaaaaggtgaaaagagtcaagcagtcagtcgtgggacttttgtttggtggcattggggtccacacttttttcaataaaaaacaattcattacccctaataaatgtctataaaaggctttttctgggacaaaactcgagtccaacttcactttgatttattctgaccaatcagcaaattcttagaccggcgcaatattttaggattctttggagaaggagcaacgccgtcgctcgccaaatcgacgggacaaagaaatgctcagaacgatgaaaactgaacggagaacgccggaaaaagactgagggaaaaaagcgaaatgttttttgtttctataaataatagttttttattgatgcataaattattttattggaaagggtgaaattttaattaaaaaatatttgaaacttgtcaatttgatattaaaaaaagcatttcttgcatatatttatttttattagaccaaaatgaaagggaaggcaaataagcgacatggacgacaacgaatggtcgaggaaatgaggcaattgtcgaccgacgacgacggcgagcagttcgaggggagcagcaaagggacggaaaaagcacagcggggggacagcgacgaagaaaagcgaagcgaacggacgacggaagaaatggggggagaaagttgcgaagagatggaggagcaccaaaaggtgggcaaagggagggagagtttaaggatgggtgaacgagactgacgtaatcgcaattgccgggattctcagtcctgatatttttcgaaaagccaacccgaaactggcaaatttcagctcgagtccatatgtctgaaagggggtagccagggccaaggcgcctacttttccgttttttcgtcagttgctttgcgttgtttatttcttggtctttcttcaccctcagtctctgcccgcccttttcccccgtcggttggccatgttcgactttggccaatgcgaccccaagcgctgttcgggccgcaagctgtgccgcgttgggctcgtctccgtgcaacggttcagccatcgttttcccggccttttgctcactccagccgcatccgtcaccatttcacccgtcgaccgaccattggtcatggccaaaggcctcgccgtggtcgactgttcgtggaatcgcctggacacaacgccaatgcacaaggcgaaggtgctttgttagtccacacggttttggccaagtttctgttttcaggggtctgaacatcgtttactgccctttttgttggctgccaacccggtcaactacgccatgccgttcaagttgagttgtgtggaagcattcgccgctgcccttttcattgtcggcttggaagaagcggccaaatgcgtgttggcacccttcaaatggggcccaaactttttggctctgaatgccgaagtgttatccgcttacgcaaagttaatgttttgggacctcttaagttttatcggaaaaacaatttcagtgctcatcgggcgacgaagtgattcgatgtcaacgccaattcatggaaaaaattgaggcggaagccaaacggagcaaagaaaggacagtcaaatatcccacttcgtcatcagaagaagacgaagaagccgaagatgaggaaaacggagaagggacggaaaatgaaaaagtggggaaagaaagtacggaccgaccgaatcgtaaatagggcaaaattaaaatatttatttggttttaagggttggataatttggggtttattgcatttttcttcggctgggcgatatccctgaaattcacacaaaacccattttaggcattgaggctgaagtctcttccgactccgaaggtgcttccgttgcgctacagaagacagaaacggtggatgccattgtgtcccaaactgattgtgagctttacgaatgggaaacgacgcccttttgccagggggccgaggcgcgactgttcgcgtgcactttcctccgtcgtcgggcagtgatgaaagagcggtttgtgaagcggtacagacacgcggaattggacgcgcggctggcgaaggagaggacgcgggccgaactgaaggccatcctcaaatgccaagaggtgccttggcgggggggggggggactgcttgaacttttccactttgttcgctttgtcataactttgccgctgcttttctctcagattggcattcgcgtgccatccgttttcttcgtggacccgctcaaaaatcggataattttcgaactaatttgctcgtctggcagcagcgacagagcaccgaccgcaaaacattttctggacaaattgcagcgggacgaatcggcgtcgaacaatgccgaacaatttgcagtgagtagtgaaagaagaagcactaatgccatgacaaaaggacggggctatgttaacaaacattttgttatttggatttacgcagctgtcaaactttagtccgatttttctttttaattttgggaagggttattcccacgttcctatgattataataattacataaaaatctgtgtgttggtgccattcattttctccctccctaaggctcaattggcggaatttggacatgaatttggaagaattctgaggacaatgcacgacgccaatctcatccacggggacctgaccacgtccaatgtgctcgtcctgactcaacggggaccagtcgaattggcactgattgactttgggttggcccaattctcgtcaaagccggaggacaaagcggtggatttgtatgtgctggagagggcaattcggaggtgagtattacaaacaatgttggtgagcaaatggacaaagaaaacaatcgcagtgcgcacattggcatgggcaaaatgatggatgccattttggacgcatacaaaacagaagggggcggaggggacgaggacggaacgaatgccaaaccggtgctgctcaaattggacgaagttcggcgcagggggcgcaagagagacatgatcggg

SEQ ID NO: 47232 - DNA, 1517 bp, Heterodera glycines
  unsure (1)..(1517): unsure at all n locations
atggacttggagggcgccgacgagaaaaacgcgtgtttcggtgggacccaggcgttgtttcatgccgtcgattggatgtacgctaattacgcaacagaaagtgagcaattggtcctaaaaccttcttttcaaagagttgtggaaacatttaattgcgcaatcgttaggttatcagttcagtcattctcacttcgctttttcatttggcatgtttttaattttcagaacgccttgccatcgttgtctgtgctgatgtggcagtttattcggctgggcccgcccgatgtacgggcggtgccggtgcagtggcctttctgattggttggattttgttgcgccaatttaggcatttattctttcattttctatttcaggaccaaatgcaccgattgcacttgaacgtggccttagggcatgccattctcaaaatgtttacgacttttacaagccaattggaggcgttagcacgcaattcccacgagtggacgggccaaacagtgtggagacctatttgaacgccgttgacatgtgttacgggcgattttgtgagaaatggaacaagaaattctgcacagggcgtaagtcattcatcgtattttgttctatcaactaaaaaagggattgcgaaatattggttataaattaatttgaaataaactttttctgttattttcgatttgcgtgactaatgcaactgttttacaaacgattggacactcaatcatctcacttaatgatttattacatttcaattagttatttcagccccttgctctctttcggattttgtcgctgtcattttccactcgccgtacgctcgtctcacccaaaaagccttttcttggctgtccttcgtcgactttaaacggggaatgatggacgatggtgtcacagctgatgatgatgatgtgtctgattgggatcaactcagcgcatacaaatcgaaatcactccatgagatttttgcggtggaacgcacaaaaactcgctcggacggcgatcgatttactgacaaaattttgcggatgagttcgcggacagcggatgccaaactgaatccatttttggagtttagtcgacgcattgggaacatgtacacgccgtcggtatatgctcagctgatcaacgtctttctgaagtgagtggggggaggaggaggaacagcaagcaaaggtcattagcgaactaatttttctatccgttttagcactgaactttccgataaatcgaacgggaaacggatcctcatattttcttatggcagcggttgtatcgccgcaatgtactcacttcgtttcaatttgtacacggaaaaactgatggctgcctacggcgcaattaaacaaagcgcgaaaaaggcacacgcgcgattggaccagcggatccgacacagccccaagcagtttacagccgcattggagagaacggagcaaatgtcgcntgaagggggtcagtttggtgacgagccgcccaacgaaccatttatgtacagatacttacatcgaaactcccgatga

SEQ ID NO: 47233 - DNA, 611 bp, Heterodera glycines
ccccccccccccccctcccttaagcaatgccattgctccgctcgtgtcactgtacaccatttacgatgaaggcagtgtccatcagaagggcgagacttccgtatatttgctgctttacggtgctgccggaatgtgcgttgggctttggctgctcggccaccgagtgatctacacggtcggcgaaaatctgaccaggataactcctcccagcggcttttccatcgaatttggcgccgctctcacagttcttttcgccagcaaattgggtctaccgataagttccactcagtgcaaggtgacgatttgatgagagaagatgatcgctttgttttgtctaggttgggagtgtggtggccgtcggactggtccaagcacatccggtggtccattggactgtgttcaggaatatctctctctcttggctggtgaggcgttagaaaattactattgaagaagcacagagcataaattaaaaatttcaaaattcattttaattaaaggttaccctgccaatcgccggtgttatgagtgccattgtgatgtttctgctgagaatgctcattttgtgagggtcgtctgagcatcatcagagaaaagggcggctgttcatg

SEQ ID NO: 47234 - DNA, 435 bp, Heterodera glycines
atcaacaaatatgcgttcagtggcgggagggacacaaaggaagaacaccgccaatttgggggcgactgtaccgtggacacttccttccaattcctgcgctttttcctcgacgacgacgaaagattagaagaaataagagaggtttaaccacaattcattatcatagacttttgcttatggcacccaaaataaggcccttttagttaattatttaaatagaaatagcaatccatcacaattacacaattatttgtacgcaataaattttgttttaagcaatacgcaagtggtgctatgttttccggcgaactcaaggcgattgctattggaattgtgcaaggcattgtgtcagaattgcaaactcgaaggaagacgatcaccaacgacgtggtgcgcgagttcaccacgccaaggaagttggcatatgacttttag

SEQ ID NO: 47235 - DNA, 2069 bp, Heterodera glycines
  unsure (1)..(2069): unsure at all n locations
aattacanngttccgggaaattaccgaaatgttatcatactttctactgtagtcgacgattgaattgtgccaaaatgcgcattaattctcgactcgagcatatcatcccttgcttcggattggctttttctcagccccaatttttgcctctcaggtctccaagttgttctgaatgccattcttcgtgccatgattccgttgctgcacatcgcactgctcgtcctcttcgtcatcctcatctatgccatcatcgggttggagctgttctgtggcaagctgcactccacatggttgacgggcatttgagaaaatttggaaaatttaagacgaaaatttagtgaaattgaatttatgattttcggaaaagttttcattttttatttaatagggaaaagttttttttttttaattttatcccaaaaaactcattaacaattcttttgaagcatcgattcggtgaccctcgaattggcgcaattagatccatccgtaagttcccattttttaatttggcatccataattggcattttgccccctttttttttgttagacttgtggcttcgcctccagtgcctaccattgtgagccttcctccgcttcggccattcattcggtgcggcacaaatggctttgctcgcacaacacaacatggatggtcagtcagtgagaagcacattaaaagtgccaatttaaatttttaagaattttaaaaaacgcggcaattttaattcttatgaattttaaaaaatgccaaaatataattattttatttaaaccctgggggcactcaaaaaaactcaatttaggaaaaattaatttaattaattattttaaaattttggaaacaattctcaattaatttcattttgtttaaaattattttttctattttcattggcactttatttgaatttccgcgcagggccccaacaatggcatcaccaactttgacaacattggcctcgcaatgcttacggtgttccaatgcgtttcgctggaggggtggacagaagtgatgtattgggtgagagaagaagcgattaatcttaggcttaggctaaagcctaggcttatgttaggtttatgttaatcttaggctaggcttaattaatttaatattaatactaaataattaattattccataaaaatgcctaaaaacaaataataattcaattttatattttaaaccatttttgtaaatgaaataaaattataaaaaaaaatattattattattattataaaaacgtaattttatttttttatacttaaaataaataaatatatttaattaattaataattgacagaggattaaaaataaatttgaactttaaaaataaaaataaataattttatatttttaaattaatttttctattttttctatttatttattattttaatttccatttcccttttccggttaatgatgcggtgggccgggaatggccttggatttacttcgtgactttggtcatcctcggctcctttttcgtgctcaatttggtgttgggtgttctgtccggagagttctccaaggagcgggagaaggccaacgcgcgcggactttttcaggcattttcaaaacaaatttctgagcaattgtaatggaattgatcaatttttggtgatcgaaatgaattatggactaatttttgattagtcggatttgaacaatgatcaatcggaaagaaagtgatcattttggtcatcctcttcgatcgatcaaaccatgccattttgatcaatcaatgcattgaatttgttactaaagtgatcaataagcttaatttgatacagaaatttcgcgagaagcagcagctggaggaggacctcaagggctacctggactggatcacgcaggcggaggacatcgagcagttgggcgacgacgaacacgcggacgaacatggcgagtcgggcgccggcgacggtgacgaggacggcgagcacagcgacggcgagacgcagcgaccgtccgcgctgctgacgcagtggcgactgttgcagcggatgaaccgccggtgtcgccgcgggtgccgtcgcatggtcaagtcgcagacg

SEQ ID NO: 47236 - DNA, 567 bp, Heterodera glycines
atggcaagaaccaagcaaattgcgaagaagagaatgagtgaaaagaaagcgactgaacaggatgctttggtttctaagcaaaatttgcccacccaagcagtcaaaaaagcgggatctgacatgggccatcgtgctaagcgacaattggcaacgaaaagtgccccgaatcgccgcccacggtaccaagcatcgcatttgctaccaccacccgaagaaccattacaacaaaaacgctttaaaaagcgtggagcgctcgctctccaggagatccgcaaattccaagaaagcgtcaatctgcttataccgcgcagcacgttctttcgtgttgtccgcgaggtgaccatgaagttcgccgatggaatgcgctggcagggcaaggccctattggcactgcagaccatgaccgagtgccatctcgttaatatgttcgaggatgtcaatatgtgcgccctgcatgccgggcgagtcacgataatgccaaaagacatcgccttggttcgaaaaatacgcggcgaaaccacactcgctccgtcgtccggtttgcgccagactaaccgtcgtcgttga

SEQ ID NO: 47237 - DNA, 2374 bp, Heterodera glycines
gagtgcggttatgccattcggtttgaggactgcacatccgagaaaacgataattaaagtaacttcgatttcccattttttgtatttcatttttgcatttcactttaatttttttcagtatatgacggatggtattctgctgagagaatgtttgaggtgccatcccaaacgcattctttttttagattttataattcattttcagtgaccccgacttggactcctacgccgccatcattatggacgaggcgcacgagcgttcactgaacaccgacgttctgtttggactgctgagagatgtggtggcaagacggtaaaagaaatgaaattaaaattgcatagataaacaggctcataaccagaaaaaaattcggtggggggaggcaaccgaagagcttccagcgccgtagaaaaaaaaacctagatgctgccgaggaaacgaaaatttggccatcttttaagaaattcagttaatttaaaattcccatttttcggatagtttttcatttcgggcgtttggcaattccccacacaccccctggttacggatctgtggcggaattaagtagggacatctaattttcaacattatttgagtgcttttccactttcgctgttcatttttttcggttaatcattccctgtcgttttcctttccaaattttctcttactttttcctttttagttccgacttgaaactgattgtcacttctgcgacaatggatgcggataaattcgccaatttcttcggcggacatacgccaattttccaaattcctggccgaacatttcccgtcgagatttaccacgcccgtgttcccgtggaagaccacgtcgacgcggcggtcaaacaggcggtcaaaattcacttgggcggcatggagggcgacattttgattttcatgccgggccaagaggacatcgaagtcagtcccagcattcacgttggctttatcaattcatttctcattggtttccttggggttccctcccctccccatttttcgcaaaagctccgtttgttattttatattgaaaaaaattaccaaccggattgacccttccaggattatgctaaattttgcccctttttaaggtgacttgtgcgctgatcaaagaaaaattgggcgagttggacgaggcgcctccgctcgccgtgctgcccatttactcgcagttgcccagcgaccttcaggccaaaattttccaaaaagcgccaggagggatgcgcaaatgcattgtggccacaaacattgccgaaacctcattgactgttgacggcattttctttgtggtggatccgggctactgcaagctgaaggtattcaccgaaaaaatcggcatggacacgctgcaggtcagcaaaattaagcatttgcaatttaatccaaaccgccatttgctgaacagatattccccgtttcgcaagcgtccgccaatcaacggtcgggccgtgccgggcgtacggggcctggccactgctaccgactgtacaccgagcgacagttcaaggacgaaatgttggtcagcactgtgccggaaattcaacggacaaaccttgccaatgtcgtccttttgctgtcagtttttctccttaattttttgcttgcaattagagttcgtcgctttcggtcctttctaatttaatgtttttcattttccgggaacattcatggtttattaaaataattatttttctcatttagcaagtccctcaatgtcgacgatttgctgctgttccatttcatggactcaccgccgatggacaacatgctgaactccatgtaccagctttggacattgggtgcactggacaacattggccaactgacggatttgggacgcaaaatggtggaatgtaagcaaattcatcccactttccccccaaaaaatgctatttttcgtttttctcagttccgctggacccaacactgtccaaaatgctgctgatgtccgtggacatgggctgcagcagcgaaattttgaccattgtgtcgatgctttccattccttcgctgttttttcggcccaaagggcgcgaggacgaggcggacgcacgacgggagaaattccaggcactcacatttcaatttctaaagaatggaaataatccgacaattgcctttaggtccccgaaagtgaccatctgacctacctgaacacgtacatccaatggcagaagcacaagtacagctccaagtggtgcaccgacaattttgtgcacgcaaaagcgatgcgcaaagttcgcgaggtgcgcgcgcaattggccgaaattatggagagtcagcgcttggaaatgctctcttccgggacggattgggacgtggtgcgcaagtgcgtctgctcggcatacttttacaacgcggcacggtaa

SEQ ID NO: 47238 - DNA, 1004 bp, Heterodera glycines
atgacagacaaaggcggcgattcagacgacgaagcggccgaagaatttgttccgacgggcacttttaagccgattgttccgttgccctcaaaagtcgatgtgaaaagcggcgaagaaaatgaggaggtgcttttgctttttgcttgttccatcttttttatttattttttttttaggtccttttcagtgctcgttgtaaattgtttcgctacgacccaatggacaaaaagaacaaagaacggggaattggggagcttaaagtgagttgtccccccccccgccccaaatggcctaaaattgggaccttttaaaaaagagttggagaaggtttcatgagggaggaaatgaaataaatttattctcttcgtcgcctgtgggccatgtaaacaaaaaactcgtcaaattccatgtcttacaattacggcttgtgtaggtcccacttggggagagggttgggccggtaaaacaaattttccactgtattatcccattccattcgtgctgaaatcgtttgcccttttcagctgttgcacaacaaagagacgggccgttatcgctgcgtcattcgcagtgatgaccaactttgcaaattgttcgctaattttcccgtcttggccacaatgataagccgtatcactggtcagaagccgaacgttcgaactttgcagtgccgagtaggaattggcactatcataattaattaactaattatctttgtttatttgttcttttaggacttcagcgaaagctccgagggaattgacgaagtgtttttgcttaaatttcgtgaccaaacgaccgctgaagaatttgctaacaaattggaggagacaggcaaaagattaggagagacgccgaaggaaaaggaagcggccgagaaagagccaagacaatgaacggagttgaaaagaaacggaaatgaaattcaatttttttccccttgttgcttaagctatcaccggaacagctgttgttgctaaggctatgtttttcttgagaataaa

SEQ ID NO: 47239 - DNA, 1155 bp, Heterodera glycines
atgaaccaattccgtgtgggtggtcagcgtgaattgttgggcgttgctgaggattatgcggacgatgtgagtgggggaggggacaatcgctgacaagggctggtggaatatgaattgttttttatttttgtgctacaattttgctgctgttttttgtcgaaccattaattctcctgtttttcagattttgcgtcatacaaaaaagattctgccgcatttggcccgacttttcctcgtttccacattcattgaggatggttgtcgcatgtgggtgcagtgggacgaccaacgcgagttcatgcaggtgacagaaaatagatgggacggatgggcgaacctttcagcgtccatttttgacttttaccacatttaaaatgttataaaacctttacaattttaggagtcttggtcatgcggttggtttcttgccatgctttttgtggttttcaatttcttcggccaaatccttcccgttgtgatggtgatgatccgaaaatatattgggattgcttgtgccattcttgcgggaggtttgtttggctttttgttactttattttattggacttttcagttgttgtgcttcaaacgtttgcttatcatattatttgggacctcaagtttcttgccaggtttggcaatatgctcgaattctttctttattattattttcctagaaatgtggccattttcggtgctctcgtcctcctctatgctgaaactgtagaggaacgaaagtcactcttcgctggtgtgcctcaaatggacgaccaaaacaaacccaaatcgtacatgattcttctcgggcgtattctcctcgtctttatgtttttgttggttttttgttttttatattcaaaaactgatacgcttaattgtaggtctctcattcattttgatcatttgtccttcttcaaagtggtaattaatgacataatgctgaataccttttcttaatttttataacccaacaattttaccataagtgatttggcttctgttttagcttgaactctcagttggcattgtgctaatgattcttgtaacaattggtttcaaaacaaaggtaaggctgaactaaactgttcatattttgtttaattttagtgttaatttggcttttttattgatgcctgacattttaattgtgctttag

SEQ ID NO: 47240 - DNA, 1450 bp, Heterodera glycines; identical to SEQ ID NO: 14855

SEQ ID NO: 47241 - DNA, 198 bp, Heterodera glycines
atggcagaggaaccagtgaaactgattcttgtcaccggcggagtgatgagcggcgttggcaaaggcattgtgtcgtcgagcatcggtgtcctattgaagggttgcggttaccgagtgactgtgatcaaaatcgacccgtacatcaatgtcgatgctggcactttctctccattcgaacatggcaagttgactttgccc

SEQ ID NO: 47242 - DNA, 618 bp, Heterodera glycines
gaacattgtccctgcggacgttgtgaaaattgcgccatttactcttttcccgtcgcccttcccacgcgaactttttgtccaagcgcagaaagtgcacaaagtgaggaagtgaataaagacaacaaaataaaaagatttagttattttatttataaaataaaaggcaattaattaattatttttcattaattaggccactcaattaattcatttttcattaatgaggccatccaattaatgtattttctcattaattaggccatcctttaatgatttttcattaattaggccactcaattaattcatttttcattaatgaggccattcaattaatgtattttctcattaattaggccatcctttaatgatttttcattaattaggccatccaattaattcatttttctattaattaggccatccaattaattcatttttctattaattaggccatccaattaatgtattttcgcgccgcgtcgaactttgaatttttgaaagatgtgcacaagggactgctgaaaacagaccaaaatttcatagaaacttttaaaagcattgaaagcagacacttggaaggcattaagcaaccgctgactttgttctgcaacagagcag

SEQ ID NO: 47243 - DNA, 442 bp, Heterodera glycines
ctgcgagtcgtgcaaggcattcttccgccggaacgcgttgcgcccaaaggagttcaaatgcccgtactcaaatgagtgcgagatcaccgcgctcagccggcggtgtgtttttttgttttttctatatttaaaaaattaatttaaaaaaataaatttttaaagtttttgtcaaaaatgtcgtctccgcaaatgctttgaagtcggcatgaaaaaggagtggattctgagtgatgagcagctgaaacggcgcaaaaatgcccgcattaagtgccaacaacagcagcagcacccaaacggtggcggaattgccagggagcaccagcacaaccgccacaacaaccaacatcagcatcatcaacaggtagagagagagagtacagtaagaaatggtacatataacgatggggggaaatggcaaaaatttggcaccactggcgagtaa

SEQ ID NO: 47244 - DNA, 809 bp, Heterodera glycines
atggcagttgctgtcgctgacaatgccaacagcaacaacaacaatgccgtgttggcaatattttttgggcaatttggtaaaaaaaatgacacgaaaaaaccggaaattttgtaatttttaggcattggactgatgcacacaacttttatgttttattatgtcaaggttttttattttattcttaaaaaatatgaaatttaagaatttcttatttttaatgggtctataaaaggtgttttaccccaattttcaggtgtttctcaacattttccaagtcaacgagtattggttcaactggtcccagctgttgtttctgatttggaatgccatcaatgacccactttttggctatttgcaggtagcgagcgaatctcccgcttttaacaaaaactcttaaaaaccaaattcatgaaattttaaatcgcaaaaatttttaagtgtgctttttttacctagactcactcaatttttgagtctaatttttgaaaatttagcgaagaaatacaaccattttttgtttgtcttggtgtgatttttaacgaaatttttgtaaattcaaatataaatttggctaacaaaatccgacatggtttagccatcgctggggaatttatgggaaatttctttcagaattatcttaaggcctagctttacaacaaaaaaaaaaatgcgcatttttttattccaaattttcccatatttttttaggacgtcggtggcacttggatgaaagaccgtggcaaaattttcacctattttggcccctttctcgtcctctcctttcctgatcatttggttcccgtggcgaa

SEQ ID NO: 47245 - DNA, 815 bp, Heterodera glycines
aaaacgtggcaccattcaacccggcagcattggtccctatccgttcgtcacttcgtccaattctaccgtcggcggttgcatcaccggccttggcattccgccgacagccgtccgtcgcgtcatcggcgtggtcaaagcctaccaaacgcgtgtcggctccggtccgttcccgactgaactgcttgacgccgatgtatgtacttgccccaaaaattatgttaatttgatcgcattgtttgtctttccatagggacagcccagcgaagagggcaaacgtttgcaagaagttggtgctgagattggcgtgaccactcgcagaaaacggcgctgtggttggcttgacttggttctgttgcgttattctgcaatgatcaacggattcacttcgtacgtttcacccaattattattttatatgttcatatttatagtttttcataattttagtttggctgtaacaaaggtggacatcctggaccaatttcatgaaattaaaattgccattggttacgaattgaatggacggcaaattgagtaccctccaggtgagctgaacaaaattaacgactgtttttatgccatttcaagtgtttatcttttttcagcgaccgtcgatgattgggcaaatttgtgcgtccattacaaaacctttgagggttggcagtcgccaacgaccagtgcccgtcagtgggaacagttgccggacaaatgccgtgcctatttggagttcatacaaaatcaactgggcgtacccgtcgaatacatcggagttgggaagggacgggagcagctgattgtgcgcacgaataacggagg

SEQ ID NO: 47246 - DNA, 796 bp, Heterodera glycines
atgcgcactttccaaattcgtcatcgttcaacggataaaacgcgcgggttgcgtcattttgctcacaaagtttgtgagaaagtgaagcaaaaagttcaaactaattacaacgaagttgcggaagaattggtcaatgaatattttgacaatattgttgaagtcccatcggacccggttaattgatattattcgtaatgaaataatgcatttaaatttcaggaaaaattacaatatgatacaagaaacattcgccgtcgtgtttatgatgcgcttaatgttttaatggcgatgaacataattgaaaaagaaaagaaagagattcgttgggtgggcttgcccacttcgtcgttggccgagtgccgacggctcgaagaagaaaaggtatgacgccacagcaaattcaacgattgaattgttaaatttcatggctttaggcacaacgtcaggaacgaatccgtcaaaaaaccgaacaacttcaggaactgatagttcaggtgattgaacaaacatagttatttcacttaaattgatctttttagttagtttcttacaaatctttggtccagcgcaatagagaaagtgaacgagtgaatggcaggcctttggtgccatgtaatcccgacactgggtaatttcgacactgagtaatttcgacactgaactattttcaaaactttcactgttttacttcattttcgacactgagtatttttgacactgagtaatttcgacactaaagagttttttgaaaaaaattcatgccaaaatttgaagattggtcaaaaactaaatataa

SEQ ID NO: 47247 - DNA, 1265 bp, Heterodera glycines
atgcagccgacgctcgtcagaatccacccgccggccgtcatcgtgggcgacatccatggacaattcgcggacctgaagaagattttctcaacgcatggcctgccgccggagcagcagtacgtcttcctgggcgactacgtcgacagagggccccaatcgatggagacgatcatcctcctcttctgctacaaggtgtggtttttgggggatggggggagggaacccccaaaaaatgaaattcatttcccccatttttcaggtgaagtacccgtccaacttcatgctgctgcgcgggaaccacgagtgcgccaacatcaacagagtgtaagtgaaaaagttttttgtgtgtttttttgtgattaatcattccccccccccattttcaggtatggcttctacgatgagatcgaccgccgttacccgcgaccgggcgctcgtcgactcttcgacctcttcaatcaagtcttcgcctggatgccattcgtcggactggtcggcgagaagatcctctgtaagttttgggggagggcaatttttggggttcaataactgtttccaactgattttcaggcatgcacggtggcatctccaatcagatccgcagcctggaccagctcagcaacttgcttcgcccgcagaccgagccactgcttcgttcgctggaaattgacctcctctgggccgacccgtcgacgagcatcacaggcgtcgccccgaacaacagaggagccggcgtcatgttcggcgcggacgtggtcgagagcgtgcgcaacctgctcggcatcgactacatcgttcgagcgcatcaagtgagttttttttggcttttcatttcacttttgctttaataattttccccttcccttctttttcagctcgtcatggacggcgtggaatacttcgcgaatcgccacctgatcaccctgttctcggccccccgctacaccggcaagaacaacacgggcgccacgctgctgatcgcgccggacctgagccacacaatcacgcgcttcccgcctgcctgaggacgacgagacggacggacagaacgcgcacacacactaactgcacacagaagaatggtggaactgcccggagagcgatgcgtgtggagaaatcggatcatctgaccccccattgttgtattgtattgtattgtattgtaaacccccatttcacatgatgaactcccccaaaaactgttgtcatttcaatatttgcgtgtgtgaatgtatgtatgtatatgctatgtgtgtgtgaataaa

SEQ ID NO: 47248 - DNA, 1719 bp, Heterodera glycines
ggatgggggagggaacccccaaaattcatttccccccatttttcaggtgaagtacccgtccaacttcatgctgctgcgcgggaaccacgagtgcgccaacatcaacagagtgtaagtgaaaaagttttttgtgtgtttttttgtgattaatcattccccccccccccccattttcaggtatggcttctacgatgagatcgaccgccgttacccgcgaccgggcgctcgtcgactcttcgacctcttcaatcaagtcttcgcctggatgccattcgtcggactggtcggtgagaagatcctctgtaagttttgggggagggcaatttttggggttcaataactgttttccaactgattttcaggcatgcacggtggcatctccaatcagatccgcagcctggaccagctcagcaacttgcttcgcccgcagaccgagccactgcttcgttcgctggaaattgacctcctctgggccgacccgtcgacgagcatcacaggcgtcgccccgaacaacagaggagccggcgtcatgttcggcgcggacgtggtcgagagcgtgcgcaacctgctcggcatcgactacatcgttcgagcgcatcaagtgagtttattttttttttggcttttcatttcacttttgctttaataattttccccttcccttctttttcagctcgtcatggacggcgtggaatacttcgcgaatcgccacctgatcaccctgttctcggccccccgctacaccggcaagaacaacacgggcgccacgctgctgatcgcgccggacctgagccacacaatcacgcgcttcccgcctgcctgaggacgacgagacggacggacagaacgcgcacacacactaactgcacacagaaggatggtggaactgcccgaagaacgatgcgtgtggagaaatcggatcatctgaccccccccccccccatttattgtaaacccccatttcacatgatcaaccccccaaaacactgttgtcatttcaatatttgcgtgtgtgaatgtatgtatgtatatgctatgtgtgtgtgaataaacattgtaagcaaaaaaaaaaaaataggcaaaattcgttttttcaaaaaatagttaacataaatagtgagtaaaaatgccaaaatagtgaagaaatagtgacaaaaagtccgaaatagtgacataattttcagccaaaaattgagcaaaaataattttattcactgattgcagttgcaaatgagtaggacagggatttttaagaccaaaaaacccaaaatagttacctaaaaaatttttaaaattaaaaatttttgccaagaaagtaaattttttagaaaattttttcatttcataggagtatattttgaaaaattttagctcgattcttaggggtgtatttgcatttttgacatagtgaaaaaatagtgacaaaacgccaaaatagtgaaaactccaaaatagtgatttctagtgaccgataatgacatcaaaatcgaaaatttttaatgcagaaatgcgttttttttaattttaataatattttttcatttttttaaaccgataaaatattttaaaagcataaatggaaaaacattaaaaatgaatatattctaattttaaaaaatggtaaagcacttaactaatttgtaagcatccaaaaaaacctaaatttaagcatgaattaagcactaaaatagcaaattaagcataaaaaccgaaaataat

SEQ ID NO: 47249 - DNA, 2551 bp, Heterodera glycines
atggtcgccccgaaacagacacagctcaacgcattgtgcgcggacaaagcgggcgatttggtgatagcgtcgagcaaagacaacttcgacatttacgtttgggtgggtaacgtaacgaacgaatgaccggctcaaagagagggacgaggatattacaatctgttgctttttcaaggcattggccaccggccatttgttggaggtgctcaacggacacactaatcttgtgacgggtttggcactgtccgaaaacacgcttttctctgcttcttctgacggcacgctgaaactgtggaatattatcgaagggaattgcctggaaagtgtccaattgaccagtgagggattggatgtgaagcacaggtaacagagtgactgctatgcctccattttttcaattgtccgcgaccaacattttcttattccacgcccccaaagctcacaaatctcaaaatgactttgccatttcagtccttccgccatgcttttggccgtgctttgttacgactcgtcaattgctttgttcgacactgtgaacacccaacaattgggtacaattgacaccaaactcgacattgacgcggcccgacaaaaggcggacaaagtgaagaaagcgtcttcagagcggaataagtacgttttttcagtgtcctttaatcgtttgtccataattcccccccccctttttaaggactttcacttgcatcgctttctcccccgacggttctttgcttttggccggtggtcagtccaacactttttgtctgtatagcgtcgcgggtcgtattcgattgcgtacattcaaattgagtttcaacgcgagtttggaaggggttaaggtatttgagaccaattaatttggtaaatatttccaatgtttaatttgtctaaggatgacatcaattcacgaagacaaacagaatttggcaacattgacttgtttgacatcagtgactcggaagacgaacggcacaatccaagaaaagccatcaaactcccgggcacacggcacacagacatggccgaacggtccatccaccaacccgtcactgttaccaagatgggcttttgtccaactggtacttaatgtgctctaaacacagcgtccggaaaattaactcctgtaccaaaaaagaattcatgtgtggcgaagtggttttgtaaggggttcgagtccgtcgcgcggcatgaatagttttatttaagttttgtccaaaaattgaaaaagtccatttttgaaaattatttttaaagcctttgccaaccaaatttggtgtcattcgaaagcttttgattaaaaaaaactttttctaagcaaatgataagcgatttaattgagagatgttttttctctgcactttctattttttgtacatctctcatttttcagacgctgcgtaaataaacataaatattgaactggttgagccgtttgctttccattttaggtggttctttcgccgtcgtttcaacggaaggcgttgcactttactctctgttccaaatgcgaagattcgaccccttccaattggaaattgacgtggtccccaactccatcgtccaattttctctttccggcgaacacgcgaaagccatttcgttggcacttcggctcaacgatgccaaactgacgaggagagtggtcgaatccgttcccattttacaacgtaaaataacaataaataatccgtacttttcccatgtttttctttctttagtttctgctgtcgttcgggggattgagctgatttacatcgaacgtctgattgtttggcttttgttttttgctgacaaaggccaccaaaagcatgtccatttttaccaattattggtccgagaaattcttattgcaaatgcatccaaactgaagcaatcagttgatcaaagccggcaatttgtcactggacttcagcaaatgattgccaaccaccaaattttgttgatggaaatgttcgttttcagaacaaaaagtcaaccaaattcgtcttattttgcatggtttcaggtgttcacaaaatacacaatcacttgcttatttgctgatgacgagaagaatgaaaaacgctatcatatattaacagaaacaaaaaccaattttcaattgttattattttcaaaattaaaaataacagaaaaggcctaaaaaatacattagattggctggatcacgaatgggggcgggggcgaacaaaaaatggaaatgggacgagaggggggggggggatcaaaagtgtgatcggaacgcggttggtccactctcatctcctcttcgtccttctctgtgtgtcggctgttttgtcggattctgtgtcactgcccttcacaatagccattttttgatggcatctgaatttcgtttttgtataattcagccaccaaactggcggatttcttacaaagtgcggcagaacaaagcgctgctgcccccaaaactacagcaaatccaattgctgtgtcatcgctcccgaaagtggcacttgcactgctggttatcggtggaggcgaagtcggacacggtgtccagaatgtaggggccgtcttaagagagtga

SEQ ID NO: 47250 - DNA, 1038 bp, Heterodera glycines
acgtgctgcgtttgctgtgccttcacaattgtcacatttctcattgacatcgaacggtttttccttcgtttcaattggccaatgactctgtttcctttggtttagcttcgaattccccgaaaaggccatcttttacatggccatttgctatttgctggtcagtgccacttatatggtcggcctggtggaggaggacagtctctcctgcgctgtttcctccgcaaccaaacaacagttggtcactcaggtcagtctaccccaaaattgtgtccattttttgtttcaactttcgttttcccgcagggcaatgagaatattctctgttctgcggtggcagtcgtccattactttttcaacttcgccggcactctttggtggttggtgctgtgcttctcctggtttctggtcaccaccctcaaatggggagaagcgccggttggccaggtctgtccttccctttttgtctttctctctctccctctatctctctcattttctcaatttgtccacttccattttgggttttctcctcctatttcaacatcctcgcctggtccttacctgccattggctccgttctgctcgtcgccatgggtgccgttgatggcgatatgttcaccggcatttgctcccttggcaatcttcgccccgagttttactttcgactcgcgttggtccctcaaagcattgccattggtttgtttttactttttgcattgttttcaattttccttgaatttgccaattattttccctcttttatgtgtcggattggtgcttttcgccagtgggttcgtttccatccttcgcattcgctcgtacatcaaaggccaccgtttcgtgaccgacaaattcgagcagacagacgccagtgacaaactgagcaagttgatgttccgcatcggctgcttctctttggtttacgttcttccgatggccgtcggcattttctgcgcgttttatcagactgaaaacattggccattggctgaccaattggttcgtcaaatgaatgttttcttgcaacaaaccttccttt

SEQ ID NO: 47251 - DNA, 646 bp, Heterodera glycines
cgtttttgttgttgtttgtgcctgtgtgatttcaagaagaaggccgagtttgcgaaacgaattgttgcgattgatcgaccttggacaccaaattcaagttgttgatgaaaatgtacgttcttcaccttttcctcttatttaaattgcatttttcagatctatcgttggaaggtgaaaataccgggaccgccaacatcgctttagtgaggatgcattttcttttgttctgaaaaaatgtttcagttttcccggagtctatacggtcaatattgaaattccgtgtgtctatcccaatcaggctccaaaagtacaattcgaaacaagaatactccaccccaacagtaagttggacctttcgttaacgatcaatcctgtttgcttttcagttaagaatggtgatttctgtgttaatctgctgacactttggaatgctagcaacaatatgacagatgtgctccaagcaatctcacatgttcttcttgagccaaattatgaaagtccatacaacactgaggcagcggtaagtacttctgctgtttagtctgtcaattttttttcctattttcagtttgcatatcaccacaaccaagtcgcgtacgaaaattctgttcgacggatggttcaactatacgctgtgggtggataa

SEQ ID NO: 47252 - DNA, 860 bp, Heterodera glycines
gatcagttcaatgttagcctctgtgatcaacgaccgcttcaaccggcacagccaatgcgctcctttcttttctttggaattttaccctccgctgaaagaacaccccaaaaatttggcggacttcttcgaaatgttggatcatctgaagcaggcgcagcctctgtttgtggacatcacttggtcaagacgaaatgacccgggtgagaggagggtaattacaaggattgatcaattagtatggtcaaaaaagctacaaacgcttacaattagtctgatttattcttcacaggaaatttggccaaattgaattcttcgtcggccattgccattgccaccgcggccattttcggcaaagaacgcacaatgctgcatatctgctgcaatgatcacacgaggactgagtcgattagtcatgtgaagcaaacattgagccatggcattgcgaatattatggcactgaggggggacgacatgccaacggagcaaacggtgggggggcaaaaaagaaaacaatctcgatactatgagattagcagcttctcaccaaaaacacaaaacacttcgccatcgatttggtcaaatggactcgagaattggaagagaccggcggatattttggcaatgatcggctaacggtggccgttgcgggacacatttatccgccgatgaaaaatatttcttacagacaatgcatggaacatttgaggtggtcgaactcaattaaaatggagtttaatgaggcagcataatcaatttaactttgtcaaatgcatttcaaatttcgcttttgacagggccaaagtcaatgccggcgccgacttcgtcgtcactcaattctttttggatgccaatttgtttga

SEQ ID NO: 47253 - DNA, 220 bp, Heterodera glycines
  unsure (1)..(220): unsure at all n locations
atgcctgattatgatgaaaccactgatcttcaactttgcttcaataaaactcattttcaacgttcggattttaacgtcgaacgatttgtgaatttggcaaggaaacgcgtgactttggatcagctgcaaaatgacctgcgaatttacttgcggcatctccaaaatttcatggttgaactgatcaatgatgattatgccgactttgntaacctttcttctg

SEQ ID NO: 47254 - DNA, 1823 bp, Heterodera glycines
atgcatgttgattttgatcctctacaagtggattggtccacattctcgtccgagtatgtgcaatttggtggatacaacatttatcgggggttgccctatcagcgtggagcgggagttggcgcagtgttcagaagtcttatgagatacttgctgccgattggaaagcaaattggctacgcaattggatgtcagggaatggaaagcggaaatcgagtattcaccaacgtgctagagggaaaagacctcaaagagtctctcgtaagtgagagtaaggcaggactaaagaatcttctcgaaaaagcagccaacaacataaacatcagaagggtcaaggttttgattttaagcgatacaaaaaagactcggctcccaaaattggaaaaataaaacgaaaaaatataataaacttcaatcgttaatcgggccaccaatggttgatgagaccaaaaataaacgtctgcgtgttgactcattaggatcctattaaaaaatgacttgcccacaaaaaatcagcatcagcagtcccctagcaattaacagtggtctgaacattttctcagttcccccgaccaaagtgtctgttgtacgttctttctttcgttaggtgcttccgctagcaacaatcacgcaagaatcgccttacctatttcggctttacagtgacaatttgtggaccgatttatcgcgggtctatctttatctcgaactgtccattgaaaaaccgggagcaaacgataaatggattgctatagaggacgcggatactagtgtctctgccattcaagggattggtcaaacatttgtccagcaactaaaagttacggttggcaatacggaagtatacgatagcggaaacctatacccattcaaggcctatatcaccaatgagttaagctttccaataaatgccaagaaaaattttcttggttcaacagggtattattacaccgtaaaccaagatgactcaacagacgaggggttcaaagaacgttgtaagatctttaagggtggaaaaaatgcgcaattcctctcccgtctcgactttgatttgggaaaccaggagctttatctcttaaacaatttggacttgctgttcacaatttacaaagccaaagatgtctttctcttgcaaactttaaaagccaacgattcaaccaaatatcgtttgacagttcacgatgtcaagatttatgccaaaatggttgaggtacaaccttcactaaacatgagcctttacaaaacacttgagaaacaacccgccacgtacgcagtacgcaagaccgaaatcaaatcgtcattcatcagcgtcggtcgatacgaatttgagtataatgtcttcagcgcgaccattcctcggcgcgtgacaatcgcgttagttggaaattcagcatttcacggcgactacaaactgagtccattcatgtttgagccgtttgatttgcgtgaaatttcggtacatgccggtggggtggtctacccagctgttccttataaactaaatttttcaaaggatcactttgtcagtgcctttgttgacatgtatgaggcactcggaatggccaattcagaacgttcatttgacatttcaatgacccagttcaagaaaggatggaccttttttctgatcccattgacatccacgcttgacgacagctgtggatttgagctgttgagaagcggtacgacaaacgtacgagcaacattcaattcaccaattccacttggtggcgtggagatgattgtcttgggtgaattcgaccaaatgattatggttgattataatcggcacattgtgaccgactcaaagcttggataaaatataa

SEQ ID NO: 47255 - DNA, 1090 bp, Heterodera glycines
gtcggccttcttctttttctcgaatgagaagcgtcaggaagtgtccggagagcatcccgaatggaaagtcgggcaaattgcgcaggaactcggcgttcgttggaaggcactttcggacgaagagcgcgcgatttacgaaaagaaagcccaggaggacaaagagcgatacgctgaggtgagagagaaaggagaacacaacggacgcaccccaaattaaaggacaaatttcaaatatttttttagtctttgacagattttggctaaaaaaccattcagattttttggcatattttggaaaattataaggccattggtggtccagaggctattcttattattagccatttaagaaaaaacaagtgatcagaaaaattaaatttaaatgcgcacggaaatgttgcacttaaattcttctttcaaattttgtcacttatttctctctaaaatggttaattttaacaaaaagtaaaatgttttcagtcggatggatttgaaattgacttttcctagggaaatggggaacgattgtcaactgttccgggttttcacgactttttaatcgctaaagcatcttttccattactttttgctgcaggaaatgcgtgcctatcgcaacgattctgctctgtcgtccggcacttgtcagaagccctcttacctggagggagggccgtccatggtcaaaacacccaatccgagaggattaaacaaaacaaaatgtccagttgattcagaccactgctgagcatgtgctgcagtcgcagggcggtgctcacgtggtgagcacatcggcgggcggacagccgcaaatggtcattctgcaacagcaaccgcagcagggacagccagggacgcagttgccaatgcaaatcttggtaatacaatccaatctagtgcattcattggccattttcagcattacaataagcagagtaaacgggagggattccccctccccccttggagtcagttcccccgcttggttaaaaaacatgtcttgggattggtccgtttattcgtcgttgttaaggaagagcacgtcagctcggcgtcagcggcacagcaatgcgcgacacagcagcacgcgtga

SEQ ID NO: 47256 - DNA, 916 bp, Heterodera glycines
gtaacttttgtgaaggatggctgtgagcattttttgataaaattgatgacaattgaaaactgtctcgggttgcgagaactctctgatcagcacagttgcgaacaacttcttgccgcaattgaggcatttatgcttgaacattttatggtaaaaaaaacattatatgagttgaatttttttcattcaaaggaaatttgccacaaagaagaatttatggcattggattcggtgacaacattagagcgactggcgaaaagtgacgatctaaacataacagacgaacggtttttgttcgaattcctcgtcaaatgggttgagatggacaaaaccgggttacaaaccgccggactaacaataaagaatatttgataattggcatgttcaggttgaggttaaattcgctgactcgcctccttcgatttgtccgtttttttcaacttcccttcgactattttgtgaacatcaagcaactcccgttgatttcccaatcgtctgaagcattggcatttgttcagtctcaatccgaagcttttttggaggcaatttctgcttctggtatttattttgtaaatttttttgcggctaacttatccgggagacgggaataaggcccctgttcatgagtccggcctcccataaacgttagaccttgtcaaacagaattttccaaatcgttgggccgtttgcttgcctcggcctctaattaaagggctctttagttttctgcttttagtttgttcggcttctcattcgttggccgaccaatgtctccaacagcgttttgttggcggccacaaaagcacgctttctggctccgacttgcacatttccagccgttcatttccgaacaaaaatcaaccttccaacagagagtcgtcactcacagcttcaagctgtttgggccagcatcaattaa

SEQ ID NO: 47257 - DNA, 1309 bp, Heterodera glycines
atgacgaccatttggcaactgtgcgaggacgcgaccaatgtgctgcgggaccaggcgtcacttgtcgagacgaaaccaccgctggtcatgtgcggcgacatccatggccaatttgtggacctgaagaggattttcaacaagatgggctacccgccgttcaccaaatacatgttcctgggtgacattgtcgaccgtggcaatcaaagtgtggagacgattgtcctgctgctgctctacaaggtgggtggaaatgtcgtgccgcgggagggagaatttgatcattttgcagggccaatttccctcccccccccaattttaaggtgcgctacccgaccgaattctatatactgcgcggcaaccacgaatgtgccagcatcaacagaatgtgagtgctgtggtgccgtcccatgtgtcacattttaactcaatttcagcaaaaaaaaaatccccccccccattttcagatatgggttctatgacgaaataaacgagcgttatggacaacataatgtgcggcctctgtgggagcggttcaacatgacattcgcctggcttccgttcgtcggattggtcagcgactgtattctgtgtgagttttttgccgttgatcggctgtctgatcgatcggacgaactctaatccccccgccctttttttaaggcatgcatggtggaatcgcgccggagatgaccaacattcagcaactccgcatgctgcgccgtccgtccatcgacccgccagttccgtccctggagctcgacctgctgtgggctgatccatcaaccgctgtggaaggcacggcacccaacccgcgtggagtgagcatcctgttcggtgccgatgtcgtcgccgaagtttgcagaaagctcaacatcgaattggtcgtccgcgctcatcaggtggggctggataatcggcacggcacatggacgactgactgtttatcgaagcgatttttttggtcattttcaaagcgttaaaacgttatttgaaaatgaataacaaaatttttcggtccgcgtttggtctcccctgtttttagagggccgaattagtgggatttgtgtgatccgaaaatgtgtaatttatttcattctccccactttttcagtgtgtcccgtttggtgtctcattctttgccaactcctacatgctgacgctgttctccgcaccgatgtacgtgactgaaaagaatgtgggagcggtgctggtgattgacgcgaagctgcagctgtccttcagattcttcaaaggcacccaaattacccccagcattggtccagcatctcgacgcgaatgttctcaatag

SEQ ID NO: 47258 - DNA, 1187 bp, Heterodera glycines
atggatgccggcttttacagagggacctcttcagagcaggacatccgtttcactgacaaggaacgcaaattgttaaggcaaatgaagttcgaaaatgtgcttgaaacaaaggttgttgtcttcatttttgttgtttgactgcagttgactaaggtcgacttggcaaagataaatcttgatgttatcaagccgtggataacgcttaaactgaacgaaattctcgggatggaagacgacgtggtggtggaatatgtgttcacgcagcttgaggagaaggagctgaacccgaagaaaatgcaaatcaacctcaccgggtttctgaatgcgcgcagagctcgcgaatttatggtattttttcatctcttggatcaccttttgtcattttaggcagaaatgtggcaaatgtttgtcgaagcccaagacagccccgaagggattccaacgagtttagtggagaagaaagtgcaggaacttaaggtaggctgaataattgatttgagaaaacggcccataaaatttgcaaattcttttgcttaaacgtttttaaacactgccaaagtttaaattcgagaaaacagcataaataatcatattgcgttaaggcatcaaattcgaacaaacagccaatgcagacgtaccacaaagcgacggaagtggactggaaccagcggtaccaaacactgacgggcggacgctatgggaaaatggacccaaaagcccaagtgagcaaatcgcatatgtctgatacttttatgaaaggtggaggaagacgacccccagcgaaggcggcgcgatccggaagatgacagagatgaaagagcggagagacggatgaagtacgaagaggggcgattcaaagagaggaaggcaagtgggcacaaatacatcggttagtacccaccttaccaataagttaaatttaaggatttgttacgtgagaaacaacggcacgaagaaaaacaccgagaacgcacttcttcgcccgagtcaccaccgtcgatccgccgtttcgagcgagagcggaaaaagtggagaagaaaaaaaggcaacggtaggaggcggaccgaccagtaaatctcaattaaagtaaggtggggaaaaagcacttgaggaagagattaacgaattaaggggcagacaaaacggcgacgatgaaaaagaaaagtaccgcttaaatttgtttatta

SEQ ID NO: 47259 - DNA, 2446 bp, Heterodera glycines
atggcgatgcgacttccgagtcctcacaatcagcggaatgagtggctacggcatcagcacacttttgctgttggtctgcgctatcatcagcaaaagggtcctttaaacattctttgttggcataccaagcctattcatgaaaaaatattttgatttttttttaataaatataagttgactttgatattgaacatgtccaataatctcttcctcagtccgtcaacttgttgaagtgcaaaacgtgctgtattcggacggaaagtccacgcatggtcaatgagaaaaacactaaactcttttttgattttctttaacaattttaagtgaatgacttttccgggtcgtccattttcaattcgctcatagctttgacttgcgatgaaattgtttcattcggttcgctttcttcgatgataacctcaaaatattttcctgcatcgaaaatctaaaaatatttgttttttttatttaggtatttgagttcaaattgcctgattggatatctttttgtataaggatttccagaacagttcaggcaaaccagaagccaacaattggggctcatgaacttggagaaattgatcaaaatttaaatggtgagtcattgtccagaaaacaattcaacatttgcttgcccaagctgaaactgatttataagtagggatgatatttttaggcaaaagcctatttttttcctgagctccctatggtctgaaatgcacgaaaaacatgtttttttcggcggttgttaagctacttttcaagttattaatgcctattttctaggcttttatttttagcgcctataaagcctaaaaaaatttgaaagagcctatttttgcctattttggcgttttgcccaaaatttgttagcaaaaattcaataaaaacgaaaatatttacatagaataaaggaatcttggaaaatgaaacgggagttgcacatttatgcttatttgtttagtagtattttgtttttaaatactatttttagatttttactattaaaaatgccaaaagaaatttcatcccgcgcatttcttttcaaaaaatggatttttggcgttttgtccaaaatttgttaacaaaaatgcaataaaaacgaaaaatacacccctaagaatcgattttttgggaattttaaaaatacacccctaagaatcgacccaaaaatttctaaaaataaaccccctcagaaatgaaaaattttccaaaaattcatctccaaaatgtatttatttattttcttgacaagaatttatgctttaaaaaattatttatctcaatactgacttggcctaatttttttacttttttgaataattttttgtcattttacacccctaaaaatgagtttttttagtgcctattttccattttttagtgcctattttgggggttttttagagcctagagcctacctattttggcggtttttagtgcctataaatatcatccctatttataagagaataaattattcgtaaattaaatttggcatttcgaaattaaattaaaatttcactggcggcttaaacaaaaaagaatttaatcccattttttaaattaattttttagatggcagcaacacaaacaatggaaaatgagaaaactttgcaaggtgaaggaattttcgcagaaccggttcttccgcagaaaaatttgccactgaaaccggcaaaatcggaagagagcgacgaagggacagcgacggaacaaactcagcagcagcaacagcagccaaccatcagtgatttgcgatatcagcagccattttgggctttagtccctgctgaagacaaacaggaatactttcttgaagtgaaatgatcattttggaaagtaaatttgttttttcactctctttttcagattataaaagagggcactgtcattgggactgtccgtctccacgacagcgcccaccaaaaatcattttggtccattggccgttttgagccgtgtgacatcaaattggagcatccgtccgtttctcgtttccacgccattttacaatacggagaatgtataaaggggagaccgggatggtaaaagatggaggataaaaggggttttaccaatcaaatgttttctctttccaggttcatcttcgacatgaacagcacccacggggtgaggctgaacaagcagccgctcaaaaaacgcacttacgtcccattgcacaacggatttgtgttccaaatagcgggtcggaattaaatattttaaattgaatgaacaacttttggcaatgtttttcaggcagttcacgtcttttcactgtttgcggtggtcccaaaagagaacagaaagaagaagaaaacaaagaaaaggcacaaccaatgggaaaaacggagaacaaaaaggacgcagaagaggaaggagaggacgaagaagaacaacagctccgatactacgagaaggacccgttgggatggctgcaaaa

SEQ ID NO: 47260 - DNA, 1047 bp, Heterodera glycines
atgagcataaatggacgtgaagttttcaactccaattcactaatggcctacaaaacatacttctcacatgagctgtcctattccaatacggcaaaggactcgcatttgaatgcggcgggctattaccgtgacattggcggctcgcttgagacaggggacggatgcattgcgcgacgcaacctgtttgcgagaagcagaacagcgcaattcattgccaaaattgacgccgatttgttcaaccaacctctctacttgatcaacttctgtgagctggacattgaaattttacccaacgacaacgactttgtcctaatcactacgcccgctgttgcccagggtgctgcagctgctcctcgttaccgcttcgaggttgtcagtttgaaaatgtatgtgaaaaaagtctcattgatggatggactggcattggacattgcgcgaaaacttgaagtgaaaccggcacgatatgctgtgaggaaaacgctgatgaaatcaatgttcattagtcatggacgtttcgagtttacagccaatttgttcatggatcaaattccccgccgtatcacaatggggttagtggctaattctgactatattggaacaatttcgcgcagtccgttcaattttcaaccgtttaatgtgcgcgaaatctcaattattgctaatggccgctcctttccccaagcgccatacgacttggactacccaaattggaaatatgttcgccctttcaatgacatgaacgaagcagtgggattcgccaactcattggaaagcaatggaattagctatgaacagttcggaaaaacccactgcatttatgtgttcaatttgaccagcagtggagatgatcaagctgcgctgtttgacctgataaagaacgggacaacagcggtgagcatcaaattcaaccaggcagtgcccaccggggggataatgctggtggtgatgggcgaatgcgactctcttgtgatgttagacaaaaatcgatcaattagcacagacattactatttaaggctgtcattttttgtatgccactatcatttga

SEQ ID NO: 47261 - DNA, 237 bp, Heterodera glycines
atttattgaattcacttttttatttggtttcgtccgacaacaagaaatggtaagttgtaacggaatagcattcctgataactcaattaattcatattcaattgcttaggcaaagcgcacaaaaaaggtcggcattgtcgggaagtacggcactcggtacggcgcctcgttgcggaagacagtcaaaaagatggaggtgtctcaacatgccaaatacacatgtgcattctgcggcaag

SEQ ID NO: 47262 - DNA, 521 bp, Heterodera glycines
gtgatcatccgaccgtcttcaaaggtgatcatccgtttcctcacggtcatgatgaaacacggctacattggcgaattcgaaattgttgatgaccatcgtgccggcaaaattgtggtgaatctcactggacggatcaacaaatgccaagtgatcaggttctgttacatgaaaagaaagagtggccatactcccacccaaatatttttttactggtatgggatttattaaacaaattctgtagatttgtttcccattccaaatgccttcatctcgttaattttctgaatttttcacaatattgcaaaatacaatagacatttgattgaaatcaaatgacttcgtttaatcataggcggaaagactttattattttatttttcgatttcagtcctcgtttcgacattcgaatggccgacttggagaaatggaccagcaatttacttccatcgcgtcagttcggttttttggtgctcaccacttcggctggcattatggaccacgaggaggcacgtagaaaacac

SEQ ID NO: 47263 - DNA, 711 bp, Heterodera glycines
atgccattaaatgatgtgtcgaataatgaaggcattgctcaaaatggcaccaccgattcgcttgccgacgccgacaacggcacagaagtgatgccaccgcagcatttgttcagcgactacgtggagatcgcttatctgggcctggtgatctgtgccggcttggcactgaacatttccgtgcttaaacgactgatggttgagcgaaggcgagcccggaggagcaacaaagtgatggtgggaaaaaggagcagacaaatgaacattttgcaaaaatcatgggcctaatttcaagactaaaagccgggaaaagcgaagcccaaacagaaaaaagagttttgaccggacttagtgcagaaacaattttattacggatttttaaattctgaaatgggcctaattattgctaattaattggttggctacaaaaaaaagtctgcggttctttagagcggttttctgctgctgaagctgaacctgaacgtgtccgacatcctgatcctgctcatccacgccagcggcaagctcggctggctgatcacttacgattggcggggcggcgacgcgctgtgccgcctgttcaatttgttgtccatgttcacgctgtacctctcctccaacattgtgatttgcatcgcgctcgaccgcctcttcactgtgctgaccgcgcagcggatggacttgggacagcaaaaagtgagaacaaaaaaataa

SEQ ID NO: 47264 - DNA, 228 bp, Heterodera glycines
atgtaccaacaattggtcaatttaagccctccctcgcaacaacctccacaatcgtcctccgcgacccatcaaggaggtcatcatcgccacacatcttcaggccatcaccgttcgtctggaatgactgcttcttcttcgcgtgctccgaataggacacgtaccggagatgacctgcacattggcaagtacaaactgctgaaaacaattggaaaaggcaacttcgcaaag

SEQ ID NO: 47265 - DNA, 3217 bp, Heterodera glycines
atggcccacctcatccaggacggttttgtcgtcaatgacgcaacatggaaactaggcattttcatcaccgatatgaacatatcgcgagagttattcgttcgcggtgacatgaccatcggtagtctgatgatgcagttggtggggcaaattggtatcagaggcaaaagcagctccgctaatcagttcactgttcttaggcgagactcaggactggagtgaccattacatgtggtggcctgaccgccgtaagtggctgaaacacacgcgaagcacgttggaccaaattggaatcactgcagcgacttacttggaatttacaccgatgcataaacatgccaagtaaagggattaattattgcgtaattgtcttgttgattatttcatattttctgtaacatctttcagggtccaactccccgatttgcaggtgttcacatttaatttactttgttcaggcttttgattatttctctatatcttcttgacttttgtagattatcgatgcccgactcgatttttccgtgcccattttgaaggtcacccaaaaaatctgccaagaacttgccatccgtcacccggaagaactgtcgctgaagcgtgatattccgccagatattttgcgaaaaggcgcatctgtcgaatcggaggctcagattcagccatacatgaagccgggcgaggagtccattggacccggcactctccgaacggccaaacccatccgcgcttcaactgtcaacctcactagcgggcgaggctcacctgcactttcgcaggcatctgcaatgggccccggtcacttgtttaacgcttctgaaattggcacactgccgaagatgggaacgattccgcgcggaatgagccccggtccagccgcagtattcctttcagtttccaacatttttaaaatttaaatttgctccattagtatcgcgaagtgcttggacgaacaccggagcccggttactctgaaggaggcggtctcgaatgtgaccagttcgacgaaaatttgataaactcaccgaaaataactccgggtcgtgaaacattcagaccccaaaattatttggagaaagccgcgttgaaccggggatggttggactcatcgaggtgggccttcgctttaatcaaattatgtgccaattattaaacaggtcgctgatggaacaaggcatttgcgaaggcgatgttgtgcttcttcgttttaaattcatgcagtttttcgacatgaatctgagatatgaccccgtccgtatcaatcaattgtatgaacaggccaaatggtccgtccttttggaggaggtcgaacacacggaggaggagtcatcattatttgcagcgctgcaggcaggcacttgactaatacatttgaattatattattgcttcagttgcaagccgcgcttcagcgaaactctccggaccgcgaatctccggaacgtgacgaggtcgatgtactgcttgatgagttggtagggaccagaattttttctcaatgattaaatttttcttgaatttgaatcaaataatagtttttataaaattttcctgattataggaacagactttggacaccactgcctcactaagtcgccgtgatttaacatacgtgcctgagttgacagaatatctcaaatatttgaagtttttttccaataatgtttttgtatatttgtttttactttagacctaaaaaattgggttttaacaacttcaagagagcttactttacatttcgagacctttacttgagttattacaacacagctcaagatgcaaatggttataaatgtatttttaaaaaattaaattcattgtttaagggcctccacttggtcactattatctcaaaggtttatcattcggtgtccgcatatttcttgacttcaaacaattctaaaggttgcgaggtcagccaggatttgagcgtctcgcaaggaaagttcaacataaaattgcaagtgccgagcagtgaagggatgtcggaactgatattgaagtgtgacacggagcaacagtttgccaaatggatggttagttaccaaaatgagtattgacaaatttcccgctttctaaggccgcttgtcgtttggcatctcgtggaaagacaatggccgattcttcgtacaattcggaggttgaatccattaagaaagtgctgcagatgcaagcaggaagtgagcatttggttgcgaaaattttttggtggtaaaaatttgtggcgtctaaaaccattaggcggatttacaatttctattttacagtgctcaaaaatgtaatcttcttatttttgcctgattacctgataaactaattaaataagccctaacaaataagacacgcttaaaggggcagcggcagcgcaaaacggtgcacaaaacaagaagaaatcgcaaccggtgcagctgcccacggatttcaattcggaagagttcgtttgtcagcgatattggaagagatcggggaacaaaagcgtaagtcaaacagaggaccggggtaggggaggaaagaaagtgttaaaaagttttattcaaaagatgcaacagcgcatttcggatgcccattcaaacgtgaaaacattgagttgcaccgaagcgaagcttcagtacattcgcaattgggaggctctgcccgagcacggccttcactatttcatcgtcaaattcaggcattttcttttccattatacaatttgcgttttttttcaaatttaagtggtactatttatacttcaaaaatgccaattaaatgtactcatattacaaaacttattacccaaaactttatttacaaatggtttttgcaaaagtatgtaaaaaatatcccctaaactctaaaagtatcctgcttatgcctttttgattttacagaaatgggaagaaagctgaactcattgcggtggctcacaataggatgatgaaagtgaacagcgacaacggagaatcatcaaagacatggagattctctgggatgaaaaaatggcacgtgaactgggagataaggcacttaaagatacaattcgacaacgaggatgtcgaattcaaacctttgtcagcggactgcaaggttataccgaattgtaaaaaagaaagctaataaagatcaaacaggttgttcatgagttcataggcggctacatttttctctcaatgcggagtaaagaccaaaaccaaacactggacgaggaagggttccatcgcctgactggaggatgggga

SEQ ID NO: 47266 - DNA, 509 bp, Heterodera glycines
atggtcgcactccgtgcacaatttgaggcgagcaatgatgtcggagttttctgtaaactcaccaatgcttattgtctggtgggcattgcttcttccgaaaatttttacaggtgtttgctaagaatagaacagccgtttttggcgatatattctttgaaaattgctgtttttaaaccgaaatgggcgtgtaaatccagaattattgcaacaaaatcggtgatgggatttggttacccattttattccggtggattgaaaatgaaaatttccttgtttttttagtattgtggaggctgagttggccgacgtcatcccggtcatccattgcacagttgcgggctgtcggattgttggccgtgtgacggccggtaatcggcacggactgttggtgccgaacgcgaccacggaccaggaattgcagcacatccgcaacagcttgcctgactcggtccaaattcggagggttgacgaacggttgtcagcgctgggcaatgtaattgcatggtctg

SEQ ID NO: 47267 - DNA, 1698 bp, Heterodera glycines
gcaatggacgaggaattggagcgggacgagcgcgtgtttctgcttggtgaagaggtggcaatgtacgacggcgcatacaaagtcggcacagacaatttgcactaatttttgccaaatttttcattttcaattttgaaaacaatggcatgaaatggttgtttttctaaatttatgttgtttttttagatcagcaaaggcttgtggaagaagtacggcgatgagcgcattgtggacacaccaatcactgaaatgggtgcgtccaaatttgattttttaaaacaaatttttcgactcgtactgggaccgtaccgattgggtatttttcaaaaataccccatcgacctgggataactggccacaaaaaattgaaaaaacaacgaaaattaccgatcgggccctaaatttgggcgggtgcctgtcgggtcggagctgttccttccgggcaaaaattgtccgagcattcactaccaatttatcgggacttattcaactgtgaacggtccaatgtttttggcaaaatatttgcattatttccgacttgcccaagacataagcaaaaatgaattatacgtttttatctgagtgaaattgcaatgtttgttttgcattgaattttgatgggtttaggctttgccggccttgctgttggcgctgcgtttgccggcctgcggcccatctgcgagttcatgacgttcaacttcgccatgcaggcaattgatcagctggtgaacagcgcgggcaaaacctattacatgtcggcgggaagggtcagtgaaagctacgaattttacattatcatggttctctattcatggacattatttagacctgatttttgggggaaaaaaattcgaaaaatcaccaattaatagggtttcttccccctgtggttttaggaatttttccaattattggtttttgacgcttaaaagtttaacaaaaaatttttgcaggtgaccgtcccaattgttttccgtggccccaatggtttcgctgccggcgtcgctgcacaacgttggcttttttgtttgggataacgcgtccattttctcgttcagacagtcaggactatgcggcatggtacgcccatgtgccgggactgaaagtggtcgcgccgtacagcgccgaggatgccaagggtaagtaaccatggagaggagggcattggccatgggatgaaccaaaaagggggcaccagagggttgtttcatccaaattttgttgctatgaaaattccaaaatggcccgatatttgtttgccctaccgaaaggaattgtaacgacaaaaaagggatgacattttggtctcggtaaaatgccaaaatattttatcgccatatttttgccagaaaataaccggacgaggattttggatgcatcaaatatgtaataatttatttgtctctgtttaggtttgctaaaggctgccgttcgtgacgaaaatcctggtaacaaaaatttgcgactttttcccccaaattttcactccgtttagtgattttcctcgagaatgaactgttgtacggcgtgccgttccccgtctcggacgaggtactcaatgccgattttgtgctgcccattggccagtccaaaattgaacgggtcggcgctcacgtgacgctggtctcctactccaaggcggtccaaaactgtttggaggccgctgatcagctcaaagcggagggcgtggaggccgag

SEQ ID NO: 47268 - DNA, 1475 bp, Heterodera glycines
agattatcgtgaacagcctgaattggatgcgctgtctcagtcgggaattgatgacacatctgacatcactgaactctcaatcgatgctcgccgccgcgcagagttggacatggcaagacgcgaccaaatgaccgttgatgacgcggtttgatgcattcgaaaattaatataaaatggaaattttatcagatttattgggaggatggcgatgatgaggcaattcacttaatgcgacggaggaagcaacgcggtttatcctctgccgacgaacattcattagctggagagccggcagaagaggacattcgcattgatatcattgagaacccgcgcgggagaccaactcgagagcacataaaagacgaagttatagcgaaggagattgagaagaggcattttgacaaatttaagctacaaaaaatgtttgcttttttagattctgcaaatttttgcgcgttttcaaagatacggtgaacaaacaaaacttttacatacagtcaatcaaacacatggtggctgagaatcgcgaatcacttgaagtggattacaatgacctggcacacgaatcgggagaaccggacattacttatttcttacccgaggccccaacagaagtttgatttaacgtatgacataatattttgagaattaaaggtactcgaatgtttgaatcgcgcagccacgactgtggtagtgtcaatctttccgtggtatcatcgcatcactacggaggtgaaagtcaggatcaaaaaccttccgatggaggaagacattcgcatgttgcgtcaagtgcatttgaacatgctcataaagacagccggtgtggtgaccattaccaccggaattcttccacaacttgggatcgtcaaatacgactgcaagtcctgctcttatgttctcggcccgtttgttcagcgtcaggacgaagagacaaagccgagcacttgtccctcttgtcaaagtcgaggcccattcgaattgaacacagaagagacaatttaccacaattatcaacgcgtgagcatccaagaaagtccgaatttggttgcggccgggcgactcccccgttcaaaggaagtgattctgctgggcgacttgtgcgactcgtgtaaacctggcgatgaaattgtgattttggtcatcgctttatctctcatctgcttctgtttaggaattgactggtgtttattccaatggttatgatggttccttaaattcgcgccagggttttcccgttttcaacacagtgatcatagccaatcacataacgagaaaggatcggatcgagtcggattcactgactgacgaggacatcaaagcaatccacgaattggcaaaacatccgcaaatagctcaacaaatattctgcagtgtcgcgcccaacatttatggccatgcagaagtgaagcaggcaattgctttagctttgttcggcggagaagcaaaaaatccccaaggaaagcacaacatcagag

SEQ ID NO: 47269 - DNA, 3043 bp, Heterodera glycines
ccgccacagctcatgctgatagcaccgaatatttgaaatgaaatgaaagctgagtcgtccgccggtgtgagtaacggaacttcagtttgtacccaacacaccgcagatgatggcagaagttactattacaataaggcaacaaaagtgtcttcctggaccaagccggacgatttaaagaccaaggaagaggtcatttgatgggaggaaattcataaggatactttggattgtttagaaagagctttctgtatggaaggagtacaaaacaccggaaggaaagccttattattacaacacccaaacaaaggtcacaacatggtcaaagcccgaagcgctgaacaaagttaagtccattctcttttttttttgctctggagcacaaaacctattctaagggttcttatcatgaaatcatcaatttgatcagagtatggttaataagttcaaacaaattcctttgtgcgaatgttctaataagcacaacaacttttagcttagagatccaaacatctactccattatggaatgctttatctgaccaagaattaatcaattgttgatttgttcgatctttagtgcttttttgcaaaaataaacctttataaaatcatattcttaatgattgtcatagatgtaatcccagaacattcaatttaagtgtcgttaaaatttagctcggttatagtcattttattcctttcagaacgatattatcttttttcagaaacaaaaacaaagaaagaagaaagcgatgcagcgaacgaatcaaagcccgatttggttcatctttcatcgaattccgaaattgaaaaggcaatggaagcgactttaaagaccttagttgtgaagaagagcgacgaacccatcgaagcgaaagaaattacacaaaaaaaggaggaggaggacgattctgaatacaatctgaagaaaagacaagtggaaaaattcagggaaatgctgcaggacaaggcaaagccatagcaatggaaggggacaaacattcatttaacaagcatttaagtgcaacgagaagcgaatcaacacgaatatgaattgggaacaggcgtcaaaatacattcagaatgatccgcgctacaaaatactggccaaagtaagcgagaagaagcaagtgttcaacgcatggaagacacagcggtacaaagaagagagggtaattaatggccaatggattaatactttaattggccattcccaaaggacgagcgaagatttgctatcaaaatggcaaaggaaggcttggaaaaatggtaaataaaggagtgcttttggcggttgttttgatttgtgcaattatttaggctgatggctcatcagagaatgaaacccactctgagataccataaagccgaggggattttcgccatggaattgcaatggaaagctgtcactgaaccagagaggagagaaatctttgaagacgtgaaaatcgcattggcaaaaaaggacacagagcaaaaaaaggcgttgaaagagagaaacataaaagtgacgaagggggggggggggtaaaacatatttaaaggaaaggcattcgggggacaggcactgagcgacattctggacggaattgacaaaatcgactacagaacgacgtgggccgaagcacagcgaattctgatcgaaaatccaagctttgctaaggacacgacgctacagggtaaaaagagtgaagaaattgacacttacaattagtcaacgtctccttttaagggatggacaaggaagatgctctggttgtatttcaaaagcacatcaaactttctgaggagcaatacgtaaaggaaaagcaactcgaagctaagcgaattaagcggcaggaaaggaagacgagagaagcattcatccaactgctgcacggattgcacgacagagcattggtatacggataacttattgtgattatgtgtaagagcgcaagtcattttatgcgaaaaacggctattaaaattcctgtaaaacatactcccgaattcggatttccaaaaaagaaaaacaccccctaaaaatcgaattttgggttcaacccccccccccgaagccaagggtctggctacgcccttgattgtaggccgataaaggcatttaaatgaaaaaatgagacggagtgatactttttcaccataaaaacttattttgttactaaaaggtgactcccgccagtagctgggctcaactctacccaatgatatctgcggatcagcgattcgaaaatatggtacttttttctttaagtttaaatgtaaatgaaacgattggggagggaataatgaaaaatcgccgaagaaatgttttaaaatataattttgtatttaagcttcttacgaatggttcaacagcactggaccttttcaaattttatgttgatgagttgaggacgaaataccacgaggacagaaaaacgatcaaggagttcctcgaatttaagaaaattacaattgacgagtcaacgacttttgatgcattccgacaatgggttaaagaggggccgaattccgatcagttggaccctgtgaatgtgaagctctgttttaatggtagattttggttaaatctttttttatttacataaacaatcgaaatttgaagatttgtgtgacagaattctgatgaagaaaaaggaggctgaacgtgacgaattaaaaaaggttttatttgaggaaatattcaccaccgggccaataaatttcagcaaaaaagggcggaattggccttttgggatttgctgcggtcgctttctccggcggtagggccaaattccgattgggagcagataaaggaacaactgaaagaaagcggacaactcgagacgacggcggaggaagagcaattgaaacggccattcttcgattcatttgtcaaatcactgcaggacatttgtggacactatcacagtgcagtgagtagcagcagcaaaaagaggaaaaaggagaagcggaaaaagtacgaacaggtaaggaaatgggggacgggaagacggaaaagcaaagaaattcaggaaaatgcatccgactcggaagagacg

SEQ ID NO: 47270 - DNA, 301 bp, Heterodera glycines
agcccacgaataggcacttatgtgatcaataaacaaactccgaacaaacaaatttggctttcatcgccagtttctggtccaaaaaggtatcactcactattcattaaacgctaatcccataaaatttatttgaggtacgacctcagcgacaaaggccggtgggtgtataagcatgatggagttacgctacacgaattgctcgagaaagaatttagacacattttcaaaaacgatcaaatttcgttacatcagagttaaagatttatcgttttttataccgatataaattttatttggtgaa

SEQ ID NO: 47271 - DNA, 1336 bp, Heterodera glycines
atgaataacaaatcacaagtatttatacattttagtggtacaattgatgaatcaaactcaatgaaaaaagagcgaaaatgggtgactatttcggagcttggccagagagatttagaagaagaacttgaaaaagtcagggaaatatcccttgatttagaaggagaagtcagtaaagtcagggaagagattaaaacgatgctaaagcatattatgaaaccgctgatggaatttcacaaaagtaattaattaactcattaattaattaattatgatgaaagcttcatttaacaattaaattgagaaattgtgatgattaattagactctttaaaccaataaaactaatttttgtttttagttgggattcatttgaattttaagccgaagaatttaattgtatttgaaaaaacagaagaagaagaagaattgccaaagctggaagaaaaaaaagcagaaaacgaaaaatcaaagcaaaacatatttccattgtttaaaatgtttaacagaaaaaacgaagccgagaaaaaagccaaggaggaaaaagagaggaaagaaagagagagggaagagaaagagaggaaagaaagagagagggaagagaaagagaggaaagaaagagagagggaagagaaagagagggccaagacaattaaatgggaggaaaaagttatcaaattgaccgattttgatggtaatttattaattatttaattttatttttatattcaacagttttgttaatcaaatgttattatttttaaattcttttttaagcgtctgttctttatttgaaagaagaaaaaaagggaataattgtaaacaaaaaattttcgagttacaataacggatttaccgcgcccgaactgcttgaagtcagagattaataaatattataaaaagtttaaatttattttatttttagctattatatgacaaagagggcgatgttgaggtgaatcaaattttaaaatttaaatcattctattaattaaatcattttattaaataaaggtcactccaaaaatggacatttggtcagctgggcttaccattttacaattgaccctcaaaaaacgtttggctataaagaaaaggtggatgagaaaattggcgaattgtttcgaagcgcaaaattgaaatttgaaggaggcgaatttaagcctgatcgtacaaaattaacacgattagcactgccaatagacaattatgaatgtatggaaaacttaaaatatgatgaatattggccatcgggaaattggtggtacaattatttgacagtgatccatgatattcttacgttatgggacaaaatgccagagattgtcttcctatcagtg

SEQ ID NO: 47272 - DNA, 3231 bp, Heterodera glycines; identical to SEQ ID NO: 15133

SEQ ID NO: 47273 - DNA, 518 bp, Heterodera glycines
atgcgacgggcggtgcgtcgtctgcgattcgtacgtgcgcccgtgcactctcgtccgcatttgcgacgagtgcaactacggaagctatcaggttatgcgcattgaactattgtatttaagcaacaatttaccgacttaccctcacattttttgtattagcattttaaaatgatagaaataggcaatttttggacgaaaaatataaaacttattgttaatccagaaatgtgggcatggattactgtggtcccaatttttagggtcgctgcgtaatttgcggtgggccaggcacaagcgacgcgtactattgcaaagagtgcaccattatggagaaggacagggacgggtgtccgaagattgtgaacctgggcagtgcgaagacggaccttttctacgaacggaagaaatacgcgttcaaaaagacgtgatcatagccgggggttggactgtcagggtttttgtctgttttttccgaccgttcgacctccgtttaatttaccatcgtttctttttataaa

SEQ ID NO: 47274 - DNA, 2570 bp, Heterodera glycines
gggaagtcgaaaacaggcgccaaccttcgcatttacagtgtgccgggcaagaaagaacagggaaattacgcattggaactggtcaccaaatcaattgacttttactctgaatggttcgacttcaaaatgccgttgccaaagtgtgatgtcctcgctatgcctgactttgcaatgggtgaacagcagaaacgaattgcaaaataaaccgaattttaggtgctatggaaaattggggacttatcactgcccgcgagaactgctctctttatgacccaacaaaaagcccttcgacacacaaacagcttctgactttgttattgtcgcacgaagtctcacacttttggttcggaaatctcgtcacaatggtgtttttacatttttatttataaatagcaaaaacatttagaaatggtggtccgatctttggctcaaggagggttttgcttcattcacgcaatatttgttcaccgacaaaaactaccctgaatttaaaatttggtccgatttcgtcgacgcggaagtggtcagagcgatggctttggactctctgcgcagtacgcatccaatcgaggcaatttctgaatattgatatgatattgtaaacacaatattttttaggttcctattgataacccaaatgaacttgaagaaatttacgattcgatcacttacgcaaaatcaaattcaatcattcggatgctcttcaatcatttgggcgaagcgactttccaaaaggccattcgcgattacttgaaaaagcaccaatacgcaaatgcagagaccaacgacctgtggaagagtttgtccgacgcttctgggattgtgagtttaaacaataaattcaatgtcgaagcaaagaatttccgcacattaaatatatttgcaactttatttcaaagaaacaaaaacactaggaaaggaaaatggttttacattttggtttaggatgtcaaagcactgatgtcttcctggacccaacagatgggcttccctttggttactgtcgaggaaaaaattttggatggagaccgtattgaattgcacttaaaacaatctcgctttttggccgatggaggtcatgacgaagcgaaccccgtttggcaagtgccgttcggagtcaccaccgcggcggacctgactcatccaaaggccaaatttttactgatgaaagccgaagacaaattcatcgtggatggagtcaaatcaaatgaatgggtcaaggtgaataatcagatggaagagacaaagattacaaatacaaaccaatttttatgttgaaattactcattacaataattttaggtcaactccaacttctcttcgttttttcgcgtccaatactcaccgaacatgctgcagtctttgctggatggtgtgaaaaaccgcgaactcggagtgttggaccgttaccaactcgccagtgacctctacgccgtgagttgtggcctgttttggatttaacccatgagtatattttgtttggttccttgattcttcatttttagcttgtaaaatcttctcgcgtatccgtttcacactttctcgcgttgctcactgtttgccaggaggaggaggattactttgtgtggtctgcaattgactcgggcattggcagcatcgctcattcactgaaacatttggacgacgaacgcaagctgttggaccgtttcgagcgttttgtgtgcaaaatgattgaacccgtcgctgccaaattgggctgggaacccaaagagggagaaagtctgaattatttctttgaaactcattttgtttttttcataactttctttcctttttagctatacacgttggacgtcttcgtgccctgctcctcagccgtttgtcacattttcgccatcaaccgactattcaaatggcactttccaaattcaatgccctcatcgagaaaggcgtcgatgttgtcccggacttgcgaaagctcattttccgtgccgtaggctctacaaatgatgaaaaaatcattgctgcattgaaaaatttgatggagacatcgggctacgcacaagtggagttgtcatgtgtattaggtatgagatattaggcaaatgtgaggtggtcccttatgacaaaccttttaaggacttggccagtgttcggacttgaaaatgctcgaggacattttcaattatggtgttattcaaggcaaaatccgcgaccaggacctttatcttttgttcgcggcaacggaaatggcaccgatggcgtgctgtggacatttcgcatgggactttttcaaaaacaatttcgcacttttgatcgagaagtacggcagcgtcaacagcaacgtgttcttgcattgttttaactgcgtgacttcgggtttctgttcgaatgccatggccgaagacattatggtgggttaattcacaatcagtggcaaaagcggagattttagacccatttaaatttaggagttttttaaaaaagaattggacgaacattctctgaaaacattggagcggcctcttcgtcaagccgtcgaatccattaaagtcaaagagagtttgctgaagaataacgtgcccgatttggacaaatatttgcagaac

SEQ ID NO: 47275 - DNA, 935 bp, Heterodera glycines
cctaaaaaacaataaaatttcggaataccaatttggttttgttagaaataggtctacgacaagtcaactaataacagttgtggaagattggtacgaggcaattataaatggaaaaaatgttgactgtatttatattgattttcaaaaagcatttgactcagtgccccataatttacttttatacaaattggaaaaaattggtataaagggcaaacttttaatgtggataaagggctttttgagtaataggacttttcgagttaaaattggggattctttatcctcaagtaaaaaagttacctctggcgtcccccagggctctgtcctgggccctttattatttttgatttatattaacgatcttcctgatgctttgccatcaggagtgaaaataaaattatatgctgatgatgttaaattgtatatttgttataaagcaagaaccgaaacagaaattatgcataaagcattgcataatttattcgaatgggcaaataaatggcaaataaaagtttcaatgcaaaaaacttttatattatatttgggttcaaaaaacccaaaagaaacatataaatttgatggaaatacaataaatgctgtggatacaattagggatttaggagtaaacattgataacaaattacaattttccgatcatgttaatcatataacaaggaatgcatatttacgtatgcgttccttgttccgaataattaaatccaaatcatctaagatttggattacgttatataaaacttatattaggcctttattggaatacgctccggaggtttggaatccgtctcttcaaaaaaatattaaaaaaatcgaaaagtgtcaaaaatatttcaccaaaagagtattttttaaatgtagccttccgccaattccataccaaaatcgattagaatacctacaactgccaacactgagaa

SEQ ID NO: 47276 - DNA, 2852 bp, Heterodera glycines; identical to SEQ ID NO: 15192

SEQ ID NO: 47277 - DNA, 1730 bp, Heterodera glycines
atgggaggacccgaggactcaagggtcagagtgattagcgcaattatatttatgattacatggattactgtctttaggttaacggatgctccgctgccggaaggctgggaaatgcgtatcacagagcaaggtgtgccattctttatcgaccacaacaacaagacgaccacctacaaccacccgcggactggtcggcctgttggtgtgttctttttgttcctacccaaagtgattgttcaatttcagggcctcttggtggtcccggcttacacatggctgccgacaaaacattcaaaaacaaagttgctcagttccgttatttgtgctattcaaacagcgtgcctaaccatgtgaaaatttctgtgacaagaaacaatttgttcgaggattccttccaagaaataatgagaaaaaaccccttcgacttgcgtcgtcgtttgtacattcagtttaaggcggaagatggactggattacggtggaattgctaggtattttgggttattatttgtttttattaattgactaaataataataataactttcagggaatggtttttcttgctctctcacgaagtacttaatccgatgtattgtctgtttatgtatgccaattcgagcaactacagtctgcagattaatcccgcttcttttgtaaatcctgaccacttgaaatattttgagttcatcggtcgcttcattgctatggtgtgttgttgtgacccaatttactatcgtaactaactattagttttacaggcacttttccatggaaaatttatctacagtggtttcacgctcccattctacaagaaaatgcttaacagaaagatcactctcaaagacttggaatcggtcgacactgaattttacaattccattgtttggagtaagttaacagaaaacgtcataattataaattattaaaaataaaagttcgcgacaatgacattgatgaatgcgacatggaattgtactttgtggttgattatgacctacttggtgaggtcaaaacgcatgagctgaaggagaatgggactgaaattgctgtaactgaggccaacaagaacgaatatattgaactgctggtggaatggcgtttcaaccgcggaattgagcaacaaacagtggcatttttcaacgggttcacttcggttttccccctccaatggcttcaggtatgaacttttgtatttagcccttaatttatattgttttttagtatttcgatgaacgtgagttggaactgctgttgtgcggaatgcaggagattgatgtcgatgattggcagcgacacactgcctatcgccattacgctgttcaaagcaaacaagtgatttggttttggcaattcgttcgctctttggaccaggaaaagcgttcaaaactgctccaatttgttactgggtaacttacaattagtttttaaatttactgactgaatcgttatttcacttttcagtacatgtcgggtcccggtcggtggtttttcggaacttatcggttcaaatggtcctcagctgttttgcattgaacgcgttggcaaagaaaattggttgcctcgttctcatacttgtttcaaccggtaaacaaccgatgcttatcaattagcttcttattgtcttcatactgatttaatttaggcttgatttaccgccctatcggtcgtacgaacagttagccgagaagttgacagcagcaatagaaatgacagaaggctttggcaacga

SEQ ID NO: 47278 - DNA, 1013 bp, Heterodera glycines
  unsure (1)..(1013): unsure at all n locations
atggtaactgcggaagataccgttaaaacaaaggaagaagaccccaaaaaaacgacaacggacgacggatcgagttcagaggaagaagtgcccgagctcgaagagggcgacgttactgaagagcagaaaaaagttgctgaggcggccggactcagtgagcaggtggctgattgattggtggtgtcatgacaactcgtacaaatgcttacaatttgactaggcactttcgaaacacaaattggacaaaaagttcaaacaaattaacattttttgtcttaaaattttttaatgtaggagttgccattaacctgattggtttgggcagggagcccatcgaggcattgatgtgctaaatcaaataaatcggaacattttaaaggttgccgaaaagggctccaaacaatcgcgttctgaaaagaaggctcgtaaactattcagcaaacttggtatgcctttcaaagttgttcattttcttttgtttataaggcctcaagcaagtgcacggcgtttcgcgcgtatgcatccgtaaatcgaagagcattttgttcgtcatcaacaagccggacgtgtacaaaagtccgggctccgacacatacgtcgtttttggcgaggcaaaaattgaagtgaggcatttgccatcgttcgtttttcagcttggtatttttatttggaggatttggcacaacacgctcaaatcactgacgtggagaatttgaaaccgccctcaatcattcgcgatgttcgcaaccgaatcacaccggcggaggaggaaagcgatggcgaagaggtcgaaagagtactaaaaaaattgataggaacatggagcctggacattgcgacaatcttattctctctcacatctaaatactaactaaaattgtgcttttcaggctgatgctactggaattgaagaaaaggatattgagttggtgatgtcgcaagcaaatgtttctcgaaacaaagctatcanagcattgaaaaaggctgacaatgatttggtgaacgctattatg

SEQ ID NO: 47279 - DNA, 1241 bp, Heterodera glycines
atgaacgtcaaaaaaagcttcctcgcttcaactggtcactatgcgacacgcacacacgacagcgtcgctgatgagggctttaaagctcggtgtaaaatttttgagggtgggaagcgagcccaatttctttcacgtctggactttgacctgggaaaccaagaactttatttgttgaacaatttggatcttttatttacaatttacaaagctcgtgacactttcatcatgcagacattgaaagcagacgatactaccagataccgtgttagagtccatgacgtaaaactgtatgctaaaatgattgatgttcagtcatctttgaatttaagtatctacaaaacgcttgaaaaacaaccagccacatatgcagtgcgaaaaactgaaatcaaatcatgctttataagtgaaggtaggtttgaaattgactacaatgtattcagtgcaacaattcctcgacgtatgacaatcgcacttgtcgcaaacggggcatttaacggaaattatgctctctctccatttaattttaaaccgtttgacattcgagacattgcagtgtatgctggaggcatgatttacccaattgttccatacaagcttgactttgccaaagatatttttgtccgtccttttgttgacatgtatgaggcacttggcatggctaattcagagcgttctttcgacatcacaaaagagcaattcaaatctggttggaccttttttgtaattccactcacatcgacgctcgacgatagcacagggtatgaactcttaagaagcgggacaactagcattcgcgcaacatttaatagtgcaattcctgagggcggagttgaaatgatagtgctgggtgaatttgaccaaatgataatgatagactacaaccgtcacattgtttccgattcaaagcttagttaattaactgtataaataagatgcataatgcgaaaaatgccaccataaaaatggccttcttaaacactacagtcaacgccagtttaaagccagagatacaagtactaacatttgaaaacaaaagcgttcatcctaacctcctcgtgcaacttctattgcttgcccattatctcattgcttttcccgttttcattttatgctggtattctttgataaattttcttaagagaagaggacatatttctcagcgtgatgccaatgagatgatggatgatttgcgaaattaccaattaccaaaaaattcatcaattatttttccaagtttatca

SEQ ID NO: 47280 - DNA, 2449 bp, Heterodera glycines
catttttactgcatttttgttaagaacttctgaaaattgtatttaaaaatggcagaaatgtgccattttcttgcttccggtatgaataaaaatttgcttttttaatgaaaatttaagaaaatatggaatcgttttgctgcgtttgtaaagcaatttatggaggaagtcacagctgttccgtctgcaaattgccgtgccacaccttctgtggcgattctggcggagttgaaaacgaaggcttcggcggaaaggtcgtgtgcaacaactgcgcaaacgaggaaggcaatgcaccgatagcagaaggctcagaaaccaatttgctggaaaattggtgatcaattttgctggctcggtgtggatgaatgatgacacaactgaggactatttgcacaaaatcatcggcgcaaagctgttcgttggcgaacgcctcttggtttgggatgcgtttggcagccacaagagcgagagaacaacgaaggtcgtgaaggaattgggagtgcaaacggtttttatccctggcggctgcaccaaattcatccaggtgctaagtcatctttctcaatgaaattctttgtcttccctaggctcccgatgtctcgtggaacaagccgttcaaggagcgaattcgacacttctacaacatttggatgtccaacggggcggaaaaggtgttcacatcggcgggcaaccctaaggcacctgcacttcaagtgctacttgattggatctaccgatcatggcaggaaatctccaaagaagttattatcaaatcatttgagggtcagttaaaaatggatacaggaaaaaggcttaaatatttaagtttgtgggctgacaacgccattggacggaacaggagaagaaaaaattgcttgcttcaagccggtaggagcaattggaccgattgggaccaaatttttgcgcgagtttagggcaaatgaaacggcgaaagatggacggaaacgatcacgaagaagccggcttatctgatgatgatgatgtagggatggatggagtcggagatgacgacgaattgttcatttattagccccttttactgttgaattgttttttattttttttgaaaaatgtgccaaaaaattttatgaaaaattctatttatcccccctggcacataaatggagactgggagattatttttcaacctagttcgaaaggggtatataattggagacggcagattaatggagactggcatataaaaagagcaaatacggtagaccacattgaaggtttgtcggcgaatctgaggcgaacatgcgcaaattgttcgccgacgccgaggaggaatggcgccgatgcgggcccaactcgtggctgcacataatcatttttgacgaaattgacgccaactgcaaacaaagaggatccatggtaaaaacagtcacaccatttcgacagtaaagccattttatccgcttaaactaggattttgtgcaaatttcttagggcggctcttctactggcgtccatgatacggtggtgaaccaactgctgaccaaaatggacggggtggagcagctgaacaacatccttgtcattggcatgacaaaccgcaaggatattatcgacgaggcgttgctgagaccgggacggatggaagtgcaactggaaatatcactgccggataagcagggccgcatccaaatcctgaacattcacacggcaccgatgaggtgtgaaaaaaaaagaaaaataagagactgatttgtgagagagagaaagagtgagagatggagggagagagaaagggaggaatgactgagagagagggagagagaaagagagtgagagagagagagagtgagagaagagagagtgagagagagagagaagaaattccaacctcctttcccaccaagagaacacaacaaattggacagcgacgtaaacattgagcagatcgcaaaaaggaccaagaatttttcgggtgccgagttggaagggttagtccgtgccgcccaatcgtccgcaatgaaccgattggtcaaaccgggaggcaaagttcagcaggtaaaggacacaaatggacgaaagaaggaaaagccgaagggccaattcaggtggacgacgaagcaattgacgctgaatcggctgctgtacggcggtctttgcctgtggggcgactgcgtctcgcgagtgttggaggggggacgccttctgatcaaagagaccgctgcgcccgacacgcgcgggttcgtccgagctttgctagcgggtaaaaggcagtcaatcatcatcaccagcagatttattaatccgcttaatttaaacaattgaggtcctccaaacactggcaaatcctttttggctgcgcaaattgccaaggattcggagtttccgttcatcaaagtttgcactcccgaagagatggttgggtacagtgaagcggaaaaatgtgccaaaattcggaaggtttaaatttgag

SEQ ID NO: 47281 - DNA, 1652 bp, Heterodera glycines
  unsure (1)..(1652): unsure at all n locations
gtaactcttcgcgatggtcgcacccaaacattggataacgtgtttatacgaggctcacagatccgtttttcggtccttccggatacgcttaagaacgctccgatgtttaaagtaagtaaattagtgaccgggtatttggctatttattgttagtgtgtacaaagattgtcttttttgattattcgatttaaaatttatttttttatatttatggtctgctctaactaacaaattttttcaaaaattccacgaacttatttattcataaaaaggaaaatgtgactgatgtatatttatgatcatttattagtttctgcgtctcgaatattccccgaatattaaaattaatatttcattatcccctctctcattcttcgcctgtagaacatcggtcgtgcgcaacgtggtgcccaaggcatgggacagggcggtgcgcctcgcggacgcggcagtgcttttcgtgggtggtggtcggggcggcggacgaggccgtggcggatttggacgcggtggtagggaagggcggtggtggcggcggaatgcaattccaaggctgaaagcggacaaatccattgaatcgntgggagtgtttgtgctgtccgtttcgatcatttttatttgttttgcacacactttttgttgtttggtctcactgcgattgaatttttttataattaagtgctgacattttttaatatattttctttattttgatccgtcaggcagaaaacttttttatttttttaaaaactttaattccaattttttctaattgcttctgcacgaaatgagtaaggtcagtttctacaaaatggatgcgcttctttttattttgccctttttacaggtcgctaaattacagcaacggctgagtgcggctttaacttctaagcagttttatgaagcgcatcaaattttgcggacggtccacgcgcgactcagcgcggaacggaggtttaccgaactgctcgagcaaatccagtccaccgttctaatattgtgtgaaggtaagtcctcaaaaaagtaaaggatggcttattagcaattgtaccattctttgttaagcaaaagaatacacaagcgcaattgacttggccgagctttacgcggagacactcaaacaaagtgaggccacactgaacacagaaaatctccaaattttgctgacggtttgcgcttcaaattgacaaaattcctcaaacaaaaaaatccttcagatgttttccaatttgccttcaacatttaactctgatagtccatcgtcggaccgtcgcattccatttttgaacaaaacgctcgactgggccctcaaatcggcgaagggaaagcccgaaatgttgagggcatgcgcacttctgcagaggaaatttggcgatgttttcttcagcgaaggacaggaagaacaagcggaacgtaaatacgaccaattggcatttttaagtcaatttcactttttaggttatgctcgctctgctgaatatttgcttgacgaagtaattcttatgctaatcgggcaattattaattgttgtttaggccgaccgaatcgaagggattccaattggtggagaagggagcagtggcgaaaaccgcgaaacggacaatgccgacgacgcggcgcagaaaatcgactccgaactcgaattggactaa

SEQ ID NO: 47282 - DNA, 717 bp, Heterodera glycines
atgatcggaggtctttttgtttataaccacaagggtgaggtgcttatttcaagaatttatcgcgacgacgtgaatcggaatgccgttgacgcctttagagtttcagttatacatgcaaggcaacaggtaatttcatacttcaaaatattttttggttttgctttcagattcgttcaccagtgacaaatattgcaaggacttccttttttcacatcaaaaggggaaacgtttggatgtgcgctgttagcagacgaaacattaatgcatcgatggtcttcgaatttctcaatcgttttgcagacacaatgcaatcttattttggaaaactgaatgaggaaaatgtgaaaaacaatttcgtcctcatctacgaaattcttgatggtaaatttaaaaatatttaatctgttcaatgtagttttttttgcttttagagatccttgattttggttacccccagaataccgacccaggagtattgaaaacatttataacacaacaaggcgtccgaacagcggtaagaaaattatttaaattttatctcttactttgttattacagagtaaagaagaacaggcacaaatcacttctcaagtaacaggacaaattggttggcgccgagaaggcataaaatacagacgcaatgaactctttttggatgtcattgaatatgttaacctcctcatgtcgcagcagggtcctatcaattaattcgctaaa

SEQ ID NO: 47283 - DNA, 1358 bp, Heterodera glycines
tactcgccgcggtggacatcggtcgctttctgtccgacgtggtgctcatttcgtacgacaaatttctggtgtttggacaattttactttactcattttataatagggttgcattggccatatcgaagaagaaaggacggcaaaagcacagagacgaagacggaggaggaaacgacggcggagtggacaaaatgcaaaaagaaaaaggcaaaacggagccgaagggtcagtttttcagtgtttaatgagggtaatttgtgtggcttttatgagcaattagtgccacttccctcagggaaacgtcgtttgcccctttccgtagatgccgccattctgttgcttttctgtatgctcggcggcgtcgtttacattgcagcggcgggcagtgaccacaatttcatcgaaggcttcttcgtcactttcaatttggtggccaatcttacgatgagcggtgaatgaatgatctcgcaaaataaaatgatttacctttttggcactttaccattttaagaaatgccaaccgatatttctcggcttatgacactgatctacatttttgtgttcgttacttttggtaatacatttttacgtttcagtaaaataatttaatttaattctttcatttttttaggcctcgccgttttgtcaatgtgtgccgaccttgcggccagcgaactcaaatggtgcaaaattattttcgttctggatggctttttcaataaaaatttgttttttttcgtgaagggtgttcctgaaaattcattactttggctgcaaaatcaattgggccaagcgacggtccctcaaaaagcaacaacagcaacaaattgaggtcaaagctggcaaagaacaatgctttcggtgtaaatggcagcaacttctgttttgatatccgaaaaatgggggcaattatcagtcaaaatgccagatgggcgaatagggaaaaggacctcggtgatgggggggggggcggggggaattcgagaatttttcggaccaggccgttttcgtacgagcacaagtttttggctgcaacttttttctttgccaaccaaatcaaacattgttggtatcattcgatagccctaggtgtcctcttagcatgtaaaatttcaaaaaatttctttaagattcgaaaaaagttaaagccagcagaatgtcaaaaaaccatgttttcaaacaatattgacaataacttttttgaaccttaacgaaatttttacaagatttgggatttgtttgtggggaagggatagagaaaaacaaatcaacagcttaacatgtttagaagcttttttcaagctattgcttagcgattagacaattagccaaaaagttctattatgaaaatcgcaaaaa

SEQ ID NO: 47284 - DNA, 2428 bp, Heterodera glycines
  unsure (1)..(2428): unsure at all n locations
atgcgtcgtttgtcacagctgtttttgcggtgccattggacgccctcggagattgcggcgagttgtcgtcatgccagcagtgccgccaccgcccgtcccttgtacatggacgtgcaggcgaccacaccgatggtgaggcggacgggggaggagtcaatgtgacaactattaataacttttcgggactgtggtcctgccgaaatttaaaaaatggccagcatctctatctacgccttcggttttattttttcgacagtttttcctgtaatccgaggggatgccgttcaagcgccctattaaaaacaaacgtttttgtataattgcttgaaccaaaaattgttttgtctctttctttgaaaggggttcgatggcaaacgtaggaaaattgcttcattttttgcttccttgatttaaaaaaaatcggaccctgggtgaggaaggcgatttgatggaattggtcactaattttttggacaatttgtcctcgaggtttaaaaactatataaatgattggccgtcgtgttgttgttgacaagcaatttctggctatctatcaccgaattatgccctgattttttcgccaggacccacgggtggtggacgccatgttgccctatcagttgaacgactttggcaacccgcacagtcggacagtgagtgaatttttattatttgagagcagttcgtcgctctccccgaatttttctttccattatttttcaaaaaaaaaattcatttttgaaaaaattttcaaaatttaaaaaatcggttcggggagacgtattgcacgctttttattatgccgtacaacatatcagcctttaattgtaccaccccccccccccccattagcatgcctacggttgggagacggaaaaggcggtggaacacgcgcgacaacaggtggccgaactgatcggggcggacccgcgcgaaattgtgttcacttcgggcgccaccgagtccaacaacattgcggtgaagggcgtggcacgcttctacaaagtggccaacaaaaaccatgtgatcaccgcacagacggtcagtggggggagggaagggggaggacaataaatcggagcaggtcatccgccagaaaaaaatttttagatttccagacccttgaaatttttcgataaattttgaaatttttctaagaaattctctggcgatttttgaaaatttttataatcaattactaacaaactgttttaccaagaaatcgctaaaaagcatttttgaaattttcttaaaaactttctaagatttttttttttgaaaaatttctaacataagtggtttaaaaaaactcaggggccgtgaaaatgaagtacacaccaagaaatacgcatttgttgaatattttattcattttattaataagtttgaataagttaatgcaagtcggcaccgctggactctaaaatttcttgatatatttttttaattcgatccaaaaaatgcgcagaattggtcatttttgggcaaaaaatccgttcaaaatcctatttgttcgtgcactgcgcctaataatattagaaaatgaggtttttgccaattgatagaaaaaatgagtgaaaaaatggcaaaaaatttgccgattgatcacttggtattttgcaggagcacaagtgcgtgttggactcgtgccgtttccttgagcacgagggcgacttccacgttacgtacattccggtgcagaacaacggactgatcagtttggaggtgctcgagcaggccattcgccccgaaacatcgctcgtctccatcatggcggtgaacaacgaaattggcgtgcggcaaccgctcaaggaaattggtaaagctttttaatttgaaaatttttcagcgttttttagaattttatgcacgaattactgttttttccaaaaaaaagtttaaacattttctccgcttccccttccctactttttaattcgaaaatgccctatagttttatagatctttaaaatgctttcttctgataaaaaaagcttaaaaggatgtttattttatttttttatgggaaaagcaattttcagttggtctatgttaaatttgattcatttttattgaaaatttttttacaacttttggggaaatgttgaacaaaaacaaaaataggtacttaactccgacagtatacaaatgcttcgtattgtctgaattgggccacacttaaagaggagctgaaaaacgctggtcatccctggactcgaattcaggggatacagtcaaaaattggtcccatttttaaaaatttttttagcgttcctaatttaaaaaagcattggtcttttaatgcctttttcttccaaacccaggcgaattgtgccgcaaaaagaatgtgcatttccacacggacgcggcccaagcagttgncaaagtnccattnaatnttnacnaactnaagattnatcttataaag

SEQ ID NO: 47285 - DNA, 1862 bp, Heterodera glycines
caactgatccgcgacggatggcaggtgaaaatgcggcttctgggggacaaggctctagtgcagttcacacgaccataacctcgactaaaataatatgacaactttaaagcaccataactttttctagaagcaccgaaagtaaacatttttttgtatcattcgatagccccaagagtcctctattagtctacgaaggtttaaaaaatttcactcaaaattcaaaagtttatgttcaaaaaaatttttttttatgttgctcataaattttttgaaacatgcgaaattctttgaaattgcaggctaatacagatcttaaggggctatcaaatgactaagatttttaattttgatgcttctaaaaaaagttatgttgcattaaagctgtattattatagagccgagaaacattccaaaaaagcaaactttgtattatttgcatttatttttacgcctcttaaaattctctactcgaagatgcaaaatcctttcaatcagatcgaagagccggacgattggctccgtttcggcaatccgtgggaaaaggcgcggcccgagtatatgcttccggtgaacctttacggccgcgtggaaaaggacgtcaatgggaaggtgtttggagggtcaccgggaaacgcgggacattaaaaaaaacattcagagccattggagggacacccatttgatttttgcgatgccttacgacacgccggtgcccgggttccgcaacaacgtggtgaacacactgcgcctgtggtcggccaaggcggagaaccatttccccctgaaattttgtgagcccaaattggaaatttaataattttggaacatttaaatctctaaaatatacaattttatagttctcaaattttatcccatttgccccccccccctctctctattaaagtgctcttttgtttatgcctttttgtccgtttagtcaatgacggcgattacatccaagcggtgatggaccgcaacctttcggagaatatcactcgcgttttgtaccccaatgacaacgttttcgtcggcaaagaattgcgtctgaagcaggaatactttttggtggccgcaactctccaggatatcatccgccgtttcaaatccagcaattacggaagccgggacccagttcgggtcgactttgacaccttcccggacaaagtaagcaaatgcatggaggaagaggaaaaggggaggcaatagggaatttcatattggacggacagacgcccaaaagtgtgttttatcatggcctgtatcttgttttttttaaatttgttttaaaaagcaaactaataataattttttaataattggcagtaaaacatgggtattcgaaatgacaaactctaaaatattatcaaggaaatccagtttttcgtgactagcctggacatggacttttttcttatttgacatggacatgagtttcccctggacaaaaaaaaggtccagaataatccagacctggatccagttcaactctaattacaactttttcctgatcatttaccattctttccctgctctcaggtggccatccaattgaacgacactcatccgtctatcggaatccccgaactgctccgtctgctcgtcgatgtcgaaggactgagtttcgacaaggcatgggaaatttgcgtgcgcactttcgcctacactaatcacacacttttgcccggtgggcaaatttagccaaatcatttggcttttttgcctttgttctccctctgaaaaatgtccgttctttcagaagcattggagcgatggcccgtcgcaatgctcgaacaccttttgccgcgtcatttggaaataatttatctgatcaatcagcgatttattggacgtagtgctgtttg

SEQ ID NO: 47286 - DNA, 529 bp, Heterodera glycines
atgccaatggatgaaggggacgatgccgtcgttgaacagccccaacagcttggtgccggggcgccggaccaatccaccggtgcggagacggtgcagcaacaatcatccgcttccgtgcaatatgcgcgtccgttggtcgcacgtccggtgaccgaacagcaaatccaagcactgcgaaacggtccgagttggcccgatcatacagttttcctctttttggtttggtcacttaaaattacccctttttcggcaaaacggaaaattgtgcctgaattgtgttcataaaggcctataaaaacgccctaaatttgcagggagtgatgtgcgtccgggcagttcgttggccgacttctacagggacttggagaattatcggccgaccatcccggactcggtggcactgtattacatgcgcaagaatggcattgcaaatccggacgtgcgcgtggtacgcctgttttcgctggctgctcaaaaattcatttccgacatctgtttggacgcaatgcaacaggcaagacacaaataa

SEQ ID NO: 47287 - DNA, 1789 bp, Heterodera glycines
gaattttacaccccaacggaaaaatacgcgctgaaaacggcccacaagcgtccgcgtcggcccaaatcgttgcgcatttacgagacgcatgtgggcatttccagccaggagcccaaagtgaacacttaccgcgattttgccgacacagtgctgccccggatcaagggacaaggttcgggaaagcggaaaaattttaaaaatcaaaattttttgagtccaaattttattattttttaaatttttccaaacaaaattttttttattgttagtaatttctgacgggtagggttggatgattgaaatgtggcattttgttttttaaattgaaattattaaaaaaatttatttctaaaaatccgttatggcgatagacattctgaatttcgattttaaaattaacagtttgatggtatttgacagtgttgccacacgaaaatttctttaaaaaataataataaattttgaatttggttgaagtacatcaccttttttttcacttacacattttaaaatgtcccaacttttcagggtacaacgccattcaagtaagtgggccggccattttcatccaattttaagggtttttgatcaattttcattttatccaccattttagctgatggcaattatggaacatgcttattacgcctcatttggttaccaggtcaccagcttttttgccgcttcaaggttttgcaattaggaaataaatatatacaaaattgggatttacgaaaaaaagaaataaaatgtttgtcgaatttaaatgattcactaaaaatggcacattgacgactttatgacaaaaatacaaaagcttggaccaaaaggaaatttcgagtttactttttttgcttgacatctgattaggaattcgaatttttttttttttgcaaaaaaactcataaattaggttttatagactttaaagtctaactagcaaattttggcggtttttcatacaaaaaataaaacaaaaagttgaaataaatgagccctaaagctcgtccctttttgtaatttattcctcttttttaatataaattgccattttttccacagtcgttttggcccgcccgacgacctcaaatatttggtggaccgtgcccatcagttgggcatcactgtgctgctcgatgttgtccattcgcatgcgtccaaaaacgttgcggatggactgaaccaatgggacggcacaaatgccgggtcagttttttttttttgtacaaattcaagcccttggggtctcgtaaatttgtaaaaaaaaatttttttcaaatcctttcgttttcattttcagaccattttcccgatttcctttccacgccatcgtttcaccaaaccaaattttgagtgtctaaaattaccaatttttttcaaaaatttagtcgagccttgtaaaaattaagcattttttctttgcattttgtctatatttttgccaaatcttctatttttctccacttttcagctacttccatgacaatgtgcgcggctatcacacccaatgggactcgcgattgttcaactacaacgagtaaattatttgttattccttgtaaaattttttttctttattccgtgtaaaaaatttacatttaatcctttaagaaccgaaactttgcgctttttgctctccaatttgtgctggtggattgatgagtacggctttgatggtttgtctgcccattttttcgtttttttaaattttttttttgaaggtttccgcttcgacggcgtctcatcaatgctctaccattcccacctgatcagtatgttgtctaaatga

SEQ ID NO: 47288 - DNA, 469 bp, Heterodera glycines
atgcaatatgtgctgtccgtcttgtggtcttccgacaacaaatttgtgttgtccggcagtgatgacatgaacattcgcctgtggaaggcaaacgcagccgaaaaacttggcccggttagtcattttgatggcttcaaccagaatagataataaaaagagcattttttttagctctgtccacgcgagaaagcggcgatcgaatacagccagaaattgcgcgacactttccaaggccatccggaagtgcggcgtatcgtcaaacatcggcatgtgccgaaagctatttacaggttgtttttttcgatttaaaaaaaattcaattgttatgccaaattcacagtgccacgcgggagcacagaatcatacgtgaatcacagagaagaaaggacaaaaacaggcggaaaaacacgaaaagtgccgcaacagaaccatttacgtcggagagggcgaaagccattgtcagcgaagg

SEQ ID NO: 47289 - DNA, 2261 bp, Heterodera glycines
atgaaagtcaaagtgatctccagacatccggatgaataccaacgcgagacaaaacatgacatattcaagggttagcagctttatgaagatatttttggtgatttttcgcatccaaaattagtgcctcggaattacgccgccccgcccgacccatttcagcagcaggtggagtacacgcgagcactgaacgcggcaaagttggagcgcatgttcgcgaagccatttctggctgcctttgatgggcacaatgaggcggtcagttggtgttggcatttcattttttattggcatttcggtatccccatttacctacatttcttcgtatattttcaaattgtttaatccatacgttcgcaggtcaatttgttggtcaaacatcccacccgtctgtccaccgttctgtccggtgcgcgtgatggccaagtccgagtgtggcatttggccactcgccgctgtttgcacgtcctccaggcacattccggccccatcaacggtctctctgttgatgcatctgacggtttgcactttgtcacggttggccaagacgcgcagctcaaagtgtggccgttgccaattgaatttgatggaaatgctcagccaacgcagcccgtccattcggtcggtggccaatgaattggccttttcttttgtgtaacgttctgtccctttccttggccattcgcagttgtcccttgacggggtccctcacggctgttcccacgtggcgatgtccagcgatttcgtcacctgtggtgagggcatttcggtgtggcggttgcacaggtgcggtgtccagacgtggtgtcctcccaatcggtgtcatccttttcagatcttcgcccattcgccattacgctgttgggcccaacactgtgcagcatattaactgcaaccccatagaggaaggcattatggccggatgtgccgcagatcgctccatttttctgttcgacacacgccagaaagtgccgctgagccgcgtagtgctcaaactgaggacgaacaggtgcaaaaatgccgtttaataaaccaaatgattttaagcattgcctggcatccgcttgagccgttcacttttgttgctgcaaatgaagactacaagtcagtctgacgaacctatcattccgttgtttattgggtatatttttgactttccccgctttttgtcagtttgtacaccttcgacatgcgcaggttggactccgctcgccacgtccaccaagggcacacctccgctgtgatggacgtcgactttgcgccatctggtcacgaatttgtcagtgggagttttgacagatccttgcgcattttccctgttgaacaatggcgaagtcggtgagaaacatttcccccatggacgtcccaggattatcagttaagggggggggcaccattcatgggcgatgagactttctgctttcacacctctttttgcggcggggcgcaaaaatattttttgcaaaaatttaaaaagtgcaagcaacaatgagaaaatgtaaaaaaaaaatacaactcgttaggctttgagcctattaattggcactaaaaaaaaattttttgtttttgtaaataggcaaaaattattatatgtgggtcctttttatttatcgatgataaaattgggcgaagccgcaaatgtctggacaccaaagtttacattgtctagccccttaaaactttttaatattttatttttgcgtcgatgtttgtggatgcatctcccctatttcctgtttataaatttccctcctaatttgtaagggaagtgtaccacaccccgcggatgcaatatgtgctgtccgtcttgtggtcttccgacaacaaatttgtgttgtccggcagtgatgacatgaacattcgcctgtggaaggcaaacgcagccgaaaaacttggcccggttagtcattttgatggcttcaacccgaatagataataaaaagagcatttttttagctctgtccacgcgagaaagcggcgatcgaatacagccagaaattgcgcgaaactttccaaggccatccggaagtgcggcgtatcgtcaaacatcggcatgtgccgaaagctatttacaggttgtttttttcgatttaaaaaaaaattcctaattgttatgccaaattcacagtgccacgcgggagcacagaatcatacgtgaatcacagagaagaaaggacaaaaacaggcggaaaaacacgaaaagtgccgcaacagaaccatttacgtcggagagggcgaaagccattgtcagcgaagggttggaa

SEQ ID NO: 47290 - DNA, 2008 bp, Heterodera glycines
ctttcatgggaagaaatttttctttcatatcttcttgacgacgaatgatgctgatgatgttggtaatggtggcgatgggaatgcgtcgtcgtctgctgctgttgcgcgtggtggtgccgacctttgctggacgacgaatacctccgtccagcacttttcgatgactttttggccctaaaactaataatttgtctctgtttctggcccattcagtgttgcgctttggctgacttttcttcgctgcccggtgaaccttcgtcgtatgtgtcggtagatgcacttgactcggaactggatgaagatgaggaagaagagcttcgctgccgtttcctctcccttctttttgtcctttcgcttgaccctttcaaatccatatttgctaaaatgaataaatgattaatatttttagcggataaagaattattttgaggatttagaacaaaaaaaatatttcaataattaatggccacaataggaaaacattgtaatttttcattcatccccggactcatcatgacgaatttagatacaaaagatccctagttcttgcctcttcctacctaatttaagtataaaaaactttccactcaaataggtatgcgttaaaaaaaaatttactgtgcgaattctgctttttccagataaagaataggagtatgccaaaatgagagtgtatttttctctgctctctctaattattatgcgttatgccaatttgaggtttcgttagattagagataataaatttggtagatcagcaaaattaaacgagagttgatttgactcaaattgtctttccctagggaagcttatgctataaatatccaaattccagaaaattttctctttgcttctctctcctctgtttttcatttccttaaaagcggcaatgaccagtcgaattttgagctgcaatttgcgaaggtacttctccaagatgaaccaacacatcgagttcggcacaacgaagagcgcttcgtccgacaaacaatcgccgccttcccctacaaacaatcagtgggtttagaatagataggagtggggagggtgaaaaaaaaagggaaagaaagggacggacgaccaatcacatggacaaaaatgcgtgatttgataagcctaccgggtcgaacaatacaaataattttggttttacaggtaagcgcaaagtggacgataaaaaatagtggaatatttctgtttctagaaggggcagggctcatctttctccgttcctattccttctcatccgacagaacgcaacacgagggaatgagtcaggaatgtcgggagcaaatcgagcagatggaaaagctgaagagcgacaacgaaatgctgaccgacaaatacaaaagaacacttgcggacatggaaaacttgcggaagagaacgcagcggcaaattgaggaggcaaaactttttgcaattcagccattttgcaaggatttgctggaggttagtgaaattcatactcagttaagaaaatatattcaacacatttgttttataaagcccgaaacgacgattgagtcctctttgatttttaaaattccaggtggctgatgtgcttgacttggcgttgaattcgttggaaaaaatgaaaacggaggacggtgccgcctccttggacagtggagtgaacaaagggatcaaaatgacgaaggaagtgttgctgaagacgttcaaaaagcatgggcttgtaccggttcaacccgaaggacagaagttcgacccgaatttgcacgaagcggtgtatgaaataccgaaggaccaggcaagaattgcaacaaaagggcatatttgcaatttataatcagcaaaattcccaaaaggtcctattatatgtgcctaggagtatttggcattctgtcattttaatggtatgaagtcaatgaatatgttcaatttgcagtcagataggcctgccggtcacattgcgcatgtgttgaacattgggtacagtttgcacgaccgtccgattcgaccagccaaagtgggcgttgtgaagatg

SEQ ID NO: 47291 - DNA, 1338 bp, Heterodera glycines
gtttttgctgctttgctccaattgtcggtggcatttgctgcgtaaaattgcctatgatacactgagtaacatcgcaagaaatgtttgtttgtttgttccccgctaataaaaatgcatttctatcagataaaattggtcgacaaattgtccaccgttttgctgaacaccgtccaaaagggtctccactcggacgacaaatgcaaagtgatgcgatccatggaaattgtggctggtttatgcgcaacgccaaccaacgagtcaattgtttgtgaattcttcgaagaatcggttccacgcttttaactgtgtttttagagtaattattaatttatagcaaatcataccgcggattttcgctcttttgtcactgaaggatattttgatgtgtatgtgtgccatggagtccgtgttggccatttccgagttgggacgggtcgcgtgcgaagccgtcgcccgctgtgaccgcgtcgttgaaagtcagtggcaaattaatgctttttcattttataataattagtttttaatcatttctgctgtcttttagtgctcgtcggctttttgaccaccgatgccctttcttttggcaccgtcggtttggcggggatgcacgtggttgaggtgcacggacaccaaaccaggccttatgttgcggttagtttccgtcttgaaaatcacaattaaatgatttaaaacttcgcaaaatgaatcaatttttagccaaacaaaaagaatcctcccccgccgcttaaacttcaacccgtacaaccgcccgttcaatatgcgcaacaacggcaccaaacgccggcgagcagtacaacaacaacggcaccaccatttggtgaagcgatggaatttgcaataaatgctcgcacagatactcttgaaacatgcccaggtaattgatattaattaattatccctccgaatgctttcgtctccttcagatgcctttcatcgtcgtgcaaccgatggcaatgactctgctcaatttgcctctcatcagcgtcatccaccgactcgcaaaaaagtttatctgaaatcttcgcgcctgccttttctcaaccaccgacaacaattggccaccgatgctccgcctttacaaaatggcctttcgtcaattgctgccgcggttccgtcgtccattgaatctgtggcgaatgaacgcgactttatgtgcgaatggctgatgcagtcggagggggacgacgattggtcggacgaggagggcacagcagcggggccaattgagccgtgcgcgaggtgtgccgggaattgcatttgtagttcttatacaaaaattccagactttcccggcggccgaaccccattgatttttga

SEQ ID NO: 47292 - DNA, 1445 bp, Heterodera glycines
atggagaatcacctggacgagcaggtgatggtgcgaaactgttgcctctgtttgtgtcaggtattttgctgcctcgatttcatttcttatattccttaaaataccctcccgttcagttcgacatccctcaagacattatgttcggttatggacatgtcgccaaccttctcgtcaaagtgctcgaaactcacagttcggatccactcacccaaaggattgtcgtatttttactgaattcaatggcttgtcatgtggaaggcgtgcaaaagatcgaagtgggcgagttcggagcaattgaggtgcgaatcccccccccccccccgcctcctgatttagcgttttgcagataattctacaacaaattgcacgcaaacttcagtccaaccaatgcgacgatgttatggacacggcttggagttttctttggaatattacaggtcaacttttagtgtactatacaaattttggtagcagctcgtttccgcaccgtatcagctcccccccccctggcttaaagctttttcgaaaatttattttctttgaatttccttgtaagaagactttgtaagattttttcttgaaaattttttaagttagtaaaaaaaattctattttctctggggtggggaaacgatgcggggtaggaacctagtgcaccccacaaattttcacaaattttgttaaaagcttcagtttagatgagacccccgcaaattgctcccgatttctgaaagccgaggggctcactctgttctacagatgttatgtcaaatttcccagtcaaatggaattggtacggaatatgatgggacttatcggaaacattgcggaagtgttcgatttgcgtgatcagttgatgattgacgactatttgaatatattttggtaattgactatctgtgcctaatgaaaaactcactgaaccccttttcagcacactgcttgacaatttgagtgacggaatcgaaatttcgtataatagcgccggcgttttggcacatttggttagtgatggcgatgagagatggaagacaacgaaggtgaaaaactcgcgacgccacgtcagcgatttgattgtgcgggtgcgtgttggccggcagcgaaccattcattaatttatagtttagtattttttctttaattcttttgatttaaggctaccgagctgtgggatttgaatgctcgtcgcttcatcaactaccgctcctttaaaccaattctcggtcttttgtcccaatggctcgcgattggctctcaacaatgggccatttgggcattggcaaatttgactaccactgaccgtgccaaatattgccgttttgtggtggaggagggtggcgtagaattggtggaacaattggtcaacagttcgaactctacaaatgcaatccgaaatttggcacagactgtgctcaacaacatcgaagaatggtgagtttggatca

SEQ ID NO: 47293 - DNA, 1911 bp, Heterodera glycines
atgcgatcactgcagaaatcaccatattattgcggacaatttgggctggttcagcgatttggacggcaaaaagaacatcgaagagattttggcatcgaaaggagaggcgatcaaaaaggggacggcggtgttggagatggaagtgccagcggaggaggagggggacaacgccaaatacagcaaataaaaaagggtgatgatttaatgaaatttgtgaccgaatagactcaaatttgcgtcgaccttgccctcatctccccattctttagacttctcccaacaaatgttcgaccacatcggtgccatcgatgactccccgtcggcgtcctcttcgttgctgattgccatcagcgagttgcagcgggcactgctcggcattggctcggctgtcatgtcactggtggacccaaaacggggcgacatggtcgccacaatgggcgaaacgacggtcagctcaaaaagagaggggcgagggggtcaattcgaatttgtcctttactgaatttgttgaggtgggagctgttcttgtcatttggcgtaagaatgcattttacggaatgtttagatttttgaagaattcatttttttgcttttacctaaaattgttcccaaactttctttttgtacattttcctatttcgtggaaatcccattctatttccgtgttttttcacttttcaggttccccattccttgctgaaacatctccgcgatcggctgagtcgtgacgtgagcggcgctgagcttttgcggaatcggccgcgcatcagtggcgaaaccatcgaccggcgatggttggcgacgcttcccgacggaacgatgggcagggaatatttaaggtaattttcaaaaaatcaatccaatgaaataggaaattgagcccaaaatcaatctcccccaccctcattattttattttcaaaagcagaaattcaattgtttgttatttacaaatagggcatcctttattcgccttttataccacacttccgtttttcggtttctcgattcgctcaacacttccccggacgcgcgaccgcccgttcaatttgttgcggatgaccccgaattggtatacgtaatgcaaaggtcccttttttgcgtttttattccaattttccattttctcgcttattgtcagatatcgcgaaacccacgactttacgcatgttctgttgcaaatgcgcccaaatatgctgggagaggtaaaaaatggcccattttcggtcgataatattagataaatgcacaaaagcaaaagtagcattgtttttaaaagccaattaaatggctttgtctttgcatgggaattgcgaatgcacgcgtttttcaacgttttagcgaataattataaaaacttttttgggaatcttggatggctttatttctttttaatttttgatgctccctgactaattataggatcctggaaaagtcttgtatacagaaccatatcctttccgggctcactgaatgctatcaattttttattttaaacgtaaaaattcttcaaattaccaggtgaccgtcaagtacttcgaggccgttcagcttggctttcccatgtgtgttgctgccgcgattttcggcgcacttcgacttggcccagtgtaaatgaccaattactccctctccccttctcatccttttgaaaaatggcaaataccaatattatggggtgtccatttgacttcaaattccttcactacttctccaaatttccattaaaataatcatttttagccatcgtcgtcagctgatcgaacggaacattccatgggttgtgcaacaggcggagaggggccgttttttgttggcgttggactgggaacgccgttttgagcagaaaatagccgatttgcagagggaatgctccatcgaaccattttcagcagaatgttcaaatgaatga

SEQ ID NO: 47294 - DNA, 1493 bp, Heterodera glycines
atggacaccgatgatcctattctgaaacatatttcaccaaattcacgtgcatatgttgttataattgcaggaattattctgcaattcacttacggactcgtgtacacattcggtaattcatttaaattatataatttgaaattaaataaatttttaaattgatttatagggaatttgctcccatatttggcatcatatttacgctggaaagtcgatcctgagttaaatgatggcacattaatatggtttcaaagtttgctcggtaaaattttacaaaaaatttgatttaaatattatatcggaaaataattttatttaaaaattttacttaccggtaattttgccttcaagttttttggtcttaatatggtttgaattgacaggcattaatttctaagaatgtacaaaatttgagaaatccaaatgcaatcggaaataaaattataagcgccgctagaaaatttcataaaattttctttaatatttatgacaaattttattaaaaaacttttataaacttaaaattaaataaatgttaaatatttagctggatttcctttcgcttttcttgtcggtggttatcttgagaaagtgattggcgcacgatggggagcagcatttggctcatttctgtacactttgggagtggcactttcttacttggccatacaaaaatcatatttttcattggtaattaattcctaatttatatttctaatagctaatgctttatcattcattcagttcattacactgggattttttgctgcttttggccatggcgttgcatacaattgtgtgttgacacaatgccagaaagtggatttcattttgaatttattttttcatttttatacgttcaacttaaattaagtcattatttttgtaataatgttttggttacataacaattttttgtaataaattgaggcacttaattctaatttttaaatgtataattaaggtgttatttaataatatcaaaattttttatttattcaaaatgtaaaaatttgaaaaaatggaatattattgaaatatcttttttaatattggctgcataattagatgaatagttattaattttttgagtaataagaccgtacataatttaatttaatttaaattttgtgcaatttatttaataaaaaattaatgaaaaaaataattttataaaacattaatttgatttattcattttgttttttaagtggctacctcatcgtgttggcctcgtcagcggccttattactgctggttttggcagtggtgccttcataatgtcaccaattcagaccaaatacattaaccctgacaacctaaacattgattctacagggttatttaaattaaaatgaaattttaaataaatttatttttgcagttattttacacaaccagaattgctggagagagtgccaaaaatgttccttttgttggccaccatctttggcacattgcaatttgttgcattattttttattgcagatcca

SEQ ID NO: 47295 - DNA, 2152 bp, Heterodera glycines
atgcccgcggatttgttggaccaacgactgcagttcaaacgacaccatgtggtcaacgggttcatccacacgtcagcctatgctcaacggtctgttcatgaaagtgcgtttattgttagtcagtccttttctaaaatttgttagaggattaaaatgttcgaattttgggttaggggttcggaaattcgtaaaaatagagttaaaattcatgatcagcggccccgaaaacccatggaaacacgtttttatcattaaaaacagaaaaaattttttgcgccgcccgcacccgcgcagctgctcgatgcgccgcccgcgcagccgctcgaagcgccgcccgcgcagccgctcgaagcgccgcctgccaactacgagctcattctacagcaaatgacaatgctgagcgacaccctgcaaaacatgaacgacaattttggaggtaaagaatgtcgtccctaacttcttttttattttgggttaaaatcagtttcctagcgtttttgagagtgatggccacgaatatgaaatcgaatttgccaaattccaaatccctgacccgaattcgaacaaaaaataggtgttaaatgaattcgaagcttttacccaagaaaatgcatctttgaaaaagaatttcactttttcgaattcaggtccggggttcggattgggcaagtccaagttcagattcgtaagcagcaagcaccctcgaaacccctaaaaattatttttgatcccaaaattaaaaaaaaaaaaatttccagatcgaatggacagaatggaagtgcgcaacaccatttccatgtgtgcctccattttggcgatcgtgatcagcggcgcagtttttttttgcaaaaagtgatctgaattttttttttttgatgacaattttgttgtaaaattattttgttttggcttatttatttgtcagttccaaaaagcgtaggatttcgcttttcaatattacaaatatttcattattttatcactgccattgatttctgatttgctaatttgtccgtcctgacgaagaggcatgaaatggtgagtcgaagcgtgaagattcttcagaatgctaaaaccaaacttaggctctttgcatgtggcaacatggagaagaggcactggccaaggcgttggtggcatgtcgcatttacaaaagtttggccaatgaggcagcggaggattacttggaagtggaagtatgtgaggaacttaagacgtatgccgaagtgagcaaaagcattcaactccttaaatcacttgcttaattaacaatttgcacgcttttcaggagtttcggcaactttcactggaattgctcgaccattgctataaagaagatgacgcacaaacgcttcagttgctgacatacgaacttagctattggggccaccagacatgcttgtcactggccgtcattgtgaacaacaagcaattcctggcacacccttggtagcagttcttagcattgattgctgctagtaattgtcatgcctttttagctgccaaattttgttggccgacctttggcacggcggtctccgtattcgaagcaactccaacatcaaagtgctcatgggcattctgtttcctccctcaatctttctgctcgaattcaaatcccgcgaagaattgctgcttcagcctcagaccgcagctgaacatcagaaggacatcaacgaatcgtcgtcgtcctcctcagattcctcctcttcgtcctcgtcttctgacagtgaaaacgacggcgacgagtcggacgcgggcgaaagaggcggtgccacagccgaagagcgccgacgcacgtcgcattcgcacggaagcatgcagtcgttgaacttcacctccgtaaaacactccatttgcttacatatggtttatcttcggttatttttcagatctttaaaagtaagcgcaaacgccgtcgtccttcccactcgcgttcttccaccacggccaaagaggacattgagatgagcaaacagaggaaccgaggttggtggttgcctccgagtggtccaatccccgttcgaccacccacaacttctgcttagattgccaatgccttttagtgacgagtcgcagttggaggctttacacgctgttcaatgtggtctactggacttattacatgttcattgccaagtcgacgacgtga

SEQ ID NO: 47296 - DNA, 1030 bp, Heterodera glycines
atgcagccgacgctcgtcagaatccacccgccggccgtcatcgtgggcgacatccatggacaattcgcggacctgaagaagatcttctcaacgcatggcctgccgccggagcagcagtacgtcttcctgggcgactacgtcgacagagggccccaatcgatggagacgatcatcctcctcttctgctacaaggtgtggtttttgggggatggggggagggaacccccaaaaaatgaaattcatttccccccatttttcaggtgaagtacccgtccaacttcatgctgctgcgcgggaaccacgagtgcgccaacatcaacagagtgtaagtgaaaaagttttttgtgtgtttttttgtgattaatcattcccccccccccattttcagttatggcttctacgatgagatcgaccgccgttacccgcgaccgggcgctcgtcgactcttcgacctcttcaatcaagtcttcgcctggatgccattcgtcggactggtcggcgagaagatcctctgtaagttttgggggagggcaatttttggggttcaataactgttttccaactgattttcaggcatgcacggtggcatctccaatcagatccgcagcctggaccagctcagcaacttgcttcgcccgcagaccgagccactgcttcgttcgctggaaattgacctcctctgggccgacccgtcgacgagcatcacaggcgtcgccccgaacaacagaggagccggcgtcatgttcggcgcggacgtggtcgagagcgtgcgcaacctgctcggcatcgactacatcgttcgagcgcatcaagtgagttttttttggcttttcatttcacttttgctttctataatttttccccttcccttctttttcagctcgtcatggacggcgtggaatacttcgcgaatcgccacctgatcaccctgttctcggccccccgctacaccggcaagaacaacacgggcgccacgctgctgatcgcgccggacctgagccacacaatcacgcgcttcccgccggcctga

SEQ ID NO: 47297 - DNA, 1506 bp, Heterodera glycines
  unsure (1)..(1506): unsure at all n locations
gatttgactattttcttttatacaatacgaaatgtaatgcatgcccggtgttccacactttgtgagcaaaatttcgtcacttgaaggtaacgagcagaagaattaacgccaaatttaatccaaataaaagtgaattgntaatagataatcaaattgctgtttatttttcgcgtaatgtttcaaataagtaaattcgctttgagggatggagaaagaagccaactaaagataaaaaagacagactcggagatagaaatgagatgcaagaaatttctcgccttttaatactattttttaattttaggactacctattcccttcgtcacttttggaaatgtttacgaacaatttatacttaaaaaagagtgaaattcatttacaacaaaaactgtcgcaattggctgccaaacatcaaaacgtctcaattgggtcgtatccgaccatggaaaacaagtaaacttgaaagctttgtgtcgcagctttatttacctttccgtcagttattttaaaactcgtctaagcattgaaagcatttcgaaggaattaggcaatttggcttatgaagaattggcaaatgaattttcaggtaattttccagataaattaaaagtaatttccaattcattcaaagagtgggtggtgaattacgatcccgaaccgtgggaggattgtgtccataaattggacatttattgcgcgactcaaaccaaggaattttctgtcaagcttttcaatgccatcgcaacaattgacgaaattttggacaaatatgggtgagtgcatctcaatctaaacatcctccccctccccctcagctctttggatcaattggcgatttcattcaatggaggcaaagattgcacgcttcttttgcatcttttccgcatttgtgttactaaaaaattcgggaaagaaaagcgaatcgaagggtttttcgtagaaggcgatgagttttgcgaattaattgcatttgttcggaatatttccccaaagtacttttgctactcattattagcttacataaaaaactcatttgtcgttgtttagctactcgttggatttgctcgagctgaaaggcgctttgaagaaaggattggctgagttgaaagtcgttcgaccgaacattgaggctgttttgatgggatcgagagcgacagatccgagagggcgcttcatgaagagtaaatgcgaatggacagatcagggttggcccagtttcttgagggtcggtttctttgaaccgacgtttctgttaactcctctttccatttttaaaggtttgccctttgttggactggacttacaccgaagtttggaagttccttagggacatgtccatcccgtactgccatctctacgacatgggatacacttcgttgggggaatgctcaacaactgggaagaacccagcactgaaagtggagggcacggaggacaggtgcttattttgtgaatatttacaatagggttttttcagcggtaaaaaaagggagcggtgttattttc

SEQ ID NO: 47298 - DNA, 619 bp, Heterodera glycines
atgtctgcaaataatggaaaggaagataagaaggtgctaacagaaatacccgaaaatctcaaatatcttgtcatcttgctggtgaaaaatttctatgggcctgaatattacgttctctgtgaatatatacaaaagagggtcatcatcaaagaagacgaattgcgtgatctatgtaaaattgaccaaagacaattgagaaagttcctcattacattaaaagtttttttttaaaattttcttttgttttcgttttgttaatttttaggttgataaaattgtaaaagagcgactcgttccagaagaaggtatgtatatgcatataacatgtgttctttatatgtataaataaaatttagtcgatggaaagctacgaaaagtaaattaccttttcatcaactataaggccgtgattaacgtagccaagtacaaaatcgatcacattcgtcaaaaattggaggttcgcgagaaggatgatgttcataagtacgttttagcaacttttttatctacaaattacttaagagcacattatcgctgtactggagcgaattgtaaaagacaatatgatgcaatggatattggaaaaatttacgatcctttttctcaagaaatgaggtag

SEQ ID NO: 47299 - DNA, 1303 bp, Heterodera glycines
atggacgttgagcaccacgtggctaaattgatggttgagctgtcccaatcgcaggacgacgaaattggcgatggtaccacgggagtggtcggtaagtgacaaagtgcgtgctgtgctcattgtaagttttgccgaatccatgtagtgttggccggtgctctgctcgaacatgccgagtctctgctggacaaaggaattcacccgacgaaaatagccgacggattcgaattggcatgcaaaaaagccattgaaaagttggagtcaattgcgcaacaatttcccatcgatgacagagaggcgctggtcaaaagtgcgatgacttcgctcggctccaaagtgtgcgtttgtctccaagttttgagttaaaatatcattttagtgtgaacaaatgtttgcgccaactcggtgaaattgcggttgatgccgtcctttctgttgccgaccttggacaacatgacgtgaacttcgagctgatcaaagttatcggaaaagtcggcggacgcatggaggagacggcactgatcagaggagtagtcattgacaaaactttggtgagttttaaggattcattgaaaacaacgcctttcaaatgtgcagagtcacccgcaaatgccgcgtcgcattgaaaatgccaaaatcgcaattttgacgtgcccattcgaaccgccaaaaccgaagacaaaagtgagcagattttcaaaccaacacaagaattaaaattgatttcaagcacaaacttgacattgcttcaactgacgaattcaaacaattgcaacgttacgagaaggaaactttcgagaaaatgattaacgaggtaagcctttgttcccgagacaacccaggggtttggcatttcccacacgaagattaacgattttaactcatttcccaatcttttgcccatttaaaattttttgtttgttaggttaaatcatgcggagcaacgttggcattgtgccaatggggttttgatgacgaggccaaccatttgctgctgcacaaccaattgcccgcagttcgatgggttggcggaccggaaattgaagtattgggaagtaaataaccgcggctgaaaaatttttgttttcagttggttgccatcgcaacaaatggtcgcattgtccctcgctttgccgaattgactcccgagaaactcggctcggctgggctggtgcacgagctgaaattcggcacggacaacgagcaaatgctgtgtattgagcaatgcccgaacaatcgggcagtgactgttttgattcggggaggaaataaaatggcaatcagaggactaactgaagaatga

SEQ ID NO: 47300 - DNA, 1086 bp, Heterodera glycines
agttttgtcgatcggcatttcagtttttttttgatcattttttcggtattttatttgataatactatcaagtcgctcgtccggctttataaatattatttgacaaattgttaattgttcaggacggcgacttcggtcaggagacggatcttttccacagcatttgcaacagtgcgttgatgcttttggtgcaggacgccgaaacgatgtgcgagccgtcattgcaggcgatgaacaaaataaagtgaccaaaaaagggacgggggattcggcgaagcgaatgaaaaacgtttttcccttttttgttggtcaaatgtcgaccaagtgggcgatgagtcaccgtatgtttcgacgatccgaaaaaatctgagggcatccgttcccctaatacgcgactacttttccgaacggtttgtcattttaattaattttttttatttctaaatttagtcgaaaatatttcgcccatttctgtctgaaattagcctcccaattggtcaatcgttttttgggcgcccttttcaaatgtcgtccaatttccatcgccggtgctgaacaacttttgctggacacgcactctctaaagacttttctgctcagtttgccctccgttgaaagtgccgtcgtcaccaaaccgccgacgcaatacacagccattctcaacaaagggatgacaaaggcggagatggttttgaaggtccatcttttttaaaaaatagatttggagcgattagttttgcaccttttcctttgatttgaggcggtgatggctgacaagtcaaatcaggaggaatttgttgcgcatttcattcgcattttgcccgattccgatgccgctgagttacagcggattttggagatgcgcccaattcgaaggaatgagcaaaatcaaatcatccaactttacaagaccaaagttgaaagtccgtccgttttcattttaaatgtgccaaagtttgaatgggctttttttgttaaggtgcaaatcccacgccaattggcactttgtccgtaagtcatcagccattgcctacccaatcggtgtactcctctctgatggcgagcattggcgactcgagcatgagaa

SEQ ID NO: 47301 - DNA, 917 bp, Heterodera glycines
atgccaatcaaagcatccggagaaactgtaatttttaaaatttggtctttgtggaaatcctgtcttttcagttaagaaagtacatcgttgttggacgtaaactcccaactgcaaatgactcaaatccgacactgcatgaaatggttatttttgccagcaaccacgtcgttgctaagtcccgcttctggtacttcactagcatgttgcgtcgtgttaaaaaaacacacggagaaattatttcatgtcaagaggtatgaaggaaaagggataaaaactcaattcgtttgtcaattcgtttttgttttaacttgttaatgtgtatgagatatctaacttctcgatgtaattgtaaaaaaagagagcgtccaaaacgagttgggcgtcgtccgttttaagactgaaaaatatttaaaaataactgaaaatgttgtaatgattgatccgcgcaatcacttacgtttaacataaaccaaatgcgaaaattaaggtcttcgagaaaaagcctggctccgtgaagaactttggcatttggctccgctacgattctcgtactggacaccacaacatgtaccgcgagtatcgcgatgtttgtgaagcgggtgctgttacgcagtgctatcgcgacatgggcgctcgtcaccgcgctcaagcggatcgcattcagatcatcaaagtgcaaaccatcagtgtggcggactgcaagcgtgccggggtgaagcaatttcagaactccaagatcaaatttccgcttcctcaccgtgtgaattccaagcgacgcaatgttagccaatgccattacacctattttttacttttatttctcatttagatgactcctttcacgacacagcgtccgagaactcattttgtgtagagaaagaaatgagacgacttgtatttccgatttgttgattaaa

SEQ ID NO: 47302 - DNA, 2289 bp, Heterodera glycines
atgctccgttatgtctgcctttttccacggaggtcgtttcatttcagcacatttttgcccaaggattactacaaaatattgggcctatccaagacggccaaggagtcggatatcaaaaaagcatattacgaggtatgcatttttcgactccatgaatggctttggtcaacataaaaacaaaagaattttagatggcaaaaaaataccaccctgacgtcaacaaagcgaagggcgccagtgaaaaattccaggaactctctgaagcgtatgaggtaatcattttggaatacaatgataaatggcatcgaaatccttagtttttttgggagtcggtggtaaaataaacaacaaaaaaaatgctaggttaattgaaaaatgtttggcattgaagttgaaaaaaaatcaacaaaaatgacttgagaaattcaggttcttggggacccgaaacgacgcgctgaatatgaccgttttggggccggcggtccgcagcccggcgcggcctctggcagccccggaggtccacaaagtgcccgcgactttggctgggagttccactcgggcaaatcggcggagcaagtgtgagtgataccattatattattgtataatataaattataaaagcaaaattttaagaaaatgaatacattatataaatattagcaaaaacaaaaatttttttgttgctatatttacaaaagttggccaaaaagccgaaaattttggttttttggctaaattttattttctatacaggttccgtgacattttccgcgacttcgacccgttcggcaatgccggcgcgtttggctccggccgccgttcctttggcgaaacgcagcacggttttgacgcagcacaggaagtggtggtcaacgtcaccttcgaggaggcagcacgcggtgttcgcaaggaagtgcgcatcaacgttggtactgtgttttgttgtttatcattgtttaacggcaacagcttgttttcccactcacccccccccccccacaaaaaaaactacgatttttttttgtaaacttacaaacaccctttaccgatttttttgtgtcaccgttttaaggaaattaatgtgccgtcggtcggtgtcacaattagcagaaataaatctctctttttttaatattaaccatgatattttttagtggattcctgttggaaatgcaacggcagcggtgttcagccagggtttaagaaggttttgttatctcgccaacttttcaataaaacttttttatgtttgtattctgttcaggtgtcttgtccgtactgcaatgggacgggtatgatcacacagcacactcaaggctacttcgtacagacaacttggttcgttttgtctatgtttctatcgtgtccatgcctttgcgcttatgtccaaatttcggatttaaatttggggtttttatttattgtcataaaggtcagacattttgccatcgcttttttacgactttatactcataccctttcatttcatgcatttattttttctttttagctctcgttgcggtggccaaggtgcctacaacaaaaatccatgcttggaatgtgagggacatggccaaagtgtgcagaacaagaacttccatttggacattccggccggcattgacaatggccaagtgctgcgcacccaagtctcacgagtcagttcgtttttttcggggggggggggtggtggaaatgtcgaacaattttgcaaaaatgccgggaaatttttttctcttttaacttttcgtttcatacagtcaactgtgtatgtggtggtcaatgtggcaccttcatctcagcaccggcgtgagaaggagcacattttcactgaagtggagattagtttggcacaggtattcgaattttcatgcaaatggtaaaggagggtgggggagagagatcatagtcgatttccattgctcctatcaagaaatcaaatatgtacccacaaaattggtaatttgtacgcttaagaccccattccctgttttaaactttcggagttacagttcgggttgttcccttgcaagttaagtcctagtggggggagcacttgctcgttttttatgatgtgtaaactttctctcattgtgcaggcaacgcttggcggcacaattgacgtgccaagcatatccaccaacaacgatggcaaaacacgggtgcacataccggccggcacgtcttcccatgcgcaaatggtgctcaagggcaaaggaattaaacgcctggagcagccgggctatggtgaccaaatactcaacatcaaagtgaatgtgccgaagtga

SEQ ID NO: 47303 - DNA, 1966 bp, Heterodera glycines
atggtgtcacacatggatgaggaactttcatttgaagatgaggaacaagaacctactccgaacggtgcgccggccggttcagtgtctgtcacaatgtcggaagacaatgtaaaaacattcaaaacttgggacaattcaaatcgcttaaaatgaccaagggggtaccaagttgagaggccagcatttggtctttaaagtcttggtaacaaaaaacgaattcagaaccaaccgattccatggaaaaattgcaaatttttgccattttcaattgcaaaattgtttttttaggattttgacgacatcaatgagaagctgcaacagatgagcaagaggcgcaaaaaattcgtgaaatgcaaaacgaaatggagaagcaattccagtccggcactgccgtgaccggcaccggcagtccggtgataccgaatccgatgtccctggaggagaagcaattggtggacgcacgttccatttacgttggcaatgtatgtaatgggtttgtgagtggcgccccaaaactgaacaattttcatatctttggtacattaaaatttgtcagcaaaattggggttagtccttttgaagccgcactttcaaaaatgtgccgccattaattccgaaaaatcaaattgcatttgtttttctttcatgagtcaaatttgtctaatgggttatgtttagttagacttttggtaatattttcggatgcaaatgaacaccctctaatataaaaggatcgaaaattggtaggacaatttcaaattgaattttcatcacccggaaatcgcttaggaccgacacctgcaaaatttttcatttttttttttttttgctcatttaagtgcgaggttcttttttttgaacagtttatcctattatacgaataaaagtattcttataccatctatcaatcttgtggttttgatgactaaaaaaatgtgtaaaatcttcgaaaaatattcaaaaaattataggtattgcaaaatagcaattgtcccaacaacaatttatacaggtggactacagcgcaacaccggaccaattggaggaacacttccgcggttgcggtgccatcgaacgcgtgaccattctgacagacaaattcactggccatcccaaggggtaattaattgctgttttcttggtccattcactcttaccaagaaagggagaggagattaaagttacatataaacaaaaatttttccatttttttaccgttggatttcgcatttttgcgcttttaagagtcaacaattttcattattcaaaagctcattgtgagatcgaaaattgatacaaaagagttaaaaatgagacctaagacgttcgacaaaatttatcgagttcaaaaaccgggacgcaaaaaaaattttaaaaaagttttaaatttcgggaagtgggggaaccgcgggggttggtaactgattgtgagtcttgaaacatatatcttaaaaacgaagtacatcccattttctaacacattttgctattttctggcttcattcactcttgccaagaagggtatggaagagccatgagttcgcataaaaaaacaagaattcccccacttttcaaccgtttggtttcgctttttgcgactttgaaagttgaaaaagtttcgaattttcgagacctgattatgaggcagagaattgacaccaataatcttaaacgagacatcgcccgtgaaatttctcgagtcaaaacccgaaacgaattttttttttttttgaaaaatttctgaaatttttttttaaattttcggggaagaaaagcggaagggggcgggcgggactgattataataatgagaggggtacattactaattatagcccttttgctaacacattttcatatgtttgccacatttcctccagtttcgcgtacatccaattcgcggacgtggacgcggtgaacacgtccacctcgttgaacgactcgctgttcctgggccgtcagatcaag

SEQ ID NO: 47304 - DNA, 1018 bp, Heterodera glycines
atggcggagaatcgacgggaggaactgccacagattgacggactgaccagcgaacaggtggggagagcaaattgcaatgcaatgaacatggattgacaggtggcagagttcaaagaggcattcgaactgttcgacaaaaacggagacggacgagtgaccgcctcagaagtaaggaaaatggcaaagtgatcggcgatcaaagcaaataaacaaaaaacatttagcttggcattgtgatgcattctcttggccattccccgaccgaagaagaattgcaggaaatggtgcgcgaaattgacgaaaatggtcagcaattaaacgatggactgatcgaatgaaaggaaaattaaccttttcaatgttaagggaatgggagcattgaattggacgaattcattaaaatgatgagccgaaaggagaaagagtcggaaaatgagaaagaattgcgggaagcctttcaggtcggactgactgatcagagctaatcaataatcaatcaatcagtaaaaagaagtgattagaactaatcagccaattgtgatagaagtgatcaaaccttctcaaattgaaattttaaaggtgttcgacaaagacaacgacggttttatttctcccgttgagcttcgctttgtcatgcaaaatttgggggaagaactgacagagagcgaagtgcacgaaatgatccgcgaggctgatttggacggggatggaaaagtgaattttaacggtacgaggaatttcttcagctttttaaactcaccaatacaaatttcagaatttgtatttatgatgaggcaaaaagtttaacggaagagagagagagaaggaagagaaagaacgactgataaaaccaacaaaacttttcaacgggtcatacaaacaaacgccggcggggctttcaggtgcagcggaatacttttggactttttggcacatctccttttggcattccatcacaaaaacaaaaaatattaacgtaaatttaatttctataaaaagcacctgaaactctggtata

SEQ ID NO: 47305 - DNA, 1029 bp, Heterodera glycines
atggtatgccgttttcctatttttttatctgataatttttttaggcgattagcaagggcactaaaattacgccaaaaggtggtaagggcggcaaaggaaagaagaagaagcttacgctaaagtttgtgatcgaatgcaaaaacccagtggaggatggcatcatgaagactgccacatttgtgagtttggtttttgggcgcatctgctttatgttgatagatttcaatatttatgtaatttttattttgccatagttaacggttctcgcgagcgtaggggcccattccctagtcagcctcgtcaacactttttaggaaacctttcttaacgaacggatcaaagtcggcggaaaaaccaatcaactggcggctaatggtgtcaaagttgaagccacgaagacaaaactggtcgttacatcggagcagccattctccaagcgttacttgaaatatctgacgaagaaatttctgaagcgcaatgctctccgggattggttgcgcgtggtagccagtgccaaggacacttatgaggtttggttttcttatcaccaaaaaagggtggatgtctttttcaggggtgttaaaatgcagttcggtccccctcacatttgtattaaattgaggagagggtcggagtgtggttaggctatatataacacagcaaactagactcattaatccatttttaatttttagcttcggtacttccaaatcaatcaggaagatgaagatgaaagcgacaatgaagcatgagcgatttgccatttcttttgttgggtcgtattatttgttgcactttttaccagcgataaaaacttgttaaaggaattgtttatgactaaaaaatacatgataattgggtaagctcaatgagtcttatttgatcaaaaaggattttctcagctcctgcaatcgctttcttgcgtcgagtactcgccgttcctgggctaatatgtcttgttccgtgatggttggaatctgaattagaatttgtctaacataaacagaatttaatttcattcttcccata

SEQ ID NO: 47306 - DNA, 1924 bp, Heterodera glycines
ttcaccgattcaatcaaaattgccttttcagtaataacttaaattggaacaaaggcagtgtcctcgggcctcttctttttttgatttttataaatgaccttactaattatattccgcctgaagtcggaattaaattgtatgccgatgatgttaaaatttacatttcgcatgataatgacgcgaaaagggatttactctctttagcgttggctaacttagcaaatggtctaaagacaatggcatagccattgcgcatgagaaatgcgcagcattatatttaggaaaaaataattctagactgagtataaaattggcgagaaagtaattttaagcgtagattgtgtccgtgatctgggggttttggttgatcaaaagctctcatttaacaatcatatttcaaaaattttaaaagcggcctattacaaggcatatcaaattttaaaaatattaaaaacaaggaatatcagtaccttaatcctagcatataaaagctatataagacctcacctcgaatacgcatccgaaatttggaatatctcctcaaaagaacagagtaaaagaatagaaaaggttcaaaaatatttcacaagaatcgtatacaaaaaatgtggcctcaaggcaataccatatgaaaaaagacttgagatttgcaaattggagaaattaagtactcgaaggtcgctcactgatatgaatatgactttcaaaataattaggggcttaactcatttagacccaaaaaaatatttcgaattttcttcaaggtcgcaacgaaaaacatttaggattcaaaacaaaagattcagtaataaatctcgaaataacttttttattcgtacaattaatccctggaattgtctacccaaaacggctatggaaatcggaagtttagctaaatttaaaaattttctgagagaattttatttagaaaataagtcctgagtggtaattcatcccttttttattttattttatgtattttactgtattgaccatatcatatttttttttaaattgtattcattactttgttttccgctataagtgcaattacatgttgccttgcggtttgctcaaataaataattacaactcgccttttgtctccttctccccttgctcttttggtgtttttgttgtccctccaattcaccgattcaatcaaaattgccttttcagtaataacttaaattggaacaaatcctattaatatttgacagtaattataataataatgttacggtaggtacagtaattaaccattgctcatttcccttaactatttgacagtaaaccttcgtctgcactttcacatcaatttgtgccatgacatttttctcaagcttttcttgaaatgccatctgctgaaattaacagatttttctttttgcaaaaagcaatctattttctaaaacattaaaatattagtgccaaaaattttttatttttgtgtttttgtaagtgatttataatttgaccccaccgcgtttaattttttctccattttgtccatttttcttctccatttcattgtgatcatttttcatgttgtcatcattctccttttcggcatcagcgttcgtctgtagcatcttttacggcattttagcaaaaaagaaaatcaaattcaaaatgtgctgatcaatttgcttcattttccttttttcacattttcccaccttttccatctgatcaatgcttttctgttgttctttctgctgatgatccatttcgaccaactttttctgtaattcctccaaattcttctccaattgctcctctttcttatcaaatttttcctgcattttttcaatgccatttttgagctttcgattctcagctttggccataaaaaatgaaatctttttaacaaaaattttaaacaaaaataaagaattaaaattttccctgtactactgttgata

SEQ ID NO: 47307 - DNA, 1406 bp, Heterodera glycines
  unsure (1)..(1406): unsure at all n locations
acagtgatcgctcatccgttcggcaacgnccgccggaagtccaaactgcagtttcggcaacagtcgccccggcggtgtcgtcgccgaccgcgtcgatgcttctcggcccaatagaaacaatggcaatgtttggtgcgcaagaatccatggatttggccacctttttgatccgcgcggcctgtgagaacagtctgatcgccaacttcctcttctggtatttgaaggtacgcacagtttggacgacaaatgcgaatatgtttttgacattttgcgtagttttcctttatttgtgcaatttggtttcctttaggttgaaatggaggccaacgcgacggacagtgacgagacaaatgcgccgtcatcagtctccgccatgtactgcttggtgatgggccgcttgaagcaggaactgtccaagggaaacgggtcggcacggcacacactgagcacaatcgcaacacaaaaagtgagcggacaaaaggggggttgggtagagagtgcgtttccagggcggacgtacccgggtaaaatttccgaaaaaaaaactaaattttgcaaaatgaagttttttttaccaactggggtacccccacagccctcaaaatcatgggaaagggggaaagaacagaaaagatgcattttgtccttcagaaatttgtcgacactttggtggacattgctaaagtcatttccgatttgagcggcagtcggtccaaaaagcaggaggtgctgcggaagaaactgtcggagaatgtggatttgacggaattgaaggtgattttctgtcatcgtttggtccgctttaccccctcccnncagggaagggtgatttgctagggacttgccaaaaaactaaatcatgttggttcattgcncctgataattgtctccncattttctcttaagggtctcggtcttccgctcgacccgtccatccacgtccgcgcggttcagcccgagtccgccgtgctgttctcttccaatttgatgccgatgcgtctcactttctccaccgtccgtgacgcgctcacgccgtacgaatgtgcggaggcgtacaccaccattttcaagcggggcgacgacttgcgccaggaccaattggtgctgcagatgattcgactgatggacgagctgctcaaggaggacaagttggacttgtgcctgactccgtacgccgtgttggccacgagttgttcagaagggtgggccatttcaaaacgtaccaacaaaataagtaaatgagtcgttttttcaagttttgtccaattcatccgcggcgccactcctcttgcggacatcaaaagtattcaagttggttggttttcactttttcctcatgagtttctcacttctttccaggacacactgcgcacattcagaccgtgttcatccacaccttacggtaa

SEQ ID NO: 47308 - DNA, 1242 bp, Heterodera glycines
atgccattgcgtttggatgtaaaacggcgattgctggcgagatccgatcgcgttaaatcggtggatttacatctcaatgagccttggatgttgatttcactttacaatggctttgtgcacatatggaattatgactcacaacagctcatcaagtcatttgaggttgtcaaaattgttctttttctacaatattttgatagagccttacaatttcaaggtttgtgatctgcccgtgcgtgctgcaaaattcattgtgcgcaaaaattggatcgccactggttctgatgacatgcagttgcgcattttcaattataacacgttggaacgtgtacatcaaatggtttggttcataaacttaggctaaataagaaaatttacaggaagcgcattccgattatctccgatcccttgccgttcacccaacccaaccatttttgctgacttcatccgacgacatgctgatcaaactatgggattgggaagacaaatggaagctgaagcaaacatttgaaggttcgaactggtttttgtcgaccatgggctataaccaaatttctaccgaattttttaacaaattttgtcaaaaactgcaactccgttcatgattatccgaattgagtgattttgctttcgacggccccgagtattctcaatttccggtgcaaaattttattaattttaaaaagattatgaacaaaaatgtttggaaaaccagtttataatacaacgaaatttttgaaatttcagtaaaataaatattttatgatatttaaattataaagccaaaaactggctcgggccccaggtgaccaagtactgcctgtaggcgccgtctgggaaaaacgaaagttactaaaaaaactatttttctccatgacatttacaattggatttttgggaaattacaattaattaaaaataccaaggcttttaataaacatttcttattttcttgcataaaggttttctcaatgctttttaaatttatcatcttaaggacacacacattacgtgatgcaattggtgataaatccaaaagacaacaatacctttgccactgcatctctggacaaaacaatcaaagtttggcagttcggaagctcagtgcccaattttacgcttgagggtcatgaaaaaggggtcagtccatggatcccactatcattcgaactttgggtaatggtttatcgaaataggtcaattgcgtcgattattatcacggaggtgagaagccctacttaa

SEQ ID NO: 47309 - DNA, 3703 bp, Heterodera glycines
aaacatattttaattaataatcaacagtttatcacttgttttaaattatttttaggcgcatttgaacttaaaaggatggcacagtatgccatagaatggtgccacaacaatgcactgattttaaggcgaaaggaggatgagggcaacaggtggacgaaaatccaaattagcattttaaattctaattgaaatgatttttaagaggcgatgctgccctatttcctccattgactttgtttccgtcgccattcccacgcgacgcttttgaacaagcgctgaaagcacaaaaggtgatgaaataaattttaatattaaatgatatgattgatcattaataaattggatttaaattcggagcaaaacaaaattaatataatttaatttatcttgaatttaattaggcgatgaatttgctttattttcgcgttgcgcgtgactatgaatttttgatgaatgcctacaaagatgtgatcaaaggggacgagcatattgccaaattggtggacattttgaagaaagtccacgaggagggaattcggcagacgatcactgtgatgctgcagagagcggtgggcagaaaaaaatataagaaatataatacaaaaatggaataaaataatctatttatggcaaatatttttagaaactgaatttaaataccaaatatttttaatgagagatgtttaagtataaaaaatgataaaatagtgcttcaattattctttcgcattggaataataaagtaagttgtaattttaaaaatgttttaatgttttgcgaaaaatatttactcaattttatttttactaatatttgcaaaaataaatttcaattttcacggttcataataattttgacgaataaaagatgctttaaaaatatacaaaacctatttcttaaaaatgaaacataacattccttcttcaggactatttattagatgttgtggagaacaatgaaacaaacgaagtcaaatatgagccaaaacaggtgaaaaagcaaattctaacattttctttcgttaatcttttttattgttattcatttatttattttataaaatcagcgacattaatttaaattaattaattgactcatatttttatatgcattttttattttggcttttaggtcgaagtcaacactggtgccatcggagcaactgggctcaagcgacggaccaccgaatttcaccggcgaatgctcaaaaaggccaccggaatggacgcaacgacagcgaacatcccggacaacaagccggacgctgctttgatcgacacattttacatggcatggtaagaatgtgctttttgtgcaatttcttatccttcattaatgggctttttgaattctaaatcgttattaaaaaattgagcgccttttgtccttgtggtcttttgtctgtagcttttttacgagtggatccgttgacacaatatcgtcatcagttcactaactttttcgaactttttcttaatgctaaattaggcacttttccgttgttccctctccaaaattaattaacaattttaattctaaccatttggttttactgacaagtgaaggaatttaaaagttaaaagtaagcaacgctctagtgaaattattatgaacatattttaaatggatttttcgatctttacttattgttttttcaaattgttaaaaacacccaaatttcgaattagagcggaattattagttcctaaaaacacatttcaattttttgaatctaaaaccttgctgctgttgtcggcggcaattctgattcttgcacttttcaaaatttcattttttaaatttatttaggcgcaaattcgatgacccaaaagcaataatggtttgtctgatatacagcaacgacccattccaatacgacttgcgatacattgcggaggaactggaaaagaaatcgagcggcaaaatggacgtcgaaatttattcgttggccgattattcggaaagagagaacagcacgaaaaggtggcagaaaagcatttttaaaatcgcacaaaattgtgaaaaataggttaaaaaattcttttaaacgtttaaacatacattaattttgccttaaatttttataagaaactgagcaaattttaaatacggaaatagaaccaggtataaatgttcaatacaattttattaatctataccaaaataaaattaattcttttttatttttattatttttttggcacaacggtgaaaatggctattataaatttatagattagcaaaagattacgttgttttttccaattaagattgcaattggacccggaggacttttcgcttcgtctggacggtcgaaaagttgccattgtttattcgggacagtctgcccttgggtgcaaatttgacgacctcggcatggaattccgacaaatcattgaactgtccacggcaattgtaaaacataataaaaatttgtttatgaaatttgtttattcacagaaagcaccttccttggctgtggcaattagcagctctaagaaagtgcagcaggtgctatttttgagctgaacttaaaaaacaaattgaccaattgaagaaaataaatttgaaataggaaaaatgttaggcttcaaaaaatgtaaaaacctaaaaatcgattattttaaaaactgagatgctcaccatgccgggtgccattgaacgtttcttcccggagcctagcgacgcggcaacggtggcacaaatcagagcgacttttgccaaaatttggggcctggagaatgaggacaacgacacggaaaagctaattgaagtaaaaaacatctgcttaatgagtcgatttggaatatattttgaattattcaaatttaattttaataataattctgaaattgttatcaggtcaacaaataattcactcccttttcctgtcttagacccatcgaaattatttttgtatgtgaaggcattcatacaattaatatttttttcgtttaatttaaccatttttcgttttcattaaaagttggtcaaatttcaaatgagtttcgtccctttaatcattttttgaataaaaaactgttttttaggatgccattgaaaatccgggcaattatgtgctgaagccgaacagggaatgcggaggacataattattatgacgataaattggtggaaaagctgaaagaattcacgcaaactgaacgaggtgcgcacattttgatgcagaaactgcgcccaatggttgtgaaggtaaaattataaaatagggataactattagaattgctcaacacttctctaattgtgcctgaaattattgaatttttatgataccaaacaaatccatcatttaacaaattaattcatttcttttatgatgacagtgctcaattacgcctttaaaaatttgccgtattttaattgtcccaataattcattttaattttacgcggaatggagagagatcaagttaaccgggttcttacaacaaaattcttaaccaattttaaactggcctttctttagaattacgtgcttagaccctatgaggcggcgagattggaggaagtgatccccgaactcggcatttacggctttttgatcggcgatttgaaagcaggccgagtgctgcacaatgtccagcaggggtaccacttccgcacaaaactttcgcatgtgaacgaagccggcatttccgcaggattcggcttttatgactcagtttatctctattagtggtcg

SEQ ID NO: 47310 - DNA, 2747 bp, Heterodera glycines
atggttcatattgtgttcgacccaagcattatcggatatgatgagtacatgcaatacggaagtggcatagaaagcgaggattacttccgagggtccagccccttccaacgagggtatggacaacgaggcgcaggggtgggggatgtgtttcgcggactttggcgctttttccttcccattcttcgtcgtgttggcactacagtaggatcggaggcactgagcacggggcagcgagtgctggagagagtgggaaacgaaggagtgccatttaaggaggcatttgtcagcgagggaaagaaaggaattgatacggtacttgagaagggcggcctgccaaaacagtttggcggtggtcgaagaaagagtataaaaagaaagaaatctcatgcaccaagccatcagaccataattggacggacaatcagcaaaccaggaaacaaacgtattcgttcagacgcatttggactttactaaataaatggctttccataaaattgataatgacagtgcaaactcaatcaccaatgccttagacttttttcgtattccacccaccaatgtgagcgtctcttcatcaaaagtgtttgagctgcttcccagtaacccactgacggacactccctaccacttcaagcttcactccagccaaaactttattgatttgtccaaatgctacttacaaagtgaattccgaattcgcaaagaaaatgagcatggtcatctgattgacctcgcagctgacgaagttgctccgatccagatgatcggccagactttcattcgaaacatcaaaatgagcataaatggacgtgaagttttcaactccaattcactaatggcctacaaaacatacttctcacatgagctgtcctattccaatacggcaaaggactcgcatttgaatgcggcgggctattaccgtgacatcggcggctcgcttgagacaggggacggatgcattgcgcgacgcaacctgtttgcgagaagcagaacagcgcaattcattgccaaaattgacgccgatttgttcaaccaacctctctacttgatcaacttctgtgagttggacattgaaattttacccaacgacaacgagtttgtcctaatcactacgcccgctgttgcccagggtgctgcagctgctcctcgttaccgcttcgaggttgtcagtttgaaaatgtatgtgaaaaaagtctcattgatggatggactggcgttggacattgcgcgaaaacttgaagtgaaaccggcacgatatgctgtgaggaaaacgctgatgaaatcaatgttcattagtcatggacgtttcgagtttacagccaatttgttcatggatcaaattccccgccgtatcacaatggggttagtggctaattctgactatattggaacaatttcgcgcagtccgttcaactttcaaccgtttaatgtgcgcgaaatctcaattattgctaatggccgctcctttccccaagcgccatacgacttggactacccaaattggaaatatgttcgccctttcaatgacatgaacgaagcagtgggattcgccaactcattggaaagcaatggaattagctatgaacagttcggaaaaacccactgcatttatgtgttcaatttgaccagcagtggagatgatcaagctgcgctgtttgacctgataaagaacgggacaacagcggtgagcatcaaattcaaccaggcagtgcccaccggggggataatgctggtggtgatgggcgaatgcgactctcttgtgatgttagacaaaaatcgatcaattagcacagacattactatttaaggctgtcatttttttttgtatgccactatcatttgaataaagatgaattacaaaaatgttggaattattttcttcatacttcgaattaatttcgatgttgtgtccagtcaaacaaccgaggtatcagcatcatattccgaatatataaaaagactaaaaatgggctggcccaaaagcagccctcaacccagtacaacgcgtgtcccagagtatctaagacgcaaattattgacacgacttcccagtacaacttcgacccggctggcaagtccagcaaccaccacaacaacccatcctcaaccccctaagcaagagaagctgatagatgaacaagtgtcctcaattttgcctccactgattcaattgtgcaaagactcctcaaaggaaaataatttcttccaacaaatcatttgctgggcactgttggctctgtatttgatgcttatcgtcagtttggtcctacaccaattgtgctctgttttttggttgaaacgtaatggacagcacacaaatcaccaaaatattgagagaaaaccaacggacgtcacaaatttttcgaggatgtttcgccagtgaccaattgccttcgccggccaccctacagtatcctgcggcactcattgtgaaccgtgacccccatcacaaagggggctcccattggtgtgccatttatgcccgggacttggacgtgcctgtgatttactttgatagccttgcccttcccataccaccaagtatttcatcatcctttttaaataattttcccaaaggtttacacaaaaacattgaagcctaccagtccccattgacatcaacatgtgccccccattgtattgtctttgtttaccacatgtcccatggaaaatcattcgataaatttatacatattctcaaaacttgttcaaaccctgacatgtattcattattaatgctaaataaa

SEQ ID NO: 47311 - DNA, 875 bp, Heterodera glycines
ggtactgcaagaaggaagaagaaagtcgtgcacaaaactactgcaatggacgacaaaaagttacagacgaatctgaaaaagctttcggtgactaacattcctggcatcgaagaggtcaatatgatcaaagacgacgggacagtgatacactttaacaacccgaaggttcaggcttcggtaccggcaaagtaaacaaaacaaaagttgcgctgtttgtttgccttttttgagttaaatttgggtacatcaattcaattaaatttcgtttccccgctctttttaatatgccaaacacaagcaaaacaaacagtgcctactgttctcttgcggcgcaaagcaataatatttcttgaacttaagcaccttctcgatcactgggacagcggagaacaagcgtaagtcacctaattttaacggcatttaaggaaaccaaatttcaaatttacaactaaaagacccttttttattcctttccctcttcagaaatcacggacatgttgccgggcattcttaatcaactcggggcggagtcgcttactcatctgaagaagcttgccaacaacgtggttcattttgtttgttcaaacttttttggattgtctttataattacagaccacgcaattcaaaccatcggctgaggacgacgatgtgccgggtataaacttagcagagtttacattctcttactcttcccccactttgtttagatttgattggcgattttgaggaggcgtcgaagaacgaatcgaagaccacggaggaacttgtccattagtggtttttaccatcgttacacaagccacaactgttgcagtgggattggccaaccaatttccacattatcaaccccaccgttatgacaaatcagattga

SEQ ID NO: 47312 - DNA, 1570 bp, Heterodera glycines
tcatttgcacttccacgaggtgggcaaaaacgacacaaccgaaggttatgtgcggacagagaacacagaacgacttctaagagagcacgtcaaagcggtgggaggaaaggttggccatgggatgaaggggaaagggattcccaatgaaaggccaagcccatttggatactgaaactccaacgatatttatacataattgctttttggtaatttcaggttgtcacgcgttttcctcctgaacccaatgggattttgcatatcggacacgcaaaggccatcaacattgatttcggattggcaaaggcaatactaacaaatgacatgaattattaatgacgaataatctttaggcacgtggtggtatttgctatcttcgcttggatgacacaaatcccgaaaaggaggaggagagatttgtgcaggaaattgtggacatggtcaattggctaggtttggtgaattgtttatactctttccacgctgatttaggctattcgccctacaaaatcacacattcttcggattattttgaccaactttacagctgggcattgacccttattcgtaaggtgcaatttgaattcgtttccttttctgtgaatgtttgtttattttcttttttcagaatttggcctacgtttgccaccaaagtacggatgaaatgcgtggctttaaccctcctccttcgccatggcgcaaccgccccatggaagaatcactacgtttatttcaggcacacttcagccgccttgctattatactttttaacgaaattacgaataatttaggcgatgaaaaacggcgcatttgacgaggggcaggcgacgctacggttgaaactcactttggaggacagcaagcaggacccggtcagtcggtcttctattcagaaattctcaggtactttcccagtttaactgacacttttaacacatatttttataactgaaaatatatttatattacatcaaaatttagcattgttttttttttgtcattcatcgaatgaaaattatttatgattgatattaaaggtacaaaaatatgtgttaaaagtagcaattaaactaagaaagtaccgattctcacccaatcaaaaattatccaaaattcaggtggcatatcgcgtcaaatatttgccgcaccatcggactggcgacaaatggtctttaaagaatgccaaacattattaatacctaattgaataatcaggcaaaaaaatatttaggtgcgtttaccccacttatgattacacccattgcttatgcgattcgttagaaaatgtgactcattctctgtgcaccaaggaatttcaagcaaggtgttgttactcacaaaaaataagagcgagttcattaatttatcatcgtggatttacaggcgttcctcgtactattggctgtgcaatgcgctcgacctttactgccctgtccaatgggaattcgcccgtctgaatgttaattacaccgtcgtttcaaagcgcaagttgctcaagcttatccaggcgggcattgtcgagtccgtctgttttaaacggagtaataagcacaaaatctcacgttttagtttc

SEQ ID NO: 47313 - DNA, 2172 bp, Heterodera glycines
acttcgcattaccaattatcgagagttggttttataccagcgaaaagcaccttacgggtcaaacaattcccatcctcaattaatgaaagtacggaagaatgggaaattgcatttgacgagtttgtctacattgagcaggctgattttagagaggtaattgcgtgcagctttactagacattattacgtacactttttaggttgccgaaaaaagttatcgtcgactgacattggaacagccggtgggactgcgtcatgtcaatttggcagtcaaaattgacaaactggagcgggatgagcacggtgtctatttcttatactaagtttattttaattcatttattttgaaggaaatcccatcgaattggtggtaactgcgaatccggtgagtagtgagtgtaagccgaaagcattcattcattgggtggcgagaccggtgctttgtgaggtgcgtctctacgacaaactgtgagtatttactatccctccaaatgttgggtaaacattttttagatttgtacacaaaaatcctgaggaccctgccgaagtccctgggggttttttgactgacataaacccgaactcgctccatgttctttcaaatgcaatggttgacggaagtattattcgcactattcgtccgttggatcgctttcaatttgaacggaacggctttttctgtttggatccgaatgattcgtggtcgagtgagaaaaaagtgaattttttttttaaatttatgtttactttttagttgtgaattttttaaataaaaaattacttctttttagttcgtcttcaatcgcatcgtttctctgcgtgaggatgcaggaaaaaacatttaaacttttccctgcttttttctgtttatttttatttattagtgcattttcattgttttgttgttgatagataaattgttgactctctattttactaacatattcttttttctttgttttttttcaaacgtacatatatttaactgtgcttaaattccgtctcatttgattttcccagcctttgttaacatattaaatggcgtggctcagtcgtgcgactttttgtcctcaccaattacaccaaaaagctgtcaaaacgccgttacagaaagcggtcacttcggcggcagagcgtgcgcttgacattgtcggcaatgcgtcgcgagtgcggcttcaggacttgagggacaacccgggcgcgaggacggtgggcaggcaagtgcgcgcgaagggccacaaccaagcgggtcacaccattggcgagttgcaacacgcgtcgaagccgccgctcggctgggtttggggcgactattacaaaccttggcagcggtcctttgacggcgacagacgcttcaacggggacataaagtaattcgttgatgatgatgttgttgttttacattaatgcatcatttgttcagtctccgccgtgaatacattcccatttctttggtcgagcttcagcgcctcatcgacttgggctggttggacacgagtcgactcgtcgacatcgccgcaatttgtgccaccaaattgttggaacagaaattcaagccggaattgcgtcagtttggcattcatctgactgatgaagtcagtgatttcgcaggtttaattcgatgctcacccgctatttagggcgaagaaatattctcaactccgatcaatttggaggtccaatgggcctcgtgcactgcaattgctgccatcgaacgcgctggtggtcgaattcggacggcttattacgacacggaaagcctcaaagccatgtccgacgccgagaaatggtttcgcacagggaagccgattccgagaaggaaacacccgccgtattcgctgatggaatattacatggaccctgaccacagagggtaatagaaatgtgaacacatgaacattttggtgctgaaaaaagcaattttagatatttggccaaccctgaggacattgagacgtcccgagtccgattggcagacattgtcggctacacattggtcaccggtccaccgcctttcgaaaatgaacaaaaaagaccggaccaagtgtttcttggactcgagcctggccaattggtcagtttggaggacgaaaaggtgttcgagccaacgcatccgacacttgtggaatattacaggggagaagaacaacaagtagccgacacaattcgatga

SEQ ID NO: 47314 - DNA, 2107 bp, Heterodera glycines; identical to SEQ ID NO: 2503

SEQ ID NO: 47315 - DNA, 1861 bp, Heterodera glycines
atgggccgtgttcgacgacattgtgttgtcccatttgaatgtgctgcacgcgctcagtgcgtccgattggccggcggcgtttggccatcaaacgaatgccctgcagctgttcaatagggaaattttgcagcgcgaaaaggacgccaattggttcatgcccatcctttacgtgctgtgcagcgacttgcgactcattgcgcgaattgtgggcacttattttggtgtttaatttaatccccgggggcgaaatgagtggtaaatttacctaaacgagttctctggaggaggcgtaggagaacggttcacggagtgtgaaattaaaatggtaccgtttccaacttcttcaaagtgcctttgggtgttcggcttattcccctgctgtgcacacctgccgtcttacaattagacaattacagtatgcctaccgtacactcctgccccttttccaggctgacaagcgcggctgtgtgctgtggggcggccaccaccagcggaagtcggccgacgcgcaaacggcgaccttttacgaagagtcggccgcctcaattatggagagttaccgcatttgtgtggcggagcggtcggacgcgaccacaaagaaagtggccatcctcagtctgaccaaccaattgtttcgcatttattttggggtgacttttgtgctttttctaatgccttcggacacttttctcgggtcaattgccgagagtcttgacaattctaataaaaaaaattaacaaatccaattgcattttcgagttgctcagatcaaccgtttgcatctgctgaaaccgcttatccgcagcattgaccacgtgggcgaactgtacgaccgtttttcgctggccgacaaaatcacttacaaatactttttgggccgaaaagcgatgtttgacatggtgtttctttcttctttttggcattttgattacaatttcggaggatggatgggcaattccattgtaaattgtctggcatggcatggcaatgcgttgtcgtttctgtttgccgcttgtccccaattgtcaattttagacatatttaaaaaatacggtagatttgccaataaatcattcatttttctcggcatggtttcaattttcatccaatatttccctccgctattcgttcgttctttcctttcccctaattttttgcttctcccattttgaggacctttcccgtgccgaggaagcactgaccttcgcttttgagcactgtccggctcatttcatgcacaacaaacggctcattctgatgtatttggtgcccgtcaaaatgttccttggccatatgcccacccaacaattgctcgtccgctacaaccttggccaatttgccgacgttgccgccagcgttaagtcagtcggagaatggaaggggacggaaatgtcctttccccctattttgcccttctaaaatgtatttaattgccgtaagggatggcaatttgcgcgacctgaacttggcactgcaaaaacaccaacactttttcatcaaatgcggcatctttttgatgttggaaaagctcaaagtgatcacctacagaaacctcttcaagcgagtgtaagttattcttcaaatgtgctcctttcttctctttttcctttccgatcactttttgattggattttcttccctttttaatttcagtgcttccattctgaacacccatctgatcaaattggacgctttcctcgccgtccttcgctttttgggcacggacattgacgcggacgaattgtcgtgcattttggccaatttaattgcgcaaaagaaaatcaaagggtacatatcgcatcagagacagactttggtgatctcaaagcaaacgccgttcccttctctttccgccgcttaa

SEQ ID NO: 47316 - DNA, 618 bp, Heterodera glycines
  unsure (1)..(618): unsure at all n locations
tttatgatttctcaaacttttgctgatcgagtcgggcgtgncaggaactaatgtgcaggaatcgtaccttcgaatgcatgcaaacgcggccacagaagagctggaactgccacaatttgcacacattgcagaatttcaatatttgtcaatgaggtttttgtaaaatataaagcctttattgttcattttaattcagagctgtttcactgtgcaaggtgcttgccagaattccggacgaaatgactgataggttttaacttaattcaagccctgaattttgtcgggaccctgccctaatttctcaaatttacaagctccttttcgaaattatggctttataatttgtttataaatagcaattttttatgtcttttcagaaggccatttctggagaccatcaaagagattgcttcgtccattaagcaattgttggacacgacaaacgcgatcattgctcttgtgcctcgctgctaccaacctcgtcagattaatttaactccttttctttcttatttttaaaattgtttagttgttgagaaacgtaagagggaatttgtacaagttagcaaaaggttcagcagcacattgaaggattattttaagcaccaagagcccaac

SEQ ID NO: 47317 - DNA, 904 bp, Heterodera glycines
cttaattttgtcccccagggctctgtcctgggtcctttattattccttatatatattatcgaccttcctgatgtcataccatcaggagtgaatattaaattatatgctgatgatgttaaaatctatatttgttataaagcaaaaactgaaacggaaattatgcataaagcattgcataatttattcgaatgggcaaataaatggcaaataaaggtttcaattcaaaaaacttttgtattatatttgggttcaaaaaacccaaaagaaacatacaaatttgatgggaatacaataaatgctgtggatacaattagggacttcggaataaatattgataataaattacaattttccgatcatgttaaccaaataacaaggaatgcctatttacgtatgcgttccttgtttagaataattaaatctaaatcttctaaaatctggattacattatataaaacttatattaggcctttattggaatatgctccggaggtttggaatccgtctcttcaaaaaaatattaaaaaatagagaaatgtcaaaaatatttcactaaaatagtgcttttcaagtgtaaccttccaccaattccatacctgaagcgattagaatacctacaactaccaacacttgagaataggcgaaagctatttgatctgttcatggcgcataaaattgtttatggccgaacagatctagatttatttaaaattttcaaaccttctaaacgctttaatgtccccttttataggtttaacacaaaatataaattaggcaaaaaatttattccctttgcggggagggctacaaaattgtggaatcaacttgataaagaaatcattaaaataaattctttaaatcaatttaaaactaaaattaaactccttaacgaataaaatgaccg

SEQ ID NO: 47318 - DNA, 2163 bp, Heterodera glycines
atgaaaatcatccgtatttcgctgccagcttgtgccagacaaatgaagttgggacagtgagttttaaaactgatggaattatcatgctcaaatagtgggaaattggcgaacaaaagcggaaatttatttaaatattctgaggtcctgatttttctgagaaattttatataaaaatcccaggagaaattttatttaaaatatttttggaattatatttttatgtttctcctttttaacttattttagcaaaaaatcttgacaacttggtttgaaagtttaaatttttgaaattccaaaaccccgcgcgagattccgcaacttttaattgcgggataatccatcggagtccaatcacaaaaaaattgattcccaatcccgctgcgggatccgcaaatttgaaaactccggtctttaatcattaacttttttatgtttcattcaaaaaatttgaattcaataataaaaaagaaaatgatgtactaaaatgactaattgtaagatataaattttttaaattgacttttacaaaacctaaatcctcacatattgttgattctttttaaaacataaatatttcgttaaaaaaataaaaatattagataaatattttttaagattaacattggatccccaggacaacacattgcgtttgtatgggcaaaaagttgccgtcacttatatcgcaacggaggcgccaaatccgagcgacgatgaatggaaagtccgacttttgttcgaacgttcgacggccattgtaaaaaaattaaacaaataaatttttaaaaaataaacaattttagaaaagtccaacaattgggcaggatttggcaaatcagaaaaaagtgcagcaggtgaaaaaacgttattttgtgtagaaaataattgggcaaaaaacggacgactttttaatgccaacaaccatttttcagcttctgactaagccgggtatgttggaacgctttttgccggaacctgaacatgccgcaaaggtggaagcgcttcggcgatcctttgccggactgtgggctttgcacgacgaagacgagcaaaccgaacgggcaattcaggcaaatttgaaatggcaattaaacaaaataattacctattttttgccaggatgccattagaaatccgcagaattatgtgataaagccgaaccgggagggcggtggccacaacatttggggcgaagacctgaagcaaaagttgttgaccttcacgaaagacgaacgaaacgcgcacattttgatggaaaagctgaacccggtggttatccatgtgagttaattaaaagccattaaatattttacaattaaaaatgaggaaatattccaatggtttttcggtaaaaaaattgtcggatgtaaaacattctcttttaatgtgaagttttattcattttttttttaaattaataaggtttattatgaaaaatctttaaaaaatcgatttaaaatggaacttttgctgattgtcataaaatccaatgtttacattgattttattactttttaatctttttttctatttaatatttatttctcttttatttgagaatttattggtaaatttcagactgctgcttaatacaattgccttccatagatttatttgaatacataatttatgtaaaaaccatttatttaatttatttattttgtattttatacgatttgaccgtttgtcctttgtcattttggcttctggtcccggcattttccacaaaagcctggtccggtagtgccggtaaaagtcaggattcgaatcttggcatttatcgctttcgattatcattgctgtgccggatgggcgaccttttaattggcaaattcttttccatttccccgttcttttttttcagaattacattgtgcgacctatgccaaacaattacaaatacggcgaaatgaccactgagctgagtatcattggctacgcttttggcaatgtggacgaaatggaagtgaaaaagaatgtgcaaaaggggcattttctgcgcacaaaattagcccacgtcaacgagggcggcgtgtcctttggcaacggcgcttgggacattccctttttgatttgatggcacaaaaagtggcacgcagagaaacacaaaagattcaaaaaatgtcataaaaaattgctaggcaatcaccatgaacgagagaaata

SEQ ID NO: 47319 - DNA, 763 bp, Heterodera glycines
atgatcgttctcaggtgcctcgcatttttgatgatcggagaaaggcaacaaacaaaatcaaagacgtgggatattactttcgttatcatcgacctggaatcgacgcattgccgcggatccccgactgcaaagagcagctctaccggccgaaatacaaagtggggccagaaaaaggagagtttagactggttgtgtcttccgggaatgaaactgtgtctggaagattgggttacctccattttaaagcacattagcacaacattcggtgaattaccccgttcagcgtttacacggtcacacgaacacctaacaatcgtttgttatccattgggtggttttaaattattgtagaaatacaatatttgatgtctgtttatccctccttaagattcgtgagccttggcgcgaaagtcaggcgagatttggcgagaacgactacatcgacctgctcggagacggctctctccatccggcccaacttcagtaccacgtcccccgttggctgcgcgggtttcccgggcaaaacagagcgattgagccggtcaagctgatccactacagaaacctgtacaagtcaaagttggagcagaattcgcctcacaaatggcaccagctgaacaagcgcatcaaatatttgctgcaatatcacaactacgacaaatcggacgaattgagggccgaacggtcgctgggactgtgggaggaggagccggactatttctacaaggacaaatcacgccgatcataccaagaccttgtgtag

SEQ ID NO: 47320 - DNA, 1826 bp, Heterodera glycines
gcattcatctggtgccatacccggcacaatttgctgtcccattgtttcccgatgctgtgaagaagcaatgcttgaaggaattgaaacagcgatatgaaaatgtggaaaaataaaaaataaaatttatttttattttttaaattaaaatttttcagaaagaaattaaaagtccgccggaaaattttgaagaatgggttctgcaccattttggaccccaaattttggatgtgttcttcaatccgtactccaaaaaagtgtggacagtgaaaccgtcgaaaatgtaaaaaaaaaatggggcaaaataattttaaagaattttttttttattttaggtctccaatttgggttggcactcgggtggcaaaattgccacaagaaaagctggaggaactgtgctcaatggatgccaatgtgttgaaaaatgccgattttggatggggcccaaatgcacaatttaatgtaaataaaataaaataaaatttagaatttaaatttaaattttgtaaaattaagttcccaaaatacggtggcaccggcgccgtgtggaaaaatatgacggagaaattgccatcggaatggttcaaatataattcaaaggtgggctgttttaataaatttatgtatatactatgaaaattttcgtaaaattagtgacaaaattcagaaaattttcattttttgcgcatcgcaaaacgaaaattttcttggaaatctattaaaaattttcattatgaatagcaaaaaaaaaaaaacatcacccggattggtagagagttaatattttcgaaaataggatggttttttctattttttatccagaaaatcacggggttggacaaaaattttagtaaaaaaacgggatttgaatcggggctgaacgtaattacggattatggaaattacggcgtttttggatccctgtgatgacggattatggattaccgtaattgaaaatccagttacgcccagccccaggtaaactcggcactttacatttggccaacattttgtggccaacttcttccggaacttccaaaaactcggattttgtgattggctttctcggcgccattttccctaattttgcttttttccaattaaattttaatttttaaatttaaatttttttaggtccttcgcgttgaccatcgccaaaagtgtgtgcattacgtccaactgaatgccaatggtcagccgacgggcccaacaaagtcactgaaatacgacgcactgatcaactccagtcccatcgacgcgttcgtggcggacaacaaaatttgcgagatgccgttgttggagcacaacaaagtggggggtgggggggggagtaattagttggactgctcgagattctcgatcaccgttttaaattcatatatttctatgggggggggataattaatggtaattaccaggactgctcgagattctcggtcgcggttcgacgaaaaaattcataaaaacgctaaaaagccataaaaaattcgcacgcaactttttgcatccttctatttcagtcccaatggtatagaaatttcagtaccgctctctaagattgattatttttcggaatttcttcgctgaaatttaaattttgccttagaaagggcttggattcaattagttcggagtaattaatgtgtctaaaattttttaggtttttgttattggcgtcggattgaaactgccaatgactgagttttgcgaggtaccctaaaaaattaattgaaattttgaaaaattcaaatgtctttaagaaatacacttggctctactttcctgaccctgacgtgccgttctatcgtgtcacatttttttcacggtaa

SEQ ID NO: 47321 - DNA, 226 bp, Heterodera glycines
atgattgaaataattattctttatgtaatattttattcaatcatcatgcggctttgccaccgaatcactgcaaagaaaactactttcatccaaatcttcgtcaagactcttgggggaatgacgctgactatttttgcccattcctttgacaccatcgagaatgtgaaggcgaagatccaggacaaggaagacatcccaccggaccaacagcgtatcatcttctctg

SEQ ID NO: 47322 - DNA, 951 bp, Heterodera glycines
atgtcaccgtttggtgcccaagtccgtgactcgcgggaccgggagaagaaggaactcagtgatctgaacgatcgattagccaattacattgaaaaggtggggtttgggtcggctgagcacggccaagcgaggcccaagcccaaacagagcacaataagcaccaggacaaatttaggtccgtttcctcgaagcacagaaccgcaagttgaaggcggacctggacatgccgcaaggacgccgcggcaaggacaccatcaccatcaagacgatgtacgagagcgagattcagacggccaaaaagttgatcgaagacacgggccgatcaaagcacgagttggagcaggacgtggccaaactgcaacgtgacttggacgagcagcgccgcaaatacgaggtacgccatcatgaatagcaaaaaaaacatcacccgggttgattgggaattaatattttctaaaatacttattggattttctgtttttttccagaaaatctcagggttggactaaaaattatggattacggaaattgtaccgtttttggatccctatgatgacggattacggatttccgtagccagttacgcccagccctgatttgaacccaggtaaactcggcactttacatttgccaactctttgggggccagctttttccggaacttccaaaaaaaatttgggtgcgttaactcattgaaaaactcaattaactaaattaattcggtgcccaattttccaagattgcaaaagtgagactctcgagcactataaatagggactaaatttatgtgtccaatttttgccccaaattttcagcattttcaattccacacaatcaacaacgggcatcgccattacaaatcttcgtctgtttgccggttacggaggggaagcgattgcgttttttcccaccttttcaccttttttgttctcatcttctcacctttttcaa

SEQ ID NO: 47323 - DNA, 1529 bp, Heterodera glycines
atggaccaaaacaacgaccaacgccgtgctgttaacgaatatcggcttaatgaggacaatgaactgcgtttagaagtgggcaaagaagaagtcattctcgaattgctggagggttctgccgaaatattcggctcccagatatccatgcacaaacgctactctctccccccaggcgagtcactgaaacaatcgcattcacatatctttgctttttgcagggtttcgcgccgccgttttcacatataaaggtgcccttattgaagtggtcggtcgaacagatagtgcttacattgcacaacaaacacctatggttgggtttggttgaacgtcttggaggaatgcctccggggactcgaattttcattaaatttttgcatttccacagattatctatttgaatactcatgccgctctcgagagtatgcgaaaaagtgccgagacacaattggtggccgaccgaacatcttccgcccgtggtccacgtcttttggttgccggaccaactgatgttggaaaatcgactctttgtcgaatattatgcaattacgccgtccgggagggaaggacacctctttatgtggaccttgacattggacaggtaaaactacggaaaaaattcagattttgggaatttaataagcatttacatttgcgagactattatccttttagggcagtgtttccattcccgggaccatcggatgcctttacattgaaaagcccgcagacattgtggacggattcgatcgaaaagccgcctatgttcacaacgtattcaatttacttgtatttccatttcgattttaatttaagttcggtcacatttctccgtccgcgaacattcgactttatgaccttttggtgaaggaattggcacttgcagttcgcaaaaagagcaaatcatcttcaatctgtgatgtttccggattcattgtgaacacttgcggatgggtcaaaggggacgggtcggtgcttaatttttaatgggtacaccccaaaatctcgccgagacaaaatctggccgcagaaatttcaaaaaatttttttcgaacataaatttttcaaataaaaaattcttataaaattttttataagaaaatgtcaaaaaaaaaaattatttgttaagattttttgaaaatttttgagaaaacataatttatcataatttcataaagaattgcttaaaaattttctaaggatttttccttggaaaatttcttaagtttgaaaaaattgaaatttctgcggcgagattttgtcccgtcctcattttaattgccttcaattggtcttttgggacaggtcataaaatcccaactttattcttatgaatttcatttaattgcttaataaattttatggaaagtcccatggctttctttttcagttacgcttgcattgtgaatgcggcggaggcctttgagcccgacgttgttattgtcttggatcatgaacgtctttacaacgaattgcagcaggatttgccaagttttgtcaaggcaatgatcgattattatactattttttag

SEQ ID NO: 47324 - DNA, 102 bp, Heterodera glycines
gtcaacactttggtcacgcccgatcatacaaagaaagcgtatgttcgcttagccgccgattatgatgctttggacgtggccaacaagattggtattatttga

SEQ ID NO: 47325 - DNA, 667 bp, Heterodera glycines
aatcgtgtcgccaaaatagacgtggttccatcggccgcttctctgatcatcaaagaactgcgtgaaccgccaagggaccgcaagaaagtcaagaacggtatgaacaattagtaaaatcaacttttattaaacgattcaaaatcaacaaactattggtaccaaaacacgaatggttagtttattagattcacagagagcaaatgaaacaaacgtaacataactcgttagaaatgtggcgcaattttaaaagtgtcaacttttgggaacaaaaggtcccccccccccattggtttttagtaaaattcaaaacttgccaattttaaagtagcgtcgaaatcttattgctgaataatatcaggaatagaccaaggaataccagtaggtatggactggtcactattataaaacgcttttagtgaagcacagcggcaacctgaccattgaacaagtgatcaacatcgctcgtcagatgcgcccccgttcaatcgcacgaaaattgcaaggcaccgtcaaggaaattttgggtttgtttcctaatccattgcaacaaatttaacgaatttttataggcaccgctcaatcggttggctgtaccgtcgatggacaacaccctcacgacattgtggacatgatcagggcgggagagattgaagtgccagaagaatga

SEQ ID NO: 47326 - DNA, 441 bp, Heterodera glycines
catgacatgccttctttacccctgatatatttaaaaacggtgcagaatttttatttattgatttcacttaggtgttattaacgcttctcggaattccgtttatgaaagcgcccgcggaggcggaagctcaatgcgtggaattggaacggcttggccttgtcgacggaattgtcaccgatgatagcgatgtttggctttttggaggacggaaggtttatcggcacatgttcagtcggaaaaggcatttacaaaaatactgtgctgaggaaatcggcaagaaattgggttagttgtcactcttcaatccgatgactttgtctgaattggaaggattgagaagggccgagtttgtccaattgggaatgctggcgggcggcgattactctcgcggcttggaaaggatcggagttgtcgccgctcttgagttaatttccgaattcc

SEQ ID NO: 47327 - DNA, 991 bp, Heterodera glycines
atgacgacaacaaaagaagggagcatcaaacgcgagcagttttatgtgcgctattatgttggccacaaaggaaaggtgagaattgtgacgagtgttaattcgaagttggtcttttgggtcggagtcattttgagtttttggtaatatggtgcggatttgttcaccgggaaagcaaaataattttatttttagttcggtcatgaatttctcgagttcgaatttcgcccggacggcaagttgcgctacgcgaacaattccaattacaaaaacgacactttgatccgaaaggaatgctatgtgggcaagtcggttatggacgaattgaagcgtatcattgaagattctgagattatgaatgtgagttgttggcaaacatggtcataagaggattatgtgtcgaatggttgcaggaggatgatgccaattggcccgaacctgaccgagttggacgtcaggaactcgaaatattgagcgggaatgaccacgtgtcattcactaccagcaaaatcggttgtctcgtcgaagtgaacgacagcaaagatccggtgggactgcgctcgttttactatttggtccaggacttgaagtgtttggtgttctcactcatcggactgcacttcaaaatacgaccaattgcgcaatgatggactaattggtgacgttcttttaaacgacgaattccttttttgataagcgactttttggcataccaaaatggaaaacaaaaaaagaagacttttggtggtttcataacaagaaattttgcccattgtatgccaatttattttggacttttgatctttatttaacacgttatctcttcaattggtttgttgtttcaccaatttttaaaaatactggaaaaaacattatcatattcagtccaaattgcagggaaagatttggctttttagtgttttcctccaaaacagatcagcaaaaagttatatactataaagacgattgccgatgagacaaaaatccattaata

SEQ ID NO: 47328 - DNA, 1509 bp, Heterodera glycines
ttttgtctaatttcaaatctgtttcttccccttttgcagtggacatgcgcacttatgtgaccaaatttcagtgggaggccgcgcgctatccgatcaaacagtcgctgaaggcactcagcgaattaatcggaaaggtttttcccattttttggaaattgcgaaactaaaataaatggccaccataaaatacggacttacttttacaagccgtttaaatattacatagcatcaatctttttaaatgttttaattacatgagaattgttaaaaacgatggcattttccgagaaaaaaaaacaaaacaaaaaaatttcccataattttcctgtgaattttttctctgagaaagtccatttccatttggcacacatttcgttttgttcagcaagtcagccaaatcgacaacgacctcaaaatgaaggcgaccgcttacaatgcgctcaaaaatgccctcgcgtccatcgaccgaaaaacggcgtaagtttaaaaagctgccgattaaaggaatcgtttcattcatacgcgagcaaaaaatgaaaagagaaaactcaaatttttaattccgtcagagaaaaagtcgaggaaatttacgaaaaaacgaacataaaatattcattaaaaagcgaaaatgtttcagcggttctctgatcactcgcgatctgtccgatttggtgaaggcggacgactttgtgctcggctccgaatacctccaaactgtgtgtgttgtcgtgccaaagtttgtttttcacattttactttgttttaaaaaataaaattgaccattttggcaacaaaaaaagagacaagcaaccgccggatttatttgttgaaattgagaccatccataaagtcacaaaatgttatggcctgcggcgtagaaaaacaaaattttgagttttcgagctctagtcatttctcatttaattccgcgtatattttgtcgtttaaaccaccaaagtttggctccgttttcccattcagacttttgacgaaggactgggagaccaaataccacactttcgccacaatggtcgtcccggggtcggcgcgcaaaattgtggaggacgcggaccacgcgctgtacacagtgacactgttccagaaggtgttggacgagtacaaaggcgcgtgtcgggaaaacaagtgagcaaaaatggcatgggaaaacgaaatttattgggaaaaatggaataaaaatcatacgaatcattccccctaacttctacaaatggtcaaaaagtgggacccattctcactgcgggatgggcccgatgaaaaagagcttcgacaaatggagggaacagttccccccccccctcccgagtattcgggaaaaggacaaaatttaaaaaaattaaacaaaatttttgagaaaaaatcttaggtttttttaatacgaaagtttctagaaaaatttttcagagatttttttttttggaatttattagagtgccacgggaccgggacctggaagcggacaacatagtaccaaggtcccggtttgaccgg

SEQ ID NO: 47329 - DNA, 1864 bp, Heterodera glycines
  unsure (1)..(1864): unsure at all n locations
agaacactgcctttgtggatggatcaacaatttacgggtcaaatgccaaggatttgtacgttttaaatttaaaatttaattatttatcgaaactgatctgctgaacaagtgtgctctgatcacaaaaagaggagcccttttccaatgactgaaatgatgacaattctaaaaaaatgcttttgatatatttggctcgatcacccgtgatcagagctggattttggttgcaagacgaatctttccactcgctgccactgatcagctgagtgatcagcaactgctttagactgaaggtccgagacggtcgtaccggtttcctgaagatgtccagcttcaacggaatgatggttctgccgtttgatgccagccgttgcggtgccgccaccaaccgcggcacttgcgcagcagcaacttttgtcacgggggacagccgtgtgaacatggtaacgaaattttgctatttttgaatttaacaaatttgaaatctggcggtattcccgtaattttttggaatttttatgcgattgttacatccaaaagctattaaatgaagattaacctcacatctaaggccaattaaataattgatagacgacaaatgacaattatgttaattatgatttgactaaacgacaaatgatcaattttttgacaaaattgtcatgcatttccttcactttcacagttcattggcctttcctcgttatacacactttttgtccgggagcacaacaggtgccatttcttatgccaaaattgcatgccatttttaaatacatctgacagaattgcccgagaattgcaatcgttgaaccgggcatggagtggtgaccgactttttcaagtgagaaaaaaggcaaaaaatcaaaaacggcaaaaatggtgccaaaatttacttttggtattaacctaatggatgttttggtccttcaaacggatcttgaactatgttttgggcctactaaaaaatcgtaggagacccgcaaaattgtcggtgccgaaatccaagccgtcctctacaacgagttcattccgttgatgcttggcccatccgctgaacgtctgatcgggccctacaacggatacgaccaaaatgtggaccccaccgtggccaatgagttcaccgccgccgccttccgttttgggcacggaacgatcgtagtcagttttgacggatttacaggataatcgggtgattaaggaagatgaattttattggtcaagggcagtgccacgaaacttgccattctaatgggttttagaagctaattaacgggtcagacaatagaggattggatccgtcggagagttaattgaaataaattgttattggcgccaaaagcgcgcggtcgaaattcgaaatttgttgaaattttataagagaactttaattttcagaatttggcaaaactttttaaaataaattttcaagtagaaaaagaactggtgttctaatgttgttaattggctgatcattgacatttttaaggaacaattttcccgactcactgagaatggccagtcaatagcggcgggtccatttccattaaatgaaggcaataagtttggcatttgaaaaaaatgccaacaaattttatccccctaaaggcactttcaaatcgcaaaaattgttgtctgagggcggcattgacccggtgctgcgcggcttttggaacacaccaattaagcgaccgcaacaaatgactgctgcggtgacggaacacctgttctcagtgtatgtaagaaacatggcacaaaatgggacaaatgatcgacacaaaaacaaattaggcaataaatgggaagcgaatggtataaatcacggaaaattggataaatgaacaaanaggggataaatgatcag

SEQ ID NO: 47330 - DNA, 1717 bp, Heterodera glycines
atggtcagcttcgccgccttcacggtggcatgtttgcggcaatttatgtggagcaagccgaccgctgagcttggcatggcacattttgtgccgaccgccggcgatggcattggcagcagtcgcgcatttctgcaccgttaccgaacggcattccccaaatatgagaactatttgggtcagttttgtgtgtaggtggccagaaaattggacatcaaaaaattggataccctggtaaattggactcataaaaattgatacaaaattttatttatttttaaaatataaaatcaaaattagggaaaaaattaatttactagaaatcatcaaatatcaagccttttgatttattagatatagtgtccatattccagcggtttttgcttcgtttttcgactttttatgagaatttattccccgacaagggtgttttgatcctccccgacattttttaattttttccagccatccccggtatttggttggtgaatttcttctccgatcctcgacttttctccccaccgagggtcggggaggaactctaattcaaatttaaccgattgggattaagtgtatttttgaattttgccagagggaccgccgtttgcgccttgcctagagacgttgatttcttaatttgaagtctgattatgctatatagaatagaagaaaactaaatttatcaaatgtagcggaagtaatggtccgagcgcaaagtcgggaacctatataatttttttagaattggattttgatggaccacttgattatgaggagcgtaaagagcaaatatttgctctactcagatggccattggtgaatttatgtaactaaaatttaaaatattttattaaattcatttttgggcattatctattaatttaattgattaatttaggaggccggattggccaacaaagctgtcagttggttggccgaatttgacaaatacaaaaagaatgttgaatatcgaattgatgaggttaaaagcatgacaagaaaaaattatttattaattcatttaaatcagggtttgcaagttttttaattatgcgcccaaaaattcaattttttttttattattcatttttgtcttaattttttcgtaatacatttttgctgagcgctatttttcaaaacaattcagaggaagtaagaagccagagattccaataggcgccgtgagggaaaaaattgaaaatttttaataagatttttacaaaaaaagcctaactttttaaaagtattcctctccgaccttcaaactcagcactaaactgaagaaaaatcagcacatttgcgaactctcatttaaacaaaatattaaaacttgcactaaaaatttttataaaaaagtaaatttactatttttttttgaattaaatatttaaaaaatcaggactcaattttgcctcttctcacgcatgccttcctgcccgctaaacaatttcacaaattcgcatccgatgtgtacatttcgcaaggccatatccagcgttcgcgcatgtatttggagttgagtgatgaaggccgacaaaatatgtaaagcatttcgccaacaaaattatggcaaaaaaaaaaaatttgaaaatactttctttttttttgaagtgagtatttgatgcacgaaattttgccacgggctcgccatgctggacttcctctcgtattgaaggtgccgttcagcttcaacccggtgcatgacctttgggtaaataaa

SEQ ID NO: 47331 - DNA, 1354 bp, Heterodera glycines
atggcatttcacaaaatcgacactgactccgtgaactcaattaccaatgctttggactttttccgtataccccctacaaatgtgagcgtctcgtcttcaaaagtgtttgagcttctgcccagcaaccctctgaccgacacgccctaccacttcaaacttcactcaagccaaaatttcattgacctctccaaatgctatttgctcacagagtttcgaatccgtaaggaaaacgttaatggacaacttgttgacctaaccgctgatgatataaacattgcgccaattcaaatgatcggtcaaactttcatccgcaacattaaaatgagcatcaacgggcgcgaaatatttaatgccaatgctctgatggcttacaaaacatatttttcacatgagctctcctattcaacaacggcaaaggactcacacctgaatgcagcgggctactaccgggacccgggtgatgtgcttgagacgggagacggatgcacagcgcgacgcgatttgtttgcgctcagcaacgttgctcagttcattgccaaaattgacaccgacctgttcaatcagccactgtatctgatcaacttttgtgagctggacattgaaattttgcccaacgacaacaaatttgtgctaattgcgccgctcgcgggcgcaccccgctaccgtttcgaggttgtgggactgaaattgtatgtgaagaaggtgtctctgatggatgggttggcgctggacattgcgcgaaagttggaggtgaagcctgcccgctacgctgtgaggaaaacaatgatgaaatcactgttcatcagtccaggccgttacgagtttacagccaatttgttcatggaccaaatcccccggcgtgtgacaatgggcctggtggcgaatgctgattatgtcggctcaattcggcgcagtccattcaattttcagccatttaatgttcgcgaaatttccattgttgctaatggtcgctcgtacccacaagcgccctatgacttggactaccccagcggaaggtatgttcgcccattcaatgacatgaacgaagcggtgggattcgcaaactcatcggagagcaacggaataacttttgcccaatacggaaaaacgcattgcatttacgtgttcaatttgaccaacagcggggatgatcaagcggcactgtttgatctgataaagaatggcactacagcggtgagcatcaaatttaaccacccagtgccagacggaggtgtaatgttggtagtgatgggtgagtgtgattcactggtgatgctggacaaaaatcgatcgataagcacggacaccactatttaagctcagcacattgtcatttcatcattttgcaattaaa

SEQ ID NO: 47332 - DNA, 1252 bp, Heterodera glycines
atggcatttcacaaaatcgacactgactccgtgaactcaattaccaatgctttggactttttccgtataccccctacaaatgtgagcgtctcgtcttcaaaagtgtttgagcttctgcccagcaaccctctgaccgacacgccctaccacttcaaacttcactcaagccaaaatttcattgacctctccaaatgctatttgctcacagagtttcgaatccgtaaggaaaacgttaatggacaacttgttgacctaaccgctgatgatataaacattgcgccaattcaaatgatcggtcaaactttcatccgcaacattaaaatgagcatcaacgggcgcgaaatatttaatgccaatgctctgatggcttacaaaacatatttttcacatgagctctcctattcaacaacggcaaaggactcacacctgaatgcagcgggctactaccgggacccgggtgatgtgcttgagacgggagacggatgcacagcgcgacgcgatttgtttgcgctcagcaacgttgctcagttcattgccaaaattgacaccgacctgttcaatcagccactgtatctgatcaacttttgtgagctggacattgaaattttgcccaacgacaacaaatttgtgctaattgcgccgctcgcgggcgcaccccgctaccgtttcgaggttgtgggactgaaattgtatgtgaagaaggtgtctctgatggatgggttggcgctggacattgcgcgaaagttggaggtgaagcctgcccgctacgctgtgaggaaaacaatgatgaaatcactgttcatcagtccaggccgttacgagtttacagccaatttgttcatggaccaaatcccccggcgtgtgacaatgggcctggtggcgaatgctgattatgtcggctcaattcggcgcagtccattcaattttcagccatttaatgttcgcgaaatttccattgttgctaatggtcgctcgtacccacaagcgccctatgacttggactaccccagcggaaggtatgttcgcccattcaatgacatgaacgaagcggtgggattcgcaaactcatcggagagcaacggaataacttttgcccaatacggaaaaacgcattgcatttacgtgttcaatttgaccaacagcggggatgatcaagcggcactgtttgatctgataaagaatggcactacagcggtgagcatcaaatttaaccacccagtgccagacggaggtgtaatgttggtagtgatgg

SEQ ID NO: 47333 - DNA, 1125 bp, Heterodera glycines
atgtgttatatttcagcaaagtttctctccaatttaatatgcttcaaattgaaagttaacgcatgaaggaaaaattgcagaacgatatattcctctatatttccataaatttaaagaacaatcatgtcgatcattggtcccgaaatttttttttttctgggaattctttaacaagtttctttgggtattttgaggcgctgagcactagagaccggcgcgggacgggatcccgcgcgggattttgcgggatcccagtccgcattcccacattttttttaaaatgcgggattaatcccgcgggatcccgtcccgcaaagaattttgagttccaatcccgcagcgggatccgcaaatttgaaatttccggtctctactgagcactccatttcaacctatttataacaccagcctgaattcgaataaagtcgaaattggaatttttcgattttgatttttaatctaaaatggtttaaacgattttattgaagcactgatgagtatcagggatgactttcagttcgtttccgtgtgtgtaaacaaaggttgaacaaaatatgaaatttaaaagaactttaattttcaactttttatcagaattttgagttcggtgttcggaatttctggtttcaaattgtgttatggaccagtgtttgttattttaatgattcttttgaaataaattaatgcattttttaattttatatcaaaataatgaggtaacctttcaatgaaaaaaatctggcggcgagatagccaaaaaacaaggcgcggcgagttggccgcggcgagttgggcggcggcgagatagcccgcggcgagttggccacgcggcgagtttctcgcggcgagatggccgcggcgagttggccgcggcgaagtgaccccgaccccaaaccgaagcgcatcaacatgaacccgccgaacggagtgctcggcccaaaggagtccgtcaacgtggccgtctcctgcgacgccttcgaccccggcagcgaggacaccaagggcgaccgtgtgaccgtggagtggaccaacacgccggacccagccgccaccgcgttcaagctcgagtggttccagggagacgggatggtgcgccgcaagaacttgccgatcgagtacaacgtc

SEQ ID NO: 47334 - DNA, 5160 bp, Heterodera glycines
agaatgggctagtttttgtttggcattcaaaatgccaaaatcctctaaaaaaaaaattaaatccaattttctgcagcataacactgagggtgatcaatgccaacggtgtcaggccggatttatgcagaaaaagtggcggccaagccatgagggggacccatttgtgtgcgaaccgtgcaattgccatggccactcatccgaatgcgtttatgaggaggaattggacgagaaaaaagcatcattggacatttatggaaagtaataaaaagaaaatttgtttaaattattttaaataaaattttttggttttttatatatttaagaattttaataggaatttataggaaaatgagaatttttatatttgtaaattagatattttaataaaaataaaaatacatttgtttataatagtttaaatattaattattttttttaagaattttcattggaatttattggaaaatgagatgttttttttatattaattttgtatattacttgaaattattgttttttaaattgtatttaaacatttgaacttttaaaaagattttctggcggtggacactgtcaaaattgccaacacaacaccaagggcatcaactgcaacaaatgtacgcccggctttttccgtccaaatggcaaagaatggtcagaattggatgtgtgccaacgtaatatatattttttaaattttctaacaaatatgattgtaatttgaacagttttttcaataattaaattagtgtacaatcaaatttctaagaacgagattttcaagaattttctgcaagaaaatgagtctttttagtgtttgaaaaataaaaacgataaataaattaaaacaattaggtaaaaaaatgccaaatttaatgaaatcaaatgtaaaattatgcaaaagttatttattcatttttagtatcataaattattaattaatgattaaatatttacattgtcaaattaaaatgtttattttatattaaaaaaaacattgaatttatttgcctaattttgaaaaataggaattaaatttgttcatattgaattatgataaattattaaatttaattaaaatttcaattgcctaatcaaaactgataaataaattttaaataatcagatttaaaatggcctattttaaatgcaataaaatataataaatcgaaaaattgtaatcaaatttcttaatatgcaatatgataaattacaatacctaaatgattaaatataaataaaattatttcaattgcctgattaactgattaattaatttaattgcttttaaaaagcgtgccgctgcgacccgaccaaacacactggaaactgtgccgaatcgacgggacaatgtgaatgtctgccacaattcactggaccaaactgtgaccaatgttcaccgggctattaccatccgcccgagtgccgtccatgtgattgccatgtgaatggcacggaggggagccaatgcttggtgaacaaacacttggattttcttattttttagatttatggtagtttataaaaaagcaaatttagagaattaaaaatactcaattaaggattttaaagggttttagcccaaaattgttgtaattttttatttttcggcatttctttaaatgaatttaggggaaattaaaatcatttaattaaaatttttaaagcattttgtacccgaaaattggtgaagtttttaaattttggcatttcaaaaaatgaattgaatttagatattaaaattattttattaaaattttaaagtattctatgcccgaaagttgatgaatttagtcaatctcattttaataaataaataatttaatttaaaatattaaaaaaaaaataaattttgtatttaaatgaataaaattgtaccaaaaatttgtagcccgacagaccggacggacagtgcccgtgcaaggacggattcgctggacgactctgcgacaaatgtgcagctggttacgcgaacataacagctggtgaaaaaggctaattaattaattaatatcaattaaaatagtaaaaattatttatttaatttaattttatgcttattaaattaaaatttttcaaaaattcctaataatattaacttatttaacagattgtcctccgtgtggttgtgatgcggaaggatcggttagcagtgaatgtgacgtgaaaacaaccgcatgtgcatgcaaaagcaactttggtggcctacgctgcgagcagtgcgccaaaggctactacaagcatccgcagtgcgagttttgcgattgcgacccatccggaacggaagaccaagtacggcattttttgatttgtattaaattaattaatagtttaagcattttaattgggataaatggcaactcgtacaaaagaataactcatattttacaaactaaagcctgagtataaggcctaagcataggcctaacctaagaaattgtatgagttgtcatgacacctttaattgttagactttattaaaaataataataaattttaaataataattttagtgttcccaaaaattaattccattgaaataacaaaaaagcatggaaaaacacgcaagcagaaaaagtcagagtatggcaacaaataaataaatataatttaattaatatttttacgaacaatcaccgttttaatctcatcattttaatatatttgttgcaaaagaccaatgccagatgtttaatttatttaaatatttgcattaaataaaactattttttgttagtttttttttattttaaaaattgaaattttggttgaaattcgttagtgaattttgcccaaaattgtcattgttttgaattaaaaatcccaaaaaaacacacacacttcttatgagcctcaaactgatcaacaaaaaaaaaagtgatcaaataaaaaaaccagcaaaaattcacttatttggttcggatccgctcgacagatgatgagtttattttgatttttcttcaaagtattattcgatctaacatctcattattcagatatttatttaatttattttatgataaccaattgatagagaattgttttgctgataattttttaaggaatttgatggctcaagcatgagtttggaattttttgtgaattttttaaaaaagtaaccttttttattgttttccgaaactttgatcactttttctgatcagtttaggggtcagggccaaaaagccaaaaatttggaatagcaaatcgactaagggttgtttaaaataaaattaattgcccttttaggtttgcgattcggcaagtggccaatgtttgtgcaaggcgggtttcgcgggccggcgctgcgaccgctgcgatgacgaattctacggctacccgaactgtcgtgagtgcagttgccatgagaaaggatcaaagacgaaggaatgcgatcagaaaaccggggaatggtaattcaaatggagaatataattaattaattaattaattcttgaagaaatatgaataaatagttttttaaattttaattaaaaaaattaatttaaaaaaaattctttttcaatttaattgggggacaaataattaatcaaattatttattgataaatatcattaaaatgattttattttaattaaaattcaaaaaataatcatttcaattcaattaaattggggaaaaattattaatttaattgaaaaaatattattaaaatggtttattttaataataattaaaaaattacaattccaaagttaaattgacgaaatataattaatttaattattattgaagaaatattattaaaatggtttattttattgaagtccatgctttgccaactttactggtcgcacctgcgacaaatgttccgctggccattaccgtttccccgagtgtttggcatgcgactgtttttcggccggctccaagggactcacatgcgacttcgatggccaatgctattgtcgggaaaattttgaaggcaaacgctgtgaacggtaaaaaaaaaagttcaatttaatttaattttttgccgtacaaaaaaatatacaatgatttggcattgaaggcatagagaaacaatttatgccctaattaaccccctgaaaatttcaaaaaaaaaaagtcagaaaattctcaaatccgttaaattctcgctttatactgataattagggctccaatttataggcactaaaaccgctaaaataggtaggctttgggctctaaaaaacccccaaaataggctacaaaaaatgaaaaataggctctaaaaagtctcaaatttaggggtgtaaaatgaaaaaaataaaataagtcaaaccagtattgagttatacattattttttaaattcaaaaaattgtccaaaaaaatttttaaatacgatttttgagaagattttcatttcttaggggatttattttcagaaacttttgaatctctgcttaggggtgtatttttaaaattccaaaaaaatcgatacttagggggtgtattttttttattattattgtatttttgctaacaaattttcggcaaaacgccaaaataggcaaaaatagggtctttcaaaattttttaggctttttaggctctaaaaataaaagcctagaaaataggtactaataactcgaaaaatagcttaacaacagcccaaaaaaacatgtttttcgtacgtttcaggccacggggagctcaggaaaaaaatagccttttgcctaaaaattggagccctactgataatgattcaaagctaaacgaaaatattgaacagaaaattcttgggattatcaaaatatatttaaatcatgctttaaccccatttaaaatacaattttatttaattttcctaattttatttaaattattttcatcattggcaaagagttaatattatttttccccaattatgctgaagtacaatgaaatttttcaatatttaactcctaattgacccatgcgcgagtcaataaaaactaaaaagcgtaattctcgcgtattaaaaaaaattttttttttctcatttcatgtgtaaataaaaaagatattcgaattttgtttaaaacatatttattttcatgggtattaagtggcattattaatgtctcattattttatagacaattttttatactaaaaaaaaaatcgaacaaatttcttgttaatgtccgtatatgttttcaatttatatactc

SEQ ID NO: 47335 - DNA, 1243 bp, Heterodera glycines
  unsure (1)..(1243): unsure at all n locations
atgccgaatccgataacactggttgacatgacttcagacaatgtggtggattatcaatggtgcactcgtgaggaattggctgaattgaaattagagacaagggagaggcaacagtacagatctgctttttcttttgcgttgattgaataaagcacttgtattgttaactgaataaatctcttaattatctaattctttttcgctttggttgtcgaacaaacaaaccaatattttctgaaatttatttttggttgcgcacaacaatttatttattgaaaactaataggtatttgtcatcatcactcatcattatgttcctttgtgagataaaagaaaaatgaaaacgtatagtaaagtaatacatagtaagctgtggttgtttcctttcatatgttcgcttattaatgctgataaatttctaatcgattctctgcttttaatttttttattgtactaattaaccaaatcataattaacagacatttactatttaggtatataacattgcttaaaaaacgacacgaaataatgtcatacaaattccaaagatcgctaggtaagtgattatttcacgaccaaagatgcaacagtcaattgcatttttagaagtggccactgatcaaacgttgatagagccaaactgggaagtcattctcgaatgcgttgatatgataaggggaggcgaagtgccgtcagtttgaatttcctttatgacgattactaaagattctttcagtgtgaaagaagcattaaaacacattcaaaagcgttatcgcaattcgaacccgcacatttcacatcatgctttgcttattttggaagcttgtgttaagaattgcggcaaaaaggtagggtttcattgggaaaataatattattttttgggtttagttcattcgggaagtggcaaccaaggaagtcatggacgacctcaaaagcatgattatttcggacccgcctgagaagattagagaaaagctgcttgagcttattcagtgctggacatccgctttcaagggaattcccgagttcaaaattgtggaggacacgcacagtctgttaaaaatgaatggcttcgaatttccgccaattgacgaagcaaaggctatgtttttggctgattgtgcccctgactgggccgaaggagacaattgttatcggtgagtgaaaatgaacattaagatacctgtctgcacatttaactttacagaggccgcgttgaatttggcatgttcacccgntaa

SEQ ID NO: 47336 - DNA, 803 bp, Heterodera glycines
atgccgtcccaaggaggtaaaaaagtgctcttatcaacaacattttgccatttaaattgtgtttttttaatttcagaactcaaagaaatcttcaacctttacgatgagggtaaggcaaaagccgagcaaaaatggaccaaatatcaaattggaccaaattttatgttcaatggaggcaatttccgatcaaatttatccgccgagggcaaatttctgatcacctttctgttgaaatgttttggctttgctttttactgatcattttcagaattggagggcaaaatcgacgccacgcaaattggcgacgtggcacgcgcgtgtgggctgaagccgaccaatgcgatggtttggaaagcggcgggcgaagaatacaaacgcaagggcgagaagaaattggcattcgaagaatggctgcccatcttcgaacagttgcagaaggagaaggtgaggtggcaaacagcacaaaaaagcaacggaagggacggcacggggggggaggaaaagcagggggtacggaaggaaggaaggacccatcagcagtgccaaaggaggaggaggatatggcaaaacggggtatggaaggagaggtgtccccaaatgagggccaaaccctttttacacattcagaatcccagcgtccctatttttcaaattttcttttgtttttaaacaaatttcaaaaaatccaggtcaaggcctgggccagccctttacaacacttgatttttcatggcatgatttttgtccaggaaatccaagtccaggcctttctcaaaatgtccaattctaatggcaacatttaa

SEQ ID NO: 47337 - DNA, 2377 bp, Heterodera glycines
atgaacagactcgaccgatccttggtggaagatctcttcgccgaccgccacattcaagtttgttgttctccattccacattttcattcaaattgcaattgttcaattaattttaggttttggtctctaccgcaaccctcgcgtggggtgtgaacctcccagctcagtaagtttaataaccgtgaaacatagccattttgtacagaataaaccatttactgctaattattctcttttttaggactgtgatcattaaagggactcaaatttacaaccctcaaaagggtgcttggactgaaatcggtccattggatattatgcagatgatgggaagggcagggcgtcctcaacataacgcactcggaaaaggcattttgatgacccacaacaccgaactgcaatattatctgtcgttgatgaaccaacaggttacaaacaccgattttgggttttgtcgtaatgaaaactttttcattcagttgccgatcgaaagtcaattggttgcaaaattgccagacactcttaacgcggaaattgtactcggaactgtcacaaacgttgtggaagcgatggaatggctcacttacacatatttacacgtgcgaatgtgcaaggcaccagcactgtacggaattgtcgcagatgtaagtccattggagcaattagacacacaaaagccaaacttctgttcctcaggaaaatgacaaattgctggagaaaccgcgggctgacttgattcacacagcttgtttgctgttggacaagggaaatctgatcaaatacgacaggaagactggcttaattcaggtttatcggtgtcaagaattgctggaatattcttttgcgttgagtttaggcacaagaattgggtcgaattgcctcgcattattactgtacttacgaaagtatggagacttacaacaaactgcttaaagaaacggccactgaaattgacctcttccgcattttttcgctttcatccgagttcaaacaaatccatgtgcgagaggaggaaaagttggagctgcaaaaattggccgaatgtgtgccgatacccatcaaagagtcactggaagagccaagtgccaaagtcaatgttttgctccaagtatgatgtttacatctttatacaaatgatgcgttttctcattgtcatttaggcatatgtttctcaactcaaattggagggttttgcgcttcaaagtgacatggtgttcatctcccaatccgcgggtcgactcttccgagctctcttcgaaatcgttctttggcgtggatgggcccaactggcattggtgttctcttttttcaaactaaaactaaacaaaaaaaattatttagaaagtgctcggtctttgcaaaatggtcaatgctcgccagtggcaatcgttgaaccctctccatcaattcaaaaaactgccattagacattgtacgtacgttggacaagaaaaatttatcgtttgaccgtctgtacgatttggacgctcatcaattgggcgaactcgtccgagtgccaaagatgggcaaacccttgtacaaattcatacgacaggtgataacgcccatttacgactattgttttgcatttgttcgcttttcagattcctaagctcgacatgaccactttgattttgccaatcactcgttcaactctccgcgtggaactgacaattacgccagattttcaatgggacgaaaaggttcatggaagctcagagggattttggattttcgtcgaagacgttaacggcgaaattattctgcaccatgaatactttttgctcaaacagtgagtacaataaataggttgttgtttaataatgtcactaataatgaatatttcagaaaatattgcgaagaggagcacgtggtgaagatgttcgtgcccgtgttcgaccctctcccgccgttatatttcattcgaattgtatcggaccgatggcttggcagtgaaactgttttgcccgtctcattccgtcatttaattctgcctgagaaatatcctcctccgaccgaacttttggacttgcagccgttgccggtgtccgcgttgaacaacgcgacctttgaagcaatcttctcgaaacgtggaattcgtttgttcaaccccatccaaacccaaggcaaataatcaaccatcactttacttaatagatataaattcaatttgtttggtttagtctttcgaacttgctacgaaagcaatgaaaacgttttgatcggtgctccgaatggcagtggaaaaggcgtttgtgccgagtttgctctcctccgccactttgagaataaccctcctgggtcgaaggcggtttactgcacgccgttggatgacttggccaaaaatgtattaatttcgaatttgttttctttattaaa

SEQ ID NO: 47338 - DNA, 1068 bp, Heterodera glycines
atggagcaaaacagcagtgaaaatcaaggttttatgaaacgggcggcacggttttcggatggtcgaatgtgtgaaacaatggttaagctgaattttgatctagcgcatcagaatgcacggatgcttaacaaccaagacattgtgttcacaattcaccgaaacagcgatgcgcttcttctgcaaacgccgccttggaagaccgtacatgctgatggtacggaaacatggaacgaaaacactgatgagtatcgtatccggctacacgataggcgtgtttatgtgcgcacagtagacgcaacaccaagcctgaaccttgcaattagtaaacaattggagaattctttcgcaaaatacgcgcttcgtaagggggaaatgcgctccgtctttttgggaacaggtcgaaccgagctgtcacataacgtgttcacctcaacgctgcctcgccgcctgatctgcacatttgtctcaacggatgcctattccggcgctcgtcatctgtcaccgttcaaatttgagcatgcgcatgtgcgatcgctcagcgctgaggcaaatggacaaacatttccctccactccgtacctgttttcgttcgagggagggcctgacaacaaacaacaacgcttcatacgcgcattcgtggacatgtatgctggccttgggctcgacgaaacagacaacaataaaacagtgtcaattgatatgcaacgattcttaaacggatgggcattttttgtgatcccgatgacctccaccctagaggatacggcaggatttgagctaatccgtcagggtacgtgcactgttaaggtccaatttgagcagcctataaaagcggacggttatgaaatgttgatcctcggcgagtttgactccatcctctccattaacgcagatcgtgtgctcagcacagacggaagtgtataaataatctggacgcttgctaaaatgaattcgttgcaaattcatttaattctgaacagattacaaaaaactaagcataaatttattggcgtcttcccgtccaataaggttccacttgaacgtaaaagattccctcactgtatggta

SEQ ID NO: 47339 - DNA, 2817 bp, Heterodera glycines
gactcatttcgttttttgttttcttaaggaatgcttttagaccggcgcaggcggaggaattgggcgtacttatgcacttgaatttgcacgcagaggtgccaaagtgataggttagtttagataatattacaatggaaaatgttattacaaaccaagtgaatgacttgggaggggaccgccacggaaaatccgcgtcgacttcggcagcagacaaagtcgtagccgaaatcctagcggcaggaggaaaagcggtgccaaactatgacaggttggccatgggaaatggcaccctatgaagcagccaattggacagtgttgaaaatggagacaaaattgtgaggactgccatcgataattttggtcgaattggtcggtctttataatgcacaatatgtaaaagtaccttcttgggttctcacttcagatatcgtgataaacaatgctggcattttgcgggatgtcagttttggcaaaatgtctgagttcgattggggtttgtcatttttatgcctttggcaattttttaaatgtttctttttttatattgatagattcggtaatgaaagtccacgtgaaggttctaattgttctcactgtcttaatttctctgttttacttttcctaagggtgccttttcggtgactaaagcggcgtgggaacacatgcgggcgcaaaagtacggacgtttggtgtttacttcgtccaattcgggcatttatggaagtttcggccaggcgaattatgcagcaggtgagacgaaaaactgaaaaactaacgggttggcatgaccaaaaaagagaccgatggatttcaaggagtagtcgaaaatggaatcttgaagaaaaaaaaacacacatcataaatacaaatattttaagttcaatgactcgataaatagtgcagcaacccgctgaaacgccttggactaattttaattgtttagcgaaaatggcactgattggtctatccaacactttggcgttggaaggagcaaagtacaacatcgccagcaatgttttggtttgtattcccactatattctattaattttaattgctcatcttcctcattttgaggtgccaactgctggttcgcgaatgactcaaacagtgatgcctgaagaattgctgacggcgatgaagccagaatttgttactccgcttactgttttcctggcacatgaaagttgcaacgccaccggaagagtttttgaagccggggcggggtggtatggcacaggtcaatgggctgggcttgggggatagggaaggccaaggagcggaaaatggccagaaaactgtcaattatttgagcattttggccaaccaacttttacataaacgaaaattttcaaaagttagaaaaatctatgtaatacaaaatttttgaagcgctttcgaaccgtaccaagaatgtttaatttggtttgaaaaaaatcgtgatgcggtcgacgttttgttcttctccgcttcgaatcacagtgtgaaaatgcgtttgtttttgttttagttgagcagttccgttctcgaggaaaagttatcgcagaaccaaccgtggagaaatgtcagtttgacattaaaaatgcgcaactttgacaatttttttcagtggtcgaaaattgggaggaaatttgcgatatgagtggggcacagcacattgggagcatgcgagaagtgatggagaatttgatggacgccctcggggtgaacaaatccaaaatgtgatatggcctttaattaggccccgtaaagccggtaattaacctaaccaaactttgtagattctgagccaaattaataaaagtgccataaatgattttttgagatgattcaagaattttgttgagaaagatattgacaacggctaaaaagttgaagggtgggcgtgggaagatgggatattcggggcacgaccggacatttggacaatgggcatttcgacagacaacttccgttttcttggcttatatcgactgaattttagcattccattttcctaagaacttcaaaaaatatttggttttttactaaagtcatttttattttttaaaaattctttttctgtcgtaatgtccgctgtccatttctgtccgaatgccattggagcattcggggggagtcgaatcgcgaggctttgcccccggggctttgttccgccgtttgccgctctccctgctgatattcttttctttctgctccctccctcggcttcatttcagtccgctgtgctgcagtcggctgctcaactgttccaccatcggatcactgctcgcttgacggcttgtcgagcgccgaatttcctgccaaaacaaattgaaagcatttgcattttgatcattgcaattgtcggcttcgcttttacttcgatgcgttgttcgaagttcgaatctctcgaactcgcactcatcgattgctgctgacgattcgcttggcgttgactttcggtcattgcttaaaagcgattgttcgttacgctgtcaataccaaacaatgacagatcagagaatgatccgctcactttcgtccctcaactgttgcacaaatttcaatggacttggcacatttggcggggatgtgtagggcgggtagggcccgaatctgtgattggcaattgtccaaaagaggggagtccgtcccatcgatggcttacgattcctctacggtctgtgtgtagtgttggcgggtgattgtccgcgtggtctccaggctcgggtcgatcactgtcacgggcgttgtggtcgcgtattggtggatcagctcgcgtgggttcgtcacccggtagtccttcttaatctcatagcgcattcccggctcatat

SEQ ID NO: 47340 - DNA, 2194 bp, Heterodera glycines
ccctccgttccgcggctgcccaggcccggctgccgtacgatcgtgatgaccaaaaaggagttggagctgttcccggagatgagccgagcccaggcttcggtggcactgttcctttacattcgcaatcgaacggtggctggcactttttctgaatgatttcttccgtcggattattagtacaatattccccacttttttccttggctttttgcccttttctgacgacatcccataaactgcttaatggtcaaactttttcttaattccgagcccattaaattgagttatttgctaattcagtcttgaaaaaggcaactaaaaatgaacaaattgaaaaatcaacaataattatgtgcgttttgatcatattattaacactcactttttgctcttttagtaaaatttcgcttcccttttcagttggtcctttggcaactcgaccctttggttgagctgaccgtcgaatacattctcaccgaacttccggcaccctttgacagttcgattttccctcttttgagtcgttttatccgtcccttctttaggtgacgttgagttggtcaccggcattcatgcgtatttgcagcgctacggcttcatcaattttggccttttccaccaactaacgggtttgttttgttttgtttgtcatatctgaatgacaatgaattcggcaaaaggcacgccctttacggttttcaaaatggtcctttttaaaatgaaatttagcgcgtcgtttggaccgcccgaagactgtcattgtcatcggtgccggcccggccgggctcgccgctgcgcgtcagctcaaattcttcggcttttccgtcattttgctggaagggcgggtgggaaaggggcgcggtaaggcaaataaatgccatcaatgttctcccttttcaggctcgtccgggtggacgtgtccaaaccatcaatcgcacccattccgcggaccttggggcgatgattgtcatgggcattagtgcgtttcactctgtttttcattccgttgcttttactttggccactatttgctaatttcagtgggaaatccgttggtcactttgatccaacaggcaccggtgaccgttttccgtgccagcaatcgctgtcccatttatgacaaccaggcaagttcgtttgtttgttagacaatttccaactttgcatcgtttgtttttcactcacaattattgaaatttgtgggttttagggcaaattggtggacagtcgcaaggatgatatgattgagcgttcgttcaaccgcattttgggcacaatttcctatctttcgcacgccgaaggcgtcaccgagacgaaactgcccggggaaacggcggggcggaaaatcagcctgggcaaggcgttcgaactgatcctcaggtcactccctcttattcgcttataaaacaaatgcaaatttcaatgatttcaaaatgcggtccctgggaaagggaggggcaaacggctaattgtaaagggttcattttgacatgacttatgatttgacaatggacacttttcttccttttcagccaacaggaattgcgcgtcaaaaacaaatggctcaatttttggcagaaatactactacttgttgaaaaagttggaaatcgaaaaactcagagtgaggcgaaggcaaaaaaactaaaaaaatagcggggcctaattcattaaattaattaattagtcgtttccaaactattgggttagttgcttttgttttcaattcctcaggtcgattctctccacgctcagcttgccgattgtatgcagagactgcgcgaaaacggaattgcgaatccggcggaagcgaccgcggaaacggtggggtttttatttattttttttaaaaaatatttttgagccatgtatttgcaaatccaacaattttggaatcaccccctcgccccaatttttcgtaaaccatttcgggactcaaattatgctgcatttctcagattgccgtcaattttgaagaatcggccgaaaaagttgaacagcaaatgattgtgcgggctttgcgtaaaatcacggagatcactttggaagtgggctatttttttggcttctgtttattggcataaatttccaataaattttttttctatcctttcaagaagtatgacgaggccgagcgcgaacggaacaacaccgaaaacgtattgaaggacttcaaacagatggaaccgaggtga

SEQ ID NO: 47341 - DNA, 3659 bp, Heterodera glycines
atgccttcatccaactcattctatgtgatcgttccttccaacacaaatgttgaaggaaatcgcacaaactcttttcgagttcgactaccaagaaaacttcaatttaattcggaatgggatgtgggcttaggtgtgatcatatacccccattcgtggccctcactcggcacatcagaggaccaatttgttcaaattgaatggaaaattggagagaatgttcaaataccaattccatcctctaacgtgacaaaccccgttgagctttggaaaagtctttacaaactgcttgaagaaggcaacaaaccgttcgcagttaaagtggaaggcgtacagaaaaaatttactgaagcggccaatacagcacgtcaattgggcagagccgagtacatcaataaacaacaacaacaacaaagagacaaaagaaatgttaatgatgatgatgatgatgatgataaaaacgaagaagaattattaaacgcccttttagcgggggttgacacgttgcttgacctttacggagcaaccagtggtggtctacttgagagagaaaaacgtgcagcaacaagcaaggtccccctgcggaattgggatgacactgaagaggaatatcagaaaaagcttgataaatattttttgcgtctacgtggccgtaatttagaacacttagagggactgataacagaaaagttgaatgcggaaattgcactgatggatgacgaagaaaggacaattctcgatcaaaccaaagaattaggcatgacagcgtggataaaaatttttcaatcagcgtactctgcatgtttcctgcattttgacagtgcaacgaacagattttcgttgaaactggacgatcgttatgtgcaaaaaataaaaatttcagaccaattggcctacattttgggttttaactcaaccgatttcactgaaaaagaaacgattgcaaaatttatgccagacatgagtggaggagttgcttcttttcatgtttatgcacctgatctaattgaaccaatgatgattggtgacgtgattgccccagttttgcgtatcgttacgattcggggaaaacctgacgaaattatagaggagcagtttctctccgtccaataccatcgcgtactagtcaaagaaataagtgaaattttcatcgaaatcagaacatccggtggtaacctaatgccatttcaatacggtacatgtacattaaccttacactttagaaaaagttcctacttttaaaaatgaacagtgttcaaataaataaaattcttgctcgaaacccagtcacgcgttcgacctttttagggtgttttccatcagatcaaattccagcagtagcagccacaccagctccttattcaatggtgattaacgttgatccgagcggttcacctggttcacattgggttgccgtgtattgcgagcagcaaaatcgggtggaatactacgattcgacaggaatttggccaccgctaagccctttcatccaaaaatttttaaagagttttgctcaaattcagtttcatcaactttcgctccaagcaccatactcacactcatgcggaaagcatgtgattttctttatatttggacggtgtatggggatgcactttgaagcaattttgcaactgctaaaacgcgcaaaaatatcaccagatttttttgtaaacaaatttatgcaaaaaaatgtgtttaaacaaatataaataactagaaaactcaatttaaaaagcgcaaaaaaaaaaagaaagaaaaatgcacgttgattttgatccttttaaagttgaatggtcagcattaacccaaatttctccagaagtagtcgtccaatacggtggttataatgtgttcagaggggttccataccagcgcggtagtggtatcgggtctgtttttaggagtctattgcgttacctaataccaattgggaaagaaatcgggacagccatcgggcgccaaggacttgaatctggaaatcgagttctatccaatgtattagagggtagggacctcaaagagtcacttgttagtgagggaaaaacggggctcaaaaatttgctagagaaagcagccaacaacataaatgcccaaaaaggtcaagggttcgactttaaacgatacacaaagagaaatgatgcaagagaaggtggtgcaattggtaaagcgaaaaaaggtataaataaactacaatcaaggttgggaccacacgatttcctaccagcaaacaccccagcaggtcggaagaaaaaacacactaaacagaaatcggtcaaacgccttcgtaccgatatacttggaacctattaataaaacaaccccccagaagcacaatcatgagttgttcacaaaaaattagcgaaagtagtccccttgccacaaatagtgctttgaacattttttcagtacctccaacaaatgtgtcggttgtgcgctcatatttccgtgaagtcctccccctagtgacaataacgcaagaatctccgtatctttttcgcctgtacagtgacaatctttggaccgatctttcccggatttatctcttccttgacctttcaatagaaaaaccggatgtggacggcaactgggtgtcaatcgcagctaccgatgctcaagtcggcaccattcagggaattggtcaaacatttgttcaacaactaaaagtctcagttggaaacactgaaatttacgacagcggaaatttgtacccatataaggtttacattacgaacacactttcgtttccgatgaacgtcaaaaaaagcttcctcgcttcaactggtcactatgcgacacgcacacacgacagcgtcgctgatgagggctttaaagctcggtgtaaaatttttgagggtgggaagcgagcccaatttctttcacgtctggactttgacctgggaaaccaagaactttatttgttgaacaatttggatcttttatttacaatttacaaagctcgtgacactttcatcatgcagacattgaaagcaaacgatactaccaaataccgcgttagagtccatgacgtaaaactgtatgctaaaatgattgatgttcagtcatctttgaatttaagcatctacaaaacgcttgaaaaacaaccagccacatatgcagtgcgaaaaactgaaatcaaatcatgctttataagtgaaggtaggtttgaaattgactacaatgtattcagtgcaacaattcctcgacgtatgacaatcgcacttgtcgcaaacggggcatttaacggaaattatgctctctctccatttaattttaaaccgtttgacattcgagacattgcagtgtacgctggaggcatgatttacccaattgttccatacaaacttgactttgccaaagatatttttgtccgtccttttgttgacatgtatgaggcacttggcatggctaattcagagcgttctttcgacatcacaaaagagcaattcaaatctggttggaccttttttgtaattccactcacatcgacgctcgacgatagcacagggtatgaactcttaagaagcgggacaactagcattcgcgcaacatttaatagtgcaattcctgagggcggagttgaaatgatagtgctgggtgaatttgaccaaatgataatgatagactacaaccgtcacattgtttccgattcaaagcttagttaa

SEQ ID NO: 47342 - DNA, 1400 bp, Heterodera glycines
ccccccccccccccaattaggccgagtacgaaatgatcacgaaggggcccaagtcgcgtgccttttaccgcgtccaggcgacgcgtcgcctcgtcggcggtggcgacatcgtgcgcaaaaggttggagcgcgagcacgacaaggcgggcgatgtgacagtgcaggaacaggagagacaggcacgacgacacacgtgccgcattttcttcgacccggcacattacacagtgctagagagtgtgggcgtattcgacgtgatggtcggaagggacggcgggccggacggactgacggtgatggcggattattacacggaggacggcacggcgaatgctgggtcggactatcagccggtcaaaggcacgctgacattccacccggaggacaaacaccaggcgagaatggcaaaagatgggccaaaccatttgccaagggatgaccaaatgattggcaaaagatggagcaattagttaattggtcaatcatttgtcataatctttggcaactgattttgccaattgcttgtttttgatctctttgttgcccttttcagaagattagcatcgaaattgttgatgatgatgtgtgagtgtcgcttcgtccctttgtcttttcaatttccgtccgttttttcagatttgaggaggacgaacacttttacttgcatttgaccaaccttcgggtccgaactcgggacggactcattttggacccctcgcgaatcggaggagtgccggtggccatgttcgacttggtaatgaggcatcatttcacggcatataaatgcctctgcaatcctctgtaatttattaatcgctcccttcccaaatcagccgaccaccgcgaccataatgatccttggtccgtttgcctaattgaccacttattatgctcatttgtttgcagatgatgaccatgccggagtgttctctttcgagcacgaccattacgtaactgtggagaactgtggtcacgtcactctgcgagtgcagcggacgagcggatgccgtggccaagttgtgttgccgtacaggtggcaaagccgggggaggggaaagtgccaaaacaatgcgaattgacacgaaaggaccatcgacggcacggcatccggcggaaagcatttcgaggtcaaagagggcgaagtggttttcgagaacaatcaaacggagtaagtgaaaggaaaggccgaattggaaagtgccacaatttagggcattcatcgacattggcatcatggacacggaacagtacgaggtgagtgattggtgagtgatcgctctgatcactccagtgcctttacaatgtttgccgtccattcattcctttaattcattcttttaagcgttccgactttttctccatggaattgaaagatccaatttggacaaagaaaatgtcag

SEQ ID NO: 47343 - DNA, 673 bp, Heterodera glycines
cgaaggggacgggcccggcctgaaacagttggtggagcaggtggtgcgcaccaccggcatcaacgaggtggcggacacaggtgggcattcgtcagtcctacctctaattagttcgttctagcactaatttagtcagtcctgccgctaattagtcagtccattactccttaaaagtcatcccatattactgcctaaaaaatcatcccccctcattatcccctaaaaatgccattcctaattgtccccccccccccctctttccaatcacacagaaacgatgcgtgtcgtcaagggcgagacgtcctcccgccagtcgtaccaacggtcggccaagggcaatgtgtccattttggagacgtcgccggagggcaaatacgtggtgttggagaacacacaccgatcaaaggaggagaccattggagagtggaagctgaagcgtcgcattgatggcaagcgcgaaattgtgtacacattgcccgccaactttgtgctccgcccgatggcccgtctgaaggtgcgttttcgtttttggcgtagagcgcagttagcccgctgatcgctgatcagagcattatcgattggtcagagtgaaaggaagaaaaacacagtgagcggtttaacccaggggtgcgatcggttcttatttgtaagaaatgttctgattttgggctat

SEQ ID NO: 47344 - DNA, 1686 bp, Heterodera glycines; identical to SEQ ID NO: 16143

SEQ ID NO: 47345 - DNA, 1113 bp, Heterodera glycines
atgacatcgttcagcgacgaagtggagcaccgttaccaggccaagctgcaggaacagctgcaggccatgcgggacgactttgacaatcgcattgcgcagaaccgtgccgaggtatgtgtccagggtgaatcagcaagccggggcaattttcttaaagcgaaaaacaagaccaatgtcagggatggtaccagaaatttggtttggtttcaggtcgatgagctgtaccgcaacaagctgggcgaggcggctgaaaacgcgaacagaaaccgtgacttggcggccaaggcgcgcgaggaagcggcaatgtggcgcgtccgtgttcaggacttggagaactccagcaaagaccatcagggcatcgtcgagtcgctgaaccgtcgtgttaaggtttgtttttttctcgcgaaacccaattcgttgagttttgaccccaaaatgtctaaaaagctatgaattctgaaattttctccctgttagaaaagtgtaaaatattcggagaatttttttttttttggatttttgacacgaagagcaaaagccctgaccaactgattatgatttgctcacatttttaaggacttggaggcggcgttgcgccgcgcgcacgaggacgccgacattcgcattcaacagcgcgacgaacagattgagcaactgcagaaggaaattgcgttgatgatcagtgactaccaggacttgttggatgtcaaagtgcagttggacaccgaattgcaggcgtaccagaagatgttggagcaggaggagaccaggttggcattgatggggagaagagagcggaattggggggggggttgaatttgtaactgtcccgtttatttttttggattcatttgctttgtgtttcaatttttaatcaaaatttctctccacagattgcacattacgccgtcgaccagtccgaacacgtcggttgtcgggcagaacatcagcacgcctaacatggtcatttccacgccacgtccggtcagcccgcgtttggcgacgccggttactcagagcgaaagtctgaccaccgtccgccgtggggtgaagcgccgccgtctcaaccaggatgacattgtctccttcgacaaaacgtccagctcgtggaag

SEQ ID NO: 47346 - DNA, 757 bp, Heterodera glycines
atggcttcgaaaagtaaacgaacgactcgatcacagcgcgaagctgccattcacattgatgcaagtgcggatgagaccatcgaaagcaggttaagttaaaaaactgttttcagtgatggcttcgatttcaataaatttccaacatgcaaaaaaatttttttgttagcatttatgctttttggaaaatcaaatgctaatttttcgcttcccttttttcagcagtaatggctcaacaattaacagttcatcgggtcatctgtcgtcgcgtcaggacgagaagaaccacctgtgcaatcttaacgaccgtcttgctggctacattgaggtttcgcttttttatagagtagaaattgagttttaaattttcggtggtccgttgatgcctcgaaatttcatttgaattcatctaactttctcattgtttgtaatttttgatgcacaacagccattgctatttcagggatggatgggaatcccgccaaaaagtgattatattagtagtttttcagccttaagaacctcaatggaaacccaccaatggataaaaataaataccagtaattaagatttacaaataaatgttttccttcagcgcgtgcgcagtctcgagacggagaatgcgcgtctacagatccaagtgcgcgaggttgaggttgtggagcgcaaggagaaggaaaatttgtcggcccgctacgagatcaaaatcgacgaactgcgcaagcagttggagttcttcacgcgtgaaaaggccaagtag

SEQ ID NO: 47347 - DNA, 978 bp, Heterodera glycines
atggaattttcttcaactgattatctcaatgagcatcaacgttttgactatcagattttgccaaaagtagaatacactggtgtatgttataaaacgaccttttttttaattcgggagctaaattttagacaactttggtgggcatggaatgctttggcggaattgtcgttgctactgattctcgttcttccagtggaacttatatatcgaatcgcacaaccgacaaaattaccatgcttaacgaccgtattgtgatcctgcgagcgggcactcaagcagacacacaggccttggccgatatcgtcatgtattatgcggaagcgcatgcgtgtgttcttttattaaaaagacgcattcacaatttttctcatttcaaggatcatggacgaagaggatgagattaccgtgcgcaacgttgccaattacgcccgcaaaatgcactacaattatcgcggacaactcaacagcacttttcttgtggctggttacgactccctcaacatgggtcaactgtatgtcatcccaggcggaggatacaccacgcgacacccttattatacgtctggcagtgggtcgtcatacatccgagaatatctccaaaaccaatggaaggaagatttggacggagaagttgttcgtcaggtatttaagttcaattcgttattttatataatacaaatagaattaaacgagtatgtcaggatgtcttaatttttcagattttgaaaaaagctgtttttgaagcgcagagaagggacggtgcttcgggtggtttgattcacacggcaataattaatgcgaaaggaatctcgcgaaaggtttttataatttatttttttgtttctgctaagcttttttaagacttatcgccccgacaaagaagattttccaattgtttcgcccgaaaaattctacccaaatttgcctgagcatattctacagcccggcttggttaccattgaacgcatggaaacttga

SEQ ID NO: 47348 - DNA, 2060 bp, Heterodera glycines
actaaagatacaaaatgttaccaatgaggcagcagcggatgcatggagcgaatcatgaggaatctacgtttaagtcacaccttcaagacgaagtgagacaaattctgctcacttgggaaaacgaacaccggaacaatgattgggaaattgagccatctttgaaacggtcagtttccaaaattagttcacagctcttattcgcgcatacatccgccggcaccatccctaccttattctcctgtcatgctttaatgtatttagaatggccgaaatactcgaggaagcgataaacgattatctacagaacaacccagacccaatggttgatacaattacattaactgtgaaaaaaagatgtttaggatgaacggcacccattcaaatcgcaaccctcgcgcccgctaggctatttgctgaaaatgataacaaaggaagagaactttctcaacaaggtttctattttttcgctttgctctttctcattccattgttttcagttgatcatttcgtatcttctcgccagggacaacccccgactgaatatgttcgctgcccgacttcttttggatttgttgcctggaattgacaccaatgtgatccttgcggtaattaataattattcaattacaattggatttaatcgttcttaggatgccgaatcattattaacacaactctttcgctgggcagaaaatggcgattctcgcgaactcagagcgtatagtatggctttacttggatcggcaatggacgctgaacaagcgcatcaatataggcagcagaacgcgactttgatcccaatcgccttgcaacgccttcagtcgctttatgtaacattaaaagttacgcaccgaaatactagtagagcattgttttcttttagtcacaaatgttgtcagaatatgatcatcaagacgagcaactcagaaaggaaagcaaagtagtcgggccaaccgatttttcacttttacgtcaagaagaacaacatgaagaagcatttattggtacgacttctacaccagattctaatgaggaaatgcgttgccggccatcaatatccaatgtgaatttattcttaaattatttaccaatatttaactgattaacttctgcgaaataaatggatcaaactgtccattatcttacaagtcttcttcaggaagaactcataaaggtcgccagaaaacggcataatgaacgacagagtggattgtcaccaacttcaaagcggtcatttcccgaccaaattacggacaatgatttctatgctgattaattcgatacggggcgtttctaccattgacggcggtaacagcaacagcagttggcgtcaaataatgcagccgattttggttggcacccattcattgtacccgctttcgattgaaatggagcaacgacttattcttaactatttgggaccgaccagtgaatatcaagatgtattttcgggttttatctaactttatttccgtaccttctttagaatcttagtattgttctcgagaaccatgcacttgatgttgttttaaactttttggaaatcgatggtccgaatcacaaatgcagagacattcggcttcttttcgacggcgttcgctatatctcctcgctgctcattcaccgcaaatttgcctgggaatttattgcggcgcagggaatccaacgcctcctgcgaatcaatcgtaaatcaattgcctcaactgcagtgaccacgtgcctttattatttggcctattcagcggatataatggaaaaagttttactgtgttttgttattgattccatccaattcaaaataggtgtgtcatttgcctgaacaagttttgaatgacatcatcgattacgctttgtatgcgcttgaccataaccatgaaagtggtcgtgcttcaattgccatgtttcttgcccatgccctccaatttcgtcccatcctcgaccgttttgaccagcgtgatggtcttcgccgtctctacaattacatttcaacattgaccgtactgcagagaattgaggaagacgggtcagatctgctcaacgacgatcacatcgcgcaaagc

SEQ ID NO: 47349 - DNA, 2596 bp, Heterodera glycines
  unsure (1)..(2596): unsure at all n locations
gaacggctaatttccatcattatttcggtgatgatggtcattacgggtccgtcatttatttttaggactgtaaaaatcaagaatttttttaaggcagcgttaacacattggcagcgaagtaagtgtttgggttgagacaaccatgcttccccggattcacaaatgctaaaaatgaaaaaacagactgggttaagaagttgtgaaaagaccagcgatgtgttggaatgccaatttccgattgctggtttccttccaacattttggggacatgaattccaaaatttctttgggccgtcggaatgccgattgccaaaattttttgagggcatcggcacacattcgtggtgtagttggtatgtagtacctcttttttgtcaaaattatttttattctaaatttggaattttccgacagttttttcaaatcgaaaaggcacaaatacggaaaaccattcgagattttaaaaaatatgcacttttcatattttgtgtgcagatgggcggacagcattgtggtggacggagtcctctttgaccatccctatttccaagcgttttgcatgttcatcggcgagttcagctgcttggttgtgtttgttgtcgcctatttggtcaaaaagcggcgatggaagaaccgaaagttggtggagattcaagacaaaaaaaaccaatttttttcaatcgaaatgtaatggaaaggaaggtggggggatgagcgtgaatttcagggaatggaaggaaaatatgtgacagggacggttccaattcgtgaaattttttgtaaaatttgggtgagggatgacttggagggaataccaataaggaaaatcgaaaattttctcacaaaatgttatttattctttcggcattgggaaggaaatgccagactttggaattgatgatgattcgaaccctctcatatttcaaaaaaaaaaattgctaaaaatttctccagtcaatacggcgacgggggtgccatcatcgaaattggcaccgatgaggagccgaccctcccgcgctttaacccgttcgttttcttgccgcccgcctgttgcgatgtgttgggcacaagcacagttagcaaatattacaattgaaatttagttggtcatggattggaatgacaattttttggttgggattaagacaaattttgacaaatttccattctttcccgtttttaaatgcatttaaataattccatgttttttttgtgcagatgtacgttggtctaaacctgacgacagcgtccagctttcaaatgctcagaggttttttaagcaattattttttatgggtaaagccctcatttagcaaaaaaaactgaaaaatatgaaattatcgccgttggaaagaatgtggcgtgtttttagcccatttaataaactctgtcttttgccccaacaatgttaagtttgtgtaggttttttgggttaacattcgtcagattttttcgggtttttttttgaaaatttttaaatttaaccacccccccccctttgccccacaggcgctgtgatcattttcaccggtctgttgtccgtctcatttttgcgtgcccaactgcgcggcttcaaatggctcggcatgggccttgtcgcgttcggccttgtgattgttggcgtcacggacatgtgaataataatgcatcgaccaaatttctcaccccccaaattttgattgaatttgcgttgcggcagagtaaagattcggaaatttgggtcaaaaattcggaaattttcatcaaattttcttggcgaatgcatttttgacattctaatagagtagtgagtgccacataagatttcgaaaacttttccaacaaattgctgaaaactcgaatttttataataaaatccgaaaaaaaaattttttggggggtgggtgggaagaaatattgtgcatcccttgtaaatctcgtccccttttttgaaaaaaattcaggcctcggtttttcaataaatattcatttgggatttacccgctcattttgtctgcaaaatctcggcattttatagacgtgttgcttttgttgactgtttttttcccttttgcatagaatgtttgacgacaacccaaaagatgacatcaacggagtgatcactggcgatctgctgattgtcatggcgcaaatcattgttgccatccaaatggtacggattttttgaataaatattttttcttagggggctcgacagcttgaaaaaaaattccttgtcttatccttgacctggggactaactaagggcatggactttatttgacaaaaaagaatcacggtccataaaaaaaaaccctgggaggtagtctcaatttgtacataatcaagtcgatgaattttcattttttttgcattcatttatacccaaaattctaattaatttcagtgttttcacacttatattanacttttttatgtttttcaatttgtaataggcttaagaaaaattagtttgacgactccggctataattcgacatttttaaaataattttttttttctggggtttgaccaaaaaaagcaaaaaaaaaaagataatttattttattccaattccctanggtttgngagcagaaatatctgatgcaatacgacg

SEQ ID NO: 47350 - DNA, 566 bp, Heterodera glycines
tgacattccgtctctttagacttcgatgaggaggcgcccaacgccaccatggagaccaaagtggcgggcggcggcgcggcgccgaagcgcgttgggcgctggacgttgtcacagctgcgccagacggacggtatcatcccgtcccaggccggttggaacaagggagactcgcagaagttgatgaccaactttggtacgccgcgtaacaccaccaccaaagtgagtgatttgtgatgattgtctctgatcaatcaatcagttatcgattgattgttttttaaccggcacatactgtactctgccccgctatgactacagtactataccggatcaaaattgatcttgattatatctgatcaattatcgattacgataattgcttttgaccggcacatactgtagcttgtcttgccagagctacaatagtactctgtttgatcaacacaggtcaaagtggagaatctggccgagattccggaggacattttgctgaaaagccacggggaggtgcgtctgcagtccggtaccaaccggttcgcctcccagaagggctttgtttcgttcgg

SEQ ID NO: 47351 - DNA, 1871 bp, Heterodera glycines; identical to SEQ ID NO: 16200
  unsure (1)..(1871): unsure at all n locations

SEQ ID NO: 47352 - DNA, 2301 bp, Heterodera glycines
  unsure (1)..(2301): unsure at all n locations
ttccttgcaatttgccatttattgtttccagctgttagtcggcggatcccgcagtgttcccgattgtcggggtgggagggacgaggacgtgctcagtttgggcctttccccgggcacttacctcgaattctccatggacgacaggtggattttaatcatatannatagatagggtaattnaatacaatttccttntctttcgcagggtttctttccaattngaggccgcttgggactcttcgctgcacaattcgccgcttctcaaccgcgtctcgggctacggcgaaaacgtttacatgacaatttcggtaccgaattcaattcaatttaataattcaattaatttattcattttattaattgtttaggcgtatatggaaattgaaaattgtgcgcagtcggcaattatcaccaaagatttgggtctgattgtgtacgcacgggactcgaagatcagtgcggccagcagattttgccggtcactgatcggcggaatctcaaaaagcgcgggtaaatgggcgacaaaaatggcaacaattggcctacttcgatgccttcagaaatgaaccgtgtgcccggcgtttaccttctcaccgtaatggaggacagtgaggcgaacaacagtcccggcacggcacggagaaagcggcgaattttggacacatcgtcaacatgtgggaagacagctaacaaaaaagagccatcggttcattctttcattttccacagatgtgcgaggcgaagagaatcttggcacttggaggttggcggaggaaaagcgaaaattccaattaaaaataataattaaattaaaattatttaggccccgaggggactcaatcattttggagcaccaattggagttggagaagctgagcaaacttcagcaagtggagcgaatgcgactgttccttatggtcagtgcttcgcatttggaaaaatatttttaatttagctgagaaaatcgcgcaaaacgggcaaaggcgacacaccggtgggaaaagtcgaaaaataaatatttaattattatttttggaagatttcaccatgttcgcccaaatttcccattccgaattctgtgaaaatgagtggaaaggaacgaaaattggccacaaaagtgttggaattgatccgactgaaaatcccagtgaacaaagacccaccgacgggcaaaaaagtgggaaatttcgaaataaaaggcgaaatgcaaatggaaaaatacataaacagatggaaatgctaagcagcgacagttcatcacaaagtggcggaagcattgaggggtaaaatggcaaaataagggaaaagccaatggcaaattgggaaaagccaatggaaatgcgaatttgttcagtcagaccatgccaaagagtgtcactctgaccgcggacattcgcaccaagtcgcggtcttttgacgacctgaacatcgaatacggtgccatgaacgagtcaatgacccgttcgacttccggaaattacatgttcaaaacaacggcaccctcaacaattcccgaggtgcgagttttatggaaattatcaaattaaggtaaattgacaggtcacagaagaaagggtcggtttggtggtgtccaagaagggacacatgcactttctggagggagcaagacaagaatggtatgggagaacaacaattggccaaacgttgtgctgtttttacagggtccgacgatgggtggtcattcgaaggccgtacattttgctgtacagagacgacaaagacctggtcagagcagagaaagagaggggcgagagaaagggcgagagagagagaaacagagaaaaacgaaaatttaaaaaaaaaataaaaataactgatttatagggcaaggaaaatttcacaattaaaaattaaaaacatttggaaggaaattggcatcgctaaaaatcggaactgtcccttaattgacaggtaattcgtggcataatcaacttggcaattgccaaaattgagtacaacgacgaacagcaggaaaacgcccccaacacttttaccgtgtgcacttcccatcgcgcatttttcatgcaggcactgcccggagacgacgtaataaaaaatgccaggggttctgccggttccctttttttcgggtggcccaacactgcctgaagtcaaatacgaaccatattaattaggataatttatatagttgggcatttttaagttgttcgattggatcgccgctttaaatccgttgttggccggtcaaattcgctcaagaaaaatcacaatcattccgaaggcgatcaactgacaatgagtgatcaaacgattggcaat

SEQ ID NO: 47353 - DNA, 872 bp, Heterodera glycines
acaatggccagtgatgataattcggacatgttcactttcatgccactcggttctggccaagaagtgggccgttcctgtcattttatgcaattcaaaagcaaaaagattatggttggattttcatttctcggatttttttctgattcgacatttgcttttttcagttcgattgtggaattcatccggtaattattgcgatagcatcaattagtttgttacccatccgcagggaatgcaaggcgttgacgcgttgccttttgtggatttcattgatgtggaggaattggacctgctgctgatcacccatttccatcttgaccattgcggagcactgccgtggcttctggagaaaacggcattccgcgtcagtgacacgaaacgaacgcattaattcctatggatttattaaaaatttttttacctatttttgaatttaaaaaacatttttgacattgtcagggtcgctgttttatgacgcatgctacgaaggccatctaccggacgttgattggcgattgcatcaaagtaaaaatggaaaacaaatttataaagggtttgaagggtgatgcttcaggatagaaagaaataagcagggttttaaaacagactgaaactgccccttttaaccggtaaataatgtaacatcaaatggcttgagatagcaaaatacggcagtggcggggccaatgaatcgcggatgctttacacggaggaggaccttgagaggagcatggacaaaattgaggtggacaaagcctttcaatttttatgttaccctttacttataaaggtactcgattttcatgaacaaaaggaagtgaatggcatcaaattttggtgttacgttgcccgccatgtgctcggtgcctgca

SEQ ID NO: 47354 - DNA, 3023 bp, Heterodera glycines
atgggctccaagtcggcccctgcaaccgccgacgtcgcttatgccaattatcggctgtttgacgaactgaacaggaaagtgcgggaaagtctgagaaaggccatcgaagctgacgagacgagtctgtaaagcaacataaattgaatgggacggaatggatggattaattggtgttgttaagggattgccaaatcgcgagtgatcggattgtacgagaatgtgttaaagcaaataaacaaagcattggagatacggcacacttcgtgcccttcacacaagcagacggaaatgcaggaacagcagaaaaaattgtggttttgacaaagatattttgaagaatatccaaatcgtttttagaaaagcctttgttggacagacgaaggatcggctggaaaagttgggtaagcgggtggacttcttggtataacttattaaatttattcagcatccattgagccgatggcgcttagagcgacgcctcttccactggcaacggtcgaaaccggcaacaacagagcaaggagaatgccgtgcacttccacggaccaaagggtcggcaaaaaagcagtaaaggaaattataaatagtactaaatcattaatagtaagtcattacattttattaatttcgtcttttagctcgtctcaaatcgtcaaaatttgtccaaaatgtctctgctgaaaagcgtcgactccaaactcggcgatgaaattctcgccaccatcgtggaaacgacggacattcgactcgacgacatcgaaggaaatgcaatggcaaaattagcgctggaagaaagtgttgtactgcctgcactaaacccgaaactcttcatgggtctgcgggcgccgtgcaccggaattttgttgtttgggcctccggggaatggcaaaacgatgctcgtgggttaattaggcaaattcattggctaataaatgaaaatttaaggcaaaagccgtggcgagtgagtgcaattcgacgttttttagcatttcggcagcgacaattatgtccaaatgggtgggcgacggagaacgactggtgaaagcgcttttccaagtggccagaaatgcacagccatccatcattttcatcggtaaaattaaaaaagggaaatgagtaattcaaagacatcgaacccaataacatcagatgaagtcgattcaatgctttgtcagcgttttgagcaggaaaatggagcagcaaggcgagtgaagacggagtttttggttcagttggacggatgttcttcggaaaaggaggcaaatggccacgttttggtgttggcagcaacgaatcgcccccaagaattggacgaaggcattttgagacgatttcctcagcgaattttcatcgatttgccggacaaaaaagcacgttttcaaatgatccgaaggacctttaaacaaagcaacaccaagttacaactcaacgatgccgaattggagtaatccgtccggtactcatttgtcacccaaagccattttcaggaaaatcgctgcaatgactgacaattactcgtattccgatttgaaggccctctgtcgagccgccgccctttttcccgtgcaaagtgcgagaatggaaaacagggatttgaggcgatgtacggctgaacaattgcgcccagtgaatgtaaccgatttggaaaatgccattcgcagtgttaggccttcaatcaatgccgaaagcaggaagaaattgatcggatttgcggaaaaccatgccaatttaaccacatgatttttctttttgctgacagatttttattgtaaatttgattaatccgatgaccaaatttcaatttctatatattcggtttgacttcctgttatttcctaatttgctcctatcactgtctatcaaatcaaaaaggatgggcttagaaattgccgatgaagaggaaggcatttgcactgacacagtgcagcgaaatcctctcgattgtctgcgatgcttttccgtctgtttcccatgctttttcacattgtttttgttattttttccattttagcctatcaaatgccccgtccgtttgccttgtcagcactatttttgtcgtttgtgcatcgccgatgagaagtgttgtgtgatttgtggtcatccgattggctgttccgagttagtagaggacaaagtgctgaattacgtgttggaaagttcgagtgaggtcactgagacatgtgcaaattgcgaccaggtaattaactgaaacaaattaactgccgcccttgcctttaattaattagagcaaattaactgcccttgcctttcttggtatgttatttcagatttcgcaaccgatgttcttctgcgacacgtgccatcagccgctttgcagcgggtgtcgcgagacgacccacaaagttgggaaaaagagaatttgccaatcgtttcttttttctttaggccaaaatattctcgactcatcacatttttgagttggaggagcgcgggagggtaaacggcgaaacaaaaacagaaaaaaatagtgatttcagttgagaagtcgccccatctgtccacagcacaatgagccgttcattttattctgtctcgactcgaaatcgctgatgtgcatcgaatgcttcaattcgtcttcgttggaacgacggttttccaaattaattaaaattcgtatgaattgtattttcaccagcggacatttcgtcaacatcgaactggcgcacaaaatttgctgtgataaattggagaaaaatgcgttgaatttgcgcatttttcaggaggaacttcgtgagcaaattgagttgaggaaacgattgacggacgaactttcgaagaacagcgagaatttgagagaggagtgaatatttggtttaattccttcttcattttttgcttaagaatcgatcacaaatgtgatgtgatcattgaccggctgaatgagcttcgccgtcatttattggatcgagtggttcaggaaaaagcggaaaagcagcgaaaattgagtgcccaactgaacaaactgctcactttgggcagtcctatcagcgtcaacctgctca

SEQ ID NO: 47355 - DNA, 1755 bp, Heterodera glycines
atgaagctgattgaatccagcgacatcgtcaaattcccagacaatgtcacattcgcgctcaacaaccgtgttgtgactgtgaagggaccgcgcggtacgctcaagcgcgactttcgccacttaaacattgaaattatgcgagaaaacccgaaggtattctgagtaacaaacaaacaaaatctgaaatttatagtgctcttttcatttctaattgttgttgaaatgattgcgctttcgtttaaaatagtctcaaatttaaacttttatttttccaactttcaaaatgctaaaatgtgggtttttagctgctccgtgtgcggaaatggtttggcatccgcaaagagttggcagccattcgcacagtgtgctcacacattgaaaacatgatcaaaggtgtgactgttggatttcggtacaaaatgcgctcagtctacgcgcattttccgattaacatcacgcttcaggagaacaacaccgtcgtcgaggtttgttttgttttgtcttctttgcattatatgcaatccagtaaagtcccgggattttgaattggattagttactagcgacttttttggtgcagggggggggggcgggtaatgggttaatttactggtcccataaaaaaagaataaataaggcggtttttacgattctttgtcacacgggggttacttgggccgctgatcacaaatatgacatccatttcgaccaattcctaaaaccggacctgatttcgaacaaagaatcgaagttaaatttaaatttgggttaatgtctcgaaaacgacttaaatgcatgaaaacaaactgaaagtcatcattcctgtaataaaagatcacataagccttttttagacgaaaaattcgaaattcgttgaaatgcgaagttccgattttttttgtttaaatattaatatgacgatcaccaaaagataggattttcagagtcactggttacgaattgatacacattttgagcaatttcgaatttgtttcatgttttcacattaattgcacaaaatcgaagcaatgtaagaaatgaccattcagaatgtgcgggagggataaactgaagtgttaccaacaaaaattacccgagtttagttaagggtcgggttcggataaaacattcattgttaagtactggtacactaaatatcctgagaaaggtcaggggccgcgtcctgcatcacgaaaatccaaaaatttcgttacctttggcaaaaccggaaaaagtgacatttttagattcgaaacttcttgggcgagaaatttgtgcgccgtgtcggactaccgcaaggcgttagcgctgtaatgtcgaccaaacagaaggacgagttgatcattgacggtaccgacatccaaaaagtgtcccaggccggtgagtgccgataaatgtcgacccaatttgactggttttatttaccggggtcggttccatggaataatcccttttcgggaaaactgccattttcaaattggactcttgatcatgaaatcttgcattacaatttgggcaggcattgcattccaatgttaaaagtctgtgttcgtttttgttctaccaaagagttccaagcgaatggttttcgaccgaccgatacaaccccataaataaaaaatatttgtttaataactttttctccccaaattcagctgctcgcatccaacagtcgacgaccgtcaaaaacaaggacattcggaaattcctggacggcatttatgtgtcggagaaggtggccattgccgatgaatga

SEQ ID NO: 47356 - DNA, 5267 bp, Heterodera glycines
ccacggcagaagaacggaagaagaatgccaagcggaaacggaagagacggtcagagtgaagacggaaactgtagacgaaccgaagcagaatgagccggaagaaaatgccaagcggaaacgggaagagacggtcagagtgaagacggaaactgtagacgaaccgaagcagaatgagccggaagaaaatgccaagcggaaacgggaagagacggtcaaagtgaagacggaaactgtagacgaaccgaagcagaatgagccggaagaaaatgccaagcggaaatgggaagagaaggtcagcgtgaagacggaaactgtagacgaaccgaagcagaatgagccggaagaaaatgccaagcggaaatgggaagagaaggtcagcgtgaagacggaaactgtagacgaacagaatgacgttgaactggagcaacagttggaagagccgagttcgagttgtggagcggaagaagaagaggatccggcattgaaagaattgaagaggattttggaagccaacggcacaaagatggaggcgaatatcccacttcccctaccccgttgggttcggggaagtgggtcattcaaaaagaaatataaaaaaatatatgataatatgataaaaaggaaaaatatttagtgataattagagttcgaagttgtatgattttgcatattttttctaaggatacgactttttggcaaattaaaaaatacatctttaaaaatcgaaaaattttgaaccttttgtaacaatgaaaaaatttgtttttgtaaaaaatgtaattttattttagcatatactaaaaattttaaattcaaaatcgttcaaaattgcatacataaattttttgaaattaatttttttttaaattgtctaaaacactacttcgccattgttttggtgtttttaaagtcaattctaaatgtttacacaattatttggcattttttgagagttaaaaactattttaggcaatttttaaggaatattttagtgcatatttggcttttttcgtgtttttagggcatatttgggggggggggggggggtttagtgcatattttatgcgcatatttggcattttttagtgcatacaacttcgaaccctaataatgataatgctgtgtttttgtttgttgttaaacaaaatttttaaatgaaaaaaggagaaataaaaattgataaatggattggaaagggcaaaaaaaaaaaaataataaaatgaaaatttgaataagaaatttaaaaaataaaaaacattttaaaaattgaaaagaatattttttgaataaaaataaattttattttttaatccataaaaagaaaaatttagaaatataaattggtagaaagacgcatataatttaaaaaatgtaaattttttgaattataatctgtttatttacatttatttctagataaaataaatcatacctaaatggtagtcaaaaatcacaaaataagtgtcaaattaaacaaacaatatttatttttgtggtttgaattgtttaattaaatataaatgtaattgataccttttattttttgctaaaattttaatatgaagttgtattaaagcaaaactaaattcaagccgatgtttccaaatcagtttcgacaattatttatgaaatcccattatcttttttgcattttctaatacatatttataagttttacatagattttagcatgaaaaatgcgaaatgtcataatttttgcatttactttttttttataattaattggacatttatttacttcaattttagctaatatgtaataaaatcaatctggttttatgaacaaatttaaaaaatatattaattaaaaattcttctttattgagcaatccattcaaaaaaattctcaaaaattttgaagaaatatttggcaaaggatggaacaaaaatgaaagagaagataaagttataaaatggaacaaaatgacccaaatgaacataatgaaagatcagcagcagttgatcaaatgggtggagaaatgggaaatgacccaaatgatcaacaaaaaacagaaatcattcaaaaatttgatgcaattaaagaaaagcttaaggaaaaaggaaaacatcattggaaaacagaaagagaattgagcaaaaactggaaaattattgggcgcaaatcgcccaaaaatatacaaatggaaaaaggaattaaatttaaataaaaagaagaataagaatttttattataagtctgcacaatttcaaaaaattatattataagatatggcgtttgcagcgccgaaatggctagaaaacttggctttttttgaggtttttagcagccatataatttttttgccataagagaatgccaattgctttaaatcataccgagcttattaattggatgataaataattttagcgtcaggcgcaagatgactggcgccaaagaaaaaatggagtaagtaaaaatcgtatttccgcttaaaaagctacttaaacaatttaagcgcttccaattccttctacaagcacctttatacaacccattatgagcgctaaaattatctgagtgtcgaaaatcggcattagatttaagcctagaaaaaatggagtaagtaaaaatcgtatttccgcttaaaaagctactcaaacaatttaagcgcttccaatttcttctgcaagcacctttgttttcgtacatgtgatgcattttattgtgcgtattacaaaatctaaatttgtgatccaattaaaaatctgatcaaaattaatttttctgttgtttttggttttgtttctaaatttgtccaacacaaaagtcagatgaatttctgtaaaaaaaacaatttgaacagatgaaatggaaaatatttaattagcataaaaaattattactaagcatgaccatgtgtaattaaataaaagtcagaagatttcacggaaaattaattctgaggaattataaaaatgtctaattggattattttatgaaaaaaatgaattttttttaattaaaacaattgcatataaatagttagttacacgccatattctataacataatatttaattatttttgtttaaattaatttaaacaattgtttatatttgattcttttctaccaataaaaaatgtttttcttaataaccaacgattttaaactttaaaaaaaaaacaatttacgtcaaggtcattatttcttcatttaattttcttttgttaaattaagcatgaccaattagcgatttaagaattcacagctataataaattttaaggaaaacggggaccgaattgacacggcaataaattaaatagataaattttaatatctaaccatttttcttcaaaaatttttattaatcattaaacgaaaatttttttattgacaaaaaattgataagtattaatccgaaaagattaattaaaattatttatcgttttcattcggtagaattgaatttttcatttcaaaagcaccgcaaaaacgtgtaaaatcacattaccaccaaggtcactgcgggaatggagtttgtggagttcgtttttttatacattgacgagacattatgacctaaaaagtatatttgaaatcacataaattgagcgaaactgaaccattttcagtgataaaaactgttattttaaattaattaatatatttttaaatagattttaaagaaatgatgcaaaatttaatttgtttactattttctctgcttttttacaatttgcattcggctccaataacgcttaaaaactcaattttgctggatgatgaggtgaagttgtaaagagctatgctttttatttttaatatttaattgaccatttaaattattaattacgcctaattaaccataatttagtccccgatggacatcgctgcgctgagacatatcaaacaatctgcgacggttgcttgatcggattcaaattactgggctcaaccacaaagggcacgttacgagtgcttcagaggtgaattttaatcttaaatattaattattaaattatgtgttaatttaattttttttttttttgagaatccaacaaaattgctccaacggctgagaattcaaaacaaaattggcgcaaatgatggcacggagttgagcgtgaacagagacattgcgcatcaactgtttgagggcgacattctgttgaaccggccacaagcccaacaaattttgcgcgaaatggaaaacggtgtgccaaagaaattttaaaattacgaaattttgaatttagaagcgtcacaaacactgatgagacgcatgcgcccacgccaattgaacccggacccaaacacattttggacagaaacaacaattccatttacaattgccggtgggcaaaatgacggtaattaattagttcaattaattattattatgaatcttaattttttttttaacttaagtgttggctcaatcagtttttgctgcacatcgacatatttcgtaataattttttttatcattgaaatttacaataaatttatttaaattatttttttttaccacaaatcaaatcttaggaatatacttaatcaaagaactttaatttaacttttcaattcaactgacaaatttttgatttaaaaattaaaaaaatgaacaaattgtggtgaaaatggaggaaaataattgcatttattaattagagttttttttgaacatttacgaattttaaaaaatttgaaatcggacatatggacaaattcgcttttattaattttcagaagcctaacttgcatccgcttcgcttattaccgagatgccaatgatttggttggcagaagagactacatggaatattctcgtttgtcgggctgttggtcaatggtcggacgacagggcggttcacaaattgtctcaattggttttggttgcgaaacggtaagcccaattggcataatgccaaaatttaaatgaatttttaatgctaaaaataaataaaatttagttgggcattactgtgcatgaaacaatgcacgcattgggagtttggcatgaacagtccagaactgaccaagaaaattatgtgacaatcaattacaacaacattttgtcggtaaaattttttaaaataaatataattttaaatatttaaaattatttatttaagggaaccgaatcaaacttttacaaacgatcgccggacacttcagacaatcttggccagccttatgtaaataaaataattatacaaaaaataattttttgatttatttaaggacctcggttctgtgatgcattactcaaacaaagcatttgcaagggatttcaacca

SEQ ID NO: 47357 - DNA, 3002 bp, Heterodera glycines; identical to SEQ ID NO: 16322

SEQ ID NO: 47358 - DNA, 4079 bp, Heterodera glycines; identical to SEQ ID NO: 16323
  unsure (1)..(4079): unsure at all n locations

SEQ ID NO: 47359 - DNA, 2070 bp, Heterodera glycines
gataggtgaattcactgtcttatacgccactgtacaattgtccaagcaaacaatgccattgaaagcaaagcggaatggccgtttggagatgcaattccgcggttctaaatttgtgaagtttcaagaaatgcgcattcaagaattggtaattgctttgtctaacttgcatccttttcaccgcacttaaaattagagtgaccaagtcggagttggcagcatccctcgctcaatgaccatttatctcagtggggaaaacacgagaaaggctattcctggcgatgttgtcgagatttgcggcgttctcatcccaatgcttcgtaccgggtttcggcaaatggctggaggtcttgttactgagctgtttctcgatgcttatgtacgttttcattttatagttatttttgcatattaaattttttagcatgtcaaaaattatcgtgatacaaatgaagatcttttggatggagagttgaacgcggaggaaatcgaattagtcagccatgagaatttttatgaacatattggtaagcaaaatgttagcagatttgaatacttctttatgttattgttttggtttccattgggtgtttcaaattcattctttttcttttagcttacagtattgcgcccgaaatttacggtctcagcgatgtaaagaagtctttgcttctcgctttaattggtggtgttaacaagaacgcaaatggaatgaaaattagaggtgatttattggcaattgttaagatttttggtccgggattcagaatttggcaaattgaggcaagatttgtgatcaacccccttttatccgcttaatcactgcaaaagaaatttctaattttatttttatcgggtccgcaaatgctaaaaattggagattttttaaacttatttttaccgtgttacattgagttttaggggccttaaacattttgctgatgggtgaccccggagtggcgaagtcacaacttctgacttatgttgatcgccttgccattcgaagtcagtacacaactgggagggggtcaagtggcgttggactgacggcagcagtggtcaaagatcagttgactggtgaattaaacttttcaaaccaattcaaaaatggtttttaataaaggcgaaatgtcactcgagggtggggcacttgtgctggcggatcggggaatctgttgtatcgacgaatttgacaaaatggtggattcagaccgtactgcaattcacgaagtgttgtcagagcaattgctttggcttcattttggttttaaggtaatggagcagcagacaatttcgattgccaaggcgggcataatgacttcgcttaatgctcgcacttcgattattgcagcagcaaatcccgcatttgggcgctataaccccaacaagtcgattgaagagaacattcaacttccggccgctctcttgtctcgttttgacctgctatggcttatccaagatgtgcctgatcgcgaaaccgaccgcaaattggccgaccatataacatatgtgcaccgtaaaggcgaacaaccgcaagccgatttcgaaccaattaacatgaaactcttcaggcaaatgattaatcaaacgctattatttcctgcaatttttagaaagtacctttcgatatgcaaacgtaaggaacccgtggtgcccaatgccctaaaagaagtgctggtggagaaatacgtcgaaatgcgctgtgaggcgaagaacagcagcgactcgaccttcacttcccctcgtcttttacttgtgcaatttccctttttcaaacatacgcaaagggtttctcgaccaatccgactttgcaatttgttaacagaaattcgaaattttgacctgtctcgagaccccttgcgcatgaatattttatttacgtcccataattaggcggcaattcgcatgtgtacggctcttgcgcgtctccgtctcgcggacgaagtggaaatgatcgatgtcaaagaagcgctgcgactgattgacattgccagaaactcattgcacgcacacaaaagccaaacgacatttaagtgagaatccgtttcggcttttctttttgaaaagattatt

SEQ ID NO: 47360 - DNA, 1325 bp, Heterodera glycines
atggcatttcacaaaattgactcgagcagcattgattcaattaccaatgctgttgactttttcagtatacccccgacaaatgttaccgtatcatcgtcaaaggttttcgagattttgccgagtaacccactcaccgacacaccttaccattttaaaatacactcgagccaaaactacattgacctgtcaaagtgttaccttttgacggaatttcgaatgcgaaaattgacaccaccaaatggtgaatggggacatttggatactaatgatcaggttgtaccgatacaattgatcggacacacgttcatacgagacatgaaaattgcaataaatggtcgtgaaattttcaactctaattcactgatggcatacaaaacttatctctctcatgaactttcgcaatcacttgaagctaaagtttcgcatttaactgctgctggatacgaccgtgaagatgctaacaatctacaaaactcaaattccgaaggattcaaaagcagaagacaacggtatttgggaggtcgaacagcacaatacattgcaaaaatcgatgccgatcttttcaatgtaccccaatatttgattaatcattgtgaaattgacataacaatacaaccccatgacgacaattttttgttaattgacaccttagaccccccggtcagccatataatattgagcttgttggattgaaactttactgcaaaaaagtcagtcttatggatggtttggctcttgagttggcgaaaaaattggaaatgaaaccagcacggtatgctgtacgaaagacaatgatgaaagcactgttcataagccctggacgctatgaatttaatgcaaacttgttcatggtccaagttccacgccgcgtaacaatgggacttgtcgcaaattcagattatgtggggaacaccaaaaggagcccgttcaactttcaacactttaacgtacgggagttgagtgttgtggccaatggtcgctcttatccccaggccccgtatgacattgactatgaaaattggaaatttgttcgtccctacaatgacatgcaggaggcgcttggttttgccaactctacatatggaaatggaattgattacttttcatttttgcacactcactgtatttatgtgtttaatatgacaaacagcggagacgatcatggcggtttattcgatctgatcaaaaagggatgtacagctgtaaacataaaattcaaaaaaccagtacccgatggtggaattacacttattgtgatgggtgaagcggactctatttactttttggataaaaacagaacgattgcaactgatacaaccatttaa

SEQ ID NO: 47361 - DNA, 708 bp, Heterodera glycines
acgaagtgcaacggacgatgctcgagttggtcaaccaattggacggattcgactcgcgcggggcaattaaggtggccgggggacatgcggaacacgtggggaaaaggcatccaatgcgtgatactcctaggttttgatggccaccaaccgaccggacactctcgacccggcgctcgttcggcccggtcgcattgaccgacgcattgaattttcactggtaaattgttatcagcgtacactgctcattcttgtgaatcatttcagcctgacgtaaaggcgcgtaaaaacattctccaaattcacaccaaacggatgagcatcgagcgaaacattcggtcggtcattattatcattgtcaacacataattatcatagtttggttttcagatacgaattgattgctcggctctgtccgaacacgacaggtgaacatccccaaaatgaatctccatttcaactgacggagcaatgcaacaaattaaccctaaggtcgtttcgctttttaggtgccgatttgcgcagtgtttgcactgaggcggggatgtacgctttgcgtgcacgtcgtaaggttatcacggagcaagactttctcaaagctgttcagaaagttgtacgtttttcctgttttctttactaaaaataatgggaaatttgtaggtgaaaggctatgcaaaattcagttcgacgccgtcctatttgacgcacaat

SEQ ID NO: 47362 - DNA, 1389 bp, Heterodera glycines; identical to SEQ ID NO: 16372

SEQ ID NO: 47363 - DNA, 1946 bp, Heterodera glycines
atgacttgcccacaaaaaatcagcgacagcagtcctctagcaattaacagtggcctaaacattttctcagttccaccgaccaatgtgtccgctgttcgctcattctttcgtcaggtgcttccactcgcaacaataacgcaagaatcgccttatctatttcgtctttacagtgacaatttgtggactgatttgtctcgggtttatctttatctcgaagtgtccattgaaaaaccaggagcaaacgataaatgggttgcgatagaggacggggatactcatgtctctgccattcaagggattggtcaaacatttgtccagcaactaaaagttacggttggcaacacggaagtatacgatagcggaaacctatacccattcaaggcctatatcaccaatgagttaagctttccaataaatgtcaagaaaaattttcttggttcaacagggtattatcacaccgtaaatcaagatgattcatcagacgatgggtataaagagcgttgtaaaatttttaagggtggtaaaaatgcgcaattcctctcccgtctcgactttgatttgggaaaccaagagctttatctcttaaataatttggacttgctcttcacaatttacaaggccaaagatgtctttcttttgcaaacattaaaagcaaatgattccaccaaatatcgtttgacagttcacgatgtcaagatttatgccaaaatggttgaggttcaaccctcactaaacatgagcctttacaaaacccttgaaaaacaacccgccacatacgcagtacgcaagaccgaaatcaagtcgtcattcatcagtgttggtcgatacgaatttgagtacaatgtattcagtgcaaccattcctcgacgtgtgacaatagcgttggttggaaattcagcatttcatggtgactacaaactgagtcccttcatgtttgagccgtttgatttgcgtgagatttcggtacatgctggtggcgtagtttacccagctgttccttataaactaaatttttcaaatgatcactttgtcagcgcctttgttgacatgtatgaggcactcggaatggctaactcggaacgttcatttgacatttcaatgacccagttcaaaaaagggtggaccttttttgtcattccattgacttccacgcttgacgacagctgtggatttgagctgttgagaaacggtacgacaaacgtacgagcaacattcaattcaccaattccgcttggtggtgtagagatgattgtcttgggtgaattcgaccaaatgattatggttgattataaccggcacattgtgaccgactcaaagcttggataaaatataaataaataaaaatattattatgtaatgttaaaatgaataacaccaacacaacaaaacctgacatacaaattttgaattccccagaagagcctaatgaaactcttttgcatgtactgcttttttctcattatcttcttgcatttcctgtgtttttgcttttttggttcgttttaattcggtggcttaaaagtcacggtcacctctcgcccagcgaggccgagacagtaatggaagagatgaaaaatatccctcgacaaccaccaatatttttcgcaacaaaatgatgcaaaattagagaaaactgacaatgaaatctctcttcagtatgacaaaatcgaaaaagactcaagaggatttgctcttgaattggtggcgtgaagacccgacaattgtaagcttgtttttttttcaatttagcattttttaaatttcatcacattttttcagattcgtttctttttggacaccgtcgaatcgaagccgcgcttcttcagcgcgccgaacgcgaggccgaaattttgcgccaatacgcagagaatcagcaatgaaaagggaggaccaatcagttatcattttcgtatgtttttttttcatttatgcaatttaaattatga

SEQ ID NO: 47364 - DNA, 179 bp, Heterodera glycines
gaccaggacagtctttttttctgtcataaaattggtgagcaaatcatctgtgcatgatgcagaccatcaaatgcgttgtggtgggcgacggcgcggtgggaaagacttgtctgctcatttcctacacaaccaacaaatttcccaacgaatatgtgccgacagtgttcgacaattatgcg

SEQ ID NO: 47365 - DNA, 1264 bp, Heterodera glycines
atggcttcaatcaacaatggtcatgccgcggttggcgctgccaatggcattcagcaaaaaaagttgctgcaacaggcacaggggacgaacatggcacaactcccgctcaaggccaatgactacgcgttggccgcagtgcgcaatgatgccgagctgaaattgttggccgagtacgcggttgactacgcgcattcaattggtaaagcggcaccgatttttggcagtttgacaatttggtttttttggccaataatgcccaattgtatggcaaaaaatagaatttttgtgccaattggttaagtgcgatgctgacatacaattaactgaaaaactgaaatttaaacggaattactgtcaccacattaagtgccaaaatgaattttgaccaacacagtttggccagacaaacattgctcaatttcattacgagttaaaaatgcctaaattgtcaaaattctactacactatggcacttataactttcttggccttttactacaatttttactattttgataattactttaattttacaagaattaatgatcaaaaaagccgtggcaaatgagtatttgattattttttatattaattttccaaaaaactcggataattctttggtttaatttgatcaaattgaacattagcaagttcataaaaggggacaattaaatgtaaattccaataattaatgaatctacaattaaactataccaaatatttcacacaatttaatattaattggcttccaatttttatattttaaaattaaaattttatgacattttgctaataattttaattaaagaagcgtatttttttaaaattttcaggcctcgttggacgcagtggggatgacaagtacaaacactccaacgatgtgtcagtggcgcctccaatcgccctgttgccgtcgccgttcccccgcgagttgtacgagcaggcgactgacgcgcaacagtcgctgaacgaactgtacttccgcatcgcatgcgaccacgacttcctgatggaggcgtacaaggacgtgatcaaggtgggaaatgaattttctgattaaaaaaaattaaattaattttaattttcgggcacagaaaagaaaactcatcaaatttttaaattttttcagtatgtttggtggagaattctaaaaaatgtttgagttaatttactcgaaaaagcatgagaaattttcaatttcattgaaatataaaactaaaaatcactttcgtcaaatgaaaactgatttttttcattaaataaa

SEQ ID NO: 47366 - DNA, 2245 bp, Heterodera glycines
atgcctctccgtcttttgatttgttggccgccctctgtgccgcgggtgcgcacccgtcgaatcagcagcaggcggcactcgcgcgtcaaatggctgccaccgcggtcatgcttggctttccgcagccgcaagcgaccgctgccgcaatgattcaccaggcggcggcagaatttccgcccgtccagcaattttttagcgcaaacgcatcacaaagtaaggcacaatgccaattccaagaaaaaatagtttaaaaaataatttaaaattgtacaaatttaggcccatttccgcgccaattccatccgatgcatttgaactgttcaacagatgcttcgccccatttgtcggctgaatcggcacaactccaacatcagcaacatcaaattcacaatcatcaaaggacgccgacaacgccaaaggggcgaaaacggcgccaatcgtcgacaagtccggcgacacaaaacggaggcaaataaatacataaaaattaacaattaaaaatatattttaaaattattttatttaacaggaacagaaagaaatcatcgacagactccgcaaaatttgatgcaatcatccgcagattcaccgctcaatttgagcagattcaaagtggaaaacggtgaaggaaggtaagcgaattgaccaattggggaaacatcacttaaataaaagaattcaattaattaaaataaaaaaaaattcaatttattttattttaaaaatttattttttttgtttagccatttcgatttgtccaacaaccgaacacaaaatcagcaacatttgattcatccaacaaattcaggcactttttattttatttttttacttcataaattgggtaattttagacacacaaaattcctgttcttcttcgggcaaaaattcgccgaataatttccataataattcggcaaactcggaaaagtcaaatggcgacaaatccgaggcgaaaaatgcaaataatggaaaaaaggtaaaaaaaacagataaaagaaataataggtaattaaataatttacgattcagtcaaacggagggaatcagcagcaaagggcgggggcgaagtcgccgaatcacataaagcgaccgatgaacgcttttatggtgggcatttagaaatgaatgcattttaaataatgcaaaaaaaacattttgaaggtttgggctcgggatgaacggcggaaaatcttgaaggaatgtccggacatgcacaacagcaacatttccaagatactcggctcacgttggaaggtgatcaaaaaaatggaattaattatttttatttaataatttttaaggcgatgagtaattgcgaaaagcaaccgtattatgaagaacagtcgcgactgtccaagcagcacatggagcaacatccggactacagatacaggtgggagagaagcattttaaaatttggaagaatagcgaataaatattagccaaataaatatcaattaaaaaacaaaaacaaaattcatttagaccgcgaccgaaacggacatgcattgttgatgggaaaaaggtgggcatagaattggcaaaaacgaaacggacaaaaattcaaaagaaattaattacagaaattaaataattaccgttaattaaggttcgaattacggaatacaaaaacatgctgaaaggcggaccgaacaacgggacaacggtggcgaaggacgcgccgcaaaagcggcaaagtttgtccacgagttcaacgccggcggaggcgacgagcgccggtggcggcacttcggacgcggcgccgctcagtccgacggcggtgtccgaggaaagcaatgaggtgaaacaatgccgaacaattaatagctagacaagtgcaaattgaaatgcattgctttggcataacagttatccttttagtcccccgtcaccgccggtgccatccccgcgatgcttttctccgccgcccccgccaatgggtcgtcccctccggccaaatctttgatggaccacccatttgctgggcaatttgcacaaaacccggtataattattgaaaattactaaagtgtaaactttgacaatgcttcttaggcactcgctgccgccgcttggctttccgcggccgccgtttccggtggagcccagcgcggcggtgccggcggagtgtccgcgttgcaccaggcgatgctgctggccgaccagctgcagcacaaccaccatcaccactcggcaatgccgttggacttcggcaccgccgccggcgttgttgccaatgcgat

SEQ ID NO: 47367 - DNA, 1431 bp, Heterodera glycines
atgctttcatcaactgaagcaaacaatgtcgacgacgaagacaatgatggcatcacccaacttggtgctattggcagttggcctgtgactaacgaatggtcgacacctccggcgactgaactgccagaactcccgaatgggttagttctgccattgtgagtaaataatgtattgttgtgctttccgttgacagtgtcggtactgatggtggcgttgtgtccgaacgactgatgctgtcaatcaacgagacagtgctcaaccaattgctgcaccagtttagatgggacttcaaaattatcgaagaggtgagtggttttattgtcagatgcttccacttacatccaatattattttagaagatcccactgaacagctcgagattgccggaggaaacgcgggacttgtgagtatttggcataaatagctaatttttctccaagcctgtgttctgctcgaaaaaattaattttgtttacagttttgccaacctctgtccccagtgcatttttattttcaacgtgtcggctgacggacttcccagtatgaccatcgaagacgactccatcctgatcaaaatgtacaacgcatcgttttctactacgttaaatttgtcttttggctgatttctagacacaaccgaattgctgccgaagttgagaatccaacaattggagagagcggacagaagaaaacggccatcgatctgacactttctctggccgtgcaactgatcccacaagtgcgggacggtattttccacacgcagctgaacctgaaggagcgcaaaattgacatgaaaaacaagacagcatttccgaaacagatgaagccggtggtggaggaactgctgcagggtgaggctaatggcgaaacaattactataataatgaaatcttgattggtatgcaattgcagatatgatcaaggacgatgtatggccggctgtaaagcgcggcattgagccactgatttacgtgaagggcgtggagttgccagcaaactgcggagtggaccctaagtctgcccaattgcactttggacaccgcaaaatcggcgcctctgccaaactcaacatcaaagaggtgaaaatttagagaggattaagattttaatagaaaacaactcaaaaatatataatattgcaaaatttcttttttagatttccctcagtcactgcgtcgaacagttcaagagcaaattgcctgacccggccaccctgttcaagatcaacgggacatctttttagtatttaaaatgatctcttccgccttcatgtgcatttactcccacttgattgtttattgtacattgcatcgcctattactgtgttcaaaatattattaattatcgcccagcacagatacccatgccaaatattgcctttctattgcatcattgatactactgtaatatacaaaagacgatgaataaa

SEQ ID NO: 47368 - DNA, 1405 bp, Heterodera glycines
atgcgaccgcttgcactcaaaggtcacgaaagagcgatcacccgagtccgactgaatcgcgagggcgacattctcttctccgcttccaaaggttccgccgtctgtgcatggtatgtcgtcgtctttttttcatcaatttttagttttcatacactgccttaggtatacggagaatggagaaagaattggcacttatgaaggacattccggtgtcgtttgggacatcgacgtcagttgggacacacaaacgatggtatccgcatctggtgaccagaaagttatggtaagttgatgaaacagaacagttcgataaattcggaaatacccccgattctgtgctccaaactatattttcctccctctttaattggttttgtttaggtttgggacattgagacgggcgtttccaaggggttctctgagcctggttccgttgtccgttccatcggtctctcctacagcggcaatttggtggttttcacgctgaacaagccgaccacgggcggtctcccgggcattgtcgtggccgaccttcgcgacaaaatgacgcaacccatcctacgcgacactttcgacgaccaatgcaacgcatgtctcttctcacacttagacgatcacattgtagccggtaagttagctgcgattttctttttaatttcagtcgacattgggtttcaagcactaataaccaaaaatcccccaaatttatttatttataaacaaaatcttttaataatttcaacgattttcaaaaaaaattccttcgccgtctttcggtatcgttttcttcccaatctccctaatttttgaaaattcgggagcaatatggacttcagttaatggtctgattgtgagttttttaggtgatcataccggacagctggcgatgtgggacctgcggcagccgggcgccgctagcaatttcacacacccgcacaaataccaaatcaacgaccttcagatcaccgccgatcagacatttatcatcacagcatcgaaggtgaaatttaatttttccgttctcttacaatttcttacgtgttgtatttgaattttacaagtttaaggacaaaacggcacaactgcacagtgcacatgatctgcagcatttgaaaacgtacaagtgagtgtcatcaggagaacatttttaactatttattttgtgattttcaaataacgttttccaggtccaatcgcccggtgaacaccgcctccgtctctcccagccgcgaccacatcgttttaggcggtggtgaagaacacatggaagtcactcagacggccacaacagcggagcaattcgtggcccgactgtaccatttgattttcgaagaggaatttgcccgattcaggggccatttcggacccatcaattccatcattttcgaccccacgggggacattg

SEQ ID NO: 47369 - DNA, 1338 bp, Heterodera glycines
  unsure (1)..(1338): unsure at all n locations
cgccaacgaaattgccggggtgcccgacttgggctcgaccggcagagggtccgacatgcaaatcgggacgtacgttgagaagctgttcgcctctgagctttccggaaatgtcatcgacttgtgccccgtgggtgcactgaccagcaaacagtacaggtacacccattactttcagtctgtacaatagccgagcctcaaaacagactcattgttagtctgacaatgaggtggcaaatgtcaccgccggggactcattttgacaaaaggcggcacatattttttctatcaccatgagcaacaaaaaggtcgactgggggaaaggggtaatcccttgaaactagtagtttttcccggcgacgcttccccccccccccctattcctcaaaaattttttgaaaaaggcgaaatgcaaaacaaaaaaagtgcgaaaattaaaaaaggtcgccactgagaaaaatttggaccttcgtttgaaaaatcgatccaaaataccccctgcctcaatctttagtctaatggcccttggtgcttgtgagcaccccctttatatgatcccttattgataataatgcgcaacaattcctccataagtttcgttgcccggccatgggaaactcggaaaacggaaagtgttgacgttatggatgcattgggctcaaacattgtaattgcacacagaacaggagagattttgaggataattccacgaatgaacgatgtataagtgaccaaggcataagtgaatcagtcgaccattgccattttgacaggaagtgaacgaagaatggttgtcggacaaagcccggttcatttgcgacgggctgaagcggcagcgactgttacagccgatgctcaaaaatgagtcggaagttctgaggttggtccatagtttgccattcattgcccatgctcctgtaaattcagtccctgcaattgggaagaagccctcttcacagcggcacaaaaacttcgtcagatcactccaaatgcaattgccgggttggccggcggcctcgtcgatgcaggtccttctaatcgccaaaacgcaatcatatgtggatttttaagaatctctaatcgcattgaaggatctgctgaatcaaatcaactcggaaaatgttttcagtgaaggggaattgccaattcttagcggggggactgacttgaggttgtcattttagtcgaaaattgcagtcacagtcatacgtgtgcaaggggggggggtcaggaaaagggtcgtgcgttcggcgatgcccccccccccctaggggggggtcagcgtcaaagatttttgcggggtgaccatttttaccccgntgaagacctttttttgctttt

SEQ ID NO: 47370 - DNA, 2003 bp, Heterodera glycines
atggcttccaaataccgacagagcaatgagaaattgcagacgaacatccaaagtgtgtccaatccgataaacgctttccgactgatcaaacggctatcgaatgcgtggaaagaacttcaaaacgaaatgcgggcggacgtggcggacgaatatttgcaaaatgtgacgactgatggccatgcgctttttcctacagatgttagcaaaaatgacaaatttgggaaacaatggatgcctttttaggaggatttgagtggcgcagcgatcggattgcttcgtttgcaggacacttaccgattggacacgagggatttggccaacggatttgtgcaggacataaaaattggcaatgaaatgacaggtactgaatgaatgaatgaatggccgtagtttcaccaaattgccaaaaaaaatttcaataatttaggacaaaagttaaaatcaaatcaaaatcttatgtacattttcacattgttttagcatttgattgctttgaaatcggtcgcattgcgtacaatgacgaggcgaacactttcatttccgttcacccgaataaacttttgagtttcaggatttttaccacactttgctttggatgcaagaagcactcggcagggcaaagcgcgaaaaaacgccgacaatttctggtcggattttactaaattcagagaaatgtccaataatttatttcccccccccccaaaaaaaagtgaatttattaacttttccctttcttttcagagtccgatgtgctcggtttgtctcttcgctttttgactttgtaaaatgcactttctctcagaatacctcgcctttgccatgtttaaacagggaaacctcaaaagagccctcgtaacgacagatcgtcttgctgagattggtgcgaactttcaaaatatgactttcaaaagaaaatttgttcagctccgacgcacccgcgagccaaaggaaatataaaatggtaaattaaaatttggaagttgggaaagtgacaattcgttgaatatttcaacaatggcaaaaacacacgaaaggtacgaagaccaattgactgcggatggagtgaaatccgcggattaccgcagggacattcccccgatggacaatcgacgccgtgacgactcattggacaactcggaaaggcgagcgcatcccgtgccaatgacaattaaattcaattcttacttttctattttaggaatatttacgaggctttgtgccgtgatgaagtgcccgttgtaagctcactttttggctttttttctgatttcacctttaagagcgtgaaacaaacctccaagttgtattgctactacaaaagggaccgcccctttctcctattggcgccgttcaaagtcgaaattgtgcgcttcaatccgctcgctgtgctcttcagaaatgtcgtgacagatgaggaaattgagcgcattcaggagttggccaagccgaaggtggtcggaatggcacggaccaaacatttttatgaattctgatgttaggtctattttctttgctaagaaatggtcaaaattacccctccctcccctaactttggttataccaaatgacaaaacccaaattttattttagttggcacgtgccacggtgcaaaacagtcaaacgggaaagttggagacggcatcgtaccgaataagcaaaagtgcttggctaaaaggcacggaggacgaagtggtcgatcgaatcaataaaagactgaatttgatgaccaatttggagatggaaacggcggaggaactgcaagtactcaatcaaatgacttttgttttggcacatttcccttttcaatttcaggtggccaattacggaatcggaggccattacgacccgcactacgactttgctagggtttttcgttctgtaaaacgacaattatttaaattgttcagaaggaagagacaaaagcgttcagtgatttggggacgggcaatcgaattgccacggcactgttttacttttctcagcccgaaaagggcggcttcacg

SEQ ID NO: 47371 - DNA, 2109 bp, Heterodera glycines
aaaatgaattctgataatttccgcgttgaacgcgacactttcggtgaactacggtaatttcgaattaattttactttgaataaacaaatcgtgactttcgctttgttttagtgttccttctgatcgttattatggagctcaaacggcaaggtaaaagattcgaaaaataagaaaataactacaaaatggacctttatttagatcgatgcaattcttcaaaatcggaggacccgaggagagaatgcctttgcccgttattcatgcatttggctatctgaagaaggctgcagcaacagttaaccaagattttggattgaattctaaagtggcagcggcgatttgtgaagctgcgggtaaattcgcattttattaaaattgacgacattttttattctatttttagatgacgttatttctggcaaattggatgagcattttccgcttgttatttggcaaactggaagtgggacgcagtccaacatgaatgtgaacgaagtcatctcgaacagagcaattgaaattctcggaggcgaacttggctcgaaggtacacccaatgattttcaaattttaaccgccaaaagtcggccctttttcagactcccgtacatccgaatgaccacgttaatatgtcccaatcgagcaatgacacttttccgactgcaatgcatgtcgcggtggccgttgagataaacactcgtcttttgccttcgctgcgtttgcttcacgacgaattgtcgaaaaagtcaaaggaatttgagcacatcatcaaaatcggccgtacccatactcaagacgcggttccgctgactttgggtcaggaattcagtgcttatgtcactcaaattggaaacggaatttcgcgtgtggacgcaacgcttggccgactgtacgaattggccgccggaggaacggccgtagggacgggactgaacacacggaagggatttgcggaaaaggtggcaaggtataacaaacaaaagcgaataattaagcaacattattcggaagtataataatttgatttgggccgctttgtcaaaaaattttcattttttcaacgcttaggataaatttaaaaaattcaaaattatcttcgtgatttattttgaaatatttttacaaaagcggatccaaattaatttgtcttggccgagtttagcaaattggctgagttgacgcgtttgcccttcaaaacggcaccaaataaattcgaagcattggctgctcatgacgcccttgtcgaggtgttttttcgataattaagtttttattattttttttattgagattaggttcatggcgcgcttaacgtggtggcaacttcgcttatgaaaattgcaaatgatattcgctttctcggctcgggcccccgttgcgggttgggcgaattgtcacttcccgaaaatgagccgggctcttcgattatgcctggcaaagtgaatcccacacaatgcgaagcactaacgatggttgctgcacaagtattcgggaatcaggtgaaaagcgtgaacgagcggcgcatttaaaagggattagagtcccaatgtttgcaaatctgatcattttgctcaatttcccacttttgtaaggttgccgtcactgtcggtgcgtcaaacggtcactttgagctgaacgtattcaaaccgttgatcgtccgaaatgtgcttcagtccgttcgtttgttggccgatggtgccgaatcgttcactaaacattgtgtgataggaataatagccaatgaagaaaacatcaaaaaactgttgaacgactcgttgatgctcgtcacggcactgaacccgcacattggctatgacaacgcggcgaaaattgcaaaaacggcacacaaaaacgggacgactttgaaagtgaatgttattttgttggatttgggtggtccacctgtttataaattggcacattttcaaagaaaataattttacttttcatttattgggagttttaacatttaaaattgcggattaatttttcctttttgaatccttattgaccattctctaatcctaaggaggaagctgtcaagtccgggctccttactgctgaacaattcgatcaatgggtgcgacccgagcaaatgatcagtcccaaa

SEQ ID NO: 47372 - DNA, 493 bp, Heterodera glycines
aaggctcgaaatgctgagaaggcaatgacggcattggcccgatggcgccgaatgaaagaacaggaggagaagggaccgatcgccaaacggccgaacgacgttcgcgagtgcaaaaagttgggcgacgctgaacgatttcgtcgcgaattgatccatgacatttcgaaaagaataacgcgaattcacgtgccgaatttgggaactaacaataagtatttacacaaactattgcctcatgatttttagaacccgcgacttggcgagttcaaaatcaaagacctcaacgaccaaattaaccgactgttgcggataaaattggcatgggaaggacgcattaaggagctcggcggagtctaccatcggtactgaataaaagaattgtaaaattcatacttaattttgctcggctgaatgatttctgaatttgttccgagtgacaaataaacaattcgtcttacaatcagacgaatcgcgccgcgggagttggaccggg

SEQ ID NO: 47373 - DNA, 3429 bp, Heterodera glycines
cccgtggccttgtgtcaaactgcttcatctgctgcagattacccgcctccggaagaccccggaaaccgcgcgcgactgctcgaatgtttggagggcattctgaacaaagcgcaggacgcgcccaagtcgaagaaagtgcagcatgccaatgcgaaaaacgccgtgcttttcgaggccatcgcactgatcattcactacgacagcgagccgggactgctggtgcgggcatgcaaccaattgggcacatttctgtcccatcgggagaccaatctgaggtgaggagcggtcaaacggctaatttatcgcattttgcttttatgttggcatcttttgcttaggtatttggccctcgagtccatgtgtttgttggcaacctccgaattttcgcatgacgcagtcaagaagcaccaggagaccattatcaactcgttgaaaaatgaaaaggatgtcagtgtacgacagcgggccattgtaatcaccaaactgttcatcgattaaaacatttttccaccgactacaggatcttttgtacgcgatgtgcgaccgttccaacgccgaaaatattgtggcggaaatgctcacttatttggagacggcggactacgccatccgcgaagagatggtgctgaaagtggccatcctggcggagaagtacgcctccgactacacttggtacgtggatgtcattctgaagctgatccgcatggcgggcgattacgtgtcggacgaagtttggtaccgagtcattcaggtcagttcctggcttttcctcaatttggattgttttctttgtattattcaaattgttttctcttttcctggcttagattgtcgtgaatcgggaggacgtgcaagggtatgccgccaaaacggtgttcgaagcactccaacagccaacttgccatgaaaatatggtcaaagtgggcggatacgtcctcggcgagttcggcaatctcattgctggagacccgcgatccaggcacaaacaaatatttttacatttgtacttgtattgatgcttgtgttttgatttatatttgtttatattgatgcttatgtgccatttgctcgctcccttttcccagtgacaatctctccccgccttttcagtccgatggttcagttcgacattttgcacagcaaataccatttgtgcagcatcaccactcgctgcatactgttgaccacctatgtgaagttatgcaaccttttccccgagataaagccgcacattcaggcacattattattccttttgatgcaataactatttcataattaatttattttttgtgcttcatcaggagattgtgttgcgggctgaccacaacctgaagaacccggacgccgagttgcagcagagggcggtggagtatttgcagctgagcaaagtgacgtcgccggatgtgttggcaacggtgagaaaggaacgggcgaatggacgagaatattaatgggcatttgccatcaatttggtaccattttctacagatactcgaagaaatgccccaatttgcggagaaagaaagcagtcttttggccaagctgaagaagtccaagccccaagctgaggagacggacacccaacagatcgaaaagaaacaaaggccatccgccgtaatgtctccgcaaaaaccatccgcggttcgttgagacattgctgttgtaactgttttcatgtttaaattttgtacgtctgttttttctaaaggagtcatcgccagcgacttccactgccaccaaactcgtggacctcagcggtgtcggcaccactggcgacagtttggacaattcgatgaccaacggcggcggggagacggcgaccaatgcattcagtcagctgaacgacctttttgccatgattcagcctccaaaaacgaatggaatcgccgcttcgtccgccgctggcggtgcttcggccgacggaatggcggcgacagaaattgggccaatttggaataaaaatgactatacaaagtgaattcccaaacaatttaaaaaagatcattagaaaataccaattataaggttcgttatgaagtccaacggtgtgctgtacgaagacgaaaccattcaaatcggatgcaaaatggaaaagcgtgccaatttggcacggctgggcatattctacgggaacaagacaaatttcaaattcagcaactttcaaacgacagtcacttgtcctgggatgctcgcagatgaaattctttgtcaagttgctctttttcagattaatttttctattttttcctcacactctctttcctcttctcatgcactcatttttctcccccccccctttttccccctttcttttcactattctcactctctctcttttctctccctctttttttcttacccccattccttctcttctcttccacccaccctctctatcttttacagccccctttctccttttccctcttttctcctctcactctctcctctcccttctcttctttcttcccactttctcaaactctctctatctatctttccccccccccctctctctccccgttttctcttctttactctctctctctctctctacatcaaatttccaggcaaaagctgttgacccggacattgacgccggttcccaagtgcagcagctgatcaatgtcatttgtcttcagtttttcactgcccctccaattttcaatgtttctttcacattttcgtgagtttcttctcttacattgtttttctttttattttctctttttgattttcagtgcccgcgatggctctcctcaacaattttcgcgcagtttttaccttcccgtttttatcagcaaatttttcgaaccctccgacatgtcatccgaacaattctttgcacgttggaagcaactgagcctgtactactgcactcttacaaaaaaataataattttttttttcaggccgtcccaagaatgtcagaaaatttttgcaacgattaatccaattgacagtgaccaaattcggatatcggtgcatttatacatttttgaaataaaaattgggcctcacaatgctatagacctggaattttttaaagaaccggggatggattttgaattgacctgtctgtctttcatgtctaataaccgtttgaattccagcaaatccctgaaattacctaaataattttggaataaatataaaatttagctcgcaaatttgggcgcacaaattctgcaaaatgttgacccgaaccctgaaaattttgtctgtgctggtattttacaaacgcaggctgcgcaaatcggctgtttgatccgcttggaaccgaacaaacagaccaaggtggtctatccgttttatttattaattaatgactccgtttttttgctcacaatcagatgttccgcttgaccattcggagcagtcgggagggagtcgcggcgacactttgcgagctgatgggtgggaatttc

SEQ ID NO: 47374 - DNA, 855 bp, Heterodera glycines
atgcccgatgctgctgctctcccctcatcacctgggcaacccaaagtgctgaatgtgactgaaaacagcattgaattggagtgggcttccccggaacggcatggctcttctccaattactgactaccttcttcagtactggagtcctgaattgggagaggtggggtattataatgataatgagcgatttattttaaatttcgttgtagtcttggcgaaatatattggatgttgtggcaaagtcccgttttcgcatcactggtcttcagcccgaacattcttatgtttttgttatccgagcggagaactcaaaaggcattggacttccttcgtctatgagcgaaattgtctcaacaaaaaaatcgaccgaaattgaagagggcaattatcgaagtcagcgaatgaatcgacttttggacttggaaacggctcgtcaaagactttcttcggaacaattggtcaaactgttagaagtgcgtgcattaaatgcaactaccgttttattagcatggaaacggcagagaaatgtaagtagaaaatttgaaaaccaaaagccaagggcggcgaaatttaattttaaaaatgggattttgaaaaaataacattttttaagaattgtttttcgaatttgcaggaacctctagtccaaggatattatataaaatggcgaggcccgccgcttgcgcaggaccacagttgggtcaatgttaccaatccggagactgatcacgtggtcattaacgggctcaggccgttcaacaactacgagtttttcgtgattccctaccaccaaactgtccaagggatgccgtcaaattcgctcgacgggaccacggctgaatctcgtatactttaa

SEQ ID NO: 47375 - DNA, 894 bp, Heterodera glycines
atgttcaaaaatgtaagatattagcagaaatatttcaaaagtcttttttaagaaaatcaattgttaatggtccacaaactcaatcaacacagaataagattaaactttctgacattgaattgaatgcgggaataatttggaatatattaagaagacttccccggcgtaattccacttcaccggataatgttccttacattttattaaaaaattgtgcagaaccaattacaaaaataatagcagatatatttaggctaattttggattccggtcaaattccggaaatatggcgaacatcattggtggtaccaattttcaaaaaaggcgaaaaaactgatccattaaattacaggccggtgtcattaaccagcactgtctgtagagtttttgaacgaattttaagtagcaaaattttagaatttctgaacagtacaagattctttgataaagaacaatttgggtttttaaaaaatagatcgactacaacccaaatattaaaaatgatggacgatatatataattctatacaaaagaatcaacaaattgacataatctatattgattttgtcaaggcgtttgattctgttccctaacttattactaaaaaatcaaagttttaaggttaaaattggcgaagaattgtcagaaagtttcagaatattttcaggagtgccccagggaagtgtcttagggccattactctttttaatttttataaatgatctgccgtcctttattgcaaatgaagcatcatcagttggcataaaaatgtatgccgatgatgctatattatattatacacatgaaaacgatgaccattcgaatcagttggataaagcaattgaggctatggaaaaatggtcaaaaataaatgagttatcatatttcaactga

SEQ ID NO: 47376 - DNA, 1410 bp, Heterodera glycines
atgggattggatgctgaacctgagcaagtgctggagggccacctgcgcgacgcgtacaatgccaaggcatttgtggaggagtcggagcaggtggagcagcagatgcagcaacagttggaccatcttgatcgtgaatattctcgtactgatttttcgctggacgatggtgaacagatgttgcgacagcttgactctgtccgtgaatacatccaacaattgcatgcgcgactcatttcactgaccgacaggtgtgcccaaatttcaccgctttggcaacgtggcgaacgcatttcaaaaccgctgccggtgatggcactttgcgagtacaagagcaaggacaaaattcacatcagacaaggggatgagtgcactctgttggacaaccatgaccaaattcagtggcgagtgcgcggtatggacggcgttgaggcttccgtcccatcggtggtgttccgcattcctccgcctgacccgcgattggcctcgttcctcagccgactgcacaaccaattcgagaagttgcgcaaactgtgggatcgcacccatcatttggtccgttacaacatggtgctgaacacaatgcgcacagtgcgtgcatgggacttggacactttcctgtcgattccatccgatcaacgggacgagatcatcaaagctttgaatgaggacgtgaacaagctgctgtccgagatggaccccaacgatcccttggccaagcggcttaaggacgagctgcggatgacgaacgaacatttctacgatttgttggcacgcgctcagaaagagccggagcccgactactccaaccagttcgatgctgcatgtgccgagttggtgcgcaagttcgaggagggctggaagcagctgaaccaccgggtgcaggaacgagtggccaccaacttggaggagttggaacgccaaatcaaagagcacaaggcattcgaagatgcactgcagacgcttgacgtggacgtgtcgaatgtgaaggaactgtaccgccagctgccccacccaacgcccacccagcgtgcagcgcacgacaacatggtgcagcgctggcaagacatttgggagctgtcgcgcatgtacgtggagcggctgaaggggcttgaatcggtgttgaacgggttggacgaagtgacggacattgtgcgacgccatgagatcacgctggcctcctttgacgacatgccggccgcgctggagcgcctgcgcggcgtgcacgcccagctgctggagctgaatatggtactgcaacagcaggaaaacatcgtcaagaagctgaaccgggacactgcaacgctgcgccaacatgttgcgcgcacgcgtttcggcgctgcaaaccatccggtgctaccagttaagccgtgccgggtttcgggattcggcctgcttagttccgacccctga

SEQ ID NO: 47377 - DNA, 256 bp, Heterodera glycines
cctcaacgccgtccataccgcgcactcgccactgaatttggtcatggttgtccaacagagtgcactcatccccttgtctgatgtgaattttgtccttgctcttgtactcgcaaagtgccatcaccggcagcggttttgaaatgcgttcgccacgttgccaaagcggtgaaatttgggcacacctgtcggtcagtgaaatgagtcgcgcatgcaattgttggatgtattcacggacagagtcaagctgtcgcaacat

SEQ ID NO: 47378 - DNA, 684 bp, Heterodera glycines
atgaaattggccatcaaacggttgcattggaatgaaactgatgggatttggtatgactacgacttggagagagaagtacgtactcatcccctggctgaaatactcattaagcttggcacactttcaggctcattccaatacctattacgtgtccaatgcattgccgttatattcaaaatgttacgacgacgaggatgacgtcacgccgtacaaagttttcgagtatctgaaggtgtctagagatgtttgcatttatgaaaacagcaacaatcggccaatttatgtagcgtgaaggtgtgctcaacttcaccagaggcatcccaacttcgttggcgatgggcagcatccagcaatgggacaaggagaacgcatggccaccgatggtgcacatggtctgcaatgcaatctgacttcaaatcaattctaatccatgattttcaaggtagttgaagcatttcgaacaagcggtgatctaagtcttatgaaagccgcggaacaaatggcaactcaatggttggtcgtcaattataaagtgagtttttacaaaataatgattgtaaaactatgaatgtttaaacattcctttagggttatgtatcaacctatgcgatgttcgagaagtacaacgtttccatgatcaatgaagagggcgttggtggttcaggaggtgaatatgaggttcag

SEQ ID NO: 47379 - DNA, 2428 bp, Heterodera glycines
aaatgccatcaaagcgttggacggcgcgtacattggcggctcaaaacttacggttctgttttgttggacaccatttttgttctttgggtggaaattcaatttttgactgggaaaattttttagattttaatgccttttcagtaaatgacaaattacaggtcgaagagtgtaaagcattgacaactgaccgaacggcgatcaccaaacaactttcgttgaacaaacgcaaaaaactgaggcaaaaaggcaaatggtaagcgcaaaatttagttttcttttttaattatttgttttgaattcgttttattgctttcattttccaatttctctccgccattttaattattaattgcattaataaaaattgttttacattttattcttttaagcgaagttgatgaggaggaggacaaagaagaaggtgccgaagaggcggacgtcgactcactaattgaaaagcaaattttggacaccggacgtaaacaatttgacattttttggcacgagggttgggaagggatgcataaattggcactaattttcaaaatcttttgcgactcgatttttctgtatccgaatttgcactgttttcaggacttttccttcgaaatttgccctttgtgtgctcggaagagcaaatacggcaacttttcgagccgtttggaccactcgccgagttggaatgtgtcgtggacaatgcgggcaaatgcaaagggtacgccctgtgcaccttcatcttcccggaacatgcggttgccgcgtggaaagcgttggacggcaccgtttttatggtactcatttggacataaactgagactatttccacagctttcttctcattaatagggttgcaaattatatggactaaaaaaacgctaaatatggactaaaaagctcaaaaatggccaaatatggactaaaaacatccaaaatatatgttttaaaccctcaaaaattccaaaaaggtttatatagctattcaatacttgcttaaataagaaatacaataaccaaccaaaaaatggatttaacatttaaaaatgcaaatttttttattgtcgtccgttgtataaaaaacacctctaagtttgccaatttcaaaaaaaattcccatttaaaaaaaaagaaaagttcgcaaaaaatggtgaaaatatttattaaaaatgccaaaatgacaacgaaaactcaaatttttcgtatttttggggggtgtaatttgtaaaaatttccaaaaagtcggtcttcaggtgtatattttcagcttttttaaatttttcttgtgaaaatttgccaaaaatggccaaaatatggactaaaaaccaaaaaatgtcgaaatatggatttattcccgaaaacccccaaaatatgtatttatatggactaaaaaccttcgccaaaacaaaaaatgttaacgcagaaatgctatttttgagcccctttcttcatagcatatgcgcagaaaaaataggtaaatccatacaatttacaaaacttactcatcaaaaacaatgaacagtttggagaaattctgaatattatctttttataaaaaaagaaaataaagggccgaatgctgcacataatcgccggcgaagagaagagagtgcggacgaacggtgcagacgacgacagcacaaacgacggatgccaaagtgcgttccaacgcgaacggaacgaaaaacgcaaggcgaacgacgcggaaggggcgacagaggcggcgacaaacaatcggtgagcaaaaaaggcaacaacaacaaagcctcggaacaattatccgaccggtggcaatgtgctgcctcggaattgtctcccattaattaatgcatttgcaactaataatgttttcctctctgttcagttgcacttggaacgcgctgtttcttggcactgacgcggtggcggagacattagcggaaaattatgaagtggagaagcgcgatttgctgctggttgacggcaaacagcagaacaggtgagctggggacggagttggaggagtacggattcgacgtatccctccgtacgcccccgtctctgttttaagtcggcatcaaaattttaagatgttttattgtttaaaaattagcctcatttggttgccaattctgctctctttccccctttaattgatatttctcccatagtgccgcggtgcgcgtggcaatggccgaggcgcgtttggtgcgcgagacgcgcaaattcctgcttgacaacggcgttcggttggacgcgttcgcccagcggcggcaccttttgagcaatggtggcgacaacgtcgacggcactgaggacggaaccgcaaaaatgagacgttcaaagacgacaattttggtcaaaaatttagacgccacgagggaagggaaaaaggaatggctgcactctctgtttggacgctttggggtcgttaagacggtgctggtgccaccag

SEQ ID NO: 47380 - DNA, 1618 bp, Heterodera glycines
atggctgttctaattgagcgcaacccgcctctgttgggcgccgtcctgcgttacattgaccgccatgttgaccaccttgacgagtacgctgtcaacattctgtcaacagtgccgttaggcttttgcactgtctccgccgaagacatcagcgaccgcttgggcaagtggctgatcagccgatccattgaccatccggcatccgccattgcgcggtgagaaagttgtggctgctcatcatagcctaaaaactattcagaagagttctgtcctctttgaactgggactgtcaatcgcctcaaccggcatcgttgcacaaatcctcagttacatccgtgggtagccaacctcaatcaaatcggctttgtctttccgttgaaatacatgacctttgcgcagaaacgcttgtgaaggtggtgttattgtcgtttgagacaattggattgatatttttggacgatatttaaggctcacattgtccaatgcaaacagagaaacaatttgattgccaagtcggtgaacaaagcggcacgaatggcactgaaatgtcccgacttggagcaacagttcgaccgcttctgctgggacgtgttgttgaggctaaaaatttcggaaaaggtcgacagcgtcatctcccttcttcaattttgtattactttttgaactttgttccaaaatttcagccaaattgtccgactccgccaaatgatctcaccgccttttacgtgttctgtgtccaaaagtgtctttcatcgtgcgttttaaattgaaacagttcaaaaagttgttcaatttcctcttttttaagttccaatctcttcttcgaagcgggtcttccccttttccaagagttagtcaacgcttcgtgcttcaaggcggccgccgtacttttgattcgaattgtacatgccttccccagcagcaaccacatgcagaatttcatcgcaaatcccacgtaaaaatgaattttttttttaacttttccattttcgaaataatttgtcatacgttgctttttccgattttgaattatgcacaatttaaaattttttttagattctgtgaggtttttgaacgacttctccacgcggacgaatcggcgtacgctgttcagctgttaatgggagctgacaaatttcctggtccggtgctcagtctggtgtccggcggaatcattgtggagaaacaaaattccaattcaattcccaaatttttttttcagcaccaaatttccatcgacgccttccattttgagcagcgtaaagtgtacgcgcaggcctgggttcgcctgttgacatgcgacaaacgaacgcacgagtggaactcggacaaattcgtgctgtacttgcttggctgtgtcgcaaagtgttgccacctcttcgacccgcaggacaattttgggatggtggagcttttgcgggacctttacaaggccggttaacaccggggaaacacagattaaaattctgtttttcaggcccgacaccaggcctggagggacaccgttcgaggccccctctcctggttctcctcctcgtccatccctcctcctctgatcgctcaagcccaattcaccgtctctccatgggccacgttcatgttgttgcgtgccgagcaggaa

SEQ ID NO: 47381 - DNA, 885 bp, Heterodera glycines
atggaggctgttgctgaacacgattttaacgctggtgagcctgacgagctgagctttaagagaggtcaaattttgaaggtaaatatattttagttggcatgaaaaaatttctgttaaggtcgctaatctaaacaaagccaaattcaggttctcaacaaagacgaggacccgcattggtacaaagcggaaattaacggagttgagggattaatcccttcaaattatattcgaatgatggaacactcttggtatctcggcagcatttcgagaagtgattcggaggtaatgagcaataaatgctagtcatgaagaaagtaagggctctcctttaaatgtgaatttttgaagtttcttaaaaatcataggggactcttttggttagcaaaaatttttatttataattaacaacaaattgggaagattttctggtcgcgaatcacaattctgacatccatttcgccaactttgaatctctgactcgaacaaatatcgacaatttcttactttgttattaaaacaatcaaggacttttccattgtttttgaaattttaaccttaaaggttcacaccaggacttttaatgtcgattgaagtggttgatttcaacactaaaatcaaaaaattgggaaaaactgtgtttttgacttatgaatgaccggatgacatcacgttgccaaacctaaaatcactaaatatttccgtttttgcccaatttcgtactgctcgagaatcttgattaaaaatagtagccttttccatttagctcctcctcttgaaaaatggcaacccagacggggcctttcttgttcggaggtcggagtcgacgcccggcgaattctcaatattgcgtaaggtaaagaaagagcggtaatagtgctgatatga

SEQ ID NO: 47382 - DNA, 4416 bp, Heterodera glycines
atgctcgaaaaatgctcgaaaaccaaggttttttgagttcctctagccataacttttttgaatcgtaacgaaattttttgaaattttgtagacttatagagaacactaagggctatcgaatgatatcaagaattaaaaattcaattgcttttcagctaagttataaataatttttcatcaaatcataatgatggttttttaagtaacgactccgccccctaaaaaccgatctgtacatttctgtgttcccatgcgcgactgatcaatcgatcgatcggtcgagggagggagagagagagggacgaattgggggagggcgccttagcctaaccctttttaactggtcgaaaatgagtgcgtttttcaggaacgcattgctcagaacgccagaaaggagcagctccgggaccgggctgttcgcttagacgattctctgacggcattggtcaagcaggcccatgacaagctgaatgagtcggctgcgatgcctcagtgctatgagcaactgtgcaatggactggctgaacagattgagcttgccgagcagtttggcgccgagaatggcatcacagttggcgaagaacggattgcgcaggcaaaggaggtgcgcgagcagctggcacagcgatggcaccattgggacgagtttgtccggcttcgagatctgggcaccgcccaactggataaggcgcgtgttgcgattgaccagaccgagcaaaagacatgccgaagcgtagcggaggccgagtcggaccatgacaacctgctggtaagtgtccaggctaattaaaaaggggatttgcaatgcaatcggactgactgatggtttgcaggaggcgcagggttcgcttgcttctttgaatgccaccatcgaccaactgcagcagttggctgacaagcttgatccgctggcgacgactcatgctgaagtgcgattcctggatgtggaattcgaacagctggagaagcatttcggagacgtgcttgaccaaatgcacaacgaaattgagcaggaaaaggcactgatggcggaaactgagcgagccggacgagaaactgacgacatgacggcacagctgccgacgatggcgaacaatttgaaggcattgcagcatgctcagcagacagccatccctgccctggaggcgaaagtcgtcatgctgcaacaacagagcgagaaggagaagccgctcagacagtacgtgctccgctccactgccgctccttctccggatgaactcgcgcagcgcttagcactgagcaaaggccgggcacaggaagcggcccaacagctggtggacacagcagttgtccgggtccaaaatgtgcttttggggacaagccaagctgctgccgaacttccctccgatgaacaaattgatgaatgcgccaaagagctgcaggacaacatcccgcttgaacatccgcacaatgaacagctccgacagcaattggagcagctgagagagaaggtgatgcgcagggatgccatccgatcgcatattgaccagcacttggccaccattggcaaggaattggaagggttcagcgagcagttcatcagcagcagcaccaccaacggcaaaaaggtgccgccctcctccaaaaaggaggccaaaaagaagaagggcaaaggaggcgaacccgagcagcaaaaacgagctgaaaagatggccagcagagaagagcacatcgacgagctgcgaaaagcactgggacgcctggaaagcggcattttgcctgccttgaacacgcttcatgacgaggccgtccagcagggcattcctttacaaccgacagaggaacaccagcatcagctgatgcgagccaatcaaattgtccaaagtttaaaggtgtgcttttgttgaagcattcattgattttcgtccatttccccaatcacttgcaggaggaccttgacaagagtgtggccgagaacgagcgggcgagcgtggtcatcaacgacatacgccttctgaaaagcattgttgatggcacggtggtggaagcagaaaccgcggcggaagaggcgactctccaactgctggacgtggagtccgtagaacagcataagcgagacatggaagaggcagccaaaaagttgggtgaacagctcgccaagatggcggcagatgcacatcaggtcagcaccagtttggagccggaagagcaagcactgatgaagcgggtggaagaggaggctggcaagaagatggacaggctgaactccctcaactcggtgctccagcatcagatggaagtgctccgagactgggcacgcgataaggacaggcttgagcagcacacgtgctcactgattgaccagctgaagagagtgcaggaggagcgggaagaggctggccctgccccagcagaggaagagttggccaagctggatgccctgcagagcgaagtggacgaggccagggatgagatgaagcggatgcagagctggctggtccaaaagctgcccaagtgcgggagggctgcggtcgaactgcaacttcggccggtcgaagagagcttagtgaagctgaacaccgacatggacggcacaatggagcagctgaagaagaacgtgcaaattgaacgccgtctgttggaagagcgcaccgcgcttctcaatgctgccaacgagctggatgagcaagttcagcaagcccatgcgtttgaagagccgcaggagcagatcagcgagctggacaagctgcacaaccaactggagcaagtcgaacagcaaatgcgcactgttgaccaacaatccgagcagtacccaacgccacagaaggcgacaacactgagcgaacaaattgcacatgttgtgcacaagacgaggacaaacattgaagatgcccgtcatcagttggaggtgaggtcatttcgtctgttgatgattggaaatcacccataaacccattgatcacggatctgtacatttctgtgttccttcagtcacacgactgatcaatcgatcgatcggtcgagggagggagagagagagggacgaattgggggagggcgccttagcctaaccctttttaactggtcgaaaatgagtgcgtttttcaggaacgcattgctcagaacgccagaaaggagcagctccgggaccgggctgttcgcttagacgattctctgacggcattggtcaagcaggcccatgacaagctgaatgagtcggctgcgatgcctcagtgctatgagcaactgtgcaatggactggctgaacagattgagcttgccgagcagtttggcgccgagaatggcatcacagttggcgaagaacggattgcgcaggcaaaggaggtgcgcgagcagctggcacagcgatggcaccattgggacgagtttgtccggcttcgagatctgggcaccgcccaactggataagcaccgcaacagtcttgacaatgtccgttccgcgcctttaatctccgaattgaacgatgctcagcttcaactttcctctttaaaagtgcttttcatttttgtgctttttcattttgcattttttaggacaattcgcttcatttttcgcaaattcgtcaacttttgtctgatttggtctctctttccaagtccctttctcctctttccgttgtcgatgatattctccgttttatgtttgtggagctcgaaagtttggaatcagccaatgaggtgtttttaacattttctctttttttcatttgatttttaaaaatttatttagcaaattgtccatcgattcgaagccgaaattgaacatcgaaatgaattggaacaaatgtttgatgggatctcttctaatgtcagtacttctgagaacaattttgatcattttctgcaacttcggaattccgatcgaatgaatgtaatttttattcttttcttttttttttgtccttttaattaatgtttttaacaaataaaaaggacttgctgactgaacttggcgagatcggcgcacaaattgatcagcttgaacagagcatttggcaagggaatgatcagcaacggatttttgtgcaaagtttcgacaagaaacgcctccgaattttgcgagaacgaatcgaacaattggagaaaaacatttggggggctttttccgaactgagtgaagggccgtcgacggaagcggcggaagaacagccgaagtacgacgtggacgcggcggtggaaattctgtcggcgatttacccgggccgagagccactcgaagtgatgagggaacacgggctggacaagttggagttggacatgaacgatgattatggggacggacagacggaaggggaagaaggtgaggacggacaaaagggggaaattggagaattttaactgatcaatcaattcacaccccacaaaaagagacatgcaatttgtgggtgtttaattaggaatgaggagatgaaacgcgcgcgaatgataatgcgta

SEQ ID NO: 47383 - DNA, 261 bp, Heterodera glycines
  unsure (1)..(261): unsure at all n locations
agagaccaaatggcaaaaaattcgggaaattccctggtaaaacattccccaaggaagaagcgtgcccagctttggcttggtcccggtgcctacataaaccacgactgcgccncaaactgcgaatttgtgccgaacaaacagcaaaccgcgacgataaacgttctgagggacataaaagcgggcgcagagattaattgcttttacggggacaactttttcggagacggaaattgcaattgcgaatgtttaacatgcgaaagg

SEQ ID NO: 47384 - DNA, 659 bp, Heterodera glycines
  unsure (1)..(659): unsure at all n locations
cagttttattaatttttcctccattgcttccatggacaattcngcgagtgtntacagggcatatgctcgctggaccaggtccccttcccccccccctcccaaantgattcgcctttccttctctttcagttggtcattcggctcgtctcttttctcctcaatttcgctcttttacgcctcgtcgacccttcccttttgggctttttcaatgtgaagtatgtttttacgaatactaattacttttttggaaatccctagcttttaaaatggattgtttttcggcttttaccttttgcaatttccctccccccatttcttcagaatgactttgctttacaccaccatttgctttctttcccgtgagcccatccgccggctctgtctcagttccgattttccgctccacaaagtgccgtcctacgcttcgctaaggtttcttttacccattgctaattattttaaaaattcatttaaaatatgatatttttgagaatttatacttaatttatcggcatttctcataaaaatcccccaaatattttggcacatattttcttttcgtcttttggcacaatttcaaacattcgtttcattcaattcccaaaactcgtcagtccagtccgctgttcgccttggccaccctttccctctgctgtgtc

SEQ ID NO: 47385 - DNA, 1537 bp, Heterodera glycines
atgacattgcatgactttttgccgcagaacacaaaagcgattgatttcactgataatggacaaaaaactgagacggtgcagcgacggacggcggacggacgccttcggttgccggaatggctgaagagggacgtggtggccaagcagagcgatgtgagtgagaaaatcagacaatttggagcggcttctttggcatttggaaatgtttgtgatcccatggataaaacttgaccgtgatttttagatttttggatggaattaaacaaccatccatttttatcaacaggtgaatttgatcagaatgaagaagcagctgaggggactgaagttggccaccgtttgtgaggtacaagtaatttggcaaattaccatataaatcaaatgttaattgctttttcaggaagcacggtgccctaacattgggtaattaagagtaacaataaaaaaatgattccgtttctctcatttttattgtagcgaatgtttgggcggtgggcccggcaggccgtcaaccgcggccattatgctaatgggcgacacgtgcaccagaggatgccggtaaatcaatttaatgccagatttggcgttgtttccattctgaattcgttctggaggtttcacttgccatctctagcattattttaggtcagtctttccaatactaatcagtccggtccgtcctcactttttaactgtcatagggtcagatcagtaaatggtttaattggctgacaaaatccctgggtaaatcacacccaaatcggctgatcagacggaggaaattattgattcaatgggcaattcttaattctatcactaaggatgaatccggtctaagtttgctcttacaggttctgctcggtgaaaacggcccgccgacctccgccgccggacccggaagaaccgctgaacacggcgaaggccgtcgcgagttggggcgtcgattacattgtgctgacctccgttgaccggtgggcaaccgaaaattcgacgcattggaattctcgaatttgtttattaagcgacgatttgtcggacggcggcgcggcacacatttcggccaccgtccgccgtctgaaggagcagtgcccccatgtcctcgtcgaatgccttgtgcccgactttgcgggcgtgttgcccagtgtggagcaagtggcccagtcggggctggacgtgttcgcccacaatttggagacgggtgactgactgttgtggcatggtgttatttataaattgtgcccttttcagtccgtcggctgactccgctggtgcgcgacccccgtgccaaatacgaccaatctctgcgggttttggcacacgcgaaaaaggcaaatcaatcaatgattatgcctaaatcggtgccaaattgcaggcgaatcccggcgtgttgaccaaaagttcgctgatgcttggccttggcgaggcggacgcggaggtggaggaggcgatgcgcgaccttcgcctggtcggcgtcgaggccctcacactgggccagtacatgcagcccaccaaacggcacttggccgtctccgagtgg

SEQ ID NO: 47386 - DNA, 1154 bp, Heterodera glycines
atggcagatgatgaagattatgatgggggagaaatggacggcgatgagtttatggaggaagagcccatagaagaccttgatgcggaacaccaagcgggagaagaagaggaaggcgcggagaatgtccaagttattaatgtaacctattattttacatattatttaaattttggttttcaaggtttctgacaaagttgcatcgtccaaccgagtgacaactccttttatgactaagtacgaacgtgcaagagttcttgggacaagggcgctgcagatagctatgggtgcaccagttatggtcgaaattgaaggcgaatcggaccctttggaaattgcgcgtaaggagctcaaggtgaataaatattccaatttcaataatagcgaggtaccagttaatctaacctaacatttaggaccagaagattcccataatcattcgtcgttacttacctgatggttcattcgaagactggggcattgatgaattgcacattacggattggtgaaaatgattaaccgcgtaattggcattttttctatttatgtttaatgaatttttgattcactaatattttctgcttattttgaccgatttttaattgacgttaataccttatttaaactccattatgcgtttatcaatcagacacttttctagaggtgttttgtcaatgtctattcttcagaaactttctcctgtaaacatcgactctaaaggcgtttttaagtacattctcataaaggtttttttctgtgaagattgaagcaaaatgcgaatttaggcttctgatggcgcaactgaaagatttttggttcgtggttatggtcgttgtaaatttcacgcggatattttggaggaagtgcaggcaagcgaaggagagaaggccattgaattttcttgtgttggcggaggccggataaaacatgagccggaagccaaacgtatcttcgtctacggatattcccaggtgcagaattctcaaaaagatttttatcggttgtttgaggggtttggccgtgctgaccatgcgaaatctgtcgaaatcctgagggaacgttatccaaactacacaatcgaatggtccaacgaaggatattagggcagtaaatctagtatacaatattgtaacgttttttgttttctatatttaaaa

SEQ ID NO: 47387 - DNA, 1284 bp, Heterodera glycines
atggcatcggacggactccgaacgttcgtccgttttgttgacagttcttattgtaagcatctgctactgtttagcatcgctttggcctacaaagattatgtcgtcgagaaaggagaagcgaacgaagtgcgcttttcattttgaatttcgccctttggcattgtgccattcccttgacattccgttttcttcagattccgctcgaaggagccgatgtgaattgggatgacgagcagattctgcgagagggaatgacggccatttgcgtgttaggcattcaggacccggttaggacggaagtgccggatgccatttcgaaatgccaacgcgcgggaataaccgtacgaatggtgagtgatttttgaccagtcttgctaatttagtaaacaatatgtaaaatgcgcctaaggtcaccggggacaacataaacacggcacgttcaatcgcaacacaatgcggcattttgaggcccggggaggactttttggcattggagggcaaggagttcaacgcacgcatcagagactcggatggggttgtggaccagcggaagttggaccaaatttggcccaaactgcgggttttggccagagcacagccaaccgacaaatttgtgctagtcaaaggcatcattgagtccaaatgcacgaagaacaggtcatcaatgattggtgggctgaaaatgagtcaaacgctgcagggaagtggtggcagtgaccggcgacggcacaaacgacgcgccggcactgaaaaaagcggacgttggctttgccatgggaattgccggcactgacgtggccaaagaggcgtcggacatcattttgacggacgacaatttcacttcgttcgaccatcaattcgcatttatttattgtctgctcgttttagcattgtgaaggcggtgatgtggggccgcaatgtttacgactccatcgccaagtttctgcagtttcaactgactgtgaacgttgtcgctgtgaccattgcctttgtcggcgcgtgtgccaccaaagattcgcccctaagggtgtgccgtgccgtcgtcccttgccctcgtcctcatttttgctactttaggccgtccaaatgttgtgggtgaatttgatcatggacactttggcctctttggcgttggccaccgaaatgccaaccgaagatttgctcaagaggaaaccgtacggccgaacaaagtctttgatttcgcggaccatggtgaagaacatcatcgggcacggcatttaccagttggccgtcctcttcggacttctcttttttggtcattga

SEQ ID NO: 47388 - DNA, 1042 bp, Heterodera glycines
atgtcaaaactgtgtgttaagagaaaccaattggctacggaaaagctaatcaatgcctacaaagacgaacacggggaacgcagcaaagaagtccaatccattggcggtccaaatgaattcgccgagttttattctcgtttaaaaacgttgaaggatgttcatcgaaaaaacccaaacgacactgctcgaacactgacaattgagtttcaagagatggccaatttcatccaggaccccgaccgattagaaaaggagatggtccgtttcacggatgaggagggatacggaaagtttttggacctccattctttgcacgagcaatatgttaacctgaaggaagtcactgtgagtagtgaattcaacatttaactattgtattaacgtgtttcccatttagcgtgttgattatatttcatacctttcgaagttcgaccatctccacgaactttccagagaaaaaacgaagaagacgggtgcctacaaaacatatgtcctttctctggaggaatatctgagggatttcatttcccgggccaagccactcattgacattgttatggaattggatcgtgtggacaaagtaaattaataaaaggacacaaaaattaatcatggacttaaattgtatacgtttaaaggattttgaagaaaaattgaaggaaggcaaagtgattgggtggtccaacgaaaagccaagcggcgcaatgaaaaagttcgcgcaaccgtccgcagagatcgatgtgtccaacttcaacagccccgaggaattggaggaattaggcgccgaccgactcaaagcggcgttaatcgcactcggactcaaatgcggagggtttgttgtctcttttcaaaataacacacataaactattaccaaatcaactcatatttaggactgtgaaagaaagggctttccgtttattttccaccagaagctccgatggttcaaatgctgtcaatggaaatggaaaactcaccgctgaagacacaaaagaagagaatcggaagtacactcttgccaaggcggaagcgcatattttgag

SEQ ID NO: 47389 - DNA, 825 bp, Heterodera glycines
atggactctcccgctggtgctcagccgtcgaacccaaacgctcaacaacaaggtggagcccgaccatcgaacaaacgactccagcaaacgcaggcacaagtggatgaagttgtcggcataatgaaggtggttacagtttttcgagtaagtcagtcaactaattggtctatttgcaggtgaacgttgagaaagtgttggagcgtgaccagaagctgtcccaattggatgatcgtgctgatgctcttcaagttgttgtgaactctttgactcgttaaattcatttttaggaaggtgcgtcgcaattcgagaaatctgccgcgacgctgaagcgcaaatattggtggaagaacataaaggcaagccttgttttcggctctttttccataattgaattttgtttagatgatcgtgatcatgtgcgcaattgtcatcctgctgatcatcatcatcgtcatttgggctggaaaatgaacgacgtgtgctgcggtcggatgctcgagaatttccaagtcttcgtgaattgaaaagatccatttacaaacaaaacccgcgaatctaatttaaccagagttcttgaccaacaattcctaagtctgtttctcatctcctgtttgtgtaccacccaaaaatccgagtacatacgacacttacttcggtcccttcccacattcctaattttcaaaactgtagagtacgcttggaatgcgatggattgacacattttatgtgatgtggataaactgaatatgtaatttctgtttctttttaaattggttgcattgacactttcctcccatactttttctgttatttattagtattaaa

SEQ ID NO: 47390 - DNA, 825 bp, Heterodera glycines
gcgcatgacatcgaaaacgacccgagcaaagccgataaaacatggaccatcattgacacgggcattgacatgaccaaagccgacctcgtcaacaaccttggaaccatcgccaaatccggaacgaaggcgttcatggaggctcttcaggttttgtttttcgtttggtcaaccccccccccccaatctaaaaaacacttttgctacttaagaccggcattgtcgctttaatgcccgggcattttggcgccggtttctactcggctttctctgtggccgaccgcgtcacatcaaagcacaatgacgacgattgctaccaatgggagagctcagctggtggctcgttcatcattcgcaattgtgccgatcctgaagtcacccgcgggacaaagatcgtcctctacctgaaggaagaccaaacggcatatttgcaggtttgttgtactttggttcaaaaagtgcgtttttgacgctcaaaaattttacatttttctttcgcagtaaatgcgcaattgtcaacaaattatatttttaattaaaaatcatcaaatttttattgagttcaggtgttggtgctggtgttgtgcgtgttcatctgtgaatgcggtgtggggagaaagggcggccaagcaggcggtgaaaggagcagccgcgggcgaccaaacaatgacggcggggggacaagcggcggagcgggacagaaacggggaggaggacgtggcggcggtcgcggtggtggaaaaggcaatggccgcggtggtggacgaaggcggcggcgggcggggagggcgggcgccgcagcacccacaggaggctgatgaggaagag

SEQ ID NO: 47391 - DNA, 492 bp, Heterodera glycines
atgaaagaggaggacaaaagagaggaagaggaggacaaaagggaggaagaggaggacaaaagggatgaagaggaggacaaaagggaggaagaggaggacaaaagggaggaagaggaggacaaaagggatgaagaggaggacaaaagggaggaagaggaggacaaaagggaggaagaggaggacaaaagggaggaagaggaggacaaaagggaggaagaggaggacaaaagggaggaagaggaggacaaaagggatgaagaggaggacaaaagggaggaagaggaggacaaaagggaggaagaggaggacataagggaggaagaggaggacaaaagggaggaagaggaggacaaaagggaggaagaggaggacaaaagggaggaagaggaggacaaaagggatgaagaggaggacaaaagggaggaagaggaggacaaaagggaggaagaggaggacaaaagggaggaagaggaggacaaaagggaggaagag

SEQ ID NO: 47392 - DNA, 1759 bp, Heterodera glycines
atgttgcttataagtttcgtaaaaatttgtaaaaaaccacaaatttttgcagcgaccattgagcatgagctgtcgctacggcacaaatacgacttggaacgcattgacgcggacgtgcgcgccaaggcgcgtgccgcacgcgacaaccgtgacgtgaacctggagatgatgcgtgcgagtgaggaggagcgacgcaagacggtcacggaacagattcggacaaccgccggcgttgtgggcgctggactgtccgagtttctctccgatcgctccaaaattatggcggcagtgagtgcttttttatgcccaatttgttaattatatttgtattttatctaaaaatgttttccgttttttatggttttatctaaatagaaaaaaaattaacaaatgctagcaaaaagaatgtgaaacaattactcatttttcagttttttcaattttgaaagggctaattttcaattttattgtcgacttgatgaaattgtatccgattttgttgaaaaatgagcttttgtatatgtaatggcttttagaattttgattttggagataaaatgtgatttagaatgacttttttgactatgagttttcaattttaattccatttcttttataaaattatttttactattttacaatacccatatctgaattttacatacagtaacaactatatttataactgcaatttataaatacttccactttttaaatgacccctccttcctccaaaaaaggtcggtggtctgactgtgctggcggtcggttggtacagtgccaagcgtggcactggcgttgtggccaaacaggtggaagcacggcttggtaagccgtccctggtgcgtgaaacgtcccgcctcacactgttcgagctgttcaaacatccaattgcgagtgtgcggacactgttccgtgcccgcgaggacccgctgaagggcattgtgctcaatgtgagtgcgcaaatcatttaccgtgctttatggagagatttacccccccccccccccacgggcagtgcctttcgatgctttccgacccacatttttctatttttaaatcttaattgaatcaatgtcctctaaaaatggtcatttgttgtaataaataaaaattttgctacagaattgttttagccaagcctcgagtcgcgtctgcgtgacattgcgatcaccacgaggaacacaaagcgtaactttggactgttccgcaatgtgttgttctacggaccgccaggcacggggaagacaatgttcgccaaggttggtccaccattttgttgcattttcttgggaaattttacctcctttctatggggtcatgcaaattcattcccctattttaatattttaaattgtttatcagagtttggctcgccattcgggtctcgactacgccataatgaccggcggtgacgtggcaccgatgggccgtgacggagtgtccgcaattcataaaatttttgactgggcccaaacgtcgcgcaaagggtgggccatttgaaattaattagccgtttttcaaatgaataattttcctgcattttttgtcagtttggtgctctttgtggacgaagcggacgcttttctgcgcaagcgaagcacggaacagatcagcgaggacatgcgcgccatgctcaacgcgttcctcttcagaaccggggaacagtcgaggaagtcagtcagtggtgcttcatttacgaattatttggctgccacaatttttaggggcagctcgtttccatcaccctaaaattaaa

SEQ ID NO: 47393 - DNA, 1784 bp, Heterodera glycines
catcacagcgcaatgggatgggcgagaatttgtacatgacgagttcgtcgtcaatttcggaaggtaaaagcaatgaaaacgtgtttgataattagggatgatatttttaggcaaaagcctttttcctgagctccccgttgcctgaaacgcacgaaaaacatgtttttttgggctgttgttaagctacttttcgacttattaatgccttttttctaggcttttatttttatagcctaaaaagcctaaaaatttttgaaagaacctatttttgcctattttggcgttttgtccaaaatttgttatcaaaaatgcaataaaaatgaaaaatgcaccactaagaaacgacctgaacattttataaatacacccttaagtaattaaaattttctcaaaaattcatcttcaaaataatttatttatttcttgacaagaatttttgattttaagaattatttagctaaatactgttttccctaatttttttacttttttgtaattttgtcattttaaacccctaaatttgagactatttagagcctattttccattttttggagactatttttagggtttttagagcctaaagcctaccacctattttagtgttttccggaaaaatttggacttcagaaaatctggttcgggtgtgtttgcaaatcgtttatcaaatgggttttgctggatcaacaagattaagcttagagtctcagttatttttgtttgtctttgagtacagcctttactcgggaatgaatttgatcaaatggatttctggataccgaattgataaaaaaacaatttctcatgatcaacactgttttttagctgatgcgctgaaacaagcttgcgacacgtggtgggcggagctaaagcaatacggcatccaggaaagccttgagctggacagggaacagttcaacaagggcatcggacattggagccaggcaaaatgaatgaatgcttatttttacgggtggcaaaaatttttttcgtaaatccaaatttttcccgtacgataggatgaaataaggacaaatcttataaaaaaaagacgaattacaatcttgttttatatccattttcatccactacttattttactgctctaacttcgtttgttgctttcagcaagcctgggccaccactgctcaaattggctgtgccatggcacgctgtcccagcgctgactggaagacatgggttgtgtgcaactacaacacaacgtgagtgcaagaaattctagcgtacaagggaatttttcaaaatcactttcaaaagatttttatcggatagagcgtggtcgatttgatattgtaaattttcggctttttggatactgcaccaaaagtgatcagaaaaaatcgatcaaagacccgaaaaatcgatgaaatgggcaattttaaaaatcagaaaaaatttacaaataaaacaagagttataacatttttaaaaataatcagtaaaaaatttctcaatcaaacggtatattaaattttaaaaaatccgctgaataaaacaatgccagatggaaaaaaagcccaaaatcaacaatagcaaattaactattctctacacgataaagtgatttaaatgataatttattttataaaattatagtatatattcctaagattttgtattgatttttttaattttaaaaatttaatcgtttcagtggcaatcggttggacgaggtggtctataagaagggtaccgcatgcgctagttgttctgactacaatggcgcgtcatgtaacagcaccagcgtactgtgcattttgcca

SEQ ID NO: 47394 - DNA, 595 bp, Heterodera glycines
  unsure (1)..(595): unsure at all n locations
gtctgtggctccaacaatcaaacgttcgcctcgctgtgccacctctatcgccagcgttgtgtgtgcaaaaagcgcagtgactttgaaactgagttggttgggcattcaaaatttatgcaaattttttttaaatttttcactcctaccccccccccctagttggaaaaaaattttccccctaaattttgcagctgtgagaatccgtccaacgccaaaattcatctggaatatttgggccaatgcaagcagttggacgagtgcacggacgagctgatgtcccagttcccgggccgaatggccgactggcttttccaggtgtcaaaaatttcaaaaaaaaattcaaaaatttttccaggtgatgaaagagttgaaaaagcgccgtgagctgcacaacttggagtgggagcagctgatcaacgaggcggagcaggacgacgagaagcgccacgtgtacccggtgatctggaaattctgtgacctggacattaaggcaaagaatttttttaaattaaaaaaaatcggcgaaaatttcttccaccaaattccagcctcatgacaaacacgtgtcacaccatngaattgatcccgatcactg

SEQ ID NO: 47395 - DNA, 2289 bp, Heterodera glycines
  unsure (1)..(2289): unsure at all n locations
atgaacaacgagaaaggtatgttatttaaaacaaagacattatcaatccgaatttaactttgcctactaacatttagtggaagacttaatgagaagaacgggcgccaaagtgaacattccgccaccacacgcaaacaacgagacgataatcataacgggcgaacgcgacggcgtcgatgaggcggcggtcgaaattttgaagattttcaatgagaaggttcacgggaaataagctgattgggcaacacacgagtaaattaatgattttttagaaagagtccgttgtctccgtggaagtgaccgtcccaaaggcgcagcatcgctacgtcatcggccaaaaacgtgcggggttggaggagattttccgggaaacggaggtgctggtggagttgcccccagaggacagcgattccgaaactgtcattctcagaggacccaaggacaaaattggtgacgccgctggcgcaggttggaattttcaatgattttttctccattaaaatctttccaagtttagtctaccagaaagcgagtagcaacatcgccattgaattgccttacaaagaatggatgcgacgccttctcattggggcaaagggacagaatttgcacaatttggtgccgaaccacgaccagttgaagatcgatttcgaagacagtgtcatctacatcgaaggacccaccgatctggtcaaacaagctcagcaacagctcagtgccgaaattgcgagattggaaagcgagccccgcttcgaggcgatgaggaacgcgccggatgacacgcgaccgggcgaagaaagggtgggctggcagagccaatgggaagacaaagagtagacaccatccaatttattaaggaaccgcaatcgaagattcaattcaatgtcgacccaaaacatcaccgacacttcatcatccgtggcgcggaagtgctcaagaatattcagaaggatttcgaatgccaaatttcgtttccgaaacaagagacgggcgactctttggtcacaatccgaggccgcaaggaattagtcgaaggagcgaaggctcgaattgaagcaattgtggaagacatggaggcccaggcccaaatccaaattgatgtcgatccaaaacatcaccgacacttcatcattcgtggcgcggaagtgctaaagcagattcaaaaagagtccgaatgccaaatttcattcccgaaacaagagacgggcgactctttggtcacaatccgaggccgtaaagaatttgtcgagggagcgaaggctcgaattgaagcaattgtggaagacttggtaagtatcactggaagtaacaaccgggctggcgccttgaatttaacaacatacgtttagttatctgattaaattttgggcataattcgtagcgctataactaatgtataagcaagcctttttattattccttcactattttttcatgataggaggcccagacgcaaatccaaattgatgtcgacccaaaacatcaccgacacttcatcatccgtggcgcggaagttctcaagaatattcaaaaggaattcgattgccaaatttcgttcccgaagcaagagacaggcgactctttagtcacaatccgaggccgcaaggaattagtcgaaggagcgaaggctcgaattgaagcaattgtggaagacatggaggcccaggcgcaaatccaaattactgtcgaccccaaataccatcgtcacttcatcatgcggggcgcggaagtgctcaagcagattcaaaaggaatttaaatgtcaaatttcgtttccgaaacaagagacgggcgactctttggtcacagtccgaggccgtgttgataacgtcgaacgggccaaatcccgcattgaggagatcatcgaagaattggtaaatctcactacttgtccaacaaaaaaaaacgcagtttttcagttcgacctttatgatgaatcccagtacattgtacgacgtgatgacccaccgccaccaaaggctgagccaaatgacatcgaaatggtgaacgcaccatggcagattgactcaatcgaacagttccccggactgtctggtgatactgttgctgcacagcagcagaagcccgttacggcaaccgctgtttggggtcagcgtcgttgatgtcactggaggggagtgaatgggacggggtgtgctgtgttcgcgattaattgttactattctttgttaaatgagtgcctttattctgtcacttccttttgcaatactcgtatctttctttaatttcaaatagttttgtttaattaactanatattctataattaaa

SEQ ID NO: 47396 - DNA, 2185 bp, Heterodera glycines
atggacattttgtcaattgcacttgggtcagccgaaggatttgaacaagcggacaaagcgttgcattcgactagccgatcgggaagatggattctgctgaaaaatgtgcatttggcaaccgaatggttgactcaacttgagaagaaatttcgccttcacaatccacacccacattttcgtctgattttgacagctgaaattggctccgctctgccaatttctatgatccaggtgtataatttaaaaatttacttttttcaaattccaactttttttcacgcttcgcgtgtacttattttcgaaccatccacagggctgaaggcgaatctgttgcgttctctttcctccatttccccagcacgaattgcgaaggcgccagcggagcgagctcgtctgtacttcattatttgctggttccatgccattgtgcaagaacggctccgctatcagccactcgggtgggccaattcgtacgagttcaccgacgcagatttccgagtcgcgtgcgatactctcgattccactgttgacatggtcgcacaggtcattctttgttttttgtgatgatggttttctttttctatttagaacagggcgaatgttaagccggataaattaccatggctggctctccggactctgctctctcagtgcatttacggaggaaaaatcgacaatgattttgatcaggcaagtatacagtgggtttataagggaaagaaataataaaaattttcatagtattataaatgtttggttttgaatatcttttagccattttctcacctttctcgctagatgcattatttcacacttaatataatttaggtgcttctcgatactcttctcgacaaactgttcacatcaaattcatttgacgctgactttattctcattgaaaacatcggagtgaacgccttgaacatgccagacgaaactaactcaaaggatgggttgatcaattgggttattaacatcaaagccttacaaaagcctaattggattggacttccaaacaacgcagaaaaagtgcttatcgccgaaagaggtactgctttcacaaaccgaaatgccatcatgacgaaatcatttatttatcaattatagggcaagaatttatacggaagatgatcaaaatgtcggacgatgaacttgcatacgaagcggatgatttggaacgtaacaagcaagcccctacctggatggttcaattttctggacagtgcaaatcttggctcgatgctttgccacaagtataccgtctttccctctgaaaagattgacattcatttaattgttttcgtttattgtttcctattctattttttttagcaactccagcgtcttcgacggactaaagaaaatgtgcgcgatccgttgttccgattctttgaacgtgaaatcaacttgggcgccagacttttgtccgatattcgacgggacctcaacgaattgttgtccatttgtcatggggatcagaagcagaacaatcacagccgtgaattaatagctgcattggtcaagagaaaacgtgtgccagacaattggctccaattttccgtgccaaaagacgtaacagcacttgaatggatgcgagactttgtgcaaaggatggaacaactaaagcgcttgtcactttctgaaaatctgagatatgaggaagtttggctgggtgggatgttctttcctgaagcgtatataacggctacgcgtcagctggtagcccaaacgaatggctggtcgctcgaacagatgtacatgcatatcacaaaaacggaggaaggacaattaaaatcaacggcattcacattgacaggtggttgatgatgatgaacttcgttttcatcgcacatttatttatagaccttcgcgcaattggcgttctttgtgaggccgacgaaattaagctgacagatgaagtgcatgttggagtgccacggcttcagttcacgtggaccttggaaggacattctccagcgagtgttgtggtgcctgtttatctgtactccaacagggccaaatttttgttcggacttaatttgttaccaattggatttgatcattctatgctaagccagcgaggagtcgcctttgtctccaattgttcgctttgattgacttttgtatcttttgtctcaaagaatatttatttatctgtctattgtttttaatttgtttccaatga

SEQ ID NO: 47397 - DNA, 1685 bp, Heterodera glycines
tttcgtctgatgatcaagtgaaaaaggcaatggacgcaacaacggagaaatttggtggtctcaatgttttggtcaattgcgctggaatcgctttcgcgcagagattgtacaatccgtcgagcagagcccaaatggacctcgacaaaattcggcgactcatcgacgtttgaccgccaaaatgccgtccattcatcctgtaactgtttcccaaaggtgaacatcttcggcaccatcaacgtgatcagacacgccctcccgctgctgattgacaatgtgccggacgaaaacgaccagcgcggagtgatcatcaacacttcatcaattgcagcctttgaaggacaaatgggacaggtggagagacaaatttgtaattacagcacccttccagttcactggctttgttttcactttaaccagtttcctcccgacgtggtgccggattttggaacgactcaaatgcgcaaaatcgagccaaaacattttaatgaaccaaaaatactgaacaatgttactcatttaaatcaaacagcggccagtcaagtctccaacaattcgaaacagttccatgaacttgcttggttacaaaaaaaaaatttctaattgtgttttatatagggatgtatgttgcaaagctactttctaagacacctcaaaacggaatcgcagaagctattcgcttgaaaggcccagattttctcaatgtgcaccagcaagcaaattgatttgatgagtgaaagtatgtgagacccatccaattgtttcattggcttacacactttaaaatttttcaatttggatttattcgaatcatgatcattcctttcttattttgaatctgcattacattctatctgatttggtgattcaccattaattaatattttactgtgctttttactttaccctaacgcgcataaggctctaaagcagtgcattagacaaggcaattaattcgattactattcataaatcatggaagtataagggaaaaataaaaatccctttccctaatttagtctgcaaaaaacgcaattcaaaatttattcattggaaacaaattaaaaacaatagacagataaataaatattctttgagacaaaagatacaaaagtcaatcaaagcgaacaattggagacaaaggcgactcctcgctggcttagcatagaatgatcaaatccaattggtaacaaattaagtccgaacaaaaatttggccctgttggagtacagataaacaggcaccacaacactcgctggagaatgtccttccaaggtccacgtgaactgaagccgtggcactccaacatgcacttcatctgtcagcttaatttcgtcggcctcacaaagaacgccaattgcgcgaaggtctataaataaatgtgcgatgaaaacgaagttcatcatcatcaaccacctgtcaatgtgaatgccgttgattttaattgtccttcctccgtttttgtgatatgcatgtacatctgttcgagcgaccagccattcgtttgggctaccagctgacgcgtagccgttatatacgcttcaggaaagaacatcccacccagccaaacttcctcatatctcagattttcagaaagtgacaagcgctttagttgttccatcctttgcacaaagtctcgcatccattcaagtgctgttacgtcttttggcacggaaaattggagccaa

SEQ ID NO: 47398 - DNA, 1179 bp, Heterodera glycines
atgtcgattaaaaagttcgactccgctactaataaatatattatactcaaaaataacgaacaagtggctacaatcaatatgatcggttcgacttggataaagaacctaaaaattatcgtccaagggcgcgagatttatgactctaactctttgtatgcttataaagcatactttgacgcggaattatcatattctaaagatgttaaacattcgcatcttcaagcaagtggttattacaaagacagtgacaaccaggacggaactgataacaaagcacccaaggatttgattgtagaagaaaattattttctgaaagccagactgtgcaatttattgcaaaattggatgctgatgtgttcaaccaggatagatatatggttaatggaattgagattgacatacaaataacgccgaatgacaacgattttatgataatggcagcatcagacgataaatataaggttgagatcacttcttgtaagctatatgttaagtcgttggaaatcgttgatggtctcgctttggatctacagaagaagcttgaaagcaaagaagcaaaatatgcccacagaaaaactttgattaaatcagtgttcatcagtgagaatcggaccgagtttaatggaacactgtttacagggcaactgcctaaaagagtaattctcggaatggttgaaaattctgcatatgtaggctcacaaaagaagagcccgtttaattttaagccatttaatcttcgatcagtttcgttgatcgctaatggaaaacaatggcctgcagcaccttttgaacttaactttgataaaaatttatatacacgcgcattccatgaaatgaatgaatctttgggaatgaattccaccactgacagtaatgggatcaccctagaaaaatatcgaagtgggtggacaatttttgtattcaatatgacaaatagtatggaagaaaatgagtgtattgatcttatcaccgaaggtacgaccaccgtttcggttcagtttcgaaaacccgttcagtcaggagggattactctaattgcgatgagtgagatggattctatcttaattttggacaaaaaccgtaccgttatgacagacactagcgtttgatgtatatttaagtgaattgttttagagtattctatttgtcaaaatgtttttatttattgtgttaatttta

SEQ ID NO: 47399 - DNA, 2414 bp, Heterodera glycines
actgtgcaaattccaaccatcgaatggtcgggcagtggtttggttgcacctgagcaaaatgccgacaattcgacggccgaattggaaattccgaaggacctttatttaaaagcgtgcgtcacgtcagtcaaggaaggactgcagtcgatggacgacaaaaacatcacatatccggtgatgatcaaagcatccgaagggggaggagggaaaggcattcggaaatgcttgagcgatgaagacttccgattgaattttcgaagagtccaagccgaagtgcccggcagtccaattttcatcatgaagttgtctacagctcagagttgttctgatttgttttgttttatctaggtgtatggttaacgctcgacacattgaagtccaactgattgcggaccaatacggccaagtcatcccaattttcacgcgcgactgttccatccaacgacgctgtcaaaaaatcatcgaggaggcgcctgcagggatcgtaccgcaggaaatccaacggcaaatgcaaatggacgctgtgaatttggcaaagaaagtgggctacgtcagtgccgggactgtcgaagtgggcgaatttcacggaagacaatgctgcaattgccctttcagtacatgtatttgccatctgagcagaagtactattttctggagcttaacccgcgactccaagtggaacatccgtgcactgaaatggtcgccaacattaatatccccgccgtccaactccaaatcgccatgggcatccccctgcacagaatcactgagattcgtcttttctttggcatggatcgatacgggtcagttcagaatcaacagctcgattctcaagtcgatctgattttcaaaaattaagcacttctccgttgcccgaagaacagtgccgaacggacacaaatatcagcgtaattgcggcacgaattaccagcgaggacccagcagaaggcttccgtcctgcgagtggcgccgttgaagtgctcaatttccagtcgaatcagaatgtttggggttacttttccgtctccagtacggggaaagttcatgagtttgccgattcacagttcgggcatctttttgcgaaaggaatgacaaggcaaggcatcaaatgacatagtaggaaattggattaattgcgcattttcagatacgaagcgatttctgcccttttgtgtgcactcaaagaattggaattgcgtgccacttttacctcccaagtgaattacctcgttggccttctccacgacaaggaattcgaatgcaacaactttcacaccgggtggctcgacgcccgaattgcctcacgcgtccaagcatccgtggaatacccaccgcacattagtgtggcaattggggcgactctgagtaacaaatccaaccgtggttgatgaatttggactaaagagaaatttaagttggccacgctcggattaccgaagtattttccaaattccaaagtgcgctcgagaagggccaaatcctgccaaagtccggacttgtggagacgtgggaattcgaattggtgcacaacaacaccaaatactcagtgatggtcaatcgctttgggcccatcaattttctcgtccggttgaatgaaagcatcgtgtgcactgttgtccgtgagcttggtaatggaactttgcttgttacccatgaagaccaggcgtacacttgccatttggaggaagaggtactcaaaactgacaatgagcaaatggccaaacaattcatatttgttttcagtctgaacgcttcaaagtgataattggcaaaactttaaccatattcgagaaagaaaatgacccttcgatgttacgatcgaaaaatgctggaagatttttgcagtatttgaagaaggacggacaatatgtcacaattggagaggtttttggagaaatggagtcgatgaaaatggtcataaatttggaaatcagaaaggcgggtggtcgtctagttcaggtacatttgggttagcatgttacgaaagcggccaaattgttcaggttgcgcaaccgggacaagtccttttccctgggactttaattgcgagattggaggaccaggaagacattgccgtgtccaaacccgtgaatttcaccggtccgatggaggagtgggacagtacacgagaaaaggagttgcagtcacggaatcaaataaggatgaacacacgatttgaagatctcattcaggtatttgggtgattgtgacaatcctttcattttgtttaccgtaattccaattgaaggcgtgcaacaacattttgtccgggtacgccatgcctgaaccatatttccgtgaccaaacagctcgtctcattgatgacctcttcgtggtgatggacaaccctcgtttgccatacgtccttttcaaagtgatgctcaacgcagtcgaaaatcgaatcaatcgtaaca

SEQ ID NO: 47400 - DNA, 337 bp, Heterodera glycines
atgctgagcaacggacagagtgtgctggatgaattgggattgtggacatggtggaagccgtcgagttggatgcgttgggttatggaatacgcacatttgacattggacattccctggtggggcacaattattgccagtgagtcggaaaaccaggggaattttttttatttaaataactaggcgttcatttaagcaactgtcactttgcgattgctttgctttccaattcccgtgaacatgcgcagaatgatggcccttcatcaaaaatacgccccggaattgaaggaattcaccgataaaatgcagaaggcatcgcgggagggaaacaacgcattgt

SEQ ID NO: 47401 - DNA, 1865 bp, Heterodera glycines
  unsure (1)..(1865): unsure at all n locations
atgcaaaagaaggaaggtgaccaantcagcgaggtgatttgcttgtgagatgagacggacaaggcgacgatgggtttgaancgccggaggaaggctatctggcaaaaatcattattcctgaagggacgaaggatgtgcccattggaaaggttatttttacgacaattcagagcaaattatcaatttatttccattttagctcttatgcataattgttgagaaacaagaagatgttaacgctttcaaagacttcaaaggcgaggaaagtgtgccagaaacaatcgaagccaaagggaccccggaaacgaccaaactcacgcaaaagacactccccacggcacaacccgaacagtcacagccatcgcctcagaatgtgatgtcagaccaaagccgtgtcaaggcttctccatatgccaagaaattagctgatgaaaagggaattgacctttcggtgggtaaaatgaacccgatctataggaaggtggttaaatgcccaagtcaaacgatcataggcggtaaaaccgctattttatggggtaatgtggagagattaatttacattagttttattttaaagcattttaaaaaattcaaatttaatatgttataatcagctcaatttcagtcgttttctggctctggccctagtgggcggattttggctgccgatttatcaaaggctgaaggggaatttccgagccgtgggactcaaagctccgcttcttcgttcatcgatattccgctttcgaacatgcgcaaaacaattgcgaagcgtcttagtgaggcaaagtcgacgattccacattattacctcacttctgaaatgcaaattgacaaattgcttgagtaagttggttgtttcgtcgtttattgttttcgtttctttttcagagtcagaaagaaattgaacattttgttggagagagaggccaaaaagaaaggagaaaaaatgccttcgaaattgtccatcaacgactttattataaaggcgtccgcactcgcctgtttgcgtgttcccgaggctaattcctcctttatgggctctttcgttcggcagcacagttcggtggatgtttcggttgcggttagcaccgacgtcggtctgatcactccgatcattttcgacgcacacactaaggtaatccaagcaacggattgctccatttccatcgccaattttaagggcgttgcgacaatcagcaacgaagtgcacgcattggcagcgaaagcgcgtgaaggcaaattgcagccgcatgaatttcaagttgtaccttcattgtccaactccgttactttcggttttcagggaggaacattcaccgtgtctaacttgggaatgtttggaagtgtcgaccattttacggccatcataaacccacctcagtcctgcattttggcaattggcgctgcgcgtcgaatgctcgtccctatggaagaggaagacaaatcggattcaaacgaacggtgtttttcgaacagttcagagtattcagattttaaataacttttgttttcagtttccgcgcagtcacttcgctgaaagtaactttgagctgtgatcaccgagtggtggacggtgcagtgggcgccgtttggcttcagaatttcaagcagtttatggaagagccatttacgatgatcctttggggcacaccggggaatgttttttaattgtttctcctcattctcggcccaattattaggcttccgtggttgactctctcctagtgatgacttacaataggataaaaataccttacaattagcgggtgaaaattgtcattgtttttgttagagtgaatgataaattataattttgaacaaatgggccataaatttctgcccctttccctccgcctaataaa

SEQ ID NO: 47402 - DNA, 810 bp, Heterodera glycines
ggtgggaagcgagcccaatttctttcacgtctggactttgacctgggaaaccaagaactttatttgttgaacaatttggatcttttatttacaatttacaaagctcgtgacacattcatcatgcagacattgaaagcaaacaatactaccaaataccgcgttagagtccatgacgtaaaactgtatgcttaaatgattgatgttcagtcatctttgaatttaagcatctacaaaacgcttgaaaaacaacccgccacatatgcagtgcgaaaaactgaaatcaaatcatgctttataagtgaaggtaggtttgaaattgactacaatgtattcagtgcaacaattcctcgacgtatgacaatcgcacttgtcgcaaacggggcatttaacggaaattatgctctctctccatttaattttaaaccgtttgacattcgagacattgcagtgtacgctggaggcatgatttacccaattgttccatacaaacttgactttgccaaagatatttttgtccgtccttttgttgacatgtatgaggcacttggcatggctaattcagagcgttctttcgacatcacaaaagagcaattcaaatctggttggacctttttcgtaattccactcacatcgacgctcgacgatagcacagggtatgaactcttaagaagcgggacaactagcattcgcgcaacatttaatagtgcaattcctgagggcggagttgaaatgatagtgctgggtgaatttgaccaaatgataatgatagactacaaccgccacattgtttccgattcaaagcttagttaa

SEQ ID NO: 47403 - DNA, 1854 bp, Heterodera glycines
atggtgcatcaaatatttgatccaaactcagttagttttgatgattttgttgtagtagagcagattggctcgggagaagcctttaattattttcgcgggatacctccataccaacgaggatatggaagacagcgaggtggaggagtaggagatgtgttgaggtttttatggagagcacttttaccaaaattaaaatctgctggtacattattgggtagagaggcattagacactggaacacgtgtattggatacaatagagaaagctgaaacaccaaacaaacaagcaataattaatgaagtaaagaagggaatggataatgtactcgaaaaaggtggggttgggcgtcaattcggaacgggaagaaaaaagagtattaaaaggaaaagaattattggaaaaactatacctaagacagtaataaagaagagaaaaagatcagacgtatttggaaaattattttaaaatggtcttcaagaaaattggcaaggaatcggtaaattctataacttcagctttgtcaatatttacccttccaccaactaatgtgtcagtgagtagttcttcagtgcgggaatatttaccgctcaatcctttaacggacattccttttcattttaaaattcaccctaccgctagtttctttgatttgaacaaatgttacatcttaaccgaaatgtcaattaaaaagctggattctgacaccaataaatatgttaatttgaaagtgaatgagcaagcggcaacaattaatatgattggtgcgacttggataaagaatttaaaaatcactgtgcagggacgtgagatttatgactctaactcactttatgcttataaagcatacttggatgccgaactttcttattccaaaaacgtaaaggagtcagacctgcaggcgagcgggtattatgtggacagtgagaatcaggacggcacggatattactcagcagggttttgatctgagaagaaaattgttttcacaaagtcaaactgcacaatttattacaaaattggatgcagatatttttaatcaggacagatatatggtgaatggagttgagattgatatacaacttacccctaatgacaatgagtttatggtaatggcagcggccgacgataaatatagaatagaaattaccgcttgtaaattatatgttaaaactcttgaagttgttgatggtcttgcattagacatacagaaaaaacttgaaagcaaagaagcaaaatatgcccatagaaaaactttgatcaaatccacatttataagcgagaatcgaactgaatacaatggaacgctatttacgggtcaattacctaaacgagtcattctcggaatggtggagaacgctgcatacgtaggcaaccaaaagaaaagcccatttaattttaaaccatttgatattcgatccgtcacattgatagcaaacgggaaacaatggcccgcagcgccatttgagcttaatttcagtaaaaacttatatacccgggcattccacgaaatgaatgaggcattaggtatggccagttcaacagacagtaacggaatttctcttgagaagtatagaaagggttggacaatttttgcgtttaatatgactaatagcatggaggacaacgagggtattgatcttattacagaagggacgactaccgtgtgcattcaatttagatcacctgtcccatcgggtgggatcaccttaatagccatgagtgaaatggactctattttgatattggataaaaatcgaacagtaatgactgatacaaccatttaatgtatttaaagtgatttattatttattatttataattttttaaaatgtttattttgtttgttttattttta

SEQ ID NO: 47404 - DNA, 950 bp, Heterodera glycines
atgattgatgttcagtcatctttgaatttaagtatctacaaaacgcttgaaaaacaaccagccacatatgcagtgcgaaaaactgaaatcaaatcatgctttataagtgaaggtaggtttgaaattgactacaatgtattcagtgcaacaattcctcgacgtatgacaatcgcacttgttgcaaacggggcatttaacggaaattatgctctctctccatttaattttaaaccgtttgacattcgagacattgcagtgtacgctggaggcatgatttacccaattgttccatacaagcttgactttgccaaagatatttttgtccgtccttttgttgacatgtatgaggcacttggcatggctaattcagagcgttctttcgacatcacaaaagagcaattcaaatctggttggacctttttcgtaattccactcacatcgacgctcgacgatagcacagggtatgaactcttaagaagcgggacaactagcattcgcgcaacatttaatagtgcaattcctgagggcggagttgaaatgatagtgctgggtgaatttgaccaaatgataatgatagactacaaccgtcacattgtttccgattcaaagcttagttaatgaactgtataaataagatgcataatgcgaaaaaatgccaccataaaaatggccttcttaaacactacagtcaacgccagtttaaagccagagatacaagtactaacatttgaaaacaaaagcgttcatcctaacctcctcgtgcaacttctattgcttgcccattatctcattgcttttcccgttttcattttatgctggtattctttgataaattttcttaagagaagaggacatatttctcagcgtgatgccaatgagatgatggatgatttgcgaaattaccaattaccaaaaaattcatcagttatttttccaagtttatcaataaa

SEQ ID NO: 47405 - DNA, 1117 bp, Heterodera glycines
atgaaccaagaacaagacaatatcccaactttcaagcttgtgttggttggtgacggtggtaccggaaagaccacttttgtgaaacgccatttgactggagaattcgagaagaaatatatcggtgtgtcaaaataataaccgcgattctttaattttgtcgtttagctacgcttggtgttgaggtccatcccctcacttttcacacttcgcgaggtcaaatccgattcaacgtttgggacacagccggccaggagaagtttggtggacttcgtgatgggtattatatccaaggttaatgaattaggaatcacttttttttactcaaacatcatatattcttaggccaatgtgctattgtcatgttcgacgtgaccgccagagtcacatacaaaaatgtgccgaattggcaccgcgatttggtccgagtttgtgagaacatcccaattgtgctggtggggaacaaagtgagaagttcaacggttctactttacttaaccatcaataaatctcgcctccttttaggtggatgtcaaagataggaaagtcaaggcgaaaagcatcacttttcaccgcaagaaaaatctccaggttcgttttttgtctatatatattcataaagcagtaccatctttgtagtattacgacatttccgcaaagagcaactacaatttcgagaagcccttcctttatctggcacgaaagctgatcggcgaccccaacctcgaattcgtggcgatgccggcactcgctccgcccgaagtacaaatggatcccgctttggctgccaaatacgagcaagaagtggccgaggcagcaagcgctgaactcccggacgatgatgaggacatttgaagagatggaaggacggctgggacagattcctgggacagcaatttccgagcagacaaagttatgtccattgttttaactgattgtttgatgagtaaaggaaagcgaatgaattgggatagaattttgtaatttgactaaattttcctagaacatattacctcaggaaatgacaaaccgtacaaaaattaaaagaaaatctaaaaaaatttcttcgctgggcttaccctaagaatattttctttcgctatttcaacgacgatctgca

SEQ ID NO: 47406 - DNA, 1446 bp, Heterodera glycines
gatgcaacattcgcttcactgaaggagctattttgcactgaccatgcgttggatcctgccaagacgcgcttccttttgggttcaattggtaaatcggaacaaaatccaaaacttattaaatatagaaggattaattatcaataaaatttttaagttagaattcaagatcattttttcagaaatgatcgctgatgatgaaacgcctaattcgcttgggttggaggacggagattgtattgatgtgatccattttgaataatgacactcctcgcctttacatttgttttatttacgacataaatttaccaacaaataaaagccttggttttgttagccattgaaagtgttttgccttaattttcatgtgctatttattcctttgattaatccgtgatcaatccgttctttttctatcttttcagcccgtttgttggagatgtccaatgtgcgcgttccgtccctccccttcagtttttaccctgaaaagtgcacccattgtcttattggactgtacatccaccggtgcttgtcattctctcattcaacttcaaataaccgccacaatgatgttgctgcccacaaaaatcattaccaaactttgggagtgtctcgtgatgcgagcgcaaaggatatcaaaacggcattttttgagctgaccaaagtgtgggcgaacccttaaaatgtcagcttaaaaacttgttattttgtcgtacagaaacaccatcctgacatgaaccctacggataaaacgaaagcagccgaggcgtttcaaaatgtaagaattatacgattacatttttaatcaaatgatagtgctttgtcaggaaagcgtttttgtttagaaatttaattctattatattgttttaaaatcgtctttccttagataactgatgcatacgaagtgcttggttccgaagagaaaagacaaatttacgatacgctcactgctccgaaaccgcaagcccatttcggcagaacgccaaatttcagacggactcgttccaaccatataaacatgggacctgcaggagggcataaagattggaccgatttggacatcgatttcagagatttcgagcacttccaacgagaaaaccggtaaaattgttggttcaagcattgaattttgcttcattttaggagccggcagacgttcaaagactgggcccgggcgaatacaaaatccgaattttactggtcatctcaccaatcttcgaaatcatataaaagcccgctagcgttggaaagagagaacttggagaagaaaatgcacgacgaagtcatggagagacgaaggcgaagcgcgacaattcccatgtttgacgaactgcaaagagacaagcagaaaagggaacaggaagagaggaagaagagaatgaagaattacatcatctttctgccgatcgcacttttcatattattatttattgcagatcgtcgttga

SEQ ID NO: 47407 - DNA, 808 bp, Heterodera glycines
aaaaagggaactaaattcaaaaatggaaaaacagtcgaaccatattaatttgtttttgaaaccctcacagcagcagatttggcccgcattttgtgagtccgcacgttcccgcgagggtgccgtccttttcgcggtggtcggcggaaaactcagcgagggttcggttttttacggcagcggggggtggggggggaatttgtaaatttatgaagttttggatattttttatatatataattatgatttcaaggcatcaacttctccgatgagttgggccgttgtgtgctgatggtcggacttccgtacgcgaacagaaactcggccgaattgtcagaacgaattcgggtgagttttatgatttaaaccgttatttgttgattttgatcaaatttataattacaattgatcatttttcaccgtttattttaattccttttttcatgttttaaaatatttatataaatttggcaccttttgtttcttacaaattcttatgctaataatagcataaattttctgaccaaatttgcccccattttttgcccagtatttggaccagcacattgggcctggcgcgggcacgcgcttctacgagcagttgtgccagcaggccatcaaccaggccatcgggcgtgccattcgccaccgtgtcgacttcgccggcattgtgctgctggacgagcggtacgcgcgcgacacaattgccgccagtttgcccggatggattcggcaacggctgacgcgcgcggttccgttgcccgaggcgctgcggcgtttggacaattttttcagcgtccacaattgtgag

SEQ ID NO: 47408 - DNA, 1344 bp, Heterodera glycines
  unsure (1)..(1344): unsure at all n locations
ataaatgatctgccgtccttttatacaaatgaagcggcatcagttggcataaaaatgtatgccgatgatgttaaattatattatgcccacgaaaaatgatggccattcgaatcagttggataaagcaatgnaggctttgaaaaatggtcaaaaataaatgggttagaaatttcaactgaaaaatgttttgttttatatttagggaaaaataatattaaaaaagaatattttattaactcaaaaaagatttcagaatcggataatgttcgtgactttggaattataatgcactcgaaacttaatttttcagaacacataagcaaaattatacgaaacgcatatcttagaagctttcagattttgagagtcttaaaaaccagggaaataaagactctaacagcagcttataaaacttttgtacgacctcaattagaatacgctaccgaagtttggaaccctaatttaaaaaaagatatagacaaaattgaacgggtacaaaaatttttcacaagaaaagcttttcgaaaatgtggatttgtgtacaaaaaatatatggaaagacttaaaatcatacacaaattggaagaaagaagaaaaatcaatgatttaacaacagcttttaaaataatcaaagggttcaccagcctcgatgctgggaaaagtttctttttctcagaaaggctcaggaggcctttacttttacgggtaaagcgccacacggccaaaactcaaaataattttttcaatagaatagtaaaaagctggaataaccttccagtggtagcggtgcaaattaataaggcaaaggaattcaggggtttactaaaagcaatgagttagagtaggaaatttctgtgccacaattacattaaaataatcacctgtgaatttaacatttgatttatttttatttcacatttattacatcattttgtatttttaatttgacactttttatttgtttgtttctttttggcgccatataagagcactaatgtgcctttggtttgctcgataaatttaattaattaattaaaaaaacacaggatttattttcctcactttcatcactttttatcgaagattttctctaaatttatttcttttcaattattttataatgcaaaaattgcacttttcacctcattcatttcgagcaactcgcaaaatcgtctttttctgcacaaattttgcacattataattaaaataaatttaattaattattgtaagagtacctattttgcattttcactatttcctcttgcacttctttcaaatttcgctcaatgttcacagccatttctgttgcaaccttacaaaatatttaaaagcacaaattaat

SEQ ID NO: 47409 - DNA, 1418 bp, Heterodera glycines
atggtcggcatggggcaacccaaatggattaacccggaacgatttgacgaaaagtcgaccaaattgttgtccgaaaggacggtaattgggtgatcattgattattggaatatatttaatcattttttgattgatcaattctcatatttcaccaattatttccgccacagattgtcaacactttgcccgttaccgttttgtcctcttttgtcctccgacaaatggtcaaacgccgtcgcggtgctgtcataaacatttcgtccgcctcggcgtatatgaaatggtaccagtacgccgtctattcctctacaaaggcaattttggaagagaggggggaggggggggggggcttttccatgccgaaatcccggacatttctcccattctcgagaattcaaataatgtcccatttccgtcatgttctcgacaccactccaatttctggcaatggcaccgaaattattttttataattctcgaggccgtccgtttccgctcctttcccattctcgcgaatagccaaatttcattttttttttttttctaaaatgccattgtcctataaaatgccactcccattttgccaattcccctacaaatgccatccccgtgccccttcttcagagcttcattgtccatttgtccgaaatcttgcgcaaggaattcgcctccgattgtccgggcattgccatccaaacggtgtgtccaatggtcgtggccaccaaactgactcagcgttcgtcccgtgacggcctttcttcccttttggccgccagcccaacggaatttgcgcgtcaagccatccaaacggttggcctcgtgccggagacgagcggatgtttgtcccaccaaattcaggtgggccattaaaaaggggggggggaataacggaatggcattggcacggaaatttgaaatttttgacacggaaaattgaacatgaaattgggcaccaccaccattttggaggcatatttttggatttggcacaggaccaattgatcaacaatttaattatgttgacctcgaattaaacattgttttcaatttgtgccaatttttgggaataattttattttaaaaattattttgcataaatttctaagcatattttttcatttttgcacattttattttacatatatatttgtttttaatataggtagctattattaatctattttttcaaaatttcgattcaccaaaataatgacagagattttaggagcataaattaataaatcattaaataactaattaaaattcctctcaattttgttttaattgcttttttcaggttgagctgttgttctcccttttgctcactttcgtcccaaattcgctgttcgactttttcgtccgtttggaggcgcatttgcacaaaagtgtgctgaacacgacatccaaacagcacgactaa

SEQ ID NO: 47410 - DNA, 277 bp, Heterodera glycines
atgaagctgaaccctttcgtctcctcctcagcgcgcaaatcgcgcaaacgccatttcaacgcgccctcgcacatccgtcgtcgcattatgtccgcgccgctgtcgaaggatttgcgcaataaacacggagtgcgttctacgcccattcggtacaaaggggcgggcaaattaacctataaactgtttaataatccactgattaagcattgatgacgaggtgactgtcacccgaggccactacaaaggcaatgccggccgtataatgcgtgtgtatcgg

SEQ ID NO: 47411 - DNA, 1279 bp, Heterodera glycines
ccggatgcatagagacgtgccttttgtttccgcaaaccaaactgattttccgacaacagttgcacaatgttcttgccgttgatgccataaaacaggtgaatgatgataagccaaacaccgggggactaatagggacggacacgaaacttcgaaatttgggctatggacagaatgaagttggtaaagcacacttaataaggatggaatatgggaagaatttcgtttgaccgtctcttttcagctccgtcgtgagggcttacacctcctttaccgtggccttcttcccccacttattcagaggacaacaacgcgttcgattatgtaccttttggacagaattttatttaaaaaatgctatttttaggtttggaacttttgaaaagtatcaacacgcttttggctgtgacccaaatgtgtccagcttcaccatttgtcacgctgtttccgcctttcttggttcgattagcttaaagttaatgtggaagaaaacagaaaaatataaaatgggatatgaattgaaaatttcatttcgttttccaatgccaaatatcgtcgcctttccaattacttttgcttttattgcattagccggtgctacggaagccattttatgccctttggagagaacacaaacgcttctgcagacgagcaaacactttgacaaattcaaaaacactggcgaagcctttaggattatgtacagaaattatgcaccaaaagagtgggcaattcatttttatttgttagcctttaatatagtcagccttaacagattttatcgaggattttccgtcatcgttctccgcaatgggtaaattcaaaattgttaaaatttttaatcaaaatatcttttcaatattattattttttagttgtagcaatgtaatgtttttcactttgcgtgagccgttccgcgaatttgtgctgtcaaagcttttccattcaactgagagcagaacgaaaacgcaacatttgtgcgcaaattttctgtccggtgccattctcggggcgtgcatttcgaccattttctttccgtttaatgtcatcaaaagtcggatgcaagtccgttttcctgtcttttgtaaacgctttcactcatttgttttagtcaaacattggcattgacttttgtactccgtggtttatgttcaaaaaaatcctcgcagaacggcatggctcaattcgtgcgttgtatcgcggtgctcagctcaatttcagtcgctcattgcttacctggggcatcacaaacagtctttatgagctattgatgtacgaactg

SEQ ID NO: 47412 - DNA, 1986 bp, Heterodera glycines
tgaaaaaacggcggacctccacaaagttgaggacgccttcgtacctctgatcaaactgcgctacgatggcattgaactcgacattttattcgctcgtttggcgttgaaagaaataaaggaagaccaggaactctcagacgacaatttgcttaagaacttggacgagaagagcattcgttctctgaatggtgctctttttcatttcctttttccttgaatatgatcatttctttccatttgaatcaatcttctattttcaggttgtcgtgtggccgatgaaattttgcgattggtcccaaatcgactgaatttcattttggttcttagagccgttaagctttgggctaaaagtcagttttttctacattttccattcattcactgtgcctctttcgcagaccatggcatttattccaatgtgttgggctttcttggcggcatttcttgggcaattctcgtcgcccggacctgtcaattgtatccaaatgcaacaccttctgttttattgcagaaatttttcctcgttttttctgcatggtatggacaaagggcaaacggtgggaagcctcgaccggcgtgggacagtatccatggggaaagggtgggtacgaagggcatacgaaccccagctaacatacagcggcttctccgagtgtttcttagtaaatttgaaacttttttttggctacagtggcaaaaaaaaattaatttgtcaaatacaaattttaagtgcagtagtttttttctgactcacagggattggccacatcccgtcattctgaaggatgtcgacgctaccccgcggattgacataccctatttcattgacatgatttgggatccgagaacacgcgcatcggaccgctaccatttgatgccaatcattacgccagccttcccagaacagaattccacatttaatgtgacaaggtcaacgagacaagtgatgaccaatgaattcaaagaaggtgggcaaagcgaaggcattaagggagggacacaagcaaagtccaaaagacacagtgccatgggtagggaaggggaggcacaatttgaatcattaaattggggggggggcagagaagcctcgaattcccccccccccctctctctctgtctcccttcattctccacttctcttttactctatgatgtgcacagagtagagattgaatatgcttcgcattgctttatgcacaattttattctgattgatgctgtggtgtccgaccgtacgagtttcttttgccgtgtagtgtctcaccgaaaatgaggaggaccacctgaatttttgcgggttggttgagtccaaaatccgccatttggtggcgtccttcgagcggaattcctgcgtgaatctttgccatgtcaatccccggcagtataaacccgcatacaaattggagctcgacatcgattacgagtaatttattattattcaactcacgaactaataaattatctctcccccacccacgcttaaaatgcgtggcattacaaaatccaaaaaatgaaaatgaactgacaaagaatgatgattcactctgttttaacttttcattcattgttaaggaaccccgtgtgcactttgtggttcatcggattggacctgaacaagcaacttacgaaaaaaattgatctcacagaagagttgcagggatttacggacaccgtttacaaaagtgcgtccgtgctgaaggacttcaaagaaacgatgagaattcacccctcttacacgcgccaaaggaatctcatcaaatggtccttttatttgaaaaattatttttggcagtgccaaatataaattcttttttgttgatgtgtcacggttttgcttcaaattgcaggctttccaaggaggacttggaccggggtagacgagcggaacgacgctgctccgccgcggcggcttctccacgcgtgtccatgctaaacaattccctggactcaaccggaaaatcattggacaccagcggaagcaattca

SEQ ID NO: 47413 - DNA, 1371 bp, Heterodera glycines
atgagcgtaataaagaaaattcacaaagacagtgttgaaggccttgagggtagcctttcactgttttctcttccgccaacgaaagtggcgataaataggaccaatgtccgcgaattgttgcccttgtcggcacttaatcagaccggcccgtatctgttccgtttgttctcggacagtcagtactgcgacttgagcaaaacatacatgtatttgctcagctctattgagcgcaaaaatgccgcaggtgaatgggttccgaccagtgatgcggagccggaggataagcgcgttggtgtaacccaaaactttggcagcagctttgtccgctcactgaaaattaacatttccggtatagaagtgttcgacagctccatttattaccattaccgggactacataatgaaggaactgggctactcccatgaaattcgtaagactttccatgaggcagcgtgctattataccgatgaggatgattgccaagatagtgccaccaatgagggcttcatcgcccgtgcagcgcgattctctaacggaaagcaatgcgaaacgatggtgaggctgaactttgatcttgcacatcagagtgcattgatgttgaacaaccaggacgtgatattcaccattcatcgtaacagtgattctttcctcctgcttacgccccccggaaagaaagcagacggaacattgcaggaaaacagcaaggaataccgtattcgcgtgcacgatttgcgtctgtatgttcgtaccgtagacgttacgcctagccttaacctggcaatcagccgtcagttggagtcaacctcagccaaatacccgctgcgtaagattgagatgcgctccatttttctgggcaaaggcaggactgagttggctcacaacgtgttcacttcaaccttgccccgtcgtctgatttgctgctttgtctctacagacgcttattctggcgatcgaaagttatcgcccttcaaatttgaacacgctaatgttcgagcgataagtgcggaggccaacggtcaatcttttcccagcaccccatacctgctgtcgtttgacggtgcacagcaacgttttgtgcgcgcttttgtcgacatgtacgccggtcttggtctggatgattcagacacaaaaacggtgtccattgggatgcaacgcttcctcagcggatgggccttcttcgtaatcccgatgacctccacgctggatgatacgcccggctttgagttgatccgtcagggcacgtgtacgcttaaggtccaatttgaaaagcctataaaagaggacggttacgaaatgttgatccttggcgagttcgattctgtcctttccatcaacgctgaccgagtgttgagcacggacggaagtgtttaa

SEQ ID NO: 47414 - DNA, 1561 bp, Heterodera glycines
atggcttccacttcggcagcagaattgtccaccccgaacactttcctcggcgtttctctcgcttctccgtttgactatgcggctgctcgagaatacaccgcttacacccaaggaccggtaagcaataaaatggggaataaaataaatattaaaataaaatatataaaaatttaaatctaaaataaatgcattaaattgcgaacaaatatatttgaacaaatttgttaaatgtataaatgcacaaaaaattgtcagaataaaagtaccaatgcccgagaataattttaaccatttttgtttttatttggctaattgctttccttccctttgcaggcgatttggatcaccacggcatatgtggtgacaatctttggcattcaatggtacatgaaggaccgcaaaccgatgcaactgacgctgagcctcagactgtggaacctttggttggccatgtttaggtgtgccagaattgccttttcaaatatttattattttttaataaatcaatttaaagcatttaaattaatttttgattaagttgcactaattgagacaaattattttattataatttcccttttctatccttagaaattagatttttttgagtaatttaattttattccattcattgaatttgattttttttaattaagaaattttaaaaggatttccaattttcacttttagcattgccggctgtctggtgaccagctacgcgctgctcagagagattggcacctacgggctggtcagctcgtacacgaactgtcgcgacttcttcgagggattcaccggcttgtggacctggtggttctgcatgtcgaaatttgccgagttgggcgacacttacttcatcgtcctgcgcaagaagcccctgatgttcctggtacgtcttgctatcacatgatataacgatcaacccactgatccgcacatgagtgtcgtttgtccccccgtttagcattggtaccaccacgtggccacgctcaactacggtctgatgtcctacgtggacaacaccgcgttcaacacatggattgtgtggctgaacttcagtgtgcacgccgtcatgtacacctattactttttggccgcctgccgcatccgtctgcccgcttggttcgcccagtgtttgaccacctctcagatcacccagtttctgatcactttggccatccttgcccacgtcggtgtgcgactgttggtcgggtcccacgtggacaccagtgagtttcctttttttggttcatcaaaaattggaacaaacgaaaaggattttaatttaataatccaaattccaaaaatttaaaatcaaacatcgaatttttcgttaaatttcttactataaaaacagtcgattagaaatgaaaaaaaaacacttaattttggcacaattaaagcaccgatgacctatgtgtactgcttgctgatggagatcagctacgtggttttgtttggcaactttttctaccattcgtacatcgccggagggggcaaaaaattccaaaaggaaaagcaaatgaaacagcagaacggagaagcagtgaagagcgaatga

SEQ ID NO: 47415 - DNA, 1600 bp, Heterodera glycines
aaaaaagcaacaaaaaaaaaatgtcgtttatacactgagaaaacatttttttgctatgcctaaaatttaccgaattgtaagaaaaatgccaaaacggggtaattttttttaaattagtcataaaaatttactggcataaagttggcactatgttttacttattgttagatagggcacttgcgaaatagaatattgctattataaaaacttgaaaattagcaaaaaaaaaaaattttttttgttcaattttcaggcaaaaaaattgttgaatattttttaggaaaaaaaattcgaggttttatttgtaaaatttaaaaaaatgtgtccaaattgccattgattgaccgttttttccaggcccctgaagtgattcgcatggacggccccgagccgtacagcacccggtccgacgtgtactccttcggcatatgcgtgtacgaactgctcacctccagattgccatacgaggaaatcaagaatcgggaccaggtgtgccaaaaaaacaaatattttttcgaaaatttcatttttttaatttttcagtgaattaattttcaggcctttgaattttccctttaaagaaattatttttttctttgaaattcgattcaaaaattgcatttatttgtttcataaaatgattttgcctttaataacaagttgcttaaataattttttaatattgtttttttttttgaatttttctcggaaaattctctctaaatttcaattgggaaatatattggattaattttatgactgaaattggcaatttcatgccacttcgtttatacaatggaatttgtacaagttaattttatataattttttttattattttccaattttctaacaaaaaaaaattcacttgaaatttcaaaaaaaaaaataattttttgtacgaaattccgttttgtacgaactgtgccattgattttggcgcccaaaatggtactttatcaaaaccataacaataaacacaacaacaacagatcctctggatggtcggcagtggacggctgaggccgagcatcgccgacttgcgcaccgacacgcccaaacagttgcgccacgtcttcgagcagtgcacgcgcttccaacgcgacgagcgacccgaatttcgaattgttcgaacatttatattttttaaatatataacataaaaattcttaggttttggcaattttttaaaaattttcttgggaggaatgaagaaagtgtgtaccttttttattgccatttttatagtaactggagggctcgatttttgggataaaatttctttgccgttgtccgaatttaataaattggcgtcattcgatagcactaagtgctttaatcttgtaaaattccgaaaatttttttttgttaagattcaaaaaattaagcccaaaaatgttgggcgtaaaagcaatttttttttgcgcattttttggcttaacttttttgaaagcaatgaaatttttcgaaaaattttgcgaacaaaaaaaatggagaattctttggaccattgtgaatgaaatcaaactggattcaatttgtaacaactatgaaagcagttttgactagagttgagcgggaccgggacctgaacacggac

SEQ ID NO: 47416 - DNA, 460 bp, Heterodera glycines
  unsure (1)..(460): unsure at all n locations
aattagtcatttttgacccctaatanggcttttgggtacaaatgcctcactnnggcgtcagtttcatctactccaccattnacgagaatttccgaaatgttcttcatgttaatgccaatattcaatccgcgcccgttgtctctgctttggccggtgagaacaatcaaatgccattccaaatttgttggtattcaggcggattttctagcattttcactcaaataatattcgtccctaccgacatcataagttatcttcctttttcattttgtaaatccgtcccattcactacggtttccctccgttttagtcagcatatgatgatctataataatcccgcaaaatttttgggctctgctaaaaatgttgccgttttggacttcgtgcgaacggatggaaagtcgggccgtttgacctttgggcttcgaattgtccgagcggtttatcacatcgatggttt

SEQ ID NO: 47417 - DNA, 687 bp, Heterodera glycines
tctgttgatttgccctccaaacttgtccaatgttttgattgtcgtcagggcgcaattcgcgccgttcgcttcaacggtaagcggaattggttactgtaattttcgtcgccaaatgtggctcattgcgtcaccacttttctcctcatttttttgttttgttttaaagcgttaatttcctttttaattgcagttgacggtaattactgtatgacagccggcagcgataagtccgtcaagtacgaattgtgaacagtattaaatctacggtattggtggatagtatccaaaaaaacaatggactggtattttggaaacgcattggcaaggcgttgctggcttatccatatgccatggcactttttcgtacaattggtccaaatgccatgacattttttcattcaattggtccaaatgcaatggcacttttttcatccaatcggtccaaatgcaatggcacttttttcattcaatcgctatttgtccccaaaaggctgtggaacccataccgtcgtgtccatttgaagacgtacagcgggctgggccaagaagtgctggacgtggccggttcgagtgacaattcgttgattttggccggcgggcgtgacaaacagccgaccgtgttcgatgtcgagtcgggcaaaatggtgaagcggtggcaaagccacgggggcgcagtcaacgcggtcg

SEQ ID NO: 47418 - DNA, 875 bp, Heterodera glycines
atggatttgtatctgttccatgccgaccggtatcaacaattgtacaactgcagctacgatgtgaaccaagtgccgttcgaggatcgtcaacacattgcacttggcacaatgttcatcacattggctggaattatggaggtggacgagtttttgatattattatttaatatattattaaggaaatcaaatatccttgaatatattttttaaaaggcaatgctgagaaaaattctggaattgttaaaaagatttccaaggaatttgtggaaaatttttcgattgaagtttggtttaattttaaagaaatcttttttatccgggggcataatgcgaaattgatgggattaaagtagagtttaaagaaaagttctaatttaataatgctaaagttgattttcaattaattcaaggacatttgttttgttggtaaaacccagtttaaggcgtacttaaaagcaaggacaaacctttctcaaccaaaacatacaataattgttgttgctcttatttggtcttaaatatttaaaattatttgcttttttgttggctaatctataactcattaattaataaaaattaattaattaattttaatgatactctagcactaattaattaatttattaaattaattgccctaattagctgctctacattccatgcacatttgccatttggaaacaccgtgaaaatggctgctacaaaatcatgttttacattgcgatcaccgacatgatggcaatgttgatgaacggcattgccaccggctggttggccattatcggcgccgtgttctgtactcatccgaatttgacttacattttgggtgcctatgggatgtgtaagagaagcaatttttaaatttacaatttaaa

SEQ ID NO: 47419 - DNA, 1464 bp, Heterodera glycines
atggaagaactcgtggcgctctcccctggaatccgcgtcggccgttggacgatcacaaagaagctgggcgccggagcattcggagccgtctacctgtgcgtgaacgaccaaggagagcaggccgcgctgaagacggagccggtcaacacgccacatccgctgctcgtcatggaggtaggcgggggaggaggggcgaaaggcaattcaatttaaaattttttttcaccacccaggctcacgtgatgaccaagctggacacccttcgagacggagacgggaagcacttctgccgctgcttggacctcgggcgcgatgagcaacaggaccaacaatcgggacaaatgaagaagttcaactacatcgtcatgtcactcgtcggtcgtggcctggacggagtcgtcaaggatgccggtggccgcctcagccttggaagcgcagtcggcgtctcgatccagatgctcgccgctctcagaggactccacaccgtcggctacctccaccgcgacatcaagccgggcaactcgaccatcggacgtccggaatcaaacgagatccgcctgctctacctgatcgacttcggaatggcgcgcaaatacaccagggacgacgtgagtttgagtgaagcgctttgaaaaaaacaaaaataatttgttccctttccccccttttcaggggagccaacaccgcccgcgcgttgccaccaacttccgcggaagcccccgttacgctgcgatcagcgctcatctcggacgcgaatacagccgcaaggacgacatcgaatcgtggttctactgcatgatcgagctcttcaaaggcgcacttccgtgggccagcgtggggggcatgaaagaggtgagcaaatgggagagggagggataatcagaattctgatttcatcgttttagatcggcgaggcaaaggtcaaacgccagaagaaacaaccggaagccgttcgacgccaggcaatcgccgacttgctctccggatgcccgaacgagttcggccaggtcctcaaatacatcgtgagttcgttcgttcgttttttccaaaattaataaactaacaaattaaattttgcaggacgacatgaagtacaccgacaagcccgactacgactggatcatcgcgacattgcgcagcagcctcagcaacgccggcgtccaggaattcccctacgactgggagacgggcaagcgcaacgcggcaccgggcgctggaggcggcggaggaggagggggaggagacagctacttcaactgatgagccgtgcagcagcagcagcagaagaatcgccaagaagcgtcaccgtgcagaattgatcatatgaccactattactgtattgtatgtattattttgtgtccatgctgccatccccgatatacacatgtattgtattgttgacatatgtattgattgaaattgttgttgcataactgtgtttgtacatatgacttttggcgaa

SEQ ID NO: 47420 - DNA, 1695 bp, Heterodera glycines
cgatttgtcccatacaaaagggcacacggcgcctatcaattcactttgttggcatcccttcgtcaaaagcgaatttttgagttgttcggacgacgggtcagtgaattatcgcgacaaattctttgtttttccgcttaattggtgccatttttcagttccttacgaatttgggacacaaacgattttaaagtgatcacaaaatgcataaacactcagcggaaattgataaagacgaaaaatgcgacggggaaacgggcgattccgacgacgtgttgctactcgtgggacgggaaaatgatagcggcgggttgtgacgacggatccatccaaatttggaacaatgcgaagatatttgtgcgtttttcctatgaatttgtccattaattattgccaacccaaaaaagggattcttttgtctgttcggtcggccctttgtccaccgtttgttcccttttcaggtaaacaccgccttcctgaaccgttcggcccattccgggcccgtcactcggttggaattttccccggatggtcaacgcatcgtttcccgctcccgtaactaacacattcctgtccctcattttcatatttttggtgctttagttgacgacacgctcaaactgtggagtttgaaggacttcaaaaagccgtttcgcatggccaacggattggacaccgttttccctcagtaaatttttccatttctcttttcccccgcgttttgcctttccaaggaccgactgcggttacagtccccacgccgagtttatttatacgacgacaaatgcgaaggacaaaggcggcggagagagaggcgctttgctctttttcgacgcggaatcattggaattactctataaaattgagtacccaaaacaggtccaatttggtgccttgcatttgccattgattggctcatttgttcgttttcgacgagtgtttttccagggatgcatccgtgccttttggcacccgaaaataaaccaaattttggtcggtctgagcgatgggacgagcaaaatttactacgacccgtccatcagtctgcgcggggccctccaatgcgtcagcaaaccgatgaaacggtcgcgcgagtcggagatggtccgcgaggaattggtcctctcccgtacggactcgcaaaataaatttggaagatttcgattgctttttctcttaagcattgactctcgaaatgttccaaccgcgcggcgaagacggcgaggaaaaggaagtgacggagtggcgcattcggaaattcttgcggatgcaaagcaaacagaagcggccccaatttcggcaacccgccgcaatgccaatgtccgggccaagtgcgtccttttccctcaacgaccaatggcttttgctgttgcaattgttggtttgaaggtgctggtggacgcattcggcaaaccggggggacgctgcactcgtacatagccaaggaaatggggatgagccggaacaaggagttcatgcagcacgaggacatccgctcttcgatcctccggcacgctgacgaggcaattttgggagggaaaatcgaagcgaaaagtccatcaaaaacaggcagagaaaaacccgcaattcgtggccatggcgtacaaacggacgcagccaaaccccgtgttccaagaaactgccgaggagaacgaagagggcgaggaggagcccgtgtacaaagtgccgaaattagga

SEQ ID NO: 47421 - DNA, 4731 bp, Heterodera glycines
ccgcttcaaaaaacaaagactttcttcccctttcaacaggtgttgtccgaaattgggccagccgtgctcatctccacgctgaccaacattttcgcggacggctgcggttggtacacgtcgtcgccggagcttggcgcactttgcctgggcaacatggtgtccatgttcgtcgcgttcatctaccaggtacggtaatcaaaaatgaaacggtagaaaaattacaaaaaaaaatatttaatttttttgaaaaattttttttttgataatttaattcaaatgcaaaaaaattttaaaatttttcattgaactgctcccagatgaccttttatgccggtttaatgtcgctggttggccgctacgaaattgccacggagcgacgggaacggcgcgagctgcaggagagcattcggcgtgccgtcgaaacgggcggtgccggcatggaactgggcaaatcgagcgtgaagcatggactgacggtacggtacagggccgaatgtactgtaccatgtttaccgtaccatgtttttgggcactattcaattgatcaaaattgcttatctttgatcaaagagtcttggcatttaaaatttctttttgtcaacagaggttggaattttagttgcgaaaacccaaaaataattaaaattttcttaaaagtggcggatctaagaaaaaaaacatttcattagatttcaatgctttaattctatatacccttaaacttttttaagaaaatccagctttttgaaaaatatatagaaaaaatggcgtgaaaattttttctaaaacaattttttttatttattattattattattccagtgaaaaaaattaaaatgaaattttttgattttgggtccatggagaaagtgaaaagtttaaggtttttgtttgagagttagtttttttttgttcatttccgatttgaccccttgaaaatttggtatattttcaaatttatagaaaattatacaaatttttttcaaaaaaaaaaacgcttaaaaattttcattagttaatttttgaattttgtcgtttttccagcgccagcacagcaaattccacgagcacactaagcattacatcagtgaatcaatccaaacatatgtgagcattgtggccaacaaattcggtactttttttacagtaaccgcattactgtaaattgtttatttattcattcattagttgcaatgctgatcgttgtactttactttgtctatttgggcatgtccatttgggtaagtgggggcggcaattaattgagtaattaattaattttggttgggtaattaattaactaaatgaacttaactgtgagattagctacgcgggagcagatttttaaaatctaaaaaagaatttaatttttcaaaagtttacttcttaaaaaataagaaaataaataaataaagaaaatcccaaaaatccaaaaatttctaactttttaaaaatcaaattaattatattaaaagaatttaaaattcaatttttagaggaaattttaaagaaatgcaattaaacattttgtgctttattgtcatagccaaaaaataaaattgctggttaattcacgagaactgagcccatgagtaaagacatataaccgattaaataggaaattctcaattttgaatatttcaacgctgaaaaaatgtaaaatttttgaaaaattttcgaaaaatcaaaaattttgttagaatttccatataaattcagggagtcactcaaatggaggtcaaactgtccatccaacaactgttcaccagcgattcgccacttcttaaggtgatcaggcccgaacaaatgttaaaatttaccaaatttttggcattttcaggttgacgaattgcgtgttggttaccaagtgccgcatttcatggtaattcatttagacaaatgccccaatttagtaaattaaaaatatttaacattttatagtgttgttttaattcaacatgcagcgatttaatgataattaaattaaaattattgaatgttatgagagagtttacttgcttgctaattaattatattattgtttaagtgctaattatgcaattagttcaattaaattataaatgccctatttagttaaatcaaataggtatttaacattctgataatgattaaacacgaagtgatttatgctaattaattgaaatttttgcttgatgaattatttgctaattaatatgattgctggtcaattgctaatgcagcaatttgtgcttttcacagtaattatttttattaattgttcccccttcccccgtgaagagttccaccgttttggtgttcaacccgggcaacctcagtgaccccgaacggttggccaaaatgaacaaatttgtggccgaaatggaagcgatcaatggctcgtggggcccaattgggaccaaatattttgtgcgcgactttatcgcctatgaattgcgggacgaaggtggtgaaaattgaaaaaatgggagaaatttttttggccatttgtcaggccaagcggtggatgccatctcagcgccaccaattcagtctccaactttgaaaatttctatgaattttccaacctatagagagctattgtcttgaaaattttgaaatttttgtgaattttggaagaaaaagtctaagttcagatggcactactcactctatgggcttaaaaataaatattaatatttttaaaatttaattaggtttatttttccgaaattaaaaaaaattgaccttttcagtaaaaaatccgatgcttataatttagtgggcccaatttggcattcattttggccatttcgaatgccgaaccctaattcgaacaaaaattccgaaattctacgaatttcggaattttgttccaatctatttttgatgctttattagtaatagtttgcaatattttgcttaatttatttatacttgatttaatcaattttttagaacataaatgcgaaattcggaatgtttgatcgaatccggattttagggtttggaattggtcgaacaaaaaaaaaataaactaaaataaatgcgctggatccaagaaagggtcaaatttcgatttttaattcgtgacggggggggggggaatgcagtttatcaggatggaattggacaaaatttcgtcgtcgaaattaaaaaaaatttaaaacttagaaattttcaaggaaaaaaacctttgataattttttaaagaaaattcaagaaaaaaaaatcttagaactttttttataacaaaatttcaggaagaaaaaatcgtagaaaacaagaaaaaccgtcgaatttttttataaaatttcaaacaaaattttgaacaaattttcatgttttgtgcaaaaattttggaaaaattagtaattcatcataaaatttcaaaatattcgaattttcaatttttcttttgactttttttttaaaatttatttaagattgttttcttgaaaaatttctaacttttaaattaaaaaaaatttggcggcaaaattttggggtacaaccatcagcaggagggtctctacatcattgatcaatgctaattttacttgatcatctatcttttcagatgatctggagtctgaactggctgcgctcgatgccggcgtggaaagcacaacctcagcagtcggtggcggcgagacggcaatggcactgaccacacaaacgccaaacggaccgtaccgcgaggaggacttgcgcgcgtttctgcgttggcccgagtccgaggagtggaaggcgtacatccgactggacaacgacacgtaagcttttctaataatgcttttcgagagttctgtataaagcaagtcttggattcgagtaatctcggaaattctcactcttaacggcattcgactgatcaagggatctaatcctgatcaatcgattctcgtttcttttcaaccaatctgggagaaagtaaaaatttatttacaaaaatttcatctatcccgagggccaaaaatcctaaatttttttgattgattaaattttgagaatgattcaaaaactttttgaatttttcagtaaaacaaagttgtgtttcgcgcttcgtattttcgtgtttttagggcgtttcgtttttttgtattttgcattttattttcgttttgcaacaaccctgctaatctgctaatcacgcttctttatattccttctgatttctgatcatttaatctaaccaaatcctttggtctagcatatctgagaatcttatctctgatccgatcacttcaattattgtttaattttgttatctgaaatgcttggacttagtctgatcgtctgctgattttataatgaccatgtcacctgaaagaaaattattcaatcatttaagcattcctatacgatactcagtctgatcctggatcatttaaaaactgatcagatcattttaaaactgatcagatcatttaaaaactgatcaatgtgctcattttttgcttcaggggacgccttgagcgcttcttcttcaccactggctaccatggtgatcagctcaaaatatggaccgaacgtggccacatgctgaaccaatggcgtgccattgtggacaaatatgccaagtgagggcccttaaaagtgatcggaaacactgatcatcgtgccaatggcattttggcagatcggaaaatttcaatgcatcagtttactatgacgactcaatcttcttggatctgatcgacaacatgccaaccgacacactgcaatcagtcattggcacattggtaagtg

SEQ ID NO: 47422 - DNA, 2307 bp, Heterodera glycines; identical to SEQ ID NO: 2796
  unsure (1)..(2307): unsure at all n locations

SEQ ID NO: 47423 - DNA, 739 bp, Heterodera glycines
atgactcacaccattctgctgattcagtcgagttccaaagtcgactcgcggacatggcaagactttatgattttgttaagctgctcaaattcactaatccttttgaggagtgattacgaaactctgaccgattttatggaggcggtatgcaaaatttacgaggaacatctgaagaagctgaaccccgacgtcccctgcatacagtgagcgaatcgtgacataaataaccgtaggaaaatggcattacttttggccaatttccaatcccaaacccgagcaaagtcgagaattcaaattttaaaattatgttcgaaccctgagttcagattcatgatcatctatttttacactagaaagtacaaaaagaaaaattttaaaatttattttccttgggacaccaattctccagtattaccttattttcatttcactaattgtttttttaggtacgacatatccgcactgttcaagttcatcgaccgattggctgatttgagctgcatggtgttggacaaaagtgtatatgtgccaaaggtaacaaaacaatgccaaattctgattatatactgcttttgtaacggaattttgaccaatattcagggcgaggatttcatcaaagagcagattttcattttgctccgtggccaagcggcgtcgaacgcggcgaagaagtgcccggctgaaggatcgctctgatttttgatcgcattccttttatttgtaattaactttcatacaa

SEQ ID NO: 47424 - DNA, 1526 bp, Heterodera glycines
atgagtttgctgtactttcgtgtttcacgtgacatcgactttctgaagatggtttacaaggatgtgattgatagtgatttgtccattcgaaactatttgaaaatctgtgaagatgtgcacaatgaaggcatcaagcagccgatttccatttatcttcaacgatcggtaaaaatgattaaaattaataattaaattcaaatttttaaaacatttaaattcgctttttaggattatatggtccatgtcagcgaaagtgatgatggtgagaaaaaatatgagcttaaacaggtaaaaaaaaaacccaatgtattaaaaaagctttaaaacgttaaaacatattagtttattatctaaaaatttactaaggtttttaaaaacgaaaaaattttttgaaaatttttgatttttaatgatattaaactactaattaatatctataaagtgagggaattgcatcaatttatttgggacctttttgcacttacttcccaatttgatttgctaatgttgagtgagcggattggatttattaaacccaatttttgccaattttggaaagtcaattacatttcataatcctttggatgttatacatacaaatcaaaaataaacttctttttaataaaaataacatttctttttaaatatagattccataaaagtggcatttttctgaatttatttattttcgtattttttaattttttttattagattgaagtgaatggcggctctattggtggtgcaaatggcatcccgccacgcatcaccaaaatccatgaacgaatgttggaaaaagcgggcttcccaaatttcccagaggatgtgctgccgagaagcaccaaggcagagagtgcatcagcgcaaatgcttttaactgcttggtatgagtgtgttcactgctaatgaaaaaaaactcatctccaaatagctatgggagaaagattggccaattagtggtggtctaattaggacataatttcattaatatgccagttagtggtggtttaattagcacaaaaattaattatgccaattaatggtagtttatgacgacaaaaggtcattaggacaattagtggtctttaattaggacaaaaattaattaaagccaattaatgatagttttcttagtggaacaattaattaaaatgctcgtcaaggaattagttaggcttagaaatttatgatttagactattaaattcacaaaataacgccaatttaatcaaattaccgtcagattaacaaatttattggaatgttttttcataaaataaaaaatattttttacttttaaactgaaaatttttcatctggcactgcctaaattattttaatttctttcattttaaaaattacaggaaaaagtttaaaaatccaaaagcaattattgtttcactcgttgtaaaagaaaaaagtaaatggcacttctgcaagcgttttgacgagtatgaaattgaccgaattactaacaagaaagtgaaagtctattacttgtcaatggaagaagctgttaaaatgtaa

SEQ ID NO: 47425 - DNA, 1067 bp, Heterodera glycines
tatttgatttattttcggctacattctatggctgctcgagagttgtaattccgagattcgggaaccgagatagggaattaaaatattaaaaaaatttccgtttaattattttttaaagttttttttttagtaaaaaatctaaaaaaatagatttttcaaatcatttcactttttaaaatgtttcttggaaaatttaaaacaattgtcaagttctgcttccttttttttgtccattccagcctccgtttatccaaatcctttgaatgaaatgccccgtggccatttctcacacgattcaccatcaaacaatgttgagtacttcgaaatggacgtggtatggggccctattttaattttttatttaataaattttttaaatttttatatccagaatacattgaaccgttgttttgatgacattgaacgctttgtggccagggttcagtcggtggcattggcacagagggaactcgaaatgcaaaaaaatgacggcaaacagcggaagagcaagaagggtgcattttataattatagttttattgctgtggccaattttatttgtttaaattttttgcggatttttttttattttttaaattttccatagttttctaaattatatttcaattttttcttttagctaaagaagcagcaaaagcggctcagaatggcattttgcatttgcgctcacaaatgccgacccaggacgaatttgtggacatttttcaaaaattcaaactctgcttcaaccttttggtgccgccctattttcttgcatttttaaaaagaatttttcttttttttttgtcaggcaaaactcaaaaatcacattcacgagccgtccagcccagagtgggattcatttccttaattattctctaattaaaaaaaattaccgcataaaacaaaatttttaatttggataggattaactgataagttgtcatccatcttctttagactcatccatttcctcttcacccctttgactgttctgttggacgcttgtcattgggggttgggccaacaggtaattaattaattaattaacttattattattaattg

SEQ ID NO: 47426 - DNA, 4056 bp, Heterodera glycines
atttgttttgttttcgttttttccaatttcaaattgcccaaatgacgagaagaaaagaagcggcacacaatacaatacaaaatagttaattatccattaattcgatcgggttacatttttgttttattttacgggattgtttcacttttcatttcttatttccaaacaatttttcttaatttgtaaattctttattatttatattaatttttcacttttaattattataattggctaaagcattgtgaatgaattgcttcgtatttgcctggggttttctatttgaaatttgccaatgcttttaattgctctcatttgaggtcattagataatcggttcaaaggttttaatggaagaaaattcaaaaaatgaaacccaaaagaaaagtggcggcacatttaaacaacagccgcaacaaaacatacaacagcaaaggcccaccgaggcaatgcttcgcgtgtcatttttggaacaggcggcgacactgttggccaacaacgaggaggacgaggggccaagcagttcaagcggaagaagttgtagcacaaccggcggacaaacggaggtgccaaacactgccggacatggcacgtcgaacttgctgagtcggctgttgttgcgggagttgcgcgagtgcgcattcgttgaccaattgcgaatgcacagggactttaaacgcagcaattgcaaaaggcacagtcaaaagcatcgcagtttaataactgtgctcttttccggggtcaatgaactgatcaaattgttcaaggcagtgaaaaccgagtgaaagaggacggctgatgttatttctgttcttttcaattgaaatttaaattgttttgcaagtgcaaattgtggttaaatttttaggatccgatattatttggcacctttttcaaatttaaaatttgtctaattctttaaataaaacctaccttttttcttagtattttagttttcgcatcgaccgatcattgggacaaaatttgcttttttcattaggcaaagaccaaatgccggtggtgaatgtgtactcgacttcggtgaccagcgacaacatttcgcgcaacgatcttttgtcatgggtcaacgactgtctccaagtgagaaacattgacatttgaaatgcgacggcaaattcgaattgagaggcctccgtttgccatttcagtccagcctgaccaaaatcgaagagatggccacgggcgcggcctattgccaactgacggactttctcttcccgacccaagtgccgctcaaaaaagtgaaatggaacagccgatcggacgtcgattgggtgcacaattggcgcgtgttgcagcaatcgtggaaaaccatcggaaatagttttagcgattttgaggatatataacatgcgtcggttcgacttcattccatgatttttagacttagctcgttaagagctttcgaatgacaccaaatttgttcaaaatttttaaaaaaatggattttgactgattttaagctaattttcgtgatttaaaccggttcaaaaaacggtttaattttccaaaatggatgtcatatcgatcttcagcgacctcgaaaacccctaaaaatgtattttctttgtaatttatcacaaaaccgaaaagtaccgacaatacgttttatatatttataggtttgcaattcaatttgtatacattttttgtttgtaatcttgactcaaacttgtaaattttttctggcaatttttagatttttttatcattgatggagcaagaaataagtgaaatttctcaacagaaaacggcgaagaagacagaaacagtggcacaaaatgcattggagctagcctctccgcgacacttcgaaatgcacactttccgtgatgcaatcgacgtcaattatcaacggatggtactgaaggattttcgaaaaaaaattgccattgatcggaaaataagcattttttgtgttcctcccttttcagtgtctgaacggcgaagaactgtccggagtgccgttggacgacttgcgttgcgcttgcgcagtgagtacatggagcgcatcgggtcgcacttccccaaaaccacgtgcaattttctcaacggtgaatctagaagctaattaaaaaaacattttgggaaaatttatttcgttttagggaaatatcctggcggattgcatgcggagaggcgaaagggcggcgcgcagccatgtaagtgcttggattaggatataatcttttgaagtaattatacttatgaaccaatcctgaagggaaggtcgccttgatttttttatccgtccctgactcgtaattggtcaattattgtatctatttgacttttttagttactctttcaacagccacaatgtcaccaccatcggcttcctcggaccattggggacagtgttccgcaccgcgacttttacaacattcgcaaggtggacggacacgcacatccacggtgagtgatggtcatttcaataaaaaataaattcaattaacaatttgagaccctcacaaaaatacaaaacttcaatttgactatttattgaattactttgcttattcttttctttttttctgctaaattcattaattttttcgcttttagccgcagcggcgatgactgaccagtgcgtttttggctttatttacttagtttcaattctctcttatttcctttcatcaaaaagaaaatgcgcaccgatgctgatgaagttgtgcaggagaaggtacacaaataaataaataaaattattttaaagaattgtgccaataaattttattataacggtcatcatggcccagctgttcgacaaacttgacgtcggcccgcacgacctgtccgtggataggctcgaagtcagagcggatgacacgtaaacggcaaaattttgttgtctattttacaatttcaattttcagattccaccgcttcgacttggcacggtgggccattggacacgatgtgagtgaataaatttcaaaaaatttgataagtgctaatttgtgattgatcgaaatgagatttctgatcaattggtcattcatttaatttgtttttcccaggtttggtccccaaatgcccgttggataatccaagtgccgcgtctcttcgacatttaccgtgccaatgtgagcaaataccgtagcacttctctgatcacattcacatttttccattttcagaaaattttgaaaacttttgacgactttctcgacaacctcttcactccgctgtttgaggtattttctccaaaaagtaaatttttaaaaaactggcattttcaggtcaccaatgaccccaacactcaccctgaacttcaccgattcctcaaagtgatcgaaatgcaaaaataccataaaacactcaaatttcagcatgtttccgggattgattcagtcgacgacgagtccaagccggaaaatgtggcatttacgaaggattcaccggagccggcggattacgacaacgaccaggtaaaaaggatcaaaataatcaattcgcgttcaaaataaatcatatttcagaatccgtcctactcctattacttgtactacatgtaagccaattattttgttgattttgtctccgatctttaatcattttttctctaccctccaaaggtatgccaatttgacggcactgaacgccttccgacggatgcgcggactgaacaccttcgcgctgagaccgcactgtggcgaggcgggcgctgtcagccacctgagcgtgtcgtaaggagtccttggggatttggtgtccccaaaaagtgaatcccactttcattttgcagctacttgacctcggaaagcattgcgcatggccttttgttgcgcaaagtgcccgtgctgcagtacctcttttatttggcacagattggaattgtcagtggccatttacttattgattgtctttctatgcctctctcaaatactatttcactcctttctttctctgtcctctctcctttctttcgctctctctctaccattaacgtcattatctcttctaattaaactccccgccctaggcaatgtcgccagtgtccaacgattgtttattcataaaaaataaaaaa

SEQ ID NO: 47427 - DNA, 1714 bp, Heterodera glycines
atatttgcttccgtattccctctttgttgtcctgtccattcattttccatgctgctcaacaatcggtctcaattgccgttgagtgtttacggcggtggcattggcagcggagtttcggcactttccgccggtgccaaagaccattccgccaccgcttcttccgcgtccgttcgtcggcccccggtcagccaatatcagagcacggagtgcgtgctgttcggcagcattttcaacgatcagaaagaccaactgatccaacggctgaagggtctgtgcgacccggacggaccgacgcccttttttgagcacaacatggtgttcaagctgagttcagtttaagccaattcggaatttgtatatgtggtttaggtggaccaaattttgaaaaagagaggggtccgttttggtatttaaaaaattgaaaattattttttgcagacctaattgttttttttcaaaaaattgggccacctaaaccgtacaactaaaaaatttaatttttgtccggttgaaatcatgcattacaatattgatgtctttctgttcgttttcatgtatttagtaaatatttcgacccaaaaattcggatttcacaaatttgagttttcgattttttttttttttttttacgaattttggtccgggtgatgaattcgctggaatgtatgacttttttttttagtcagcgatcctttaaagttccagcaaaatgtttaacaacccgtaattttgcacgcgtttattttcctaattataaatgattttccgatttgttgcccaattctcattgctctaaaacaatttcagagacgggcattgagtcgcctgtccaagtgcaaatgcgccgtcgtttcaaagtggacactgtgcattggcactgccgttacgtgtcccaacccgaggcacacattaaggcgggtgatgagccgggcggggtcgtccaaaacgttgccggaaaaagtgccaaataaaatttttacaaaaaaatggcaaaaaaaaacccatgggatattgaaaatgccgcccagaggcttcatgcattgtcgaaaaacgataaaattggcaaaaacagttagaattattcacttaaagagttcgtactttaaaatataagaatttatcccttgaaaaattttttttttacaaaattggcaatttttcttaacgcaaaaattgttaaatggaatttgtaaaaattttatccaaatttccaaattcattgaaaaattcttcgctatttcatcagtctgtaaaaggatttttgatttttccccccaaatttttacaaaaattgcctcaatttttttgacgaatgcaaaaattccgtttcccctcccgttccatgaccaacgcatgttaaaaattagccacttttttgtgtaaaatttttataatttgcatttaaacgcaatttttggttgcgatattgccttttcctccccctaaacgcatcgtttacccctcagaaaattttgcccattttcaaaaattgccgatttttgccccttttcaggacgtggtcgtgcgcaaggtcatcgactcgttgattcattccaccgacatgatgagctttgtcaaatcgttggggctgaggtgaggtcgaaatcgaacattttgtccccggcaaataaattgtgaattccgtccccctcatttcaggatggaatacgaatacattgccaacggtttcctgttcaccaagggtgacatccgc

SEQ ID NO: 47428 - DNA, 3911 bp, Heterodera glycines
gcctttctttggacattgttcgactgcgagttttttccaattttggccagccacgatgaacggcgattgtaagtcgaaattcgaagtgggagaggggggagggggacgaatggaagaatgaatggccatggcattaattggacttggactaccattatatggcaccaaaggtacgaggatttgttgcgcgactacaacaatttggagcgaccggtggagtaccacgcgaagccggtgattgtccatctgaaagtgtccctccaacaactgatcgatgtggacgagaagaaccaagtgagtgggtggtgggcatggcgagagagggacaaatcgatcgatcaataatcatacccattaatatcaaaatgattcatattgatttatcggtcattggatgacagacgaattaatcaatggcagaatgttagagccgtttagaaaatattattgatgatttgtgaccatttgaagttggctcctcccaattcagattgttcacatcagtgcttggcttgactacgtattttaatttgctcatttgcgcctctttcattgtgcctttttcagttatggaatgactataaattacggtgggattcgtcagagtacggtaacataaggtcggttgtcccattctccgcgggttctccaatctttcgcgttttttcttgtagcaatgtccgatttcccgttggcaaaatttggaggcccgatgttctgttgtacaattctgtggacgccagtttcgactcgactttccccacaaatatgatcgtgtacaatgatggaaatgtgtcttgggttcccccgggcatctttaaaatcagctgcaaaatcgacatcacttggttcgtttgtcggctggccatggacggtgtttccttccaattgggcctcactttctctctctctccctctatgtcccatttcagtctctctctcctactctttctctctcttccccgcactctcttttctcctcttaggttcccttttgatgagcagcgttgcttcttcaaattcggctcttggacatattcaggttcgtccgccgtccattctccaatccatccttggttaactttcctttttttgccaggcttttacgtcgatttgcaacctgcggaaggcggcttcgacaccagcgaatatttgccaaacggagaatgggctttgccaagtcaatttgattttgttaaaatgccatacttttccggaaattacagtgactacggtagccagaactgagaaattttacgattgttgtcctaacgagccttaccccgacttgactttctttttacacatgcgaaggtgaccaatgccaaagtcgaccatttaagcccattcgttgacatttcagacggactctttactacggctttaacttgataatgccgtgccttctcaccacgacaatgtcccttctcggcttcaccttaccacctgaagcgggggagaaaataacacttcgtaagtgcgaaaatgaatgggggaagaaggcgtcccatgacagccccacttctcgggaaatgcctccggctaaacccttggcgggtggccaaactgaggagtgatcaaagggaaagagtaattggcaaattatggctaaattggtgttggctactcaaaagaatgacagtatttaagagatcaccgtcctgttgtccatttgcttctttctctccattctttccgaaatgtctccgccgacttccgaggcggtgcccctcctcggccttttcttctcgagttgcatgctcatcgtcacagcatccaccgttttcactgtttatgtgctgaatttgcactatcggacgcccgaaacacacgaaatgggaacaaaggtgggagaaatgaattgggaacaaagaaaggtaaattttggaactggcacgggggagggaatggcactttgaaatgaaaattgggaaatgaacggacggccgatttctctgtttgtcaggcccgcgccctgctgctgtattggctcccgtgggtgcttcggatggaacggcccggggtggtgctttgctgggtaacttcggtcaaacgcatttcgctcctaatcgcctaattaaggaaacgcttccgtcgctttttccctgctcaaagcaaaccattttattgcctattaatgctgactgaaatcatttagggttttgcagtccaaaaagcatagcgaatcgctgatgcgaaatgtcaaagattgcgaaagcggcgctcggtcggttcaatttccgaatgattcgctcctttgtccctcattgaagcaaattaagcacatccatcgaaattgaccaccgagtacagcagctgctgttcggcaatggccgagcattgagcttccgacgaggcgcctccaaatcgatggctgccggagggactgagtcggcggcactgtccgactcggccgggccggcaaaaaaaaaaccccccccccgtcgtttccccccccaaaattttttttcaaacctagaaattttttcataaaaaaattcttagaaaatttcttagtaagaaaatttcaagaaaaaaattctttgaaaaatttttcagcgattttttttatgaaaaaatttctaggtttgaaaaaaatttaaaaaaaaaatttttcgggaggggaaacgacgggggggggggggaacgacctgctcccgggcgtgaaacatagtgcacctgctgctggaccgtttaacccaaaatgtgctgttttttatattaaatttatttttgttcgttattattgcctgaggcgccctctcggggcaataactaacatctgttaattggctaattaattttgcctgcctcctcctattaacgcgcgtcccccccccccccctcccccagggcacttcgccaaaaaatgttggtttaaaccatcacacacacccataattgcctcattagacaagtaagcaatttgtaatgataattcacattttcgtcacctcaatcaaccaattagtcggttcattgtcaacagcaggtggcatttcgccaaaaattgtttttcccccaatcgcacgcattctgtcccttctcgagggcattttgccaagaaaatctttttttaacaattttacaatcgcattgggcaattaattggtaaatattttcgctctgtttataagttcccctcgtaggtattatttcaccattaattaactgataatatgtttttttcctttattagcctacaaattcaaaaatttcatttaattgcaaaagaaattatgtatggctcaaaaacccccaaaattggacacgttttttaaaatcatttccccacaaattgaaaatatttaatttacttgagttagaagaacagtaattaatttagaaaagtgtcacattttgggggggggcaactttttggcatcaaattattcagtgcattttggcacggacacatcagtcccggggcaccaaaaaagttaaaaaaccccaccacagtttttcgacaaaaaatgaattctgtttgtataatagggttgccaaaaccggtggccatttcggcatcgtccaccactcacatcaacaacaacagttccagtaactgtaccaccactacggtaacggaactgcggcgacgactgaacaacggcagccgaagcggcgccggtggcaccggcgacgagcggagcaacaacaacagtcggaaaaacagtaacttcagcggcggcataaacatcaagcaggagcaactgttggtggacggcaccggcacaattcacagcagtagcagcagccatctccagcagcaggccatcagcagggttggtctgcaggatcgcaattttgaatggaaaagccgggatttgccggcttttggggttcggtgccgggtttttgaaaaacttgatggccttttgtggggtttggttcagcaaatcacaaaagggacc

SEQ ID NO: 47429 - DNA, 903 bp, Heterodera glycines
atgactacgacagcgcctattgcgacagaagagggtgaggacagtttgtaccctatcgctgtgcttattgatgagcttcgtaacgaagatgttcaggttcgttcttttgatatgaatgttcgctgtaaccattcaggaattgtaattgatcaattttaagcttcgtctcaactcaatccgtaaattgtcgacgattgctttggcattgggcgttgaacgaacgcgcaaagaattgattcaattccttacaggttattttaatactaataatccgattacctaattacataaaaatatattgcataaataaattttctacatttattacaaattcagacaccatttatgacgaggatgaagttctattggcattggccgaacaattggggaatttcactccgttggttggcggacctgagtatgtgcactgtttgctgccgccacttgaaaatttggcgaacattgaggagactgtcgtgcgtgacaaagcggtggaatcgttgcaaaaaatagcagaaaaacacagtgcagctcaactcgaggaatatttcattccgatggttctgcgattgtcagctggtcagtaatttgcattttgttcacatttgtcttaattagttcctccactgactgcgtttgtttctccgttcaggtgattggtttacttcgcgcacctccgcttgcggattgttcagcgtggcatacgctcgtgccaatcctgctcaaaaaactgaattacgtgccgcattccggtgcctctgtcgcgacgatacaccgatggttcgccgtgctgccgcatccaaattgggcgactttgccaaagtgcaggaggaggactatttgaaaaatgaaatcacccaaatgtttgaggacttggccaaggacgaacaagtgaagaattga

SEQ ID NO: 47430 - DNA, 786 bp, Heterodera glycines
gtcacattttatggcgttaaataattgttttactgagaatagatatccaaatgaatgcattctttcctatggctcgatcgctgtttcggatccggtatgttctggcatttactatgctcaatctcaccctccgactaagcgattgaggattttgcttggataacaatcccccggttcatttccggtttgactttttcattcggctttagctcgatgcgttcgtttgttgtcgtttttccatccatgaacaccaggagaacatctgcgcatttggcacagaatatggcagagtagtgatttgcgatgtgacagctccgattaagggcgaggattttatcaaacatcgtgagttacttctattagtctacgacggttgaaagaaattcatcaaaattcgaaaaatttggatgcttgtaaaaagttatgattaaagttcgtgtaaactacaatataatagataaacttttgctttttttcgcacaggatttgccactggaaaaaatgctgtgttcgacttatgtttcattcctgatcgccctaatttattactttctctttgtggtgcctcaaacctagagcttttggacatcgaacggtcgtcgtccatttttttgcttggtcatcgtgacacggtccgatgtgcttccgtgtggcctgaaaatccctgtattctttgtttgttttttcctgtccaacctcttcaaatttcagtttgcgttttgactggttcaagggacggtgacattttgctttgggatttgcgtgaaaaaccatgaaaagagaaat

SEQ ID NO: 47431 - DNA, 1577 bp, Heterodera glycines
agcacaacaatcgttggctctgtgttcgctcgcccggttatcgatgccggcttttgctggttgctttaaaatctataaaaaaattttcctaaaaaattttctggaggaccgagaaacgatgaggagagagagagagagagagaaaagagagagattccaatccgtttggttttgccttcaagtcccaacttccatccttcatttttcgggggatataactaactaaaaaacacgcggttcatcattcattcgttctttgcagctcgtctgtaccccaaacagaccaacaaggaacaacaacagcaggggggcggaccgtccaacggttttcatgacatcacatccattggaggcggtggtggtggtggctcggcattgttccacagtagcaatggcaccgctgctgctgggctcagttcgtcgtccggctcgtcgccaaccatcctgcagcaacaacaacatcgacagttttcttcggcaatttcgcagcaaaaatcgttgacaccgccgcctctgtcggtgggcagttcgaccttcaacccgacgcttgaacaactgttgcaggcaacgcagaacatgtgagtgatacaatttgaatttttcatttgaaattttgatgggagggaaggcaaaggtatagattattggtcccgaaaattaatacgtcaataaaagattatttaaaccattttgaagtaaaaatgtaaagtttgaaaaatttaaatttttgaactattattcgaatctgggtcaggggttcgaatttggtcgaaattgatgtcagaatcggatctccgaccctgaaaacccctaaacaactttgtttctagaaaaaaaataaaacttttcaaaaaaagggtgcggggtacattcgacagtattacgaaatgttcgaatccgggttcggggttcgagactgagacaaaataaggccggattcgtgctcggcgcctaagattacccctaaaaataattttcttaaattttattaaaaaaaaactttcgggaccaataatctataccaaacgatgctcaatttgaccagggctgtaaatttctggagcgagtgcaagcgttggcccattggtacatcgatgcggtcagtgttttcgctctttcattttcccattttccactcatccatttgttccctcttttcaggtctcttacactgacaatgatgaccatcgttatttcaattattttctgtttgccgtgcgtccatcttccgatggcgatggttcttccgtccatcggttcgccggttacgtcaatttgtaccgtttttaccaccatccggacaaggaacgagtgcgcatcgcacaaattctggttccaccaacttaccggcgcattgggttgggtccgcgactattgcgtgccgtttacaatgacttatgccgtgccgaacgcgtaactggtgagttaaaaatgaaggcacataatgtttaatattattcagctgaaagtccctcagacgcttttttgtttatgcgcgactacgtcgattgtgcaaactgtgcaaaactttccgattttgctccggaaaaattacgcaaagggttctcagatgaaat

SEQ ID NO: 47432 - DNA, 1060 bp, Heterodera glycines
atggcgaacatcattagtggtaccaattttcaaaaaaggcgaaaaaactgatccattaaattacaggccggtttcattaatcagcactgtctgtagagttcttgaacgaattttaagtagcaaaattttagaatttctgaacggtataagattttttgataaagaacaatttgggttttttaaaaataggtcgactacaacccaaatattaaaaacaatggacgatatatataattctctacaaaaggatcaacaaattgacattatctatattgattttgtcaaggcgtttgattctgtaccaattgatttattacttcaaaaaatcaaaaagattggaattgaaggaaaaatttataaatttttaactaactttttaaaaaatcggagttttaaggttaaaatttcagaatctgataatgtacgtgacttgggaattataattgactcaaaacttaatttttcagaacatattagcaaaattgtacgaaatgcatatcttagaactttccaaattttgagagtgttaaaaagcaaggaaataaagactctaacagcagcctataaaacttttgtacgacctcaattagaatatgctacagaagtttggaaccctaacttaaaaaaagatatagataaaattgaacgcgttcaaaagtttttcacgagaaaagcatttagaaaatgtggatttgtgtacaaaaaatatggggaaagactaacaatcactgatttacacaaattagaagaaagaagaaaaatcaatgatttaacaacagcttttaaaattataaaagggttcaccagcctcgatgctgggaaaagtttctttttctcggaaaggcccaggaggcctttacttttacgggtaaagcgccacacggccaaaactcaaaataattttttcaatagaatagtaaaaagctggaataaccttccagtggtagcggtgcaaattaataaggcaaaggaattcaggggtttactaaaagcaatgagttctgagtaggattttccatgttgccatatttacactatatttttatcacctgtgaataaa

SEQ ID NO: 47433 - DNA, 1805 bp, Heterodera glycines
ggccaaaagtgcgcttggctccgtcgactgtcctttctgttggcagtggggaattcgcgtcactccgttgctcggcttcttctgcataatcactttgctgctttttgtcaaagaaccggtcaattaattaattaattaaatggaaaacaattcaaagaaagcaattaaaatattaattaattaaatcgcaggtgaggggacaatccgaacaaagtgtggcacaactgatgccaacaaattacgaaacgtattgaaaaaggaaaatttaaaaaagagaaaaaaaatttaaaaacagcggaacgatcagtccaagttcaaggcgaacagtggcatcagcagaagcagaagcaccgaatgagaacatttggaaggagtattaccatcggatacgcactcacactaaaagttattgcgcagacattggacatttaattgcaaagtaattgaacagccaattaatttattaacagccaattaatttattaacagccaattaattcattaacagccaattaatttattaattaggccattttatgcaaaataatgggacagtcaattattattacataaattaattggactaacatttgcttccttcgtgctttagccgtacattcgtgtggtcaactttggcctacaccgccgtggtttttgtcaccggaactttgtcatggtaataatttcctaatttcttttttatttcttcttttatttttggtggggtcccaccgccatggaacacgccaaagcgatggacgaacatttgaacgacacctcaaaattgagacctgccgaaaagaatcaaattgcgctaatttttggtgcaaattattccccttcaattttacggcgtataattaactcttaatttgtcaggagtgatcacttgcgttgccggaatttttggcgtttcgttgggcagtttaattgcgcaggtggcacggattgaaaaagcagaaaaatgccaaattaaattcagcattggaagacgggcaaattttgttttgcgcaccaccgctcggaaagggccgatccgatcgtttccgcggtcggttcgttcgtcgccgctccgttgatgttcgtcgcgttctctttgatcaccactgatcagcttctgtcatgggtgccttttatgttccattcactcatctagcaaaaaaaaagtcaaagaaaaaaatttaaaggaacagtaaataattaagagggacaattacggtatcaaagaggggcaactactgtatcttatatttcgaacgcaattaattaattattcatatcattcacctaatgtttctgttcaatttccattcagttcgtcgttttcctcaccattttgtgtctctgtttgaattgggccattaacgtggacatgctaatgtaagtaactagtcagctaattagtcaattaagactaactagttattacacccagtttaaatgcttgctttcccttttttcaggagtataatcgtccccgaaaggcgtagcattgccagcgccattcagattctcttttcccatttgttcggcgatgcctccggcccctatttggtcggtgccatctccgacttcgtccgcggctcttccgatttgccaaccgatcgtttccattcactgatcgtcgctttttatctgcccaatgctttgctttttctcagcggcgcggcatttctcggcgccgcttattcacttcccgcggatttgaaacgaatggaagcggaaaaagctgcggcagagagtgagcggcgggagaggagtaaaaattaaaggggcgggggagagaggtaatgagagaaaggatg

SEQ ID NO: 47434 - DNA, 501 bp, Heterodera glycines
ttaaacggtagaagtaccaataaacgaactcttttctagtatttatgttaaacgtgttaaaatatttcaaatttttaggcccaatgaagttgaatgcgacaccgttgcgccgcatcgcacaggcttttgtcatagcgaccaaaacgaaattggacatttcgacggtgaatgttccggagcatttggacgacaaatactttaaacgacaaagtggaaaagtggcggacaaatcgaagggtggaatttttgcggagggagcgaacaaggttatttattcattgccgtaaattgaaatgacaaatctatgaaaccaatgttttccataaattcacccgatttaagcagtacgctgtgaccgaccagcgcaaggaggaccaaaaaactgttgacttgcaggttatggaagtggtccgcaaacatcccgagaagaaattgctgttcgcctacctgggttcacgttttcacctcgccaagggaatgtatcctcacaaaattactttc

SEQ ID NO: 47435 - DNA, 1146 bp, Heterodera glycines
atggatccggcattactacgacaacgacaagagtttatgaaacaggccatcaagtcgatgggtgttgctcagcaaattaaaaatgacagaaatgaacaacagattccgacttcctccgctgcaagcagtgccatgccgaagaaaaagaagaaaaagcctgttcagacggcagctgctggccaatttggcacagaatttgccgccaatgcgaccactgctgaggacagtgcacagaatgcgacaaattttaggtgacttttttcttcatcaatcgtcagttaagtcgaatattatttcagcataatggcgaaaatcgttgactatatgaagaaaaggcacctaaactcgcagccgtgggcactttcgctgaaagaaatattggaggagatgcaggtgaatcgaagcaattaagaattgacaaaaaaagcatttccctatttgattaggtttacgatgtcaaccgaaagtcaatgctttggctccaagaggcactcccgcggaatccgcggctgcaatccgaggcggacgacaccaaatttgtctacaaaccgttgtacaaagtgaagaaccgagtcactcttttggcacttttgaagaagtttcacacggaaggaaagggcggaattttgttgtcagatctcaacgattgtgtgaacagcgcggaattgttggtaaaagcgttgggcaaccaagtgattgccatcccaactcaggttggaccggcagatcctttctccaaatttgctggtccttcaaaaccgttattttagataaacaaacggaaggacatcgtttatttttacaatgatacggaaactgatcgcgaaattgacgacgaatttgtgcaattgtggcgaacggctggcgttgagcatttggacgagaacaaaattgaggaatatttgcagaaacatgggcttgagacggccagggatttggcgccgcggaaaccgaacgcaaatttgggaccgaagcggaaacagccgaggcaaagagtgccgcaacggttgcacaacgtccatttggagggagttttggaggactacaaaacggatgactgaatggacaatacaatgaaagtccgtttgttaaattgtgataattaaaattgtggatcgaattaaaagaaatcgtcatttatgtcca

SEQ ID NO: 47436 - DNA, 1026 bp, Heterodera glycines
atgaacgatttttcgccgctcaattgggatgaatttttcgaccgtaaagaatgtgtcaaaacaggcgatgacaagttcaacgtgtatgtgaagggttcaaatggtccgctgttctttctgttacacggtggtggctacacgggcctcacttgggctgtgctttcggttggttgggtttttattagatttgagctggaccgagagtccaagaaaaaataatttaattatttctcgagagaaataacaaaataaagttagttttttgggaaggaggtgacggtaccgaaaagcgccgctggaaatttttagaagttccgatcccgctcaattctatttttttatctcatcgaattgtttaacatttatggcacctgttaatttaaaaaaaagcataaatggccaaaacatatgttatcttaagaatgtagcagtgcaaaattggtacccacttctagtagtgatccataaatgaaaagaaaatgtattttaccgtgtcacaatgtccccaattttaggaacaactttcttccgtcatcgaatgtcgcattttggcaccggatttgagaaaccatggcgaaacggaggtgaaagatggggacgacatggcagcggagagtcaagtcaagtaaaaaaacgctttctttccgtttgcctctcgtgcctttgactgtccgttcttttcttttatagtgacctttgcaatatctatcagcatttttatggacatgacagtagtaagtatccgccgaccattctcatcgggcacaggcaagtgaagcgggagggggcgagggattcgactatggccgtactcaaaatgccacaaaatgaatttaaccccgctctgtttagcatgggtggggccatcgcaattcgagcagctgccagcggaagattgcccaacgttttggtagtcagtgccatcgatgtcgtggagggttcggcaatgagttcgctgtgcttcatgcagcagttcttgcggagtcggccccaacactttccgtccatcgaacgttcggttgaatg

SEQ ID NO: 47437 - DNA, 1096 bp, Heterodera glycines
gccgtcgaattgcctccggtcgatgccaatccctcgtggaccggtgccacgatcatttgccaagtgagcaaggcactttccatttctcgcccaattagcatttcaggccgcggtcaatggggggacaaaagactctccgccgtcggttgtcgacgtgcaatatttgaggggagtgcacgtggtcgactccaacgggcagggccccgtccacattcccaaccagggcttccgattttatgtggaatgcgtgcgcgggacggacggacagtgtcagcaaagtgcggcccgacggaagacgctccactgcgcggtgcaggcgaaccccgcggcgaactctttccgctggctgaagaacggcggaccgatcagcggcggaaatgggcccgagtttatgatcggcacggacatgatcggacactcgctgcaggtcgaatatcgcaaatgccattccaaaattgccgctttctttgtcagtgtgccgccaataatggcctttacggtgaagagctccaatcgcccgccgtttacatcgattcgtacaccgccgcccggctaattcaggacaattttcaggcaatttgaggacaagcgttccaaagtgatgaattttttccagcaagtgcagagcagcgcgcccttccaacagggaaaccgcgtcgaaatgggccagcgagttcagatgagttgcgtcgtcgaaggtcggtccctacaccgctgatcactggtcccaaagctcgattgcccccccccccctccctcaggcaatcctcgtccggcggtgttttggaagttgcgaaggagcaatggccaagtggtcgacgcgccttgtccccaggcactattctcccctgcctttctctctctctgtactgttccaatttccagggtctgaacggtcagtaccgggaagtgcctccgacccaattgccgacgggcgcagccgccgtcgcaaattcattggcggcacaacagtctaattcgttgatccgtctgcaagccatttgcgacctgcaagtggccaactattccttctccggacagtattggtgttctgcctgttcctacgtgtcccagggactgcctgagtgttctccgg

SEQ ID NO: 47438 - DNA, 3437 bp, Heterodera glycines
ttctggtgaaattatgtcccggcgaaattcgattgcgaggggtgcaccctaattaaacgtacatctccaggccgagcgggcgcaacgcttgaagattccaactgcctaatctgtttacgcaattccaatcggtaaggcgtcatagtcatgtcggccccttcgatgtatcggtcgatctcttgcaaatccgtttttgacaacagctaaaagaattatcaattgggaatcagtttctgcaaattaccatctgatctctgataatggcaaatggtctgaagtattgccaaacccgctccaatttgtctttgtcaacacgttttacggcctaaaaagaaagttaaatgaatacggagaagaatgaaacaccggatgattttgaatataatcactttgctgctcgaaaaacgactggtcgtgaggacttttgtttgagaggagctccattcgtgcacgaagaatctaaaaagacaatgaaaatgtagtaaaataaggcaaggccacaaaataacaccaattgtaaagcaatgccttaacgaattcaaaccaattttaaaagcattaataagaattaatttttggctatgaaccaaaaacctgattttgcaatatcagtgaaaaaggaagaaaatggtaaatgaaaggaaacacctcaatcgcctctctgaacatcactttattgttcttcatcttttccaaaggaagttcaaaaaatccgtattcgtgttcactgaaattctgctgaccatattgctcctttctgataccttgtctaaaaatttaatgcttacaattaggaaaggtttatacatttgttggattttaccagttcataatatttaacatttttgaattttgtatattctaacaataagggaatatgtgtccggtggcgtagcaagaaaaagtttatgtaaattattaattttaacaaaaattccaattaaagattggattgaatcaaattaagtacaattcgaaaaaaggttgaaaactggcttaactcttagttgtcattaatatgcacccaattttatgcttacctatttgctgttatcggaggatcggaagaattaatagtgattttgttaattctgtcaataaacgaattttcttttgagtttagcacctaaagcatgaatttagatcagtagataaaaaacattctgttaaacttctttgattttgttgtccttgtcaatgtctcgctgaagcttcgctgtcgttgtgtgtttgggagccaatgcctttattttccctttttctattgcgtcaattcgtttgagtgcacttttttgatttaatttgatgacagtttctgaccttaatattgggcttagcatcctttggagaaaatttttgatcattttaaatgagaatatctctaaattataaataattatcataattccgaatcattgaagtttagtttttagaatttttttacggcttttttgaactgaaaatttaaaaataattaatcttttctttttttggcgctttgttcctttataaaaagctaacctcacttccaatttctatgtacgtctacagaaattgattcaaaagtcctcaaagattaccaattgcccttgttgtttcataaaatataaccaaattcgattttccggaacctccgttttgtcttgattaaaaaaacatttgtttgttaactaaaacacatgattcttcgttttaaatattcaagatatgagtcgtcaacagagggacagcagtagttcaaggtctagtgactcatggtcaaggaaatcaagatcgagatccagagcaagctcaccttctcgttctagcagttctccgcacgaccgtgattggaggtttagaagcaggagtggagaaaggaataaacggcgatgcagacacagccgacagtcaccacctcctagaaaaagggaacgaagccgaactccggtaaattaagaacaaaaatgcattaaccttaaaaattccaaccaaatagttctcacgccgacgttctcctaacgaaactaagccttcaaataaagttatcttgacctcgttgccaaattatgctgacaaagatgcggtttgaatctttctaattgtttttttaattctaaaatattaagttgaacattttgctggcaaagcagggatttcatcccatcgatattagagttgttaggcgtaacaccgacagcggctccgttcgaatttttggttttgttgaattttcggatgttgaaacagcggaggattggatacgtcataaccaagttacaaatggtcacaaaaaaaaattcatttcatgttaagggctttctcaaaatggacgatggttttcaagtacgcttggagtattcacgtgaagagttgaaccgagaaaggccgatttataatcccctaacatcggattggacatgttccaagtgcactatcaacaacttcaaccggcgcacaaattgttttaaatgcggtacatctagaaaggactcagaagcgcttgatgcgagaggatatgggatggtcggagtatcgccttgtgacagtaaataatttcggttcgggttattactagatttgcattccatgtttagcgctgcttatccgcgagctcccctcttcggttaccgaggaaagcattcgcacttcgctatctcagttttcggggctgacaattcaacgcattcaattggcttcctctcgtctctacgcttttgttcaaatgaaatctgctgagcaagcaagttatttgttacaaactttcaacaaagttgtaccgtacgttgacaattgtgcaggtgtttcttcattaatgattttgtaatttcactttttgttaagtaataattacttattcgcgtcagtctctcaatcaaattttgatcatggagaatgtcaatttgcttaaaacacaaagcggaattagcagcgcaaacattcaagaaggtgaagattcgctttgctcccgttttttgcatttctaaaaattagacccaacaaattctgcggctcaattggctcagaatgctattcgattggcacaaatgggaaaggccgtgccgggtgctgtccctccaattgctcatatggaagggccagctcgacagagcatttctacgccttttggctatttgcctacctatagtgggtgaaattttcttcgtcatcagttaaatattttatttatagcaacgcctgataccaatctgttccaatatgaaccttcttctggatatttatgggatgttaacacgtaacacattctgagggttgttcattaatgacttttctttttagaggattttattacgaccaaaaaacaggatattattatagttccaacacctccaatgtttgtgttacttttcgttcgcttttaaaaactcagtgaattaaaattagtggatgttttggtcgtcgaaattcagcacatatatcactgcgaaggaggtgat

SEQ ID NO: 47439 - DNA, 1302 bp, Heterodera glycines
atgtatttgaattttggcgatatcggacaaaacatcaaaggactgatgaatgaatatcaacggaaggctaaaacacaccaacagttggaatcaattgcggatatgaaaaagtttgtggaacagtaccctcaattcaagaagatatcgggtaagcaaacctgaccgactggttctctatggagagtgctccaaaacttcaggaacggtagctaaacacgttcagttggtgggtgaacttagccgaatggtcaccgatggaaatttgttggaaatatcggagttagagcaaaacattgcggtcgcaaatggggattattcggcttgtctggattcccttcgaagacttatccagcatcccaaaacaactgatttggtgcaatatttttaagttttaaatagtggattttgtcacagaatgccctccgattagcgatgcttttttctctccgtttcgaagggaacagcggcgctttgagcttcgttcatgagctgttgagaaagcgagggatggccaacaaacagctgcaattgatctcaacactgctcgaattcgcgggacagcgaagacggcaaaacgatttattcggggatagatccgcaatggaaatgaccaaacgattcataaaaggtcgaggacttattctattattatctgaaaagttgttggtgcttttaaaatacccttaaggttgatttatagtatcgtcgtctccctcatcttttttttaaatagcttttagtcgcacgtcctttagccgtttacaaaatttaggactgaaaggcgttgaaaatatctacacacagcacgagcctttcattctccaactcattgatttggcgtcgcgtggcaaactcccagaaagtgtttatccgtctacggatttggcaaatctgaagtgagttatatttgtccccttatttcctcctcttccttcagctcccgctttgaaaatgttattttgtttgtcattggtgggacaactttcgaagagagtgctgcggtggcaaatttaaacgccaagcggtcgaactcgccctcctcccaaccttcgctttaccaggggtcgttaccccctcgtgttatactttgttccacttttgttcacaacacgaaaagttttgtttcacaacttgcccattattcattcgcaacaacaaatccaattggaagcactttcagcacgggcgacttttctgcgatactttaatcttttgggtgtatgaaatcgctgttttgtttgaactgctatgatcgctaccgatctcattgtaagaatcgaaactttcatttattataataaa

SEQ ID NO: 47440 - DNA, 2133 bp, Heterodera glycines
cccccgccacaaagccaggaagagcaagagctgcagcaagaccccgagaagaagaatgacgcgctttcggcagctttggccgctgctgcgatggtagcccaaaaattgggaaaaggtggactcatttctggcgctggtgctgccgtggtttcttctatagatttgcttaaccgagttccacaagcgactcaaaaggcaacgccattagcagaaacagttctggccaaagaaatcggtgaatttgtatattttggttattttaccacggttgataaacatgaaacagttaaaagagaaccatcggagcaaaatgatcaattaaccgaagaacaacggcagcgcgaactgcgccgtaagtctcgttggagcacaactaaatcttttgtgcccggaatgccgacaattttgccttcggatattgatgagaatcagcgtcaagtttatttgcgtaagcactacataaaaaaacttaattcaccttcctattacctaattgaccttttacgtatttttacttctaatttagtgcaaatggaaatcgaggaaaccactcgtagattgcgtcaaagcgattttggacaaaacgttgacccggctgaaaggtcgattactcaaaaatatgttgctttaataataattgtatgtaaaaaggcaaacggtttttgtcataaacagcttaaaacgttttagaatcaattcttaatggaaaggaattgctttttcagaatcggtactcgtgggtcgatgctacacctttaatataatcctcttgtttagctgtgccaatttgtcatcaaaaattaatttaaaaattcactatacgttttagcatttagtgcggtagcggggtgatgtggtggattcagacatcctccaacaattttaatgtaaattttgaaaccattgggccattaacattgagtcaaaataaggctaggcaaattcgaaatcgcaatcagtcaaatagatttctgaagtaagaattggacttttaggagtccttctccggaacccgtttatgacgcgaccgggaagcgactgaacacgcgcgaagtcagaaaacggcaggagattgagcaaagacgacatgagaagatccaagcattattgcgtctgaatccaaattacaaaccaccggctgattaccggtaaagcaacttttatatgtttatttttccaaaatatctttaattagtccgccaaatattaaattgcacgacaaagtttggattccccaagaggaacaccccgaaataaacttcgtcggtcttttgatcggtcctcgcggcaacactcttaaggccttagaagccgaggttttttttgttgttgttgttgttgttgttaaatacattgattctttcttcttaagacaggagcaaaaataatcattcgtggcaaagggtccataaaggagggaaagctcgccaacagaacgggtcctttgcctggcgaaaatgagccgctccatgcttatgtgacatcgactgacagagaggcgattaaacggggatgtgacaaggtgggcgaattggaatttttggatattttctttttaagatacgtgagataataaatgccgctttgatgattccggacgggcaaaatgaattgagaaagttacaactgcgtgagttggcactgctcaacggaacacttcgtccggaggacgttctcagtggggcacgttgtaccaattgcggctctgaccagcataagacgtgggaatgcatggaagcgccgaatgtgactgctaacgttatttgtacggcgtgtggcggggccgggcacattgccagggactgcaaaaatccgaggcccggcttcgatggggcggtgatggatgctgaggtatgtcagctttttctgtagttttcttaatttagccttacctataccgatttcagtattctgctttgatggctgaacttggcgaaaaacctcccatttctttggaagccggcactgcaccaccgttagtcggtgggaagccgatccccgggttccccggcagtggattacgcccgcgtttcgcgctgcccgcgcccactcctattgtgcgcgttaatttggcgaagcaacaaaatacgcctcaacaacagtccgtctcgggtggcggttaccccgggtggg

SEQ ID NO: 47441 - DNA, 1297 bp, Heterodera glycines
cttggctccctggtgttcacattaccgcatttttttgccgaaccgtacacaacttcgtaccaaattgaaaatgctggactttcccgttgcatgaaaggtttgttttgggttttttttcttaccaaacttattttttattttaaggtgcgcaatcactgcggtgcgcggggccacggcaaatcacggccattggttttgacttgggcgcggtcggctgcaatttggccatcatcatttttgtgccgaatttcatgtgcggaaaatgtttgcacactgttgtgtttgggttgagcggctttgacgccaacgggtaccaagtaagttgttttattctcttttttaagaattcaaagtttgaaattttttaaagttttggcagcaaaattttgggtacatccgttttccgtctgtccaaatcagtaattgtttttttaaattcttacttttccaggtccatctctttcatatgcccaaattttgcggcttcctcaaaagtgcgctgcccgaacggaccaacgaaattgtgtggctgcagcacatgaaattcatcgtattcgacgacactgttctcataaggttctttttcccccattttttccccgattttaatgggtccgtatgtcataaatattgtccgaccgaccaaacccttttaaatttaaatagttaaaggttaaaaaaatttaagggtaagaaaaagaagaaagatttgacataatcattgattttgaaatttctggcaaaattctgactggaaattcgggaatagttcctccggtttcctaatattttgtttttggtttaaaaaaacgaatatagtaaatcttcctgatccattagactttcgaatatttgtttttttttatttcatttttttaaaatgttgccaccggttttttttctaaaatctctcacaattttccagtgccaatttgtccgaccaaaactttgtcaaccatcaagaatcgctatttgctgatcgagactgtccactgttgaccgacttcttcgtcgacctgttccgcctcgttgataatccttccggcggatgaacgcgtcgcgtcggaacagttttttggaaaaaactcagactcttggtaatttttttttaattttctattcaaaattggataacttttaaaggaattattccgccaaaaaaccaccgggctgtcgtccatttgtccctccccaccaaaaaactgggaatgtgttggcaccgaattttttttataaagctgtaaattatgcttaattggtataccatgggagcaaaaaaaaattttcaaaacgttta

SEQ ID NO: 47442 - DNA, 1004 bp, Heterodera glycines
atgcgatttggcacagccgcgaatgtgcgccgatgggtcattttattgtcatttgtgtcaggtggattatgattatgtttttcacatgaatcccttaaatttttttgtctttcagaatgaaaaagtggggtctttgaagaaaatgccatttgcctatctgccgttggttggcttggaattcgatggcattcaattcgatgttttattcgtttccattccgaccagtgattctcttccgaagaatgggccgttgagccgaaaagaagtgatggcattgatcagaaaattggcagggcaaaaggaagcggacgaaaaaatgatcaaatcattggcaggtaaagtgtttttatactttaccattttgtctttgtttttcatttccctgagaatttttttaagaataagcattggtgaataaatcttcaataaaaataacatggaaataatccattaattaattgatgataagacatatcaaaaaatttgttcattctgttttaattattcggctttaagcattcatttcaaatgagaaaataatggcgttattgggaagaaaaaacatgcaaaaattcagaaaatttcttacaattttaaagttttggtcaaaaggtaggtatattttttgaagattaaaccgattttaaataacacatttagctaattttatttatgaaccaaaactcggattttttaacggaatttcgttggcaacaatggccaccaaagtgatgttgctttatccgaatgcttcgattccctttttgttggacaaattctttcttactttcgcattatggtatctcaataatcgcttaaatgtactaattacctgccccccaagggattggccaattcctttacgtttggaagagtatgtgccggacgaactccaaaccttttcatggactccaaaagatgaggagcaaaaaaggaattcaccgctgttgatgccaatcataacgccaggcaaaggggacaaataaatttggataattaataaa

SEQ ID NO: 47443 - DNA, 698 bp, Heterodera glycines
tgctcaatttgactttgatcgatttgcccggactgaccaaagttccggtgggcgatcagccgcccgacattgagcagcaaatccgtgacatgatcggcacgtacatttcccgcgaaacttgcctcgttttggccgttacaccggccaacagcgacttggccacttcggacgcgcttaaattggcccgggaagtggaccctcagggcctccgcaccatcggagtactgaccaagttggacttgatggacgaaggcactgacgcgcgggacatcctcgagaacaaagtgttcccactcagacggggtattctttgggcattttggatgccattttcctccttttccgagtgtttttcccttccaatgccttcgcttccccttttctgcttaggttatgtcggcgtgatcaatcgttctcagaaggacatcgtcggccgcaaggacatccgccaggcgctggacgccgagcggaaattttttctgtcacaccaacaataccggcacatggcggacagattgggcacgccgtacctgcaaaaggcactgaaccaacagctgaccaatcacatcaaagacacactgcccacgctgagggacaacctgcagaagaagctgtactccatggagaaggaggtggccgagtacaaaaacttccaattcaacgacccgtcgcgcaaaactaaggcactgatgcagtga

SEQ ID NO: 47444 - DNA, 2306 bp, Heterodera glycines
atgagtttggagaattttggcaatggtttcatgcgacggttgggatggaagcaaggttaattaggttattatagtaatgcctatgataatcaaagaatgctttctcaggggatgaggacgagggatggtccaaaaaggcggttgacagtttgctgaaaaagttgcaaaagcagcacaacaaagagggtttaactctgttggaaaatgctttgcgtacggagggcaaagagccgagcgaatgcgtcaccattccgcgctcattggacgggcgtctgcaaatttcacatcgaaaagcacttccgcacgtcatttactgccgcgtctaccgatggcccgatttgcaatcgcatcacgaagtgatcagacaaataatgcccgatcagaaggcacaaacttttgctttagcttaaagcgtcccaatgctgccgtttttgtttcgaatccggtcaaaaagtgcgcgtttcctcactttctgtcaattttcatttatttttcttgaggatgtgtgcatcaatccttatcattacgaacgcgtggacagctccaacttgttgccgcctgttcttgtgccccgcttcagcgattcgccaccgaaacgtcagccgggcggcgaacatcgcgttcttctcggccacgaccctattccgtttgtgccatgccagcactgggccaccattagctattacgaattgagcacccgggttggtgaacaggtatattctatttttttgtcaaaaagaaaaataatccacgaaagggaaaaatccacttacttcatggacatattcaaattaaatatagtccataagcaaatggataatatcacttaattcccttgggactgttttggtgtcaccgcatttctttccactcaaaattatgttccttaaaattttatcattgaaaggcaagagtcagtgcaattgaatgtgtggttggtttataatgctttttccaaaattcttttgactttcggtcgatgggttcacagatccgagcagcggagaagccaacgaccagcacaaaatttcactcggtttattttcaaatgtgaatttactcttttagggtaaattcatttggacattaaattttaggttaatagaaattcgacggtggaaaacacgcggaggcaaattggcagaggcgtgaaactcacttatgttccttaccaaggcaataaaattggacggggggggggagaacagaaattgttgattttgaatcccaaaggaacactctatgccgaatgtttgagtgactgccccattttcattcagtcgaggaacagcaattggtttgactttctcatcattaatcgagttccgactcataatcaatcccaccacaggaccaacgacttccatccgaccaccgtttgtgagagtgcaaattcattccatttaaaaacaaaaagtgtaggcaaactctctcatggatattcgttgaaaatattcgacacagcaaaatttggagaggttggaaagtgattttacattttccctatattttattatatttttcatttgttagttgctcaatcattgcgtaaatttgggttacaacagcagttttgagctgaccaaaatgacaaccatacgaatggcttttgtgaagggttgggggaaggactaccaacgacaagagtattggaaggggaaatcattctttaatattttaattttataaaaagcataacttcaacgccatgttggatagaagtgcatttacacgccccacttatcgtaataattgaaacaaaagtactttaaacctaaatttgtttagtggttggacaaggcactccaaaacttggcgaaaattggtccgccttcggacataattcattcaaattcatagatgacaaaaaccaaaacagatggattggagatattttgacttttcttattgtctatacagtatatttttagaattttattagtaaatataattttaaaatcataaataaatactgtgttaaaaactcagaatgtgtccggtttctttgcaagataaaacattttatctggacaatataataataaataaaggaaagaaattaagcttttttatcactatttttcagggcatcgcttacgaatgtttttctttgctttgtttagaggggacattgctacttcgtctccgaaaggtgttaccgcattctgtagttcaattgtggtgccaaatttggacgaatcgactgtgatgaacgagttgaacccttccatcgaggaaacggccaacacacggccgtcgggtgtccaagccattgaagtcaacttgtcgtactggagattttcaat

SEQ ID NO: 47445 - DNA, 660 bp, Heterodera glycines
tgagtttggctccgttgaattagaaatgccaattccccccccacttgagtcagttgcaatacaccgagcggaacaacaccgctcacttttacggggccaacaaatacccgcaggcgctggagaagaagatcactctgctcaagttcttccggtcgtacatgaacgagcatctgatgaaggcgggcgccaacattaagatgcgggacggcgacgagttggcgcggctgccctgcctgaacacgtggttccggacaaagtcggcgattgtcttgcatctgagcaacggcactctgcagatcaacttcttccaggtccgcattgaataaacacatgaatggcctaatattggtgatttctgcacatttattatgggattttgtcttttcaggatcactccaaattgattgtgtgtccgctgatgagtgccgccacatacatagaccagcagaagaatgtcttcacctgcaaattccaatatttggagaaatacggatgccctaaagatttgtgtcagagactcaaatacactaaggtaattaattcgcttgatgaaaactattgaataatcacaatttaggtccatattttttgcaaattcaggtgatggttgaacgtctgattgcgcggcatgaaaatccgaatgcgatgactgcaaaaagt

SEQ ID NO: 47446 - DNA, 1316 bp, Heterodera glycines
ccgactccgttggcatccgcagaatgagtccatcgtcctctggacaaagtcgccttcggctaaggcccgatttgttgcgattttggcccattcttcttcaccttttacttgcccatttcatttgcccttccattcatcttccaaacagtgccatttaccaaattcgagctcaacaattggtcgatttattgccacaaattggtactttgaattggaattttttttaaaatgagggccaaatcagtgccgatcagtgatcagaaacacagacactaaccatcagccaaatccattcttaattgatccccccattgatcagattccctttcccttcgacatcggcgcgccaccaccgaatcgctgttaacagtggaatgggaaggcattcaaagcggagaccacccggactcatccattcgcggattcatcgtcgaatatcgggccgagaaggagtcccaatggaatgtgcactcgggaatgatcccatacaaaggaccaaaccaccagtacagagtacaggtgaaaaggggggggggacagaagggaaagagggggggggggatatcgcatgacaaaacaaacaaaagacagtggggataaagggggacaaatggacaaggcgtggggagaaaaagtaaacaaagcattttcaatttcatgattaatcagtctgtgatgggcagtgattgctaattataattggaatgattcgttgataattagtgaatgatcactcaatggcacagattccctccccctctttcttttcagattccaaagttacccaccggcatttcctattttgtacgcatcaaagtgcttggcgataagggcgaagttctggtggagacgccggaaatccgcgcccgcaacgaaattgtcagcataaaatgcgaaccggacgaaatctctgaaccgggcgacgtggacgtgaaggaaagggcacaattcagcgtggcattggtaagccatgcctttggacgatcgatcgatcggatgatcagttctctctgatcagtagtcgtttgatcaatccgctcatttccttcccctattccattcatcccccccccccccccccttaggcttggcaaccgcctgagtgcggctccatcggcgagtaccaaatcgaacttcgtgggcttggcagtcagcagttcgacgtccatcgtcaaactgtggcacaaccatccgctagcatcaccgggcttttgtcgggaacagaatacgcgagtcaaaatcagagcgagtggacagggcacacattgtgggcccatggaatgccgaactgttcactgtctcgacgaagggcgaag

SEQ ID NO: 47447 - DNA, 1302 bp, Heterodera glycines
gcaggtcatgcgaagtagggaacgcgaagtcagcattagtgctagttccactcgcggcaatgtttttggtattttacggcaaggcaagtcgaagaagttaattgactgcaattaagcaatgcccaaatttgaaggaaaaactcggataaatgattttcgattgcccatattgccacagccaatggtgccgagcaattccaagtctgccgcaaaacgaatggtggtgttccaactgtccaattacactctgagcagccttttcttttggatggtctgtcaaggccaaaacaatcgaaacttttccaaattaaggaccaatacaggaaattcgactatgaaatcagcaaaacaacagtgaaggacaaggaaatcgcagcttatttgaagacggagtgcgggccgaaagacatttgtgccggcactttgttcccaggcatggcacttttttcaaagtgtttaccatttaaaattcccttttaaagcattggcacagaattttcccaatgggttggtgagcatcaaaagtcggacattgacttacccgacaattttaattgaacgaaatcgcataaatgtgcaggttgagagtcggattgacgcatttgcaaatgtaatcgaattattaatttaaaattaatgttagaaaatattttagtattccgatcataacagacgctttttgaccgccacaatgcgtgcaaaattacagctgcagaacacaacatttgtgaattatgtattcagtgccgagttgagcattgacacattcgacataacaaatgttgtaagtttaggtcagtttcaaggaaatgatgaaaaattcaaagataattaaattaaataaattgttaattttaacttccaaaaacagtggatgggatcgatgcgggatcaattgaattcctggtaaatgcactcaatgagctgatcattgctgacgacatgcggcataaacttaaagaaggtacacacatgaaatattaaatttaagattataataaataatcaatgcctaatttcggccattaattaattatttaattaattagtcaaatcaatcaattccaattaactattccatttgcaggcgttcgtttgcccgttctgctcgacttcgaacagtttggcccgggtgatgttcacctcgaggacggctccctggtgctcagtgccgacctgtgctttgacgaactgtgcaaaaggacacccgcaaatgaattgggaaaacaatcgcgcgaaaatgggggcaacacaatgtccaacgtggacatggacgcgaattactacgacagtgttaaaggg

SEQ ID NO: 47448 - DNA, 3079 bp, Heterodera glycines
atgtacaaaaattccattaagtcgaatggcgcagcccaactttacatttcgggctctttattgcttggcactcgcacattttcttcggacatcgatttgatttgtattgccccgggaaaaatcataaaattggccaattttttcggcgaagaaaacgttttttgcaagaaaaatgagtgcacaacggaacaaaacgattcattgttttgcaaattttgtcaagtaattttagaggataaattaaatccttaatggttcattgatccttattgactaattttcagaataaaggcgtgaaaaacttgatcaaaactccgttcgggaaagtgtttctgatcagatttcttctgaatggcatcgatttcgatttgacatttgtttcaattcctgccaaaagaattttgccatttgtgctaagtgacgaccaaattggcaaatacattaacaatttcaaatcggagagaaattttgcgcacaaaaatatgctgcgggcattgtcaagtgaaaatttatctttttttaatacaaattttgatattttaggttatcgctccattttttacttggcaaatttattccaagaaaatcatgcaaattgtgccattccattgtcagaaaataaatttaaggtggaaaaatttcaaaataaaaaggccaaaaaatttcaagcattggttttattcatgaaaatatgggcaaaaggtaacaaaataagtgatatttataagttaaaaaacttaaatttagaaaatcacatttattcgactgcttatggctttttgaatgggccaatgttggccataatggcagcaaaagtaattttgctttacccaagcgcatcattaccatttttaattgagagattctttattttctatttattgaggtaaaataattaaatcataagtagggcatccaattatatgcacataaaatcgtaaaatatgcgcataaaatatgcaccaaaaattgcaaaatatggacataaaaaatgaaaaatatgcacataaattttaatagcaaaattttgaaatttcttcaaatttgttaaatttaagcataaaatctcgaaaatagctaaatatagtatgagtaatcatttatgaaaccaaaaatacaaaataaaagtaaaatttatttattttgaagaaaattggttaaaaaatggagaattttctattttctgactatttttggcataaatttccaattttttcaaaagtgacttttttattagaaaatacccaaaaatgatatttttgaaaaattttcggtcattagaggcccaaatggccgctttaatagagggccgttttaatagaggatttattgaaaaaatgctaaaatatgtatataaaatatgcacgaaatgccaaaatatgcacaaatatgcacataaatcgcgaaatatgcacaaatatgcaaaatatgcatatgtaaatacgtcctagaagcttcaaaacaagctaaaaaaatgtttttcgtgcgtttcaggcctcccacagtccaggaaaaaaaatggatttccatataattggatgccttaatcataagcaattctattaaatctgaataaattaaattaacaaattttgatgaatttctcgttttataattgaaattttaaatttgaggccaattcgtgtgcctgtgcaactcgcaaaattaaaattggaagaaaattttgatgtcaatgaaaattgggacctgttttttgttaggaagccggatgagcaagaaatgcccgtttatacgccaatgtttccggaacaaaatgtggcatggcatttgacacattctgcagcaagagttattcggcgtgagatgaaaatcggtaatgtttttgaccattatttttatttgcaaaaaattatcgaattatttttataaaaatttttattactataaaaaagtgaaagctttcaaaattggaaatttaagcgttaaacaaaattaaagttatgaatgaagaaaatttgtatgagttattgacaaaagcgactccgttcacagaaaaggcaattgttttgtccgaatatttattaatttttttatcggcagattacatattagtagggcttcctttttagtcaaatgcctaaaattttgcgaaattgatacgcaaagataactcacgaaaaacgccttttccgcttggtttggggtgtctacgatgacttttattggggtgttgtataagttctgtcacccttcttatgctatgctaatcggaattttttgcaccgttaaccgcaagtgacagccgatcaatttctgtcctataggaaagagcagacatttttgcttcggttaaaagccatttttcgttcttccccattcaaattgatttttaaaaaaattttccaatggatgtccccaaattacaaattcgatcacttttattgtacgggtcaaaactttgctttgatcagttggaaatttattaaaagcagtttttgtggccaaatcaagtccggagaatccaaatctggcctcagatttgatctctgaattttctctggcattgtactgctccatgtcgttgacaagaagttgaagcagtacagggtcatagaacagcaactgactaaatctgaggcgatattcggattctccgggtttggtttgcccatgaaaacatcaatttcattttattaggtcctttcagaaccaatgttgtacaaagtgggtgctgaatcttggcacttttgagcacccatttcagacaggacaactttaaaaaaataacccgtcggtcttggtggctctttttcagcttgtcagatagtcccaactttgctctacaaaaccataatttgttttgtacctttagccttttcttggccaagaaatcagtggttgaatttggccacttttttaagtagaccgatcagtttatttgagtctaactatcttgaatttaatcgacagatcatttttaaaatctcaaaaatgggagaagatggtcgagaataatggtgcatattttgattaattttgagttattatttgattttttataaatttttgaatgaaatttttggtcggggtgacagaacttatacaacaccccaataaa

SEQ ID NO: 47449 - DNA, 1413 bp, Heterodera glycines
atgaccgagtcggacagtcgcattcgggcgtacaaattcgttgcctattcggccgtcactttctccatcgtggccgttctctctgttgtggtcactctgcccatggtgtacaattacgtagcccacgttcggcgacagatgcagcacgagctcggcttttgcaaggttgggagggaagagggaattggtgccaaatgcttttgggggttggcactggcatatttccaatggcattggaattggattgccgttggaattggcatttggcattttgacattggcattctgtgttcatttcgttttattctccagggctcagccaaggacatttacgtggaggtgaaccatatgaagtcgacgcccgacatggacatgaggtccaaccgaactgctcgtcaaactggcggtggctacggccccgtggtgaacgcggccccggcgtgcggtgactgctgtctgcccggccagcccggcccgcagggaccaccgggaagacccggcaaacccgggaagcctggagcaccaggaaaccccggcacgcccggcaaaccgccaaacgcgccatgcgagcccacgacgcctcccccatgcaagccatgcccccagggaccgcccggccctcctggaccacctggacctccaggagagcccggagaagctggaactccaggacgacctggctcagatgcgcccaatggcgagcctggaccacgcggccctcctggaccccccggagaagcgggaccacagggacctcccggcgagccgggagtgccggcgaccccagaagcaccagttcctggagagactggagagcaaggagaccaaggtgaacgcatgtcttgcccacaaaattaacccgcttttcaggtccccctggacctcccgggccccctggcgcccccggcgcggacggtcctcccggccccccgggaccgaagggaccggccggacccgacggtgcgcccggcgcagacggacagcctggccctgccgggcctcctggaccccccggcacatccggagaaaagggaatctgccccaaatactgcgccatcgacggaggagtgttcttcgaggacggcacccggcgctaagatggcagtggtgggccgatcaacgatcagacgaccccagaaacatccggcgggtcgaatggggcggaggtggcggcgatgggagaggcggagaaatgtccatccgattttgggatcgattcgattttggcattcgattcttttttccgtccgtccttctccgattgtcccttcccttcccatttcatctcttttctttgtccctttgttgtcccttttcgctttcccctcaattaggcactcttttccttctccgttcgctcagtgtcctctaatgatgacacaccaaattaattgtgcaacacaactgaataaa

SEQ ID NO: 47450 - DNA, 2369 bp, Heterodera glycines
atggcttttccgcctccttttccgaatccattgcttcctcgccttccgaatcagtcgggtaaaaaagcaaataaaattccatttcgtcagaatgtttcttttttagttcaattccctggacagaagtttggcttcttttctccacaacgtcaaagtattctgcccgggattccgctgctccgtccacgttttcgtccgaattttattccaagggtttgtgctttttatatgtctacatagggattgaattcgataaattattattataaaaccgcctaaatttcttttggttcatttattctcgctaaaatagtgtaagaccatactaaaaggatgataaatagcatttgtaattttcattttaggaactgcggccacccaatccattggcaagacccaccgggccaccaacgaccacaacagtttttattgggaacatttccgataaatgtccggaccgaatcatacaggaagttctaaaggtcttgtttttcgtaaaaattaattctcttaaaacctttattacttaagaagtgcggttccgtgtgcaattggaaacgtctccaagactcaggcggaaaatttaaagcgtttggattttgcgactttatgtacccagacggagcaaagaaagcactgagtgtcctcaaggacttccccatcggcgacaaacgtctgaatgttaaagtgagtttggtgctcaaagtcagcgaaatagtggccattttcaggcggacgaacaaacggagaaactgctggatgaattctccaagaataagctcatcgccgccaacgaggagagcgacgacgccgtcagagcttcgatccgaaagtttttggaggacgaggcggccgacctggtggacatgccgacggacgaaggttttcggtgagggaaggcgaattgtgaccaaacaattcaggcgaatccaaagaaaaaagcccggccgaaggaagcactaaggtttttagcttctttcattatttaaactttgctctttccgagtccgtccttcttaaatcactctctccctcccttctcactcattcttttgcataaaaacattcttaggcaccgtgttttggatctttttgtcttctttgggcaattggtggtaagtttaaattttggtcatcaactcccctttataaactttttttttgatttccttcgtttttttagaattatattttgtttacatactttcaatagtcagaattttggatttattagagggtttttgcattcattcctcgctcctaaaatttattttttgacacatgaatatgtgacatatttaaacgaatattccaaacccattcgtataatttaccacacagtaatttctctattggccgaagtattataggttcaccaaaagttgaggctgcgctgctacgatgaggattcgtaagtaggcgcaaaaatgccaaacatctcattacttatgccctattttcttttacttctcaatttgcatttattattctttctttttccttttcctcattaattgaaattcattttcgggaagccaaaacaaaataagggcgagtgaaagtgaaacaaatgccaatgttgtctttctttttaacataaaatcctttttcaattgagaaaagttgaatttcactcgcctttgaatttggcattttcctgcatttttatttttctgttttcaggcctcgaacaaggagggccgtcagtcccgttcttcttcggtcgccagtcatcgacacaagaaaaaacgttcacaaaaatcaccaaatcgcaaaaagttggccaatgggtgggcatttctaattcgcccattgcaggtcccgtcactattcttcgagttcatccgatgcgtcgtcttattccagcacatcttctacagagtcgaggagaatcaaacggaagaaaaacgccaaaaggaaaagtttgagttcggcggaggactcagatgaagcggaagagaagcgaaagctgaagaaagaggtgaaagagaaggaggagtcgtaccaggcgaggctgaagaagtgggaggagagggagaagagaatggccaaattatacgacaaagagagagaggaggaaaaacagaggcagaaaacgctgcaaaaggaggcgaagaaactgcgacagtttctggaggattacgtggacgaacgggacgacccgaagtattacaggtgggagactgccaaaacggaccaattgaaaggaaaatgacaaacaatcgttcaggggctcagcactgttccaaagaaaacgaaattacgaacgcgaaagggaggcggacgcaaaggaccgacacgaagaaagggcagaactggaggagataagaaggtccattttggaagaggaagtggtcagcaaaaaggaa

SEQ ID NO: 47451 - DNA, 2620 bp, Heterodera glycines; identical to SEQ ID NO: 17503
  unsure (1)..(2620): unsure at all n locations

SEQ ID NO: 47452 - DNA, 613 bp, Heterodera glycines
tgatgttaaattatattatacacatgaaaacgatgaccctttgaatcagttggataaagcaattgaggctatggaaaaatggtcaaaaataaatgggttagaaatttcaactgaaaaatgttttgttttatatttagggaaaaataatatgaaaaaagaatattttattaactcacaaaggatttcagaatcggataatgttcgtgacttgggaattataattgactcgaaactgaatttttcagaacacataagcaaaattatacgaaacgcatatcttagaattttctaaattttgagagtgttgaaaagcagggaaataaaaactctaacagcagcctataaaacttttgtacgacctcaattagaatacgctaccgaagtttggaaccctaatttaaaaaaagatatacacaaaattgagcgggtacaaaaattttttacaagaaaagcacttacaaaatgtggttttgtgtacaaaaatatggggaaagattaaaaatcacgggtttactcacattggaagaaagaagaaaaatcactgacttaactacagctttttaaataatcaaagggttcatcagcctcgatgctgggaaaacttctttttctc

SEQ ID NO: 47453 - DNA, 1802 bp, Heterodera glycines
atggtagctgtgacgctcggcacatttttacaaggcagcattggcactgcggtggtcattgagcttaaggacgaaactgcgctcgaagggtcagtggacagtgttgacccgaagtcgctgaacacgcagctgagcaacgttgtgttgtacagacgacggcagaaagggctaaaacccgcgcatttgcccagttttttttgtaaggtgtgcttttgtcattagtcaatcaactcattgaaatttccctgaatttttttgtttcaacaattttcattttagggcaaacacattcgcttcgtgcattttgagaattacgcttgtgcgctgcatttgttgaaaaagtcgttgcgcaaattgtaaaagccatgcccaaaagaagcaacaacaaacacccgtaaagctcatctccgtgtcttctgtctaattggaaatattccatagcttttgatttttctaatttattgtctttgtgcctgagttatcatttaatcatttctttatcaaatttctctacaattcaaagacaaaatttccagatttgttatttaattttattgttggtttaaaaaaaataaaccaaacaacaaaaaagttgaatatgaatgtaccaaaactattttaaccggtctctgaatattttcttccttttataattagattttttcaaaatatttctattgactttcttagtctccatgtatatgacaacaaacagaagcatggcgattggttggaagcttttgacccgagacaaatggttggccattcttgtcttttttggctgatttttccatttgattttaaaggcatctttcttctttgccctgctccctattggcattcgctgaaggaatgtgccatcgaaattctgtagtgcagaattcaagaatttggtatttatttaatcctgctatttatcaaatggaaaatattcaggtcacagaattggtgaatgccttgcggaactgtgcttcggagttgctgcctttgcctgatgaagcacagaaactaacgctgaagaatattggtgggttgattctatggtttgatgcaaaaaccaacatttccaatttgtgttaagaacatgataaattccgcatgatggatggacgaaccgccgatgaggcgatcgttgccactgtgagtaaagttggcgagaatattcaactcgcccgagcatctgtcatttcttcttcaccaggaacactttttggtcaaacccatccaaaaggtcgtcgtatggtttttatgagtgaaataatttttgtttttagaggaatttaatggcgttcaattgggacgttttatttcgttggtgtctttgggtcacaaatcggatgagagtgtttctgactttccaacagcacaacttggtcaagtgctttgtcagcacatcattggaatggcgccggaaagtttgggtgaaccaaggaaaaagggagctaaacgagcaactcaaatggaaatcgttgacaatggggagggaacggagaaggaacgctcagctaatgcggaaaatgaaagtgacggcggggaagaggaggatttgaacgcttcacaagttgaccaatccgaggtgggatggcaatttcttagagaaggcaccaatcccatttaagctgacgagaatggacggagaagaaactcagctgttgcaccagccattcatgctcaatcctgaacagactgtcaacgaatatttggaagcacatggggcaaatattgcggatttcttgcgcattgagatgggccaagaacacaccaagacaaatgacctttctgtttgttcattgttagtataa

SEQ ID NO: 47454 - DNA, 1600 bp, Heterodera glycines
atgacttttttatacgaaacgctgcacactttggactcgtttaaccgcgactcgcccattggacgtcaaacaattcggaaatttgtggtgaatattgtgctgaaattggagcaggaggagggcactcacagcactcgtgccggtgccgggtaccacagcaaacttttgacccccgaatttgtacttcaccatcataatgtaatccccatattcataaattgatcactaccgttttgaattcagatgcccccaattcgtttctgtcgtgtgttggtggagcgaattgtgcaggcgagcacatacactcatcaaccgccgcaatttgttcacagagactggcgatttgctgaatatccggtcagcccctccccctccatccagctttctgcaacatttttcatattattgtacgtcttcagcctgccggacaagccttgaccagtgcatgggtggaactgcttgccagccagcacactcccgcggctattgtcgatgccctcgtcgatttggccatccgtcgaccgatatttcgtccacaagtctttggcaatgaacaaaataaattaaataaggactattttccaggacactctgaatgcgttgggtctgttgctgactgggcttccttcctccttccaagccttcttcttggatcgaattgaggagtccttcgactggccccaaattgcttctgtcgacgctgatccttcgcaattgttcgagtcgcttagccacgaagtttacctccactcggaaagtcgcattctctcgatgctggccctaatccattccttttgtcaacatggcggcaatgttcggaaacaagcaaaatattttgaaatcaaatcattttagaattcgctttcgattattcccgatttcgtgataaaccgacttgcccacaaagtggacaatgaggcgcagctggtctatttccttcgcattgtggtgccgtatttgcagagaattcacgaaaaggagcggaacaaacacatgcccgaggtgtcccatgggcacaatgttcgattagggcagctgcaaatttcagctactccctatgttaataattaaattgttttattagatttaattgccttcacttcgcttgtccttttccttgcgtttgattgtttgggtttcttcagatcatttccatttacaaagttcttggcgatttggtaaagaaggtcggccaacttcactacgaggacaccatttgcgacttgctttaccagttcaaatatatgtttgtcggctatacgctcaaagaacaaaccgagattttcattctaaattttccggtgagaaagtggtgaatttcctcaataactattgttttaattacccttttaaaggattcgatgcgtgaaaagttgaaatttttgttcacccattcgtcgacagcagcagcagcggtggaaaatcagcagcaaatgcttcagcaacaacagcagcaattggttggcattggatttgcatttggtcagcaactttcatttcccatggaatcagcaacacatcaacaacaacaacaacaagtactgcccttccaccattcacaacagcaacaacaacagcagccggcggcactgatcggaat

SEQ ID NO: 47455 - DNA, 2058 bp, Heterodera glycines; identical to SEQ ID NO: 17540
  unsure (1)..(2058): unsure at all n locations

SEQ ID NO: 47456 - DNA, 979 bp, Heterodera glycines
aaagtagtcctggctctatccaattattaaaattcatttctacaaattaaaaaataatggtcatatcaaaacagattatttttcaataaactgcataactcatgatagaattattgtgaatgaaaatttggccatttattaaattagatgaaaagaaaaaagtgcgaaaaatatgttaaaaagcaataaataaacgtaaaattcggcgtcgacccctttttccacctctttaatgtacattttgaaagttgttactttcatacttttagattgccgccgctttgcccgttcaacacgccaaaaagacggcgcctgcccaatacattcgctacacgcccagccaacagtcgggcctaaacgcgggcggcgcccaacagagaatcattcggctggtggaggagcaaaaggacccgatggaaccgccacgttttcagtaaccataacatgaagagcaatgttgttactggtgcattaaatttgtgttttaggatcaatcagaaaatccctcgggcgccgccctctccgccggcgccggtgatgcattcgccgacgagaaaagtgcgttttcagggacccattcattttgcgagatatgacttggaaatgcactcaaactggcaaactcatcctatttatttctttttgaggtaagcgcaaaggaacaggccgactggaaaattccgccttgcatttccaactggaaaaaccccaaagggtacaccgtggcattggacaagcgattggcggcggatgggcgcggattgcaacaaggtgggcaaaatgggtggagcaaagcattagccaaagcatgctaatttaagtgcacatcaatgaaaactttgccaaaatggcggaggcgttgagcatcgcggaaagaaaggcgcgggaggcggtggagacgcgcgctcagatggagcgacgcattgcgcagaacaaaaagtgtgagggaggaaaagcgaatgcgcgagtggcacagaat

SEQ ID NO: 47457 - DNA, 1353 bp, Heterodera glycines
atgtcaactcttaagaaaattgacaaggcgagtgaggacggtctcgaggggggcctttcgctgttcgatatccccccgacgaacgttgcaattaataaatccagtattagggaattactccctctttcagcaataaatcaatctggaccatatatctttagacttttttcagataatcagttttgtgatctcaataaaacttttctttatttgtcaacttcaatagagagaaaagacaaaagcaattggattccgattaccaaggacagtgaagctgaccaacacgtcggtgtcattcaaaattttgggcacagctttgtcaaaaccttaaaggtgtcaatttccggtgtcgaatcttatgattccggcatttactatgcgtttagggcatatatgatgaatgaattgcgattttcagaagatgtcaaaaagggtctctgtgaagcatcttgctattatgtcgacgatgtcgaccaggatgattacacaaacagcggctttaaaaacagagcgtcacgttttgctgatggtgccaaatgtgaaaccatggtgaaacttaattttgatctcgctcgtcagcccaatctattgcttaataactcggatgtcatttttagcatacatcgtaataccgatgattttctaattatggcaccgccatatgtttcaggaaatgcagtcatagcgaacccgcacacatatcgtattaacatacatgatattagaatttatgtaaaaacagtcgacattacccagtcattaaataacgtaataagcaatcaactacaaaccaccccggccaaatacccggttagaaaaattgagatcaggagtcttttcatcccacggggcacttctgatctctcacacaatgtttttaccagcattgttccgagacgtttaattgtcgggtttgtttcaaccggtgcgtacaccggaaatccgaaagagtcacccttcgtctttgaacatgccaaaatacgctctatcagtgtcgaagcgaatggaaacattttccccgggtcaccctattctcttaattttgatagaaacaaatacattcgagcatttgttgacatgtatacggggctcgggatggacgacggagaaaggacaatgtcgatcaatatacaaaaatttgtaaacgggtggtgtttcttcgtcatcccgatgacctctactctagaggacacccccggttttgaattgattcgaaacggaacgaccagcatcaaggtgcaatttaatgagcctataaaggacggaggttatgagatgatcgttctgggggaatttgattcgattttgtctattaatgctaatcgtgtgctcagtagcgacggaagcatatga

SEQ ID NO: 47458 - DNA, 618 bp, Heterodera glycines
ccgtgaattaatagctgcattggtcaagagaaaacgtgtgccagacaattggctccaattttccgtgccaaaagacgtaacagcacttgaatggatgcgagactttgtgcaaaggatggaacaactaaagcgcttgtcactttctgaaaatctgagatatgaggaagtctggctgggtgggatgttctttcctgaagcgtatataacggctacgcgtcagctgatagcccaaacgaatggctggtcgctcgaacagatgtacatgcatatcacaaaaacggaggaagtacaattaaaatcaacggcattcacactgacaggtggttgatgatgatgaacttcgttttcatcgcacatttatttttagaccttcgcgcaattggcgttctttgtgaggccgacgaaattaagctgacagatgaagtgcatgttggagtgccacggcttcagttcacgtggaccttggaaggacattctccagcgagtgttgtggtgcctgtttatctgtactccaacagggccaaatttttgttcggacttaatttgttaccaattggatttgatcattctatgctaagccagcgaggggtcgcctttgtctccaattgttcgctttga

SEQ ID NO: 47459 - DNA, 1719 bp, Heterodera glycines
attgccttgccctaattaattaactattataattctctctatatcgtcgtcgccgtcaacctcaatttgaggtgttttcactccattcataattttttaatctccgtttttcttacagcagtcatcacgatgtccgggagaagtggccgcagtgggaaacgccgacaggacggaccgggccgcccctcacgttcacgtcagcagcagcacacccagcgcggcgttcagtctgcatatcaaggtccacgagagccgccggagcaaccaacagtccgaggctgggaggacacgcgcgacttctgctcagccctgaaaatcttcgtcaacgagacaacgcgacgcaacgtgaaggagctggtcaacgaatacacggagctgaacgccatgccacggccggagacttcgccggaattcacacggtcagtttggctgtttcgattttcaaacacaaataaaataggtaatttctttacagccacatggactgcaaccgctaccgggacgtcatctgcgccgagcagggccgcgtgcgactcgacaacggacgatacatccacgccaactggatcacggcccttggcgaacagcgcttcatctgcacacaaggcccgctcgagacgacctgcgccgacttctggacaatgatcgtgcaggagaacatcgaaagcattgtgatgctctgcgacaccgtcgaacaaaacaagaccaagtgccaccagtactggccgacaccggacaaaaaggtgggtttttccattttttgcccttaattttctaatcattccctcccccctcttttccccttgcagcaattgcacttcgccaacaagacgatcaccgtgcacttcatcgaagagactgcgctggagccggacctctacaggacaaagctggcggtgctctttcccaacggctccatgcgcgtccatcacttccactggcgccggtgggccgaccgcggtgtgccccagaacgacttggcgcctcttcgtttgctgttccaagtgcagcagtttcggcgctcggtgatccactgttcagcgggagagtttgtgccaagttggaaaataaaaatgcaaaaaatttcccattttcaggaatcggacggactggaacactggtggcgctgcacattgcctacaatactctgcagcgtggacatcggctcaacatcctcacgttggcgcgcaacctccgtcagcatcgggcccaaagtgtgcagaccctggaccaatacctctacatatactacgtgattttgcggtgggttttttgtttgagtttgtgtgtctaaataatcatccccctcccccgcttagctatgctcaaaacaaggcggcgaagctcaacattgacgaacgcgcactgacgacattcctgcgggagatggacgagagaatgacgcgaagctgatcttctgtgtattcgtgatcgtatttgtgatctgtatttgtatgtattgtcatgtattcatctcgctgttgtcatttcattcacttgtatatttcaaactacaataatataaacaactttcattattgtattggtattgaatcgtactgttcctaaaatgcaccaaaattttttcctgggaaaatctgatttttcaaaaatgattaactcaacacttaaaatcagaaaatatattttttgtgatttcgaagtctgaaataattctcacttctattttgtccaatccgaaccccggactcgaataaa

SEQ ID NO: 47460 - DNA, 1442 bp, Heterodera glycines
aattcaacgctctgcagcgcatttcaaccacaacgcacacagcaaacgcggatcacatcgccgcgcaccgtgcaggacctggtcagcgaattcaccgaactcaacgcagcgccgcagccggtgccatcgcctgagtttacacggtgggttttggcgtcgttttcattttgtatacatgtctaatcttcccagtttcaatttttcaggaacgtggagtgcaaccgctacagggatgtgatctgcacggaaatcaatcgtgtgcgactccacaccggacgatacatccacgccaactggatcacaacgttcggcgagaaccgcttcatctgcactcaaggaccgctcgagacgacctgcgacgacttctggacaatgatcgtgcaggagaacatcgaaagcattgtgatgctctgcgacaccatcgaacaaaacaagaccaagtgccaccagtactggccgacaccggacaaaaaggtgggtttttccattttttgcccttaattttctaatcattccctcccccctcttttccccttgcagcaattgcacttcgccaacaagacgatcaccgtgcacttcatcgaagagactgcgctggagccggacctctacaggacaaagctggcggtgctctttcccaacggctccatgcgcgtccatcacttccactggcgccggtggcccgaccgcggtgtgccccagaacgacttggcgcctcttcgtttgctgttccacgtgcagcagtttcggcgctcggtggtccactgttcagcgggtgagtttgtgccaagttggaaaataaaaatgcaaaaatttcccattttcaggaatcggacggactggaacactggtggcgctgcacattgcctacgatactctgcagcgtggacatcggctcaacatcctcgcgttggcgcgcaacctccgtcagcatcgggcccaaagtgtgcagaccctggaccaatacctctacatatactacgtgattttgcggtgggttttttgtttgagtttgtgtgtctaaataatcatcccctcccccgtttagctatgctcaaaacaaggcggcgaagctcaacattgacgaacgcgcactgacgacattcctgcgggagatggacgagagaatgacgcgaagctgatcttctgtgtattcgtgatcgtatttgtgatctgtatttgtatgtattgtcatgtattcatctcgctgttgtcatttcattcacttgtatatttcaaactaatataaacaacttcattattgtattggtattgaatcgtactgttcctaaaatgcaccaaaattttttcctgggaaaatctgatttttcaaaaatgattaactcaacatttaaaatcagaaaatatattttttgtgatttcgaagtctgaaacaattctcacttctattttgtccaatccgaaccccggactcgaataaa

SEQ ID NO: 47461 - DNA, 1356 bp, Heterodera glycines; identical to SEQ ID NO: 17634

SEQ ID NO: 47462 - DNA, 1202 bp, Heterodera glycines
atgcaattaccaaatcttttatttgttttttttgaaagtgtctcaaaaggaaagaaaaaacgcggaaaggggggaaatgtgtcgcaaaaggagggccagcagcaaattgggtcgggcagtgacagcgaagagggcgccgtaggggcaaaggcgagcggcggatgcatcagagagaggggcggcagcggaaattgggtggtttacacaagcgcattcggatggaagccgagtggcgagcagcggacgcaaattgcgaaggatccgccgcgactcgtccacggagacatcattttggccaaactcaggccgggccaggagatcgaggcgaggtgggtcggcaaaggggatggactcacccctttacgatgactttgccattttcagttgtcattgtgtcaaaggaattggcagagaccacgccaaattttcacccgtcgccaccgcaacgtacagactgctgcctcagatcaaactgaaaaaggacaactttgatgaggagcaggcggcacgactccagtcaagtttttccactggcgtaattggaagggacgaacagacggggagaggtgagagagaagggactgatgtgaacgtacaaagggaagagacgtaaaagaggtgcacgtcccccccccataaaaaatttaaaaagaaattcacgttacaagtgggtgggacgaattgtcgagtttgagggggcaggggacgcatgtcttggagaatacgacgcttttcaaaaaaacaaagaggggtcttttgaattttatcaaaaacaaaaggggggccttttgttttgcaaaatttttttatgataaaaaaacccatgaaaatttgttatccggggttttagagggtcgctgatcacgaatctgacatctaattcgaggtcatttaccccaataaccccattaaataaattttcatgactatatattaaaaaattttgtaaaccaaaagggtccccccttttgtttttactttttgataaattcaaaagactcctctttgtaactagcgccgagaatactcaaacaatgaattgtctttgtttcccagtttatgtgcgggatgctcgcgctgacacttcgagtcgcaacgtgttcatacacgacgacctgaaagatgcggtggaaatgggcaaaaagaaaacacatttcatttgtaaggcgaacaccaaactatttgcactcaaatgctcataa

SEQ ID NO: 47463 - DNA, 982 bp, Heterodera glycines
atgagagtatttccatcatacgcattcattcaaatggttcttctttgcttattctcccacatcgctttagctcagagtcagttgttgggaagcgacgatctcatcgctcttttcgatctcagcggtgcgtacaaccgctactgtggtgttaagaagccgcgagaggacctcgcctcgtttttgccacatgtttgtgccggttcgcacataaacaaaaaggcggattcgcaatggtttgtttatacatatcataatgctttgttaattcagttccaaacatatttcagttctcttcggaaactgatcgaagacccgccaataatgggacgagaaataaacaatttgaatgccagccaaatggtcggatttaaattgacaccaggtcagtgcaagagttgacaagtgaatgaatataccaattcaaatctccttgacaatggaagtaaataatctcttagaggacacagttctttaggcccaattcccaacgccaatcgcttcttcgatttgccggagcaaccgacgagcagcaccaccagcacaacgacggcatttctgtcccactcagcatctgcgacacaatttgagtccgaggccaaaaccaccgacgaacgccgacagcgaaagcgcgtcaaacggtcattggacgaactgacattggatggtatctgcaattatgataatgaaagaccattgttatactgtgaatttgccgaacagaagtcgaacgaaaagcgaagaaagcaaaaagcggcggagccgaagagaacggaggacgcgaaaaggagaaaaagcggaagaaggagaagaagaaaaagaagaaggacagggaaaagcgaacggaggacgaagggaccaaacgaagcggcggagaaacaaaacgcgagacggtgatgcccttcttctgattttccaaccgcatattttcgatgctcatcaaaaaaggtggtcgccattttatgggagtcaatttaccaataaa

SEQ ID NO: 47464 - DNA, 1313 bp, Heterodera glycines
atgccatctgcccaaatggtggacaacattaaacaatccgccaatgggtccaaacggcgtgtttttctcatcgagacgatgggagggcactgcggctatttggccacggtgtcggccatcgccacgggggcggacaatgcgtacattttcgaggagaaattcacggtggacggtgggtaatccgtgaattctttttggtcaattttgtattttacagacattaaagaggacgtcaaagtgatcagtcagaaaatgcaaaagggggtgcaacgttatttgatagtgcagtcggagggcgccagccataattacgacaccacttttgtacaaaagttattcagcgaagagggcaagggagaggcaagtgctattaatgtaattttgttttttgagggcaaccagggcctttccaacggaggctacagtcggtggtgtccccccccccccctcgaaagccgaaaatataattaagaaatgtaccagaatttccttaaaccataaaattgccatttttggcaaatcttttaataaatcacacagtcgttcgttgggtgttttcgacttctattgcgtttgtatgtaaaaaataggataggaaggagttggtgagaaaattttttccaacccccccccccccaaacattgtcaaaattcgaccctccgttcgtcctctgccgcgatttgcccctcaatgggaaaaggaaattttaaaaattttgaagaatgaagacagatttgaaattttaggttaaaaaaattgaattctgagattttaggcgaagaagggaaatgaaaatttcgagaattacgaaaggttggaaactggaaaatttttctaaaacagacgggataaaaacttgtaattttgtctataaatatattttcttattttaaccaggaaaaattatcaaaagccagcattgtggttgcaacggccgatagccttgagaaatacaaagcggtgactaaagaattttctttgcgcacgcaaatgcatgttctgggattcaacaaaaatgttagcttttttaaaagttaaaattagctaataatttgtatttcaagtcgaccggactcctttcaagcattcttgatgggaaagcggaacttaccgaacaacaacaagagatttcccgttcaatcaacgccattacggcggatgaagttctcgtgaaggaattcctggagttgatgaatgaggtcgaaaaaaagaaatgccgccgatccaactccgaaacgccacttgtgacctagacggtattattgggtaatctcgtaagcaagggcgtatctaggcccccccccccccgaaa

SEQ ID NO: 47465 - DNA, 2526 bp, Heterodera glycines
atgaaactctcttcttcaattgttgatgttgtcgttgaacttgtcgaattaaaagacaaaaatgccattcaaattgatactgaaaaagcgaggattgtccacggaaccacaaatgaacgtttagaacgccttttgcaagcaaaaaatgaggtaaatgccgttggtcgaattcggaattcgaaataattttgtctcattttcagttggacaataaaattgacgaactttcttcgatgctccaatacattttcaaatgtgtttttgttcatcgatacaggtcaagctttcgatatgcaaccattctttccttttttcagggaccaggttgccgatttcaggattatttgcatctctgaacttggagtatggatccgaatctacccggctttgtttttggacgattcttacttaaaatacatcggttggagtctttttgacaaggtagtttttgccggtttacgagtttctgaatgagcaaattaaggttcccgaagtgcgccaaaagtgcatttatgctttgcttcctctttacgaaaataatgatttgattgcaaaattggagttgttcacgcacaaattcaaagatcgtttggtgagtatggtgttggacacggacgtggaagtggcaacgaaaacatgccaactgatgacgcacatttacaggtgccaatgattgggacttattgccctctccgattttaaaatgacggtccttttcattttcagggcgttccccgctcttctcgacccgggtgcttgcgtgccgctttatgagttggtctattgcaacaatcgccagttggccacggctgctggagaatttgtcaatgcaaaattattttcgacggcggccgatgtttgcttgactaaattcattccgcttctgaattattgccttttcttcagaattccctgctcacttcctccacttctctgctcactccgccagctgaaaatcgccagctgattaaggatttggtcacatttttcatagacggcgctgtccatcgtcacccggcctatttggttgattcgctgatcgacatttgccccatgctcaaggattggtccacaatggtcgacattttactttcggatgaatgtaataattctttattttcaaaaggattatgtacctataaaaatttagtcgaccaatttgacactcagctgatttcgattatgtgtgctgctgtcaagcatgctgcgacgggcgaacacccgccaaatcgcattgtcgtctcaattcggcgaggcccgggcgcggggacggaaaaagtccgtgaatagggggcaaccttttcggaacactttaaatggggtacttagtttttggtgaggtgttaccattttcagttatgtaaataaacgacattcaaggctcctagatgtgtattttccatatgtgtaaaaggtgttggggtcaaccaaaactttgctgggtattgggggtaggagcggccaaattttctaacaaacgttcaaattggttcaaggtttcaataaattttctttcctccgccagtgaccaccctcaccccgcaaatttttttaccattcccttcataaaaatgccattaatagaggtgtaaaacctaaattatgttttgttcagaaggaccttcgaatgctgcatgacggacgagtacatctttcggaagtgttcattcccaaattgccaagattgctacaaaaggttcaaaggattcctttcgtctttaaattcatttttcagtttatcgcagaccaagaaaaagtgcgtgatcttatcggactctttttgtacttcgaacttgaaatttactctgtttcccgtcatgatcaagttgttctttcgggttcaaaaaagcatttgaattgtttggtttcagcctctttatgatctgatgatgcttctcgagcgcattgttgaacaatactccaatgatgagattgcctcaaacattgcctccgtttttcaatttatttcgactaatatgacattggcacgatccaccgaaacaaacagatgccgaattgtggacggagttgtgcaaaatttgcggcaacaattgcaagtgtttctggccaatgaagaggacgaggaccaacagcttgacgaggaggacgaagccgcacttttgtccgccttcagaaaaatggttgcgttcgccaggtgcagcaaaatacatttctacagagctcaatttaaataaatattgtactattgcaattttcagcacaatcgacgtgcctgtaaatgtcgaattttgggacatgtgcatggctttgtttcaaaattcgcatcgatttcggtcggctgatttggttgaaaaggcgatgcttttgtgctttcttcttctcagctgggaaatgaaacgatttgtggcggcacaagaacatggagaggtaaactctgcacggttttattcatttctctttattctcactgataaggagactatcgaaacattgaagaaaaaacgcgaccaatttttgaggacgacaaagtccattctgcgcgacttcgctattggtgttgagact

SEQ ID NO: 47466 - DNA, 2638 bp, Heterodera glycines
cattttctgttcccctttctgtcctcttccactttctgttcctcttctatttctttttctgttcctctttttgtttctctttctcttcctcttcccctttctgttcctcttccactttctcttccactttctcttccactttctgtttctctttctgttcgtcttacacttcctcttccactttctgtttctcttccactttgtcttcctctttctgttcgtcttccacttcctcttccactttctgtttctcttccactttctgttcctcttctatttctttttctgttcctctttttgtttctcttcctcttcctcttccactttctgttcctctttcatatttttttgttctaaattttgtttgttttatttaaatttttatcgatttttaattttccgtaagccataaatcaaaatttattctgttaaattggatcagaaacattttttttgtcaatttttatactgttaattcttggtcatccaaagccaacaatgttacattgttggtattatttgaaatcttaacatgtttaaaagctttgtctaagctattgctttatgattagacaattgctaaagaagttatacatgaaaattgcgaaaaaaatgaaattttgaagtttttcttaataaaattttttcgaggcttgaaaatcttttcgttttttgtaaagctaatagagcatgtgaagagctttcgtatgataccaacaatgttggatttggatgataaagaaaaaaggtataatggaaaagcatgctggggccgaatcgtgagggctgaactgagcgagtccggtctggctgatgataggcgctccaaggatagtttaaattaattttcaatttgttacaagttttgtccaaaaaaggatcaaatttttacttttgagttcattcggtatgcataaaaaacatattatttcactctttatgtaaattttttttaatttcctaaacgtacttatcaaaaaaaaaattaaaaagtttgataatcagaattaatgggaatcgaaccctatacactacaccaacaaagaaaggcatactaaccacttgttcaccggattgcttgtcttgtacttgtaaatacttatttatcttaaatattatttagatttatttattatattattttttttattattatttacctattttatttgattttaaattcagttttaaatttgtttttaaataaatcttatttcattaatttaaaataactaatattttatttccataaagttaattaaataaaaaaacaaaacaaaaagtagaattatatataatattttttcaaattactctgaagcagtgggacccgaacccactataaaaggcaggcacactaaccgcctgaccatctggccgcttgccacttcacctttcaatgcccattttccttcctttcttttattgcaaaaagctcgaccttgcctccacccttttaatttcctttaaacaaacatcacaatgggactcgaaccacagagaccacgccaccaaaagcaagcacagtaaccacttgaccatcggctggcttgcctccacccttttaatttccttttctttttccttctttttgggaaaaataccgaccaaaagtgcttgagctccctttttagggcacttcccggacccggacccaaacaaccctggtatcattcgaaagccaagagtttgtagatgtgcacaaaactcgcgcatttatattgattttcagaaagcttttgactcagtgccccataacttacttttatacaaattggaaaaaattggtatacggggcaaacttttaatgtggataaaaagctttttgagtaataggacttttcatgttaaaattggggatgctttatcctcaaataaaaaagttggctctggtgtcccccagggctctgtcctgggccctttattatttttggtctatattaacgatcttcctgatgctttgccatcaggagtgaaaataaaattatatgctgatgatgttaaattatatatttgttataaagcaagagccgacacggaaattatgcataaagcattgcataatttattcgaatgggcaaataaatggcaaataaaagtttcaattcaaaaaacttttgtattatatttgggttcaaaaaacccaaaagaaacatataaatttgatggaaatacaataaatgctgtggatacaattagggatttaggagtaaacattgataataaattacaattttccgatcatattaaccaaataacaaggaatgcgtatttacgtatgcgttccttgtttcgaataattaaatccaaatcatctaagatttggattacgttatataaaacttatattaggcctttattggaatacgctccggaggtttggaatccgtctcttcaaaaaaatattaaaaaaatagaaaagtgtcaaaaatatttcaccaaacgggtattttttaaatgcagccttccaccaattccataccaaaatcgattagaatacctgcaactgccgacacttgagaataggcgaaagctatttgatctgttcatggcgcataaaattgtttatggccgaacagatctgaaactattttcaatatttaatccatcgacacgctttaacatccccttttacaga

SEQ ID NO: 47467 - DNA, 2280 bp, Heterodera glycines
atggacaacgcactgattgtgcaagcgctgaccgacaaaagttattttacgcgcaatgatttggacgacgaagcgatgggagacgacggaccattgacgacggaagttgcgagagacaaatccaacgaccaattagtggagaaaggtgctaccaattctcatcttttcgttggggctaattttccccgaaaacccattttcaaggaatgcccctctttcgtcatatcgtactcacttatttgcgcgcccattggcctttggctcccgaggtaaacatttagattaaaaaatctcatttgatttgggctccaagtacaaataagtttattatttataatcagaacgccaaaactttgcaaaacttaaattttcttgggattttcccttgtaaaaatggaagagccgatctcgagttaaaaacttaagtttcataaaataaacttggaatcgttagagggggtcaaaaaactagcctaggcaaaatttcaagaaaatctgacccgaggaaaatttttttgaccctagtgaaaatttcaataaatttaactcttttttagccaagtgcgctatttaaagccaaatcaaataaaacttacaatattctccagaattttctctttaaaatgaatataaaattattatatttggcctattattgtccgagttataagtctggaaaatttcataaaattgtcgatgttgtacgtaaccaacgctttttgaatatgattttttattgacacgaaaacttctattaatgcaaaaataattcttcctttcttctttaaacgaagaaattgaaattaacacacaacataaggaggactcgaacctgagaccccccttttggtgactaacgcacagaccactaagacgaaaaaaccaacttaattgtacttggagcccaaaattgactcgccgtgtagaaatgagaaatttatacatttccgaaaatggattttaacaattttgtggaaaacataagcaatttgtaaattattttcagttcattcgggatcaaaaaatcagatttttaacaatttttttgcagcatgctttttcaaaaaaaattttgaggaatgggcgacgggatgaggtcgaggcggtgccgataagatcgtttttattataaatgcaaaattaaagggaaagcaaacagattgtttttattgaatgaatgctttcaaaccagaaattaaaacagaccctcaaaataaatagtcttccgagcctcgttgaaaactaattttcaccttttgatcgaaaaccccatccgtttagctcttaacaccaatttctctctccggtttcattatggcccctttccaggaattcatcattgccgtggccacccgaatcgcccccacttcggcgctggccgagttggccacccaattaggcctccaccacgtggtcagaaccgcggagtttcctcccactcagcaaacgctccagtcgacactgttggcccttatcggtgccatggacgtggcaaaagcgcgcgacttcgtccgccgttttgtgctgccgcgactgtacgaagtgccgttggaggatgtgctgccgttccggcatcccttcgccgtgttgggcgattatttgcgcaaatggcaaggggtgcggcgaagagacttgcattctgtcttgaatttgatttgtggtttgcttgcaggcaactgacatcgaaccgcgtacaattgggtcgggtgctgttatgacagcaacgcctttttacgaagtcgcgatttacgtggacaaacagcaaattgttggacaatgtgggttttcttagctccatgattcaatgttaaatccgttgattaaagcgggcggtgaattcccttgggttgcgttggatttggccgctcagaatggactgcttcgcctgtggcgagtggctgaccatccgcgcgtgttcccattcaaatttgaggaagtgtacgcgacccgatttgagcaggcccagcagagaaaccatcggctgagcgacgtttgcggagaaaagtgagtgggcgagggagaggcggcaaaaacagagccattggtcgcgatgatgcgaatgaaccttactgtttcagcaccgacttgagtctgtacacgcccgaagaactggccagagacccaattgacatggtcgacatgtgcaaccagtactacacgaagatacggcccgatgtgggcattcccctgcggcgaaggcaacggcataagttctcccgtgggacgatcagtcggctgagtaggcgatttttggtcaagcccaccattttcaatatctga

SEQ ID NO: 47468 - DNA, 1366 bp, Heterodera glycines
atgacccttggtactcgaatgtcatgttttttttgccgcttatttattaatgtaacattttgttttcccaatttgaatttccattttttttttgcacagaggcacgcgacttttttgaccgtatcgccactgaacacggcgtggactgtacacagccgcgcagctgtgctcgcctgttggacaagctgatcggcgagttcatcgaggtgagtagttggtaattttaaaaaaaattatttaaattttgtaacttttttagcccaaactgatcaaccccacctttttgactgggcatcctcaaattatgtctccgttggccaaatggcatcgctctcggcccggcctcaccgagcgctttgagctgttcgcatgcaccaaagaattgtgcaacgcttacaccgaactgaatgacccgctgcgtcagcgtgaactgtttgaacagcaggcgaaagtgggcacagaattttttttactgaaaaatttcccccgtcgctcttttagtattttcttgccgtttttcaagagtctcacgattctcgagtagagatagtaagcggaaatttgctttccgcttctttattgacgatagatgggttctaatgggtcctaaaaattagagttgtatcaaaaaaaacaattttttttcatattttccgtgttacatattaatctttccttttcctactgttgcgtacaaaatttttttttacaaatctattttccatttttatagcaaaattaattggcttatttgtaaactttttcattcttcccaccaattgtaagtttgtaattttttttttttaggctcgtgaggctggcgatgacgaggcccaggcggtggatgagaatttctgcaccgcgttggagtacgggttgccaccaaccgccggctggggcatgggcattgaccggctgaccatgatgctcaccgacagtcacaacatcaaagaggcaaaaattatttttgaaaatgaaaaatttgtcaaaaaaaattttatagaaattttgcaaaaaaaaaaaaaaaattatgtaggctttgaattttaattttttgtacaatttattgcctcctccaccgtttcgttcgggatttaaaatgtcaaaattatgatttttttaaagttgtagaaatatttaaaaattccaaaaaacataatttttcttttgaaagatttatcttctcgtaagcaacctcttttgtttgttattattagggttataagttgtatgattttgcatattttttctgcgcatatgcaatgaagaaaggggctcaaaaatagcatttctgcgttaaaattttttgatttggtgaaggtttttagtgcatataaaagcatattttggggttttcgagaataaa

SEQ ID NO: 47469 - DNA, 1172 bp, Heterodera glycines
atggcagtgcccttcagccttcaagtggacggccttatctacagagtcagaaactccacttacgggcaatttcccttagatgtaattgttttttgcttttcaaaatcgtcattattcttcccttccctttttacaggtgacggagcacgacttacgccagctttgcgatgccacgatggacgtcttccggcagcagcagacactcgtcaggattcaaccgcccgtcaacgtctgcggcgacatccatggccaattcacggacctgctgcggatcttctcgacgctgggccccccgccggagaaaaaatacctcttcctcggtgactacgtggacagaggcccccaatcgctggaaacggtggtgctcctcttctgttataaggtgaatttggaaaggcaaagaattacggggcagtaatctcattttttaaggtcaaatatccggagagtgtgacgctgttgcgcgggaaccacgagtgcagtaacatcaacagagttgtgagtcgagcaacgtttaattggcaacggatggcactaattcagccttgttttagatatggcttctactcggagatcgagcagcgctaccaccaagcggacactcgacggctcttcgacatgttcaaccaaacttttgcctggatgccgtacgtgggcctgatcggggacaggattctgtgtgagatcgacttgttgtttcattgctcaaattaatttttctcttcatttcaggcatgcatggcggcatttctgacaggatcaccagcttgcagcagctcaacgaattacgccgcccgctgctcaccctgccgagcccgtcgttggagatggatcttctgtgggccgatccaatgctcgacatccgcggtgtggagccgagcccgcgcggggccggcgtcgtctttggcgaggacgtggtcttccggatctgcgagctgctcaacctcaactacataattcgggcgcatgaggtaggcagggtggacagatttattttcttcaaaagtttcccattttttcagctggtgcatgagggcattgaatatttcgccgacgaacgtcttgtcactgtgttctcggtgccgcgctaccacaatcaaatgaacaccggagcagcactaacaatcgcggaggacctgagccacgacgtcacattcttcccgccaaattga

SEQ ID NO: 47470 - DNA, 962 bp, Heterodera glycines
atgccgggggcaccttttcacaaagtgacaaaggagaactatgtgatcgaacaggtgcactcggtaatgatgcaattaagcgtaattaacataaagcaggtggtcgagtcgggccccaaattggttaccacgacgcgcattgtttaccctccggcacagcaacaacccctgggggcacagcctcaaacgcaacaaataccacggcaacaacaaaatcagccaaagggacaatggcaagcgaaaccggaacaacagcaacaacaacaacagcgaaaaatacaaccacagcaggacggacaagcgcaacagcagcagcagcgacaaccgccgccgcaagtgccgttcaaaacgcagcatcagaaaatggcacaacccacgcaacccccgcaacggcaggaacaatatgcggtgcaacagcagccacaacaacatgaacaatatccgatgcagcagcaaccaaaacaacagcaacaagcgcaacaatattcgattcaaccgcaactacaacaacctgttcagcaagtgcagaaacctcaaaattttgccaaacaacatcaatacgttcatcagcaagtgcaatttcaacagccgcagccgcaacaacaatatgaacatccacaacacgcaacagaacgggaacaacatcaacaagcgcaacaatatgtgatgaagcaacagcagcagacacagcaaaagcagccccagagagtgcaaattgttggacaaatgcaactcggacaaattgaacaacaacagcaaaggggcggaggaggacaacaaccagagcaacaacaaaagcaagcagtagtaggacaacaacaacagcagaaggagaatggccaagccaaacagcagccgaagcagggacaatttggacaagaagaagagcagcagtacaacaagcaaaagagcaacagaaatggaacaacagcacagcaaatgaacaaccctatcagatccat

SEQ ID NO: 47471 - DNA, 1195 bp, Heterodera glycines
tgtatgtaattgcattcttgtttttttaatttaatggaaatgacgctttaaaccacgaaactgtcccatgtttaaaggcttcttcctccgcctcgggtggccctccgcccccgtccctcgagggcgcggcggccgaatttccgtccgcctcggacgaaacggaggagccgctgcaggccgaacggaagcgctacgattacaacagcgaaactttgagggaattggggtaatgaaagcgcgacaaatatactaaaattggcctgccaattgtcagttatgacaaatacccctattacgtggagagagcgtggtggaaggagggccatcgcatgacattttggccccattggcggcaactcgcggacatcaaacggcgccgattggtggccgagtggggcccaatgaggtaaaattgccaatggaaatgttgccgtacgatttttggaccataatttctttcattttaaataaaataaaaaaattccgagcacatttctattaaaaattaaaattgaaaccatttaaaaaaatgttttgtgacaaaatactcaaaaaccgatctttcctggccattcttatgaaactttaaatttttacaaaacagtaacaataccaaaaatgcttatttgatttaaaaaatttttggaccgtaaatttccattttataaaagcccaacatttttgctattatttaaaaaaataagctaaatgaagcgcaaaaaagaaaataaacgttccaaaaaattaataatggaaaaataaggtgattttttattaattttacttttctttccttcacaaatttcactgctaatccccccccccccccatttaatgtttcatattttcataacaatgaaattccaaaacttaatttgcacagaatgcgctacaaggccatgaagacgaacaacattttgccacgtgtgataatcgacgagtttcaggttatccccgagggaaaatgaatattggcatgggggcggagattattgcaatttttggagcaattaaacccaattttcaggaacggatggataatatgccgcgtcgtgcgcaccccgttctgatcatccaaatgtgccaattcacttccaagcggcgtggcaaactcaacaaattccgtgtcagtcggcactgtttcagagacattgcggacagaggaggactcagcggcattcagaggggcatttgg

SEQ ID NO: 47472 - DNA, 960 bp, Heterodera glycines
atggcctccgtccgttggattggccctccggcggtgtccacgcgcgcgcgccccgtccacgtgtacgccatggtgtggaccacgacgccgtggacattgcccatgaacaacgcggtggcggtgaacagagccgtggaacactatgcattggtggactttcccaaggaccgaaggtgggcgccaaacccatgagagcggttcgcttcccctcccttgaatttttttaagaagattttcagtaatagaaatttttcaaaaaatttcaagaagtaattcatcataaaattttgaaaattgctacataacatagccgaggcaaaaattttcaaagtaagaaatttttcaagaaaaaatctttaaaaaaatttttcttagaaaattcgtagaaaaaaaatttctaaaattttacagcgattttttcaaaaatttttgaaaaacaataattcatcattaaattttgtaaaaaaatcgccggttttttgaattttttttcttcgacttttctcagaaattttttttaataagattctaagcttaaatttattttttaaaattattcccggctctgtttcggcggctgtgttttgtcctgttaaaaaactatgtttttttttaaaaatgtaattttcatgcagattccgcatcattcgcgacctgtacattgtggcagttgaaatggtgccgcacattgccgccgaatttggccatgaaattgccgtgctcggcacagtgtccggcgcgcagctggcggacagcggactgttctacagcaacgcgtgggccaacaacatacaggcgctgcccgtcctcgccgcgccgttcgtcagcccatccgccggcacggggctggtccatgtggcgtatgcgcatggccaagacgattttgaggcaataattttctcattattcggcggggaatggaggaaaattcaagcccctcccctcgaaattgaaaaatga

SEQ ID NO: 47473 - DNA, 1307 bp, Heterodera glycines
  unsure (1)..(1307): unsure at all n locations
cggacagcggactgttctacagcaacgcgntgggccaacaacatacaggcgctgcccgtcctcgccgcgccgttcgtcagcccatccgccggcacggggctggtccatgtggcgtatgcgcatggccaagacgattttgaggcaataattttctcattattcggcggggaatggaggaaaattcaagccccccccccctcgaaattgaaaaatgaaagaatttttaacgaaactgaaaatttttgaaaaagtaaaccgtttttcttaaccgttgggcccaaaacccttaattttctttaaaaattagaaaagcgatatgcaaaaaagaaaaaagggtctctgtcggtgaaaagtcttttttaccaatatccgctcaaaaatctcactccaaacttttttcaaaatgcccctggcaacactttttttttttacctttctccctctctctaccgtccagcttggtcgaacgcaggagggcaagcagtacattcagtgctttgtggacgagcggggccgctacacgcgcgagatgggccacgaactgtgctggaaggaagtgctgggcgacggacagcgggccgcgctgaagcgcttacagttcagtacgctcgctataagaatttcgactaaatttcttgcatttttaaaatttgggccaaaatttatgaccgatttttttaatgtttagtcgaattctgaggcacaaaatttctgctgggttgaaattgtcacgtaatttttaaacagtttaaaaaataaattcgctgtttttcagattcgacgttttgcatcagtccgaatatgtgcactcttacccttacgattggcgaaccaaccaggttatcaatgaactaacaataagtgagcattgatggctgagattttactttggcatatcgattatatatatatatatatatataccggtctgaaaattggcacaaattttatacaaaaaaaaacaaacaaacaaaaatcaaatgttaaggcgttcaagtttttcattggtgacctttttagaaacaaaaataaaaaatgcaaatttttatgatttcctcggccagagcggtactgtttaaaaaaaagtaaaacaaaaaaataagggacagcttttgtcggagcagggtcgtcccccccccccccccccccgaaattttttaaattttcaaactttacttcttccccagcccgtcatcatccgttgctgcccccagtggttcatcgacgtgaaggaggtgaacaagcggtgcctcgctgccaccgaaggcgatgcgccggcggtgcaaatcgcgtcgggatgccaaggt

SEQ ID NO: 47474 - DNA, 961 bp, Heterodera glycines
atggctaatagggctgattggacatcaccggatttctgctctttgctcatttatgtataaatgctttcattatcaaatttttagcaggtaaaatggcctccaaatttgtattcagtcttcgcttttcctacccaaggctcttaaccagcagtgccctcaacaacaaaaaattggtgccaaatctcattcagtctcggtcaattgtgaccaaatttgacctggaattgcctgacgattacccggagccttggccctacaaacaatgggggtaaaatttttgcaaaaaaattcattgtattactagtataaccattaaatgttgttgttattggtttgctgtcctccctcgtcagcttcaaccaattcatgcaacatcttgacaaaacgctgaagcgctggcacatcaactcgaaacttatcgttttcgaaagcaacattggcgtgggccgggtctgttttttgggggtattcaaacggcaattttttcgaaattcaatcaaacaattgatttgatgtctccccataaaatgattttataaaatttcggtttgccatacctaaataagttccgcagtcttaaacatcgcgttttgtggacctttcaaaatttatgagttcttggttcaaaaaatttattttagtcgtcgatcgcaaaggaattggccgatgcgttgggcttttattatatgccggcctttaaaatggacgacattttggttgaccgttacaacaatgacatgcgcgactattatcatttggtctgacaattggcacacacctaaatttttggcatttctccggttatgttcccctaaaattcattcacatattttttcaaaaaaatgcttaaaagccattccggtccggtttcggtgttaatgacgcattgaaatggatgccaaaatcgcattttctccaaatcgaaaagccaacaatttttttacggaatttataaaataaa

SEQ ID NO: 47475 - DNA, 1819 bp, Heterodera glycines
caaaataataatctcctccttctgcagattttgacgctattcttcactgttttatgtctgatttgcgctttctttcatttcttttccttttacaatttgtttcccaaagtaagctttccattctcagtgaaattaaagccattttttcccttgctaattaggcattttcgagtcgggatttcctccaggagagggcgattaccggcatttatacccgcgattatgtgtcaccataaaaatcaatgaccataagcatgtgctgtcctattttatgggcatggtggaggattttcgctggccaaaggtgcgtttatcggaatttgaaatacatttacgcatttactaattgtcaattgtttttaggatcggatgcacattcttttctttgaagaaaaaccaattttaatttcggagttcgttctgctaaagtccataacttttcttttttaattttcagatggatggaaaaattccctcgcggtttttatcgactgattttgcacaaagacaaattcgataattggcgggaggagtctcttctctttggccggtccaattcctgtacttttcttctcattttggacaccgactgtttccttctgcgcgactccattcgccaattgatttcgcttgacaaattggtggtttcgccccttctcatctctccattcggtggccaatcgaatgcccacggtttactcggggagaaatttgtgcagggacagaacagagaaaacgtacaggttggcaaaacgaacagagaaaataagggtattttggcaattaatgctaatgaaggctttggtttcccactaatattttaggcttactattcaagcggcccaactttgatcaatttgaataagatggactcttcttatctgacctttgaccagggaaacattgtcaattatcacggcaatggccacccaatcgatgtctttgccttttccgcttacgcaatgaacattccgatattcttctcaaatttgcacaattatggctattttatcagcccaaactcactgagtaaaagcgaacaaatggccgttgtatgtcacttttcatgtgccgaatgaaaattgttttagttcggcacttttttggctgattgggtttcgaatgtcggcccaatgcccttcccggtctcttccgttttacagccgtggtacccagtgccgattaaggtaattgataattcccttttaaattattcctctttaattcagtttggttttgaccaagtttatcttattaaccttcgacggagaccgcaaaaattagaaaaaatgcgggaagttcttcatctcgtcggcttggatttcactcacttcgaagcagttgatggacaaaatttaactgaacacgaactttcagcaattcattttttgcccggattcgaagacccctattacaaaagaccgatgaaaaggggcgaaattggctgttttttgagtcattttaaaatatgggaggaaatcgtgagaaatgggcaccaacgagcagttgttttggaggacgacgtgcgattttcgccgaatggcacattaatgtgagaagagaagaatggaaacgccaaaattgaattttagtcttcaaaaaacaatggaagatttgacaaagactcgacttgattgggacctgatttatttgggcaggaagcgaattggcaccgacgaaacatttgtgccgggtaagcacaattaggggctaaaatggggacggaaacccaaagacttttattttcaatgtatgcttttctaatcattttctcatctccaatggtcttagaaaatcgctttctgagcacagtcgctta

SEQ ID NO: 47476 - DNA, 315 bp, Heterodera glycines
tccgtgttgagcatgtgaaaccgtccggctcccggcttgagtttctgcagcgatgcaaagcgaatgacttgcagaagaagcagcacaaggagggcaacgcaccgtttgtggcgctgaagcggaagccgaaggagccccggggggcgcacttggtcaaagtgaagagcaccaaagttgagcggctggctcccgtcaaattcgaaattgtcgcttgaggcattatgggggcaaacgaatgcacgagcacagaaaaccaaccgacaattgttatttttaatttgttgatccgtttcgtgttaaagaaaaagttttgaa

SEQ ID NO: 47477 - DNA, 286 bp, Heterodera glycines
cgcctgtctatctggcagcggtgttggagtacctggcgtcggatgtgctcgagttggccggcaacgcatcgcgggacaacaagaagacgcggatcaacccacgccacttgcagttggctgtgcgcaacgacgaggagttgaacaaggtccgacagcagccgatttttgtttttttttgaaaattgtgatttttcagcttctctcgggcgtcaccatctcgcagggcggtgtgttgccgaacattcaggcggtccttctgcccaagaagacgcagcacggcgaaagt

SEQ ID NO: 47478 - DNA, 1361 bp, Heterodera glycines
atgactattgttgggaaaaggggatctgctgtcaatgccattagtaggtctccttttggcgacgacaaagactcgcgccgttcggtgtcgccgccgggcacaaagcgtgtacggaacggcggtggcggtggagacgatgacagcgcacgacgcaatgacagggacagcaagcggagcggtgggcgaagggaacgtaagttggaagctgggtgcaattttcaccggaaacttattcaaaccaaaaaaaaatgtttgaattttttttttgggtagggggaacagcgactccattaaatttttcatttttttaatcaaaaagaaaatccaggcaccgctcgtcatgacgaggaggagcgagaccggagcgacagggaccgggagcgggaccaccaagagcgggaacggcgacgcattggactgccgggcaagccgaagtcggaccatgtgctgagtgagtggaaatggaattcaggggggagggggtcaacagccaaatccgctataattgggtggaaccccgacatttgcggcccaacttttgtggcgccgagatttgcgccaatgtccaaaatcggattctaaattgaatttttttttaagccctgatagcataaacagcattaaaattaagaaaaaactctcttctaatttattaggaacattaattctgttgtttaaaaattgtgttatttttcaaaaattcattgaagatcacaaatgatcagatacaatcactttcaatcgcttatttaaatttccccgtattgaacccttttgtggtggacttaaaaatatgtttttgcagttggctcgcgcaccctttggttcggccgtattccctcgggcgccaccgagtcggacatcattgactcggtgaaggaaattggtcttcctgaaaaggtgtcgttggtgtttggccgtggttgtgcatgtgagtgatgaagcggttgctgatgcaaaaatttttgcttgaaaatttcagacgtaaccatgccagaccggaagttggccttcaaaattttggatcggctcgctaaaaacatccgtgtgcagagcaaaaatgttaaagtaagtctcatccattggaacagtttcattgtcagggacataccccacccaaaaatgcgtaaaattttaggtcgattgggccaccatcccgtatctgaaggacaatatgcaattgatggatgcttattgggacctgaagcagggctacgcgcaaattccgttctccaaattgccggacggcaccgtcgactcgctgatggacggcgcgtggttggagctggatacactgccggcacatttgaggggtgagaattttcaagtgtaaaactgtagatttcaatttctcctggtaa

SEQ ID NO: 47479 - DNA, 1703 bp, Heterodera glycines
atgagtattatcaaaaaaattgacaaagatagtgttgaaggtcttgaaggtagtctatcattgtttaaccttccaccgacaaatgtggctattaataaaacgagcgttcgggagcttttaccattgtccgctctcaaccagacaggaccctatctttttcgtctgttttccgatagtcaatattgtgatcttagcaaaacgtacatgtatctgctcacttcgatagagcgtaagaatgccgccggagaatgggtgccgaccgacgatgcgattgaagaggacaaacatgtaggtgttattcaaaattttggaagcagttttgttcgatcattgaaagtcaacatttctggtgtcgaagtgtttgatagctcaatatactatcactatcgtgcgtacataatgcaggagcttggctattcacatgagattcgcaaagcatttcacgaggctggctgctattatccggatgaaaacagtcaggatagctactcaaacaaaggttttaccagccgagcacagcgattctcaaacggaaaacagtgcgaaacaatggtaaaactcaactttgatttggctcgtcaaaacacacttttgctgaacaatcaggatgttgtgttcacaatccatcggaacagcgatcctttccttctgcttacaccaaaatggaaaaccgttacagatgcggtcaaagatgcacaaggtaatataattacagcagcgcgtgtgacatggcatgataacacagccgaataccgtatccgtctacatgatataagactttacgtacgcactgtagacgtaacttcaagccttaatattgcgattagtagacagttggaaagcacgccggccaaatatgcgcttcgtaaggtagagatgcgttccatcttcttaggcatgggtcgtactgagctgtcacacaacgtgttcacctcaacccttccgcgtcgtctgatttgtgcgtttgtgtcaacggatgcatactcgggcgcccggcatctgtcacccttcaattttgagcacgcgaacgtacggtcaatcagtgccgaagcaaatggtttgacattcccaagcacaccatatctgttatcgtttggcaatcagaaaaaatttgtgcgcgcatttgtggacatgtatgcagggcttggccttgacgattcggacaacaaaacggtgtccatttcaatggcacgatttctcagcggatgggccttttttgtaatcccgatgacatccacactggatgacacgcctggctttgagctgatccggcaaggcacttgcaccgtcaaagtccaatttgagcagcctataaaagcggacggttatgaaatgctcatattaggtgaattcgattcagtcctttccattaacgctgatcgtgtgttgagcactgacggaagtgtatgaaagaaaaataataatgaattcggttcagctgaaaacaattctaaagggcgtgcaggctaccagaactaagtttattggcgtcttcccatcggataaaattccacaaccaaagtggagaagaaaatacccttattgtatgatcataaatacagacaagtcaggaacacggggcgaacattgggttgcctgtttcgttcctaatgcatcaagggttgaatattttgacagtttaggcaaagcgcccaacaaagacttaggcgcgtatttaaacacttttagtgacataaaaatca

SEQ ID NO: 47480 - DNA, 899 bp, Heterodera glycines
atgaattcctcttccgttggttatattccgctgctctaccgagacaggccagaatggcgagacgtgaccccaatttacaacagtgctgaggagaatgccgttgtccgaattgccaccagcgaggaatgtccgtgccaataaaaataaatttgcgaaaattttttttgatttagttgacgatgcctttgcgtatttgcgtgccgtaatgaatgccaatgagctcagtgagcggacactcgaactcacacagacatgcattgcacaaaaccccgcaaattattcagtttggtaagaaaattggattttccaaaatattgtatttttttttttttgcaaaatttccttttttcggttatatcgccgtgccattctgcgcgctttgaacaaggatgtgagcgaagaactgcgctactgtgaggagatcatcattgaaaatccgaagaactaccaagtttggtccgtttttaaatccaaaaaattaccaagttatcctctttttcaagtcctggtaattaccatggtccgtttttttaaaccccaaatataccaaatcgattcgtttaatcaggaaaataccaaatttacccatttttagccggataattacaatgaaatgatagaaaactaccaactagcccattttaaacccaaaggaatgccaagttttgtcaattttgttttttaccaagttttgattcgtttttaactctaaaatattgccaaattggtccgttttaagttcgaagaactttctttcgtaattgtctcactaaaattgccgcttttaggcacaatcgtaaaacattggtggacgagtcgggcatttacgctgctgaactgccattcattgcccagcaattgcatgacgagccgaagaattaccacgcatggcaacacag

SEQ ID NO: 47481 - DNA, 1012 bp, Heterodera glycines
aaaaaattgatataatttatttagatcttcaaaaagcctttgatcaagtaccgcatgatcttttaatatacaaactcaaaaaaactggaataactggcaacttattaaattggcttcaggattttcttcttggaagaacctttaaagtaagaataaatcaaaaattttcaaatgaatttcctgccaaatcaggagtcccacaagggtcagttctaggacctattttatttttaatttttattaatgatttgcctgaaaaaattccaaaagaaatctcaattaaactttttgcagatgatacaaaaatttaccattgctattcaaatgaatcccaacgtaaagttttagaaacagctctaatttcagtctttaattgggctgaaacatggggcttatatttttcagtaaaaaaatcttccgtcttatatttaggaaaaaataacaaaaaaaataccgtacacaattaaacatgcaactattcctgaatcaaaaattattcgtgatttaggcattttaattgacaacaaactcaaattcaacgaacagttttcaataattctccaaaaagcttatctcaaaagcagaattctttttaaaaaaattaaaaccaagtcaaccaagacttggattacagtttataaaagttttattcgaccccttttagaatacgcaaccgaaatttggaatcctcgaaccaaaaaagaaataaatcgcctggaaaattttcagaaaaactttacaaaaaatgttttcagaaaatgctgtctcccctacatctcatacagcgaaaggctaaaatttctaaaactttccaagcttgaaaccaggagaaaatatcttgatatcataacagcctttaaaattatcaaaaatactactcaccttaacccaaaaaacctttataatttttcaaataggaagatcaccttttcctattttggtaactaaacgaaaaattaccaaaacagagcactcctttactaacagaaccacaaaacatctacaagaaatc

SEQ ID NO: 47482 - DNA, 392 bp, Heterodera glycines
atggcacttcccatttacagtcatggccttaaccgcctttgcatttacattgaggacgtcgcctcgggcgtaaaaggcgacggtcagagaataaaaagggaaaagccaaaaaagaaaagagttttcaggtgaaccgaaggtgctcaagcaggtccatttgaaacagaattgaaatgccaaaacaaaaagcaattacgctgaatttacagaagggtgccaccgcttgggtggacgggtgcgatttgcttggcgccgtcgtcggtaatttctgcacagaattggccataaagttggccaaagagcacggcatcggctgggtggtgtgcaagcggtcgaatcattacggcatttgccaacattatgccaaaaagatagcaaatgccggcttgttg

SEQ ID NO: 47483 - DNA, 991 bp, Heterodera glycines
atgaaacgaccattcgcctcccaattcagaattggaactcgcccgagccttccgcactcccttccttttgcgcctctccaaaatcgaatggcgtgccgaatttggcgatctgtcgagcggagcggcacggaagttgcaagagcaaatccgagcagatgtaaggcgattaaaccttcattttaactcccgccggaataaatccttcccatttctcagctccattccgcactctccgccgccattggtcccggctttttggactatcaaatcgaagcattgcaccaaggctcagtgattgtggaggggcaattgttgagccgagaagagataagcgatgcccaaagtgtggccatggccttggaacaggtgccattgagaagaatttgaaaataaatccgagtttatttggttacttcgcttaggcaattgtctcccgaggcggcgaattgggcggaaatgcggtggacacggaagggatcagtgtggcgggtaaccaactagcgatcatctgctgatcagcttatgattttcaaaattcacattttcaggccttcccgcccacgggccaaatggtaacggagtggcagcgaaccaaaggcagcaggaggaggaggcaagccaattcggaagcaaatgctcatttctcggctttgaaattcaggccgagagtaccggctacatcatcggtggtgccgtcgtcgtcggcgttctcatcgtcgtttttgccatttttgccattgtcgtttttggggtaagccatgggaagaacggaaatactactgatggtaatctctgcaattccttcaaaggatgagaaaaaacaatacaaattcataagtttatccccataaaattatgccatattttatttaggtttacgatgtgaccaaatttctggacgaacaccccggcggaatggaagttttaatggaaaaagcgggcgaagatcgaaccgaggcattcgaagacatcggtaaatgacaatgtttta

SEQ ID NO: 47484 - DNA, 521 bp, Heterodera glycines
atgtttgaagctaaatttacaaatgccgcccttctgaagaaaattgtggaagcgatcaaagagttggtcagcgaagcgccatttgactgtacagaaaattcaatgtgtctacaggttttgcagccttatctaagaaaatattgcaattaaaaaaaccctgagtttaggcaatggatgggtctcacgtggcactgatttccctcaaattggacattggccttttcgaagtgttccgatgcgaccgcaccattgcacttggactgagtatgggcgagctcagcaaagtttgtttgggtggacgattagggcattcagaactatggcacagtctttaaaaggtgctcaaatgttccaaatcggaggacactttgatgattcgctttgaggacagtgagcaggacatggtcacgttcacttttgaggacaccaaaggacggaagcaggacatggggggaaattcgtccgctgtttcgcccattcttttggcggcggtttaccacacgtttcatcaacaaaaatga

SEQ ID NO: 47485 - DNA, 633 bp, Heterodera glycines
attaaatatatatatttattgagcaaaccacaggcacattagtgctcttatgtggcgcataaaaaaaatcaaaatgaataatgtcaaaaaatacaacaatatgaaatgtaaagtaaaataaaataaaatggaatgaatgtcaatgcaaatgtcaataaatcccttagaactcatacatagcttttagcaatgccctgaattgatttgccttatctgcctgaattggaacaattggtaatttgttccaattcttggctatacggttaaaaaaattattcttactttttgtggttgtgcgccgcattctcaaaagtaatggcctacgaatggggtcgatcagaaaaagtaaaaagtttactagcatcaagactcgtaaaacccttcataattttaaaagcggtagttaagtcagcaatatttcttcgcttggctaattctataagctgacaaatttcaagtctttctgaatatgatctatgtaaaagtccgcattttttaaaggcttttctcgtgaaaaatttctggactttttctattctttctatatctttttttaagttagggttccaaatttcaacagcatattctaattgaggtctgacataagtcttatacattcttataatagttttt

SEQ ID NO: 47486 - DNA, 1093 bp, Heterodera glycines
  unsure (1)..(1093): unsure at all n locations
acttcttaacatcgctcgagaggttcggatgcgcagtccggtgacgggctctcaattcgccgcgtggggtgggatgttctctgtgatcgactgcggcctcgtttatatgcgtcgaaaggtaaatttccatggcatttgaagaaattggacaaacattaaaatcatattttttctgcattttatgtgacttattggaaggaattttctgataattaacaaatttttcctgggtcacaccttaaatagggggggggggggcggggtcgacccgctgactgttcgtatgagtggccgaaaaatgggggggggggacttcatattttgtggacaacgacctgaaccttgaaatcctgattttccccggacttaggtttgcatctcatgaaaacccaggtaaatctggaaatcaaaacccattcatgaaagtatggattttaacattttatcgtgaaaatccctgaaattggcgcgagaaattgtgattaatttttttgaatgatcaattttatagggatgataaaaagttaattaattggcaaggcaccagggatggcattccgaggccccaaaaattttcggaattctggggtcaaaaaaatttcggaaatcggaattccgactccaaaaatgtcggaattccgtgccatccctgattggcaccacatttacgggctggcgccaaaatgaattgttcccaggttttatgtgcatttttttaaacaatcaatgtttctgaatctacaatttttcttggccgggtttggcatggaattcatttacaggctttttcaaaaatatttgtttataatatattcaaatacacacactaattatgcaatgccttataatgttaaaaattaagaacagtgacaaacacccaaaaataatgatcaaacagcaattattaatcgtattctcatgactcggactttccgtttaggaagaccctctaaattcgatcgctgctggcggtctgaccggcggtttgctctgtgcacgaatgggttggaaaacggcgctggtgtcggctggtttcggtgcagtcattctgacgatgatcgaaggggtgggcattttgatgaaccgangtgat

SEQ ID NO: 47487 - DNA, 945 bp, Heterodera glycines
atgccgtgcgctttcagaggcgggcgtcgcattgtgtgccatgacgaccgttacattctgaagacggccgccgagaaacaggcggtgatcgtgtccaacgacgagtaccgcgacttggtacgcgagaatccacggtggcgcgcggtggtcgagaatttgttgctgatgtacagctttgtggacggaaagtgagtagggagagagaagtcgggaaattttttggctaaaattgccaaaaatcggaaattttgctgaaaattgggtaaaaattaattgggatgttatttatttgaaggtttatgccgcccgatgatcccctggggcgacgtgggcccaaattggaccaatttctgacctttgcgcacactccgctgaatgctcagctgtgcccttacgcaaaaaagtgcacatatggcaacaaatgcaagtgagtgaatggcacggcatggacaaaggcgtaattatgccaaaaaaaataaatgaataaataatttaaatatatttttaaagatatttccatccggaaagagtaaacggcgtttggatcagtgcaaccgagcggttggccagcagaatagcaaacggaattggcatcgaaaattcaaaacagctgttggccgcaagtgagttattaggggggggggcaattaaaaaggcgggttattaagggtaattaaaatttaattaccgttttaatgtttgccttcagggccctcaatgatcgctgaacactcgcagagacaaaatgcttcttcttcgtcttcatcgctgttgccgacgacagtacggcacaacaacgtgggacggacgcggtcattaaactgcggcggaggcgtaactgttgcgccgccactgttggtcggattggcatcaccaacgacggcacaaatggaggacgagcagcgaagcaaacagcgggaagagaaccaacaaacatcgattacg

SEQ ID NO: 47488 - DNA, 1180 bp, Heterodera glycines
atgtgcaggtatttaaattctacacgagtaaaagattgcattttcacttacacttaaattaaggaatttatgcaatttactgccaaattaattgcggagagatcggcgacaccaagccgaagttcagtgaaagagggcgaatatttcatccactgtatggtgcgacaagacaatttagtcggtgtttgtataacggacgaacagtgcgtgaattggtttttaattgaaaatttaccattaattatattcattcaactttataccaacctaaaaacaagataatgagatagaaaatggttacaatcggagtcgaattttgcaaactgaaatttgccctggggcgggaaaggtgtcccaatcggaggggttatatcatttatattaagcctcaatctgtacaactccaggtatcaatctcgggtcgctttcactctgctcaacaaagtgttgtctgactttgccgaacgaattctcgaattggaatggaaacggatgagcggcgagtccgactgttcttatagcgaattgcctggatttctcacccggtggcagaacccacgtgaggcggacgcactcacccgagttcaggtgaaaacatttaaatagaggcggggcaaataattaaatcgaacgtataacaggacgaagtggaggagacgaaggcggtgctgcacacgacgatgcaagcggtgctggagagaggcgagaagttggacgatctgatcaaagccagcgaaaatctgtcggatcagagcaaaatgttctacacgcaagcgaggaaaatgaacaaatgttgcagctacacctagccaagacagagcattccgtgattttatacctatattcaggcctgtatagtgaacacaattgttggttgaggttgggcgccatcataattttttaaaatttgtaaaaaaaacggtgggcatttttaaaggcatcgaagtgtttattttgaagtcctcatttctccccggatatgggcctgtcaaaattcgaaccaacacaaatgtttccatgagattcctttccattatgtctcttctatttgctatttatattttctacctttggtcacattcccgggatttcttcaaattgaataagggcaaaacgtgtgaccctttcatatttatagaaatctccttgtaatttagtgacacatttttcccaattatca

SEQ ID NO: 47489 - DNA, 540 bp, Heterodera glycines
atgtcaaacgagttttattattcgaacaaatacgaagacgacgaatacgagtgagcgaattggagttcacaaactcattctttgacatttgctcctttgcaggtatcgacatgtccacgtcaccaaggaggtcgccaagcaggtgcctcacaatcggctcatgtccgagtctgagtggcgaagccttggcatccaacagagtccgggttggttctggagtcacctttgactccatttgttctgcttcaggatgggttcactatttgatttggccagctgagcgtcacattttgctctttcgccgtcccaagccgaaggtgaacggcgctcagaagacgatgatgaagacgactgccaatccgagtcaagtccgagttggctgattttgggatgccgatcgatcgagagcagatgaaaaagtaccgcaatcaattccaatactcccactcatcacaccattcctacgtatcgccgtcgacagtctttctatccgatcaaacaccaaccaatgtgctcttaattacctgctgctgacttaaa

SEQ ID NO: 47490 - DNA, 1174 bp, Heterodera glycines
atgatttttcttttagttaaatgtgatgaaatgctgtacagaagcataattgacgaaatgtgggcaaaattggaggaactgaagcggaatgaccggcgcgggattcaggacgtcactttgatttggccatttgtgaaggagttcgttgaagagattggcgcgtggagaggtgaactttcaataaaacaaaacaaatttccaattcgtttttagagcgacagcagcaatcgaaaaaggacttctttattcgtcgagcatttcaggaggtgagttattcaatccattgtccgtcacttaattttaccggactaaaaacggaatttctcagactaaaaacgcgagtccccccgttctggttaccatcgcgagtcctgacctggtcgatgacgagcccaagtcattgacagcattgcgcaaaaggcgttcggtagaagcacaacagtcgccgaattcttcggtgctttttgtcggatcggttggcggatgcacgccgaaaatgctaaattggacattgaagagggaagaaaaacggtgtgaaaatgaacagtcaaaaaagagacggaccgaagacgaaacggaacagcggaagaacaaaacggaaaaggcggtgaaacaggaggtgatcgaagtggacgagcagaacaaggaggaaacggccaccaaagaggcggcgggaaaagaactgacgagtgccacgcacagtcagctgaatgttggcatggcatcaaaggcggtgactttggacatggacaaatggacggaaaaagcaacgcgaggggaggaaattgaaaagggaggcatagaggaggaggacgactcggacgtgtacacactgtcatttggggacaaaacgatgttcgaaattgtcgaggattctccgcaaaacgaaccgaaaacggatgaaacgcagccgctgaaggaggtcaagcgggagccggaagaaagtggcagaaaagaagatgagaatagaactgaagatgaaccggggagaggggaggaagaggaggaaatgaactcggaagaggaggacgaggaagagggggaagaacaaagcgacgaagaggaaggcgaagggacggggagcgaaaggacgggcgcttctccccctccccctccaaccccagcggacaagacattggcaaggccgtattcgcccatcaaatcccccgggtaa

SEQ ID NO: 47491 - DNA, 1919 bp, Heterodera glycines
atgctcaaagagtgcgaagagaacatcaaagcggcggaggaagcgatggaaaagcaacggttgtatgaggaaaatgtgcggctgggccgagtgaagaaaaagggcaggagaagcctggtgcgttttttaaaagcggcgagggtcacggcacaaaaattgatggcacttcctcatcaaaattcggcctttttcggcaaacccaaatttacaataatttttggtttgccaatttggcataaattcggaacgcatcaagctaaaggaagcaaatccccgaaaaaatccatttgaaacactcggtgggttgcagaaaaaaacggggatttgtggcttgctgtttgtttcccgctgagaggagaattcttcttaaaaaactaggaacttgaaaaaaaagttagaaaaattatttttacggttttttcaaaattatatatgatgtactaatattactaattaaaaaaaaatttcaaaaaggaaattttgtaaaaaatttttttttaaaaatctcctttaaatttcaacaacacccgatgaatcattttgaaaattggaaaaattgaacttgcttttaatttttagaaaaaatcttttaattttttccatttataaattcttcatttgtgcaaaacaatttttgccccattttaattttgcaattttatctcgcaaaatgcaaaattgaaaatatgtcaattgggaacaccaagaaaaaggccctcctccgtatctcggtgaacagtgaacacctcaaaattcatgttttttttttcttatttacaatttatgaccggagggaaggggggggggggcgaattcattccgtaattttccatttttccatcaaaaaattgcgattttgggcctcccaaaagcgttgtaatttctttgataaaatgccactttttttcttttttggtaatgaatgccatggtgccatttttgtttttggaaatgcagcaatttatcatccgtcattttgtcattgtgtttgattttttttggcaattgggccagaaaaaagcattagttggccgtcgctccccccgtcccccaaatttcatatttttgtgtttacaattagcgtaaaattggaaggaaattattattacatattgccattagcattactgtaccgtaaaatgatgaaaaacatgtacaaaaataactaacattccttccttcccacggcattttgcgcattcgatggcatttaagtggtgaccgtttccgaaataaaattatccatttttgggtttcacttcattcacagctcatgaagaagtgagaaattgctgcgcgcttttcttcatttacataaattagcattagtaataaagaataatttttttttgttgaaaaattcctaagatttcaaaattttttctcaaaaaacttagtaattcctcatcaaattctaaaaaaatcgcaaatttttaaatttcattataaattttttaagttttttgagaaatttccgcgtttgaaaatttttaaaaaatattttcggggtggggagcctagtgcacccatattccttcttcccctcttttccgtttccaacgcattttttaaattaaatttataaaattgaaatcgcttgcttcttcaaggcggagctgaagcgggacaagaaggaggccaagaagcgggcgcgccagcagcaaaaagagcagcggaaaagggagcgggaggagcggcgccagcagcgcaaattggcggcggcgacgacggcacaaaacggcgtcggcacaggcgcggaaacagaggaaatggcggagcgcagacggcagcgcaaggagcagcgccgggaggcaaagctggcggaaagggaggagcggcgacggcacaaaatgcagcagcagcaacaaaaacaacggcacaaggaggagaagcagcagcaccaacaacaacggaccaag

SEQ ID NO: 47492 - DNA, 879 bp, Heterodera glycines
atgtttggatgtattaatggaggaaagagacgcggaaagggaggcgtgaaaggcttttgtaaagtgagcaaaaatagaataattgcaaaaaaactttatgtacttaatttacggcttctattccaaaccacgttcatttaaaacaatttaagagaaaattttatgaactttaaattttgtttcgagggccactaatgcatttgtgataaagttttaattgtttaaatgtgtaaatttttgttgtttttccaaatagtgcatatataattattacctattcatattttagacagggcgtcataacatccaaggcatcaccaagccggtcatccgccgattggcgcgttgtggaggggcaaaacgcattcccggcatgaactacgatgaaattcatacggtaccaaaaaatgggcaggaatacttttttcttttgttcaacaaaaatgactatttttgacaatatttgttattcttttcgacacactttccatttttcgtaattttttcaaaaattatccatattcagtcaattttcaggtttcgttatatttcacaattattaaaaacgattagttattttctaaaattaaagcaatgattaactaaacgcattaaattttttcaggcagactatgacaacatccaaggtatcaccaacatgaccatcaaaaattttgctcgtcttgatggagccaacgacatcttcaacatgatcgatgagcaaatttggccaaacgattccaattttggaacggtgaatatttcttggttttcagaatcaaaaaactgaatgattataattaattaacaaaaaatatattaatgtggcaaattttaacaaatccatgtagacacaacaggtcaaatctcaaaatggta

SEQ ID NO: 47493 - DNA, 504 bp, Heterodera glycines
atggacggatgggaggcgcgagaactaacattggccagctcgggcaccgatcgccgtctgcacatttgggacctgagcaaaattggcgacgaacagtcgccagaggacgcggaggacggaccaccgggtgagtggaggcaaaacggactaaaatggatccttttaaagaactgttgttcatccatggcgggcacacagccaaaatcagtgacttttcctggaaccccaacgagccgtggtctggaacaaatttcaatttttgtaattttttgtgtctttttcacagatttggcagatggcggacaacatttacaacgaggaggagttggacccggcgatggtggaaagtgttgcggccgcaagcggcgccggtccgatgggccaacaacattgaacacaccagaacatattcaaacaaattctgaagctaattgatgatgatggtctctgtttcctcaacaacactaaatatttattttctgtcatccatttttatgtttttga

SEQ ID NO: 47494 - DNA, 981 bp, Heterodera glycines
atctctcccctcgcccctcaaggcgttcgatcaaaatcatcaccgccacccctcgcgcggttcggccatcgcctgctgccagcactcacactttgatgacagcatttgcggccgctttatgcgccgcaatcgctacctcgcgccccattccgccgaaacggcaaacggaacctttggtggcgcattgcacgcggacagaaacgggggcggcaaactgaacggactgagcggcgcactgagcgggtgggacatcagtgaggaaaactgctgggagcagttggaggccaactcggaactgtactcatcgctacagatggacatgccaataaaaggtgccaaaaatggacaaaagagcgaaaaatgccaaaaagacagagtggcctttttcactggttgtatctttcagtgctcaacggttcgccggggtatataaacattttggacggactgaacgcgtggcaattggtgtcggagttggcggatgcgaccggacaaccggcagccgcctccttcaaacagttcagcccggcaggggcagccattggcgtgccactgaacgatgccgaggcgcaagcgcttatggtatttatgggagagagataaatccgtaaaatcctaaatcattgctttccacccaaaaggtctccgatttgcctttggactttcggcggcactctttggcagttgctttggcacgtgcgcgaggtcaattcctttttttatgtgttgattttctatattttctacacatttatttttccgtttccttttcctgtatatttcttttccaaatttcaattcagaacaaaattggccattccaaacgccaaattcaaacaaattaaagcaaatcgtcggtacagtaccctcctctgtctttaccgtatcctgtccttatctgttctgtcctgtcattcttttttattttgcttttcgcaaagattagatatcttttgtttagccggagtttgtttgttttat

SEQ ID NO: 47495 - DNA, 1325 bp, Heterodera glycines
  unsure (1)..(1325): unsure at all n locations
gctcaccgttcgaatggtcataaaaaataggatgatgtaaaataaaaatatttcatgcatgatgactgataatacccctnttcattcgattgttgcattatctttccattntaagatcatcgatgtgagcaaggctgttgcactgctctccaacggcactctgatcaaactgctgcgcagcaaagagctgtctcaccgcgtcaacgccaaggcatggcccaccattttggacattgaggacgccccgtcgctgtccgtggcgcgcagcaaagtgcggaaggcgggcagctctaccgctgctgttgagccgtccatcgcacgacagcccgacgacattttctatttggttggcatttcatcaattcaattttaaattgcctttgtaaaactgctactaatgcgtccccttttttaggactttgctgtcagcaccactggacaactctcgggcattgttgttactgctgttggtgccgcgaaacagtgcaaaagtctgaaaatggcctgcgaactatacccttcccggactgtcaccgtctgcctggacccttactccggactcggcttcactttgtggtgtctttgcaggtgctttttattggcattttccaatgtgcgttcgtttcgttccccgtttaattgtaccttcgttcagtgtctattccggtcatcagagcattctgatccctccgctggagttggagcagaacccactggtgtggatgcagacgctgagtcagcaccgaagcagggacactttttgcacgtattccgtcctggaactttgcctgaaggagctggcgacccaagtgggacagctgagggagaaaagcgtcaatctgtcaaggtgtggtggggagacagaaaaatgataaaacatcaaatagggcgaggggcggggttatttcaatttgttcggtttgttcattgcctattgttctgttctcctcgtacagtctgcgcaattgcgttgttgtggcagaggagcgtccccgcgtgcagttgtgcaacgcgttcatcaaagtgttcgcgccgctcggtctgtcgccccgggcggtgagcacttcgtttggctgtcgcgtgaacccggccgtgggcatgcaaggcgcggccagccccgaccccaccgttgtctatgtggacgctcgtgcgttgcgcaacgaccgcgtgacgctggtggaaaagggtgcgccgcatagcatcgcattgatggagagcggaaaactgttgcccggcgtaaaagtggagggtggaaaggaacaaaatgctgacaaaataacacggttagaaggccacagactctgatcagtttgctcttgaacaaa

SEQ ID NO: 47496 - DNA, 1108 bp, Heterodera glycines
atgcaagaaactcacattgtcctcggcattgcctcgctgtgctctctgctggcaattatcgccaccgtagtcactttgccatcgctgtactcggagatgagccaactgaacaacaaagtgcgcgacggcgttcaagtaaaaaacaattttaaagaataccgtaatttattaccgtattcccaaggccttccgtgtcaacaccgactcggcctggactgacctgatggatgtgcaagtcgtcgtggcaccgccgtcaaaggcccgtgacaaccccttcagctccatcttccgtgccaagcgtcaattgcctggccactgcaattgcggtcccccacaacggccaaactgccctcctggcccacctggtccggccggaccgcctggccaacccggacagccgggaggcgcaggactgcaaggacagccgggagcacctggccaacctggtaagcatcgctacacataattgccataactcgtctcacatagctcctccgtgcccgccccagaacatcccttgtccacgctgcccggctggcccacccggcagccccggagggcagggaccgcccggacagcaaggagcccccggccagcctggtgcgcccgctccgggcggaggacagggaccgcctggcccatccggaccccaaggacagcctggacagcccggacgcagcggaacacccggccaacccggacagcctggaaataatgctgttattttgtaagcattttgatgggctaacttagtttaaatatcattttcaatgtttagcaacaccattcctggcccgagaggagctcccggagcgcctggccaacccggaagccccggcagccaaggccaacctggccagtccggaggccaaggaccgcctgggccccctggtgcgcctgggctgcccggcctgtctggcaacagcggtcagcctggacagcccggggcacccggccaacccggcaaggacagcggctactgcccgtgcccgccccgctcttccgcgatggcactcaaaaagaaaatggcggcggtcaaaaaagcataagcgaaaagtgcaggggaaaagcgaagaaacgagaagaagacataaagcgattctgttga

SEQ ID NO: 47497 - DNA, 2075 bp, Heterodera glycines
ttacggaaaaaaataaatgaaattttaggagtgatgttgccgaaattacgccattttcactcttcccgactccatttccgcgaaatttgttccgattagcagaaaaagtgcaaaaggtcattaaagcaaaatcatttatttatttgttttttatttagctaattactttattttaaataattgttttccttatttgtttaggctttcaatttgctttactttcgcatttcaaatgattttgactttttgtcggaaacattcgaacctgtcgcgaaaacaaacgaaaatgtgagacgaatgcttaacattctgaaacaggtccatgacgaaggcatcaaacaaacgaaaacagtggttttggcacgatcggtgggagttttggcaaaaatattttatttaattaatttttttttgggtatcgaattatatttttcttaaggattatatgtgccatgtgataacagacaaagaaacaaatgaacagaagtacgagctaaaacaggtaaatgatgggctaactaaaaattagtttaaaaataaataaaaattatttttatttttcagattgaaatgaatgccggccaaattggtgggctttccgtttcgagtcgaatcacagaaatgcatcggcggacattgtggagggcgggcattgacgcgacaaaggaccaagtgccggacaatgaggcgggccttggtgcggcagaagtgttgtacaaagcgtggtgggagaaattttctttaattaatttaatttttcgttttttatttaggaaagctttcgccgacccaaatgccatcattttgttcgttgcgagccgaacaagcaaaaaccgttatggccagcgtcacattgagtacgacattacgaatttggcagaagaagaaggagaagcactgcaaattgtacgcttgtctttgcccgaatgcgctaaaatgtacaaagatggaaagtaaaatgctaattaatggtttttaattaaaatatttaatttttcttttcgattgactcttaacgccgacgaccattctttgcaattggagggactgacagtgggagttgtttacaaattgaatgagcctccgaaatacagtgaacatgattgggaaactcttttgttgttcgaacgttcaacaacaattgtatgcatttgaaaaataaatatttatattatttttattttatttttaattaacaattaaataacaaagcaaatgaaattaattaatttcatatatattaattaaatgggcatggaatttggaagaaatgccaaaaaatcagtatacattctcctctgataatttactctttttagatgtctccaacaattgctcttgatttagccacacaaaagaaagtgcaacaggtggcagacaaaacaattttaagattatttaaaaaataaatatttccaaagattttggcgaagcccggcatggtggagcattatttggaggaccaattggaaattgtgccgttggtaagaagcactttcgcgggcctgtggagtttgactgacaaagacgaagacacgcaaaaagccataaacgtataaaacaaatgaaataataatttaatttgaataaataaaaataaatattttagcaataaatgattatttttttatttgataggatgccattgttcatcccgaaaactatgtgataaagccgaacctggaggggggtggccacaacttcttcgacgaaaaactcagggagaaactgcagcaatttaccgacgaagaacgggaggcacacattttgatgcaaaaactcagcgcaatgcgcgtaaaggcgaggaaaaaataaataaaaactgaatttacaataattcattttaaaaaattattattttttagaattttatgatccgaggtcataagaagccccagttcggtgaaatgaccacggaattgggcatttttggctttttgttgggcgacagaagtgagggaaaagtgttgcacaatgtccaaagagggcactttatgcgcacaaagttggcagaggttaatgagggaggcgtttctcatggcaccggcgtgttcgactcggcatttcttgtgccg

SEQ ID NO: 47498 - DNA, 1845 bp, Heterodera glycines
  unsure (1)..(1845): unsure at all n locations
atggttcatattgtgttcgacccaaacattatcggatatgatgagtacatgcaatacggaagtggcatagaaagcgaggattacttccgagggtccagccccttccaacgagggtatggacaacgaggcgcaggggtgggggatgtgtttcgcggactttggcgctttttccttcctattcttcgtcgtgttggcactacagtaggatcggaggcactgagcacggggcagcgagtgctggagagagtgggaaacgaaggagtgccatttaaggaggcatttgtcagcgagggaaagaaaggaattgatacggtgcttgagaagggcggcctgccaaaacagtttggcggtggtcgaatgaagagtataaaaagaaaaaaatctcatgcaccaagccatcagaccataattggacggacaatcagcaaaccaggaaacaaacgtattcgttcagacgcatttggactttactaaataaatggctttccataaaattgataatgacagtgcaaactcaatcaccaatgccttagacttttttcgtattccacccaccaatgtgagcgtctcttcatcaaaagtgtttgagctgcttcccagtaacccactgacggacactccctaccacttcaagcttcattccagtcaaaactttattgatttgtccaaatgctacttacaaagtgaattccgaattcgcaaagaaaatgagcatggtcagctggttgacctcacagcagatgaagttgctccgatccagatgatcggtcagactttcatccgaaacatcaaaatgagcataaatggacgtgaagttttcaactccaattccctgatggcctacaaaacatacttctcacatgagctgtcctattccaatacggcaaaggactcgcatttgaatgcggcgggctattaccgtgacatcggcggctcgcttgagaccggggatggatgcattgcgcgacgcaacctgtttgcaggaagcagaacagcgcaattcattgccaaaattgacgccgatttgttcaaccaacctctctacttgatcaacttctgtgagctggacattgaaattttacccaacgacaacgagtttgtcctaatcactacgcccgctgttgcccagggtgctgcagctgctcctcgttaccgcttcgaggttgtcagtttgaaaatgtatgtgaaaaaagtctcattgatggatggactggcgttggacattgcgcgaaaacttgaagtgaaaccggcacgatatgctgtgaggaaaacgctgatgaaatcaatgttcattagtcatggacgtttcgagtttacagccaatttgttcatggatcaaattccccgtcgtatcacaatggggttagtggctaattctgactatattggaacaatttcgcgcagtccgtttaacttttaaccgtttaatgtgcgcgaaatctcaattattgctaatggccgctcctttccccaagcgccatacgacttggactacccaaattggaaatatgttcgccctttcaatgacatgaacgaagcagtgggattcgccaactcattggaaagcaatggcattagctatgaacagttcggaaaaacccactgcatttatgtgttcaatttgaccagcagtggagatgatcaagctgcgctgtttgacctgataaagaacgggacaacagcggtgagcatcaaattcaaccaggcagtacccaccggggggataatgctggtggtgatgngcgaatgcgactctcttgtgatgttagacaaaaatcgatcaattagcacagacattactatttaaggctgtcattttttgtatgccactatcatttgaataaa

SEQ ID NO: 47499 - DNA, 1437 bp, Heterodera glycines
atgacttgcgggttggctgtgaaacgtccgttggaccttggacaggacggcagtttggtggacgtcaagcggccgcgccatggcggcgcatcgccacagtgttcaccgtttcgaccacagctcggcattctggccacttcattgatgcaatccgtgccaccaaaggtttttcgcgctccccaaaatcatggattctcatggcaattttttcaataccaaataaggaggacccttttgggttccaattttttttttgtctcataaaactcggggaaaccatatttctgggagttttcggggtcgctaattattttaagacgtacaacaactgattgctcttcccgtccaatttaagggcttttctagcaattcgcatccattcggcccgggctcggcattttgagtccccgaaagcgctgtcgggtagttgacagtatgtgccaaaatccggttttttctaaaatgccggtccggatactggcgcaaatctggctagtcctgcgctctaataaaattattgtgtctgcataaccgccgccctctcatttttaggtgcctagtcctcctgctttcactggtactgcttccgccggcgttggccccatcggcaatccgtcctcaccatttgcggacgtgtccggccgttgtcgcttgtccagcacccagctggactcgtacttgcgtgccgaaatccaggcgctgaaacggcgccggctgatcccgcgccgtcagggcaattttccggaggaagggttcccgttgagcaccaccaacgttgtcgtcaatgccaacaaaggcactgccaccgctgtggcggcgtccaccggtggcattgttggcacgccggtgagcagcaccagtggcaacgcgtttcgcaaggcgacatctccgtcttcatcaaatgtaagcggtgccattgtaaaaacgggtttttagtgtgttcgatattccgagaattaaacagagcaatggaatttattggaatctcggcactcgcatagatatagtggccccgaaaaatgttgaagttgggcgtacatttttggtttgcaaaattcctttctcttaaaaaaattaaaccaaaaacgcaaaatttggtcattttggacggttaaaaattaaaagattttttcgcggcttattgacgtagctccggcgcagcaccatttgcgcatgtattaaccaatttcgaatccttaacatattaaaaaaaccgaaatttgaaatgaacttttgacctagcatcccagcaaaaaaataaaaataaattttcagtcctcaggactcggagggtgaagcaatgcggaccggcaacgctgatgaggagaagcgtgccatgctcgaagcgctctaccagaatccccaattttcgctgcgtcaggtgaagctgatctgtgaacgcctgctcaaggagcaggaaatgcggctgcgctacga

SEQ ID NO: 47500 - DNA, 1436 bp, Heterodera glycines
cctatcaattccctgcaatttgcattttattgttttcagctggtagtcggccgaatccgcagttgtcccgattggtcgggtggggaggacgaggacgtgctcagtttgggccttttcccgggcacttacctcgaattctccatggacgacaggtggatttttaatcatattaaatagattaggtaattaattacaatttcctttttctttcgcagggttttcttccaatttgaggccgcttgggactcttcgctgcacaattcgccgcttctcaaccgcgtctcgggctacggcgaaaacgtttacatgacaatttcggtacacaattcaattcaatttaataattcaattaatttattcattttattaattgtttaggcgtatatggaaattgaaaattgtgcgcagtcggcaattatcaccaaagatttgggtctgattgtgtacgcacgggactcgaagatcagtgcggccagcagattttgccggtcactgatcggcggaatctcaaaaagcgcgggtaaatgggcgacaaaaatggcaacaattggcctaccaagcatttgaaatttttgggtttttttgacgtgccgtcatcgcccccttttttgtcggactttccaatgccaaaaatgcctatttttaacattttgccttcttctgcttgcaatgcaccgcttttcgatgccttcagaaatgaaccgtgtgcccggcgtttaccttctcaccgtaatggaggacagtgaggcgaacaacagtcccggcacggcacggagaaagcggcgaattttggacacatcgtcaacatgtgggaagacagctaacaaaaaagagccatcggttcattctttcattttccacagatgtgcgaggcgaagaaaatcttggcacttggaggttggcggaggaaaagcgaaaattccaattaaaaataataattaaattaaaattatttaggccccgaggggactcaatcattttggagcaccaattggagttggagaagctgagcaaacttcagcaagtggagcgaatgcgactgttccttatggtcagtgcttcgcatttggaaaaatatttttaatttagctgagaaagtcgcgcaaaacgggcaaaggcgacacaccggtgggaaaagtcgaaaaataaatatttaattattatttttggaagatttcaccatgtttgcccaaatttcccattccgaattctgtgaaaatgagtgaaaaggaacgaaaattggccacaaaagtgttggaattgatccgactgaaaatcccagtgaacaaagacccaccgacgggcaaaaaagtgggaaataaatgcaaatggaaaaatacatattcaattgatcgtcagacttttctcggagggatgattcgaacacttttattcataacaaacggcaaaaatcgaaggagaatgatgaacttatt

SEQ ID NO: 47501 - DNA, 1692 bp, Heterodera glycines
atgcatgttgattttgatcctctacaagtggattggtccacattctcgtccgagtatgtgcaatttggtggatacaacatttaccggggattaccctatcagcgtggagcgggagttggcgcagtgttcaggagccttatgagatacttgctgccgataggaaagcaaattggctctgcaattggacgtcagggaatggaaagtggaaaccgcgtcctcaccaatgtgttggagggaaaagacctcaaagattcgctcgttagtgagagtaaatcaagactaaaaaaccttcttgaaaaagcagccaacaacataaacactcagaagggccaaggttttgattttaagcgatacaaaaaagactcgactccaaaaattgtaaaaattaggcgaaaaaatataaataaactgcagtcatcaatcgggccacctatggttgctaaaaccaaaaataaacgtctgcgtattgactcattaggaacctactaaaaaaacgacttgcccacaaaaaatcagtgacagcagtccactagcaattaacagtggtctgaatattttctcagttccacctaccaatgtgtatgttgttcgttcattctttcgtcaggtgcttccgctcgcaacaatcacgcaagaatcgccttacctatttcggctttacagtgacaatttgtggactgatttatctcggatatatctttatctcgaactgtacattgaaaaaccgggagcaaacgataaatgggttgcgatagaggacgcggatactagtgtctctgccattcaagggattggtcaaacatttgtccagcaactaaaagttacggttggcaacacggaagtatacgatagcggaaacctatacccattcaaggcctatatcaccaatgagttaagctttccaataaatgccaagaaaaattttcttggttcaacagggtattatcacaccttaaaccaagatgactcaacagacgaggggttcaaagagcgttgtaaaatttttaagagtggtaaaaatgcgcaattcctctcccgtctcgactttgatttgggaaaccaagagctttatctcttaaataatttggacttgctcttcacaatttacaaggccaaagatgtctttcttttgcaaacattaaaagcaaatgatgcaacgaaatatcgtttggccgttcatgatgtcaagatttatgctaaaatggttgaggtacaaccctcactaaatatgagcctttacaaaacacttgaaaaacaacccgccacgtacgctgtacgcaagacggaaatcaagtcttcattcatcagtgttggtcgatacgaatttgagtacaatgtattcagcgcgaccattcctcgacgcgtaataactgcgttggttggcaattcagcatttcatggtgactacaaactgagtcccttcatgtttgagccgtttgatttgcgttaaatttcgatacatgctggagggattgtctacccagctgttccttataaactaaatttttcaaaagatcactatgtctacgcctttgttgacatgtatgaggcactgggtatggctaattcggagcgttcatttgacatctcattgtcatgggagaatttgatcaaatgattatggttgattacaaccggcacattgtgaccgattcaaagcttggataaattataaataactttattattaaa

SEQ ID NO: 47502 - DNA, 1320 bp, Heterodera glycines
atgacttgcccacaaaaaatcagtgacagcagtccactagcaattaacagtggtctgaatattttctcagttccacctaccaatgtgtctgttgttcgttcattctttcgtcaggtgcttccgctcgcaacaatcacgcaagaatcgccttacctatttcggctttacagtgacaatttgtggactgatttatctcggatatatctttatctcgaactgtccattgaaaaaccgggagcaaacgataaatgggttgcgatagaggacgcggatactagtgtctctgccattcaagggattggtcaaacatttgtccagcaactaaaagttacggttggcaacacggaagtatacgatagcggaaacctatacccattcaaggcctatatcaccaatgagttaagctttccaataaatgccaagaaaaattttcttggttcaacagggtattatcacaccttaaaccaagatgactcaacagacgaggggttcaaagagcgttgtaaaatttttaagggtggtaaaaatgcgcaattcctctcccgtctcgactttgatttgggaaaccaagagctttatctcttaaataatttggacttgctcttcacaatttacaaggccaaagatgtctttcttttgcaaacattaaaagcaaatgatgcaacgaaatatcgtttggccgttcatgatgtcaagatttatgctaaaatggttgaggtacaaccctcactaaatatgagcctttacaaaacacttgaaaaacaacccgccacgtacgctgtacgcaagacggaaatcaagtcttcattcatcagtgttggtcgatacgaatttgagtacaatgtattcagcgcgaccattcctcgacgcgtaataactgcgttggttggcaattcagcatttcatggtgactacaaactgagtcacttcatttttgagccgtttgatttgcgttaaatttcgatacatgctggagggattgtctacccagctgttccttataaactaaatttttcaaaagatcactatgtctacgcctttgttgacatgtatgaggcactgggtatggctaattcggagcgttcatttgacatctcaatgacccagttcaaaaaagggtgggccttttttgtcatgacatccacacttgacgacagctgtggatttgagctgttgagaagcggcacaacaaacgtacgagccacatttaattcaccaattccagttggtggtgtggagatgattgtcatgggagaatttgatcaaatgattatggttgattacaaccggcacattgtgaccgattcaaagcttggataa

SEQ ID NO: 47503 - DNA, 1399 bp, Heterodera glycines; identical to SEQ ID NO: 18212
  unsure (1)..(1399): unsure at all n locations

SEQ ID NO: 47504 - DNA, 679 bp, Heterodera glycines; identical to SEQ ID NO: 3019
  unsure (1)..(679): unsure at all n locations

SEQ ID NO: 47505 - DNA, 3551 bp, Heterodera glycines
cgaactgtggacggcacgcgtgccatcattgacctgttttgggacgagccaaaggaatggaacggtgaccagctggggtatacggtaaactgcactattgtagctactgtgccagccggccaacagcaaggcaccagtgatgtgcaatcaggtaagatatttaatttaatttaatttaatttaatttaataatttaataagtaaatttttaaattaaattaaattaattttattttaattttaatttaattatatttaatttaacaaagttttaaaataatttgtttttttaattaaattccaataatgatttttaaataatatttgcgcttttcccagtcaatgcaacgcttcgtcgcggcacaaatcgtgcttacaccttctcagtccgatccggcaaaatttcatgcctgatttttgcgatgaatgatcaacgccttgttggccctccatcatcgccagcggccgaaattgatggaagcggttggttaggagaattaatattttaattaagagttaatatattttaactaaaagatatttaagtaattttaatatccaatattttgctaatcaaaaataaatatttcaattaagagatatttatttatccaatattttgctaattgacaataaatatttcaattacgagatatataattagcaaaaaacttccttgctaatggagccaataacaacacaaaactgagaaatgtgcaaattttaataaactttttgtataatttctattaaaaaaaaaaatattatggtccgttggcattccaatgctaaatatgttgccaaatatgttttatataacattttgccagagttcaagccgttgatccgtttgttcgccatcgattccactgacaatcttgtggccatccaaaattggaccattgagtcggtggtaaagccgtctggcggcagcaaagcacgctttttggccaagaacagaaagcgacgacaaattgcgcatacggtaacaaaaaaaaaattttaaaaaatgcttggcattttgtattgaataccaattttaaaaaaatacacaaaatgacaattttttttttacactagattcaatatcaagctatgacctatgtgggaggtgaactgtatgcaattcggaaggagcctgaaatgtctcagttggccttggttaagctggacatcaatcaagtggataccgtaatcttcaaggtccacatgagtgtagtacatgatttttttgaatattcttttaaaatatatttttatttatttatttaataatttattttgactaactaaggcttcattattgggcgaattttctcaaattgatgcaatggcagctgattgggtagcaaatcggcttctgttagtgagcaaacgtgaactgatgacagtaaattttatacacataaatgaaggctaattaattttgtaaatttattaaatttgaattccgataaatttcaataatattttcactatgctgtgttgtagatacaccttgatcagctgcaagattcgcccagcactgtgctgttgaagaagctgttccaactgtcactgggcgctcaggatgccaaacagctcgtttttgacccattcacgaagttggaaaaccttatatttgaagacatttttgaaattttaaagtcttaaaattttgcctaactctgatcagcaaagactatataataagtagggcagcaacttttagtgaaaaaactctttttttgctcaattgttttgaagaaaggagctcaaaaaacgcatttctgcgttaaaattttttcatttggacgtcacttttcgtcactagaaatcactatttttggggttttgtcactaaaatagttaaaaatcactatttttggcgttttgtcactatttcgacattttttggaaaattccttaacaaaaatgcaataaaaccaaaaaatacacccctaagaatcgacctaaaaaaatttcaaaaaaatacacccctaagaatcaaactaaaaatttttcaaaatatactcctatgaaatgaaaaaaattttctcaaaaatttactttcttggcaaaaattttaattttaaaaattttttaggaactatttttgggtttttggtctaaaaatcccagtcctactcatttgcactgcaatcagtgaataaaaattattttggcttattttttggctgaaaattatgtcactattcgtcactattttggactttttgtcactatttcttcactattttgggatttttactcactattttagttaactatttcgggatttttcgtcactaaaagttgctgcgctaataataagatagaaaaaaaccatttaagtgatcagctcgattaaataatagaccctgatcctatcattttctctttcctagtgatcagaattagttcaatgctaattaatcaatccctgataaatccaagagtaatcaatcagttacaattaattcttgatcattttcccattagcacagcctatttgttgaccaagaatggttcactgttttcgcttgatctgaacaaaggcatcgagagcaacttagaactgacaaccggttgcctcaggcaaaaggtaattattttaatgaatgatttgatgaaggcacaacacacaacactcactaattagcctaattacataaatttgttcgcttaattaagacgatcacttcaattgtgggcgaattcatatggaacaaagcaacatctccacaactgtacgcactgacatggaatgggctgatcgagctgaagctgaactcggacaacaattgccctgacatcaacgtcaattggtcactttttgggggtgaggcattttaaaataattaaagattttataatttgttaactctaaaccaactaattatcaaatagcttaaaaaaagtataatttaaaaatctaaaccaattaaatgacaaattcccgatcagttttattcgaaaaattttttttgataaaataaacagtcaaataataatttttgagagtaaaaataacatagaaaagcaaaagcaacaaacatacaaaattgtaaactgaactgacacgggaaaatatccctgccatggatttggcctgttgataaagataatctgatcttgggagattattcggccataattttcgactaccgataatattgataaaaatatttaattaatattcggcatttaccgctcaacccaaacagaaagtggcctgaaagcaatttcgttgttcactgttgcggacaaagtgttggtgtttgccaccccaactgatctgctggtgtacgatcggcaagcggctgcggtgtcccaattccccagtccaagcccaccaattcgtcaactgttggccgtctcacagtcatcccaaccattccctgatcgctactgtttccagctgccacccacaaatcagatcaacttcaatgtgaaaaatgaaggtataaatgtgccatttatcaggaaaatgcgtcagtcagtgctactataatccaagaataatgtagtccacaaaaaacaaaaaagcgtggtttggtgcctccggcggg

SEQ ID NO: 47506 - DNA, 877 bp, Heterodera glycines
cccgagtcggcttccaacagcgattgggcccggtggttttattatttgggacgcatcgaagcgttgaagggcaccgacgccgagacgtacaaagcggcagagaaacattttgaggttttggcacgagccaatttttaagggttgtacacaaaatttgaaaaagtaaaattatttttgtaacatctaaaatttgggtcaaacaattcgctttgaaattgcattgttttcccttccaaatatttctcaggtcgcacttcgaaaggccccacaaaacggcgccgtcggcttcaaacaggaagtgaacacaagcagaaatgccacattcaattgggctttaatttccccaaatcgttcgcaggtgaacaaatgggtcgtgctggtcaaattgctcatcggcgaaatccccgagcgcagtctcttccacacggccgaacttcgccacgtgttggcgccgtatttgctgctgacccaaagttggttttatgcgcggcgaatggaaacgcacatttggacatttgagtccgggttgtctctaattgtcatccattcccgacgaaaatttagagtccgatgtttccaagggcaacaattttttagataaatttcccccccccccccccccccctcctaaaaagaaaaggtgtggtttcttttttaaaatgtacaaaaattgctgagccctcatcagctgtacgccttggcgacgtggccggctttgaccagacgaagcgcgagcacgggcccatctttgtgaaggaccgcaccgctgcgcttgtcgagcgcatccatcagagcgtcattcggaccgcaattcgcaaaatttcgacgacatattcgcgcatttacgtgtccgacgtggccaccaaattgaatgttg

SEQ ID NO: 47507 - DNA, 1317 bp, Heterodera glycines
atggcattccataaaattgacaatgacagtgtgaactccatcaccaacgccttggactttttccgcatcccgccaaccaacgtcagcgtctcatcctccaaagtgtttgaactgctcccaagtaaccctctgaccgacaccccctaccacttcaagcttcactccagtcaaaattatattgatctctccaaatgctatttgttatccgagtttcgaattcgcaaagaaaatgcaaatggtcaactggttgaccttgcagctgatgaggttgctccgattcaactgattggacacacattcatccgtaacatcaaaatgagcatcaatggccgtgaagtgttcaacgcaaattctctgatggcctataaatcgtatttttcacacgaactctcctattcaacagcggccaaggactcgcatttgaatgctgccggttactatcgtgacactggtggtgtgcttgaggtgggagacggatgcactgcacgacgcaacctgtttgtaggcagcagaacagcacaattcattgccaaaattgacgccgatttgtttaaccagcctctctacttgatcaacttttgtgagctggacattgaaattttgcccaacgacaacgactttgtcctaatcacaccacccggtgttgctgcagccactcgctaccatttcgaagttgtcggtttgaaaatgtatgtgaagaaggtgtccctgatggacggattggcgttggacattgcgcgaaagcttgagttgaagccggcacgatatgcagtgaggaaaacgctgatgaagtcgctgttcatcagtcatgggcgttttgaatttacgtctaatttgttcatggatcaaattccccggcgtatcacaatgggattggtggccaatgctgactatgttggcacagtttcacgcagccccttcaactttcagccatttaatgtgcgtgaaatttctataattgccaatgggcgctcctaccctcaagcagcctacgacttggactacccaaacggaaagtatgtgcgtcccttcaacgacatgaacgaagcggtgggattcgccaactcatcggaaagcaacgggattactctcgcacaattcggtactacacattgcatttacgtgttcaacttgacaagcagcggggacgaccaagcggcgctttttgatttgataaagaacgggacgacagcggtgagcatcaaatttaatcaggcggtgccagctggaggaataatgttggtggtgatgggcgagtgcgactcgctggtgatgttggataaaaatcgatcgatcagcactgacatcactatttaa

SEQ ID NO: 47508 - DNA, 1435 bp, Heterodera glycines
gtgaaagacaaacaaacgggtgcttgttttagagccgatcacttggttaaaaatcaagtggaaactttgattcgggtatattgcaaaataagccatcattgctaaaaatttatttaaggacaaaaaaactgatgaaaaagcaaagtccgaacttatgaatgtgcttgttatgcttgatgggatgagctgtgatgacttgcacgaagtcattaagaaattcaatttcaaatctccgttaaccggcggtgacttgtccgaacccgtttctttcaatctgatgtttcccactgaaattggacctacctgtgatcagcgagcctttctgagacccgagacggctcaaggaatctttatcaacttcaaacgccttttagaatttaaccaggtattttggtgtttgatgtaattttttattttttctgttaagggacgacttccttttgctgcagcccaagtcggttctggctttagaaacgaaatttcgcctcgacaaggacttatccgcgtccgggagtttacaatgtgtgaaattgaacactttgttgacccgaccgacaagagacatcccaaattcgagaaaattgcacatttggaacttactttgtttcctgcttgcaatcaaatggaatcaaaaaatccccaaaaggttttctaatacaataccaattttaagtttttactaatttttcagatttcaattggaaacgcagtcaaattgggtatcgtaaacaatgaaactttgggttattacatggcgcgaactcatttgtttcttctttctgttggcatttcgcccgataaactacgctttcggcaacatctttccaatgaaatggcccattacgctcaagttgttaatcatattgtttcatttatctgtccgtgtttcctcaaggactgttgggacgcggagtgttttacctcttacggatggatcgaatgtgttggaaatgcggacagagcttgctatgacttgcaccagcaccaaaaggcatcgggagtgaagctcgtagcggagaagaaactcggcgcgccgaagcaaatcgaagtggtcgaagcagtgccaaacaaacagttgctgggcaaagaattcaaatccgattcaaaacaggttcacattagcattcagtttaaaggaaggtcaaaggaataggcacttctttcgtgcttagattcttgcagctttggacgatttaactgaagcacagatcgaggaattggaacgggaaatcaaaagcaatgggtttgtttactcaaatcagatcaaatttaaacaacataatattttttaattgactcaaccaataataatcaaatccctttcagtaaatatcgcttgtctttgcgcgagggaaaaacttttgagctgaactcgtcaatggtggaagttaagcgtttcgagaagactgtccatgttgaagaagtgactccttcg

SEQ ID NO: 47509 - DNA, 868 bp, Heterodera glycines
atgactttctcggcttcggggctcactgatcgaggcgctaacgagatcacttttatgatggaaagtcagcaaaccaatttggtgcagtattacgaccagaagtacaacagacggctgcgctacccacgccttcagtgcgtcattcatcgcagggggagtcaggaatcgttctttccgatggaagttttgcagattatgtgagtgatggaactatcctgttttggtaaatccatttaaaagtcaattatttgatcaaaggccaatcatcccatcttttgtttagcgatgggcagcgtgtttcgctcgacaaacaaacgccgaaactcactgagcaaatgatccgaaaatgccaagttctgcccatcgatttgccgcgtggcattgagacacagcgcgacaaagggatgattcagaatgccaacccattttttcgtgctcacgaagttcgtgttgagacgaacatgatgcaagcggaggcgcaacacctttaccctccggcactcggtttctcggcacaaaatgaacaaatcgaaccgaacaatcgtggcggtcagtttcagattcaaatctggcacttattgttgggctgtcgtttttagtgttggacttccgtttggctgaccgtggacaaccgttgccccgtcgctattcgcttccgtgtgaatttccgaaggtttgggctgttgtcatcgtgcaaagcgccgttcgaaaggatcagtgcaggtggtttaacgaattcaaaaggaaaacggtttcccgttcgttgtccagacagttctgtgagagtttggtccgatgtgcgcaggcgcgtggcgttcagatgggaatgccaccacgagtcgaccattttgaggacacatcgctgtga

SEQ ID NO: 47510 - DNA, 2000 bp, Heterodera glycines
gaagggcagccaaaggcattcattggcgccgattggaggaaattgcttatgggaccattttctgagcagccatcaagtgctcgagaagctgtggacgccaaactcgtgcttcatcaactccaaagttgcccaaatacacaactcgccctttcagtcagtcgctttaccacgctcaatggcacgcaccaaaagcggcccatttcaggaacatctttttgatgctttatccgaatgggaccatttgggttaattatgtgggttgcttgttgcttcttccattcttcgttgtcttcttcatttttagcgtgtccgtgtgaagggtccgtgtgccatggatttgtaagtgccgacaaacgcaagggaaggccaaatcggtctctgactgaaggacaaactttccaatggacatccaaatgtgccatctgatctacgaaagcttcaactacaacaatcaggaagttcggatgcggtggaactcgctgaacccaacccccgtgtacccaatcaacaccattctgttgcccgacttcaacctggtcaacattcaggcgtaccttgtcgtcgaggtatgggcgcgaaagtgccgtcaaatccccgaatttcagccgtaccccgcggggatgtgggtaagaaagaggggaaggcgaaaagagagcaccaattgaggacgaattgcacgtgaaactgtccttcgagcggcgttatgtgtggtacttcatgcaggcttatgtgcccacctatttgaccatcttcataaggtagtccaactttcgttcgttttgttttgtgattgccccccccccccattttcagttgggtgtccttcagtttgggctccaaagccatccccgcacggacaatgctcggagtgaacgcacttttggtcggttgggaacagtgacaaatgctgctaactcgcattgtcactttgaattcaggcgatgatctttcaatttggaaacattatgaggtaattaactcactgatcgtttttttatacaaataaaaaaaaacaatgggggaaaagaagcaaaaaacggccaaaagtcacgcacaatttggcgattttggagaataaaaaattggaaaaaaggaaaaggaaagtacataatcgaaatggacaattaatttattatgtttgctttaaataagaagatttctccgttgttttgtggccaattacatatttgtttgtgttctgtgttaggaatctcccccgcgtttcctatgtcaaagcaatcgatgtttggatgcttggcgcgatgttcttcatcttctgcagtttgcccgtcccttcggtcgttgctgctcacttagctcaattcccttaaggccttctcgagttggccatcgtcggcttcaaagtgcgcgaaatgcccccgccgcacccgcgcaacaaaaggacgccccccgcggggctaattaaatgcaaaaagagatgggaagagaacggcggggggccactggaaaaagcggagcagcagcggcgccggaacagtgcggacggggcggggcggggcgaggatttatcgccaaagttcggcggaatccgacagagcggcgaaaggcgttttatgctcccgtgggctctttttaagttcctttctaagtttattttaaaggatggatggcgatttcgtagtgcgacttcaccaacgaacgccgcctttgcgcttccgatttttcaatttgctcagtgtgccttcacaagtccaagccgaatccatagacaaagtcaattaacagggagccaatagagctgagaatcgggaacaacgaaaggccggccctcgccttccaatttgcccaaattaattttgttttcttcaaaaggtctctcggattgctttccccacaatgttcgcccttttcaatgtgagttttgctgaccaacaaactccattctgatcaatcccttctcatagattgtctattggtcttattatggacgaaaagcggctgagacaagcgccgaattgcattcgagcggaggaatgatg

SEQ ID NO: 47511 - DNA, 1115 bp, Heterodera glycines
atggaccgtgcgctgctcgaacttcagcttggccaggagaagttgttccagactttccagcgcattgtggagaacatcaacgtgatcatcgccacctacgaagatgatgatggaccgatgggtccgatccaagtggacccgtccattggcaatgtcggctttggctctggacttcatggctgggctttcacaaagcagtttgcggagatgtacgctgacaaatttaaagtacatgtttgccacatcgtgctattttgttgtctcttttcgggttcatacacttacacctttttagattgacaaattgatgaaaaatctgtggggcgatcgcttcttcaacatgaaaaccaagaaatgaaccaagagcccgagaccaagcgaggcttctgccaatttgtgttggacccgatcttcaaaatgttcgacgtttcggttttgacttttgtcaccagtgaacaaattaatttttataaattcaggtcgtgtgtttgctggcagagtcgccactgggatgaaagcgcgtatccaagggccgaattatgtggtcggcaagaaggaggacctctacgagaagaccatccaacggtatacaacaatacatttccgacttagttcaatccctgtttctagcacaatttgataaaaatcaggtagcgctatacgcgcgacggatagttttgctatggccggaattaagagagcccacatgccacgacaacattccagaaatacatttgcactgcgaactcaacttgatcacacacaactgcaattcggtgacgaccacatgcttgtagtcatagtcaatcatcgacctgcatgctaatatattataaaatgatggccggagatttgcgtgcctcgcacgatcaaaccggtcacacagcgaaaaaagcgacctaacgtccgcactgaggtctgaagccttcacgatgaggaagtcctataagtaattaatttcatcggccaagaatgacagagacaaaccgcgctctccagaatgtcaagtctatcaggtctgttatcttcaaacaccactctcactagattcttgtaagactcaattttcatcgcacaaatttgtgactgctcttccgccaaactattcattagca

SEQ ID NO: 47512 - DNA, 1247 bp, Heterodera glycines
atggccgctccgctggacatcgtacgacacatgcgccaagtgggaaagcaataaatcccgacaaaaaaaacaaattttgtgtccttggttttaaggatttgataacaaatggtcttgtcaatgctcttgccactgggaattggacaattaggcgttttaagtgagcgatgaatgccggaaattactgaaaaattaaccgttttgttgttcagaatggaacggcatggcgtcacgcaagttttgtcacggctgtcttacatcagtgtgttgggaatgatgacgaggatcaattcgacgttcgaaaagacacgcaaagtgtcagggccacgttccctgcagtcttcgcaatgggtctgtttcatgccttgcccatttttgtaaatagtccctttctactccttttagggaatgatttgtcccgccgatacgcccgagggcgaatcttgcggtttggtcaagaatttatcgttgctcagtcacataaccacggacagcgacgaagcggtccattgtttttaaatgactttttggaaccaatatcatttttagcccattttgcaacttctctacaatttcggtgtccaagacgttcgtccgttgaaatttagcgtcgttcatgaaaggtaaatttgattgttaatgcctttaaaagggaattgattaaagacgttatcacatcgttttcctcaatggttccattgtcggaattactgatgacgttgaaaaaatcattggcacggtgcgactgatgcgccgaagagggcatttgggtgcctttgtctcggtcagtttcaacacgtccacaaatgcgctgtatttggccagcgacgggggccgactctgtcgtccgtatgtcatcgttgaaaatggtcgtccatgtctcacgcagtcccaaattcaggtaaaaatgggtgtcactttttgttcatctacaattatttcggttgcaggaagtccgagacggtcagaaaacctttgaccatcttttggcggagggatgcatcgagtttttggacgtgaacgagttgaacagtacgcgcatcgctgtctatgagcaccaaattttgccgcagaccacccacttggagatcgaacccttttcgttgctcggcgtcgtctcgggactgatcccttacccacaccacaatcagagtccccgcaacacttaccaatgcgcaatgggcaaacaggcgatgggcaccatcggatacaatcagcagaagcgaattgattcggtccatctttag

SEQ ID NO: 47513 - DNA, 1891 bp, Heterodera glycines
atgtcagcgcagaggatcgccagcaattcggagtggaagaaaacggtgggtttcgggggactgacttggccagaaaaaaaacttggcttaaattcatttttcagcccctcggacaaactggcctcttcaatatgggaaatacgtgcttcatgaacgccactcttcagccactgttccatacgcccggattttctcaactgttccaagaaaagagcgcgcagcgattcgtcaatgggtgcgtcaggaggggggagccgagcgccgtcttcgaattttcataaaattcattttttgtttcccttttcaggaacaactcgtttggcacgaatgggatgatctccggctcattctctgcgctcatcgacctgatctggtctggcaagttcaacgcacttcggcccaccaccttcctggtgagtgactctgtgcctttgaacaatccattctaatcaaatgtttcctttttttccccaggaattcttcgctcgccgtgtcaacaccgaaatggccgaccgacggcagcacgacgcccaagaatttcaactctatctgctggacgcgcttcacgaggacaccaaccgggtgagttttgccattttatgttccatttttcaccctcccccctccccattttcaggtcaacaagcgacaatcgtttgaacagaactacgacgacaccgatttgggcgccagcgcttcggatttcaatgagaggtcgaaactgttctcttcgtcgccggtcaacgatctgttcaacgtgagtttggagccatattcattttgtttgtccgccgccaatttctaatcattttcccttttgttcagctgacaaacatctccatggtccaatgcagcacgtgcaatacgacgagtgttcgcttcgaggtcgtcaaccaactaaggtgagtttttcacagacccaaaaaaaatccctaatttgaatttccctttgaatttttcagcctcgaattgccgaccaacaccgacgacctgacgctcaaggactgcctggaggcgcacttttcatcagcagtgagcagcacctcagcctgaatttgtgtctgatcccatttcccctccctttttcagagtctcgaggataaatgggattgtccgaagtgcaaaagcaaacagccggcgacacggagcacaaaaatttgggagatcccgaaggtgctgatcgtccatttgaagagattttcgctgaatgatggacactacgtcaaaaataacgtaagtttccgtcggggttttttttgagcgtaattttcactgattttttaaacaattttcaggtcgaagtaacgtttgatgtggccgagttggacctggcgccctttctccacgagaagtctccgcatcacaacacagcactcagtctctacggcataacggtgagtgatcaaatttggttaaaattgtcactaatcacactaactatgtttcaccattcccccttcaggatcacagcggtcggctgaacagtggccattacacatcgtccgtgatcaatttgatcagcactgatcgggagtggctgagtttcgacgacgaagcatgcattccgtgcggcaccgctccttcgcccgttgtgagaatttcgttcccgaccattcaaatgaaaaaaataataatttgttttcccctttttagagcaagcacgcattccttctgtactacaagcggatgaactcgaaagccgagcgcgacaacaatgccaatgcgaatccttcggtgctgagcgacgaagagaataacggatgatattattgtgtgtctacaagcggatgaactcgaaatccaattgatattattgtgtgtgtatgctctgtacaatatgtattgtatttgtattgcattgtatgttcatattagtcgtcttgtaaataaa

SEQ ID NO: 47514 - DNA, 2286 bp, Heterodera glycines
atggcttccatcgcatgtttgaacccaaaagcggagttggcccggcacgcggccgcactggagatgaacatcagcggtgctaaagggttgcaggaagtgatgaagaccaacctcgggccgaagggcacgctgaaaatgtgagaaagtttcgagaacaattaatctggccaaactttctgcttttctttttttaaggcttgtctccggttcgggtgaccttaaagtgactaaggacggcaatgttttactccatgaaatggtgtgttttttgttttgctttggcaaacgtaaatttgccgagtaaatttctcattttttgcatttttctacgatttctcgaccaattttctcttgcatgtaaaataattctctaaaaatgaaaacatgtacatgaatttaataccgccttcattttaaaatggtcaaatgtttcagcaaatccaacatccgactgcttcactgatcgccaaggcgtgcaccgcgcaaaacgacgtcaccggcgacgggaccacgtcgaccgttctgctgattggcgaactgctcaaacaggccgagaattacgtcagcgaggtatgtggcagggattgtttcggataatgttgggtattccggtgcccaataaactccggaatccggtccaaccctggtttagtgacaaaacgcgacggcacaccccgtcttttggcattttccttttatttttcggacggcgaaatacagtttcgccttaactttgtagtctttttagtgactcgcttaaataacgattaattggtgtcactgatatttttttgatttttcattctttttcaccgcagggtgtccacccccatttggtcaccgagggtttccaattggcccatgaccatttgctccaactgttggccgcctccaaaaagacgttgcctatcgaccggccgctgctcatcgaagtggccaggacgacgttgcgcacaaaattggaccaaaagttggccgaccacgtcacgggttggtctcttaaacagcaaacgaacctcataaaacccttacaaaattctcagaaaatttgattagacgttgtgtaattaacgagtttttgctttgttccgacacttaaatcaaaaaaaagtcggaaactgctttcaatactcattgtttccccatttctcagaatgtgttgtggacgccgttttggcaattcgtcgggatgaaaacgacacggagcccgacttgcatatgattgaaattcaggtgcaaaaatgggtttattctgtttcatattggtcgattttctttcatttccaaaaaattcagatgaaaaagtactgaatttgtaaaaaagtcctccacctttagcaaatggaacacgagatggagacggacacgcagctgatccgtggcctcgtgcttgaccacggcggccgacacccggacatgccgaagagtgtgcgaaacgtgcacattttgacatgcaatgtttcgttggagtttgagaaaacgtacattttatttatttaatccgtcgaaagagttgaagaaccctagaaatgccaagcgacttgggacaaaaattttgtttaccatggaaatgccaaatcctggatttttatttgttttttaattgaatccctcattttcagtgaggtcaattcgggccttttctacaagacggcggctgagcgtgaacgtttgctgcaagcggagcgtgaatacatcacgcgacgagtgctgaaaattgtggaactgaaggagacggtctgtgccggcggagaccaaggctttgtggtgattaaccaaaaggtgtgtgcttgttttatttgggaatgctctcgaatttaaaaaaaaataactaatccccgcttcccccaagggcattgatccgccgtcgttggatttgttggcgcagcacggcattttggccctgcgacgtgccaagcgccggaacatggaacggctgcagttggcctgcggcggcgaggcggtcaattcggtggacgacctgacgcccgatgtgctcggctgggcaggcagtgtttatgagcatgtggtggtgagttaagggggagcagtgccgttgttgcttggccggggtttgtcacagtatttgtcccattggtgtactgtaacatacaacatggattaccgtacagctttagggcgaggacaaatacacttttgtggaggagtgcaaaagtcccaagtcggtcactttgctgctcaaagggcccaacaggcacagcatcatgcagctgaaggacgccatttacgacggacagcgggcggttgccaatgcgttgaaagacg

SEQ ID NO: 47515 - DNA, 1083 bp, Heterodera glycines
  unsure (1)..(1083): unsure at all n locations
tatttatanttgattttcaaaaagcatttgactcagtgccctatgaattacttttatacaaattggaaaaaattggtataaagggcaaacttttaatgtggataaagggctttttgagtaataggacttttcgagttaaaattggggatactttatcctcaagtaaaaaagttacctctggcgtcccccagggctctgtcctgggccctttattatttttgatttatattaacgatcttcctgatgccttgccatcaggagtgaaaataaaattatatgctgatgatgttaaattatatatttgttataaagcaagagccgacacggaaattatgcataaagcattgcataatttattcgaatgggcaaataattggcaaataaaagtttcaattcaaaaaacttttgtattatatttgggttccaaaaacccaaaagaaacatataaatttgatgggaatacaataaatgctgtgaatgcaattagggacttaggaataaatattgataataaattacaattttccgatcatgttaaccaaataacaaggaatgcctatttacgtatgcgttccttgttttgaataattaaatccaaatcatctaagatttggattacgttatataaaacctatattaggcatttattggaatacgctccggaggtttgaaatccgtctcttcaaaaaaatattataaaaattgaaaagtgtcaaaaaaattcaccaaaagggtttttttaaatgcagccttccgccaattccataccaaaatcgattagaatacctgcaactgccaacacttgagaataggcgaaagctgtttgatctgttcatggcgcataaaattgcttatggccgaacagatctgaaactattttctatttttaatccctcaacgcgctttaacatccccttttacagatttaactcaaaatataaactgggcaaaaaattcattccctttgctgggagggtaacaaaattgtggaatcaactcgataaagaactaataaaaacaaattctttaaatcaatttaaaataaaacttaaaagttcactagggtaatctgtaagaccggga

SEQ ID NO: 47516 - DNA, 1129 bp, Heterodera glycines
atgagtgatcgacgcaaagtgttgctgaaaatcattttgttaggtttctgtccaaaatagagtagagcgggaccgggaattgaattttgggcaaagccaggaccgggatcttttggggttgaaaaccgggaatttttggctgggaaaaccgggactagtcccggtcaaaaccgggactcaggtactcagttgtcccgttttttcagtactcagttgtcctggtcccgctctactctagtccaaaacaatgaattgttcaaatgaattgcctctgatctgtttaggcgaggctggagttggcaaatcatcacttatgaaccaatatgtgaatcgacagtttgtcagtgcgtacaaagcgacggtaatttattctttttaaaaactgctcttcggtgcaaatgtttaagtgcagtacgaatgactgggacctccccgaagtccgggcgaattcgatttttattagtattcatttatctttgtctttttccgacgcaaacccggataaaaactgccactaattcagtcccgatttgtctggaattgttggtgttttgctcaactgatcttccctcttttagcatggttttaaccctccaacccatttttaaaccttttcctggtccggcattctttcaaatcctggttttattgccatttccacttaaatacaaaatcgtttccttctttctggttcaggttggctgcgatttcctgaccaaaaccatcaccgtggacggcaccgaagtaaaaatgcaaatttgggacacgtgcggccaggagcgcttccaatcgttgggcaacgctttctaccggggctcggacgcgtgcattttggtgggccagtcaaataaatgccataaactcattttgtagcatcgaatctctgggaaaaaaaatgttgacaatttttttttagattttctgtcacacaatttattaaaaatttaattcaataataatcaaaaaaacagaaagttgaattttatgtgtgtgccatttttctggaggttatgcgcttcaaaaaatgctttcttcattgtcatgtcatcacgttttttgcaggtgttcgatgtgaccaatgcaacatcgtggggggccggagagttggcttgatgaatttctcgtttag

SEQ ID NO: 47517 - DNA, 1376 bp, Heterodera glycines
atgagcgaattggatcagctgaggcaggaggcggagcagctcaaaagccaaatcagggtgggacgacggagtgatcggagtcactgatcagtgcttaatcgggttcaggaagcgcggaaacaagccaatgacaccacgttggcatcagtggccgctaatttggagccaaacgggcgcattcagctgcggaaccggcgaactctcagaggacatttggccaaaatctatgccatgcattgggcgtccgactcgcggaatttggtttcggcttctcaggacggcaaattaattgtgtgggactcgtacaccacgaataaagtgagtccgagttcaagcagtacatgctgatttgccaatttccttcaggtacatgccattccgctgcgctcctcctgggtgatgacttgcgcgtacgcccccagcggatcgttcgtcgcatgcggcggattggacaacatttgcagcatttactcgctgaagacgcgcgagggaaatgtgcgagtgtcgcgcgagttgcctggtcacaccgggtatttgtcctgctgccgcttcttggacgacaaccaaatcgtcacctcctccggcgacatgacttggtcagtcagtcagcagacggccaattgagtcccctcgggccatttgccaaattgaaaaacgatcattttggcatttcccattgaattcactcaaaaaccaattaattcgtccatttcctttgccccattttagtgccctttgggacattgaaacgggacagcaagtgaccgcgttcaccggccacaccggtgacgtcatgtctctatcgctttcgcccgacatgcgcacgttcatctccggcgcgtgcgacgcatccgccaaactgtgggacatccgcgaagggatgtgcaagcagacattccccgggcacgagtcggacataaacgccgtttcggtacgggcaattagcaatgaaaatgcagtcgattgggaaacatgaaaatgggaggtttcaattccggcaagatcccattcccgaccctttttccatctttttaatcccgtttctcgacttgtttcctctgatggcgttgctcatccccaaaagtccggtagccgttttttacaatgtttcgtgtttaagtatttaaaaaggttttttgaatttgaaaatataaataatttaaaatgcactacgatgatcaaaatatttttagtttggtctctgcacccatctcattgcattggctgtggacagtaagccaaattaaaaaattttaaacaaatttacatttccagttggacagccccctgttccaaacaacatcattcagtgctcaagaaacgaatactcgtgctgcatttgtggcccaaaaagccaaggaaatgtgccatgattg

SEQ ID NO: 47518 - DNA, 482 bp, Heterodera glycines
  unsure (1)..(482): unsure at all n locations
gcaatctgccgctcagctcgacggcctcgatcgtttggtgaataaagagccttctgggaagcgtcacacttcgaaatatcggtttgaacagctgcgacatgattataatgcccttgaaatggcaattaattcactgcaaaatcgactcacaacgaaatggagaacggctgcggaaagggaggagttgctgaccatgaggtgataatgcaacgatttgcttctattggaaattcacgaaacttggcttataatttgatgcaatttatttgattggctttttgacggtttattttagatttaaaccaaacgaaacgcatttggactttgaggggacggaattgctcgtcaacgaccgactgaaacagtcgcacaacgccgtggacgatctgattgcgcatgggaattcagtgctcacttcgcttcgtcatcaacatttgnggctaaaggacgttaaacggaaaatgctcgatattggtcaagtg

SEQ ID NO: 47519 - DNA, 630 bp, Heterodera glycines
gaactgctctaccaggaggggcacagcaaatccgtctttgatctcgatttccatgccgatggctctctgatgttgaccgggtgagaaaccaatcacccgcacatttgaataattattgctcaaataagcaaaaatcaatttttttttttgaaaacttaaagcaattttttaaacaaattctattaaaaatagcaaagaaaattctgacgaaaatttttcgcttccccccccctccgaatttttttttcattctagctacgggcatggttacatttaaaaaaaagtgatggccagaaaaataattttgtttttttttcaaatatttttggtgattactttttttttgtaaaaattattttttaaaacagttttgcgcatttttttagtcgattaatcaattttttttttttttgatcaatcgatcagtgaatgagtgattgatttatcggttgttgataattcctggttttttccaggggcctcgactgctacggccgcgtgtgggacttgcgcaccggccgatgcatcatgtttttggagggccatcagaagggcattcacacggtgtgctggcaccagaatggtttcctgatggtcaccggcagtgcggacaacacgtgcaaggtataa

SEQ ID NO: 47520 - DNA, 558 bp, Heterodera glycines
agttggccgtgccggcggcggttattcctccggcttttaccgtttggaattcgtcttcgactgcgacgtgtcctgctttgtccaaattcacttctgtgcccgggaacaaattgacgaacagcagccacaacttctccagtaataaaaataataattcaaaggctttatcccttttctctctcccttttactacctttgcctttcggcgatatttcgttactttttttaatcttttggcaaaaccgttgatctgaccctggtccacccattcggagtgttcttcctaatttgtgaattaaaggctttacctcccctcgtcaaactttcaaaatttccctttttttcctggtcaaaatggtaactccccttccctcaaaggattgtctctcgtcagccccaatttgaacactccgaacgtttccatttccccgtgggcgccaaccaacacttcagccatttcaccttcaaaccgcaccgatacgacatgaaaatgatgcattgggacggcggcccagttttcccggtggtcatcgaaattcgatcggtgtccgaccaatt

SEQ ID NO: 47521 - DNA, 2216 bp, Heterodera glycines
atgaattcaaccgaatttttatggcatgacaaagaaacgacacatgttgtgggctcacacatgcttcgaagctttcactggattcgaacctgtgaccccccaacttcggtatcgcaatcatcgggactcaattctccgacattccaatcaatgggactcaatctcagcagcattccaatcactgggactcaattctattcaattctccatcattcccattcccgggactcaatttcaccagcattccaatcactgggaccaattcttcactattcaaaaaactggaactcaatttcacggattcttcggcatcgcaaccaccgagactcaattctcctgcattccaatcactgggactcaaatcttcggcattccaatcactgggacctaacctcacctggtccttcggcatcgcaatcatcgggactcaattctgcgacattccaatcaccgggactcaattctactcaattctccatcattccaattaccgggactcaactcacctgcattccaatcgccgggactcaacttaccagcattccaatcgccgggactcaattctccggcattccaatcaccggaactcaattctccggcattccaatcaacgggactcaattatccggcattccaatcaacgggactcaattatccggcattccaatcaccgggactcaatccttcactattccaaacaatgaactcaattttatggattcatccacatgtcaatcaccgggacttaattcagacctgttcggcataattttggaattttaaaaatgtatttcaattatcaaatacaatttgcgtagaaaatccttttcattataaatacttgttctcttacattttaataatttcttttgcataaacatctgcatacaaaaaaagaacaaataaactgatcttatatcgttaaaagtaacttctttttgtcaaaacaaacaataagtgcgataaatccatccaattaaaaccatatccattaaaagaggcataattgacatccgctttaattacaaaaacaaaaaaactccatttcaaagtcaaaacaatttctcgaaccaaaactttttcaatacaataccaaaactaattgtaagatcatttccattgactttgcatatacaaaaacaattattttttacaaaaattaagagcattcatttccatatgcactttgctaatatacagggttcccagatctgaggatttatcacagggctcccagatctgaggctttagcctcattttgtggttttttgataggtcaatgaggctaaattttccatatttttggcatccctgtttatgactagttggcgaaatttggtgaggtacaagtattcttgaattttacctttctattttgcttttccgcttgactgattcccatttattataacttaattaaagtcaatttgttgtaaattactgattttcaaaaactgatatggtaagggccactcattttaagtccaattgtttttacccattcatttctgtttagagcaccactttgcaaccataccttgatgcggttcgtcggtccctggaggcggcactctgtcttcagcagtttggttcacaagttgttgaacggcacaacaaaccagaggcaagaaagtggttaccgtcgttgtgaatttacaatttatttgtttatatagccatgggcaaaggttttccgctgacatttctccaaacaattattcatttagttttgagtcaatttcattgttttgctcttttggttttgttcaatcatttttttaggttgaagttcggaccagcaaagagctgctgttgacgccggtgatggtgtgtcgcaataaacaggaagccgttctgattgagccgtccataaattcggtccggatgagcatcagagtcaaacaggcggatgaaattgagaaaattctgtgcaacaaattcacgagggtgagacaaaaaaagggaaaacccattgcaaatctatttctaggtaaaggtaaaaatttaaaatcaacagtttttgatcgaagttatccatcgccaatcagtgctttttttagtttatgtgccaacgcgctgacaatttcatcattttgaggcgcaaaccaatgcccggctttgacatcagttttctgatcaccgcaacacatacccaagtcatgtacaagcacaagttgatcgactttctcatccattttatgcaagagattgacaag

SEQ ID NO: 47522 - DNA, 853 bp, Heterodera glycines
atgagcgtcgaactcaccgaagaagagcgcactttgctgtccgctgcgtaccgaagggcgatcagcactcgtcgttccgcgtggcgtgtcatcgaatcccatgtgaaaaagtcgaccatcatggacaaacagaagcaaggtgtcaaggtgctgcagaagaaggtggagagcgaggcggaggagaagggccgtgaaattttggtcagtgcgtccgtccgtgcggcgttttcccggaaagagtttaactccaaaaaattttttgaaattttacagactctgttggacaaccagctcatcccaaaggctgccgacccggaggccaaagtgttctacatgcggatgaagggcgacttccaccgctacttggccgagatcaaaccgtcggaagcggatggtaaaagggcttcgaaaatgctaaaattcaacaaattcccccctccccaattttcagatcttcgcaaggcacagaaggcgtaccaggaggcgtacagcattgctcaggaaaaacttcgaccatcgcatcccatccgtcttggtgtggcgctgaacttttccgttttctacgaggaattactgaaatcgacggaggaggctcgccgaatcgcacaaaaggtggttggaaggatttcattgttttagagaggctgctgttcatttcatttttgcgcaggcttacgacgatgcaaatgcggttatattgacggactcgagcggcaacgaaacgctgatggaggcactcgcaatcattgagaagctgcacgacaatctggcggagtggaaccagcgcaaaggtggagctgaatagaacgccgctgctgtgaatggagatgaatcgcgcaattgatatgggtga

SEQ ID NO: 47523 - DNA, 1548 bp, Heterodera glycines
atggaagaaagaatcgttctgaaaaagaatatttggcttatccttgaagggaaatctttgctcgtgtgcaacaaattccacgaggattcgtgctctgagtgttgcattgaagagaacaaccttttgccggacaacaacagcgaattccaaagcaattactccattaatgagctccccgccggtgcccctcccctcccttttgcttttcatttccctaattaaggctatcttctgaagggcgacctcatcatcaaccaattgccaactcctcccgacggtgtttttgcctctttttccgctttaagccttttcttcaggcggcttcggctgggtcattgttgctgctgctttcgtctgtaactttgttgtggacggcgtttccaattcgttcggctcttttatgagtgcctatcaggcggcatttcataccacaaaggctgccacttcggtgatcggttctttgctcattggagtttatttactcgcgggtgattcctcccttcgcttgccaaaattggcactttcacttgtctttggcactttctctatttgccttaaggtccactctccggtgcccttttaaacaatttcgaggcgcgcaaggtggtcatcgcgggcactgtgctgtcctccgtggcattcgctttgtccgcattttcaccgaatattttcgtccattatttgctttacggcgtttttggcggtgggcgccttttcattttttttgttttggtaacaatttgctcttctccatctccaggcattggtttcagcttcatctatctgccagcaattgtcatcgtcagccaatacttcgagtccaaacgggcacttgccactggcatttccgtggcgggcagcggattcggcacttttttgattccgctcattttgaagtttttcctcgaaggtgcttttcctttgctttagctgaactgttcacataaactgccaatttgtgaagcattcggctggcaaatggccctttacgtcaccgcccttctcactctttcctgtgccttttgcggcattctcttccgtccgttgccaatgcccacgtttgacttggagaaacagaataaactcaacgaggaactgaagcaacaagcactgatcgctgctttacagcaagttgaggtgatgagaaaaaagacggacgatttgagacgaccgattgaaagactttttgtagggcaaatcatccacataaaaaaccaattttagtccgagtcgaatgtatcggaagaggaggaggaagcgaacaacgggggcatttcgccaccgcgtcggtcgggcgccactcggacgagttcggagtgtacggacggacaaccgttgctaatggccaacggagtggaacttggcgccgtaggggagcacgcggaggaggccaacgaggcggactcttcgcccattactccacacaatcgccctccgctgtcgcccattttggaaagagtggtgcgccgactgagcaaaaagaggggcggctcccagcatcacaacccgcaccaccagcagcagcagcagcagcagcagcaatccggg

SEQ ID NO: 47524 - DNA, 1085 bp, Heterodera glycines
ggaaaagctgactcaaacaaactcaaaaaagaattttccaaatcaactgaagaggaatttgagaattcgggaagaataagtcatttgtccaataattaaacatgtaattaacatgtgtcatttaaggtgtattattggctccggcatctttttgtcaccaacgggtgtccaaaaaggtgcacattccgttgtttaacttgcgattggaaatcaacgctttagatgctggaagtatcggcctttccctgctcatttggctcttttgcggcctcttcgttgggctcggttcctattgctatgccgaacttggcactctcatcaaaaagtcgggtggcgactatgcctacataatggaggcgtttggtccttttttggcattcgtacgactttgggtcgaagcattcgtcgtcaggtggacggctgctaaaattttgtccatttgaatttaaacgcgaatttatgacatctttagaccgtgcacttgcacaattgtcgctttaacttttgccaaatacattttgcacccgttcttctcaaattgcaaaacccctgatggttctgctcaaataattgcggctgccctgataagttggcactttcaaatgccgctttcatttgcaaatgcttccgtttagtttttctgactgctctcaattgtctttccgtcaaattggccactttcatccaagacacttttacacttgctaaaatttttgccctcatttttattataatcaccggcttttaccttctgatccaaggtgtaatttaatagtctttctcattttttattactttttaaggcgatccgcaatatcgagtcaattttcgaaatgttttcgaaaattccgagacaaacgttggcaaagtttccattgctttttattccggactcttcgcttaccaaggctggaactacctcaatttcatcgttgaagaattgcaaaatccaaaacggtctttatatttttgcaccgttggcattttaccaattcaggaatttgccgttggccattttgatttccactgtttctgtaactgtcatttacgtgctcactaacatcgccctttacgtggtcatcagt

SEQ ID NO: 47525 - DNA, 1434 bp, Heterodera glycines
ctcgccacccgcagcttctctacgagagcaaggtgtccttccttctgcaaggaggggttggcattccgcacattcgttactacggcatcgagcgcgactaccactgcctggtgatggatttgctgggtccttctctcgaagacttgttcaacttttgttgccggcgcttcacgatgaaggtttatttatttttcctttgttagtaaacaaaagtggtattcattcatcatttttaaacattgtggagtaaaaattccaaagtcttatctccttcggtttagactgttctgatgcttgccgaccaaatgatcggacggattgagtacatgcatgtgaagaactttattcatcgggacatcaagttagcattgaaattgctttacatgcaccactgacatcccattttctgttagacctgacaattttctgatgggtatcggtcggcattgcaacaaactcttcatcatcgattttggattggcaaaaaaataccgtgactcgcgcacgcgcatacacattccttaccgagacaacaaaaatctgacgggcaccgctcgctatgcgtccatcaatgctcacatgggtaagcaggatggcatgttaattcattttttggttgctagtgtactgtttagtaatttaaaatactctaaaaaacattttcctcgtggtgtttggaatcgcctgaccttcatgtgtatgtgtgataaattttggcaataggattaataagtatcttaaattgaagtccagagtttcttttactcaatctatccatatatcagttttaggaccaacggtttgaattatcccccccccccccctcaattaggtaaataaatgtgcctctttaacaaaacctctgtctctcaatcagcatcaaatttttgaatttcgtaatgtttaggtatcgagcagtcgcgaagggacgatatggagtcgctcggctatgtgctcatgtatttcaatcgtggaaatttgccgtgagagattaatctgattgaaaagcattcttcattccattatgcgtttcagatggcaaggcctgaaagcggctaacaaaaagcagaaatatgagaaaatcagtgaaaaggtgatcattatacagacttaaatttatttgaaaaagccgatgccttaaatctaataatactttggctgtgcattctttcattttgtcttattgttagaaaatgtcaaccccggtggaaatgctgtgcaagggattcccttccgagttttcaatgtatttgaattactgccgtggtttacgctttgacgaggcacccgactacatgtatttgcgtcaacttttccattatgatattcgcacggcaaaacaaaaaagaacaattggaagatatttttgacataaaccctcaaaattcgctaaatagcacaattcttactccaagaaatcagcccatcaaaaga

SEQ ID NO: 47526 - DNA, 261 bp, Heterodera glycines
atggctgctgtagtcacaaacaatagcaaggtgtgtgcccgtttttaactttgataatattgttctaaaagtttttagactataaattcacaattttttatttccgaaaatgattataaaaatgtcttgaggcattctctgaaaatttcgcttaaggaattcatcgttggtgtgaaatacaagctcaagcgcaaaatcggtagcggatcttttggcgacatttacctcgccatcaatattcagaatggtgaagaagtggcg

SEQ ID NO: 47527 - DNA, 2081 bp, Heterodera glycines
atgttcatctcggcagacgcgcgcggacttttctcttatgcatttgtggacttgggcgacgaattcgttgtgaacgattccgacggggagacgtgcaaagaggtggaaattggaataattaatttaattgcgaattgaatggttccgattttcaggtgctcgttgagtacatcgactgcgaaagcggcgacatgatgacactcgaaggcgcatttcaccagttggaggacggggaccacgttgtgttcaccgactttgagcacgccgaactgaacgaacttccaccagtgccagtcactttgaagggaagtgagtgccaccactgaacatttgttggttcatctacagtcctcccatttttaggcaatgtcttcaacattggaaatgctctcgcggccttttctggcgcagttcaaggccccgtttcgcgtggacgtgttcagcaagtcaaagtgcccaagaaaatgtccttcaagccattgtctctcgcactcgccgagcccgactttatgatttgggactttgccaagttcgacgaacctgcacaacttcacgccctttggcaggctttgtacagttttgaggcgacggttcgtcattctggccactttccatttgtttgggttttcctttcagaaaaactacagccctttgccccgttccgatgccgacgcaaaattgttaaaggaaatgctgccaaaagatgcgcccgaaatgccggactcactgctcttcaacttctcttaccaggtcccttttgtgcctttttcaacttcgaattcctcccccgtcttaaggcgtgcggaaatctccaacccatcgcttcgctcatcggcggtttggtggcccaagaggcgatgaaggcagtgacgcaccacacgacgcccctcaagcagtttctgtacaccgattctcttgaggcgttgccgggcgccgattcgacctttgacgccgccaagttggagaagaacgattgtgcaccggtgagtttttggacggacaactaattgctgttggagtgttcaaaaactgtccatttgcagcgcaacaatcgctacgacggacaggcggccgttttcgggtgggcctttcaggaggcgctgcagcaacagaaatggttcattgttggcgccggagcgattggctgtgagctgctgaagaacatggtcagtcatttgctgccaattgtaataaaagtacgttttgccaggcgatgatgggcttgggctgtggcaacaatggctcgctgaccatcaccgaccccgacaccatcgaagtgtccaatttgaaccgccagtttctgtttcgtcgtcctgatgttggggtcagttgcgagtcttaaatgttaccaaattcttgtcatcgcctttctgtagaaaaagaagtccgaagtcgccgcccgttccgtcaaagcgtttaactcgaccattcacatcaatccgatgtctgagatcgtcgccgagtcgaccgagcacatcttcggcgacgacttcttcgcccgtctgaacggcgtcagtaatgcgctggacaatgtcgaagcacgtaagaaattaggagaagggggggggcagactcaaattggcacttttgcccattttgccaggccgttacgttgaccgccgctgcgtgtactatcagcttccgctgctcgagtccggcacaatgggcgcaaagggcaacacgcaagtggtcttcccgcacttgacggagtcttacggctccacgtccgacccgcccgagaaggagacgcccatctgcacgctgcgcaatttcccctaccaaatccatcacaccattcaatgggcgcgagctgtgaaatttattgacctaatttcagttgtaggaaaagtcccgtttaagaagttcaccgactatttcacttcggttgcggagacggtcaaccaatacttggacaatgtgaacgactttttgcaccgagtgaaccaaatgactttttctcagcgggtcctttctttttccatcttttatctttttttatccgagttcttttgcagatcgaagtgctcagtacgcttgagcgtgcgttggtcgtcgaatacccgaaaaatgcggaagaatgt

SEQ ID NO: 47528 - DNA, 2667 bp, Heterodera glycines; identical to SEQ ID NO: 18631

SEQ ID NO: 47529 - DNA, 1624 bp, Heterodera glycines
atgtccgaaaagaagtccgaaggttgtgctgaaaagaagagcggtggattcaacacgcagaagtttatgttggacctcgcatccggcggaactgctgctgccgcctcaaaagatcgaacggtatcgcaacgagaaaaagtggcgcagaaattgtttacgcaattcgttttccaatttcctttccgtctgtccattgtcagatttactttctattcggtgttgtggctcggttggttgtttcgttgatgttcgcccttttccttgtccatgtctatccaaaaatcctgagcattatcagtgattattgcttattacttttcattttaagtcctttagactgatcggaagcaaaagtcggcggacacaaagcacgcaaaacggagaaaggtttgcatttgcgtgtgtttggcagttggactgcttgagagttaaggtttttgagtcccggaaatcccgaggggatttgcatgggaaacccattttggaaaagtatttaaacagctaagacttcctcaaatggatttatgccaatgggaaacgaaacatttctggcgccctgtgttggttttaaaaaattcaaatctaggccataaaacggaaaagtacccattttcgaatgaattcttagatttgtcactatccgctaatatataaaacccggacttacccatgattgctgcttctttcattttttctgccaatttgcctttctttcagactgatcggaagcgaaagtcggcggaagagacggaaactgcgctggaggccaactatccgtcggcacagttggtggcagaaaagcgtgccaaaatggaggcggacattcgccgcgtggcggtgccgccccatcgctaccaaaatctgaagcgccaatgggcaaaagtgacggcaccgattgtcaacgaactgaagctgcaaatccggtcagttttgccggaatcggtgtccattccccgcgcgttgtctttaattaatgccatttttgaccttctaattgtaggtttattttcaggttcaacttgaggacccgttgtgtcgagatccgttgtccggacgaaaaagcggccggtaggtaaaacaaaaagtattaaccaaacaataggcagatgatcatttttcaatgatttctgattaatattattttgttttaatcaattttagacagttttcaactttttgttctattcgcgtttgggattcggaattaataggaatggatgtcagattcatattcaacgacctcgaaaacttcctagaagacgaattttacacgacatttttaaatttttattattttcgaaaaatgggagagacaaagaaagcactattaccgacaacaacaaagtagtttactggtcaaaaattttacttacaattaactcacgtaaagcgtatgagctaaaaatgaacgtaataattgtattcagcgcataaaattaccctagaaaaattatgttaattttcaaagggatcacaaaaaggataagtagcagcattgaaataattgggtcactaatgtttcagatttttgtgcacgcttttctgctcggatttgaggtggacgatgccattgcgctgattcgccttgaccatttattcttggaaagcttcgaagtcaatgacg

SEQ ID NO: 47530 - DNA, 291 bp, Heterodera glycines
agacgcttcaattgccgattccgtttgaaaatggttcacgaaaacatccactggtcccggccgcgcaaatttgggcccggctcgcgttcgtgtcgcgtctgcttcaaccaccatggactgattcgtaaatattcactgaacgtttgtcgtcgctgcttccgtgaatatgcctccgacattggattcaaaaaactcgactgaatggcgaagaggaatttacgagcagtcattggagggttgttttttgtttgttctgttcgttattttatgttgataaaaaattgcgttaat

SEQ ID NO: 47531 - DNA, 797 bp, Heterodera glycines
atggaagtcaatgaacacgcttccacactttctcagcagcaatgcatctcttcactgaagcgaaagttgaagcgcaagttggaagatgggcaagagttagaccagtacgactgcaaatttggcgtaagcacacaatcgaagcaaaaagagcccaatttcttaacccattcatttggtacagatacgtctcgaccccgaaggcgacgtggtaatgatgtcggacgaaagtgaaatttcgtcgctgaacgaagcggacgttaccgatttgagggaacgttacgaaaatgtgtgtttcgtgtggtacgttttaaattttcatccacactattacagacacaaagacaagaagtacccaaagaagtgatggtacagcgcgaaatgcaaatccgcgagttggagtcaatccttcggttggaggaggccaagctgatgatgttgaagaagttgcagcagagtcagcagaaggctgcgcagaaaacggtgagttaaagccgaacaacgaaaaaattcggggacatggactaattgcaacaattgttttaccgacttccgccgcttaatgcgctttttatgaccgagtcattttcattaattaagaaacatttacatttagcagcaacaacagaatcagcagcaacaacaacaacaggaaaatgtgcgaaggttagccccaggcgttgtgcagaattcaacgggacaagcgtataagccgaaagtggccgtggtaaacccatcacaacatcagacgggaaacaccagcaaaacgaacggcacgacgccgcagcacgggaagaagg

SEQ ID NO: 47532 - DNA, 1817 bp, Heterodera glycines
gatgcgcaggggcgcatcgccacgtttgacgcggtcgagttgcgcttgccgcaaaatgaacaaaagcacatcggtgttgagctgacaaaaaggagagaggtcaaaaatggggtaatttgacataaaataaaataggtgccatttgtatggtaaattcaatgaatgaatgccttacggaacgctcgtgtacttcgtccacaatgacggcggagtaggcgttgagccgacaattgtgcagcaattcgcgcaagagaatgccctcggtcatgtaaacgagtcgagtccgttcgctggtctgatcttcaaagcggaatttgtagccgacctaaaacaaatgaagtctcaatttctgccggataggttcaaaatgcggtactcattgcgtttgtatccacatttttggtcaaattttttcaaaattttttttttcttttttattgtcagaattgcttttagattaatggaaacacttaaaaaacttcaaggatcctgtcactggtcagcatacaaacacaattgaatcgacgtggcagaagttcaagcagcaacacaaagcgagatttggcagtcacagatcacttttttccacatacatttctgattttttgtggcgtaagcaatttggaggaccggacattttttataatttgtggacccaaatcgcggaattgtacccaataagcacgtaaatctccttttatttgttatttaaagcaattgcgacaataaaaaagaaaaaaaaaattgaaaaatttgaaaaaaaaaaagggggatacaaactgaattagtacccctgattgtgcctttctatatatttttttgtcttttaggcatctgaaattttttgcgcctaaaccttagctgttaaactattttaaaatgccatcagaaaaattggtaaaacacaagaaaaggtcacttgagatccgaattgagaaagacaaggtaagcttttattttattaccgaataatttttttaatcaaatgtaaataattctaggccaaaaaggagagacgtgaagaaaggaatcggacacgaaaagacaaaggagaggacgcagtgccaaagcaagtcccaagaacaattgagaacacgcaagaagctgacgacacctttgtcggatcagacgatgaagaggtaatttgacaatgaggaattaaggcaagtgaaatattcaatgcatttaaaggtattggaagacatggacaatgatgcgatggcacatttttttgaagggtctgcgaatccgaaggttcttatcaccacttcgccgagagcaaaactcgtaagaatgatattatttaaaaaaataaaaaattttctcagaaaaccttcaaactctgtttcgagttaaaaaaggtcattccgaatgcagaaattgtgtctaggaaaaacgttgccataaaacgtgttgtgcggcaggcaattgagcgtggtttttctgacctaatggtggtgcacgaagatcgcaaaaaaccaagtttttattcctttttaccattatttccaattattaattcagatggaatcgttttttgccatcttccgaatggtcccactgcgttttttaagataaattcacttcaatactccaaacagatcaaagtgtattttgttttgtttttctcattttcgatattgaatttgcaggacgtcggtgaggcaacggaacattaccctgaacttattctgaccaacttcaacacaaggctggccaaaacggtgagccgaatgttcgcctgtctcttcccgcaaaaagctgattatggcggcagacgagtagtgaccttccacatcagcgcgactacgtctttt

SEQ ID NO: 47533 - DNA, 1447 bp, Heterodera glycines
atggccgcggagaacgctttggcggaaatgtgccgttatctcttcgcctccatccaaacgtttgagcaggacatccgacccgggctcaaagaattgatgaagtaatttagacagacacaaaagaattaattgatttgttcttttcgtacattattcccaaggttttttaaaatcagcataacggctttggaattcaaaaatttcttgcatgaggaataaagggtcagtgctgcgttttggcatcgatgaaaaaattcggagaatttgagtcgtgtttattaatattagaacgttgcataatattgcctccttagagtgtagtggcataccttttgaattctcataagatctaaaaaattcaattcttaaatattagaccatattttagaactgggtactttcgcagattaggtggccgatgaaagaccatacaaaaggatcccatctatggttttaccgggccacataaactgtaaaagtgccaaacaactgatttttttacgttagaattgtaaccaaatttttacaatatctttttcaggtttttgattgcattgtgcaatccccatgatgacaccaacaagtccagcatgattcttatgggtcttcacttgctgaccgtcgcctttgagacgggggatgattttctgcgcaccaccgcatcacttcacgcattgctcaaggacgaactcagccacacactgctccaacttttgagcactcaaaaattaccaattttcgcagcagcgaatcgcgtctgttttttgttgttgcaaacattgcgtcctcaactgaagttggctcgttcacttaattggttagctcacaactgaactattgcaggttccaaatggagtcgtacttcctcaagttgggtcagctcatctccaccgaacaattggccgagtctgtgtccatttcatccgcgggttcacctctcgcggctaaggccgccgtttgttacgaattgcgcgaactcgcgctggaggcattggtcgacatgtggcgtttgcctggccttgtcgctgaattgtacctcaactatgactgctctctgtactgctcgaatctctttgaggatttggttggttgattttgtatctatatatatatatatatatattatattttacaaatatttttaagattcggactttgctctataatgcctttccaaatggtccgcttctcttttccactcacattttatccctcgacactgttttggctgtcgttgaactgatagagaccaattgtgctgccaagcaacttaaagggttcactggaaagggtcaaattggcattgaggaggaggtgtataattatccgcttttttgaattttcttaaaaaattaatttttttgaaaaattctgtttggaattttttttttttaattttcagggggagaaacgatgtgggtgtgggaaacgacctgctccgatttaa

SEQ ID NO: 47534 - DNA, 1955 bp, Heterodera glycines
atgtttgttcttagtattctcaaacacacggttaaaattgagcctactgcccttggtagagattttactgaggcgttggtggagcgtttaaatcgtcaatttgctaattacgtatgtactttgaatttaaatgtatcatgttacaggtcaaagagtattcaggttataccaaatgtcgggctgtgcattactttttacgactttaaaaaatacggcgcttcttacatattggtttttgtttcttgctttattaagttaaacaattttattttatagcccggtgacgcatcaacgcatacgcctgtcctattccgttatgttgtttttcaaccaatgataaatgaaattcttgagggcaacatactgcgctcgaaccaggaagggatcacaatcagtatgcagtttttcagcgacataacagttgcgccagacaaattgcctgcaatttctaaattgtatttattttattttaaacattattgtctaatgttctaacttcttttttattttagtgatgagtctgttcaagtttggagatgggagtatcaaaatgaaaatggtgatatcacgccattctatatggatccgggaaaacgcgtaaggtttgttattgttttttggtatagcaatgatttgaatttttctatattttcccgcgtgtgctaggcattcattttttccctgcccgtctattagctccgccgggaccctcccccaccccttctcccggtctcaaattttaagaaattatccaatgctttaaaaaattttggtgtaaaatcaacaacaacaaaaaatatgcgcggcacattcaacataaagaaatagtccggcggtgcagataagctattgacaagaataattctgtaagatggctggctatgtatggccttaccttttttgctttttgggtcttatttttcttacagatttaaggtgataagcgttaagtatcaaaatgtcgaaccgggcgctcctccagaagccaccaaagctatgacgattgaggttaataccttctgctttttgtattatccaaatttttcaggcatcgatgttcgatatgggcttgggttgtgtggcatggtgggaaccgcagtgcgcaagtgaattgaaacaggaagcaaatgatccaagcgaagatgaatagtaacaaacgaattgaagattttgttattgttttatttgttctaacggattcttttttaaaaatttaccatggtgaatgaatggatgcatttatgttaattaactcatttcatatttcaatttttttttcatttacttaatgtctttgatttagtcaagaaactattaaaagtatggctgcaattgagaagcctcagattgttcaacaacccgtgcaagtttttggtaggaaaaagacagcgactgccgttgcattcgcgaagaagggcaaaggcctgataaaggttattctttgccgaagttgggtattgtactttttcggctagttttagaattgtttaatggggtagtaaagactcatttattgagacaattcttttacaagctagaaactagtcaagactttttaaccagtgtattaccgaatttgttaccgcttttctacatttatacattctcccatgcagttttctcaattaaacattcaggtcaatggacgtcctttggagtttattcagccagaaattctgcgcatcaaacttcaagagccaattctaattgtgggcaaagacaaatttgcaggcattgacatacgaattcgcgtcaaaggcggtggacacgttgcacaaatttatgctgttcgtcaagcacttgccaaatcggtggtggctttctaccagaagaatgtcgatgaacaaagcaaaaaggagctgaaagagcaatttgtcgcctacgaccgcaatttgttggtggccgaccctcggcgccacgagccgaagaagtttggaggacctggagctcgtgct

SEQ ID NO: 47535 - DNA, 438 bp, Heterodera glycines
taaaaatttaaaaaatctgatttttcaataaaatgtttaaatttcgtgctgttctatccaatttgtctctgtgctgttcctcctctttgctccaaatccaacgacattttgtgactgcctccattttgcgaaaatatccttcgtccactaagcaatttgcaaatgcacaccgttgcatcagcaggacacggagttgggccatttttcaaaaacattcaattatactaatttcaaatgctaggtctcttcatgttcatccaagttcaagtaatgcaatttttccaaataaaatcatttttacttttttctcaaattgaggagacgccaaacccattgagtctcaaatttttgccaggccaaaaagtgttgtccgagccgggtcgcacttacgagttcacttccgcccgcgatgcggcaaaaagtagtccgttgggcagg

SEQ ID NO: 47536 - DNA, 1404 bp, Heterodera glycines
atgacctttcacaaaattgacgcgagtagcatcgattcgattaccaatgccgttgattttttcagtatacccccgacaaatgttaccgtatcatcgtcaaaggttttcgagattttgccgagtaatccactcaccgacactccttatcattttaaaatacactcgagccaaaattacattgacctgtcaaagtgttaccttttgaccgaatttcgaatacgaaaattgacaccaccaaatggtgaatggggacatttggatgcttcagatcaggttgtaccgatacaattgatcgggcacaccttcatgcgggacttgaaaattgcaataaacggtcgtgaaattttcaattctaattcactgatggcatacaaaacttatctttctcatgaactttcgcaatcacttgaagctaaagtttcgcatttaactgctgctggatacgaccgtgaagatgctagtaatctacaaaacgcaaattccgaagggttcaaaagtagaagacaacggtatttgggaggtcgaacagcacaatacattgcaaaaattgatgccgatcttttcaatgtaccccaatatttgattaatcattgtgaaattgacataacgatacaaccccatgacgacaattttttgttaattgacaccttagacccacccggtcagccatatagtattgagcttgttggattgaaactctactgcaaaaaagtcagtcttatggatggcttggctcttgagttggcgaaaaaattggaaatgaaaccagcacggtatgctgtacggaagacaatgatgaaagcactgttcataagcccgggacgctatgaatttaatgcaaacttgttcatggaccaagttccacgccgcgtaacaatgggacttgtcgcaaattcagattatgtggggaacaccaaaaggagcccgttcaactttcaacactttaatgtacgggagttgagtgttgtggccaatggtcgctcttatccccaggccccgtatgacattgactatgaaaattggaaatttgttcgtccctacaatgacatgcaggaggcgcttggttttgccaactctacatatggaaatggaattgattatttttcatttttgcacactcactgtatttatgtgtttaatatgacaaacagcggagacgatcatggcggtttattcgatctgatcaaaaagggatgtacagctgtaaacataaaattcaaaaaaccagtacccgatggtggaattacgctaattgtgatgggtgaagcggactctatttactttttggataaaaacagaacgattgcaaccgatacaaccatttgaatcatttttaaaatgttgaaaattttattggcttccctatttttccagtcaattgttgcacttgttgtagaagaagga

SEQ ID NO: 47537 - DNA, 720 bp, Heterodera glycines
atggcttcttcaattcgactcgctggcggtgctttgcgagaactccgaattcatctttgccagacaaccgcagcaagcaatggagttcgggaattcatccagaaagattatgtggacctgaagcagaacaatcgggatttccccattcttgtaagagaatgctccggaattacgccacgaatttgggcaaggtcggtgttgtgttttgtttattttgtaagtttttggtaatttttttccaaaaggcgtcacttttcagtttgtaggtggcccgataaaaataccaaagggtcccaaaaaggcttaaaatttagcgagcgttttacctcctttttcatgcggtgtgtttatcaaatattttttccaatcgaactctagtaactgtaagaatagaattttgctaaaaaaaaatttttttttgctgatcgactcgtacgcgttgagttttcacccttaatccacactatttttcacaaaaataatctacctaactcgaaaattacaagaaatgcatttttgtgactttaaaattttgaattttttttcccgtaaaaaggggtaccaaccatctaaattacccaattctgaattgttgaattgttttatttatttttttctagatatgagcatggagttgagacaagcgtttcggttgagaatcagccgcgtcagaagataatggaagtgatcaaagaaatggcaacgaaaaaaattgattga

SEQ ID NO: 47538 - DNA, 1142 bp, Heterodera glycines
atgtccgaaaataagtccgaaggtggcgctgaaaagaagaagagcggtggattcaacacgaagaagtttttgttggacctcgcatccggcggaactgctgctgcagtctcaaaaaccgctgttgcacccatcgagcgtgtcaagctgttgttgcaggtttgaaagaaatttgtcagtaggtagtgccggcctttatggcatgggattactaacctttactaatactaaaacaattctcgggtttcctttatgtatcacagttttcaactattgtattgcttaggtgcaagatgcttccattcacatcaccgcggacaaacgctacaaaggcatcatcgacgtcctcgtccgtgttcccaaggagcagggctttctgtcgttgtggcgtggtaacctggccaacgtcatccgttactttccgactcaggcgctgaacttcgccttcaaggacacttataagcgagtcttcacgcaagggtatgttcaacattgaatggttaaatgaaagttaaatctagagtggacaaggagaagcagttcttgaagttcttcgccatgaatttggcttcgggcggtgccgctggcgccacttcgctgtgttttgtgtaccctttggactttgcgcgaacgcgtttggcagcggatgttggaaagtgagattaaaattttaaaaaatacttaaataaaacgtccctttagggccgatgcccgtgagttcaaaggtttggcggactgcatcatgaaaatcctcaagtcggacggtcccatcggtctctaccgcggcttcttcgtctctgtccagggcatcatcatttaccgcgccgcttacttcggctgcttcgacaccgccaaaatgctcttctccccggagggcaagcagatgaacttcttcgtcaactgggccattgcgcaggtcgtcaccgtgtcgtccggcgttctctcctacccgtgggacaccgtccgtcgtcgtatgatgatgcagtcgggccgcaaggacatcatgtacaagagtgcgtttccctcactttcccacaattgattgttctgatttttgttttgttttagacactttggactgtgccatcaaaatcatcaaaaacgagggactgctcaagggcatgttcaagggtgctttatccaat

SEQ ID NO: 47539 - DNA, 1076 bp, Heterodera glycines
atgtatcttgggttttttaactcgtgcgaactgcttttacacttgctgcaattggctcgattgagtttgttttctaaggttccacaagctcccgatgacactgtgcaggcaatgaaattcaatccgctggtggccgggtctcccatttttttggctgctggttcctgggacaacacctgtcgcatttggcaggtcaatgaaaatggaatggttgaaccgaaggcaatgcaaaatgttggagcgcccattctttcgctggattggtcggaggtcgtaattttttgttttgtaatcagacttgaaaattttccaaaaaatgtactctttccaggacggctcaaaaatattcatcgctggtgcagacaaacaagcgttcgcctgggatttaggctcaaaccaaatggctgttgttggcacgcacaatgagccagtgcgaagttgccattggatagcgacaccccaatattcggtattggcggtggaggggctgtaaccactatagaatttgaatgtaatgttcaacattttcagtgtctaatgacgggaagttgggaccggacgctgcgtttttgggacatgcgccaattgcccacccaaaactccctggcaaccatccaactgcctgaacgcgtgtactgctccgacatggttttcccgctgatggtcgttgctttggccgacagacacatcaaaatgtataagttggacggaacaccgtgagtttttcagagagctttctagcattcattcttttttccatttagctctgaaattcaagacgtggaatctcagttgaagtttcaggtgcatgcaaaaccttttactctctcgaatttcgttttcattttagagtcgttgcattgcgattttcaaagacaaaatgacgggacagcccaatggattcgctcttggctccaccgaaggcaaattactaatctaatcgtaattttcccatgtttcgctttttaggacgagtggcgattcaatgtttgcagccaaaggacccgaaggacaatttcactttcaaatgccatcggtcagccgaactcatcaacaattaccaggagatttacccg

SEQ ID NO: 47540 - DNA, 987 bp, Heterodera glycines
atggacaagcccggactggtcggctcggtgctgttccacgcgctgtttttcggttttggcgacctcgagtccaatgtgctcaattatttgtctgtgccattgcgcgagttcttcgccgactcattgcaacggcactacgcaattgagcctgacagtgaacagtttgagctggcatattcggcaatagccagcgtaaatttgattaaaaaatatttaaaattataattaaacaaacaattaatatgaaattacaataaataaaaataaagataaatgaactttaaaaaaatttaattacaaatattcaaatataaaatagtttaattattatttaattcttattaaatttaaattaaataacaaatatttatatattaaaattcgacttaaattattaaaattaaattacaaaaaacattttagtctttctttgttggcgcgatcattgcgagtttgatgatggcgtggtgtatggaccgttacgggcgcaagggtactgcagtgtatatacggtaaagattgaaatttacttaagcaacttaattgcccatttcagctcttctcttggcattattgcagcactggccatgctgatggccaaatggcttggaatggccgaattgtttgtgctcggacaccttttagccggtgccatctctgcgctgaaaacggtcgtgttcatttatgtggcggaatgtgctccggaccaggcgagaggtgggcacaatttaattttgtttttgaaagttcctggttttgtttttgagctagctaacacaaaattcgaataacaaaaaagcattcgctaattgattgttgctaatttttagttcgactgggaattattcgttttgagactgcaagagtcttagacgattttctcaactcgagaatttgactcccgaaacatcccaactcattcattaccgcatttcctataatatagcccgccccccccccccataaattagagccctaccccttgaa

SEQ ID NO: 47541 - DNA, 1235 bp, Heterodera glycines
atggaagaatgggagaaaacgtacaaacccagtgagtaattaaaacgtgtggcataatgccatagaaataaatgccaaattaaaaaaaaaactaagttattcagaatttttctacggaaaggccccagttttggaggttgacggaaagccattggcacaaagttcggcaattttgcgctaccttgccgaaaaatttggtaataatatttattttaatttatttaattttataatttaagacttggccggcaaagatgaatgggaaaaggcgaaggctaacgaaatcattgactttctgaaggatgctaccactgatttgctcccgtatttgatggtcaaaatgggacgccaagaaggcgatttggtgaagaaaatgaagcaaaatttaattatttctaattttattaattaataattaagcaattcattaatttattcattcattaaattaaattattaatttaattttaatttaatatttttataaaaatcaattcaaaaatcacccaaatttgccaaattttttaaaaatttttggcaattaatttcatataaaaaatattttaatttgtaattttaataaataaatatgtatatttaaaccattttaaaagaaaaaatttcattctttttaatgaattaaaattctttttatatattatttaatagaaactttttttcttttaaatttttccattttccaaggacaaattgcacggcgaagtgttcgagccgggagtcaagcgcatttttccactttttgagaaacttttgaaggagtccgggtcagggtacatgcttaagtctggcctctcaatggtggactttcaagtaaaattttttttgaaaaaattggaaaattttctcgacggcagtcatcgaaaccgtcggagttgaaattttcaaattttttgaatttttaggtaattttttaaattttaagccgttttatgagtccttaaaaattgatttataaattagatttaattcttttgctgatacgaaaataatatgctatttacggtgaattgcttaaaaaatttttgttacagtaccgtaccataaataccgtaacaatcgctggttttcaacaggtggccaactttctgtacatgtttacaaagttggagccggacaccatcaatgcgtacccggagctgatcaaatacgttgaccgtgtccatgcgctgccccaacttcagaagtatttgaagcagcgcccgcaggaccgctga

SEQ ID NO: 47542 - DNA, 1104 bp, Heterodera glycines; identical to SEQ ID NO: 18790

SEQ ID NO: 47543 - DNA, 159 bp, Heterodera glycines
gtacaatttggatttggtggaattgtccggtcagatgaagcacggcctggcactgtacaaggagaagcagtcgcacattgttgccacaatgatgggcacccggtcaacagatccgattggcaaatacatgaaaagcaacatccaatggaccgacggagg

SEQ ID NO: 47544 - DNA, 1651 bp, Heterodera glycines
cattaaaagtcggtgggagggggagagacgggagggaattgggcgaaggtcaatttgactgactgaatatttgatcagttacaaaattataatgcatattagaaaattgaccaattgaacttctaggcatttgtggttttgggcttcagttcgttcgcttgtgcgaagaaggggaggggattttattgagaattcccttgggagtggggcactaattccaattgccctcattccacaacgagacccaccattcccggccatatgaacatttcggttaaaatcgaccaaattatctctgttcccgcttcgcagatgtcttcacatgatccgacttcgttttccgccgtgtcgctttcccgacctgaacttgaagccggtgttcccgcctccgcttgctgcccccaccaaaccaaccaccgcttcaacagacaacagcagcagcactgttcaaggcactcctaccgttgtatgttgagcatataatcacactaatgactttgtcttggtttattcgccttttgcttttttagctcgctctgcccgttggggtgccgtgcgaggtttacgtttcggcacacgttgacgctgggcatttctttgtccaattgcccacccatccttctttttcatcactcgctttgctcgactcgtacatgctcagcgtttacactcagccgggcggagctccggatttgccgaagccgtgcaacagtaattttcaacatcgcatctttttaaatcgtttatctggctgtttcctttcagtcggcgtgctttgcgctgccccggcgtacaacggatggttccgcgccattactttggcatacgaccaggtggaaagcgttctccaatcattcccattttaataatattttacctgttcattgtcaggaccaggatgagatgttggtccgtttcgtcgattacggcggcttcgcccgtttgccccgggccgatttgcgccaaattcggtcatttcccccgggggttttccagctaatgtcatcatctcttcccatttcagtactgactttgtgacccttcccctgcagggcatcgaatgctatttggccaatgtgcagccagctggtaattaattgtccctaattgggccaattatttcttagggcattttacctttcctttccgttcagatggctctttgcattggagtgacaaggccaacgagttgttccagcagttgtgcgtgtccaaaatcattcaggcggcgctggtgggctattgcaaaacggacggaattccgtgcgttgagcttttcgtgatggacagcgccaacaaaaaggtgggatcagagggcaattgttgtttattgctcaacgaattgagtccgttactcctcaaaaatccaggggattctcgggcgaaaaccctggactctagcaaatccctagtgctaatggactgtgggtccgttccgttctcaacggtgccaatgcctttttcatgccgtttcagactgtgcgcattgaccaaattctgttggagcgtggccttgccaaacagatggatccgactttgatagtgcgaacgccgatgctggtgtaagaaggggacctccgagaccagcacaacaacaacgaaaccaacctccggtcgacaattgaaattcacaaaggaataaatgatatgt

SEQ ID NO: 47545 - DNA, 1269 bp, Heterodera glycines
ggttccttccgacaaagggaatcgcctcattttcgttcgacttatggtccaacggattacccaatcattggcgggagtttgtctctcccttcctttttgaacaaaccgcccaaatctttaaaaaggtaagtaatcaaaggcatttctgctccgttcatcctaaataaatttggtttgcgtcattttcagtcgaaagattgccaataaaagaaagccatgcaattgcacaaaatcaatgtgtctgaaattgtactgcgattgcttttccaatggcgagttctgtttggactgcaactgtaaggactgtcacaacaatttggagcacgacgcggaacgcagccgagcgatcaaacaatcgctggagagaaatccgagcgcattcaaaccgaaaatcggtcacccatcgaacagctcatagttagcaattacggattttctacgctttaaggagttgctgcaaaaaatatcggaaaagcaattgacatggagcgtttgcatcagcgcgggtgccattgcaaacggtcgaattgtctgaagaattactgcgagtgttatgaggtgggaggagcagcgaaattgtcataaaaatagaaaaacatggacaaacaatggtttaacgccctgtaagccaaaacatagactttcttaattatttcgcctattttctatgccgacaattggttggcattctgtgcctaatttggcttttcttttaggcaaaagttccgtgcaccgaccgttgcaagtgccaatcgtgtcggaacactgaacatgaccggcataataagttcaaggacaagttcactaccaccgcgggtggcctcgcccaactcgcggcagcagcggccgccgagtcgcacgcgcgcgcgggcacgccattgagcgaggacgacaccagcgacatttgtgtaggcgaagacgaaacgacgagacaggcaaacccaaaaacgtgcgaatcgaatgtttggcattgtccattttgagatttgtgattcagtcagccgtggttttatatgacagaggacgtaatcgaagcgacgacaatgtgtttggtatcacaagcacaggaacttgtaaatgaaaaacaaaagatgtcaacgccaacaggcactttattttcaggagcaaagtctttcggaggaggcgttggaaaaaagcgttttgcgggagtttggccgttgtctcgagcaaatcatcgaaagtgccaattcgtgcctacctcagaaaagtaatggcgctccgcaacattttcaccttacacccattgaa

SEQ ID NO: 47546 - DNA, 1279 bp, Heterodera glycines
atggcccgtggtcaccaaaaggcgctgtctcagcaaaagaaccagcaaaaacaacagcagcagaagaagggtcagggcaacgatcagagagcggctgccgccaaagcactgacattcaaatgctccgtttgcatggtaaaaaaactaaaatggctttgggtgttgtacggttgatgtccggaccaaaaaaggcttcttgaactggccttccgtggtaacgaataaatccatttttcttttatctgaactgtttgtagttatttacactgaattaattcagttacgtttttgttttcagtcattgatgcccgacccgaagacgtacaagcagcactttgagtcaaaacatcccaaggtaaacaaaaccaaatgaatttctgtttttgttatatgttttagaacgaactaccgcctgaattggtcggtgttgaggcatgacaattgtggaattttgtggactacgatgttttgggggaccattggaaatcatcgaatgtatttgtttggcgtacggattgttttcattgcattttctttattttttcaaacaattttattttctggtgatggtgtatttttgaatttccaaaagcaacgtgttttgcggtgggtgcttttgttatttccccgttcgttatttaaattgctggtgattttgtagggcgtcgcttcgctcggaaattagcaaaaaaaaacgaacacaaaatagcctggaattgttcattcctttttttaatattataaaatgaaacgaattaggaaggaaagaacaattcagacggagtcagtggaatagtcaaaatcggacgcacttttaaagagaaaagtccgattcgaatgtccaaaagggcgtcgtttgctcagattcaattcccaatgtaacaatggataaaaccgttattgtcattgataaatcagtgttcaaaggagaatgtgcctgtttttcttaagttgtgtttatttttgagaaattttctgaaaactttattatgaaattggctctaatgcagtttacgcgtccaatcgacttttgcgcgtccaatcaatgaccaacctcggtttcttaagccataacttttttcttacttggtcaaaacttacattcttggtattaatcgagagcttaaagttcactgaagtttttgtatagaaaaatgcctggataaaagcatagacaaaaattactgttgaatatacgcgaaaaatgatgaattcaggttttttttcattgcaatttttttcttaatgcaagtatttgctcttttcttgtattaataaa

SEQ ID NO: 47547 - DNA, 204 bp, Heterodera glycines
gtcagattggccaaatttgacgatgctaaaaaaattgcactgatcaaagaggtgcgaagtgtgatccccggcatgaatttggtacagaccaaaaaactgatcgaatcggcgccggtggaaatcaaaggggacatgggcaaaacggaggcggacgaactgaaggcgctgttggagaagcacggggcggaatgcgaagtgatctga

SEQ ID NO: 47548 - DNA, 647 bp, Heterodera glycines
atgggaggaacggaagcaaacggtggaaacagtgaaggagaggagggcggagaagaagcgagagaatgtggagaagagaaagagacagcagacggaaaagaacagagggaagagaaagagaaagtgagagacacagacaaaccaaccgaattgagtcgaattcttttttatgtttataaaagtgttaaaaataaacattttcaatatataaatattactatcttcccacaagttgaagacgcattaattaattaaatatgaatttggccagtgattcatttgttttgcaaaaacaaaggaagtttattggttcatctgctcagaatgccgaaacacgagaagggaacgccgaaagaaattgccaaccgtgcaaaggtgacaattcatattttcaaaaatgggagtggggacaatgatttgttgttttgtctttagtcatgtcatatttaaattcctcttttcaggccaaagggctgcaaaagctcaaatggttctgccaaatgtgccagaaacagtgccgggatcagaacggcttcaagtgtcacatgatgagcgaaagtcaccagcgacaactgttgctttttgctgagaaccaaaactcgtatctgcgccagttcagccgcgaatttgaggccaattttatgcac

SEQ ID NO: 47549 - DNA, 1491 bp, Heterodera glycines
  unsure (1)..(1491): unsure at all n locations
atggaaagtaatgcccgtgggtgcgaaattgtggtcagcggcaagttgcgcggtcagcgtgccaaggcgatgaagtttgtggacggagtgatgatccattcgggtaacccggtcaccgagtacatccaagaggcggttcgccacgtgcaaatgcgacagggtttgtgttttaaaatatggaaaaatattttgggatctatttgaaagatcgattaaaagggttttcgggtaccaaaaatacttttgagttagtttccaatgccatgcgatcccatttttctatttttttcgcctctttgttcaggcgttttgggcatcaaagtgaagatcatgttgccgcacgaccccaagggacagatgggaccgcgcaatccgttgcccgaccacatccaggtacaatattctacaaaaactgacacacggaaccgcataactcgggatggatacaaacccgaggatttatttttagaaaaaaaaactccatacctttagattagagaaggacggagaatttgctattaaaaatctaaaattctgggtttcctagacaaaaataaagttttgatactttttcctaaaattgttccttttccatgacaggtcaaagagccaccgattgacgtcgcgccgaccacgccgtactcggagcaccgcgaaccgatgaccactggcatgccgccccagacacaaatgccgcccgcccatcagcagcagcagccgatggttggccaagtgccgtccccggcacnagttttattgtgagaaagaaccgctgatgaatggtcatgatggaggaaggggagatgttcaattaaaattgttatttgttttttttacttttttttttttgctgttgaaacgcatcgtaaatggaattgctaatgaattttggaacaaaacctttggggttaaaaagtaattaattgtgcccgtgatttagcgtcttttgcccatgattagcaaataataaagtagatttagaaatatttacttcaaacaaaaaataaacaggcagtgaaacaaaaaggcatttttcagttaaagtggtcaaaaaaagatttaaaaatgtttttagcaacctacccatatacacgttgcatgagacatgtacacattcataagttacatatttgtacaatatgtaacccattatgtgtacatgtgccatgcaacgtgtacacaggcaaaaccaccaaaagaaatttcgatttttgaccaccctaactgaaaatttcacaactttttttcgtgctattagaaaataacaattttagtttatgttctgtttcagccactcataaacagattccattgaatatctttcgctgctcctcacgctccaaacgttatttcatcagagttgccaaatcgaacacgaattcgggtccaaagttcgcctcaatttcgtcaccagattcaagcaaagtaacgaatggaaagaggaacgcacaatcagcagatagagaaatcgaaaatgcagttgaatcttaa

SEQ ID NO: 47550 - DNA, 1511 bp, Heterodera glycines
atgtgtcgtggtggccgtatgttcgcaccgaccaaagtgtaccgtcgttggcaccgccgggttaatgtggcgcaacgtcgttacgccattgtgtccgcaattgccgcttcggcggttcccgcactggtccaagcgcgtggccatgtgattgaccagctcaacgaaattccgctcgtcatttcggacaaaattgagtcgttcacgaagaccaaggaagcggttggctttctccagcgagcgcatttgtgggacgatgttgagaaggtttcatttaatacattttcgagataagtattaaggaatgctttttaagtaaaacgaaaaatatcagttggagaaataaggcatctacaggaaggaacaggcataaatagtattatttccaataaattgttagcattcctctcgaaaatgggttcagataaaggcgttgcttttctgtgcgtggtttttgttaatctctgcacaaattatatcttttctttaggtttacaaatcgaaacgcttccgcgccgggaaaggaaagcgacgcaaccgtcgctacaaacagaaattgggcccgctggtcatctacaacaacgacggtggcattgtgcgcgcatttcgcaacgtccccggcgtcacattgctctccgtcagccacctcaacttgttgaagattgcgcccggtggtcacttgggtcgtctcgttgtgtggacagagtccgccttccgccagttggaccccctttttggcacatggactcggcagagcaatgtcaagaagggctttacgttgcctcgtgccaaggtatagtatttaacaacaaaccctttgttggtaatcatgttccttcgtaattttatttgtctgttttttaagatgaccaattcggactttgcgcgaatcattcgctcggaggaaatcaccaaagtgttgcgaccgacgatggcgcgaaaagtgcgccgggtggccaagattcatggcaacccgctgaagaaaccctcgctgatggccaagctgaacccgtacgccgctgttctgcgccgtgccgcggtgttggcatcgtcaaaagttaaaaaggcggaggcaaatgaatcggagggcaaacagaagcagccaaaacagcagaagtaagcggttgggctggttatgttaccatagatttttatgactatttgttgaatctacgtagtttttaaaaaattgttaagaacactgcatattgagtcgagtcaattctattacaatattagtaaacccttgggataagaacaattctctctctgggtttgtttgcgactaaaaaagtgattaccattcaaaccgacaaattatctatcttccctttaattttagagcaactgcctaattgaacgaaaacaacatggaacaactgattggcgatgctgactttggcaacacacatttatttttgttgggcgataattgtttttgttgagtggataaatgttgattttgtttcgttgggacttcttataattggttttttgaatggtaattccgtaaa

SEQ ID NO: 47551 - DNA, 2370 bp, Heterodera glycines
ttactgggtttttgagttccttctggccataacttttttgaaacttaaccaaaatttttgagattttgcaaattaataataaacacatagactatcgaacaacaccaacaattcttaatttgattgacagtgaacaaagttatggttcaaaaagtcttccgacgacgtttcggccgacgacgttttggggtgcaccgctaaaaatcccatccctacacatgacccaaaatttggtggtggttttgggtgttggtgacagaatggggtcaccaggacagacaacccatcggtgctatataagacattagtaaaaaacaatcagatgaaaaaatttttggtataaatttactcaaaagcaaccaaattttaaaagcttaatatcattcgatagtcctaaatgttttctattaacttacaaaatttcaaaaaattttgttaaggttcaagaaagttataaaaactaggcttgattttttagttttctcaggtcaaaacttttttgaaattttgcagaatgataaaaaatgtttagagctatcaactaaaatttaattcatttttaacgaagttgtgagtaatttctgtcaaaaattttccataacgaatgcggaatcactgaacatttgaatcctggggatgtccatcgccatccatggacagttgtgggttccgatcaatcgaacaaaaagcgccgcagtgtcaaaattccattcactgaacgcaaataccgtgatattttcataaaaaattttcgcaaaacacttaaaaaacaccaaaattttccgcaaaatatcacggtccggcggggtctgacccgctcggaactgcgagccttgtaccagcttaggactcaagcatatgaaatgaataagtccgaaggactgttcaaatatactgtcgttgacctttccattatcacattgaaaaacccacaccctctcaaaacatgagaaaataatgcataggggtcatcgaacaaaccactacaaaatacgaaaatggcaaaaaaccaaaatctctcctgtatactcattaatgcaaggtcaataagcaataaggtacaggaaataatttatttaatggaaaccaagaaccgggactaatctttataaccgaaacatggctgaaagaaaaaatacaattatttctgaattctcaaatatggggaaatataacccaatttttgcaaaccgtccaacaaaagggggtggatgtgccataatagtctcaaataaaataaagggggattaatagagactggactataattagagcatatacatatattgataattctaaagcttttgatagtgttccaattgaattacttctacaaaagcttaaaaatatcggtattaatggtaagattcataaatttatcgaaaatttcttaaatgaccgttcattcagagttaaaatctctgagcgtattcaaattcaaaaaacatttatagtggggtgccacaaggtagtgtcttaggccctttgctttttcttatttttattaatgatccccccgaacaatttgcctaaaaatgttggtattaaaatgtttgccgatgatattaaaatttatattgagcataaaaatgataaaaatagagagaatttatcttccgcgcttgaggcaataaataaatggtcaaaaaataatggaataaaaatatcaatagaaaaaacaatggtcctttactttggtgaaaataacacaaaatttatttattttcttgatggcgaaccattgcccgaaacaaaatgtgtaagggatttgggcattttaatcgatcaaaaactatccttttctaaccatattaataaaattttaaaaaattcatatttttcttgttttcagcttctccgggcgttaaaaactcggaagcttgaaacattaattttggcatataaaagctatatcagaccagtgttagaatacgccacagaaatttggaatccattgaaaaaagaaaatgtccacaaaattgaagcagtccaaaaattctttacaagaaaagccttcaataaatgtgggcttgtccctatgccgtatgaaaaaagattaatgttttgcggaattaagacattggaaattaggcgcaaaattaatgatattacaactacttttaaaataataaaaaaacatacacatcttaaaccatctaacttttttgctgttgctaaacgggctattcgcaaaccctttttactacaaaataggatatatattacaaaaacaaaaaataatttctttaatagggttattaattcatggaatttattaccgaaaaatattatggaaataaatgaccccaaaaaattcagagaaattgcagaaggaataattaagcaataatgcatattttccctattgag

SEQ ID NO: 47552 - DNA, 1760 bp, Heterodera glycines
aatgggccaaattccctttccaattacagtttcagacataaatgagaaatactgcatatttaccactgaattaaaaaagcgttttgataaaaatgtacccatgaaattgcttaaaacaactattaagaaaaaacatgatgaaaaaataaaaactttagtaagggaaaaagcccgaacccatagcatgctaaaaggaaaagctgagtgccgtgagcttaaaattaaatataaaatattatgcagggagtacaaaaaacatatccacaaattatactgtgaaaatgaagctaaatttatttcaaatggaagaaattctctctataaatttgttagaaatcggcttaaaactaacaccggaataccaacacttattgatgaacgagggcaaattatttttcggaataaacaaaaatgtattttattggctgatgtctttcaaaagtcatttttgtacaaggaaaataacaatgacttactcagccatgaaaaccctaatcagatcacagacattgaatttaatgtctataatatttggaatttattgaaaaaactccctagaagaaattcgacatcgcctgatggcatcccttacatattattaaaagaatgcgcattacctttggcacccatactaactgaactctttagaataattttagattcatctaaaatccctgaaatatggaaaacgtccatatgcagagtaatggaaaaaataataaagctagaaatacttaaatttttgaataaaaatcaattttttagtccatttcagtttggattccgaagacaaagatccaccacaacacaacttctatcaactttaaatgatttttatatatcgattgaaaataaaagttgtgttgatgtaatatatattgatatttctaaagcttttgatagtgttccaattgaattacttctacaaaagcttaaaaatatcggtattaatggtaagattcataaatttatcaaaaatttcttaaataaccgttcattcagagttaaaatctctgaacagtattccaactcaaaaaacatttatagtggggtgccacaaggtagtgtcttaggccctttgctttttcttatttttattaatgatcttccgaataatttgcctaaaaatgttggtattaaaatgtttgccgatgatattaaaatttatattgagcataaaaatgataaaaatagagagaatttatcttccgcgcttgaggcaataaataaatggtcaaaaaataatggactaaaaatatcaatagaaaaaacaatggtcctttacttgggtgaaaataacacaaaatttatttattttcttgatggcgaaccattgccagaaacaaaatgtgtaagggatttgggcattttaattgatcaaaaactatccttttctaaccatattaataaaattttaaaaaattcatatttttcttgttatcagcttctccgagcgttaaaaactcggaggcttgaaacattaattttggcatataaaagctatatcagaccacagttagaatacgccacagaaatttggaatccattgaaaaaagaaaatgtccacaaaattgaagcagtccaaaaattttttacaagaaaagccttcaaaaaatgtgggcttgtcgccatgccgtatgaaaaaagattaaagttctgcggaattaagacattggaaattaggcgcaaaattaatgatattacaactacttttaaaataataaaaaaacatacacatcttaaaccatctaacttttttg

SEQ ID NO: 47553 - DNA, 1378 bp, Heterodera glycines
atgatttcgaattgtcgccactgctcacgggattggttgggattttctgttttggttagcattgatcagagtgacctgaattttatcgggaatattcgggatttgttggatttcgctttatttcttaatcatgttctaccccagtggactgatcagtgatatttaatctcgacgccaattcattgcagagtggcgagctgtacttgcgcgaagtacccgaccaattgttcggccggcaacgagccgaattccgtgcccatttgaccgccctggacggccactgggccgacgcggttgtggtagtcgatttgaatttaccgccaaaatccggcagcgttggcaccggtgccggtgtcggtggtggtgatgaaagtgttccaaaggcggctaccattggccacaaaaaacaccatcaacaacagctcgcaaccccatcgggtattgaaattgccgaaagttctgatcaggtgaggcccaaaagtggacggaatgccaaggaattggtttaaaaattgaaaatcaaaaatcattttttaaacatagacaatgggtgccgttagcaagcattagctataattatcctcactaagtttggtgaagtttaaagatttatggttgcaaaaattataaaaaacgtgtatttattgtaatttagggaaccgtaattattttttgtaattcagatacggtatttttatcgtatctactattttggtacatttttgatacggtatttgctcactccgtaacgcctttttgtatatttcgtatacgttatttcctcacccataaatttttattttttgtacattttggataccatatatattttccgataatgtctatttcgggtacggtatctttaactttttctttttaggcgagtcgaacagttgccccaacagagacaaaaattggttcgcttaagccagcagcagcagcttcatctccacgatcaacaccagtcacaagctcacgttcaacatttgcgacacgtcgtaaaactgcaactacagtatcaccaactacagtatctacatcgtcacaacagccgaaccgattcagcagtacgatgtcgacaagagcaacaacaacagtggctaacgtattctcttcaacgcctccgtctacaacaagcagtagcaccaccagcagaactgctgcttctgctgatcattcctccaacgccaaatcgacgaacatcagtgatcagtcatcttctgttgatcagtctgatcagtcttcgtcgtccagcagcagaagccgagcaccggttgttggtgttgatcaacaacagcaacaaaacgaagtgcactttgcgtccgatcagtaccgggccatgttgccagaggcaattaaatttaaattttttgactaa

SEQ ID NO: 47554 - DNA, 1060 bp, Heterodera glycines
atgatcaattacatgctgctgttctcgcgccagggcaaactccgtctgcagaagtggtacgtcgcatatccggacaaggtgggcaacacacacagcgggagcagaccattgacagtggggtcgggagcggttaattgcttagatggctgctctcacattggattgactacttattgtttgtgatggcaaaattgcgctagcccgttgtgattaattatctgattgtttagtttaatttttgtcccggtttatttagagattaaacaagtggtgagcggcacggtaaaatttaccggccttttttgtgaccggtagatttaccgaccgactatctctgaaaaaccggttgtttttaccgttatgcatttgccgttcactattagctcttacaaaattgtttaaaaaagactgcattttcaggcaaaaaagaaaatcacccgcgagttggtaaccaccattttgtcacggaagcccaaaatgtgcgcattcctcgagtataaggacacgaaagttgtgtacaaacggtgtgccatattgaaaaccaatttaaaataaataatttaatttctcagttacgcttcgctttacttttgctgcgccattgagcagacggacaatgaggtgaatgaattgaaatttatgatgaattactaagatttttcaagaaaaaaatttccaaaaaaacgctgaaacattttttttcttgtaattttcttataaaaaacttaataagattttttcttgaaaaagtttctaagtttgtaattatcacttggttccatgcttattccgaagtttgtttttgaaattcgactcgatttttacggtaattttttccgaattcgccccgaacttcgttcagttgctttgtctggaggtcatccaccgttatgtggagctgttggaccgttattttggcagtgtgtgcgagttggacatcatcttcaacttcgagaaggcctacttcattttggacgagtttttgttggccggcgaaattcaggagaccagcaaaaagcaagtgctgaaggcgatcagtgcgcaggatttgctgcaggat

SEQ ID NO: 47555 - DNA, 1467 bp, Heterodera glycines
atggtggaggtttttaggaaagtgataagtatgttaaattttaaatattattgatgaatctgtttttttcagaatttatctacggaccagtgccagttttggaggtggatggaaaacaattggcacaaccagcagccattatgcaatatttggccgaaaaattcggtgggtttaataccatttagcgggataaatgtaaaaaaaaaaattatcaactacacattcattcatccatagaaaatatttgtaaaatgttttctcaaaatcccattgatcaagctttatttatatctttagctgattctcactatttatgtaatcatgtctgggagttagaagtcataatatcatttttccactttaaaatcacattttgatttttatttttgcatttattttattattgttgaagaattggccggtcaaaacgcgtgggaaacggctaaagcattggagatcacgtgttatgtgaatgacatcatcactgagttggtaccctatcttggcgcaacgatcggcttccttcccggggacgaggtaaaaaaaatggaaaatctaatctgatcatgatcatagtacaatgatcttttgattgagattagtgattatcagcaaatagaattgcttattgtttttttggttatatggctaatcaatccaacgaatgaatgagagaatgaggccatgttccttttttgcaaagcagatttagtccgatttttttccatcaattaactaaaaagaattgacaaaaaaataaaataataaataaattgcagtcattaccgaattaaattaatataagaattcttttatcactaattgtatttttgaatgtgtttaatctgctctaatagcactgaacattgaatttatcagtccggtgattaaacagtgattgttcatttttcttttctacatgctgaatatttcacaataaagtacaaaaagatttgaatttgggtattagttgtcctaattactctcctaatagcttgtattgctctaatttgttcattttaaccaacattttccactttaggccgcccttcgttcggatgttttcctccggtgcgtgaaaaaagcatttcctcttctgatcgctcagcttgatcaatcaaagtccggcttcatgcttccgtccggcttgtcctatgccgattttgtggtcagttgcgccttcgaaatgctgtgccaactcgacgcggctgccgactttttgccgaatgagtacccgtcgttggccaaactgacggaacgggtcaaagcacttccccaactccaaaaatacttcagcactggcaagaatcagaagcacaaaatgtgaccatagagaaggattgattgatagtcttgtcaattggacgaaaaatcattgtgaaatttgtcactaaatttgttaattaaatacgctttttgtgcggttattttgtacagatttttcatgccgcttcctcacccctccca

SEQ ID NO: 47556 - DNA, 2045 bp, Heterodera glycines
atgatctccaacatgtcggcccctgcacccgcgtctctctcagtcagtgataatgtcacaccgaattcccaacaacatcaccagttcacagaaacttctgtcccgaattcttctatcaaaatagaaacaataagctcttctccaacaacacaaaacataacgagctgtacaaataacggaacaaagtcatccgtcgttctctctccaagtgccagcgtaaatgtcacagtgtgtgctgctacatcgagcaatgacgacaatattctgcagcaaaacaccaccgagcacattgcaactggagaaaccatcgtcaacaacggaagaattgagcctttgccgcagctccaccaacggaataccggcagaacattcttccgcgcgccgggcttggaagcgccggatgagaacagtggcgacttccccacaaatgcgttggtctgtcctgattgtggcttcagttgttcttcgaaattccattacaactcacaccgcaacacgcacaggtggccccgttgggcgagcaatgacaaaactgaacaaatgattttcagcacgcaccaatgcccaatttgcaagtttgagactcgcacggaagggcgtctaaagaagcacatgttgcagtcgcacaagcgagagcaaaggcttgctgcaggcattaacatccaatcgccgcccccgacaccaacgacactcaagcagaattcgccaccttctaacggcgatttaagtggcgataaatgtttgagtcagaaaatacttgccagtcaaggaatgcccccggatggcataagcatattaaacaggtggcaattggatgataatgagaatggcaaaaaacgaagttttctgatttagcatgttgtcggcgggagacaattccaacgggacactcgccttagagtccattcagtctatgctcaccaataccaattctgttgccttctccaactccaccgacgccctccttaagatatgcactgatgttattgcgaacaatggtcccaacaaaaaaatgctcaattcgtcgccgcaggtgggggacttcggccacattccgcttgaacagctgagggccctgacggaaaggcacaccgccctgctgaatacatcgacagcaggcacactgaacatcgcagagttacagattgggccagaagcggtaagcagcgcaaagcaaaccgaaaaagagacacgcaaaagcgccatttcagtcgcttatcggaagtgatgccattcaccaacaaaacgcagcacagaacggcagcgatgagaagcaggacacgccacgaagatcggggaagccgaagcagtacaaatgcaagacatgtcagaacatcagccgcagtaaagaggagcaatgggcacacgcacgcctgcatatacccaagcaaaagcagttgacttgcgaactttgtgactttgtgacagaatacaagcaccacttggagtaccactaccgtaaccacaacggacagaaaccttttaagtgctccatttgtgattacagtaagaaaaggacggactacaattaaacaccgcttctgtcgttcagcttgtgtcaacaagtcaatgctgaattcccacatgaagtcgcacactcctgtctaccagttccgctgccaggactgcacttatcagaccaaatattgccatagtctgaagatgcatctgaagaagtacagccacaaaagagcgcctgggcccagcggatttgtggacagcagtgacagtcacggggagggtttgtcggggaatcccttacaattagcactttgattcctcttcctctgttcaatcgtctgaatccccttcttgttacagatcggcctgaaaatgcgtccagttcttcgattggacgtgaagacacggcctcttttgagaatggtgctccaattgggactctccaatcggatgggcactcggaaggaacggaattaatcggagcgctggcaacaacaattcatcagcaccatctcaacgggcctccgcctggcgataccgccgagatggagctgacttctcatcgattactactacaacaacag

SEQ ID NO: 47557 - DNA, 3789 bp, Heterodera glycines
atgaatagtgttttatcgatctccattttattcctgctcagccaggttctttccactgtctcctctagcgatgtgttggaatacacggatgctagctttgactcgggaatgcagcagcacgacatcgcattggcagaattctatgccccctggttggttacttcattcctcacttttttattgcacatatttatcgattacccttcaaatgaaagcgaagcatttttctattttgaataatattacctgtgctgtttccccaaaaaatgctttttaggtgtggacattgcaaaaaactcgctccggaatacgaaaaagcggccactaaactgaagaacaacgacccaccaattccactcatcaaagttcgttttgtgaacggtattataaatcaattggattagacaagttcaggtcgattgtactgcggaaaaagagacttgcgataaatttggagttagcggttttccaacattgaaaatcttcaggaaggggcatgtttcttcggaatatgatggaccaagagatgcagaaggaatcgttaaggtaaatcacgaaatcgtaatgcgtttattcctcaagaaacattgctttttctttaccaccccccctcccccctccaaaagaataataaaaatgaacaaatcaataaattcgttaatattttaattcctctttattaatgacttaatccctgcgacagttatttgaaaacccgattaatccgaacgttgcctgatatatgagcataagtggacaagccagcgcagttaaaattcaaagtttaaccgcatagtttctcgttggtccatacctaagcaattgagccttttgtaatttcgtaaaatggattatatcatctttacctacaacagatacgaacatattatcaatcattttctcactgttttaaactctaatgggttacatgaacttactcccatccattttcactcagctcatcaaatggatggatggattatatatatatatgttctattttttcgtcaccagaagtttgctatttttttcgtctcctctacggtctatccgtttcattattttctcattcttctttctttcttcttttgcacacacacttctgcatcaggaagtaacactcgtggtaggctgcgcgcgagcaggcccggacttgggatggtctgtactccgtgctaggccttatctatgagtgtcagctgagcttttttttggttatgttggaaacatttttttgccacgtttcaatgttttgcgaacgaagtgaccaataaagaaaggatgttaatccaaacacctgctaccaaaggggaaagaattcgtgattaaattcaactaaaataaaatactaacaaagataaataaaacaaaaacattattaagactactagtcttaagtcaacatgttatttttgaacacataaattggccgaattcggcatccgaatggtgggcttataacataaacggctgttttccaccagttattcgtgtgcatctttgtgaagttcatcactctccacaaattatattcaccattcctggtgaaaattctaatgtccttttccttcctcaaatttctcaaaaataaagttgttggcttatctgttgtgatagttaatcattcgattgaagaattgcatctagttgaatgaacatctggttgtcagcaaactcctgcatacacaaaaaccgtctctgccataaacatgtaaaactcaatcttttaaaaattaaaaaaaaagatttctgaaagatctgcctaaaagattaaaagtaatgcttttgagcatatatattctgatgaaaaaattattttcttaaaaatctttaatttttggacaaatttgtttaacaaaaatcaataaaaattggattttccctcgcggcgcctatagataccacggatgcaagttataaaatggtcgtttaattctgcgccgtaattgcgaggactccacaaatatcggtaccgaaaatccattctaactgggcgccgcaaggtcgctttgactgtgcgcgcaataacaataacataaaaacaatgactcgcaagtaggacctcaacactatataatacctaattttattggataaaaattatggcgcattgcgataaaatacacaaggattgaagaacataactttgttccgcttagtgaaatgctggaaaaattccaattactacaacgattgatcgaagcgttggtttctagtgaatatgaaacaatttaataatgcacaagttacttttaagcccgaaactggttgattacaatactttttactaatgtttattggataagaaaaacaaatcggattttgaaagtatccagaagccgctccacggcacgaattcatgaaatttaatttactaaagattccaagcttaatatttacattttttaacagttgaaactaataattggggttataattaaagaaaaaaaagtcctgtaaaatcactttcaacaaaaactaaaaaaaacttagtctattttttggattgttacttgacatttgcacctaggtttaaaattgatttaaaaatttttcgggtgtcacaaaaaattgcatccaaaaaacggctgacaattctttttttaacgtcgctggtgaaaataataattttcgacttttaattttacatacaacttttgtttttgtcgaattgtaacaaaaacaagaaatgcattcctaagattagagaagtcggaatttctgacaaaaaattccaacagtatttcaaaaagaattcttcatttagctaattgctaagattctgtcaaactcacaattattttttcgttattttggtatttctctgtaaatcgcatttttgactgcttatggctcataattttgtctctatttcataagtttttaacctatgctgttttgatttgaaaaatcgggtttaagcataggatcaatgtctcttggaggaattaaaataataacaaattcaaaatattcagtacatgcgaggacaagccggacccagctcgaaagaactcaaaagcatcagtgactttgacaaatttgtggatggcgatgacgttagcgttattgggctgtttgaaggagaaagcaagctgaaggactcctttcataaagtggccgacaccgagcgtgaccgtttccgctttgcgcattcctctaacccggatttgctgaagaaaaccggatacaccgagtaggattttaacatctttaattccctttatcattaaattattatttcacttaagcgacattgtggtgtttgtctcgaagaagttgcacaacaaattcgaaccgaacgaatttcattacgatggcaattatgacacggacaaaatcaaaaacttcctcctctacgaaacgtacgttaaaataattactgttgtttttttgtcgaaatgtgattgcattcaaattatatatttttagcaatgggttggctggaattcggacccaaggaaatctcttccaatttacgcatcgtccattggttgttgtttactacaccgtggactacttgaaggacccgaagggttctaactactggcgaaaccgtgtgctcaaagttgcgcaggattacaagcgcaaagtgcactttgccgtcagcgacaaggaggaattcgctcaggtgttttctaattacattattaataagagtttgtacacacagacaaattttccttaggaagttgaacaaaatggccttgcggaccgtaaggaaagcgacaaaccgttggtggcggcaatcactgtcgatggaaagtacccaatgaacaaggaattcag

SEQ ID NO: 47558 - DNA, 702 bp, Heterodera glycines
ctgagcaacagcgaagatttcggaagttgcacaactcgttcacccgggaacactttgtggagttggacgtcgtcagttttttttctccattttttataatttttttgcccttcattcctttgaaaaaatcatagtttttagatagaatactgattattacactagaaattcccagtttttaaaacggattttttaaacattttgaaaaatctaatttcgttaccgtcattctttagcttttgccgtaaatctcttgaaaaattttctgttttcattcaaattttgaaaattaaaaatgtcaaaaatcccaagaaaaaatgccattgcaattcctgacaaagcaaattatgataattatgcataaaattcagccaaaagccaaggcggaggacaatttccactttatcacttacgtgccggtggacggaaagatttacgaattggacggaatgcgcgaggcgcccatttgcctggcggacattgagccgggaaaagaaagttgggtggacacgctgcgcccattcatccaacggcgcattcaaaagttggctaattcaaaatgccaaaattggcaaaaaaaaaaacaattttttttgttggttttaaggtacacagagggcgaaattcacttcaatttgatggcgctggtgccgaatttgaagaccaaatacgagcagcgggttgccgagctgagcgcggtat

SEQ ID NO: 47559 - DNA, 1171 bp, Heterodera glycines
attaaagcattacaaaataatttttcaaggtccgagagcttctacgtaagctaaggcttgaaaattcaagactcaaccgacaaattgggggccatccaacgcgaggaagaaaaagtaaaatatgaagcagggctctacctttattcttgaatttactcgaaaaaccttgaattttaagtttcagtgtatttttcctttactgccagtatttgctcgtttcttgtatttttcttgtatttataaggtcccgagactaattatgtattgaccaaataagaaagatttattgtcttattttaagaaactgaggatggcattgattggatgcgtaaactgtagagtttcataaatttaaggtgaaacgggaaatcaaaacagcagcgaaaaagggggacagagaagtgtgcattctgttggcgaagtcaatagtcaactcgagaaaggtgaatttcaatcatcatattttaatcaaactgtttttgctagtagaacgtttaattttcaagtcagtgagcaaactccacggaacaatcgcacaaatcaattccataaacatgaacatgcagcatcaattggccactattcgtatggccggcacactaaaacagtcgacggaagtgatgaaggtcatgcaacaattgttgaaggtagcccatttggaattgcacttttcgcattttgcccaaggtgcccgaagttatgcaagtgatgcgagacatgtcgaaggaaatgactaaggtaacagcgacggaatttttaattcgattttgacattttctttagatgggaatcatcgaggaaatcatcgaggagacaatggagtccaccgaacctgacaatatggaagaattagcacaggtaaactgtttttatcaagggaagattttacttaggcgaactcggtaacccccaatatttcccaatctttttgtccttttttatgggactagtaaatttactattaacaattgccagaaaacaacctatagtaattacctaatttatcatattgcggttttttaaggaggaagtggacaaaattctttgggaagtcactgccggcgaattgggcaaagcgccagcggcggtgcgggacgaactcggagaaaagaaaaggcaaaaagaagcagcgattgccacggcgaatgcattcattgctgaacaaatgggc

SEQ ID NO: 47560 - DNA, 1641 bp, Heterodera glycines
tttttggatgcgttgcgcgagtgggcgaaggaaaaggccaattgaaattggaggagacggaatttgccgtggagaaagaaaaaggtaaaaatggacaaaattcgtatggatttaatccctccaattttggtgttcgacggcattattcgactttgcttcaaaagtgtaggcaaatgtttgttcaaattgttgcatccaatcgacgggaaaaagggacgaccatcgaacagagtgagtagtttactaacccaataagaagtctaaaaaaaaatttcaccattttttttgaaattttatgaagaattatgtactaacatcttcatttttaacactttccttaataagccctctcagtgtttcgagttgagtttatctgaaagctttgcagagaggcccgaagaagagggaatcaactcactttaaacattggcacaaatacggcgcattgacaaagtcttttctgtcggcagtgcaaattgtaagacccatcttcgaactttcccgggtttcttctttgaatctctccccctttccccccattttcagtttctcatggaagtcgattctgtccaagttttgctgtcgacccttcgcgtggtcactgatctcgtcgacttgttccttcatttccccaagctttgcaaatccctcataaaggtcctttccgattttgaccatttgatagagatttgatttttcaaggttttgacccatttttggagtcgcaaaacggaagaaatccgttgcattgccttcgtggcgttgtgcaaaattgccaggctcgactccgagtgtttccccgccgtttacaaagtccgaatttccttggcactcacttatttttcttaatgcttttaatgttcagaattgttacacggcgtatgtcgccaattgcaaaaccattgacgatgaaacattgcctttcattcactttatgcaggtgccgccttaattccgccgaaactttgccgactttttcgcttcctttccctttgtcagtgttctctcgccgaactgacttttgtccatccttcccaagcttaccaatacgcattcgtttacatccgccagttcgccattcaccttcgaaatgcaatgattgccaaacgaaaggtgcaaaaagacattcacatttatatttatcgttttggttggctcttcaggatttgatccaaaccgtgtacaattggcagttcgtcaagggccttcaactttgggttttggtcatttgcgaaggctctaaacgctttcggccgtcgtccgacaaaagtgccagttggttctatgagttggtccatccgctcgtggaagtgatcaattccctttggaggtgcttttattgctctgcattaatttcccattttctgtccaattttaaggcttttcccttccactaaattcttcccattgcgaattcattcgattcaaatgcttttggacatccaaagagagtccgaagtgttcgtcccgagtttggcctttgctgttgaggtgcctttgtcttcctttggcttccattttcccatttctttgtcagcttttggatgagttggcacagatcgacgccaaaaggccaacggcgggcaaaggtcgaacacgcgaaccgaacgccgaacgaatgctccgattgtcgggcgaaca

SEQ ID NO: 47561 - DNA, 2921 bp, Heterodera glycines
atgttcgacgtcggtggtcagcgtgacgagcgtcgcaaatggatccaatgcttcaacgatgtgactgccatcatctttgtgtgcgcttcttcttcatacaatctggtcagtgcaccacactctttttgccatgatttctttggcatttttctaaaatattaaacaattattaaatttaatttttctgttagccaacgattaattcccatatgattttgcaaatccactttggcatgcgatttttttggcatttttccatttggcactcctatcttttttgaatttggcgcttccattggcattcctttttggcattcctttttcattattttggcattctattttctccccccccccttttaaggtgctttgggaggacaacacacagaatcggttgcgcgagtcgttggcactgttcaagaacatttggaacaaccgctggctgaagagcatttcggtgattcttttcctcaacaagcaggacatgctggcggagaagatcaaggagggccggcaccggctggagacgtacttccccgactttgccaactaccaattgccgcaggacgagcgcgtgccgccggacgaggacatcggcgtgtacagggccaagtgctacatccgcggcgagttcctggtcagtccttttggtgctaattgggctagttataggggagggtaattagcggtgatagaacaaagttttttttgatcaatcctagtgctaattgtttaattaggggaggatacttagcggtgacagaactaagtttttgtttgtataatggctttcaaacccctttgatgaccagattgatcaacttgggtaattaaggattaatttcttttgaaatgcgacggttttcaaactaatttaaatgacatattttgctaattagttcctaacccattcccttccccaccaatcactcatttccccccccctttttttcacattccttctcccccccccccccgggggatgcgattggaatttgcaatgaatgagagagtgagtgagtggtgccgaaaagcgccgccgccgtcgtcggaggggccgggcgatgggggaggggtgctttgtgtttggcttggaagaagcatagcaaaatgtgtgagtgagagtgagtgctctcacacttttattgctttaactgcttgggtgagtgcctaaaatgctttttgtgtctcggctctccccctccccgtccaaggcttttcccctctcttccccccattcatcttgttttctctctaccctctccatttttctctttatccctctatatctcctctccctcccctctgccctttctctctatcttgctttttgtgtctcggctctcccccttctccaacaaggcttttccctcacttttcccgtgcattctctctctctctctcccccctctctctctctgtctctctctctctctcttgtcccctccaattttccctgtatctctccatccccccctcctcctctccaattattgtctctcttatcgctccgtcgcaaatccccccccccccccgggggggctgccaccgctcctccgtcctctctcccttctcccctctctccgtttctaaaaatagcttttctccgtctctcaaattgcgtttgtgccccctatttttggctccccccccccctcactttatggtgcacttttctcttcttttattacacttttcctctgctgctgctatggcgacaaaagaaaatggaaaaaagggaaaaatttgggggatttttttatttgcaaaaattggccaataaaaatttgcgtcgtttcgcggggggccaaccgagcgataagagaagaagaaaatggagaaatggtgatgatgatgatgatgatgatgagataaaattggcaaaacattggccaaaaatagaacagaaaaaagcgagaggagacgaaacgaagaaaaatggcaaaacacggacgggaaaatttacagaaaaatgccgcatttggaagtgccaatttgggaaatcagcaaacagagattactgattttaacatttgattggatgtgatatcgaagtgtcgagattgaactgtttcgggagtgaatttattggaatttattaaacgcattataattttgatttaattgtatagttaattaatgtgtttggctttttgacatttttggcacactgccagagggcaccaataccgtacttctgtttttttggagtgtgatcagaaaattcattttggcctctgctgtcgcttccgtctcttctgataaatctctctgattggtcatcactttttggcagattctcgttttaatttcttttagtttccccacttaaaaatttcacttccaattttatgtccttctcaaaaagaaggtaaaaaaattatttaattatatttttataaaatccaaaaattaattattttgttaataaaatattacatttaacgaccctacaaaataaaattgatcactctctccccccccccaaagtaatcaacttgaaatatttcttacaaattcccaaaaataaacgccccatcccttaattacccttaattatttttttaaattcgataaaataaattaaaaattttgaattacttttcttctttttacaatttccaatctctgtccctttaattacctctaattaattaattaattaattttccccctcccccaacttagaaaatctcttcagccggcgtgaccagcaaggacaacagccacacgcacacctgctacccgcacttcacttgcgcggtggacacggagaacatccgccgggtgttcaacgactgtcgcgacatcattcagcgcattcacctgaaacagtacgagttactgtagcattagcaacgcccacccgcctaccgtatgcggcaccaatgggaccgaccgtatgcgccgcgacggattaa

SEQ ID NO: 47562 - DNA, 1603 bp, Heterodera glycines
cagcactcgccgccctcgttgtcctccgcttcgtacgcgtcgtccaccgcttcgtcctgctcggagcacccggagaagaaatacttttgccagcgatgcctaaaccacggcgaagtgagagacagagggagaaaggagcagggggagagaggggaaagagagagagaggaaaattttaaaaaatgcgaaaattaacatgaaaaactaagggggaagtaatgaagaggaaattgaaaaaagccgcgtttcctctccaggaacatcctcggaaaggccacaaaccgttttgccgctacagagagtgccaatgcattgagtgccaaatggttgaacaggtgggagaagaggaggggcgaggggaagtcggaaagaacattttacacacattttgttgccattttcagcgtcgggtactgaataacgcgctgaacccgaggaagacgaacggcgaaagtgccaaaaagggtgccaatcagcaggggccaaagccgcgcgacccgaagtgcgcacgatgttcagcccacggggaacaggcaataaaaattatggaaataaattgaaaataatttatttgttgggagcatcgcttttgagaggagagaaagagagagagagagagagagagagggagggagggagagaaacaagagggagaaaaggacagaaggggaagaaaagggagttatttcgagaattaaatgtctgacgccgaaaattggcagtcaacttgctgctgatcactgaccactttcttactgatcattctgttcagagtgcgttgcgtggacacaaaaaggcgctgtgtccgtttttggagtgcgcttgtgccaaggtgggcacaagccgacatttaaatttttataacaaccgcaattagccaaaaaaatcccggccataaaattaattagggcacaataaaattgctaaatttttccgttagtgcgctttggtggagcagcgacggcgtctgatggccgaccaaatcaaactgagaagacagcagaagaaggcgcgagtgcacaccacacaccatcatcatcagaatggccaatcgcagaacggcggcgccgggggggacgaagagggacaaaggacgccgcaggggacaaacgccgggggcaaaagtccgtcgccgaaccatcagcagcaacagcaggtgggcaaaagtgtggaaaatagtggacagaaggaagagacacagagaaagagagagagagacagagaatgtagagactgggaaagagagagagagagagagagagcgacaaagagacacagacaaggaccattgacaaatgtgaacaataattgaacccgagaggcgagtccaagacccctagaaaccagagaaacttctggatgatctcatagttttctcggttaccttccgaaaatcggttgctgatcagccaatatctgatcaattaaactgttaccttttttgaataatggtcgaatatgatgcttattgatcagtgattgaacaacgccctcccaccccctcaaaagttaatgaattcgaattcagcttcggattccgatggcaatgctgctgaagaaggcgtacgagaagaagccgacctatccgtccacaatttcctcg

SEQ ID NO: 47563 - DNA, 811 bp, Heterodera glycines
gggactgcgcgaggcgaaaagcgccaaaggactgcatacacgcggaaccaagtgctggagttggagaaggagttccatttcaacaagtatttgtcacggaaacggcgcattgaaattgcccattcactgattctgacagagcgacaagtgaaaatatggtttcagaacaggtcgggggaacagagaaataaagaaaaaaagaaaaagagagaggagaagagagaaaagagagggggagggggagaaggtagagaaaagagagaaagaggggcaagaggagggagagagagaatgagagggactaggaaataaagatagagataaagggatagagagcagagggataggagagcggaaagagagggggagggagagaagagagcagacagagggataggatagaggaaagagagacagagagagaaggagagggacgagggggacgagggggagagagatgataaggactaggaaataagatggagagaaagggagataacgagaacagagggataggagagcggaaagagaggggggagggagagaagagagcagacagagggataggagagaggaaagagagggggaggagggagagaagagagcagacagaggaaaggatagaggaaagagaacagagagaaggagagggacgagggggagagagatgataaggactaggaaataagatggagagaaagggagataacgagaacagagggataggagagaggaaagagaggggaggagggagagaagagagcagacagaggaaaggatagaggaaagagaacagagagagaaggagagg

SEQ ID NO: 47564 - DNA, 589 bp, Heterodera glycines
atgaaattggacgaattctgtgaatatttcggggaggatttcacatatttaattgacgcaggtgttttaatttgtgttgcattgcccaattaatcatttctcatttagcaaaaatgggaaacatcggacgctttctcaaccgtatgctttttccttttatcatcactaaccttaaaatttgcaaagttcagactcttgcgatccgaattgtcatgtccaacattgtctcgtcgacactcatgaccttcggatgccgtggtgtgcgtttttcaccaaaaagttagtcaaggccggggaggagctctgctgggattacgcgtacgaaattggttccgtggagaggcaagtgaactgcaaatgcggcacgacggtgtgccggggccgacttctctgaggaaaagtgatggcaattgatagatattaattacactttgtcagcaattacctcactttgtttgtttgttatttgatggaatgggaatgaacagtcatttcgcttgctttgttttcacctttttggctaacttttcgtctgtccgtgggaaattgtcttcctttggcttgtccccgccattccccgcacaaatta

SEQ ID NO: 47565 - DNA, 1305 bp, Heterodera glycines
atggcaagagaggactactgcttcgatgcaacggcagcggcggagcagtctcggccttcgacgacatcttcaacacttgtacacgcgccgactggaacgacggctcgctgggagggagatggcctgtcaagcagcttcgtggacgcgatcatcaggaaggtcaggcagtcgcctgtccaacgcttcacggatgaggtgggatttttttgacatgacatttcaacaattaaaaaatttcattttttccacagatcaccgacttggagctcaaccaactctgcatggcggccacgaacatcttcagaatgcaaccgccactcgtcaggattcagccgcggtcgtcgtcgtgggcgacatccatggacaattcacggacctgcagaggatcttccacacgcacggcaaccctccagagcagcagtacgtcttcctgggcgactacgtcgaccgaggcccccagtcactggaaacaattgttcttctcttctgctacaaggtgtggttttgtgaatctttaacagaccaaattacaccccaaaaccattgcaggtcaaatacccagcgaacttcatgctgctgcgcgggaaccacgagtgcgccaacatcaacagagtgtaagtgaaaaagttttttgtgtgtttttttgtgattaatcattccccccccccattttcagttatggcttcttcgatgaggtcaaccgccgctaccagcgtccgggtccccgccgcctctacgacctcttcaatcagacgttcgcctggatgccctacgtcggcctgatcggcgacaaaatcctgtgtgagtcacattttttgttgttgttgtccattcatactaattcattatttttcaggtatgcacggcggcctctccgaccagatcaacagcctggagcagctcagccacctgaatcgtccgcaaatcgacccgccgcttcggacgctggagatcgatcttttgtgggcggaccctgcgcgcggagttcgtggcgtcatcccgaacaccagaggagcgggcatcgcattcggcgaggacgtggtggagcgggtgtgcgacatgctctgcctcgactacatcattcgggcgcatcaagtgagtttttttcttttttttcatttgcttctggactaaattcccacttcccctttccaggtcgtgatggacggagtggaatatttcgccggccgccggctcatcacccttttctcggcgccgcgctacactggccgcaacaacacgggagcaacgctgacaatcgcgccgaacctgagccacagcatcacccgcttcccgccggcctga

SEQ ID NO: 47566 - DNA, 3066 bp, Heterodera glycines
atgattatcagcagcaaagccgtccaacttttgacttgctacagaaataggatcaccagaaaactacaatattcgactacggagaatgtgccggtgaatgtgcctgagccggtcatttcctcctccaacatggcacagttccgcaagggagcgggcggtcgttccagcttctcgggcaatgtcattacaggtcccctcattcttattatattactcgtagcaattgggaagttttgtggtttcttcgaaaaataaatttaaaaattaaagaaacacattttctagactaaaaaatacgctgatcaggaatctgagctcagattttgcaaatttttgtctatgatttttcaataataaaaaaataaactgcagccaagcgggctcgaaccccacccccatctcatatgacccttaagagctagtaattaaatttcaaaaaatcgtaaataactaaaaatatgacttttccagacattcaatagctcattcaaatgctcattttgatgtgtgtgtgtcgtttacgcccgactaattacttaaaattttggaaaaaacaagtacttgataaaaaaaatcatagataaaagcaatgattttgcaaaatccaagactcagattcgtaatcagcgcattttttcagcctagaaaatctgcttcttaaatttttaaatttatttttgaagaaaccacaaaaacttttaccattgccactcgttatgtgtttcctttaaatgtctcgtttctctgtaaatttgattttttggaatctgaaaaaccgaaatgagaaatttagaattttcgatttctgttcaagttctggttaagaattagaaatttgttaaattagatgtgcggtttgtgatcagaaacccaaaaccccccgaaactggttttcacacaaaaaattttacaaactaaaagaaaatactctttttttcttagtttttggcaataccggatttaccggccgaagggtggtcaatcggttggccagacacgcaaatcagctaattttgccgtaccgctgcgattcgtattttctcagagaattgaaagtgccttgtgaccttggtcaagttctgttttttcctttccaattggacgacgatgaaagcattcggaaggcagtcaaatacagcaacgttgtgatcaatatgatcggcacatatgtcgacacaccgtacggttttaaataaaattaatggccgggaaaatgagacaaaagacacaatttatttttaaggaattattccatttatgacgccaatgtggagggtgcgtggagaattgcgcgcatttgtcgggaaatgggcgtggaacggctgatccatgtgagcgcattgaacgcggacccatcgtacaaaacacaattcatcaaaaatgtatgtgaaatttggataatcgctcactctttcccccatttttgaaaagggcgcctttctgaaaagcaaaggcatggccgagcaggcggtccgtgccgaattcccaagtgccaccatcattcggccctctgtgatgtacggcgacattgaccgtctcatttataatctgatcacccgttggcgcgttgacccgttcggcaatgtgtacactttcaatgcgggcgaaggcatttacaaaatgccactttttgtgagcattccgtttttaaataatgcatatacaatattttctttttaaaagtaaaaggtttaaaacctccttttttgaggtcaatgactttgccgacggagtgaacagagtggcgatggactcctcaacagcgggcaaaacctacgaatttgtcgggccgcactgctacgaaatgtgcgagttggtaagtgaatcgaaacgtattttcatgtccatgggagtcgaacaaatgacgggattgaaatttaatgaaaaggaattttcattatgtggttaacgaacaagaaagacatttgtcgtttattaggtaaatggagctgaattgtatgtcataaatggacgggggggtcagaaattgcctttaccaaataagaaatatcccccatcagaggccaaaattgaaaaaaaggctcaacattttttttaacctttttttttgcgtggcgcgctttttccaaaaaatttgcggaaggggggcggggggggggtccggcggtgcgaatagacgccgccggaaaaatgctgcaatttattaacagatttattttcactaaataatccaaattccataaaaaaaaatatacgaaattgaaaatgaaatccaatttcgttaaaaaattttgagtttgcaaaattcttttttccaattttcgtaaaaattttatcatttttaccagtgctttttcgactttcatcgccaatttctttccattttctaatgcccccttccccgtttagttcgacttcatcttcatcaaaggcggcctcgtcgctgacataactagcagataccgtcgtgttggtattccgatttggttccttttcacgtcttttctctgtcattcgtatacgaaaatatatcgtcgtcctggcgttattaattgggagtggttcgatttcatggtgcgctacagatttccaatttcaaattttaagggatttatttgttggaaagcaaaagataggcatttaaataaaacgaaagcttaagttttgatcagtcttttgcattttttgaaaaaatattcaactaaaaaactcattgtcaggaagcgacgagtgatgtgctgtcggctggggacacttatcttctgaaggatttgggcgtttcgttgaccgattttgaggatatgggcggctattacgccatgcaaatttcttttcagaggtgaaccaaatgcgtttagtttaaaaaaaaatacattttaatggggtaacaaattttttaacggaaaaataatttatacatcaaaccagcgaggctcaggcttattcgactaattctaacaatttcttccagaccataccagccaagaatggctgactatccgcagtgtccgctcccccttcgttcgccgcctctttacaaacggaagccgatcacttttaagaagcaaaatatagtcactgagcaaagggcgttcggactttgag

SEQ ID NO: 47567 - DNA, 518 bp, Heterodera glycines
gctcgttcaaacagcgcccggtattcgttggtcagaaaaggcgagtcgtaatcttcaacgccaaccatttgctgaaataatggaagtttggcatttatttccgaaacaatgacattatggaagaacacaatttgatttgattaaacttacgctccacattggtggggcgcattgatcgatcgtcagaatgcctcggaaagccttttgtttcccggttaaactgtgccgataccacgtttctgggtcattggcggaaaggacatgattgacgggcacgtggatgagagtacaaagacagcgagtgccatctttgagcctgaaatgttgaaaatggatccaaaaatatcaaagtggaaggatggaccactgaagagtcatgccaattttgcgaccaatcagaccaattcgcttggaagcttcaaacgaatattgattttgggtacaatccggcggattcgaaacgccgggaatcaaatggaacgtttcgtagggggagagagacaatttgcgtgaattta

SEQ ID NO: 47568 - DNA, 1292 bp, Heterodera glycines
cttccaagcgaattggtctgattggtcgcaaaattggcatgactcttcagtggtccatccttccactttgatatttttggatccattttcaacatttcaggctcaaagatggcactcgctgtctttgtactctcatccacgtgcccgtcaatcatgtcctttccgccaatgacccagaaacgtggtatcggcacagtttaaccgggaaacaaaaggctttccgaggcattctgacgatcgatcaatgcgccccaccaatgtggagcgtaagtttaatcaaatcaaattgtgttcttccataatgtcattgtttcggaaataaatgccaaacttccattatttcagcaaatggttggcgttgaagattacgactcgccttttctgaccaacgaataccgggcgctgtttgaacgagccggtgtcccgtgcaaaaagttcttggccgggtttatggtgtccagcgatgccgtcgtcaaaccgggcacaaggatggacgtccgacatttcaaggtcgtttgcgctactttacaacccggattgaacttgtctttatgcatcattgtcagcctggacaatggattactgcctcgggccgaaccatcgattggggctttcaaggcgtaatgcaccgatggggcatgaagggccaaatgagactccagtaagtgtccacccttcgtaagggatttagtcgcttaattgtcgtgtcattttcccctaacagtaagggaccgacaaaagcgcatcgtcgagtgggggccatagggacgaaaggcgaggcaaaggtttggccgggtcggtgtctgcccggtcacatgggttacgaatggcggaaaatggttggaattaaagtgcttcggatcaatccgataaagcaggtcagtcactctttggttgttgagtttattggcctttcatttttgttttcatccgctttttcaggttatttatgtgcgtggcaatgtgccgggcgatattaacgagtggattctgctgaaggattgttttgcaaagaaaaaacgggtggaagagccaccgtttccgaccttttacccgacggaggaggacgaagaagagatgcaaatgttgtcgggacaggacaatttgttcacgatggtctccaaggacatgtacgattccacggcgcaccaggtcagactttgctgggagtgtttcgtttggagttattttaatttcagttttcacaaccgtccgtcctttacactgaagcggacgaaaccaaacgaacggagagggacagatcgagagcgaagacggccaaagtgaagaag

SEQ ID NO: 47569 - DNA, 1378 bp, Heterodera glycines
atggatcacaactactggcaagcacatccgaacaacccggttttgctgctgcttttatcaaataaaatgatcaactatgtgcttggcatgttattttttcttttctcttcagcttgtgaatcgacctgaacggaatggaacgaccgaacagaatggggcgatgagttcatgttcccatccccaaagagcttctggagagcctaaccaactcaatgttgtgctcgtggatgggactgaagttgttgttaaggtgaccattctgctgatggtaaaatgttgttccatcatgcaaattgttcagatccacaatgttttgtgctgctatgaattgcccatgcacattgacttacgacaggtcgcatatggcagcataaatgtggactataacagagcaaaaggggtcagtggcatttcaatttcgacttgttttgttcatgctttgttcagattttgcacaaacagttgcgcaagccgtcctgttcaattcgaattgcaaacagtggcaaagtggtgattcacggctgcaaaaggtggcaaaaggaaacaaaacattcaaactgcacatttaagcgaagaagattgcaagagagtcgcacgcgcaattggccgaatgatccaacggagcacgggacggttggaccagcggatttgcatccgtaactacagggtaaagcgaagatgaacatccatccttagcactcagtagtctttttgaggccaaaatgcttttaccaaaaattatttaaaaagcgagttcaaagaaattaattaaaaaatttaggtttctaacatattggctacttgtcgaatgccttttgatattcgtattcaagaattgggtcgaaagcacagggaagccctttatgagccggaattgatggtcggtcttcaatggaatttgaaagagccaaaggcaaatttgcgaattcacaccactggcactgtcacagtcactggaggtgaaccgtcaaaaatgaattttgttaattacagtcagtgaaacattgcagcaacttccgaggcgaatgttgtcgcttctatccgcaaaatttatccgtttctcaaagagttttcttcccaacgcgcttctgtcgacgttgtgaatttggacagtatcgactcggcatggttcagcgacacattgcgaaaccgacgccggagacggccgccgcagacaaatcgcgactacgcactgcccaatgacacggacaatcgctcgaggccaattccggcgaagcgatctcgttaccagcaaatccagggcagcggcttttacaacaacgccattcacaactcggacgaagaagatctcgactttgcgggtgattatgaagacgacgactacgaggaggagagggaggaggaggacgacgagtag

SEQ ID NO: 47570 - DNA, 207 bp, Heterodera glycines
ttgttcggcatcgcctaccatcaatgccgttggaattacaatgatcaggacgatctgctgagcgtgaatcgtgctttcgacgaacatgacattcccgtcgacgtgctttggctggatattgagcacacggacggcaaaaagtacttcacctgggacccggtgaagttccccaactccttggagatgattcaagaaattgagtcgaag

SEQ ID NO: 47571 - DNA, 1149 bp, Heterodera glycines
atgtcgtctgaaaacctcgcgaaactctacaaaaacaccggaaagtcggaagtattgaagtgtttctctgcttcattaaaaatattctcattttaggactcgcgtcgacgtcgaacagaagtaagtcaaaatgatgttcagggattagtcattgattatgagatttaacggatattatccatgaattccttctattgcagaccagcgttgagttgcgcaagaagaagtgcaatgaggagatgatgaaacggcggaacatcaacttggagtgtgcggacgactctgccacatccgccgaagaagtcgtaaccgatggggaaattggcgaaccgacgggccgtttgtcgcccgaaatgctatcgttggaagacgcagttgaagttttgcaaaaagaacaaaatgcggagagattccgattggcttttgagtcggtcaggcgcggtcagtggataaaaaattgatacaatttctgtgctcctaccgaggtttccgtttttagttttgagtcgcagcaaatgccctccaattgacaaagtgatcactcttggctttccttgtgctctcgtccaggcgctccattatgacgtttgtgttttttatttgctttctccacacttggctcattttcaggatgacaaagtgaagtttgaggcagcttggtgcatcaccaacatcggtattttgaatttgatgacggcataaggtttaaaatattaattttccagtttctgggacttcggaacagaccatgaccatggtcaacgcgggtgcggttggtccgctgcttaaactgtgctcctctccttcgctcaaattgagtgaacaggtccagttgtcttcgtggatatgttttgtttcgtcggcagtgtccaaaatatttttttgttcccttaggctgtttggtgcattgccaatatggccggagatggcgttcaacttcgcgacctgctgatttccgagggtattctgccgttgcttgtcgggttggctgaccgcgcggatactttgggcatttcgttcgtgcgcattctcacctgggccttctccaacttgtgccgccacaagaagccgcaagtgccattgcaaatgttagccgtaatggcaccgtcaatttccaaactgatcaaatatgaggttgacatatctgat

SEQ ID NO: 47572 - DNA, 1233 bp, Heterodera glycines
atggaagtgttcttctttgaaccggtcgaatatgagcgcttgtacaactgcagctcctacaacattgaccaaatcccattggaaaaacgccaaaatttggtgatcggcgcaatatttatgcctatttcaataattttggaggtaatatacacaaaaaaaaatatgcaaaataattaaattatttttaaaagatactgtatgtaccgtgtatgatcgccatacggaagcacatggacaacacatgttacatggtgattagtcgggatatatttaaagaaaaaatacgaaaaaatagatatgaaaaattggttaaaaatgaaattataaaatcttttaaatttttggcaaattcaaaaattaaattttagaggagaaattttaattatttaaattttaataaaaaaaattgttgtttattttaattcaaaatgttcagctgatgttttacatttccataacggacatgatgtgtttgttgatgtgcggcattgtgacaggatatttggccattgttggcgccgtgttttgctcggcaccaagcttcatctacattttcggggcttatgggtttggtgagcacacaactaaatgcaataattatcaaatttttgagttatgctttttcaaaattagattttttcataaaattgcaaattttttaatttgtagctttatgggccaccgaaacaactgctgaaatgtttttggcgatcaatcgctgcgttgaattatgctcaacttggcttgcggagctgttgttctatgggaaaagaatttacctgtggatggtgagtaaattattgaattggaaaaaataaaaaattttctttaaaaattaatatttttttttattacatttttaattactaaatagtaaattaaacaaatgagaccaaattcatacaaaattgcttaggatgaactggaaaaattctttatttaaaataccaaaagagtttttactaaaataggctgcatgaaattatttcaaaatattgagaaaggccaaaatcgtttaatcaaattgttaataataaaaattaaattaaaaaatgtaaccaaattcttagaaaattacttaaggtgttcccaactgtgtacgggttgtacgccttcatcttcactgaaccaattctgttcagcggtttgcacatcacctggtttttgaacccgcacattggttatctcaatgatggaacaattgtaaaaaaaattttattatttttaatttaa

SEQ ID NO: 47573 - DNA, 1139 bp, Heterodera glycines
atgcaattaattgttccgattttattgcttctgacattcgtcgtcagtttgccaatttgccatggaatgaacggacttccgggcgaaaagggcgagccgggctacccggggatgccggggatgaaaggcgaaaaaggccagacgggcgagccgggcgcgccgagctatccgggccttcccggatggccaggcgaaaaaggcgacccgggctatccagggcttccaggtaaaaaatccgactttttttaaattttctttttatttattacaaaaaatttagaaataaaatttatatttgttttattttcaggtcttcctgggccgattggagaaccaggtccaaattcaatgaaacgaacacaattaatttttggtttttcaatacttgcaggatattaaattaacaattatttttgaaaatgaaaataatttattttcttgaaatatctgaaaatattctcgagtcgaaggaatggcgacataaaattcgggcactgggaagtttaggcactcttataataaaagaattgaaaaaagtaaaaaatagttatagtaaaaatgaattaaattaaaataaaaaacaaataaattttaatcaagttcgcaatttagttttaaggagtttcctgcccatttaattaaccattcttttttttgttttaaatttttattttataaaataggtaactatgatgcccaaattcgggtgccgaaaagcttccccctgcgactgctacccgaattaatataaataaaattttttggatagaagaagccttaaaccaagtaggaaattatataatacaattatccagagtaaaaatttaattgataaattctttcgttctaattctccctgatttatatgaattgaagacaatacaatacatatatatgtacctagtaaaataaatgaataacagaaattataaactggaagaaaacaatttccatttttgccatttttaggagtttgtgccgaaaattgtgaccgaacaaaacgccaaggcgcggagaaccaatgggccggcattgcagggacaatcagcgaacggagcgcaaaattggaagcggaactaagccaaataaaagaacgattatcaaagcttgaaaaagcggaggaaattccaaatgagtga

SEQ ID NO: 47574 - DNA, 753 bp, Heterodera glycines
atgacagtgcgtggacgagagcaaatcagtttggacacactctccatcagaggttagtttattcgctcaaaacccaaacactatacaaacttgagataacatttttatgggttttctgggtcgtagaattcgattctgatatctatttcggcaatcctgaagaatgtgaagaatgggggtccctaatttttatgggctaaaacaagtttttaggggttttcaaaggtgctgattacgaatttgacttcggatttgcccaattccgaactcctgacccgctttcgaacaaaaattgaaaaaaaaaaatttttcctagtgatttcatactcccttttcaggaaacaacattcgctatattgttcttccggattctttgccattggacactttgctcatcgatgacgagccgcgcaagaagcccactcaacgccgatttggtggccgtggaggacgcggtgggccgcgcggacgtggacgaggccgcggagggcctccacgcggcggcggcgggggacgacgctgatgatggaccacaatgggagaagggatcagtgtctattgttgttgttcatttcaaaccactggctgaacatctcatttatttttctgatataaaatggggttactcgacgcaatgcataaatcggaacggcaagactaattatcgaaaatctatataagcgtagtgctggttcagtcggaattcactgttcagttattaacgcactagaatttcgtattttttagattaaa

SEQ ID NO: 47575 - DNA, 2467 bp, Heterodera glycines
atggatattggtaactctgagaataaatgtcgaaattgggctgttcggctggaagaagtgctgaatgactttgacgctttgcaggtgaagcggggcatttcacagataaagccacccaagcaaaagctaacaatcgatgcaaatcactgccaatgcaaatttcagtgcttccaatcgtggctcggcgtcgatgatgacagcactgagcaccctttgcgccttcacttcgcaataattgcctttcgcgaaatgagcgcctccggggacgcgcggtccttccaattggccaaggaaatcttcaccaaatttttgctgccgcgagttggcctttgcgattttatcggtgcgtccatccgcgagcgaattgggcaacggctgaaaagagagcaggcggacgaggaccttttcgacgagtgtttggccccgctggacacttttctaaggagacagcacgcagtctttggtacatttgagggaatgccttggcaaagaatttcttttatcgccctctctcttcccattgtctctccattgttttttctcattgtctttctccttttccctgtttctctctccgtttaatctttccaattcagtccaatctcaagaatttctcgacttcttcaacgaattttgcttccgcaaccagcagaaaccgtccacctctgctgatgagcaaatgatgccaatgctttcttcgccccttcccgcgaccatttggcaccaaaattcgatcagaaggagccgacgaagggatagcgccggcaaagcgccacagccgttgacagccgattcgctgttgcgctcgcaatgggagcgcgaggcaatcattccggtgggaggggccgggtaagagaaggaatagcgatggactgacgacgaattggcatttcattgctcttttttaggttgtttaagccggtcagcaagttcccctatatgggacagaccaatgccagcaaaaaggactccgccgtgtcctcttccttttccagcgaagccaaccgacgaggggtcgccgctggcgcaaatgtccccggagggggagggacccattcgatgcggcaattgcgcgaaggccaacgacgcgcgaaccaacagcaaaaaacgcatttactcagtgcatttccggtcggtcttacttaccgatgcaaatcaaagcatttcgccattttcagaagcctgacattttcctgagagaaaactccgccggaatgccgcccaattgccatgaaacagcgcagggaaggcgcgaatttgccgaaaagttggcccaaaaattacgccatgttgagttacagcatcagcaagatgagtctgtcaaccgacaaattgatcggataaattcggcacgacaaagagacacaaaaacatcgacgagggaactgatcattgccggcgttgcggctgatccgcttctgttggacgccaccgcggcggatgacgcggacgacgacgtggagaattatttccgacggcgaatgatggactcgtcatccaacaattcggcacaacagagtccgccgccattgattctcagcgcgcggaaaacacgtcgaaagtcgcgcgggtcatgttcaccgacagcggcggacaacagaacggggccccctgctgagcagcaaagacactgttcacaagtcggggacatgccgctatcatccgccgaattagggacgagtcagccggggatgagtcggccggggatgagtcagctggggatgagtcagccggggatgagtcggactgggatgagtcagtcctgctaccacccgtccctaaaccagcagcagcacttcgacttgcatttcgcacctcctcaaaatggagtacaaaaaggtcgccagttttctttggcattgcctttctcatcgccaaccttttcagtcccaccactcgccccttgtcagctccgctcgcccttcgctgctttacccggaatgccgtcgtcctcgtccccccgactgctcccctcttctcatcaccacaattccgtcccgcctcctcctcattcttccgctcttagtcagtccgtccatctcgcgggtccgtcggcctttccggcgcccgctttgcccaagaagtcgtccccagtcaatccgacgaagcagatgacaaggcaggcaggcacaagccgaagggtgcccctcccgtgggagttactcagtgacttcctttgcttttcgcttttccctccgggcatttaaattgcaatggctatataaattaatctcagtgtttattgtgataacgacggagacacttcgggaatcggctcaatgaccacgacacattcgggcaattcggccaggggcgacaacgacagacaaagggcggcgatgttccgcagggcacgggaactgtcctcggggggacgaagcgaaaggagtggtgcacatcaacagcagggactgactcggacggcgcgcagggagcagccgcaaatggccgatggcaaaccaagcga

SEQ ID NO: 47576 - DNA, 1647 bp, Heterodera glycines
atgacagttgcgatggaccatcaggcgttgattgacgagctgccggaggtggagaaaatgccagcccaacagcgcatcgctttggcccgtgaacgacgtgaacaacaattgcggttgtgtcagcagcgcgaaggacatttgccgcagcccgccccgcgtcggccgcggctgcggttcagttccgacatcgctctgctggagacaaccgtccgtggcgacgcgcaggaaggtgctttgtcgtacaatatttcaatagtgttgtacaataattggcgagattctccctttatagctcatttcctttccgcttttactattgtatttaagttctttgagcgatttttcgaatccgttcataccttttttgaggggctgggaatcggggttcgtagcgaagggaaaaatgaggaaaatctcaaaaactggctattcttcttaaatggctgattttacgaaacgatccagcacaattccaatttagttgagctgatgctgatggatggtgtcaacccaaactcacacaatgaagatggcctgactccccttcaccaggttcgtctaaaaaatgatcaaattttaattgtaaattttattttttagtgtgctattgacaataatgaaagaattgtgcgacttttgcttaggttcggcgccgatgtaaacgccaaagacacggagaatgtataattgtttttttttattcaaaaattgcgattcagaaaattttgcgatttttgatttttgagtttatttataatatagtataacaaatatgcctgaaaaattggttttttctatatattgacaaatttaatttttgtcaactttttagtggacacctttgcatgccgccgcttgttgtggttacattgaaattgtcagacttttaatcaaacagtaagaatcgtttaaacattaccgtactaatagtattattcagcagtgccgatctgttggcggtcaatgcagacggaaacatgccttatgacatatgtgacgacgaacagactttggatcttattgaatccgaaatggcgggtcaggggtaattaattgaatcctcaattttctttataaaattcgaattttctttttaagcatcacccaggaaatgatcgacgaacgacgtcagttgccggagcgggaaatgctcagcgacatgaaactgctccaccagcaaggcattccactggaccaacggatgccggacgaatccacttacgtgagttcagtgtcacatcgctttttgattgctgacaccgtttagctccatattgccgctgccaacggcttttacgacgtcgccgccttcctcttgcgctgcggtgtgtcgcccgcctcgcgggacaaagactcgtggatgccaatccacgcggttggtcatatattagccggataattatttagatttttctatttatatattggaatcttctaggcagcctcttggaatcagcctgatttgatcgaattgctctgtgaatatggggctgacatcagtgcgaagacgcgcaacggggagacgccgctggacctaacggaggacccgcaaacgcaattagtcattcggaccattgcacagacggaggcacgaaggaagcgaatcggacactttggagtgcgagatagtcgacgacagtcgagaaa

SEQ ID NO: 47577 - DNA, 1739 bp, Heterodera glycines
atggaatccggcgattttgagcaattgatcatggaacagggatggttggactcggctgaccaatggaactccacaatccttgcccattgggctgaccaaagtttggctgaactgctcgacaaaagcttttcaaggtgtgcattttttgtttgggatttgttcgaaattattgggattttagttgagtctccgccaatttcctaccaagattttgggttttggttcacaattttcgtttttatgtcgaatttgcgctcattgtttaacaagaaatccaatttttggactgtgtctcatctattttggatttgtttttcaattttgttccgaattctctttaatttcttacaattagcaaaatctcgagagtttcggctcgctccgttttcttactaaggcccaacaattaatttggttttccattttcaggcttcaaacgccaaaattgcgttgggaatcaatgaaactccgatttgatgatgcaacacgaatcaatgcgcgagggatcaaattgccaccggttttcaataaaaattttgggtaaatatgtaaaaaaaatgcaattttttagacaccttccgatgaagcgaaacgctgtttcatttcattggtcatgaaatttgcttatccgcaactcgacgcaaatgtcactgttgggtgagtcagttaaagacaaattaaaatggaaaaaatttaaaagcatcttcggagcattccgaatcccgaacctgaattcgaacaaagagttgaaattttcgatcttttctttaatgatggcggttgatgcaattctaatacatttagtttgaattcgaaagtaaatcttttctaacaataagcataaatttaaatttacaaatttgaattatccattgtatttagttcaaatccagtttaggggttcgtaattgcacgaaaagaatgcccattcgagatgagagacccttcaaaaattttttcaaaaaaaattccaggctcaaccatttgctgaaatcgcccttctctgtgcatccagaaaatggaaatattgccgttccgttgagtgccaaggaaatccgtgcctttgatccgaatgtggtgccacgaattgataaattgttggcacaacttgcctcattgcgagaatccagccaagaaaacaaggagaatcaacgttcaattggtaaaaaattatcggcaaataaccaaaaattgcttttattagagagagaccgggattttggggttaccgggccagagttcgagcttctaattagccaatttggccgatcccgggccgcctggttcaaaaaaggccgtttaatcgctcgggcccgagtttttttttaaattttaccgggctagggcagcctgggctggtttttttaaggttcatcgagcccaggctaggggcggtctcaagaattagacaaaattaaaatttacatttcattatatgagtgtcaaaatttttgaagcaaaaaagtcctcgtcgatttgtgggtttatggattcatttttccctcccgttttccccttttaaaacttttcaggtgtttttttggaaaattttttgacaaaaacttacaatagtattataattcaacataaattttcgaaaaaaaaaaaaatttttttttttcttacaaattgtctatttcttttatgttttagtctatcgtcaaacttcattggctccacacattgctgtgtttgaacaatggaccgcacaaattctcaattctgaagcgcaaaactga

SEQ ID NO: 47578 - DNA, 111 bp, Heterodera glycines
atgggtatttcccaagacagatggcacaagcggcgaaagactggggggaagcgaaaccccattcacaaaaaacgaaagttcgaaatgggacggccggcagcaaatactaag

SEQ ID NO: 47579 - DNA, 832 bp, Heterodera glycines
atggtaattttaaacaaaataaaagacaaaattctccgcttttagccaggcaatgaaacaattcgaggccatttggaaaaacggaaggattggatccgacggacgagggaccatcaggaaaagtcggcggatatcaaaaagttgaagagaagcgcacgggaacggaaccccgacgaattccattttcatatgttgcggagtcaaatcggagtgagttggccattaaaaaaatgccaaaggatttggaaattgaatttccattttggcatcccttttttgttagtttgttatgttaataatagggttgggctcccgaccgtcggggttggaaaagtcggggtcagcaagttcgggggcccaaccctagttaataattcaaattgagtttgatggaacacatcgcgacttagagacggaagaggaggagaaaagcgaagcgcaacgccttttgagcgatgtcagcgatattaatttcgtacaattcaaattgggcatggaacgaaaagttagcaaagataaatttgtagtaaaaattttgttttttagaaaattgaaaaattgaaagcggtgctccacttttgtgatgagacggaaaaaccacagaacaaacacataatattcgcggaggacgaagaagaaggtaaagggaaaagggaggaaccgaaggggcggaaggacgaacaaattcagcacgcaatttcgaccctcggcaatatttcaacacttccgaacaattcttggcacggactttcaatagaccaatcgaaggcgacgcgcggaaaagcctcagcgtaacggagaaacgaaaattaaaagttagcgcgggtgggga

SEQ ID NO: 47580 - DNA, 1345 bp, Heterodera glycines
atgacttgcccacaaaaaatcagtgacaacagtccactagcaattaacagtggtctgaatattttctcagttccacctaccaatgtgtctgttgttcgttcattctttcgtcaggtgcttccgctcgcaacaatcacgcaagaatcgccttacctatttcggctttacagtgacaatttgtggactgatttatctcggatatatctttatctcgaactgtccattgaaaaaccgggagcaaacgataaatgggttgcgatagaggacgcggatactagtgtctctgccattcaagggattggtcaaacatttgtccagcaactaaaagttacggttggcaacaccgaagtatacgatagcgggaacctatacccattcaaggcctatatcaccaatgagttaagctttccaataaatgccaagaaaaattttcttggttcaacagggtattatcacaccttaaaccaagatgacttaacagacgaggggttcaaagagcgttgtaaaatttttaagggtggtaaaaatgcgcaattcctctcccgtctcgactttgatttgggaaaccaagagctttatctcttaaataatttggacttgctcttcacaatttacaaggccaaagatgtctttcttttgcaaacattaaaagcaaatgatgcaacgaaatatcgtttggccgttcatgatgtcaagatttatgctaaaatggttgagttacaaccctcactaaatatgagcctttacaaaacacttgaaaaacaacccgccacgtacgctgtacgcaagacggaaatcaagtcttcattcatcagtgttggtcgatacgaatttgagtacaatgtattcagcgcgaccattcctcgacgcgtaataattgcgttggttggcaattcagcatttcatggtgactacaaactgagtcccttcatgtttgagccgtttgatttacgtgaaatttcaatacatgctggagggattgtctacccagctgttccttataaactaaatttttcaaaagatcactatgtctacgcctttgttgacatgtatgaggcactgggtatggctaattcggagcgttcatttgacatctcaatgacccagttcaaaaaagggtgggccttttttgtcatcccattgacatccacacttgacgacagctgtggatttgagctgttgagaagcggcacaacaaacgtacgagccacatttaattcaccaattccagttggtggtgtggagatgattgtcatgggagaatttgatcaaatgattatggttgattacaaccggcacattgtgaccgattcaaagcttggataaattataaataactttatta

SEQ ID NO: 47581 - DNA, 1015 bp, Heterodera glycines
atgcctacagaagaccaacaacaacagcagcagcaacagcgtactgtacccgacaacaataattacccggcactccctttgcacggtcagtacggtgtgttgttactgtactgtatgtgttgtgccatatgtctgttcgagaatactgagtcgagaaaactctcgtgattttggcatatcggcactggatctcaagcatcggcacatttaaaatgtacaactccaaggttgtgccgtacaattgcggcactatttcaagtcgattggtgtcttacagagtcgtgggcactgaggacttaatttgatcgattttttttttttttgcaattttcccgtcaaatcccagccccaattggctctctgttagaacttctttgaaatttccctatttacggaatccaggccccacttggttggactttctctcccacggcccgtttctcccaatttttattttcaggatccccccgagacttttttttaatcccgaacctccctatttttcaaattttggcataccatttccagcttgcttttgttagaccaaattgcccacttggccacccattggccaaatttcaatcgctctctgaccgtctcgccactgctctcggagctggacgttcgggcactgcttgagcactttgtgcacgtccaaattggccaattggatgccgaaattgagggcatcgagcgccaacttgaagccgaatttgacgaggccgagcgcggctggcccattggctttgtaggcaccgccggtcaccagcccgtgccgaaccgcttccaagcgcctgtgtggcaactgttcaacgccgacggcacacatttatttggcaatgatccggaccgcaatgttgagcgcgctgatcaggcgctgcgcgacgagttggcattggtcattgaactggccaagcagaaggcggaagaagcaaacggtggcggtgccgccggtgatttgctgatcagcggcggccacttcaaagcgggccgagttcgccagggctatcggtga

SEQ ID NO: 47582 - DNA, 2474 bp, Heterodera glycines
  unsure (1)..(2474): unsure at all n locations
atgttcttccgtggattgagttcaagaagtgagttttctgatcaaatttctgcgcttaattttctgttcttcgaagatgtctttcctcaaagtgttcgcccgtcgtctctttttgcatgtcacttttcttcgggtaccaacgatgatgttttatttgaacgggtcaatcaaaaattggtcatcacgctgaacaggcccaaggcattgaatgctcttaacttgccgatgattcgcaaaatttacccccagcttagggtaaatcatttccggataaatctactaacaatgagtcgctttttcagaattcttccttcgatttggcacttgtcaaaggtacgggtggcaaagccttttgtgccggtggcgatgtcctcggtttgtcagtttgttgaatgcttatgtattttttttctttttagctgtctcaaaatcctataaggcgaatgatccggaccgaatttttcagcaatttttcctagaagaataccaactcaatcatttaattggatcactcagccgaccctacgttgccttcatcgatggcattacaatgggcggggttggtgtgttttgctaaataggtttgagtgcgaagaattaggcatttttgtcattgtccgattacaaaatctgtcctgggttttagggatgtggcctctcattgcacggggcttttcgtgtggctactgaacgaacaatattggctatgccagaaacggcacttggcctttttccggatgttggcggaacgtactttctgccgcgactcagcggtcaactcggcatgtttttggcactgacaggtggcaatattcatgtattatttccagacattgatcatttttcctcgtaggttttcgtctccatggtgcggatgtgttccatgccgggctggcgacgcattatgtcccttttacttttttacaattatattttcctttttcaggtcgagtcagccaaacttcaacaagtacaagatgaacttttggcccttccatctccaacaaaaaaagacattgaacaattgctccgttcccatgggccgtccgatgtcgcttcctttgttttggacccgcatttggaactgatcgacgaatgtttcgcggcggaaagtgtcgaaacgattatcgaacgacttatgcgcagaaacgacagtgattttgcgcgggaacaatgcgaaatcttggcaaaaatggtggggttttgttgtacagaaatattggactaattcttcggtttttttacattcttaacgattttcatatttctttaacagagtccaacttccttngaagtgacatttcgccaaattcggatgggtgctaaattaaaattcgatgaggtttttatttttcatctttccggcctcaaatgttatattttttaggtttttcctattgaatatcgccttactcagcgttttatggcagcaaatgacttccatgagggctgcagagcgagtgagaatataaaattgccttttatgagtaattatttaagcataaccgattttttagctcggcaacaaaaataaaaggcttataagaatgcccaagttttttttctttccctgatatagcaaattagcatttaaccatttgagaattattttttaaatatcagcaaacaactttgctttattcaactaattgtaaaaattttgttttttttataaaattgcaaaattttgggaaaacttttcattttcagttctgatagacaaagaccgaaacccaaagtggcgcccttcggcattgtccgatgtcaacaatgccattgtcgatgcctatttcgcaccttttgacactccccaaaacgagcttcaattagagcgcattccttctaatatttaatgaaaatattgtatcttttttaagcattcaaatgttgcaaaaagaggaaactatcggatttctatatatttataaatgctttgttattttgtgccttactttttctaattatgagtattttcgttaataattacttttcgtttatgctttgggttttcccaatttttgtttttcaaattcttttctcattgcttttcctttctttttcgaatgtcttcccatccctccgaatttccgtcctcgtcttctgccccctctgttcacaatcaacaagcagctgaattcgttctgatcgagtacccgggagtgataaaaaatgttcaagcagcactcgacactttgggtggactgcgtgcaatttccaatgtctgttgttttttttttgttggttttttgcccaattgaatgatttttaaaatttaatttgcattattttaggcacatttcaacaacagtcaattggaattgcaattccaaccccaaaatccgtttaattcggcattgacgggcgagcggcgaagccaagcggcggttttctcgggccaagccaatttggtgttgcgcattcgaagacgaaaacggaggcaaacggctggaggaggcgagtaaaaaaacaaacaa

SEQ ID NO: 47583 - DNA, 1238 bp, Heterodera glycines
atgaccgcgttgattagactcgtgtaagtcaattgggcgggttattcaattaagatttattttttctactcaaatttttagtttttttgccagcattgtctgcgctatggaaactgctgccctgggacggcgctctgtcaactcgagcgcagcggagccgacgaacgaacaaccgggtaaataagaattaaattaatttatttaaaattaaattaatatggagacgggggattatttttcgctgatttattcgtgaaaaatttttgaaatttttttgaacgtcgccaaaaaatgtaatcgtgtcaaaaaaatcaatttatattttttagtgaacaaatcctctgcgaatgagaagaacatggacgtcggagcgaatttgtttgtgggcaatttggacccggaggtggacgagaagttgctgttcgacacgttcagcgcgttcggtgtcattttgcaggtgtggggacagccaccaagaaaacaattattttttaaaaataatttccaataattttagcctcccaaaatcgtgcgcgacgtggagacgggcagcagcaagggccacgcgttcatcaattttgcatcgtttgaagcgtccgatgcaggtcgtctcatttatttttcaattaaaatttgacatttgttccccggacatttgcctatgtccaacgggtttaaatttgagtgatgtttaggcaatcagggatttaaaaaacttatttgaaccctattttggacatagccacaaatgtatggggcgaaaatatctgcagacggaaaacagagagttgcaacgaactccgtcaaattagaatacaaaattttgggaaagttttccgaaatttttctttcagcgctcgaggcgatgaacggccaattcctgtgcaaccggcccatcacgtgttcgtacgcgttcaaaagggacaccaaaggggagcggcacggcacaaccgcggaacggctgctggctgcgcaaaatccgctgttaccgcaagaccggccgcatcagtgcgtttgtttttgcatattacggcacaaatttttttgtgagaggggggggggggggatttcactaaattgtttaatctctaaattaaagacaatttagaatttgtgccctaattgcacaaatattgaaagcgttcgtcccacttccctcccctcccacattaaatttaattttaaattctccactcaagtcttcggactatctctagcaaaattaccttttgcaatta

SEQ ID NO: 47584 - DNA, 3281 bp, Heterodera glycines
ttcacccattgtttgttcctcccaaaggaagaaggcatggattccatccatcgaagtgaagaaatgtgagagacattcgccgattgggcaccacacaatttgagcatttaaattcgtttaggtgcttgacacaactttttctgcaaaaagaggctgcttactcatgcgttgccgagttgggcgaacttggacttgtgcaatttcgtgatgtgatttttagcaaatcttttggcaaattatttgaatctcaatttagctcaatgaaaaagtgaacatttttcaacgaaaatttgtgacggaagtgcgtcgttgtgatgaaatggagcgcaaattgagtaattttgaatcagttgtgttcctggatttgcctaatttcactttgccaagggtttcttgagacggagatcaaaaaggatggtattccgatgctcgacacaggggaaaacccggaagcgccggcaccgcgagaaatgttcgacttggaggcacactttttcaaataactccgggaaaacaccggtcataaaattaaatttccaggcaatttttgagaaactcgaaaacgaactcagagaagtgaaccaaaacgaggaaatgttgaagaagaattttgccgagttgacggagctgaaacacattctcagaaagacgcagcaattcttcgacgaggtaccgttcaaacggcctctaatcattgggaggggcttttggctttaaaagtttgtcttcttcaaggttttatagcagtaatttttcccattttttggcttttggggttgtctttttttctggttcgctgtttctgttctaatccttccccccttggcaatgcttctttgcttatatttctactttaattagctgtctcaatgctttcgtcctatgtaattaaatattttcgactcttcccctgtttattccctttgttccgcttctgactttcacggtgtttgttgttgtcgggctttgtgcctcctcttgatgtccgatatttcgttgcttttcctttcccatcccctaaatcgtttttctttttttcgctaaaaattacaattaaattcaaaaaagaacctttcgggggagggtaatggaaaattgccgaaatttcgtgtcataaaacccggccgtgtaatttatttgtcgtccctcctccgctgaccatgttgcgtttgttcctttttctgttctccctctgttcaatgacctcctcctctcctccgtctcgtcacattcgcttgcccaaggtcgagtccgagcgtcgttcctggttgtattccacgtcggtccacaaacggtcgaccgccgtccaggaaacgcgcgtggacttcgacgcggaacagccgctgctcggccctgccgaattcgtggacaccggtggttcccgtttgcgttttcggttggtcccaattattttttgtcgatttatttttcacttattaaacgttgtggcgtgacagtgtggtgatttatgctcaaagtgaattgtccatttcttgttaaagtgtcggagtgttaattaccccccccctcgattttgtttaattttgtcttaattaattaattgcctcgggaaattcttttttttattgcttccctttctttttttgtctttgattaattagtacagttgtttgtttctttttatgctcttctaatttctttataatcagcctttttaacaacacattttttgaattagaggggttttctaatttcgcaatttgaatttgtgtcaaattttgattgtgtctgttccccacggacagaatgaaggcgaacagcaggccctaaataccctcgcccaagaagaactgtttacggatgacggctctagcctaatcccgaccgaaggccgggccaccgaacccatcccaacaaagggccatttgaagtgagtgaatgactgggatagatagagagttagtaaatgaaacaacacacgcacacttgagcacctttcaccgcactgtcacgagaaataggacaaatcactgtcatttgaaaatggaatttttaattgaattagcaaatagccgaatttatatttaattgaattgaaagaacaacatttaatttgagattcatcgccggcgtgattctccgtgaacgtctgccaacatttgaacgtttgctgtggcgcgcgtgccgtggcaatgtgttcttgagacaggcggagatcaccgaggcactcagtgacactgtgacggtagggagcagttcatttcccctggccgtttcagattagttatttaattgttggccatgaggaacccgagactctgattattgtactacctaaatctttcataaaatgacccttttacaaaaaaaaaacaattacaacagagaatttgttttagaaattacgaaaacgttttgtcccgaaagtggccaattgaccatgattgtatcaattcagggccttgctgtccaaaaggcggtgttcatcattttcttccaaggggatcagttgaaaagtcggattaaaaaaatttgcgaagggtacgacaccaacattttccatccggtcaaattttgcaaattcagctttcgtgcctccatttatccatgcccagaaacgccgcaggaacgtcgggagatgtccatcggagtgatgacacggattgaggacctgaagacggtgctgggacaaacgcaggaccacaggcaccgagtgctggtattttacccaacgacggccgggcgggtggaactggacaccagggtttacttcactaaaacccataggtttctgcggcgaagaatgtgcgcatgtggttggcaaaggtcaccaaaatcaaggccatttaccacacgctgaacctgttcaacctggaccagaaatgctttgtcgccgagtgttggtgccccgtttcggaacttgaccgaatccaacgggcgctgaagacaggaagtgtacgcttttgagaacttaatccaatcatgtggtttttggtgtgtacttttgcattttcaggatgaaagcggcagcacagtgccgtcaattttgaacagaatggacaccgccgagtcgccgcccacttacaaccggacaaacaaattcaaccagggcttccagtccatcgtcgatgcgtacggcatagccaactaccgggagattaatccaggcaattacatttaaatgccaaaaataggaattaagacgaaataaaaaaatagttataaattatttaaaagataaatctatgtccgggaaacagccaccttgtttcaatttcatacttctatggacattcgtttccttcagccccctacacaat

SEQ ID NO: 47585 - DNA, 1179 bp, Heterodera glycines
atggagaaaatgaacgaagcaaacagcgacaatcaacgagagaaattccaggacgacctgaaaaaggagataaagaagctccaaaggttaagggatcagatcaaaggatggcaaaactcttcggagatcaaggttttcaagtatttctttcacttaaatttgattacccttttctctgttattgaaggacaaggactctctgtcaaagtttcgaaaactgattgaacaaaggatggaaatattcaaggacgtggagcgagaaaataagacgaagccgcacagcaaacagggactgtcagcggaggacaagttggacccgagggagaaggaaaagtgcgagaccattgaatggctgaatgtgaggagagcgaaaacgcgagccataccgacatcatctcccgtcctttatagtgccaaattcggagaatacaggacgaaattgacaggacggagtctaaactggaaacaatgtcatccatggccgactcaaataggaaacggggcaagaaggacgaagcgaaaaagaatgagaaagaggtgtgcggaagagggtgatggccgactgtttttgaatatagtaaagttatatttttcaaaaaatttagaagtcggaagagctgaggaaacatctggagagggtaaaattccatctgcttaacttggaagtgtgcatgagaatgatcaacaatgaaaagctcgagatcaaggttgtgcttggaaagttgaaggagccgttggagatgtacatagatgcgctggacccggagaatgacgacgatcccgagagtttggaccctgaaggttgcttgaatcacggcagcttttgtacacacacactgctggttttcagacatttacgaggaacttaactttggcacatacctctcgcaacttggcggaatcattacgacgacgagtgtggacgaagagaaggggccattgccaaatgacaacggctgttcttccggatctccccaaatttccggcaaggagaagcagccacagttgaacctgtcttcgcctaccatcgctgctgcgccgattgtaacctctccggaatcggctagtgccgacataacaacatcagtgggcaccgcatcggcaacgaccgcgcaggaagacgtgttccttttcaatggaaccgaggcacaaccgcgtaaaagcaaggaaccgcaagag

SEQ ID NO: 47586 - DNA, 747 bp, Heterodera glycines
atggacgtcctgttcaccatctatcgggcaaaggatgcgttcctgttacaaagtctagcggcggcggcagcagcagcggcgggccaacattacgcgctgtatctacacgacataaagctgtacgtgaagatggttgaggtgcaaccgtcgctgaacctgtccatctacaagacgctggaaaagcagccggccacctacgcggtacggaagacggaggtgaagtccgtgtttctgaccgccggccgtaccgagatggaccacaacatattttccgccgccatcccgcgtcggctgaccattgcattggtggcgaacggagcattcaacggccagctggcactgtcaccgttcaacttcaagccctacgcaattcgtgagatcagcgtgcacgctgccggtcatgtgtatccggcagtgccacaccgcatggacttctccggctgtgcctacattcgaccatttgttgacatgtacgaggcgctgggcatggccaactcggagcgctctatggacatcacgctggagcagttccacgacggatggaccatcttcgtggtgccaatgacatcgacgctggacgacagttgcggctttgaactgctccgctccggcaccaccagcattcggctcgcgttcaacgaagcgataccggcaggcggcgttgagatggtcgtgctcggggaattcgatcagttgatcatgattgactacaaccgccatattgtatccgactcaaaaattgcataa

SEQ ID NO: 47587 - DNA, 1703 bp, Heterodera glycines
caaggagaacactgtgctgcgggcgggcgtcgcaccccagcgcgttttcgtcattccgaacgccattgactcggcactgttcacgcccgatccggcccttttcgcgtgccaaaagcgcacaactgtggtggtgctcagccgactcgtctaccggaagggcgccgatttgttggtggaagtgatcccggacatttgtgaacggcacccaaccggtgattataattaattagtaaattaatggggttttgttttcaatcttttcaaaatttcccaataatttttagaaattattatttgttattttgcaaaaataatttaaaatcaaacaatatttttattttcgatggaaccattcgataacggatatcaggaatggcattttgagacccaaaattttatcggaaatcgggattccaagaatactttcaataatgctttatcaccgtcctttgcatttcagtccaatttctgatcggtggcgatggtccaaaacgagtggacattgaggaaatgcgagaacggtgtcggttgcacgaacgcgtcaaaacgttgggcacaattccccatgatacggtaggtgtacggtggtgtacttattcaaatcattgttttttggaattaatttgttgctgccttctttttaggtccgtgatgcgcttgtccaaggccaaatctttctcaacacatcgctcaccgaggcattttgcatggccattgttgaagcggcgagttgcgggtactgttccaacccatagatcaaacctgatcatttctccctgattccggaattttattgcttcagaacattgaaaaatggagaattttacaacatttagaatcttataaaaaaattcctaagcgtcgctgggcccttcggtcatcagaaaaaattgctaaaaaaataattaaattttgatgattaaaaattttttgggcctctgatcaaacttttggtgcatttcgttcttgaattcaatttttattcattttttgtgttaagtcttcatgtggtgtctactcgcgttggaggaattcccgaagttttgccgccggaattcatctctttggtcgacccaaatccgaaaggcattgtccaattattttatgaaattacagtaccaaaatcaatagtagattggggccattaccgtagccaaatttaaaactttaaattaggttgattcccattgaatttaacaataatttttggttgttcgatcattatttgactcatttataatccaaatactttatacagcaattgcaattggtcttttggatgccatccgtcggcgcgagaatggcgaattgccctgcccgttgaagaagcatcgacaggtggccgaaatgtacaattgggcggacattgcgcagcggacagaactcgtttatggcaattcgatggaagagccggaggacagcattgaccacaaattgcgaaagtgaggcgaaaattcaaattttaatgcttgtgaaataaatttcaacctcttttatcattgatcaaaattcgaaaatcggagtaaaaaatcatttaaaatttccccgtttattcttccagtcagttgaatgccggtttctggttcgggctgatctgggcatgggtaacagcagtgaatgtccttttcgcctcgctgttggattgggtggacccccgggatggcattgagacggttgacaacaaggcgaaggcgaacaactga

SEQ ID NO: 47588 - DNA, 1928 bp, Heterodera glycines
ttgaacggctatttcgagtacatccgccgggatttgctgatcaaccacatcatgccacaggacgaaatccaactgctgctcaacctgaccatcgtgtcggacaccatcaccaagaacagtcagaacaccatcaaccaggccatgcccgagccacggccatgcgaagtaaaaggacgggagggagaacttgaaaaaacaccacaatttttgggaattggaagaaaaaatcattatttatcccttttgtgacccacgctcaaaaaaaaattttttttcatttttccagggtatttttagacgctgaaaacaaaaatttaaatttaaaaaaagccatgtgggcgagagtctagcgaaccatgggtttttttttgtctttattaattactttttcattgttcagctggccaaggacttggaagtgatgtttggccagaacaggtaatgatgattaatttactaattactcataattaaccatcggaaatgatttttcaaaaaaaaaaaatttccccattttccaggcatacagacttcaagatcgtctgtcgtggcgaaggcaaggagatgcatgagctgagtgcgcacaaggtggtgctggcggcacgttctcccgtgttcagtgccatgttggaaccgcacacggaggaggcacagaagtcggaggtgttctatgaagacatcgactttgaggtgggtggtgccgggtggtggacttgtgggtaaatcccaaaacgtcaccgcaaaaaaattttcaaggaaaaaaaaaagattttttagtgggcttggaccattggccatagggtggggccgaattccggcggagcagcagtctttgagcccgaatttcgcggagcgggtcgtttcccctccacatcgccccccccccctaaaaaactaacagaaattttccagaaaaaattcttaggaaatttcttagcaagaagatttcaagaaaaaaatgaaaaattttgcgggcgattttttgatgaactactaagtttttcaaaaaattttaatcgctgaaaatctttcaataattttttttcttgaaaagaaatttaaaaattttagacggaggagaaacgacggagggaaatgaagtgcatcccgtatttcgggccgttcattttattttatttttgccttttattcgcccctccccgaaaatattttaaaaaaattaagaaagattttcctagcgattttcaaaattttactgttaattactgcgttttttcaaaaaatcattccaaaaatcgcccggaaattctgatgaaaatttttttcttcttgaaatttacttgtaaattgaatcctttttttaaattttccctcacgcttttaggttatgcgcgaaatgctcttctatatgtacagcggtcgttcgccgttgctgcagcaaatggcgctcgatttgctggcggttgccgaccgttttcaactgatcggactcaaggagatggctgatcaggttggcaatggacattatttaacgccaaaccatttttttcaaattttgtcgtcaaaaactacagaaaattttagttttttaattttttctatgaaaatttggggaaattttttttttatttaaatttttaagctaatgaggttcatacgcacaatgggttttcaagaaattaaataactttttcaaagtcccttttacagtttatcaatttcttacaaagatttgagaataacactatcaaagggggttttaaacaacaaaaaaaaatatttatattttggttgattgactattttttggcatatgctccttttacccatttccccaggtgctccgtgccggactgtccactgacaatgtgtgccgtaaccttgtgttggccgacatgcacaacgcgctcgacttgaaggcggacgcgctgcgcttcatcgcgcaatactccaacaatgtcatcatg

SEQ ID NO: 47589 - DNA, 505 bp, Heterodera glycines
atgaaatttgctcttttgggagccgccagggcgggctatttggaagtgtgtcggctgctggtgaacggatgggcagcggatgtcaaccagcaaacaattgacggcaccacagctctgatgcgcgcgagcggtcggggacacgtggacgttggtgagaaaaattgtgccaaattttgacaatttttcttcattttcagtgaattttctcgtcgaacatggcgccgaccttgaccacaccgactttgatggatacaacgcgttgatgtgcgcagtgaagaacagaaggacggaaacggcacttcatttggtgacgatcggcgcgaacactgaccaaattggcattgatggtgagcagaaaaagtggttaaaccgcacggcttttatatgtaatttgctcccatttacaggcaaacgggcgcgcgacttggctgaagaaagcggacttgccgaaatgattgacattttccgtgccgcggctgagcagcgggaaaacgccgatgggtaa

SEQ ID NO: 47590 - DNA, 951 bp, Heterodera glycines
atgcctttcaatttatgtgttggtaattcgttttttacagtggcggcgagcatcaaagcgaaattcactacaaatattgacgaacaagaagagaaattcaaagaacgaacggttggattggtaacacttgacgaagtgaaggagagacagaacgaaatattttacaggtgaaaaccattctttttatttaattttaggaaatttagtgggccatctttaaaattttcaaacgaagaccgacccaaatttgagaaagccattcaaaaaagagtgctttcgtttggcgcttttgacgacgacgacgacgaggaggacgaggcactgattccaatcaccaaaaagagacacggaatggacccaacggtggacacttcttttctgcctgaccgcgaaagggacgaacaattgcaacggtaatgaataggaaggctcattattaattgtatgaaattaaaattcccatttttagtgagcgcgaacggatcgctaaagaatggcaagaaatgcaggagagggaaaagaatgaggagataaccgtggcattttgctattgggacgggtccagccatcggaaggactcaaaaacaaaggtcaactgtcaaaaaacaacaacaattattcttggcatggatttatttgttaatcattcagaaagggacgacaattgctcaatttctgcagaaggcattggacgtgggcgaaagtttactaccacaagatttattttttgtttttagacatttcgcaaagaattcctcgaattgaaattggcaacagtggataatctgatgttcgtgaaggaggacttaatcatcccgcacttttacacgtaaatttattatattctcattcatttgatgacaaaaccctgatttcttatgaaaattttgctttttttttttaaaaagagaaataacaaacagtgaaaaatagaagaattattagggtgga

SEQ ID NO: 47591 - DNA, 1932 bp, Heterodera glycines
taccattttgtcggaaaaaaccttaccataaacaccatacacatccaataaaagataaaatttagaaaaatgctttcacaagaagaaatttttcgaaatacacgaactgttgcccaaggattggatgcattgagggaagaaaatgaggccatcaagaacaaattgttggtcgggatggacgtgttgacacctgatgaacgtcaactcatcgatgagaaggcgtcaattgtggaaaaaaatcttgaaaacatccaactcggactggaagaatcgcaggttctttttcccattaaaattctttgaagttttttaaacttttcaaggtgatgttggcattggcatcgcatttacaaaatttggaggcggaaaaacaaaaatataaggcgcaagtgcgtcgtctttgtcaggaaaatgcgtggattcgggacgagctgaactcaacgcaacaacagcttcgccaatgcgaacaagtacaataaatgaatttttcattgaaattgacgaattatttacttcctaggacaaggcacaactcgaggaagagaacaagcacttgaaatttatgaacagtatcaagaagttcgacgaggatttgccggacagatcggagaacgaagaaaacacatcggagcaactgcgatccaacgaagtgaacacgtcgacgactttgcaagagcttggttttggaccggacgaggacgacgatttgcacagtgagttgggagaaattgttttgctaagtgatgagttaagattagaaaacggttcaatcggattttatacaaccataaaaatatacgcttcccacatttgtgcctgtgctctcctatttttttttcaatttttattaacatcttgtaccatattaaaattaaaaaagtcttaatctactttcactttaaaatagagtttatttgaattagcagatgccagtcacttttcacaaccgactccggcgaatgcgatggctgccagtaccagcgcgggttacgatattccgcagcgtttgaaaacgctccacaatttggtaagtttgtctgctgttctctgttcttgactatttaactgttaattaggtcattcaatacgctgcccaggggcgttacgaagttgccgttccgttgtgcaagcaggccctggaggacctggagaagaacaacggccacgaccaccccgacgttgccaccatgctgaacattctcgcattggtttatcggtttgtcccgcggttctttctttacgctatgtttcccattcagtgaccagcgcaagtacaaagaggctgccgccctcctcaacgaggccttggccattcgcgagcgatgcctcggcgaggaccacccggcggttgccgcaactctgaacaatttggccgtcctttatgggaagaggggcaagtacaaagaggcggagccactttgcaagagagcgttggaaatccgagagaaagttttgggcaacgaccatcccgacgtggccaaacagctgaacaacctggccttgatttgtcaaaaccaggcaattatcaacaaatgaatcacccattcattgtccatttttagggaatgtacgatgaagttgaaaaatattatcgtcgagcgctggaaatttacgagtcgaaattgggaccggacgattcgaatgtggcgaagacaaagaacaatctttcgtcggcatttctgaagcaaggcaaatacaaggtaaatagtcaaaagtgggaaaagggcgagcaagcagtctcttaattttgcaaattttggtgatttgttaaattaaggaggcggaaatgttgtacaaacaaattctgacacgggcgcacgaacgacagtacggccgagtgaccgatgagaacaaaccgatttggatgatagcggaagaccgggaggacagtaaacaagcggacagcggaatttaccacgagaatttgcaagt

SEQ ID NO: 47592 - DNA, 742 bp, Heterodera glycines
gatataacgcaacaaatgttaaacaatgaaatggccttggatttggttgagaaatgcgctcggcttcacattttttgcattttttggacttgttgaacttgaagcggatctttttgaccataaaatgaacacgggtattattactaccagttttaatatattttttgcatattctttagagaatttgtcgaaaagtctccaaacacttcggcacatgtatgacgatttggcaaaaaaacaacttttctgtgtcaatgagtccgaattccgttcctacgacatccttttgaacttgtccgatttcaaaaattctacttttcaaattttgagtttttggttcattcccttcctattaagccaagtgctctcctaagtccgtgccaatccgcaagtgcaactcgccctctctctctccagtgcccttcagaataacaattacatccgtttcttccgtctcgtacgtcttcaaaccacttttcttcaggtcgttcgttgcctaattgactgacttctcctcctatttattgctaattaattactctccgttttgccttaggcgtgtctgtgcatcacttttttccgctcatccgttccaatgctcttaaagtgatttgcatgccttaaaacattttcccaattgaaacttttgtcgaatatctctccttcgactcaatagacgaggcgatgaaattcattcgccaattcaacttggaaatggacgccaccgaccccaatttgataa

SEQ ID NO: 47593 - DNA, 496 bp, Heterodera glycines
atgacgaaaggaacttcttcgtttggcaagcgccacaacaaaacccacacgttgtgccgtcgctgtggtcggtcctcataccacatccagaagcacacttgctcttcctgtggctatccggagaagcgaaagcgcactttcgatggtgggttttgcaaacgaaacgaatttctcggagcggaggactcagtgtgaaaacgaaatttgcaaaagcagaatgtccaaataaacaccaaattcatgaactgcaagcaatttggttttcggacccccccccccccatttacataagtgttacatttcttcaaaaagacccgcaaacgtttcattctcaattcattaaaaggccatcgctttcttccacaggtctgtcaagtccatccgccgacgcaccaccggcaccggccgaatgcgtcatctgaagcttgtgcaccgccgcttccgcaacggattccgcgagggagtgaccgcgccgcgcaaaggcggagtgaaagcg

SEQ ID NO: 47594 - DNA, 941 bp, Heterodera glycines
atgcgcagcccaacaacagtcacgaagcaatctccagaatggacgtggtttgtgcacaagggaccaaccatttttgagggtggaaaaatgatggaaatggtgccatcctccgacgctcttttaaaatgcctaaataaaatggtttaagctagaggtagagcgggaccgggaccaaaacacggacaactgagtaccgaggtcccggttttgaccgggaccagtcccgggttttttcccggttttcccagccaaaaatccccggtcccgctctactctagtttaagcaacaattcatttggtcttttaattcagttaagtgagcggatccgtgacttccattacaacgaggaccaaacgcacgcacagctcaatcgaaaattgcaattacgcgaccaactttattacgcaatttcaccgattttcccaagtacaatcgaattatttttgataaatgaagcacaaaatgctccgttctgttgttcagtgtgcggactttacattgtcggctcgtcactgaacggattcgggacgaagcggtcggacttggacctttgtctgatgataaccaatcgtgatgtgagtttaggcattaataaagggcagaaaagcaaaggaaatgtccagagaaattgggccccaattctcttttaaattcattttgtcgtccgcagattgaccaacgcactgatgcggttgttgtcctgtcgtcggtgatgcggacattggagagcaatcaaattgtggccgagcagaatctgatcctggccaaagtgccgattctacgcatcaaatttatcggcactttccacgacataacggttgacctgaacgtcaacaactcggtggccattcggaacacgcatttgatgtgttactacagctcttgtgagttatcttcattaaacggctttttgtcaatccccgagaggcctgttttttga

SEQ ID NO: 47595 - DNA, 780 bp, Heterodera glycines
acaaagaaggcgagtggatcggtggcaaatgatcagacccatgaacgaatgtgcttttccccacttaagggtggtgccgcaacaaaaagtacatacaaatagtcaaaaaaggtgccattgcaatgccaatttaaatattgccatcaaattcgccatcgttcccttaggctatcggtgtttggtgtgcaacaaagtgtacggtcgctacaactcggtcagttaccacgtgaccatttaccatcggaacccgcccatccgttgcgaggaggagggatgtcagttcaccaccaggcaagccaagcccagcggaatactgccaaaagagtgtctttccgtttagagaagcgcggtacattcactttcacaaatattaccgtcaccaaatcgcactgccggaatccatcgacttgggcaagtttaacaaccaatgggagacggacgaacaaattttaagacagaataggaaaaggggtcaaaattaagtgaacaaaacccaaaaagagtcgaatagagcgggcgaactctgttcaaagacattatatgtacacatataccgtattacttaaattttttccaatttacatttcggaggggggggcaattggatggcactccgttttgatatgttcgtcaattggtagaatattttgccaatttctgatttgaattgactccgccttctgctgttcagcttctcgcaaatgccctctgttaggctgtaaacacgtgtccaaaagcccggccatgttggacaaacacatccaccgacacgtggccgac

SEQ ID NO: 47596 - DNA, 2168 bp, Heterodera glycines
atgaccttttgtcaggctctctcatgcgcccgtacaatttctgcttgtcttggctcccatgtccatttgattctgccgccaattctgtccgtattggacgaccgcaaaacggaggagaaagtgcgtacgtcggcactggacactttgcttgagttggcccgtcgacattccatcgaggattacgctttgcccgtcatgcaaacatggcttcgttgcattggcatcaagtctcaacagccgcgactgatggagttactcggcatcatcgtcagagttcgtcttcatttaagcttttcggcggaaaaagttcatttccccttcattttcagaaatggactcagttttctgtgtacaaagagaatgtaaatgccgccttggtgcggtgtcgtgtcgaaccaatgctgtgccatgagtaccaggaacagttggcacttctccaggcgccttcatacgcacgccaacagcagcagcaacaacagaatgccgttggcagtggtggaggcgtttaccaacaacaacagggcacattcagtgccagcacttcatcaccattattcgcgcgtcaagtgtcttttttaccgccgacgcaaaacggcggggcgacaacggacacttcgcccttgcccgacacaaacaacggaattgtcggttttttgcccgggcccggcggaagcagtgcggacatgtctcgagtgcacagaatgtcttcgggtaaggcgaacaggaaaatgccgggacgaatggttgggtttaggccgtgatctttcccgcttggccatcaatttggaccaattgcgtcgcttttggacggtccaaccactgctctcgcgtgaggattggcttcagtgggttggcactttgcgcaaccaattcatccgtcagagtccgtcgtccgcacttcgcgcctgcgctgtgttggccgaaatgtgcgaatcactctcaaagtccgttctttttccccttacttttctatttttaatgaaataatttacagggaattattcaatgccgcttttatgtccgtttggactgaactgccggagcgggaacagaacgaactgaccaatcagctgatcgatgtgttgaggcactgcccccatgccgaacccattcagaccatactgaatttggccgaattcatggaccattctgagaaggcaataaacaaagcgcagtaaaaaaaaaaaatttttttttgtttgtttattctttaagggacctcttccaattaaacatcgaatgctcagcgaatcggcggagaagacacgtgcatacgcaaaagcactgcgttacaaagaaatggaaattttgagcacccgcggcaacggagaaccgaacgcggatgactgtcaaacgatgataatgctattcaacaaattaaatctggaagaaggcgccgccggcattgttcagtatgccaaacgtcacaacatggaaatatcggtaagtcgtgactttcttttctcaacatgggttttaataccttttttcgttgctcaccgattcaactgtttttagggtcgttggtacgaaaaattaggcgaatgggaaaaggcgttggagatgtatcagaacgacatgaccaccttgcccgacgaacaactatcatggaaatctatttcgtcacacagtgaaccccaattgctcccgactaacagagaggagttggaccagtccaaacccactgcaaacgcaggactcggtgatgatgccgccgtttccgccagtgcttccacgaatcgaattgcgacaccgcagcaacaaaacggagtacaaacacacggattttatgtttatttttcaaagcattctcctgactatttagtcttctcgctccgatcttttgctgcaccaaatgcgctgtttggaggcgctcggtcagtggagtcagttggaccgcatttgtgagacagcactcgccgaggaggaaagcaaccagtacaactccaacttcaacagcgccacagagaagcagcagccgcagcgacaattgttacggaaacggtcgagcaggagaagcggagcccgactccctcaactacacgcccccaggcaaccgacaccgttggtggacgcagtcgccgccgaatttctgaacgcaacgctaagcgaagtggcaaagcgacagaaaattgcgacgataggagcccggggctgttgggcagtcg

SEQ ID NO: 47597 - DNA, 2964 bp, Heterodera glycines
  unsure (1)..(2964): unsure at all n locations
ttttctccattcttcgccctcgggcgatgcgtcgcccatccgatgatcattattattattattacagtttatgtttaaatttccgataattcatctacagaaatgactttgttggtagctttttcagaatgcttcgtttgctttttaccttttccacaattttcacgggtttcggtctcgcctcgcccattaaaaatcgttcatcggcaacagaaacagtcgatgatcaaccgcaaaacgtaatttattatttttaaatgttaaaattaaattgaatttaatcgcaaaattttttactttagcaaatcggcacacaattcgttgaagtccgtcggttattagatgaaataaaaatagcttcaataaaacaacatggtcgcttctctgatcaggcaataagcaaaaagaaaaaaaatttgcttttttacttacaaaaataggacccaacccgagaaagggcacggcaacgaattcgggacaaagtggcgattaatgacggcaccgaggcgaccgtcaaccgagccgtggcggacgaccttttcgagaacgacattttgctgacattgccacaggccaagcaaatattggaggaaatcaaagaaggtgccgcgggcggaatgccatcgaatgaatgaataaaaagttcattcagtttcgccatcgaacaaacgacgcggaagacgacaggcgaacccaacgccgagctcaatttggggcaatgtgaacattccctacttgttccaagtctcgcaaaccgattgtgagattaagcacagagaatgggactgaatttgcaatttcagcaaattggcaaaataacatcagaaaagggcaccggcacattgagtgggcattggccataagccaaccctctgactcttttcattttgaagaagcctcacgtgtgtccgttttgtgttccaccaaaatgaccacgcgttgaaaggcaaagattacctgcaatactttcgtggctccggctgttggtcccaagtgggcaaaaccggcgggcgacagcccatttcgatcggatacggttgcgaatccgtaaactcatcgggttttggcatcttcgtcaatccctccccctctctccccctaaagctcggcatcgtcgctcacgaaactttgcatgcactcggactttggcacgaacagtcgcggctggacagggacagtttcgtcaggataaattacgactccattttgccggtaccttcgccattttgttgtcaatttattcatacgtctgtttttgtcagggcaccgaatcgaattttgaaaaacgaacaccggacacaagtgacaacctgggccaaccttacgtagaaggggcgaagttgaccatttgagacggcctttgtttaggatttggggtccgccatgcattacggcaacagggcattcgcatcggactttcgaaggtgcggcacccttcagacggcacatttggcctcttttgcttcagtttcaccattctgacggtggatcggatgtatcagcagacaataggacaacgcggcggactttccttcaaagacgccaaaatgatcaacacgcgctactgctcaggtggacagtggcgcattggcaccaaaatgggcaatacaaattgcagaaatatgcaagactaagttggactgtgacaacggcggatacaccgacccaacggattgcgaacggtgccgctgccccgacgtacgaatcattggcataaaattaaaaatggcatttgtttgttggcttagggatacgccggcgattactgccaacgcattcccagcagcagtaattaataaaataattaactacaccctagcatttgtctcgttccccaagattcccaaacttgtctaacgaccggcgaattcacccgccggccgatggccgggcagcctcaaaacaagttcactggtgccgcgtgcttcatgttattggcgaatccatgtaaatgaatgcgttcactaattaacccaaacgattaaataattaattatttagcctttgcatcggacacatagagttgtgataaacatcgaaaagttggacatgccctgcaaagattcgtgtgcctcctttttggagctcaaatacaaaaaggacaaaatagccacaggcaaatgacgtcaaaaagctttcatttcactttttattttgccatttttttgctatttaggtgccagactttgctgcggaaatgcgaccacaatttacgcggacattggcaccgatgtgctggtgattttgatgtcggacaacaatttggaagcgaagtacaccgggttcgagctgagttacaaatcgggcaagtgattagcgggagaccaaaagagaccataattagcaaattcacagagggcacagatccgacagtaatttcaccaatggtaacagcgaagccgacaattgctataacgaaaaggccgccgaaaacattgaccaacattacgccaaagataacaatagaaacaacgccaaggataacgacaacgacggacacaatgccaaggataacgacggaaacttcgccaaggacaactacggaaacatcgctaaaaacaacgacaacttcggaaccaacgaccgaaacgacggcggaaccaactaccccaaaagaagaagaggcaagttacttggatcagcagattgaaaagaaacacttaaaacggatgagcaggggatttggagcaaatggggcggatggagcggatgttcggcttcgtgcggtgcgtgcggtcacaggagaagagtccgcacgtgtttcaaaggcaaatgcaagtgcgttttgggcacaaaggcaatgcatggccaaacgctgttgttcaggggggagtccggccaaatggagcgttgcgccttcggaatttgccctttggccaaacaaagaacaanccgttgtcaaggtcgactggtaatgccattcaatgggatggaaagcctcgagttcggcacggtgattaatta

SEQ ID NO: 47598 - DNA, 2605 bp, Heterodera glycines
gaggctttaaacggagattccgctgaaacactgaaagaaaaaggaaacaaattttaccaaaacgaagattttacgtcatgtattgaagtatatacaaaagcattggagctaaaacctgatgataaattacgattggtcatttataagaacagagcaatggccaagctgaagacggacgattttgagggagccgagtccgactgcaacaatggcatgttttatgggtgaacattctcgctcagtaattattatttcagcacttgaattaaacccaagcgacccaaagtcttattatagacgcgctttggcgagagaaaaattagacaaaatcggctcagcttttaatgatgcaaaagaggccattcgtttacgaccaggggacacgtaattttcggctgattaattcttgcaattttataataaacttcagtgtgttagtggaattatgctcgcgtcttctcaaaatcaacgcagagcgtttaaaacaggtcgaaagtgtggaaaatcgtgcggaagaaatgctaaaaattgcatttggagagcaacaaagtgacaaagaaaagcacataaaggtgaagggaatgggatggatgtgttacagttttgagctgttatttaggccatgaacaatttgcttgttttatgccgagactcaaatagcggggcaatgcgagtttggcaaaatggacaaattgtggcgcaattgttgggagttatcaaaggaaatgcatcggacgaagaagcactgtgtgctgttaggattttggacgaattggccaagtcacgagaaagggtatgcctttcttggttttaaattatgtacatttttctcgatctttgcttaatattatttttgtaaaataatgcactagcggggaagagtcatttttgtcgtaagaactggttaaaatttcggagggaatacgtgcccctcgtgtgcgaagtgaaaaattttatttgttctttgccagtccgtccaaatgatggaattgctttccgtacaaaccctcgctcgactgccttctcttcgcccatcgattgcaaatgcggaggctgccagcgcagtcattcagcgtgtgttcaacggattggcggcgatggatttatccaaggagattaagccggactcggaagtagtcgaacggaacaaggtcgcaattctgcggctcattctcgagttggaagaaattctaacggacccgcaatattcggcaacagcgagagaaatcagcattgaccttctgcttaaaaatttgatgcatatgagtgggggattaccccgtggatggtttgttttagtttttgtttagaagaataaattttatgatagagaattccacatttaaacttcgaccggaaccattccttttttttcaggtcctggcgttttgtcgaggacagaggacttttcaaaatcttgcacattgccacacaattgccagaacaatgcgactatccagtcacttccgaaactcgtcaccatgtttctgttttccttgctcaactttatgacgatatggtcggtgtaattccttcatgagaaataaataaatttaagatttttgaccaacggagagcgatttacaaagaaagggtggaccaaatatttggtggtttaatgtccgaccttaatgatccaaagaacagaatcaatttggctgctcttctgatcactttgctccaagggcccgttgatgttggcgttaatttggtgaccaacgaccaaatcaccgaagtaatgctccagatggcctcttccgacgactttctgcagcaaagcgttgcagccgaattaattgtgctttcagtgagcaaatacgaaagggccaccaacatgatcaagcaggggctggtcagtatttaaagcattttggaaaaatctaaccaatttgacggggtccatcggtgcaataggcatggagaagcctgttaaattaggactttgtctctcttattttagccatttaaagctctcctgttttcaacaatgccttttagccagtgcttaaaaagttatttttgtcttcggatccaaatgtccgtgtccgcgcattggtgggcctttgtaaatgcgcttcgtctgccggcgatgattgcagtaaacagccaatggacgatgaatctcgcatgaaactggcgaacacgtgtcataaatttttaattgaaaaggcagaaaatttttcggtggatttttttctataatatttggaattttttggcagtttacggctgtctaatattttcccacatttatttgtcaggtcgatgtcagacgtttcgcttgtgaaggactttcttacctttctttggatgctgaaataaaggaatatattgtcggaaaatcggaattgctgaaggcattggtcgatttggcaaaaaatgccgggggatgcgtgttcacaatggccacaatttatgtgaattgtgcgaatgcctacgaaaaaccaaagatggacgaggaaatggtcaaattagcgcagtttgccaaacatcacgtgccacaaacgcacccaaagggtaaaaggaaatttaaaaaataatttgacaaagcgaatattacgatgaagataccgaagaatgcgtggacaaaaggatcagaaaaatg

SEQ ID NO: 47599 - DNA, 1046 bp, Heterodera glycines
atgaattacttttatacaaattgggaaaaaattggtatacagtgcaaacttttgatgtggataaaggactttttgagtaataggacttttcgtgttaaaattggggatgctttatcctccagtaacaaagttggctctggcgtcccccagggctctgtcatgggccctttattatttttgatttatattaacgatcttcctgatgctttgccatcaggagtgaaaataaaattatatgctgatgatgttaaattgtatatttgttataaagcaagaaccgaaacagaaattatgcataaagcattgcataatttatcagaatgggcaaataaatggcagatcagaatctcaattaaaaaaacttttgtacttcatttggggaataaaaaccccaaagaaatatataaaattgatggaaatataataaatgttgtggatacaattagggatttaggcataaatattgataataaattgcaattttccaatcatgtcacacaaataataaagaatgcatatttacgtatgcgttctttatttcgggttattaaatcaaagtcttctaggatttggattattttgtacaaaacttatgttagaccgttattggaatatgctcctgaggtttggaatcaatctcttctaaaaaatattaaaaaaattgaaaaatgtcaaaaatatttcaccaaaagagttcttttcaaatgcagccttccacccattccataccaacaaagattagaataccttcaactgccgacacttgaaagcaggcgaaagctgtctgatctgttcatggctcataaaataatttatggccgaacagatcttaatccctttgaaatattcaaaccttctgaacgctttaacattcccttttatagacttaactcgaaatataaattaggcaaaaaatttataccttttgcggggcgggtaactaaaatttggaaccaactcgataaaaggctcattgaaataaactattaaatcaatttaaaaataaaattaaaagtcgaattattaattcattaaacaaaaagtga

SEQ ID NO: 47600 - DNA, 875 bp, Heterodera glycines
  unsure (1)..(875): unsure at all n locations
cctttattattttntgatgtatattaacgatcttcctgatgctttgccatcaggagtgaaaataaaattatatgctgatgatgttaaattatatatttgttataaagcaagaaccgacacagaaattatgcataaagcattgcataatttattcgaatgggcaaataaatggcaaataaaagtttcaatgcaaaaaacttttgtattatatttgggttcaaaaaacccaaaagaaacatataaatttgatggaaatacaataaatgctgtggatacaattagggatttaggagtaaacattgataacaaattacaattttccgatcatattaaccaaataacaaggaatgcgtatttacgtatgcgttccttgtttagaataattaaatccaaatcgtctaagatttggattacgttatataaaacttatattaggcctttattggaatacgctccagaggtttggaatccgtctcttcaaaaaaatattaaaaaaatcgaaaagtgtcaaaaatatttcaccaaaagagtattttttaaatgtagccttccgccaattccataccaaaatcgattagaatacctgcaactgccaacacttgagaaaaggcgaaagctgtttgatctgttcatggcgcataaaattgtttatggccgaacagatctgaaactattttctatttttaatccatcagcacgctttaacatccccttttatagatttaacacaaaatacaaactgggcaaaaaattcattccctttgctgggagggtaacaaaattgtggaatcaactagataaagaactaataaaaacaaattctttaaatcaatttaaaataaaacttaaagttcactagggtaatatgtaagacc

SEQ ID NO: 47601 - DNA, 3195 bp, Heterodera glycines
atgggtagtgttgttaaacatatgaccaccccaaaagggagtgcagttggtaaaatggtttgtaactaataataacattttgacaggggacagtgaatggtatcattataaagcccacaaaaaatgctacaagaaatataaaacatacctatatacacaatatagtcatattgagattttataatcaatttaaatcaaatttggtagaaattttgagtgttgttaaacatatgaccatgactgtataaatcagtattttatttatttttcccatataaaatatagaatttggaatcccacagtttttggggtgccgagtcccagtggccatccgggtcgaaccctctgatcaacatgctcactaattaaactcagaatttatctaatgtgctaatgattctttttcttttttaggatacctatcagctgaaaagcggcgatctcgcaaatggttatgttggtggcgaaaatgtcggcactgggcttaatgcgcacgactgtttcgaggtcggccgtgccgcgtacaaccaaaaggcaagtgccggaattcagtgccgaaatttagctgattaaattaaatttgctaatgattttgttttagaattatttctacactttgcaatggatgcaagaagctttagagcgccagccgagccacgagttggaagtggacatcatcgagtacttggcctacgcgctttaccagcaggggaaccccggcagagcgttggcatacacccgacgcttggcatatttggcaccgaaccatccgagggcggatggtaaagattgcaatgctttcaaatagcattattaaattttaaattaattttatcgaaatatctacaagaattaatttgaaattattttttaaatatcgaacgggacaaaatttcgccgatgaaatttcgcctggacaaaatttcacctcgaaaattaaaaaaaattcatcttagaatattttaagaaaaaaattttatggtaaattaataagttttttcgaaatttttcaaaaaatggctaaaaaaatttacaaatgtttttcccttggaattttcatataaaaaaattttctaatgttttttttcttgaaaatttgaaaattaaaaagaaaatttctttggcgaaattatgtcccggcgaaattttggggtgcaccccgaaatattaataaacaaaattatttttattctctataaaattaaattaatttcataaaaaagggaatttgcaatggtacaaagagcgaatgtctgctgaagaatttgatgaccaaactgatttgcccgaattgcagaatgagtacaaacgatacaaagacataccggagagagactcatttgaaaggcaattaattaaaaattaatttaaaaaataattaaaaatatatttttgaatttttcagtttatgccgtggcgaatttgaaattccaccagaaaatgtcacacaattgaactgttattataagaaagacaaggtgttgttatgttgaacaaaaagacaaaaacttttaaattatttatgaaagaaattaattatttttcgaaaattaattaattaatttatcataaattcgaaatttttacggaattatctttaatagtttataattttattaaaaagcaactcaattaaaactattaaaatcaatcatttcagccttttctgaagttggcaccccataaagtggaaattgtccgttttgaaccattggtcgttctttttcgtggtgtcatttcggacgccgaaatttcagtgatcaaagaattggcaacaccaaaagtaaaaattaaaaaataataattaaaatttatgtttaaaaaaatgtttagcttcgtcgggccaccgtacacgacccggccactggacaactcgtgttcgcctcatatcgaatcagcaaatcggcatggcttaaggatgaagaacacgaagtggtggcacgggtcaacaaacgcatcagtgtgagtgtttattaggcagttaccgtaagacgagacgtacggtagggagtgagttatcataagagtgatactgtgggtttagaaatgtactgcatttttaaacatgaaatagtgcgaatatggggtgtcatggcaactcgtacaattttaaattgatgtggccataacttttttttagtcggccaatttcttaaaacttggtatcattcgaatgcttttcacaaaaaatctaacctccttattataaatcatagattaaaaaataattcattgaattgattataggactcttttttatgaatttatttaccaaaaaatgccgaaattgtgggagaagaatttgtcccgtttcactatttcattatctgatgcgggtttttctatatttcaactgctcatcatactgaaaaatggattttaagaaattttcaacttttctttcaggacatgaccaacctgaacctggacacggcggaggaattgcaggtggccaattatggcatcggagggcactacgacccgcacttcgatttttcgagggtatgtaaatttcctgggggtttttcttaatcggcagtaaattttttaatcttttcaccacaaattagcgagaagagaagaaccaattcgactcgagaggcaatcgcgtggcaaccgttctcttttacgtatggccggaaaattaaatttcgggtttttttcactgtttttttctcagatgtcccagcccaaaacggggggcttcactgtgtacactgacctgaaaatgggcgttgcgccgtcgctgcacgacgcgttgttttggtacaatttgcaccgggacggaaacggagatctgcgcacgagacacgtaaaaaaaataattaaaaaataaaatttttggcaaaaagccgcgaaaatcggtggcggcattttttgatattttctttgtaatttaaatttgccaagtttcatttaagacatgcaattaaattaaaaatatattttaaaattattttcaaaattaaactaaaaaggtgttaaaatctttttaattaaatctcctcattatattcctttcggattgtttttatgactattaattaatccatttaggctgcttgtcctgtgttgaccggcgttaaatgggtgtcaaacaaatggatccacgaacggggccaggaattcatacggccatgcccgctgaagaaagaatataacgaaaaatatgtgggcgacgttagaccattttga

SEQ ID NO: 47602 - DNA, 2823 bp, Heterodera glycines
atgattaccgaggcaatcatcaattccgaacagctcaaagagatgtcgactcgggcagtcatcgaaaaattgccggaggcgatggacggacgggcattggcggaacaaattgcagaagaatgcggcgtcaaagacaaactttcgccggacattcaccgccacccgaggacacgacctgagggcgggacaaaaaaggaccgaattttgaaggtgccattcttggacaaattttcccgtgaccaatttctttacaagttccgtaatgcactgaaaaaattccctaatttgccgcaatttatcaaagtccgcagggatatgacccaaagcgaactcaaaattttatactccctacggcaacaagcctaccaggccaacattgccgcaggtgagtacaaatattttgtggtcgacttggagatcaaatctctgaaagatccccgcccgctcagaactcgctagggatacgcgagcaaaccagacaaaaaaatttggaataccggagaaaaaaatccttggatttcttgcctattaataaacgcccgatcgataacaaataaaatagccgacttagaacatatagccaaaaaatatgatccttctataattctaataaatgagacctggttaaactccagaaatacagtagaatcagaacttaaagtacatggtcaatatcaaataatccttgcaagccgaaatgataaaaagggcggaggatcggcaattttattaaaatcaaacatcccttatcagacacttttctctgggacaaaataccaaagcgaaattattcacattaaattactttttaaaaaaccaattcaaattataaatatatatcgtccaccaaattgtacagttccgaatactaaaaagctactcaaattcatttctgaccagagtgattctgaaaatatcatattctgtggtgatattaatatcccaaatatattatgggatgaaaataaagtaaaaaaataaatgatccgatgtctaattctctgattgagtttatggaccaaaaacaattgatacagcatgttaaagaaacaaccagagaaaaagcaattttagatttagtaatgactagtgaatcagaattaattaatgaattaattgtattggaacatttttaaacttccgatcattaaatggtcggatttaaaataaatgaaaaattccggcgtaataatcccagtgtttatagaagagattttaaaaatattaatttttcgaaattaagtcgggcgatacttgaaaatcgaattgatttatcaataaactcagtgtacaccgttgatcaaaaatataaagaatttttaaataaagttctgaaattatatgatacttttatacccaatagacatctaaaatcgataataaaacaatcgtatcctcaaaaaataagagacttattttcagagaaattacgtttgcataagcttgtaaaaaaattccctgaaaaaagtgatctcattttaaattacaaaataatttcaagggaagtgaaaaaacaattgaaccaatttagaaatgaaaaagagtcaaaaattatttcccgggggcaaaattcagttaacaaatttatccgaaataagttatcaaaattttttgagattcctactctaattgataatgctggaaatatgttttccagcaatgtataaaaatgtaaaatattagcagaaatatttcaaaagtcttttttaagaaaatcaattgttaatggtccacaaactcagtcaacacagaataagattaaactttctgacattgaattgaatgcgggaataatttggaatatattaagaagacttccccggcgtaattccacttcaccggataatgttccttacattttattaaaaaattgtgctgagccaattacaaaaatattagcagatatatttaggctaattttggattccggtcaaattccggaagtatggcaaacatctttggtaataccaattttcaaaaaaggcgaaaaaactgatccattaaattataggccggtgtcattaaccagcactgtctgtagagtttttgaacgaattttgagtagtaaaattttagaatttctgaacagtacaagattctttgataaagaacaatttgggttcttaaaaaatagatcgactacaactcaaatattaaaaatgatggacgatatatataattctatacaaaagaatcaacaaattgacataatctatattgattttgtcaaggcgtttgattctgttccaattgatttattacttcaaaaaatcaaaaagattggaattgaaggaaaaattcataattttttaactaactttttaaaaaatcggagttttaaggttaaaattggcgaagaattgtcagaaagtttcagaatattttcaggagtgccccagggaagtgtcttagggccattactctttttaatttttataaatgatctgccgtccgttattacaaatgaagcggcatcagttggcataaaaatgtatgccgatgatgttaaattatattatgcccacgaaaatgatgaccattcgaatcagttggataaagcaattgaggctctggaaaaatggtcaaaaataaatgggttagaaatttcaactgaaaaatgttttgttttattttagggaaaaataatatgaaaaaagaatattttattaactcaaaaaagatttcagaatcggataatgttcgtgacttgggaattataattgactcgaaacttaatttttcagaacacataagcaaaattatacgaaacgcatatcttagaagctttcagattttgagagtgttgaaaagcagggaaataaa

SEQ ID NO: 47603 - DNA, 1028 bp, Heterodera glycines
ggctgaaaaggaaagggagaagctgaaactggaacagcagcagcagcagcaactccagcaaaaacagcccaaacaaccattacctatacaagtggaaaaaccaattgaccccgcaatacaagccgaactcgacgcgcaaaaggaacgtgaaaaggttttgtttgtctcatcttattattcattttattattcttgaattttaggtaccgttggaagagcgtattaagcagtttcgtcagttgttggaagacaaaaaagtcagtgcgacaagttcatgggagaaggaactctcgaaggtgcagcgcattatcatttacaggatttgtcacttgcaaaatattttaaatttaagattgtctttgatcagcgctatcttctccttagtactgtggaaagaaaagctgcttttgaggcctattgtcgtgaacgggctgagattgaaagggcggagaagaagaaaagagcaaaagaagccaaggatgggtttcttaaacttatggaagaggctaaactgcatggaaagtctgcttttcaattacagatcatggcacaatgccttgatttttttaacattttaaggtcgacatttgcttccttctctacaaaatgggttaaagatgcacgtttcaaggcagtagagaaaatgcgtgaccgcgaggcttacttcaaggattacgttgaagaactctacaagaaggaaaaggaggagaaaaggaaggagcgcgaaaaggtgaacaaatgctaaaaagtaaacacttacaattggtttgcaggccaaggatgaattcaaagctcttctgagtgagcaaaatgatctgagacgcaattcaatctgggctatcgtgaagaaacggctggacaaagaagcgcgctacaagaacaaacatttggacagtgaaacgcgtcaacgccttttcgaggagcacgtgaaagactgtccggagccaactgaggttattaagctaatgaatattccgagaaaacaatttgtaggaagaggaggaggaagccaaacggttggcggctga

SEQ ID NO: 47604 - DNA, 744 bp, Heterodera glycines
atggtgcgcacattgaaattccatgagaaaaagttgctgaagaaagtggacttcatcaattggccggccgagttggacaacagtcttcatgagaataaaatcatgcgccgttaccatgtggagaagcgcgagcactacacactgtacaacaaactgtccagagaggtacgacgaataatgaaatttgaacttgtgggcatggttttcatggtaaaacgacgaaaatatttccaaacttttgaaaattacaactgcttaggctgggcctcccaggcttaaattacaaaattctgtatgttttgcaattgatgcgttgcttttagcgggatggacaattcgggttttccgcaaattcaggctgatggccagggggttgggtgtggtagaacccgggaatttcgaaatttgcggacttcggtgcgctgcatgattgaaactcaaaaaagggttgcgattttgatcgaaaaattcgacttttgcagggttttttttgggggggggggggagaaagggtcccgtgccgggattattgaagtttttggcgggtttactgggtttagaaccagagtttttccttcctcataaaaaaaacttttttttttgcagatccgagaaatggccaaacgcatccgcgagttggacgacaaaaacccgaacaagttggtgttggcacggatgctgctcggcaagctgttcgacatgggcgtgattccgaccgcggacacacttgagcgatgtgacaaa

SEQ ID NO: 47605 - DNA, 683 bp, Heterodera glycines
tcgagggtgccgattatgaacctgaactcggatttgcccaattccgaagctcggatccgaagtgcagcgaatagatgagaacgactcggatgattagatcgtattgattatgattggacaacgtgcttcggatgttagatgaacgacagggcgaatgtcgggtcttcgttatatgatgtaaaaagggatgggagtggcatggacaaaatggtcataataatgaaaaatgattatgtaaaaatctattaaaaataagaatgatgtagcgaacgcggcttttccgattggaatgcttacaaacagaagcatggcaagtcataaggaattggaaaataaacgagataaaaattaagggaaagcatacgcggaccaagaagtggagaacgaacggatgctgacttatttgaggttagctgaaaatactaaattaatttgaaattgaaatacccaatatttatagcgccaaacagttcattgacaaacacaacgaggcgtacaaagagggcaaagtgtccttccgagtgggagagactcatattgccgacctggtcagaaatcccgaactgttgttcgaatttccccctctgtttcagcccttttccgaataccaaaagctgaacggattccgtcgtttgatgggcgacagtttgcgccgcaatgcgtccacttttctggcgccaatg

SEQ ID NO: 47606 - DNA, 1390 bp, Heterodera glycines
atggacgacaacaagcgcgagctgctcaagttggacaggaaaattgttgccgccgcttccattggcattcttggccaacaacacaaagcgcttcaacagcatcaacaacaacaacaacagctgaccagcaacggcacaatcactgccggcggtggtcgccccgtctgtgccattgaattttccaccattttccccgaattggtggcggtgtgccatgaccgggacaaggacgagccgttggcacccgacagtgtgatcaatgtgtggaacacacgcttcaaaacggcatcgcccgagtgcgtcagtgtgttggtgttgttgttatataatgatgatgattgtccttggcaagggtgggggagcatcattccccccgtcgttgctccacccccggaaagtttttttaaattttacaaaaaaaatcttggaattttaaaaaaaaaattaatttttttaatttttcaaaaagggtaataattggccgactaagttgtcgtgttaaacttcaaataaataatcctgggggtgtaccgcaacaattgaggagaagttttatcgtccagtttgcggttatgtgatttttttttaccgaataaacaaataaacaattgcacacaaattcatttgttttccaggatgacattcaccagctcatcacgcgtgatgagcatgacatgggacatgttcaacgcgaacatcatcttcggtgcatgttattcgggtcaaatttgcatttgggacacgcgggtgaacaaacggatgcctgtgtgtaaggtgagcagtgaaccgttttagttttagttatctaccaaatttttcttagctattttcgaaattttatgaagaattactacctattttcaaaaaattttcaaaaaaactttttttttttgtgtttcaaaatttatatttcaatttatttatcaaaatttgtaaccttttcttgagataatcaaacatgaatatacaaaatcttttatcatttatttaatttttccccctctcagactccgttgaccgccaaagcacacacacagccccttttgtgcatgcgtatggtcggcacagcaaatgcgcacgacttggtcaccatttcgacggacggtcgaatgtgttcatggagcattgacaacttgcagtcgcccattgaagccaccgaattgacatgtaacaggacaaaaaagccggtgattatttttttcgctttgcatatcaatgaaatgaaaattgtctctcctttccaatgtttcagatttgtgcacttagcatggcattcctacacaacagcatcaacaattacgtgctgggcactgaggagggcgagctgtacattggcgaccgacacgcggccagcggcgagtcgagtagaagcattgctggtgggtggtga

SEQ ID NO: 47607 - DNA, 2368 bp, Heterodera glycines
ttggggaaagcgatggcaatgagcagcggagtgttgcggtccgtctcttctcggaggacggcaaagagattggccaggcacccgtcgttgtgcgtctttttaatatttaaaatttatttccaatttttgcttctcgtcctttagcttcttgcttccaccactgctgaacagctccaagtgctttaccaccaattgttgcgcagtgaaaaacagcaaaacggcgaatgcggcgacgacggagactttgacgaagggacggcgcccgtccaatttcggaccgtcgcagacgaaaaaagtggcggaaaagggacggaaattgtcgattctttgctcgactcactgccctcagaacgcctcttcttggaaaaggttattattttcacgctttagcataaagcaactggacatttattacgctgtgacaaaaagccattacataattagggcattcgatcaaaaatacagaaaaataggtataaattaccaaaaacggaatatatttgcaaaacgtgggaattttatcaaattcgtttcatatttatatgatgaggttgacagcctagtgaagtgtaactgttttaaagtgtttcatttccaattgactttcagcccctcgagttggtctgtctgccacaggccgtgttccgagttcggcccgtcactcggtgcaccgcttcgttgcccggccatggcgaacccgtcctttccgtacagttcagtcccgacggaaggtgtgcctttttcatttttgtctcactccccccaccccctctttaagctgtttggccagtggttctggtgaccggacagtgcgtttgtgggatttgcacacgaatctgcccaaacagacgttgaccggtcacaacgattgggtgctgtgcatcggctggtcgccggacggtcgcgcgttagcatccgcgtgcaaaagcggcgtcatccgcgtgtgggacgcgcgcagcggggcgcagcgacgcgtgctgaacggccatcagaaatgggtgaatgcactcgcatggcagccgctgcatgaggcgaccagcgacgcgcagtgcaggccgtgttttcttcgaacgagcaattattaagcgttggttggctttttaggttgttggccagtgccggatgggacaaaaccattcgaatttgggacattcttttgggtggcactgtccgcgtgctcagcggtcacaccgcatcggtcggtaattgggcaaagagttactatcaattggtcaatttatttggattgattgtctcattgtcaggtgacagcagttcggtggggcggttgcggactgatttattcggggtcacaggtcggctgaacatttttaatttggctttttacaatatttgtcccctttcttgttttcaaagaagccaagttttacaagcaattgtcattttacaacacaaaaaagaatgaaatataattacttaaagccctaaattaaattcgaatttttcattttaaaattgtgagcacctttttcgttttttatttcatttttattagtatttttgaaaatactgaaaacgaattttaacctaaaaattccatctcttattggctctgtgctcttttgggcccggatttgaatttcgaaaaaattaacgaactacccattcccaaaacaggaaattctcctcttatttttgtttttaattgtttaatttcaaccttttgtgtttgaggatcggaccgtaaaagtgtggcgcgcggaggacggcactttgtgccgcactttgaccggacatggccattggatcaacactttgtcgctgagctgcgattacgtgctcagagtgggctatttctcggccgaggcgcaaagcaaaggccaaccgacgctcagtccgttctccgacggaatttccacggaaaaagtgttccatttttgcaaattcattagttatcagtgcccagtgattccattttttctctttcacagattgtaaacgatgccaaacagcgctatttgagggcactcggccaaccgtcgctggaacggctcgtgtcgggctcggacgacttcacaatgtttttgtgggagccgggcgaaaagaagcagccaattgcgcggatgaccggccaccaacagttggtcaatcaggtgggccaactcaaccaaaacacggagagacgaaatgccaaacaactgttgaatgttcgaatttgaacaggtccaatttgcgcccgacacgcggaccatcgcctccgcctcttttgacaagtcaattaaactgtgggacggacgcaccggcgcattcgtcgccactctgcgcggccacgtgggccccgtgtaccaaattggctggtcctctgacagccgactgctcgtctccggctctgccgactcgacactga

SEQ ID NO: 47608 - DNA, 1293 bp, Heterodera glycines
atggatgcttcctttgaccaattcggtggtggaggatggggtgaccaaggcgaacaagaatttgcagcttcacaattccaaaaaaatatttatgacaaagttcctgtccccgttgcaatcgatgtccttatttccatgactggtgatgaagaaaaatatgttcttggaaatttttcttttaacacggtaatttgttgttgttttttgttgttgtaaattcatcattcttttcaggttcaattgatgggaaaagttgccaatgtgtcggaagttgaccaatgtacgacttacgagttatgcgatgccatggccacggatattcgtgtggcaaagagatttactgtcattcgttatattacggctgacttggttctttttccatttctacttatttgactaatatttactcttccataaaagcaacccgttaaagacgaggttttcacaattggccaattggtccaagtaattggaaagctgcggctgtataacaatcggctgagtgccgtctgcttcaatatccgtgaaggttttggtgtaaacatttcgcaaaaaatatacttaaaattcagttgaaattgatgagattgctattcacaaattggaatgcaaacttgccaaaatctactttgagaaggttttgtcctctcctattttaccacttccaattatttaggatttgaatatttagaatttgactgaattttcacttgggattgttgagaatgacacgattttccatggcaaagtgtccaaccaacggcctggctcgtcgattggccattcttttgctgggaatatggcaacacctaacagaaaactaagcgggacaaccactcaaatgactgcgaataggccgcaaatgtaccaacagaagcaacagttgaactttccaacgcattggacgcatcagcagcagaaagtaattggccaaattggaaaaataaattaattgcttatcgcttaagatttacgagttcattaagcacaatgcaattggcgaaggtttgtttaataaactcatgctttttgtgtccctcccttattttttttcgttaccatttgctaaaatctcagttctctttatttttttattgccgattcaaacttgagggggaaaggtcacaaatggaaactgataatatgttcttgcttcgttggtaattcgttctttctaaagcgggtgttcacaaggacgtgataagaaatgcgctgggtcttaatgcgagttgcaacacggacttggcaattctgagcaacgagggatcgatttacgcaacaattggtaattga

SEQ ID NO: 47609 - DNA, 577 bp, Heterodera glycines
atggcctatttgaactacgaccaagtccaatgcccttgcatgcgtgccaacaatgtggtggggccaaggatgggcggggctaattcgtcgcttggccgtgcttacacgcccgggggaggaggtattgaaggagtggtcgagagtttgaacggtggacagtcccaaaatgcgagcatactgagccgttttcaggtgccaaccacaacaacggaggaacgtccggacaatcgaccgcacggcacgctgaccattccggcattggccagccgtgctccagccacgtgcgcgaactgcccacgctgaacacccatttgacttctcccgcagcagccgtcgctctcggcctcatttatctgcgaacgggcgattgttggatcagagaaacgctggcaattgctgacacattttacgagattgaccaaattcggtggaaccgatttctcaaacgacccaatgctaattttgctttttagtcctgacatgctaatgattcgcactttttcgcgttgccttgtcgatttcgaagacattaaatgcacgagagaatgggtcgatgcccaaattccgcagataattc

SEQ ID NO: 47610 - DNA, 4412 bp, Heterodera glycines
gggtccacgggtgtgctttgctttctgaagggtgttgatttttctcgaaacgatttttccgctgatcgcttcccggacgaagttattgagatgactcaagccacttggttgaagctaaaccgtgctcagatggagcgactgcccgatgttctttctaatcttaaacacttagaacacctgcaaatggcgcgtaataaattgcaggtactgtacaagtaaagaccgaaatgattaaataaaacttgggaggattcgtctatttgtacgcaatccatcgaattccctatcttgtcctgctttttctctatttccttgttatacagaatgtgcatggcgaattgtccgaccttccgctccttcgctcaatcatcgtccgatacaaccaggtatttatcagacgaattagatttatttattttaatctttcggtttaagataaaaacatcagcaataccaacagacatttttcgaatgaaggatttgaccatcattgatttcagtaacaatttgttgagggatgtgccttctaacttggaatatgcaaaatgtgccatcgtgttgaacctgagcgggaataatattgaaaatgtaccaaaccaggtcatattcacttaattttttagttgtcaattcactgtttcagattttttccaatttaatcgacttgatatatcttgacctgagcaataatcggttggaagtggtgcccccacaactgaagcggctgaccaacttgcaagtgttgaagctgtccaataatccgctcactcacttacaacttaaacaactccccgggtgagtgtcgcttatttcctacctttaattcacgtgtacttattatccatttagttctaaaaagcttcgtgttttaattctgagaaacacacataggactttgtcaaatattccttactcatttgaggatgttttgaatttgcaggtaaattaaaacaacataaatattgctaatttgaatttgcactttgtttaaggaattggatctttcgatgaatgagctccaatcgttgcccgattcactttatgcactcaaacaattgcgcaaattggacctcagtttcaacaaaatatcgaaaattgaatttccttcctccgtttttactcagttagaaacattgaatgtgtcgggcaacaatttgacttctcttcctgccaaaattgtgaattgtcaaaaattgcagcggttatatgcgagttacaacaaactgaaatttgaaggtcggaatttataattttattacttgggatttttattttaaacaatttaggcttgcctgccagttttggacaacttctgcaattacaagttttgttcttgtcggacaatgacttggaattaattcccgaaggcattggccgttgtgtgaaacttcgtaaaatcaaattggacaacaatcgcttaataacccttcccgatgggatatatttactgcccgacttgaaggaactcgacctgcacaagtaatttgcaaattcttattccctttcaatgattattctgtttttgtaatcccgacctcgtgatgccgcctaaaccctccgacaaagaaaaaggtaaaacccgagggactttcattcattctgattgtgattcctttactagctatggctttctacaacattgacttttccctgtccaatcaggttgggtttttccactttccattgttcaatcaatgcccgatttcagcttcgtttggctggacaaagtcccggttcttcagtggactcgcttagtcctaacaaaagtcaacaaaaagactacatgcaacgcaaaaaggactttatacggcgccgaaggtgtcaagcagatcaagacagggcctctaaagtcatccaaggaatgtccaaaatggcacaagatgcacatgaaatgaatcaatccgtggagaaagaaaacgacgccaatttacgcccagttattggctggaaagagaaaatggagcagcacaaaccgcgattggactattcggacgtattcgacgctgtcgctggagcggatgctggtctttgggtttgggagattgagaacttttatcctgtgcttgtcgactcgggttttcatggtcaattctatgaagctgactgttatttggtccttaaaacaactcgggagacaaacggagcactgacacatgccatttattattggattggtgaaaagaccagcctggacaaggccatgtgcgcggcggtacacgcagtcaatttgcgaaatcatttgggagcatcttgtcggacaattcgtgaagaaatgaatgaggaaacggacgagtttctggagatgttcagtgaggaaatcgtttactatgacggggcccgcactcaatcgggcttttatgctgtggaaaaagtcgctttctcaaacaaactctatcgagcatttgtcaacggaccgtccgtcgaaatggaggcggttccgttgaatgccgagtcgttggacccacgcttcgtctttttgcttgattgtgacaaagttatttggatttggagtggagctcggtcgagggtattcataacaacacttttcatttcaatttaattttttaggtaacgattgccaataaagtgcgacttttcgcggtgaaaatgaacaaaagggataagaagggaaaagccgagattgagtcttgtaaccagctaaaaacgccggaagaattttggcttgcgctcactggtaaaaaatgaatgaaaatgaaaataaagtaaaattaggatcatctaaaaggccggatgagcccatctttgaacacattttggaagatcgtaaaccagaaaggaaacgtctctacgaagtccaacttggcatgggatttttggagttgcctcaggtggagctgagaaatggcgtgttgcataaagaactgctgaagccgaaaggagtgtttctgttggattgcacttcagaattattcttgtgggtcggcaaaaatgctaatcgtcttacgaaaatggcgggacaggttttgaattgtgaacacagctttggaagtgaattgttttttttttgctagaaaatcgcatctgaaatccatcgaatgatcgaacggcctgacttctgtgtgatttgccgagaaaacgaagatgaagaatcaacgatatttcgttccaaattcgcggcgtgggatgacattgtgccattcgatttcacaatgacagcggacactgtgcaaagacgcggagcggacataaaagtgagatttttctggcatattaccaataactcctatcaatatttcaggttattatggagagagacaaattgaagacggatttggtcgctttgttcctcgaccgtctgcctgcaatgccacacagcgacacggagaaaatcattgaggatttcaacatggatttggaagtgatcgaatcatttgtgctggtgagatttcacttactataaaacatcaaataaatgccgcgtttaaggaagggaaaaaatttgtccgccttcctcagaatgaatttggcatttttcattcaatggactgttatgtgtttttgtgtcgttattttatcgatgacgacgatgaagaggaggagggagccgaagatgaaaaagaggcaaacgatgtgtcggatgagaatgacgagggtggtccaattaaagaggtgtgaatattcactttgttatcatttttactgccacctttagccaaagaattctgcctcgggaaaaccaagcgacttcaaatgcgtcgtttacttctggcagggccgagatgccagcaacatgggatggttacacttcacattttcactccaagttggactgtcatgccaacggaatgataattccgtttcagaaaaagtttgaaagcttgttcaaagacaagctggaggtggtgcgaatgaatcagcagcaagagaatcacaaattcctgtcacatttcaaatgcaaattggtcatccgttatggcaaaagaaatccgtcgcacaatttgagccaagcggtgccagagttattccatatgcgagccaatggcacttcaatttgcacacggaccatccaagtggactgtaatgcgacaagactgaattccgccttctgttttattcttcgagttcctccttctgaccttcaaacggatgaagagggcattggaaacgtttttgtgtggattggttccaagagtgacccttacttccacaaattggcggaagaggtggtttttgattatatttatgtttatgccctccttttatcaggttgcgagtgaattgattggtcgagattctgactttgctgttcaaagaattgaggaaggaaatgaaccattgctattttggaaggcattggggggcaaaaagaagtacgaccgggacgcggacttcatggaatacacgcggttgttccgttgcaccaacgacaaaggctatttcagtgtgtctga

SEQ ID NO: 47611 - DNA, 1396 bp, Heterodera glycines
atgacagatgctgataaaataaacctggacaatataatttcaaggcttcttgaaggttgtttttcaaatttagtaacgaagtactttttaaatttagtgcgtggttctaaaccgggaaagaatgtccagcttacggaaaatgagataaagggtctttgtatgaagtccagagagatctttctgagtcaacctgtacttcttgaactggaggctcctctgaaaatctgcggtaaaaaaacaaaaaattttttaattacaaattatttaaggtgatgtgcatgggcagtattatgatttgttgcggttgtttgagtatggagggtttccgcctgagtcgaattacttgtttttgggtgattatgtggatagaggtataatttattttgtaaatggatgcaattttacaaattaaggaaaacaatcacttgaaacaatttgtttgcttcttgcatacaagattaagtaccccgagaacttctttttgttgcgtgggaatcacgagtgtgcttccatcaaccgaatttacgggttttatgacgaatgtttgatctttcttcactattaatttcagtttatgattgtttataagcatctgtatttcaggcaagcggcgctacaacataaaactgtggaagacttttaccgactgctttaattgtttgcctgttgccgcaattattgatgagaagattttttgctgtcatggtggtctttctcccgacctccaatccatggaacaaattcgtcggctcatgcgaccaactgacgttccggatcaggggcttctttgcgatctgctttggtctgacccagacaaggtatttacttgatcaacaattttagacataatcaacatataattttttaaaggatgtgaccggttggggtgaaaatgatcgtggtgtgtcttttacttttggacctgaagtcgtctctaaattcttgcacaaacatgacctagatttgatttgtcgtgctcatcaagttagtcaataataatcatttgaaatttattggtttaaaaggtggtcgaagatggctatgaattctttgcaaagcgtcaattggttacactgttttccgctccaaattactgtggagagtttgacaatgccgggtcaatgatgaccgttgatgagacattgatgtgttcttttcaggtaaatgaattccttgtgaatgtgattgtatttcggttttagattctgaagccgtccgacaagaaaggcaaattttcatacactggggctggacagaatcgtccggttacgcctcctcgtgcaactcctgctgaacaaaacaaaaaggcgaagaaatagtgttttgtcgttttagatttgaattggacagccctttattgatcttttttatatcagtttcttttatctcaattaaa

SEQ ID NO: 47612 - DNA, 1160 bp, Heterodera glycines
aagttccgtcaattgtttctgccgtccaataccttcactcgaagaatgttattcatagagatttgaaggtttctaaactaattcttattggaacaaattttgtggttaaggcagagaatttgttgctcgatgccgacatgaacatcaaaattgccgactttgggttcagcaacacattttcaccgggcaacaaactcgacacattctgtggcagtccgccctatgcagcacccgaattgtttcaaggcaaaaaatatgacggtcctgaagtggatgtttggagtcttggtgttatcctttacacacttgtttccggcagtcttccgtttgatggccaaaaccttaaggtacacttaaacacacaattaaattcaaattgaactttttgttaggaacttcgtgagcgggttctcagagggaagtacagagtccctttttacatgtcaacaggtccgaaactgtgcaattcattgaagaatattatatctaattttagactgcgagaatctcctgaagaagtttctcgttttaaacccgataaggagaggaactttggagatgataatgcgggataaatggatgaatatgggctatgaggaggacgaattaaagccttacaccgaaccgacaaaagacgttcgggatgaaaggcgcattttgaagttgcaagcatttggctacactctccagcaaatacacgagtcgttggaaagagaaaggttcgacgaaattttcggcacgtatttgctgatgaaagaggcaaaaaagcacgacgcgcaaggccaatcgttgggagggagtggaccaaatgcgacggccgaatcgccgtttaatcaatcgatggggccgaccgtgccacaatcgcatggggtggccagtggtcttggctttccatgtgataaatcaaatttattaagccaacggtgtcaaatacgaagaacagcagacgctcttcttcaaatgccgaacaaatccaaccacagcaacatgccataacatctcacagcgtaataaaccaacagtcggctgctcccatccaacaaatttcggcaactccacaagcgattccttctcgtcaaagacaaactgctccgggacaagtgacgttcagaacggcacaaaaaccagtcgccaaccgactctcagcgttcaaccacaag

SEQ ID NO: 47613 - DNA, 1344 bp, Heterodera glycines
atggcatttcacaaaattgactcgagcagcattgattcaattaccaatgctgttgactttttcagtataccccctacaaatgttaccgtatcatcgtcaaaggttttcgagattttgccgagtaacccactcaccgacacaccttaccattttaaaatacactcgagccaaaactacattgacctgtcaaagtgttaccttttgaccgaatttcgaatgcgaaaattgacaccaccaaatggtgaatggggacatttggatgctactgatcaggttgtaccgatacaactgatcggacacacgttcatacgagacatgaaaattgcaataaacggtcgtgaaattttcaattcaaattcactgatggcatacaaaacttatctttctcatgaactttctcaatcacttgaagctaaagtttcgcatttaactgctgccggatacgaccgtgaggatgctagcaatctacaaaacgcaaattccgaagggttcaaaagtagaagacaacggtatttgggaggtcgaacagcacaatacattgcaaaaatcgatgccgatcttttcaatgtaccccaatatttgattaatcattgtgaaattgacataacgatacaaccccatgacgacaattttttgttaattgacaccttagacccacccggtcagccatatagtattgagcttgttggattgaaactctactgcaaaaaagtcagtcttatggatggcttggctcttgagttggcgaaaaaattggaaatgaaaccagcacggtatgctgtacggaagacaatgatgaaagcactgttcataagcccgggacgctatgaatttaatgcaaatttattcatggaccaagttccacgccgtgtaacaatgggacttgtcgcaaattcagattatgtgggaaacatcaaaaggagcccattcaactttcagcactttaatgtacgggagttgagtgttgtggccaatggtcgctcttatccccaggccccgtatgacattgactatgaaaattggaaatttgttcgtccctacaatgacacgcaggaggcgcttggttttgctaactctacatatggaaatggaattgattacttttcatttttgcacactcactgtatttatgtgtttaatatgacaaacagtggagacgatcatggcggcttatttgatctaatcaaaaagggatgtacggcagtaaacattaaattcaaaaaaccagtgcccgatggtggaattacactgatagttatgggagaagcagactcaatctactttttggataaaacagaacgatcgcgaccgacacaaccatttaaatcatttttaaaatgttga

SEQ ID NO: 47614 - DNA, 733 bp, Heterodera glycines
atggagacggcgctgtgggagttggaggaggcgcaattggcggagaaacacgcgctgctcacccaacagtttcgggtgagttgagtcaagcagataccaagagttgttcaacaaggagacaacgagacaagcatcgggaacagtcccctcttacatgaaaaaagaggcgatgggtcaaattatgcgaatggtgtcaatttgtttttttatcaggtaactcactcggcttcttttcaaaagatcctttttccttttggagcaggcgccgctgggaaaaatttgaaattttttactatttttagcagattcaccaaaaattaatcaaattttgcgattttgagccaattttttttaatagaaataagaattttaaggccggcgctgccaacaggcgccggccgctaggaaaatttttcagtttttaaaaacaaaaaatttataataacaataagtacagcagattataaatacaagaaatgcggttacatgaatttatgtttttttggattttatcaaaaaatttctccaacttttcatttttaaaaatcatttctccccgcaggacgtgttccacttacagcggacgcacatgttggcccggcatgccaaggaacaggagcacgtgcgccgcatcaaccagtccaaggaggaacagctgttgcgcgcgctcaccgccgaccgcaaggcgttgccccaaagtgttgcgcaacgaggcgaagaacgcggacgatga

SEQ ID NO: 47615 - DNA, 3688 bp, Heterodera glycines
atgttctctgtccactacaaattcaaggcgacgctcgagtacaaaacgctgacatttgacgggctgcacatcggcgttgacgagctgaagaaggccatctgcgacaaggagaacatccggacggagtcgttcgacctgctgctgaccaacgcgcacaccaaacgcgaatatgcagtgggcgaattggtgccgcgcaattcgtcggtggttgtgcagcgaattccgcgcgaaaatgcgcaaaaattgcccaaagtgcagtaagtgttgggctgacaatgaatgggcgagaaaatacggcatggccttttttggcacaaaatggccaatcgatgggcccattttggatttgagaattgtgggattacctctcaaaagttaattgtttgaagcgtgagggaaccgaatttactctgtcgatttttctcgtattttgtttttgcatttctgagaaaaaaactcgagattttaaatgagtacaatcatttttcttttctttgcttttaacatgggaatcccattttgaaaaagttgctcattttctccaatttagtgataccagcacaagcggaattgtcgtaagaaacttgtcgacgtaccaacagaacagcgccaacagctacattaacccggtttgctttgtctttattgtaacgagtcgggaaatttttgttagtactttgcccgggttttgagtgctcttgccgagttttgatttgtggctgtatttactattgtattgtatttaaaatctggtccaaaattcgtttgttcggcggagttcttgcggagagatttttaaaaaaatcttgtttataaaaccaaaatcttaaaattaaatatttaaaaaactggttgtgtagcagctttaaacaaaagtttaggactgaatattcttttttcgaaatttcttttcaaattcaattcattttcgtatttttaggaggaatttgccggaatgagcgaagaacagcgcctggcacacatcaaacgagtgtcaacggagaagtacagctcgacaaagtgagctaacaataagcaaggcattgacaatgagcacttttaagcagttggagtgggacgcgtttttaagaaaacaatggaaaccttttggttacgcaacattggcgcgaatgactaaaagcgatttcatatcaatgctttttttcatttttgataatttcaattaaagaaaccggtacttgtctagtttacaggagcaattccacataccttttcagattccaataaatgtgttttagaaattaattaaaataagttttaaggggtttttgaggtcgctgatcacgaatacagcacccatttttgcctatttcgaacccctgacgcgaactcgaacaaaaataaaattagaatcttgtatggataatatcctcattgacatcttgcccatgtgggtacccttggtacaggaagaataaaattcgaaaattgtacgcatgatatcctcatgggccccttggccatgagggtattaaaatggtacaggaagcctgtcaatttattgtccctgtacagctcatgtaatgaacggtagcgctgaactgagcccggattcgtgatcagcgacctcaaaaaccctttaaaacttattttaattaatttctaaaacacatttattggaatctgaaaaggtatgtggaattgctcctgtaaactagacaagtaccaagaaaccaacttcttttgacaataattgggttcaaaaattttctaagaatgaggtatcgcatttagtcaaattccatctcttatttaatgctctttatgatatttaaaattgacaaaacaactaaatttgaaaccgatttttggcataggcgcaaatctctgctgcacacgaactgtttggttttttcaatttttcttcaaacaaaaaaagttgttaagtagatgtatcgtcccatcccaactgaaaaagtgtgccatttttgtaaaaaaaaaaacaacctttattggcaaattggcatcgaaatgccacccactaaatcgggaattttttttcaaaatttctttttttcggagccatctttcggaaccttcaaccactgggcttttttcaagcaaaaaagcttatgaatatgaccaacaatgtgtccgcttctttcagttatcagcgacgcagcggcggtataatgacgggccctccgccggccacgtacgtgtgcaaccgttgcggccagcccgggcattggtacaaaagctgtccactggtaaatgcttcttcttctccttcccattgctccgcccattggttgggcaggcaaaaacactgtgctgtctgtcggtgatggatcagcgaatttcaaaattaatctcaaaatggccactcttcctttgtcggcgttgtaattgtcagtctccccctccccgtcatgctttacccttcacttccattaactaattggctaattaagtgtgtcaataattgcccaccctactcagccttttattgtccgtcaatcctcaatacctctccatcaaattatgcattttgttagcgcaaaatactaaaaaaaatttggtattcgaaatgcataatttggtggacgttttcgcattccatgcatataaatgttcgacttttcactcttttcttaaaatattccatctgttttaccatataatgccataataatggaaaagttgtcgcacgaaggcaaaacaaatttttcatgccctagtccaaaatggcacctctagaaaatgacggcacacttttccattcattttattcaaaaatgtattttgtccgatctcatttgtatagaaatcttttaaattaatgcaataaaatttccatttcagccaaaatgaccaaagttttaaattttaaataagctgaaacccggcctaagtcatgcccgaaaatttcacttttcagctaaacttacggcgcacagcgggcatcacaatggaagagctgatggagacggaccgggacgacccgctggcgatgctccacccgtccggcaaatttgtcaagccgatcatgcaccaccaggcacgaatgcagcgaaaacacgtaagccaccagcagagggggggggggggggattcggggattgacatgtcgggcgagaaattaaggaatggaaattaacataatttaaatggaaaatttttataaaaatttgcgaccaggcttaaacctgaaaaaagaagcttgactgagaaattctctgctcttcggccattattcgaataggcgaagaaatcgctttttagcagttttcgccaataacgtgaccaaattcctctaacaattaattttaggaattccagcggtgccgataggatccatcgggcaaattttttactaaacttgttaagaaaactaatgtacattttcaaaaaatttccctattttttgacctctatacgacttgataaacacgatttcaatttgtgcatttctatttttctttattttcaggagccattccctggtcagccggatgaaagccgttctcctggtcagcaacagtccgccatatctgcagttccggagcagttcaggtgattgacgcaacccaatctcattgacaaatcagaaacgaaaattggcttctgctcgttcaccattcttttcttccctctaaaaatgtgtcaaaacatggtacattttgctgccttacccgaaaaaatatgaaaaataaatttaatttct

SEQ ID NO: 47616 - DNA, 2084 bp, Heterodera glycines
  unsure (1)..(2084): unsure at all n locations
gcaatggagaaccattggagcctccgcaggcatttgccaccgcgtcgaccagcgaagattcatttgaggaggaccaggagtttttggagctgcaagagagggaacaaattgtggacaaatacgaaagggtcagaaaaatgaaatgaaaagtgtgagaaagagaaaataatatagtacataggttggaggaaataacaaaacgagttccgtcggtgacgtcccagggttttgtggtgtcattcattacccattttttattttatgtagaaaagggcatattgagttgtgggtttttgaatatgcatttaccatcaaaaaagtcccatttttaaattaaaatttcattcagcataaagtgatgaaggtttccgataacttcttttttttgtgctcgtcggtgataaaaaaaaagtgcagtgcaatgcttcttttttgacaaatgaatccggccatttcggaggggggggggggtgggtgattccgangatctttttttctgctcttcggattgccagtcttaatttttaaaatcttcagcgcgggaactggaaataatattgtacactatgcttttctgcattttcagggaccagatcaaaatgacgtggacccgtgggagaacccggactttgagctgtacaaaatcacggaccgatatggctttatgcagttaattgactgtctataatataagccaatttcccaataattctcacaatcagtaaaaaaacaccagagcaaacagaagagcagaagagggtacaaaaagagttgaagcgagagcagaaatggttaaggatgctcaaggaatgggagcagcggtaagtgcaaattgatggacaattctgctagatgcaaacatttttgaaaataagtaactgattatacaggcatccaactaaacttgctgagcgaatgtggaagggtgtgccggataggcttcgattggtggtgagccattgatacttacaattaggaattcgttttaaattgattatacaaactcaatactagtacatttacctaaacaaaacttaatatcgtgtctcttttataggattcaaaaacgaattttagattttattatttgttatataatctttcagatatggaagcgtttgactggtgctgacacaatgaaggccaattcgagagaaaaactttacaaggaattgttagcacgggctcgacttgtctccagggacatcaaacaaatcgatttggacattaaccgtacataccgggacaacttggcattccggaggcgctatgatgtgaagttggtgatttatttaaaagatttattgtgtgtatgttttcagattgttttaatacctacctattcttacatttaatttaatagttaaccttcttcttatctttgttgcaacttcatgggcttttccaattttcttttcattttctttctttcaattcgtcttttttccaaatacttacaacatgaaaccgcaaaaaaatttctgattttttgcagttccgttcttattttaataaattctgttaagagctttcggttaatattttggtcacaaaaaagttattacgctctaaacttgggtgggacggaactgtcggagggaacttattgttagtcttgagggtggttgattcgctccaaatattttcccgctaaaaatttaccaattttaagatgctccaatatggaatatttttagcttaatcaattcatttttagacaacagtcccttttcaatgtgctgactgcctacgcgatgcttaacacggaagtgggttattgtcaaggtaaaatgggtttttaaacgatttaatatcataagacaattactgtgatttcaggaatgagtcagattgccgcactttttctgatgtacatggatgaggaggaggcattttggtctttacacggactattggttaatcgaaaatacggaatgcatggtacatttacttctttctttcttttcaaattttattaaaatattttaggatttttcgtgcccggcttcccaaaactccatcgttttcagaatcattacgataaagtgcttctcaaatatttgccacgagtgaagagccatttg

SEQ ID NO: 47617 - DNA, 930 bp, Heterodera glycines
agcatcaattaataatcaaacgaatgtaaacattgtttcagtgaacaatgtcgggatgagctacgagtaccccgagcgattggaccgtattgagggcggactgcaacgcgtctccgacattaccgtacgttttaaatcagttgaactgctggtggtcttaagtgttttgattttgtacctttcaaggtgatcaacaccctgcccactacggtactctccgcttttgtgctcaaacagatgagggaacggggacgcggcgtcgtcgtcaatttggcctcctcggcagcgtatttcaattggttttacctggccgcttattccgcgtcgaaggtggaggggaaaaggggggtgccgcgttggaattttgaaaacattttgcttttattgggctgtattgtatattttttggtctaattaatgatttgggacctcataaaacaattcggtaatactttatagatgactcaccccgattttaaattgaatattaaaaattcatgagaaataattttaaaatggagccaccaactaaagagtgtcatcgaacgtttcaaattatttagaatttctcaaaaaatgtttttcaaatgattagaacttttaattttctaagatacgccgatcactaaaaaccctaaaaatacacaagaaaattttattcgattccttttcattttggaaataatttaaagaattcaatcttatcaaaaaaatcatttgaatctctgtctcagaaatacgtgtgttggttgtcctccattctgcgcatggaatacgccgacaccgacattgtcatccaaacggtgtgcccgatgatggtggccaccaaaatggccaagattcgcaaggcttccttcttcacgcccagccccgaggaatttgccgcccaagcgctccgcagcattggtttggttgacgagaccaccggct

SEQ ID NO: 47618 - DNA, 544 bp, Heterodera glycines
atgtcttttcttgtcacattagccggctatttgacaattgccatttttctccagaaactcttccgctctctgtacaatgtggttttcccctatttgttcgctgttcctcagaatatcaaggtgggtagaggacctcgtcggatttagaccgaccaagtcttatttcccaaaaaatatcaatttatatttttcccaaattatgggtgaagagaactgtcagaataaaagaatacactcacaaaaaaaagattaattttcatatttaaatttttacttttttaaatttcattcaaaaatatagaaaaatggagcaaaataattcattttttgaaatttaagcattgcaaaatctttggtggggaatgcggcgttccaattccctaacatttccgttcaaatcggttgtttccaggtgctcgcgggtgccgagtgggcagtggtcaccggcagcactgacggcattggcaaggcatacgcgctcgagttggccaagaaaaacttcaacgtggtgctcatctcacgctccatggacaaactgaacgca

SEQ ID NO: 47619 - DNA, 2066 bp, Heterodera glycines
atggacgccaatttgctgcaaaatgtgacgacggacaacaacaacgaacgccaaattggacaacagcaaattcttctcggccaaacattcgattgggcacaattcaaagtgagtggaaaatggggggaaataaatgaaaaaaaaaatagaaaattccctccccgttttgtcagaatcgtctcgcgttggatcgctgcgtgtgcatgggccacagttttggcgccgcctcatcgctgtccgcatgtgccgaatatccgtcgctgttcaacgcctgtgtgctgctcgacgcctggctgtacccggtggaacgacgaatgtatccggcgactgtgcaggtgtgtgaaatgcgattttttggaaaaaaaattttgaggaacggcggaagggtgccgataggcgccactggaaatttttaaatttgttcaaattcaaaatttgtcttctttccccccttcatcggcacatacacccaatgggattcgaacccacgccaataaaacccattttgtgcaaaaaataaatttggcccgtttccagaaaatttcggaagtttttttttctcatcgcctttccccgcttttttagcctgtgctgatgctcaacgccagcaaatggcaatggccacgcaatgtgcgacgaatgcagcgactgttagcgaaagcgaccacttccaccaatgacgacaaaacagcaacggagacgacaacaacgacggcaccgcagcaacagtcgcaggacggcgccgcaacgacagcagcaactgcacagccgagtgtcaccaacacggacagccgaatgatgttcacgataaagtgagtggtgggagaagcggtgggaaaagcaaaaaatatacatattttcttgttttcacccactctttttggcattccccgaattgctcgctcatatttatttgaacatttgtttccttttcagggacattgtgcaccaatcgttcagcgactttggcttcctggtgcctggccgtgtcgcccgttacatcggcgttcagggcgacttggacccgctgttgaccggcacagccgtgctcgagatggttctgcagttcttggagtcgcaatttctgcaccagcaacaacagaaggaggacgaggaggacacggaagatgaagaaggagaagaagacgagttggaagaaaaggaagaggaaggagagaaggagtcaaaagagagaggaggaggagggcaaagggatgtgcggactgagcaaggggagcaggacgaagtggcgagaaggtgaaaaacagggcattaccttaaatttggagttcattttgtttcctccccatcccccgaaaaaaatcaacaaattttcaaactgagaattttcaacaaaaactttttccagacataaaagtaaaaaaatcactgaaaatgtttcgttttttgaaatttcataagaaaaaaatttcgggcgggaaacgagctctgctctccctatttgtaagtgtgagagggtgaatttgaatccaaaaaataataatttttgatacaatttgaccaataatatgggaaatccatgcattttgtcaaatttgccccaaatttacagcaatgcctccgcgttggaccgtttgcgtcgtttggtggcggagaaatacgcggcttttgtggtggaagggacggacattccgcaggtgaattggggtcctgggcatattggatggccatttggggcgcctttaacaattttggaaaaattgttttcacactaacacatgttttcaaaaaataaaaaatatttttttcttaattttcccaccttttactaatgtttttttattttcgcccaaaattttaagaaattgcaatttttccccgtctaaacactgtgctctaattcaggtcaaattggacgaggtggccccccttgtggaagcggaacaacagcaggcggtgtccgcggaggaggagcgcaacgtggccaatgacagcggcgtggacacaccgccgacgactgagacaacgacggaggaggcggccgagaataataatcagcccagcagttaaagaatgaagtgccaaaagtgtgatattgaattcaa

SEQ ID NO: 47620 - DNA, 1134 bp, Heterodera glycines
atgccaacacagacgaagaagggattttctctcgcaaaagcgcaggttttttgcattaaattgacatttttaaacatgaatttgtctaatttttcgatttatacattttatgaaaaacggattggtacaaattggcgccagctcgctttttggagtataatccgaatgaattgaagagatttgatatatcaataattcgatagccctttctctattttcctgcaaaatgtcaaaaaaaattgttaaatttcgggtaagatactccaaaaatctggctagcgcccattttcccacaacggcgaaaattaaataatttcaatctaattcattcattttaaacaaattagggactttttaaattttctgattaattaaattgattgaaaattgtatttgttattcgtttttttagctgggtaaacgtcctgtcagaaaatggctttggtgtccatttgaaaacgaggcgagaaaggatggacttgcgcttaagcattgggaacgtgaggacaaacattcaacgccctactcctttgtgcagttcaataaggtgtttatattgttatcaattagaacatgggtcggaccaaattccggagaaaatttttttggatgcactatgtctcaaattaatttgaatttttagacgaatctggatttttagtttttttgaaaattataaacaaaaatatgaaaaatctcatatttgtaattataaataaaatctgaggttttgtttcaaaaaaaatccgatttttaacccaaaaaaatggagaataatactttccaaaatgatttcacttccccattttcagcaacttgatgtgccttcttttacggatgaggaatatgaagaacatttggtggacccgcgttggactcgtgaacagacacagcacttgttggagctttgcaagcagtttgatttgaggtttttaccacttctttaaaaaattttgccaaattttcactgtttaatcatagccaaatttaagatggccaatcattgaggaccgatttgatcaagaattgtgccggaatcgaaaaagcatggaggacatgaaggagcgctattacgggttgggtcacacgctcaacgatgtccgaaatgtacaggcggaccccattgggctatga

SEQ ID NO: 47621 - DNA, 1018 bp, Heterodera glycines
ctcacttctcgtgccgccattctgtgccgacctttctacaagtcgacactgtacgaccggctcagcacgcggccctatttgacgggcattgagaagcgatggatcgcatttcaactgctcaaggcattgggtagcaaaactttgcttatgagttctttttacctttttcaaaaaattttttttttgaagctcaattacgcattgcaatggtacgccatggagacataaagtcggtaacaaagactttttttgggtatttttagattttaaattattttacgacataaattgggttgatcgatgtaattaataaatattgattgcctcatatcggatcatttaattttccccctttccgtttttttttaatttcaaaatttgaaattgaaaaacctaaactaagagcaagatgaaaaaacaataatatttttatttattgcgattttcagcgtttttaatgagaaataaggattttaggcaccgtcggagaagtttttagaatttttaatgatatcattaataaatttgtttaaattttaaatcttcccttttcccttcccgattttttaatttcaaaattgcaattaaaaaagccgacgttttttggttttatttgatttttaataaaaaaatttgttttttgaattttaactttttttgccgataaattagctttccgcatcgttttccccagtcaactatttttgtaccatttatcctcccccctctcatttaagacctcaaaatgtgctcgtgtcctcttccctgtggattcagctcaccgattttgcgcccttcaagcccgccctgctcccatttgttgggcaaaaaaatatatatgtttttgttttaattgaacaaaataaatttcaggacaatccgtcggactttacctttttcttcgacaccaaccgacgacggcactgttatttggcgccggaacgcttccgcgacagtgaggagttggaggcgcgggcggcggtggcggccggcatggaattccccaatttctatgaag

SEQ ID NO: 47622 - DNA, 1361 bp, Heterodera glycines
atgggcgaacaaatgaaattggagggttcactccgtggccacaacggatgggtcacgcaaattgccaccaacccattgtataagaatatgttggtgtcggcctcaagaggttaattttttccacaagcaaatttaatggtttctctgtttcctttgaagacaaaaccatcatcgtttggatgcttgatgagagtgggtcggtgctaaacggcaaaccgatcaaatcattgcacggacatggacactttgtctccgatgttgtcatgtcctcggatggacagtacgcactgtccggctcctgggacaaaacattacgactgtgggacttgaacacgtccgttttgatgatataatgaaaagtggcgataccaaaaattggattaacggaatttcgtctggggtatatcctactatttcgtaggacaaaaatgataactgaagacgagattaatcgttagaaagcactcataaattcagaggacaaacgactcgtcagttcgtctcccacacccaggatgtgctgtccgttgctttctccgccgacaaccgtcagattgtgtctggctcgcgcgacaagaagatcaaactgtggaatacacttgcccagtgcaaacacacaatcgtggtaagaattcaaggattctttatggcccagattaggggtaagggcttttgtgacaaaataaattgctttaggaggagtgccattccgattgggtgtccaccgtgcgcttttcgccttctcatgcgaacccagtgattgtgtccgccggctgggacaaaattgtcaaggtgtggaacttggccacttgccgactgaagaccaaccacttcggacacaccggctacatcaactcggtcaccgtatcacccgacggctcactttgtgcttccggaggaaaggttggataagcaaattgttgattttctgagcacctatacaatcagcaaagtatcaggacaaacattcgaccaaactttcttcatacttataaggatcctgcttctacttgctaaaactaaacagcacttgcattcttttcgcctttcaggacggctcggcaatgttgtgggacttaaacgacggcaaacacttgtacacattgggcggcaatgacgtgatcaacgctttggcgttttcgcctaatcgctattggctgtgcgccgcggttggcccggtggtgaaaatttgggacttggagaacaagacggtggtggacgagctgaagttggacattgccagcaccagcgccgcaaatccgatgcgtgtatccaaaaaatcgtgtccccaatgcatttcattggcatggtccacggacggacagacgctgtttgccggttacaccgacaacatgatccga

SEQ ID NO: 47623 - DNA, 1169 bp, Heterodera glycines
atgacatcacagacactttctttggcaaaacgtcctcacattatcgttggtaagtattttacttgataattctgtcggtggtgaaagcagttcccctcccccccctccctaaaaaaatttccggcgtggggggcgtagtacacccgtcagtggtggtcctcatcatttttttggtgtaggagtaacccatcgactgcattatctttttcttttaattttaattaatcgtctattttaagcaactcccggccgtctcgtcgatcatttggaaaataccaaagggttcgatctgcgcactgtcaaatttcttgtattggatgaagctgatcgaatcttaaacatggattttgaagtggaacttgacaaaattttgaaagtattgccaaaggctcgtaaaacttatcttttctcggcgacaatgacccaaaaggtgttggattttgtttgactgctattataagtcataaatcaaaatggaaaattgaatctattgaaacaaaggggtgaatttttagaatctaatttcggcaagatgtttttcctcttactcacttgtgtacctctataaaaattgtttttggcatttataggtgtccaaattagaaagagcgcatctcaaaaaaccagagagaattgaactttcgacgaagtaccaaacggtgagcactctcatccaaaatatgctgttcatcccgttcaagtacaggttgggatttcaattaatactctaatggcaatgagattcaaattatgtgcttactttttccactttaggaggcttatttggtttatttactcaacgaaaaggcgggcaatactgccattgtgttcgtcagtacgtgcgcaagtgcggtcaaattgtcgttgctgctgcgacatttgggctttggtgcgatttcccttcacggacagatgtcacagccgaagcgtttgggggctttgcataagtttaagaaaaaggacagaccaatcctcgtttgtacggacgtggcatcacgaggtgttttacttacaattagaagtgggcaattagtggaaaatttgcttgcagggcttgacataccaaatgttgacatggtcatcaattacgacgttcctcaaagctcgaaagactacgttcacagagtcggacgaactgcgagagcgggaaaggtaccgcaagaaataaa

SEQ ID NO: 47624 - DNA, 4767 bp, Heterodera glycines
atgacatgttcggtaggttatctttaaaattaaaagattataatatcggtttagttgaccaaactccggacgcgcgagaccgaacttacgcgcaaattatgcaagagcaaagatttctgacagaaaaggtccgttattttccgtattgtggaacctaagccagagatttagttttttagcatccaatgtaataatctgattgtgtttatgaatatcttcaggaaaaaattgaaaatgagctagcagagaaacaacagcatggtgaactaaatcaatcggcaaagatgtctaaaccttttgttgctgggactgatttgacttctgttgcatctgaggacgttgaaaatacaccgtcccaattggttcggaaaaagcggattgtattgagcgaaaatgttatttcagcggtgagataattccgacatttaataaatggaattgcaaatttttcgatttgcttcaggaaaaaactccaaatgttgcgcgttgggaggagacaccggctcatatcggtgctggtgatgcaactccagcggcaggcaaacaatgggacgcaactccgtcccaaactcctcgtcgaaatcgttgggacgaaacaccaaaagagtctgttcgcgatggcggtatgactcccgggtggggttctgaaacgcctcgcgacataaaagtcgacatgtcggagcgttctgaggagacgccgggtgcttctaaacgacgttctcggtgggatttgactcctgcccaaacgcccgccgttggttctgagacacctttgaatggaatggatgcaccaactccagcgcatttcactcctaaaatccaaaatggaggaatgactccgtcgctgttaaccccgggagggtcgactccgatcggaacgcctgcgatgggcatgaaaacgccggctgttccctttgttccaatgacacccgagcaagctgcaatttacaagtgggagaaggaaattgacgaccgaaatcggccactttctgatgaagagttggacgcacttatcccacccggatatcgcattttggctcctccatctggtactgtttttaaaatattttactggttattttcctcattccaataactaaaaccttttcaggatatattccaataagaacgccggctcggaaattactgtccactccaacgccaatgaccggagtcggtggttttatgattcctcctaccccggagcgtggcggtgctggtgacaaaggcgttggtggaattctggacacgcagccaaaggacccggagttgccagcacttaagccagaagacattcagtacttcgacaagctgcttcaagacgtcgacgagagcacattgacaaaggctgagaagaatgagcgtgagattatgggttatctacttaaaatcaaaaatggagcgccaccacaacgaaaatctggacttcgaaaaatcacggaaaatgctcgtcgtcttggagctgggccattgtttaaccaaattttaccacttctgatgtcaccaacattggaggaccaggaaaggcatttgatggtcaaagtgattgatcgtattctctacaagttggacgatttggtgcgtccttacgtgcacaaaatacttgtcgtcattgagccattgttaattgatgaggattactacgcccgtgttgaaggtcggccatttaattgttattcccttttattttaatttacttggaaagttcaggtagagaaatcatttccaacttggccaaagcggctggacttgccacaatgatctctacaatgcgacccgacattgacaatgtggacgaatatgtgcggaatacaactgctcgcgcatttgctgttgtcgcttcagcactaggaatacccgcgcttttgcccttcctcaaagccgtctgtaaaagcaaaaaaagttggcaggcacgacacacaggtacaaaaataagaacattttgcccaaatttctgtgctttttgtaatccaactgatccatttgaggaattaaaattgtgcagcaaatagcaattttgatgggctgtgcggtgttgccccatttgaaatctttggtcgaaattgtggaaagcggactcgtcgatgatcaacaaaaagtgcgcacaatcaccgccctttgtattgccgcgttggctgaggccgcgacgccatacggaattgaagcgtttgattccgtacttaagccattgtggaaaggtaaaataaagaagcaaaaaacatcctaaaataacaaaaaaatataggtatccgaactcatcgaggaaagggattggctgcatttttgaaggctattggttttctgatcccattgatggatgccgaatacgccagttattacacaaaggaagtgatgctgattttgattcgagaatttgtttctccggacgaagaaatgaaaaagattgttttgaaggtatggttactttactggactgtagttataatttatatttcgaattattgttttaggttgtaaagcaatgttgctcaactgacggggtggagccagcttacatccgcgaagagatattaacgcccttttttagggcgttttggaaccaccgaatggccatggaccgtcgcaattacaaacaattggtggacacaacagtggaaatagcgcaaaaagtgttttctatattttaagttattgttataattgcaagctttaggttggctctgtcgagattatcagtcgaattgtcgatgacctcaaagacgaaaacgaacaatatcggaaaatggttatggaaaccattgaaaatatcgttgctctgatgggcgcttctgaaatcgactcgcgactggaggaacagctgatcgacggcattctctacgcttttcaggaacaaactcaggaggtttactaatctgttctcctcttttcttatttttttattatttaacaggatgcaataatgctcgaaggctttgggaccgtttgcaaaggattgggacgtcgtaccaaaccttaccttcctcaaatttgcggaaccattctgtggcggttgaacaataaatcggctaaagtccgacagcaagcgactgatttggttctactgtttcttcattttttcttattataaatttaatttttgcagattgcaaagatagcccctgtgatgaacatttgccaggaggagaaattgatgggtcatttgggcgtagtattatacgaatatcttggagaggaatatccagaagtgctcgggtcaattcttggggcacttagtgctattgtttctgtgatcggaatgacgaagatgacgccgccaataaaagatttgttgccacgactgactccaattcttaaaaatcggtaaatctatacaatacttaatttctcctttttccttagcaaattttgtatattggttttatttccaattattcattcagacatgagagagtgcaggagaattgcattgaattggttggaaagattgcggaccgtggctccgaatttgtgtcggccagagaatggatgcgcatttgcttcgaattgttggagcttctcaaggcacataaaaagtccattcgtcgtgcagcaataaacacttttggttacattgctaaagcaatcggtcctcacgacgtattggccacccttttgaacaacctcaaagtccaagagcgacagttgcgtgtgtgtacaaccgttgccattgcaattgttgcagaaacttgtgctccattcactgtgctgccggctattatgaatgaataccgagtgccgggtcattttttgctttatcccctggatattttatacatattattaatatttatttttcagaaatcaatgtgcaaaatggtgttttgaaagcgctgtctttcatgtttgagtacattggtgaaatggcaaaggattacatttatgcagttacaccgcttttggttgatgcgatgatggaacggttggtcacataattaatttttcttaatagtcattgatcttacaattaggcttttttatactcttatcagaccaaagagcaactaatttaaagaacaataattttcaaaagaggtttttaaatatttttttcgggaagatatcttacaatattttccaacaacttattattttatgtattattttgtatttccagagatgtggttcatcgccaaattgccattgacgcggttgcccatttgaccctcggcgtccatggttttggttgcgaggatgcgttgatgcatttgctcaattttgtttggcccaacatgctcgagaattctccacatgtcattcaacgtttcgtgttcgcatgcgatgcgatgcgcgtgtcacttgggcctatcaaagtgctgcagtactgtctgcaagcactgtggcatcccgcgcggaaggtgcgagagccgacctggaaggtaaactgataattgcatagccgaacacgctgtattttgtctttaattcaggtgtacaataacctcattctcgggtcccaagatgcagtcgttgccggatatccgcgaattggttagtcatgcctattctattcacaatcagcagtttgtaaaacccaatttcccgtttttagctaacactgaccgaaaccactacactcgctatgagcttgattacgttctttgaatgaaatcgtatcggtctgtgaatgtttgggcgacctgtggtgaaattctgtaaaacaatgatctaaaaatggtttcgtaaaatatactcgatttgtaatagtagttcgtttctttgtttcttccaacaactggttaaatttgtgtactgtcagaatgtcgtaca

SEQ ID NO: 47625 - DNA, 2290 bp, Heterodera glycines
tttcggctggctttacgacagattttgggtaaaataattttaaagataacattaaaagacaatctaacaaacaaattcataaatcataaaaacttttctcagtgacgaaatgatagggagccgaaaactgaacctaactttccttctaagtaattactagggctgggatttttatgtgctaaaaatcctgaaatatgtaataaaatatgtgctaaaaaatgctgaaatatgtgctataagcccaaaaaaatgactcattctttatcattttcgcccgcacaattgcaaataaaaaacatttggaggtgtttgggggtaaaattagtccttttttgataaattgtttttaaagataatttttccatcagttgagtaagttcagcaagaaacttcgatatccagtaacgaattaatgaagaattcgattttcggtacacgaaataaataaagaaaattttgaaagagcctctaaaaatggcaagaaagttgatttttaggggtgcatttttaaattttttgtgttttcttagatatttttttcaaaaatgccaaatatttgcaaaatatgtgccaaaccccgaaatatgtgcgatatttatttatatgccaaaatgccaaaatatgtgtttttatgtttttataagtcgctctaattcgaaaattgttcggagaaaatgttatttttgggcttctctcgccataactaagccgcagaaaaaatatgtaaaaacataaaaatcccagccctagtaattacatattggattgtaagtaaatgctgatgttaaataaaggaatgtgagcaatttcaacagaaattgagcattcagtaattattgctcatatgtaaatgctttggctaactttgttttctataataattgcctaattagatgttcctaaaatttaaccacccttttcatcagatgcttcaatttatcgctgtgtttcactttttgtgagttcttctttaaaaattgttttaaagtacgcgcctttctttcagttttctttgggttgttttgcctttgctttccgtctttgtgccattttatttatttttctacactaaattttggtggattgtctgtttgtatttcatttggtttctttacgactttgacacgccaagaagaggatcaagaaattgggtgctttttgaatttaatttttttttaaagtttcaaataattttagttatggtacaaaaattcctttgtatggaagcattttgctgattattttccaatcaaattgatcaaaactgctgaccttccaccgaacaacaattacattttagggcactgtttaatttatattcattaaataattttaatttatatcttattttaaattgtgtatttgtactggcattgtttgtttcagatgccatcctcacggagtgttcagtaccgcttcgttcgttcatctttgcacttctgcgacggggtttgggcagctttttcccggattgaaatcgaacattctgacattgaatggccaattttggtttccatttcgtcgcgaaattggcatcggattgggcatgtttacggagacaaacgcggcaaaaggacaatcaaattgtccaaagtttacccaatttaaggtggggtcgaaagttcttcgcacagtctcaaattcttgctgaataaccccggccgaggccgtctcattggcattgtcatcggcggtgctgaggaagtgctggacgcacacccgggaaaacaccacctgaacataatgggacgacgcggattctgccgattcgcgttgaaaacggggcaagtggaaaaggcgcaaaaatatgcacaaaatgtgcaattttataagtaatattttctgatttagcacccctcttgtgccttcgtacagttttggtgaaaatgatttgtttgaccaattaccaaacccccgagggtcccttctgaggacagttcaggcaacgcattctctttctgtttctgactttgcacttcttcatttagtccaccatcaagaggaagtgtggtttttgcattccgatcatcaacggatgttgcggaatctccgatcgctttggtctgttgccacgccgtcgttcgatcacgacagttatcggtgaatgaagagacaatgtttacacaaatcctttgattaaggtgccccgattgaagtgaaacgcattggcagcccaacccctgctcaggtcgaccaactccatcttcgctattgcaatgcattgaatgagctattcgaagagcacaaatcgaaatatggcgttccaaacgacaaacatttgactgtccat

SEQ ID NO: 47626 - DNA, 699 bp, Heterodera glycines
atgacttgcccacaaaaaatcagcgacagcagtccactagcaattaacactggtctgaacattttcttagttccaccaaccaatgtttctgttgtacgttcattctttcgtcaggtgcttccgctagcaacaatcacgcaagaatcaccgtacctgtttcgactgtacagtgacaatttgtggactgatttatctcggatatatctttatctcgaactgtccattgaaaaaccgggagcaaacgataaatgggttgcgatagatgatgcggatactagtgtctctgccattcaagggattggtcaaacatttgtccagcaactaaaagttacggttggcaatacggaagtatacgatagcggaaacttatacccattcaaggcctatatcactaatgagttaagctttccaataaatgccaagaaaaattttcttggttcaacagggtattatcacaccataaaccaagatgactcaacagacgaggggttcaaagagcgttgtaaaattttcaagggtggaaaaaatgcacaattcctctctcgtctcgactttgatctgggaaaccaggagctttatcttttaaacaatttggatttgctgttcacaatttacaaggctaaagatgtctttcttttgcaaactttaaaagcaaatgatgacagtttacgatgtcaagatttatgccaaaatggttga

SEQ ID NO: 47627 - DNA, 934 bp, Heterodera glycines
atgaccattgtgccaattttacttcaagctttgagtggttcgtttcccatttattttgggttaaatttttagtctgacaatgagtagaagggtatctgattcatttacaattttgcttctcctgaatactttacacaaataaaagctctattccctggtgggtttttatctttcaattctcactttttcaaaaattttttataatcctgtaaaattatggcaaaaaataatttatttattatttaaaatttctcctctcacaatcagcggcttctattacttttttttgaacctccccctgagaaatataaaacctttttacaacgtacaaagtcgattttaactttttttgatttcagcacttgcaaaagaacgaccatcggacccaatcgaatttgtcgcgaattatcttttgaaggaaaagccacgttttaacggtgcagctaatgcatcagcaaccaatgaacattgattttatttgattgtttaacagtttagccacttgtctcttgaaataggtacttttacatttatgtgacaaaaagcgattttgcccctgattttcgaacagtttcagagcagatcaagaaaacttgacttgctctgaaaattattgctcaatatttgaaaaaaaaagaatctgaacctggttccatattgtacctggatttcctgacaaaaacacagctctaggaaacatccaggcttgtcatggcttgaatccgtgcatggactggattttttgaaattggttatcagaattaaaatttctggggaccagggggttcggtagtgccgaagggagagggggtgtccgaggcctcttactattgttcgtaaccttaactgtaaaagtatcttggaacaaagtaatcaaatcgtgagtaaattgtttatactaataatgcggttactggggaaattctttgaaaca

SEQ ID NO: 47628 - DNA, 1121 bp, Heterodera glycines
  unsure (1)..(1121): unsure at all n locations
atgaccctgtgggagatcatgcaagctcgatccacactgtttgtgcacaagatcttcaaccgatcagctcggcccagtcagtctctgttcgatcagtccgccatccccggcaacgacgcctcccgttcctcacgcaacacttcttactcttcctccaccacttgctcatccatccgcaacagtgcaggcggaattctctgcggagctgagccgatcactttgttcaggctggaactggaacggctgcagtacatcctgcacttcccggaggaagtcgcctttcaggcaagcgacccgaacgcattcccaacagaagcaggagttgttgccatgctcacaccaacacatattccgaccaaaatgcctttgatcaatcgcattataatgatgattatacctctctgagggttgattagtgatctctgtctgatcacactccgatcacttaaaacaccatacttttgttcgctgttcatttgcattcattcagctctcctccacggagtaccagttgttctacaacatttgcagctttggattttgttcngtttcgtcggttgcgacttggccaacatcagtgcccaggacaacccaagtccggtgaagaatttggtgaagcgactgtcagaagttagctcatggatcactcacatcatcatcagccagccgacgcacgaagagcggaagagctgtctggcggcgattatgcgagtgatggacacgtggttggtcaattagctaatgtttgccttggggggctggcaaatgacggttagttcaacggcaaaacattggtccgaagtgctagagaagccggtttaataaacccatgttctttcagttggaacattggcaatttcaatgctaccattgaaattctgctgggcctgaagagtccccgcctgcgccccttttggctttcgttgaagcaggaggagcgccaacgcttcgacgaatttgcggccattttggtgccaccgacgaatcaaaagcagcaaaatcaaataccaacgaatggttgcgcatatcagcaaatgaatggcggaggaaccgcacattggacgccccacccggcgtacattgaggtggccaagggagtgggcaattcatcaaaactttaa

SEQ ID NO: 47629 - DNA, 4568 bp, Heterodera glycines
  unsure (1)..(4568): unsure at all n locations
aaaaatttatttaaaaataaccatttgactagaatttagctttataagtaattatgagangannnaataaataatgttaaaccaaatattgtttaaaacagactctttctttaattaatttcccataatatttaagctttcacttgacaaacaaaatgtacgtgaattgatctccgcaaatttgatctcacttttcatcgacattgcagtcttggcccatttgcataccaacagagcaaaacttcacggccaaacaaatgtgattgaggcaaccaaagatgcggcacattgtgaggagactgagccaaaagaatggtattacaacgaccggcagggccaacgccaaggaccgatttcgttcaaaaaagttgaatcattttactccaataaagaatttaaattattgtcgtcattttagatgaagcgtttataccgcgacggtgtgctttttgagaagagtgaaatttgggcagaaggattggacaaatggtgccatttgtcgtcagtttcccaatttcggtggaccgtttgttgtgtcggcaatgcaaaactgggcgcttcatcaaccattgaccgaggaattggggacgaagccgtaatagaaagaagggacgatgaaccaacgacactgccgatgggcctttacaacctcactgacctatgctcactgatcctcgacactctcatccaaatgtgcactttcttcccatccaggtaaacccccaccaataaacacctcagaggattagttcatatagggaataaaacgaattggtggtttggcgataaatcagtaaattttcatttttttcacagcaataattcaccaaatgattatcattagtaaatccattcctttgcacttatcatgtgggtagttggtctagtggtatgattctcgcttagggtgcgagaggtcctgggttcaattcccagactacccctaactttttgattaaattacatttaagtgtcaattgttcaattttttatttttgcttaaaagtgctttagagatgagacagacgctgtcattcgtccaatgcctcgaatcaaaaaagtgctttctgaacccgtgttgctgtaccaattggtgcagttgttgcttacttacgacccgtccattgtgcaacgagttgcaactttggtcaacgatgtcatgcaggacaacccttacatttcgagactgtatttgtcgggcatatttttctttatcttgatgtacaatgggtccaacattttgccggttgctcgcttcctcaaagacactcatttgagacaagcattccgttcaactctttccaagtcggagctcgcctcccgttcggtgctttgcccaatgttgccagaagcaaatattttctacctcgaggtgaatttttaattcgtattgctttttcaaaaattggtctaggaatatggagcggaaaaatatgccgaagtttttctgggagagtttgagaatcccgaatgtatttggaatagtgaaatgcgacggaatatgatcgaaaagattgctcttcatgtgtccgatttttcgtccagactttcttcaaatgttaaggcactttacaggtattgaaaaccaaaaactttttatttgtttcaaacccattattattattatttttgtcagatattgtcctattcctcccattgattatccacaactaaaagaagagctgttctgccatttctattaccttcgccatttgactgataatcaccgctttccgaattggcctattcgcgagcctgtcgattttttgcgggcctgtctctccgcctggcatgatgaaatcacgcgcaaaccggcgaaaatgtctgttgagcaggcttgtgaacgcctggggctgtccacgacggattccactggcgggtggaaagacgcatcggcagtgcgccgagcctacttcaaattagcacaaaagtatcacccggacaaaaacccggatggtcgggaacagtttgagcagatcaactacgcctacgaattcctcacatcgacgctggtcagagccaattcctcgtcaacgccagacatgaatcgcatagtgatcatcattcgtgcacaaagcattgtatacaagaggaacttacaaggttcgccagcaattcggtgcaaaatcaatcatttataattttctttagtgctttcgccatacaaatatgccgggtatacccaacttatcaaaaccatcgatctcgagtcgtccgacgacacattgtttgctcgaaccaaggaggacggtggtcaattgctggttgctgccgttgagttatgccattggacgctaaggagttcgtcattgaatgcggagcagttgcgacgggacggagggttagatgtatgtactaatgggcgaatgtattaactgtgcgataaataagtcctaatgctgtgttcaggctctgtacaaaacatttgagcggtgtgttccgatgattactgctggttcactcgaaagcgaaatgccagtgcaagtttgtactcacgtgtgcaattgttttgccaccgctgcccgttttgatgcgtgccgtgaaaaaattgcagaaatgaaaacgttgttccaaagcatttgccaactgcttagattcgaagtgatttgctttttgctcaaaattactcagagtatgcttttaagtctctccatcggttggcttgcgctgcggcggagtgcgtttgtgccttttcagtgtgcacattgttacagacgcaactgtttcaagcgggtgtcatttggcaactcttacctcatctttttcgcttcgattacacgttggacgaaggaggttggttggaaggcaatataacaaataaatatagccaaattgaaaataaacgcataccaattccaaggggttgcccattccgagaagacgaaccaccaagcggtacttaaccgactggcccgcaactgttgtgaagcgcttgcctgtttggccggctttcgtccggacacgccggacaatgatggagtacaaaaaaggtggttacttacaattaggcaaacgattgctgaatttatctccattatgataccgtttaaagtttgcgtgccatgctaacgccattcatttgccgtcaaatgcaattggctcggattgctttgcccgttaatgttttacaatttggtgatgacgatgaaatagcacagaatgtaaagcagaaacaacagccgaactcatcagccaaagctcccaacggcggtggtgaaagtgcaaaaatatacattatatttttaaaatttatcatattaagggcaaaatggggatgaggacgaagagggaatggccaatgccaagcccaatgttgaacagtgccgtaatgattttgtgttgaaattactcaacgcaaacaccgaagacccctatctgatttgggacaactccactcgtgctgaactgctcgattttgtggacaaacaaagaaactcacacgagaacgtatttaatttaatttaattcaaatttagtaattcatctttttttatctagagcgaaatgtttggtgccgaattcaaactgagtatttacgcaacagaattggtggttggcgaaatattcgtgcgtatttacaacgctcaaccggaattcagactgctggtattttattaaaagtatttatttattgccttaattacggtaaaggaaccaaaacggacgtgcatggactttttggactatctatctaaacatgtggaggaactccttatcggtgaaggcgtcgttcgacctgcggcagtgaagcagaaaccgattaccaccccgaaacccttgaatttacccgcaagaccagcagggtcctcattaaacggaaccaacattgcaacactgtccaggcccaaggtacgtttagtagtaagaattggggaaaggataggaccatcaatttaaaaaattaaatgaggaaatgatcaaaaagcatctagtattttttgtacgggcggcagggcattagcgaaagagaaaaaaaaatcaatgagaatttggtattgactactatactaacctgtttatttaagccggcgaaaaccgaagaggccgatttaatagatttgacaaccgaatttgtggtggaagaggagcacccggctgtcgactggggacggtttgccaacgccaatgcttccaacccggaaataacgacgcattcttccacttttggcaccgttaatctaaacggtgcttccgggggtcgctttcctctccaggaacgggttcggatggtgctcgaggcgttgcgtaatgtgctgatgatgaatccaggttttgttttgtccttcctttctttctttatttttcgtttaaggcattgaattgctgttaattggccacttttccgccatttttgcttttcttcgtgttcattcgctatcagccatccaactgaaggcattgcaaatcatttcgatcgcggccaacaacaaagagtgcgtcagcgacatcgcctgctccattcagctgccacttctgctcactcttctttctaagcttcacaaaggtcgagaaaattttacagaattaaagtctccaagaaatcttctaattttaaaatgtgatttttt

SEQ ID NO: 47630 - DNA, 1781 bp, Heterodera glycines
atgggagttccagcctttttccgttggctttcacgaaagtatgtgtcgatcattgttgacgcggtggaacagcgcagaagagaaattgacggagtaaaaatcccaatagatgcaactcaaccaaatgagaattaccaagtgagataattggacaaatgaaaaattcaatgagtaaatgatgcatttttaggagtttgacaatctttacttggacatgaacggcattatccatccgtgcacacatccggaagaccgacccgcgccgaagaccgaggaagaaatgttcattttgatcttcgagtatattgaccgcctcttttccatcgttcggccaagaaaacttctctacatggcagttgatggggtcgcccccagagcaaaggtttttttgagtggaaataaaaagcatcgcaaaactttaaagatctcaaaaccctaactttgtagatgaaccaacagcgaagtcgtcgttttcgagcagcacaagaagcggcggagaagcgcgagctcatcgaaaatgtgcgtaagcggttggagtcggaaggaattccgttgccgccaccgcgaaaggaagaggaacactttgactccaattgcataacacccggcacgccgtttatggcccgtctttctgttgcccttcgctattacgtgcacaaacggatcacctacgacccggcatggcaaaagatccaggttctttttttgttactgggttttggttttatttttgaacaatgaaatgtttttaggttattctttccgatgcgaatgtgccgggtgagggcgaacataaaatcatggactacgtccgacgtcagcgcgcttcgccggcgcatgacccgaacaccgttcactgtctttgtggcgccgatgccgaccttatcatgcttggattggccacccacgagtccaatttcaacataattcgagaagagtttttgccgaatcaaccgaggccgtgcgaactttgcggtcaatacgggcacgaggtcgaacattgtgaagggttggcacgtgccgagaccgggccggaccaagcggacccgttgaagaaggagaagaacttcatcttcatacgtctgccagtgcttcgggaatatttggagcgtgaactttccatgccaaatttgccatttccgttcgatttggagagagccattgatgattgggtaattcaaagcaaagtctctattctgaaactacgatattctcaggtcatgatgtgtttttttgtgggcaacgattttctcccccatttgccatcgttagaaatccgtgaaaatgccatcgaccgtctcgtgaagttgtacaaggacatggtttatcaggctggcgggtgcgaaaaatttcaatcattttttatgaattaaagaaacatttttagctggctcactgaaaacggcatagtgaatatcgaaagagtgaagaagatcatgggcggacttgggaaggttgaggacgaaatattcaaacaaagacaggttggcccagaaattaaacagaaatggcaaactcaaaagcaacttaagctcaaagaattgcgcttcaaagaatcaaagaaacagcgaaagcagcaacaacggcaggcaatggcaaaaattatgccgtacaatgccaatttgatagcaccaatgccacttggacagcaaaagcgaatgtcgggcgaggaaatgcgcagattggcggcgggagaccgacaggaggtggcattttaacatttggaatttaaattagagcaattaaacgcggatggcttatgatgcttatttgaaaataaa

SEQ ID NO: 47631 - DNA, 500 bp, Heterodera glycines
ttggtatttctataactcatttattgttaattgttcggtcggaatatctgctcgtccttttggctgtctccgttattcgctttaaatgatttccggtcaccgttcggttggcagatgtttgctgtctctgccacaatttgcaagtcggttgattcccatttacggccatgtccaggcacaatgtttccacttcatgaaaaaacaagtagaaatgtactgaattgttaaaattggtcatttcaatgtaaggtcaccgtcgacccagaaattgcaaaactgagagagggcagaaaacggcgtaaattgacaaaagcaatcaagaagctggcggagtacagcaaaaagccggtaccggttgaggagattgaggtcgacctacgccaccaggcaacgaagggacagagggaacggacggacaacggagtacaaggacgagacgagaagaaagaggcatatggcagaaagaagttgctcaagcagtacgcccagtcgagagccag

SEQ ID NO: 47632 - DNA, 633 bp, Heterodera glycines
atgtggattaaacgttcaattgatgcccaagagaatgcgttggaagtgttgaagcaactctctcccacactttacgaagcggcggtacaactcgacgagcgcttattctacacacaaattcaaggtataggcctgttgtactttattcaccatccaacccttttacaaattaaaaaaaaaattaaatttttcgtgtgaaggtccaccaatcagtccgccgattgacaattacaattgcccagacggggagtaccaagacgtaaccaagaaatgggagctcccgatgctagaagaactggagaagaagttcggcacgggacgattgatcaaaatgccggaatttaaaaagaaacaaattcaaatgatgcgacaaaaagcagaagaagaggaagaaaaaatggcgataaaggacccgtggctgaagaaagacacatcatgtgctgtagaggaacagaacgaaacggaagtacaattggcgaaggcgtaaagcgtacccgaacacttagaaattcattacatgtattttaaatacccatttcgaaaaagactggaattgttttaaaaagccggactaattgtaagttggacagtgcttggcttaatttctcgaaaacaaaaagcgtttctttgaaa

SEQ ID NO: 47633 - DNA, 983 bp, Heterodera glycines
atgagtgattggatgggcagggatatcagcacaatctccgcgtcaatctttagccttcgccaagacgaaacgcatcccggaaaaggaacaaacaaaggacagcagcgaagcggaagaacaaattgggggtggggaaagcgcaagttgagaaatgtttcaaagagaacatttggaagtgatctgacagaattggcaaaggcgggagaaagtggcaaacggagcgatcggaatttgccagaaaacgctgaaagaaaggcaagcgaatcgaattgaatggataaatccaacggaagggacactcaaaaggacgagggagggcacaatgctcacagccttaaattgaactttttggaaagggaaaggccggcacatccgccgatttgtcccttgaaaaggccgtggatttaaatgtttttgtttttctccccccccccctcctcctcaatttccccttaatttccctctctttcaaaatttgcccttatcagtggcttatcattaatcatttcttcttctgctgatcgcccagcccctacttcctccgccttttttcttctctttgccttttttgcacaccaaacgccaaagtcatcaccaaaaatcgtttcccttcgctccgtttactccgatggattattttacacaatttatcggccattttccttcccttggcactcttttaactaaacattcttcggaatccgagaaggaacagcaacttcagcaacacaacataaaaaaggacgaaacaaacggcggaggggacgaaatggcaactgaaaaagccgaattagtggccaaaagagcgaaaatgataaggcaatgatgagagttcaaacgcctaacgattgtttgccgacatttcagcagcaaatgccaaacattttacgccgatgagcccattttggtcactcgcgcgtcgatgcaattccttttcgatgagaatgggagacgtttcctggactgtatttcgaatgtgcaac

SEQ ID NO: 47634 - DNA, 847 bp, Heterodera glycines
atgacccaagaccttttaaatatcgagaatgatgtttaccgttacgaaacgggaggagccgaatctgttgacaaagaggtgctacttgatgaaaacgacgacctatgggcggacaaccgtcacaagcacattgctgttgtttcgcaagaagtattgaacatggggttaaattaagcaaatgcttattttattttaactcgagctggcataatacccatttattcaggtgactcgtggtttgaaaaaattctcggaaaataagaaaatgccaagtgatgccagatcaataaaggacctttcgcttctgatcaaaaaagctccgcaatatcaaaaggaattgaataagttcaggtggcttatctaacaaaaaaaaacagtttatcgttataaaaaacgatatttctttcttatttaccttttagtactcattttcatctggcagaagaatgtatgaatcgttacaagcacggagtcgacaaattgtgtaaagttgaacaggtctttgctccggttaccaaattcgtccgaattatatttggtttaggatttggcgattggaatggatgctgatggggagagaatcaaagaccccatgaaactgatggttcctttgctcattgacccgtcagtgaaacttgaggatcgcttgcgcctcattttgctttatattttccacaaaaacggtactgtttattatattgtgctagtacaattataaacagtgatcttattttcagggataacggatgaaaaccttaataaactgttacaacatgccaacattcctcagacggaaagggagacgctgacgaatgctgctttattgggtcttaacatcgtaatcgat

SEQ ID NO: 47635 - DNA, 1508 bp, Heterodera glycines
atggctactactatacctgggtcgttggttaacaaaacgaagaagcattttttgggtatgacggcgccggcaggttatgtggccggagttggtcgaggtgccactgggtttacaactcggtccgacattgggccggccagggacagcacggacgtccctatggatgctgctatggcttcagccgcagctgcagctgctgctccagcgccagggccgccacccaaaaaacaaagaaatgacgatgaccatgatgaagctgaggatttgaatgatgctaattacgacgaggtttcccacaaaaaaccttttgaaaataataagatttattagttcgaaggttatggtggaagtctgtttgctaaagacccatacgacaaagatgatgaggaagcagacgaaatttatcatgcggttgatatgaggcaggacgaacgtcgtcgagaataccgagagcgaaagtacaaagaggcggtcgagagttaccgaaaggagcgaccgaagatccagcaacaattcagtgatttgagacggcagttagcgactgtgaaggaggaggaatgggctgcaattcccgaagtcggcgacagcagaaacagagcaaaacgcaatccacgaggagagcagtatgccttgccaactatgatttcttctgagtcaagctttaagactaactcctgtccccgactccgtaattgcctctgcaatgagctacaaccaaatgaacacaatgcttgacaaaaatgtgcagaatgggatttctactccatattccggcttccaatcaactctcgggggctttcaatccacgtttgggttccaatcaacttttggatttcaatcgaccctcggaggatttcattctgttctcaatggaggacagatgacgccagggtggaaaacacaaactggctcctcaactgacctggatttgcgcaaaatcggacaggcaaaaaacagaataatggacattcgacttaaccaggtgagtgttttattttaataaaagttgatggttgccaaatgatgaggaagtaaaaggtctgacgcccattaactgtgcattaatggctgttgaaatgcattcaaatgttttgtgcgattctcttgtctgtggggatataattttgcattcccttaaattacttgctaaatgaaatgtcactttagtgagctaatcaatgcacatttgtttcatttatctaaacccgcaaagacactaatgtcatgaaatgtacaactgagttaatgaaaaggtggttgatcacgaagttttcaatctgatggcacatagcaaaatttgaacatgaataattttataataattcctataaacattgcaatttttaaggtgtccgactcggtgtccggtcaaactgtcgttgaccctaagggctatctgactgacctccaatccatgatccctcagtttggagcagacatgcaagacattaagaaagggcgaatgctgctgaaatcactgcgcgagacaaatccagaaaaaccacagg

SEQ ID NO: 47636 - DNA, 2617 bp, Heterodera glycines; identical to SEQ ID NO: 20236

SEQ ID NO: 47637 - DNA, 1172 bp, Heterodera glycines
atggacgaagaggcgaagcaggaaaacctggcgaaagagcttctaaagctcacttcttctctcaagcaaaactttacgactgccggttcggtgctaaaggaagacaatgcggtaagccacaggaaaagaatgctgcaaaagaaggcccaaatatttcagacattggatgttatgcaaagggtcgccctgtccaacaaagaaaatctgataagggagaggggccgacttggccaccacgcctaccaatcgtgcttcaactgtgtgatggtcatgacagtgattgtggtcatttggtcgttcattgcgatgattattatgatgcgaatgttccccaaaatttaagtgttttatattttctttggataactcaaaacgggcccaaaccaacaaaataagaacgattcacttctgtgattgcttctgagctgtgttattctgttttgtttatttatttttcgtcatttaaatttgtttttctttaatttatttcttttgtccgttcgtttgcctgtttttaacccaatttttctcctaattattgtttttttctgtttttaatttggtgttttagaaatggttgactgaatgaattgcgtgccttttttcctttcctttcgttgcacttccctttcctttcccttttcccgtcgttttatgactgctcaccaagcatccgtcgcattgcgtcccttttattttgctgtccatcccgacagattcgcgacagaaccgaacattcgaaataacaatgagaaggcgctgcaggtgaccgatgcctttagactttactttgcaaatggtcaggtgttcaacgggtatctcagcagccttttcccgaggccaacagcccaacaacagccggtccaggttcgtcgaaagtgacgcttttgtgggactcaccaaccgattaaaaaacaaaaatgggtgattcgcattttatttgatttcgaatgcatccgtttttgaatttatttttttaggtcgatttctttgtccgagggaaagataacaaatttcggagtgttcggctgtcattgtccggctttgatgttgagcaaattgtcaggtgcctttttaagcatttcttattttccaactttttcagcgctttcattcccattttcaggaccactttggaattgttcgaattaaacaccgacactttaccaaca

SEQ ID NO: 47638 - DNA, 1783 bp, Heterodera glycines
  unsure (1)..(1783): unsure at all n locations
ggacacaatgttttgctcactttcgcctgccttcagattggcgagtccgacatcattcaagagcttnatcacatgttgctcgaaagggattccagttgtcaccgcacctgtttcaagttgtactacgagggaacagcactagacaattacacggagcttcgcaatgtgccggacatcaaagacaacgccgtcatgagagtggtcgagggttggtgctgaccaatgccggcccattcgctcctcattcggttgtccgtcattcagaaccgtataatttgcgggaggctcgagtgcatgtgcgccatttgcgcgaaataattcgttcggtggacatttctgatgcggtcagcggcgtcgactttgcctcactttcgtgtctgtcgaccattactcaatcgacctctgacgaattgggcaaaaagtcgaaaggctctcccacaattgaattgctccgtgccgagtcggactgtcttcctcccgaatggcttttgcccaactcttccgacatcattttgaagccgctgattccaatggccgagcacagcaacggcactctgcagcccactcagcttatcgctctcaaacagatctcattctctgctttcaatcccccgcccggaccaaggaaaatgaaggcactcccttctttctctctttcattgctttttccgtcttaagggggacattctctatttggttgtggacacggtcgaagatcgtcgttttcacgtcacttgctgcacccgtggattcttcgtcaactcgactattggcgaaaagttcaagcccgaaaggtcgtccacttacggcggtcgcgtgttccacagtctcttcgatttgctttccgacattagcgctcactttaaaaagacactcgtccaattgttgaagctgcgcaatgagaaacacattttcgagcgattgcccacgccttttcagctttatcaatgggttggttttgccaatgtcaaccgaagcagaaaattcgctttcagattgtcccctctgtggaaaatacccaggaccagttgcgagccgatgagcaagttcagccgcacagactcggcttggaagaccatatgcctggacaaatccgagactggaacgaggagctgcaaacgacgcacgacatgccgcagagcagttttgcagagaaactctgtcgggatagggccaggttcaaagtccatgccgacttcctttccgcttgcactcggggcgcttcagcggtaatgtcaaatttaattagtcgtttattgtttttaattaccgaatttgattaggttattgatgggtcggtgcacaccatcaacccaatggacgagccgcgcatgcacatgttcatttggaacaacatcttcttctcactgggctttgatgttaaggaccattataaggttgacaatgcgttcgggtggggcgcgagaaaaccaatgcctttgtccaattgcaggaactcggcggggacgcggctgcgcacgcatcgtattcagctgacttggccgcggttcaggcatatgcccaaattgacgatccaaagtgagtcaattaaaaatcgcctggaaaatggccgagtccaaactttgcaggcttcacacttctggcatggccatcatcgacttcaaaggtttacgtgttatggcccagtcgatcattcccggcattttggaacgggaacagcaggattcgattgtttatgggtcttatgactcgggaaaaacagtgacaaccaacgaactatacgaagaattgttgaaaactcggccaaactgttgaaaattga

SEQ ID NO: 47639 - DNA, 691 bp, Heterodera glycines
atgcatgaaacactgcactcgcttgggcttggccatgaacagagccgagcgggtgggccaattaaaaaatttactaaaataaattaatgatatataaaaattatttttaattaattatttccccgctttagaccgtgacaaatatattacaataaataaggacaatattaatccgcaacaatatgatgtttttgcaatatctgatcagacaaaatattcaaggtaaaatctctaattttatttttattttatttttaccaataaatttcatacatctaattaattatggtagacacttgattgtataaatcatttccgattaatgagaattgtgataagcccaggaaacatccaggttgctgaaaaattgcctgagcctgtacctggatccaggaaattagtaattagtgctctctgattgaattgttattcattgaattttgtaattttaaattttagctacggtgtgaagtacgattacggtagcgtgatgcactacgatgcccacatgggtgccaaaacgtggggtgtgaagacaatccatgccaaattcgacccggaacataatgacagcaaaatgggacaacgtgaaaagttgtcggacagcgacatcgaggcactgcgacggatgtactgtatgccaagtaaggcgaatactgtatttgctagtatgccacacaatttgaaatag

SEQ ID NO: 47640 - DNA, 1592 bp, Heterodera glycines
gcaactttccgctttggagactcttctcgacatttcttatcaggtacttattttgtttgttgggtctttaagctaaagataaatttttgtttgtttagggctcaaatgttgagaagtcctttttatttgatgtttccagcaaaatttacatcgccactgactcttctccggtggatatggtgggcatatcattcatccgttgtatttcacaattttgattttcctcctcttcaggcaacatatgagttgtgctgcgatatgattgatgtttgttattttattttatttttgtaattaagttgaatgatttaggtaacaattgactgaattatttaggtaacaattgacatttcatccatttatgggcaccggaatgagcagaaaaacttccgaccgattggctttgatcaggattcgtccgccgttatcactctccggaccagacaagtcttatttattaaatcgaagaaacattattttgtaccaattatttaatttaggttatttttttgcgccaaataaatgtttatttggcattggtttgtgtgatcaaagaagacaatttcgaaaagcaaggacttatcgatttcaatttcaatgtgtttaaacaggcaaatatcattttaatttaattttatattaattgacaattctttaaagggagtggaagatgtgttcgaattaggcaaaagacggttgccttccctggctgttggatgacaccaaaactcagcttctaatttttccgtttattcactggcattgtcttttatttttgttgccgcatagaccaaatttctatcaaattattattcaaatgaaatttataaagacacattcaaaaatacattcctaattattattgttgctgggaacttttgctgttgggaggggcttttcaaaaaaattaaatcttttgatttaaaattttttttcagagataacaaattgctaattacatattcatatcagttaccatgatctggtaaattcatggtatcagttatgctttaagaattctctatcacctaaattaaaattctttttcgcatttttggcctaatggatttgtttcaatcttcacaggctaatagtgaactcagagttcgacagataccaaaatgtttattttagagaaaaaaatgaatttataagccaaaagggtccacgctttgttctcaaatccaaaaaaagaaaagtatcaattttgtcaaattaatattttaggtctttggcgttatgttctttccgtttccaatctttgtgaagtaacaaattgttgttttaagggtaaatctttgttttgttaaaaatgctttctctcgcaattcgacgtttcatcgtccaacattcaaatggcacatttatgagcactaattttgtcgcgacatcgtcaaactttttgctgatggaccaagaaaatgacaaagagacgaagaaggactttaggaaaattgtgaaactgctcgaacgaagtccgactcagaaaacaaagaaagggcaggaaaaagcggaagaaaatgcgaaaagagaagagaacggaagggaggaggaaaggaccaattggaaggagcacatcagcaaaagtctgc

SEQ ID NO: 47641 - DNA, 1840 bp, Heterodera glycines
atgggcgtaagttattttcacataattcattcgtcggtcaatggaaattcgctctcgttaccgttcaccttaatttaaatatccatttgttttctttttaattttggttcgttcttggcgtaataatttttgccaagccaaagactttcatcgaaaccaaaagaaaattaatttactttaagaaaattcgtgatattattgttttactatcaatagatttttgaattgtatttacctaaacttttttttttctgctttagcgacaaaagaaaatggtcaaagacaaaaaatattacgacatcctcgaagtaaacaccagtgcaacagaccatgacttgaaaaaggcctatcgaaaattagcgtatttacttccgcgttatgactttattaatcgcccctttttaggcttaaatatcatcctgacaaaaatccgaatgaaggcgaacgttttaaactcatttctcaggttttcttttctctgtctttgtaagctgtttcatttttcaggcttacgaagtgttgagcaaccccgaaaagcgtaaagtatacgacgaatatggagaagaagggcttaagggtggcggagaaggcggcggaatgcacaatccaatggacatattcgaaatgtttttcggcggtggtggtaagggttggattcatttgtccttgtttaactgctgttgcaaatttttaggttttcgtggcggtggtgaaaaaccgaccaaggtcagagatactgttcatcagcttaccgtttcgttagacaaactgtacaacggatgcaccaaacacttgcgcatcacaaggtttgcatcattgatattttcgaagattttctgacacggtctgagaagaggggtaatactatagatggtaccccccctttttgacgaaaattttttttgttctgaaaagtcttggaaacatgtttatggggggtttcagggtcgctgatcacgaatatgaccttcattggaccaatttcgaataccggacccgaattcgaacaaaaagtctaaaactcaaaatttaaaaaattctcactttagttcctaaattgattaaaacgtgctaaatttggtcacaaaccattggaatatcaaagaatggtcattctatacagctacgaacataaaagtgaattttcaaaattttgattttcttcaaaaaggggggtaccatctatagtattaccagaagaggaattgggttggggtggcatttgccattttgaaagaaataatattttttcgaccccttaatattttcaattttgttcaacacttaatttattattcaggcatatcctttgtccgaaatgtaatggtgtcggcggcgctaaggaaggggtcaaacaatgcgaaaattgtcgtggacgcggactggagattcacaacatgcaaattggtccgggaatgattcagcgaattcaaagagcttgttctgaatgtggcggtgagggggaaataaatcgcaacccgtgcaaacactgtggcggcaaaaaacgggtgcgttatatcgaaaatagtccactaaaactatacttcgatgaaaaaatggtggggggggggactttcaaaaacctcggaattttttgctcttttgtctgatagtttctctttaaaggcattaatttgttttacagatcaaatcagaagagacaatcgaagtgcatattgagaaagggatgcgcgacgggcagcgactgatgttctacggaaagggcgaccaacagccggggctggagcctggcaacgtgatcattgtgctggacgaggaggagcatcccgtgttcacgcgaagaggcaccaacgtcaccctgaacatgaaactgacgtga

SEQ ID NO: 47642 - DNA, 1064 bp, Heterodera glycines
ctgtgcatacacatcggtggcggtgtaaagtttgactatttcatgctcaatttgcacccgcgcggtccaaccgttgcggacgaaacgtacgacgagcgcgtgatcgaagtgcgccgtgaccccaaccgaacgccgtacattgcgctagttgcgggtgtcaaggttcctattttggcaattttggatacatttagtaatttgtaaccattgagaaagatgtccaatcctccaaagttcttacgccacaaaaaaccaaaaaaatatgaaaaaatatagtttgtatatgcgagaaaaaattatggggcctcaaaaagcgaaattttgactgtattaccttgaggttgggtttggatagggcaattcgattgaaaactgatgatcttttttgccgtcttatcgggttctctagacgcccaaaacgcaaaactttttttttcaaattgcttaattttgctccgttcagggaaagcgttggatatacgccacgcagaacatgcaggccggccaaatcatacaaacgacgtgtcacattccggaacggccggtcattggctgtgagggcaactcatacccattgggtgtgcaattcgtttttgtaaaaaattaatttatttcatttttgaatgacacgttgttttttaagtgctacgtcctcctcaattggaaaaattttttttatccgaaatcctttttcgtttcaaaatccgtcaattttcttttgcaggcgctttggtcgaagggacaatggtgaattcgattgagcttcatcggaacaaccctaactgtatttcatttttttgttgaattttcgtacatttgggcggtgaaaattgatcatttgcgtcctctttagcgcacgtggtcatcaccgaggcgggcggttgtgccgaaattattcgacacatggacgaattcactgttgtccgggttggtcattcgttggtggtcccaaattttaatagatttcctctagaattgaacaattaactccccaaacttttagccattaattccaattccatttttttcagatgccgaacaaatatgaatacgcggtgcgcaag

SEQ ID NO: 47643 - DNA, 953 bp, Heterodera glycines
  unsure (1)..(953): unsure at all n locations
gctgtcctttcatgtttaacgcagttaatttatgccttttgtcagactttcnccagtggaatcggtgttgctctgttatcggcatggaggacaacgccattttggcgagaattacctgcaagaattggagacaaaagctcagcaaatggctgagcatggggccgaccaaattcgatggcattacattggccgaatacaatcgaacatggtaactctgcatctttgacaggattttattcaggcatttcaaaaaaaaaccacaaaaagataaatcgcatttgtgccgtgcccaatttgtggtgtgtggaaacggtggacagtgttaaacatgcgaatggtcttcagagggcaatgaatgcgatggggaaaccattgaaaattttcattcaaggcaaaaattgcagaaaaattctaaaaacaaatttgccaccaattttcagtaaacacaagcggcgagctcaacaagggcggtgtacatcctgaaggactgcttccattggccacacatgtcacggaacagtgccattctttgacactgatcggtgggtagaggtccaaaattgaaaaaaaaatttgttagaaccccgctacgacctgccctaagattacggaatcaggaatcccgcaattgtgtccataagcatttttgaagaattttaaaggtttgatgacgattggatcgattagccaaagtttgggaagcggagacgaaaatgcggactttgcactgctccgaaagttgcgtgacgcattgcaaacggaactgcggttgtccaccgagttggagttgtccatgggaatgagtgccgactatcaattgggtgcatgccgattccgatcactttctcatcactgataaactgttgttcaatctattttcagcgatcaaatatggcagtacaaatgtgcgcgttggttcgaccatttttggtgtacgaaattatgccaaaaaa

SEQ ID NO: 47644 - DNA, 356 bp, Heterodera glycines
agaagaatttctcaaccatcataggaccgaatagatgaatagtgttttatcgatctccattttattcctgctcagccaggttctttccactgtctcctctagcgatgtgttggaatacacggatgctagctttgactcgggaatgcagcagcacgacatcgcattggcagaattctatgccccctggtgtggacattgcaaaaaactcgctccggaatacgaaaaagcggccactaaactgaagaacaacgacccaccaattccactcatcaaagtcgattgtactgcggaaaaagagacttgcgataaatttggagttagcggttttccaacattgaaaatcttcaggaaggggc

SEQ ID NO: 47645 - DNA, 700 bp, Heterodera glycines
gtacagccacgagcagagcatcgaccagaccagcatcccctaccaaatgggatcgaacaaatacgcgtcgcagaagggcatgaccggctttggacagccacgttgggaggtgcttgacccgtccatttcgtaccagaaccgcaagtcgcaaggcatggttcgtctccaatccggcaccaaccgattcgcctcccaggcgggcatgaccggctttggcacgccgaggaacaacacctacgaggcggaggcgggcgagctgccttacgaggatatgaagaagtcggaggcgatcatcccgtcccaggccggatggaacaagggcgactcgcagaagctgatgaccaactttggcacaccgcgtgacgtgaagggcaaacatttgaagcgcatttgggaattggagtacccggaggaagccgaagtgtcgctggaccgtctctgatcagcgacacggattgaattgtgctgctgatcagcacatgaatacacacggaggaaggaggagtaggacaaatgccatcgtcctcatcaagttggagcagtacacacccaccacaccgtcatcctttgccgtccggagagtgatcgatccattgtttgatagattgattgatcagaaaacatccatccatcctccgatcacagcccctggcattttttgctgcttaaaactttgtggttttaaaaaaaaaaaaaaaaa

SEQ ID NO: 47646 - DNA, 437 bp, Heterodera glycines
aataagaccaagccgatctggacccgcaatcccgatgacatttcaaatgaggtgtgaatttaggcttccttattcacttgctttgagctattttttttctaattccaggagtatgcggagttctacaagagcttgtcaaatgactgggaggaccatcttgctgtcaagcatttcagcgttgaaggccaactcgaattccggtcggtcttgccttacctatgtttattctattactagtaatgagaaattggtgtcccagcggaatgcaaaaaggattttttcttgagcgaagaataagctggcaaaatgaacttattttttctagtgctctcctcttcgtcccccaacgcgctccgttcgatctctttgagaacaaaaagagcaagaatgccatcaagctttatgtccgtcgggtcttcatcatggacaactgcgaa

SEQ ID NO: 47647 - DNA, 2029 bp, Heterodera glycines
gtcaaattgctttttcaaaaatgccatctaaagctaatgcaattggtattgacctcggcatgacgtattcgtgtgttggagtcttccagcacggaaaggtggagatcatcgcgaacgaccaaggcaaccgcaccacgccgtcctatgtcgcgttcaccgacaccgaacgtttgatcggcgatgcggccaagaaccaggtggcgatgaacccatccaacaccgtgttcgacgccaaacgtctcatcggacgcaagttcgacgacccggcggtgcagtcggacatgaagcactggccgttcaaagtggtgcagggagagggtgctcgtccgaaagtgatggtggaagtcaaaggcgaggacaaagcgttcttccctgaggaggtttcgtccatggtgcttatcaagatgaaggagacggccgaggccttccttggccagactgtcacggatgcggtggtcacagtgcccgcttacttcaacgactcgcagcgtcaggccaccaaggacgccgggaccatcgccgggctgaacgtgttgcgcatcatcaacgagccgacagccgccgcgattgcctacggcttggacaagaaggggcagggtgagcgccatgtgctcattttcgacttgggcggtggcactttcgacgtgtccatccttaccatcgaggacggcatcttcgaggtgaaatcgaccgccggtgacactcatctcggtggcgaggacttcgacaatcgaatggtcaaccactttgtcgcggagttcaagcgcaagcacaagaaggacctcagttcgaaccctcgtgcgttgcgtcgtttgcgtacggcctgcgagcgcgccaagcgcactctgtccggttccacccaggccagcatcgaaattgactctctcttcgacggcatcgacttctacaccaacatcacgcgcgcccgcttcgaggagctttgcgccgaccttttccgcaacaccatggaccctgtggagaaggctttgcgcgacgcgaagatggacaagtcccagatccacgacattgtgttggtcggcggctcgactcgaattccgaaggtgcagaagcttctctccgactttttctccggcaaggagctgaacaaaagcatcaacccggacgaggcagtggcctacggagcggctgtccaggcggccattctttccggcgacaaatcggaaactgttcaggacttgctgctgcttgacgttgcccctctctccctgggcattgaaacggccggcggcgtgatgacttcactcatcaagcgcaacacgaccattccgacaaagacgtcgcagacattcaccacctattcggacaatcagcctggtgtgctgattcaggtctacgaaggcgagcgcgcgatgaccaaggacaacaacctgctgggcaagttcgagctcagcggcattccgccggcgccacgaggagtgcctcaaatcgaagtcactttcgacatcgacgccaacggcattctgaacgtgtcggcccaggacaagtctaccgggaagcagaacaagatcaccatcaccaacgacaaaggccgcctttccaaggaggaaattgagcgcatggtgcaggaggcggagaagttttccaaggaggacgaggtgcagcgtgaccgtgtgtctgccaagaacgccttggagtcctactgcttcaacatcaagcagacaatggaggactcaaatctgaaggacaagatcagcgaggacgacaagaagaaggtgctggagaagtgcggtgaggtgctggcatggctcgacgccaaccaggcggcagagaaggaggaatttgagcaccagcagaaggaactcgaagggatctgcaatcccatcatcaccaagctctaccaagccggcggcgcaatgcccggcggtccaatgcctggcggagggatgcccggaggtggcggcgctgctggtgcgggaggagccggtggaccgaccatcgaggaagtggactaagcgagtcgatctcttcgcgatcattttttgtttgatcgattatttaattttaaaaa

SEQ ID NO: 47648 - DNA, 1443 bp, Heterodera glycines
atcgagcgccaagtgcgcaacgacgcgctgtgggccggcctcgccatccgacggggatggaagaagtacttcttttgctccaaggaccaggcgacacgcgcaatttctcagtcgtggagacagccgaagaacggggaggacgcgttggagttccagcacaaattctaccgcgaactttacccaaaaatcactgctgacattcggcaaattgagcagaattggcgcgagggacgacatcgattggagcgcatcaattgccaatcggagaatagcaaaggtgtctactgtctccaatacgacgacgaaaagatcatctcgggactgcgcgacaacacaatcaaaatttggtcccggcccagcctcggctgtgtgcaaacactgagcgggcacaccggctccgtgctgtgcctgcagtacgacaaccagatgatcgccagtggcagcagtgacgcgacagtcagaatatgggacgtgaacacgggtgagcaactgaagacgctggtccaccattgtgaagctgttctccacctgagatttcaggacggcatgctggtcacatgctccaaggaccggtccatcgcggtttgggacatggcatcgcctcgtgacattgaagtgcgtcgggtgctcgttggccaccgggcggcggtcaacgtggtggactttgatcacaaatacattgtgtcggccagcggtgatcggacaataaaggtatggaatgccagcacgtgcgagttcgtgcgcacactgaacggccacaagcgtggcattgcctgtctgcagtaccgggaccgactcatcgtgtcaggctccagcgactattcaatcagactttgggacatcgaatgcggcaactgcttgcgcgtgttggaaggccacgaggagttggtgcggtgcattcgcttcgattccaaacgcattgtgtccggcgcttacgacggcaaaattatgatctgggacctggcggcggcacttgacccgatgacaccgcccaactccatctgtataaagacactttcgcaacacaccggacgcgtttttcggcttcaatttgacgagttccaaatcatcagcagctcccatgacgacaccattctcatctgggacttcctcaacacgggcccgtccgccgccgttgccgcgggcgctgcggcagcagccgcgcacaaccaggccgttcaacatcaccaagcagcacccgcagcccaaccggctgctgcagcgatgcccgggggcgctggtgccgcgccggccgccgctatcattccgttggcaccgccgccgtccccataaaaagcaaacctaaaaatgctgaaatgatttgatgaatatacaacactttttaattccaaatgtttcgtttcgcttttttgtgggatttccttttatgttttcttcacaattttgtgtattatggtgaacaacaaacaaacaaatgaaaaa

SEQ ID NO: 47649 - DNA, 1245 bp, Heterodera glycines
ttgaggtttttcgagaaatgacaaatgagcgtgatttttctcacgatgaccacattaacaacgctgttgggaccaatggcgacagtaaagacgcagccaaaagaaaggacatctgccgtgattttctgaataatatttgcagcagggggaatcgatgcaaattttatcatccggaagacagtgtcgaaaagaatcaaaactcggcggatgagccttatcagttctgcattgattttcagaaccagggctgttaccgcgaaaattgtcgttatgttcacgcgtttcgcgaggatgtcgatcgttacaagcgcagcggcgacgtgacgcttgggttggcgcgagctttggcagcgctgttgaaaggcgatacgataaatggaattccgctttgcaaagagttccaaaatggacactgcgcgcgcggcccgcaatgtcgctattggcatatcaatcgcgacgaagagcgacgcaaacgctttggcggcggcaggaactgcggcggttcgccttcgtcgcttgcgttcggcgcttacccggcggtgcctccggcaggagcgcaactcagcagacgaagaggtgacgagttcgtcagtgaagattttgcaccgccctccaaacgatcttttgctcacaatcagccgtttgcaacgattcccggacagatggctccaacgtcagcaccaaccgcaccgtctcacccgtcacctcaattagtcattgagttggaacgtcgaaacgcggaattaaccactgaagtggaaagtctgaagagggagcttaaccgggaaaaggagcgttacgatgaccttatgtcgctttttcgagccgcccaaggccaaccgacggttcaacgttcggtgatttcgactccgtctttggtacccgccaatttgcagccaaacatttcttcactaagtgcgcttcaacaacaacatcagccgcagtctctgcagcagtggagcgcaacgtcaacatcgcaacagccaaattggacaaaattcgattggggtgcaaattgatcaatgaaatgatttgtcaccattacgattccctttaaatgaaccacaaattccttttcaacatatgaactgtttcctcttcctgtggttgtttcccttttggcatgctatcgtatctaactgagccccccccccccccggggggcaaagggatcattggggaagccactcaattttttgtatgtttaatcaatcacctgcataaattcaatttttttgaaaaaaa

SEQ ID NO: 47650 - DNA, 639 bp, Heterodera glycines
  unsure (1)..(639): unsure at all n locations
atgcacttgattaacttaatcgccctctttttcatgcttttcggcccatccgtccagcaatacacaaaaacgccaacgaatgaggacaaagaagcggctgtcaattgtcacaacaaattccgatcgcaattggccctgggcaatgccgacaataaattgggcggcaacaaaatgccaaaggcgggcaacatgcgtaagtttgaatgggacgaaaacttggccaaacttgcggatgaatgggccaacaaatgcacattatcgcactcgtggaacggctgggcaggcgaaaatttggcaatgaatggcggaacattttcgaacaaggatggcttcgagtacgcttgcggtcgctggtgggacgaactgaaccgttacgggttcaacccggatctgattatgaccggggaaaacttcagtggcatcggccattggactcagatggcgtgggccgacaccgaccgaattggctgtgccatggcacaaaactgcccaaataccaattggaaaacatatgtggtctgctggtattacacgggtggtaattactttggtgcgcctgtctatttggnccgggagccgtgcagcaaatgcaaagcaaatgacaaatgtgacaaagccactggactttgctctcaatga

SEQ ID NO: 47651 - DNA, 881 bp, Heterodera glycines
atgcacttgattaacttaatcgccctctttttcatgcttttcggtaagtcaattgtttaaattcattagcgggataattgggtaattattttgctaatcgtttcaaggcccatccgtccagcaatacacaaaaacgccaacgaatgaggacaaagaagcggctgtcaattgtcacaacaaattccgatcgcaattggccctgggcaatgccgacaataaattgggcggcaacaaaatgccaaaggcgggcaacatgcgtaagtttgaatgggacgaaaacttggccaaacttgcggatgaatgggccaacaaatgcacattatcgcactcgtggaacggctgggcaggcgaaaatttggcaatgaatggcggaacattttcgaacagttcgatacaaattgataattgtggctactaattgcctgcttaagaggatggcttcgagtacgcttgcggtcgctggtgggacgaactgaaccgttacgggttcaacccggatctgattatgaccggggaaaacttcagtggcatcggccattggactcaggtgacctattcattatttcgccgtttctagtcccattattgctaattagacactaattagttttctcttcgttttgttcagatggcgtgggccgacaccgaccgaattggctgtgccatggcacaaaactgcccaaataccaattggaaaacatatgtggtctgctggtattacacggggtaataatcaaccactgataaaacataattagtttactaataccccttttagtggtaattactttggtgcgcctgtctatttggcccgggagccgtgcagcaaatgcaaagcaaatgacaaatgtgacaaagccactggactttgctctcaatga

SEQ ID NO: 47652 - DNA, 1555 bp, Heterodera glycines
atggagcattttccttctaaatttgttctctgcttgctcattgcattcatcggtgaattaatttaaaaaaaaataacaattttagttaataattgaaatgtcacaaaattagcggataataaaaaaatgaggagttgttggtgcggtaaaagagaatcgggaaattaggaatgaaggcaaaaatttaatattggaagaaaaataaataaaaaaccaaaatttcatattagatcatttctcggatcaaaaattttccaaaatcagaaacatcgggccgaaaaaaacagattttggggtcgaaaaccagaaccttttgcaaattgctttaaatcggcttgtgtaacaattgatcatttaaatataatatcacattttgattttgcacctcacattatcggttttaataattttttagggattagattagcaaattgtatatttcggtgcaatcgggatcaaaaaaaaaatcagatttttcattcgctacatgaaatttcccgggctctaggggccccaaaaaaaccgaaaattctcgactcaaaactctgtactccgactgctgaatatttttacataattcctttccattcaattaaacactaataatataatcttcaaattcgcagccgttccatgctctgttttggcactttctgctggcagccgcgtgtcgatgctcgcgtgccacaacaattaccgctcacaactggccaaaggcactgcggacaacaaatcgggcaaaatgccggctggcagcaatttgatccaacaaaaatatgattcgaatattgagtcggtggcgcagaagtgggccaacggatgctcaatgtcccactcgggttcatcagggatgggcgagaatttgtacatgactagttcatcgacaatttcggaaggtttaattggggtgcaatttttaacagattaggcaattaaaattcaagggggacggcggcaaatcttttcggtttatgcctgtctgctaattggctattaatctaccataaaagtcacattatttcctgggcctactttaagcatacatattagtttaaatgaggaagaccattttgcagctgatgcgctgaaacaagcttgtgacatgtggtgggcggagttgaagcagttcggctttcagtcaagtcttgtgctggacatggctcagttcaacaagggcatcggacattggagccaggcaaatgaatattagagctaatcaaattaattttgttgctttcagcaagcatgggcctccactgcacaaattggctgtgccatggcacgttgtccctcctccacctggaagacatgggttgtgtgcaactacaaggaggcgtaagcaaaaatggaattattcttagctttattaacgtcgatttaaatgggttttttctgattaatttattttattttatattaatctaattcattaattctcaacagtggcaacttcttgaaccagccggtctacaaaaaaggtgccgcgtgcagcaagtgttcggattacaatggggcgacctgtgacagcgccagcggactgtgcaaattgccataa

SEQ ID NO: 47653 - DNA, 2057 bp, Heterodera glycines
ccccgccatgccgtcccccctgaaaatggcggcccttccccctttggctgtggttgtccttctcgtcgctgtcgtccttcccgaagcactgttcgccctggaagtctttaccaaccattttctcgtccacacgaataccgccggaacagaaaatgcgcatcgggtggccaaacggaatggcttcgtcaaccggggcccggtgctcgggtcggacacgcaatggcattttgtacagcccgcactttcccacgcgcggactcgtcgatcggtcggacacaacgccaaactctcacaggataaagacattgcttatgtggaacaaatgactggttataagcgcttaaaacgcggctaccgtccgctggctgaccgtcttcaaaaacagctcgacttcacttcagttcaatcgcccaccgaccctttgtaccctttccaatggtatttgaagaacgacggccaatcaaatgggaaaccgcggcttgatctgaacgtggagaaggcgtgggctctcggatacaccggcaaaaacattacaacggcgataatggacgatggggtcgattacatgcatgccgatctccgcttcaacttcaatgccgaggcgagttacgacttcagctccaacgacccttacccgtacccgcggtacaccgacgattggttcaactctcacggcacgcgctgtgcgggagagatttcagctgctcgcgacaacggaatttgcggggtcggcgttgcctatgacagcaaagtggcagggatacgaatgcttgaccagccgtacatgaccgatctgatcgaagccaattcgatgggccacgagccgaacaaaattcacatttactcagcgagttggggaccaacagacgacgggaaaacggtggacggcccaagaaacgcgacaatgcgagccattgtaaagggagtgaatgagggtcgtttcggtctcggctccatttttgtttgggccagtggcgacggtggcgaggacgacgactgcaattgcgatggatacgcagcatcaatgtggaccatttcaattaattctgcgattaacaacggcgaaaatgcacattatgacgagagttgctcctccactttggcctcgaccttttccaacggtggtcgaaacccggagagtggcgtggccaccaccgacctttacggccgttgcactcgttctcattccggcacttcggccgccgcgcccgaagctgccggcgtttttgcgctgactttggaagcgaatccgaagctgacatggcgcgacctgcagcacctcaccgttttgacgtcatctcgcaattctctcttcgatggtcgctgtcgggaattgccgcctctcgaattggaagacatcaaacggcagttggtctcgcggcaggcgagctgctcgcacttcgagtggcaaacgaacggagtcggtctcgagtacaatcatttgttcggttttggtgtgctcgacgccgcagaaatggttctgatggcaaaggtgtataaaacggcaccgccgcgctttcattgtgaggcgggcacaattgaaatgccaagggaaatccccgcaagcggcgaaatggtgctgacgctgaggacggacgcatgtacgggttcaacaacggaagtgaactttttggagcatgtgcaggccatcgtgtcgctgaacagctcgcgtcggggagacacgacgctgtacctcatctcgcccgccggcactccttcgatgattctctcgagaaggcctaaggacgacgatgccaaagacggattcaccaattggccatttatgacaactcacacgtggggagagaaccctcgcgggcgttggcgtttggtggtgcgcttccaaccaggcaaatcgacgccgaagggccataaataccgagggacgctgaaaaagttcacgctgatgctgcacggcacaaaggagccgccttatcgcggcattgagcccctgcagggacacgccaattccaagctgagtgtggtgcaaagtgcgcacaaacggatggcaaacaggcgatgatggcacgacagacgaatggacgaacgatggaaaa

SEQ ID NO: 47654 - DNA, 1367 bp, Heterodera glycines
cgacagcacacacagccgaaaagcgcttcttctcatcgccttcgccttcaaaactttgaagcaccaatcccaaccagaaaaaatgtgcgacgaagaagttgctgctctcgtggtggacaatgggtccggaatgtgcaaggccggtttcgcgggcgatgacgcgccccgcgcggtgtttccgtccattgtgggccgcccccgtcatcagggcgtcatggtcggcatgggacagaaggactcgtacgtgggagacgaggcgcagtccaagcgtggtattctgacgctgaagtacccgattgagcacggcatcgtcaccaactgggacgacatggagaagatctggcaccacaccttctacaacgagctgcgtgtcgcccccgaggagcacccggtgctgctcacagaggccccgctgaacccgaaggccaacagagaaaagatgacccaaatcatgttcgagacgttcaacacgccggccatgtacgtggccatccaggccgtgctgtccctgtacgcctccggccgtaccaccggtctcgtgttggactccggcgatggtgtcacccacaccgtgcccatctacgagggttacgccctgccccacgccatcctccgtttggacttggccggccgtgacctcactgactacctgatgaagatcctcactgagcgtggttactccttcgtgaccacggccgagcgtgagatcgtccgtgacatcaaggagaagttgtgctacgtggcactcgacttcgagcaggaaatggccactgccgcctcctcctcctcgctggagaagagctacgaactgcccgacggccaagtgatcaccgtcggcaacgagcgcttccgttgcccagaggcgctgttccagccgtccttcatcggcatggagtcggccggcatccacgagtccacctacaactcgatcatgaagtgcgacatcgacatccgtaaggacctgtacgccaacaatgtgctgtccggcggcaccaccatgtacccgggcattgctgaccgcatgcagaaggagatgaccgcgctggccccgtccaccatgaagatcaaaatcatcgctcccccggagcgcaagtactccgtctggatcggcggctccatcctcgcctccctgtccaccttccaacagatgtggatcagcaagcaggagtacgacgagtcgggcccgtccattgtccaccgcaagtgcttctgagcagcagctgcacgaccgcacggaggaggaggagaagaccaacgaagccgggacactcgccatccgccgacccattcgccaccccccaccaccatctgttttttgctgaaaattatgcaaaaatatttttgaataaaatctatgaacaaaaaaa

SEQ ID NO: 47655 - DNA, 463 bp, Heterodera glycines
atgactagttcatcgacaatttcggaagctgatgcgctgaaacaagcttgtgacatgtggtgggcggagttgaagcagttcggctttcagtcaagtcttgtgctggacatggctcagttcaacaagggcatcggacattggagccagcaagcatgggcctccactgctcaaattggctgtgccatggcacgttgtccgtcctccacctggaagacatgggttgtgtgcaactacaaggaggctggcaacttcttgaaccagccggtctacaaaaaaggtgccgcgtgcagcaagtgttcggattacaatggggcgacctgtgacagcgccagcggactgtgcaaattgccataagtgaggggagaatgcttggaagaaggattttttaatttgatttatgaatattgtagaatgggagtgaataaatgggcattaattgaaaaaaaaaaaaaaaaaaaaaaaa

SEQ ID NO: 47656 - DNA, 750 bp, Heterodera glycines
atggcggatgagcttgtggcgcttgcaccaggaacgcgtgtctcaggccgatggaccatcctaaagaagcttggcgccggagcatttggagccgtctatttgtgcaaagatggcaagggaacagtggcagcgctgaaaacggagccaatcgacacacgtcaaccgcttcttgttatggaggccaccgttttggacaccctgggcaaaaaacttaagaatgctgatggtcaacacttctgccgtctgttggaccttggacgtagtgaacaacggaatgctacgtctggagatacggtgttcaactacgttgtcatgactgtggttggcactccgttggacaaacttattcgaaacgcgggcgatcgcttcagtccgggaaccgcaatcggcatgtcaatccaattgctgagtgccatcaaggctcttcacaatgtcggtttccttcatcgcgacatcaaaccagcaaacacagcgattggacgggcggagaccaacgaacatcgacttctctaccttatcgacttcgggatggcccgtcaatttcttcggcccgatggtacgcagcgacgtccgcgagccttcgcgaatttccgagggacgccaatttacggcaccgatcctctgcacatatcaagggtgactacagccgcaaagatgacgtcgaatcgtggttttatgtcatggtcaaattctacaaaggtgctgtcccctgaaaatttgcgaatgacgtcaaggagatcggaaggatga

SEQ ID NO: 47657 - DNA, 511 bp, Heterodera glycines
  unsure (1)..(511): unsure at all n locations
atgacggacactgcaaatcgacagcgacgcggccgaggcgagagacgcacacgagtgcttctacgcgacagtgccaagaaaatcaccaaagcgtccattcttcgtctggcccgacgcgccggtgtcgcccgaatcaacgcaagagtctacgacgaggtccgtgccgcgctgcgctcgtacttggaaaccatcattcgagacgcggccatctactgtcagcacgagaggcgcaagaccatgaagagccgggatgtggtacacgcactgaggcgccagggcaatttgatgtacggcttcgaacaanaagcgcanggaggaggaggatggatatatttggaaccggcaccatatgatattttcgganaatattattattgtacatatgtgtgtatatgcctatattgtatattgttatgtcgatgctattgtacaccattttatccgtgtaattgtgacccgtnattattattgtctntgtgtgttgatatttgcgtattttggtacgataaaa

SEQ ID NO: 47658 - DNA, 457 bp, Heterodera glycines
atggaggactcggacagacagttatttctgcgcaacgaaacaatcgccgaacaattcaattcggttaaacgattgaccgatcaaagtcacgtcaaatggttcggaaatgtgcgaataatgacggagagattgtcggaattccaaggcaaaacgaagtcaaaaaatggacaaaaaacggatggaaaaaataaaaattcaccggcaaatttcaaaatgtatccgtcgcgggacattggaattctgacggaacaatcgcaaagggacaaaatggcgatggccgaaaaacgggcttatgtggacacgcaaatggagagaattgggaaggcattggacgaaataatgccaaaaaacggacaaaacgaatcttttgggggcgacagaataacgcaaacggaatgccataacgaagtgatgcacactttcaacaaaatttgttttaatttctcaaagagtccgt

SEQ ID NO: 47659 - DNA, 551 bp, Heterodera glycines
  unsure (1)..(551): unsure at all n locations
atgtttggaagcattctgagctgcaagattgccactgacattgagggaggaagcaaagggtatgggttcatccattttgagactgaggaagcggcgaacaggcaattgcgaaagngaacgggatgcttttggatgggaagaaagtgtttgttggaaaatttgtgccacgcactgctcgtgagaagcaaattggtgacccgtccagtcgtttcaccaatgtttatgngaaaaattttggcgaggcaatggattcggagaagcngagcgaagtgttctcacagtatggcgaaatcatcagtgcaaaagngatggaggatgacagcggcaaatccaaggggttcggctttgtcgcctacaaggaccatgaaagtgctgcgagggcggtggagaagangaacgaggtttcggtgccaggcagtgagaaggtcgagcaaaagtttacggtgtgccgtgcgcanaagaagagcgagcgccaggctgagcngaagcgtcgttactagcagtacaaagctgancgcattcagcgttatcagggagtnaatctgtacgtc

SEQ ID NO: 47660 - DNA, 461 bp, Heterodera glycines
gatgatcaactgctgcgcgacacaattttccaaaaatggatgggaatattggattcctcacaaaatatgttccgtcatgagcttgctcgcattgagtatctgtcaactgcggacgagcgcttacaatggaacaataatggaatgccgaaggacgaattatgcacggagaatgccattatgctcaggcggttcaaccgtttcccattgatcatcgaccccagcggacaatccatcgaattcatttgcaaagaattttccacagcatctggcaaggaacatcaaaagggaggctcggtggcaacaacggttcaactgactagttttaatgataattcgttcagaaagaatcttgagtcagcgcttcggtttggcacaactttgcttgtgcaagatgttgagtcctatgatccgatcctcaatcctgtgttgaataaggaggttaagcgaactggcggacgtgt

SEQ ID NO: 47661 - DNA, 720 bp, Heterodera glycines
  unsure (1)..(720): unsure at all n locations
atgcgagatctgttcatcgaagacaacagcccgatcactccggcccggcttgccgaactgatcagacatttctacgcgttgggatggatgcgcgataacggcggaggaatggcggtcctttgcaacggcgccgtgttcggttcgcccacttcggtgcagaaggagaaagtgcccgaaaatgatctgtttgtaattgatgctacgaccggcacagtactgaaacggccgcaaaacgcggcgagtgttccgagtgccacctgcggactgttaatgaacacaggtctgaactgcgtaattcacacccactccaaatacgcaaatcttgtctctcagttggtcacgggcaacgaattcgccatccaaaaccaggagatgattcagggggtcgagaatcgtagcagcggactccgtctcgacaacgtcgaccgcctcgttgtgcctatcgttgattctgagttaaacgaacaaatgctcagtcctgttttgctccgaactttggacaaatacacagaagcatcggccattttggtgcgtggccacggcttttttgtgttcggctcttcacttgctggcagtctaccaaaagtgatgttggagttgtttccgagtacccttctnttgagtttagccttgctaaatgantcaaatacaaattgccnatttggtgcccanaaattcgccgtaaatttnaaaataattgccgncccaattttccctttt

SEQ ID NO: 47662 - DNA, 659 bp, Heterodera glycines
  unsure (1)..(659): unsure at all n locations
atgaacgaggtttcggtgccaggcagtgagaaggtcgagcaaaagtttacggtgtgccgtgcgcagaagaagagcgagcgccaggctgagctgaagcgtcgttacgagcagtacaaagctgagcgcatccagcgttatcagggagtcaatctgtacgtcaagaacctgcacgataccatcaatgatgagacacttcgaagcaattttgaatcctacggaaacatcacaagtgcaaaggttatgtgtgatgagcatggtcgctccaaaggattcggttttgtgtgctttgaaaaggcggatgaagcaaccaaggctgttgtggaaatgaacaacaaaatcatcgaaaacaagccgctttacgtcgcgcttgcgcaacgtaaggaagaccgcaaagctcaactggcctcgcagtacatgcagcgcttagccgcgatgcgcatgcagaaccctgctggcctcatggggacaatgtatgcgcctgccagcggtggatttttcctgccacaggccatccagaaccaacgtgcttgngccgttcatgcaaacaccgaatctgtccggggcacaaatgcgtggcgctgtccctngctggaacaatatgggcggcttcaaccatcccaatgcaaggctttcatgatgggttccagctgttggcggtt

SEQ ID NO: 47663 - DNA, 396 bp, Heterodera glycines
  unsure (1)..(396): unsure at all n locations
actcgggatgagatacaggaagtgcggaagagcagggaccccatcaccagtttcaaagatcgcattgtcacggcgggacttgtcactgaggaggaattaaaggacattgacaagaaagtgcgtcaggaggtggacgaggcggtcaaagtcgcactttcagacgaagttttacctccggaaacgctcttctccgatttgtatgccaacactccgccgcttgcggtgcgcgggacgactgccgacgcaaccgtcacacagccatttgtgagcacggcggaagtgttgagaaaaatggggagggagccgaagaattatngagagaacgaacggacagatagccaaagacgcattgataatnaggagaagcacggaataattaattgtnagtcaattatt

SEQ ID NO: 47664 - DNA, 153 bp, Heterodera glycines
caagggcaatgcggctcgtgctgggcattcagtgccaccggcgcattggagggacaacacgtgcgcgacaagggacatcttgtttcactgtcggaacaaaatctgatcgactgctcgaagaagtacggaaacatgggctgcaatggcggctac

SEQ ID NO: 47665 - DNA, 1332 bp, Heterodera glycines
acataaatcaattgcgcaaacgaagtccaaatggcagaagtcggaaactcgtacagaccgccgctaagcgaagagaaacaaaacgaactccgcgcaattgctcagaaaattcttcagccgggcaaagggattctcgctgctgacgagagcacaggttcgattggaaaacgcttcgatactattgggttggagaatacggagaacaatcgccgtcgctaccgccaacttttgttcaccacaccgagctttggacagaatcttagcggcgtcattctttttgatgagacattccgtcagtcaaccgacaacggagtccgatttgttgacgtcatcaaaaaggcgggagccgttgctggcatcaaagtggacacgggagttgtgccattggccggcactctcgatgaggggacgacccagggactcgacaaattgtcggaccgctgtgccgagtacaaaaagggcggctgtgactttgccaagtggcgttgtgtgctgaacatcggtgcccacaaaccgtcccatttggcattgatggagaatgccaatgtgctcgcccgatacgcgagcatttgtcagcagaacggacttgtgcccatcgtggagccggaggtgctttgtgacggcgaacacagcttggaacgatgccagaaggtgactgagttgactttggcctacacctacaaagcattggccgaccaccacatttacctggagggcactctgctcaagccgaacatggtcacccccggccaatcccactcgcccaaggccacgcccgaccaaattggtctcgccaccgtgactgccctccgccgttctgttccgattgccgtccccggcattgttttcctctccggcggccaatccgagatcgaggctacacgcaatcttaacgccattaacagtgtgcccgggccaaagccgtggacgctgtccttttcctacggaagagcgctgcagtcgtcagtgatcaaaaaatggaacggcaaagacgagaatttgggcgatgcgcagaaagtgttgctgcaccgtgccaaggccaacggcgacgctcagcaggggaaatacaccggcgaggaggcagccgcgtctgccgctgaatcactttttgtggcaaagcacgcctattgaacagaagtgtggaatatgcgatgaataggcgcgaatccgagaatcactcatcatatattttagctggaggaattggcagaataatctgacaatgaacataatgataatttcgtttcatatttcattgttgtcactttccgtttggtgcacttaataattaacatatagtgataattgatgaatgaagcgtttccttaaaaa

SEQ ID NO: 47666 - DNA, 3464 bp, Heterodera glycines
ggcacgagggaagattaaaaatttttgaaaaaagttaataagctaataagggcactaaagaatacaccaaactacacaacaaaatggcgacaacaacagcaccaccagcagcagcagaaatccccagaaaatcaccacaacaacggaagcgcgaagaaatggcgcagcttctagagtcacgaaaagtggatcaaggtgctaccttcgtcgagccaagaaaaccttcaggaacagccggacaaaaggggaggatgaaactcatcacaaacgcacacattctcaaactactgggtacgcaagccatctaccactacgaggtgaccatcaacgcagtgagcagtcgttcggaccggaagttttgcgtttcagagccgagcggtccacgggatagggacgatttcccattactcaaccgtcgtgacaaatgccgtgaggtcttctcggcgttctacaggaccatggaacagtcactgaaagataccgggaacttactctactacgatttatcgaaaacaatattcacattgaagaagctacagatcgagtcggaaggaaaattcatgtttaacatcggcacggtgccaaccgctgaacgcccagacgcggcacggttcaaacattatgaattcatcatcaggccagcgactggcttcgaggttaacgacttgtccttcatcacgaacgacgtgtcgaaaatggaacgatcacttgagcaattccttgacattgcaacggcgcagaaggcaaacatggacggaaagcaatttatcgggtttacttcgtctcgtgtttacttattggcgccaaccgactatggcttcggagccaacgagtgtcctgtcttcgattccaaccactcattcttaggtgtcggagtgaacaagggatgtcgaattgttgaaggagatcaaggccctggccaaatgacaccagccatcgtcatccaaacgaaaaagtccgctttccacattccggacatgtgcattttggacaaggcaaaaacgctccttttccgagagaatcagggaaggttcgagacaggtgactttactcaaagtgactacgaggcgctttgcaatggccttgtcggaatttatgctgaaccgcgctatggaacgtcgggacgatttttccgcatcagtgacattacaaaaccaaacactggaaatggtcttaactcggagaacacatacatcacacaccaagtcagcgggaaaatcagcgtcaaacaatatttcgaggatacctatcagaaaacgcttcagtaccctaaagcaccactcctcgtcaattatcgcagaattggggacccggcgtattatcccatggaggtttgctttgttttggatggtcaacgcgtcaaaagttctcaacaaaatcccgagcaaattcgtgaaatgatcaaagagactgccattccgcccaccgttttgcgagtgcacaacgaaagggtgaaggagtcgcttcagttggtcaacaacgaatacctgacaaaagcgtccgttcactttgacacaacgccactccatgtcgattaccgtgttcttggtccgccagcaactctctatcggaacaaccatcgtgtcactcctgccgcgtcaaactgtgaatggcgtccgggtgacgctttggtgaatgcgcaaattggcaactgggtagcctatgcgtttgggaaccctgcgggtgactcggtgcgacgattaggcttaaccgaaacgatgtggaggaatttcgtggacaagtatgcaggtgaaatgcgtaacaagggcattgtttgtgtgcctccggtgcgtgtctctttttgctggtttacgtccgtgaacgaggtcttgaatgttttgcacaaggaagccctgaacggcgttgagttctgtctcattggtcatgcgaaaggctttgagggtgatgacgtgcatgttacgatcaaggcgtttgaacaacagactgaaattgtcactcaagcaattacatttgacgttctcaaggaggtgctcgataaaggcagcccattgactgttacgaattgcattcacaaaacgaatgtgaaaatgggcggtctaaattatgctcttcatatggatgatccatctgtggcccaattgttcgacggtcaaacactgtttcttggttttgcaatgaacttcccgggtggattcgctccttccgaatctgctgcccctatcaatggtgctgtgccttcaggaagtaaagctggactaacgccgcaaaatggtgcgaacggtgccgccgctactggagcaaacaccattcctctcggctcaaatggaaatgttgttccgagtacgcccgtgccacgtgttggctcctcattgcctcctccttcgtgcattgggtgggccgcgacaatcggaaaacgacacaaggacgaatacattggtgactttgtctaccaggctccgcgacgtgaggagaaaattgatatcattgcaagcgttgtcaggagatgcattgagtccttcaaaaagaacaggaacaaattaccactacgcgtggtcattttgcgcaacggatgtaccgagggacaattcgaatatatcatgaagtatgaaattccgctggccaagaaggaactggaggaattgggttgcaccgcaaaacttactgtgattgttccaaaccgacttcaggatgtacgcttcctgcgtcaagatgccaggccggaggacaagagcaatgagcaaaacatccccccagggactgttgtcgacactgtcgttgttcaccccaaacgctccgagttcttccttaacagtcacgtggcgatcaagggcactgcttgtacgccacattacactgttctgcgggacgagaacgatatgtcgatggacacactccaaacaatggtccattacctctgctttgggcatcaaattgtcacgaagccgacctcattgccctcgccggtgtacatcgccgatgaatatgcgaaacgcggtcgaaacatctactcacactacgccaagaacggtattgacaacagcaaaaatttgcagctcttcgcaaagaacaaaggggtggaatggccgctgcgcacttatgcggacatgaccaaagtcctttcttttctcacgaccacctatctgaaggagctgcgcatcaacgcctgataagttagtgatggatgggttttgattgattgtttttgctttccatttgattgtttttctttttgtttaatatttcttttttttcttcgtgttgtttaacattgatacttttctcttctaatattttctcaatttgattgtttaactcccctcacctttgcctcttcaattcgtgcatttgctttcgtttctttggtcattcttcgtgcattctcttttctttatgtggaatgattttttccttctctgttttattgtaccaatccttttgttgtttattatattcttagctttaataaattgaaaacggggggaaaaaaaaaaaaaaaaaaaaaa

SEQ ID NO: 47667 - DNA, 279 bp, Heterodera glycines
  unsure (1)..(279): unsure at all n locations
agcatggaagactcccagcagaatattactgaacagtcggtatcggcaccaaccactgatcgcaacgaatatgaagaactttccaaattggtcaacccaatctcaaaaccgcttgcaaacagaaaattggctaagaaagtctacaaattggtgaaaaaagcggcaaaagagaagggctttctgagacatggattggctgatgtgatgaaagccttccgaaagaatgaaaaaggaattatcgtctggcagggaacgtttcaccgattacgngtacagtca

SEQ ID NO: 47668 - DNA, 175 bp, Heterodera glycines
  unsure (1)..(175): unsure at all n locations
acttgaaaaaggcctatcgaaaattagcgcttaaatatcattctgacaaaaatccgaatgaaggcgaacgttttaaactcatttctnaggcttacgaagtgttgagcaaccccgaaaagcgtaaagtatacgacgaatatggagaagaagggcttaagggtggcggataaggcgg

SEQ ID NO: 47669 - DNA, 1980 bp, Heterodera glycines
atgaaaaaatcattcgtttcttttctgttttttacggcattgctcgtcattgtttgctcaaaagaggaggaagggggcgcaaaggaaaagaagtacggcacaatcattggtattgaccttggcaccacctactcctgtgttggcgtctacaaaaacggcagagtggagataatcgccaatgaccagggaaaccgaataacgccttcctacgtggctttcacaccagactcgggcgagcgtctgatcggagatgctgcaaaaaaccagttgactctaaacccggaaaacaccattttcgatgccaaacgactcattggacgggaattcaccgacaaaaccgtccaggacgatatgaaactttggccttttaagatctacaacaaggcaaacaagccccatgttcaagtgaaagtcggtaacgaggataagcaatttgcggcggaggaggtttctgctatggttctgacgaagatgaaggaaattgcggagtcttacctcggtcacgaagtgaaaaatgccgtcgttactgtgccggcttactttaacgatgctcagcgacaagcaacaaaagatgcggggaccatcgctggactgaacgtggtgaggattatcaacgaacctaccgctgccgcaatcgcttatggtctggacaaaaaagaaggcgagcgtaacattctcgtgtttgaccttggcggtggaacattcgatgtctctcttctgacaattgacaacggagtgttcgaagtgttggccaccaacggagacacacatttgggaggtgaggactttgacccccggacaatcgaatactttatcaaactgatcaagaagaagaccggcaaggacttacgcaaggacaatcgcgcagtgcaaaaactccgccgagaagttgaaaaagccaaacgggcgctgtctgttcagcatcaagtcaaacttgaagttgagtcgctgattgacggcgaagacttctccgaaacgctcacccgagccaaattcgaagagctcaacatggacttgttccgagggacgcttaagccggtgcagaaagtgctcgaggatgccgacctgaagaaggaagacatccacgaagtcgtgttggtcggaggttcaacacgcatcccaaaagtccagcagctgctcaaggaattcttcaatgggaaggaaccgtcccgcggcatcaatcccgacgaagctgtcgcctatggtgcggccgttcaagcaggagtcatttcgggggaggagaactcagaaattgttctgttggatgtcaaccctcttacaatgggcattgaaactgtcggtggagtgatgacaaaactgatcactcgcaacactgtcattccgaccaaaaagtctcagatattttctaccgcggcggacaatcagccaactgtgactattcaggtcttcgaaggagaaaggccgatgacgaaagacaatcatttgttggggaaattcgacttgaccggcattcctcctgctccccgaggcgttcctcaaatcgaagtcacttttgagatcgatgtcaatggaattttgcacgtgactgccgaggacaaagggactggcaataagaacaaaattacgatcaccaatgatcacaaccgactgtcgccggaagagattgagcgaatgatcaacgacgcggaaaagttcgcagaggaggacaagaaaaccaaggaagtggtcgaagcgaggaacgagtttgagtcgtacgcctactcactgaagaaccagctcggagacagtgaaaagttgggaggaaaactcagtgcggaggacaaaacgaccatcgaaggggctgtggatgaggccatttcgtggttggactccaacaaggacgcgccacctgaggagcttaaggagcggaagaaggacctcgaggccaaagtgcagccgatcatcagcaaactctacgcagggcagtcgcctccgcccggcagcgaaccgccgccgactgaggagaaggacgagctgtga

SEQ ID NO: 47670 - DNA, 1321 bp, Heterodera glycines
caaatatttcaattctcccaattttataaagcaagtaaaatgtttcttcttttcttattatcaatgcttctacttcagacaaatggttggcgtgcccgcgagcgtgcaattgaattggccgactcggacgaatcgatcgaattgcagaacattggccaacggaaaacggacattcgaacaccgacagaacgaatgtctgctcttcgtcaaatgatcgaacgcggcttttccgattggaatgcttacaaacagaagcatgggaaagcatacgcggaccaagaagtggagaacgaacggatgctgacttatttgagcgccaaacagttcattgacaagcacaacgaggcgtacaaagagggcaaagtgtccttccgagtgggagagactcatattgccgacctgcccttttccgaataccaaaagctgaacggattccgtcgtttgatgggcgacagtttgcgccgcaatgcgtccacttttctggcgccaatgaatgtgggcgatttgccggaatcggtggactggcgggacaaaggatgggtgaccgaagtgaaaaaccagggaatgtgcggctcgtgctgggcattcagtgccaccggcgcattggagggacaacacgtgcgcgacaagggacatcttgtttcactgtcggaacaaaatctgatcgactgctcgaagaagtacggaaacatgggctgcaacggaggcatcatggacaacgccttccaatacattaaggacaacaaaggcatcgacaaagagacggcctacccctacaaggccaagaccggcaaaaagtgtttgttcaagcgcaacgacgtgggggcaaccgactcgggttataacgacatagccgaaggggacgaggaggacctgaagatggctgttgcaacgcaagggcccgtctcagttgccattgatgctggtcaccgttccttccaattgtacaccaacggcgtttactttgagaaggaatgcgacccggaaaatttggaccatggtgtgctcgtggtgggctacggcaccgacccaacccaaggcgactattggattgtgaagaacagctggggcacccgctggggcgagcagggatacattcgcatggcacgcaatcgcaacaacaattgcggcatcgcttcccacgcctctttcccattggtctgatcggagtgaatttgttgcccttgcgctgattcagagacatttcatttgattaatcgtgcaaaatgataagataattgataatccatcagtcaatcggtcgatttccattttttatgttcgcaattttattcacatataaataaattacttattttaa

SEQ ID NO: 47671 - DNA, 1219 bp, Heterodera glycines
catttgtcagcccatcccaaaaactgataaaaaaaatggcgttcctctcccgtctctccatccttccaaattcgccaatttcgctgcttgcagtttctttggccgttttggctttcgtcgctttggcatcggccaatccgccgacggcacgcgaaacggcgccaaatgcacagcaaaacaatgccaattcagtggcaactggggaaattgcgaaaaatattgcggaaaagatggagcggatgaatgagttcattaaggcgaagaagttcatcgatgcacataatttggcatttgagaagggcgaagtgtcgttcaaagttgcgccaaaccatctgatgcattttacacctgcccaatataatcgaattcgcggcttgcaaatgcgcagcaaccgacaacggcacaacatggcaactctggcgggaaacagcagtactttgccggaaaagttggactggcgcgagaaaggggcggtgaccgaggtcaaagatcagggggactgcggctcgtgttgggcattcagtgccaccggtgccattgagggagcattggcacagaaaaaagcgtcgaaaattatttcattgtccgaacaaaacctggtcgactgttcgtccaagtacggtaacgagggctgtgacggtggactgatggacagcgcatttgaatatgtgcgagacaacaacgggttggacacggaggagtcgtacccgtacgaggccgtaacgggcaaatgccaattcaaaaatgagaccgtgggcggcactgtcgttagcttcaaagacttgaagaaaggcgacgaagagcagctgaagattgccgtcgccacaattgggcccatttccgttgcgctcgatgccagcaatttgtccttccaattttacaaaaccggcgtttattacgagcggtggtgcagcaaccgatacttggaccacggcgttctcctcgtcggctacggtaccgacgaaacgcacggtgactattggctggtgaagaacagttggggcccgcattggggagagaacggttacattcgaattgcgcgcaacaaacaaaaccattgtggcattgcgacgatggcatcgtaccccgtggtctgagaaagcgtgggaatgaatgggacgagaagggatcagaagaagaagcaggcagaccaaatagaagcaattcacaatcattatcattgttatgctttttggtaataaataaaattgctttgtaa

SEQ ID NO: 47672 - DNA, 360 bp, Heterodera glycines
atgaatcactttgggctgacttttctgttcgtcgccgtttctctgctggtaattgcgcccggctgcgatggcatgcaaattttcgtgaagacattgacgggcaaaacgatcactttggaggtggagagctcggacactgtggacaatgtgaaggagaagatccaagagaaggagggcattccgccggatcagcaacggctgatcttcgccggcaaacagctcgaggacggacgaacgttggccgactacaacatacagaaggagtccacgctccacttggtcctccgtctccggggcggaaatgggaagagaaacacgggtaagaacaagaaaagcaacaaaaagcttgatcagaattga

SEQ ID NO: 47673 - DNA, 390 bp, Heterodera glycines
tcgcaatcccgatgacatttcaaatgaggtgtgaatttaggcttccttattcacttgytttgagctaatttttctctaattccagaagtatgcggagttctacaagagcttgtcaaatgactgggaggaccatcttgctgtcaagcatttcagcgttgaaggccaactcgaattccggtcggtcttgccttacctatgtttattctattactagtaatgagaaattggtgtcccagcggaatgtaaaaaggattttttcttgagcgaagaataagctggcaaaatgaacttatttttcctagtgctctcctcttcgtcccccaacgcgctccgttcgatctctttgagaacaaaaagagcaagaatgccatcaagctttatgtccgtcgg

SEQ ID NO: 47674 - DNA, 390 bp, Heterodera glycines
tcgcaatcccgatgacatttcaaatgaggtgtgaatttaggcttccttattcacttgttttgagctaatttttctctaattccaggagtatgcggagttctacaagagcttgtcaaatgactgggaggaccatcttgctgtcaagcatytcagcgttgaaggccaactcgaattccggtcggtcttgccttacctatgtttattctattactagyaatgagraattggtgtcccagcggaatgtaaaaaggattttttcttgagcgaagaataarctggyaaaatgaacttatttttyctagtgctctcctcttcgtcccccaacgcgctccgttcgatctctttgagaacaaaaagagcaagaatgccataaagctttatgtccgtcgg

SEQ ID NO: 47675 - DNA, 390 bp, Heterodera glycines
tcgcaatcccgatgacatttcaaatgaggtgtgaatttaggcttccttattcacttgttttgagctaatttttctctaattccaggagtatgcggagttctacaagagcttgtcaaatgactgggaggaccatcttgctgtcaagcatttcagcgttgaaggccaactcgaattccggtcggtcttgccttacctatgtttattctattactagcaatgagaaattggtgtcccagcggaatgtaaaaaggattttttcttgagcgaagaataaactggcaaaacgaacttattttttctagtgctctcctcttcgtcccccaacgcgctccgttcgatctctttgagaacaaaaagagcaagaatgccatcaagctttatgtccgtcgg

SEQ ID NO: 47676 - DNA, 390 bp, Heterodera glycines
tcgcaatccckatgacatttcaaatgaggtgtgratttaggcttccttattcacttgttttgagctaatttttctctaattccaggagtatgcggagttctacaagagcttgtcaaatgactgggaggaccatcttgctgtcaagcatttcagcgttgaaggccaactcgaattccggtcggtcttgccttacctatgtttattctattactagcaatgagaaattggtgtcccagcggaatgtaaaaaggattttttcttgagcgaagaataaactggcaaaatgaacttattttttctagtgctctcctcttcgtcccccaacgcgctccgttcgatctctttgagaacaaaaagagcaagaatgccatcaagctttatgtccgtcgg

SEQ ID NO: 47677 - DNA, 390 bp, Heterodera glycines
tcgcaatcccgatgacatttcaaatgaggtgtgaatttaggcttccttattcacttgttttgagctaatttttctctaattccaggagtatgcggagttctacaagagcttgtcaaatgactgggaggaccatcttgctgtcaagcatttcagcgttgaaggccaactcgaattccggtcggtcttgccttacctatgtttattctattactagcaatgagaaattggtgtcccagcggaatgtaaaaaggattttttcttgagcgaagaataaactggcaaaatgaacttattttttctagtgctctcctcttcgtcccccaacgcgctccgttcgatctctttgagaacaaaaagagcaagaatgccatcaagctttatgtccgtcgg

SEQ ID NO: 47678 - DNA, 390 bp, Heterodera glycines
tcgcaatcccgatgrcatttcaaatgaggtgtgaatttaggcttccttattcacttattttgagctaatttttctctaattccaggagtatgcggagttctacaagagcttgtcaaatgactgggaggaccatcttgctgtcaagcatttcagcgttgaaggccaactcgaattccggtcggtcttgccttatctatgtttattctattactagtaatgagaaattggtgtcccagcggaatgtaaaaaggattttttcttgagcgaagrataagctggcaaaatgaacttattttttctagtgctctcctcttcgtcccccaacgcgctccgttcgatctctttgagaacaaaaagagcaagaatgccatcaagctttatgtccgtcgg

SEQ ID NO: 47679 - DNA, 390 bp, Heterodera glycines
tcgcaatcccgatgacrtttcaaatgaggtgtgaatttaggcttccttattcacttrttttgagctaatttttctctaattccaggagtatgcggagttctacaagagcttgtcaaatgactgggaggaccatcttgctgtcaagcatttcagcgttgaaggccaactcgaattccggtcggtcttgccttayctatgtttattctattactagyaatgagaaattggtgtcccagcggaatgtraaaaggattttttcttgagcgaagaataarctggcaaaatgaacttattttttctagtgctctcctcttcgtcccccaacgcgctccgttcgatctctttgagaacaaaaagagcaagaatgccatcaagctttatgtccgtcgg

SEQ ID NO: 47680 - DNA, 2286 bp, Heterodera glycines
cgacagcacacacagccgaaaagcgcttcttctcatcgccttcgccttcaaaactttgaagcaccaatcccaaccagaaaaaatgtgcgacgaagaagttgctgctctcgtggtggacaatgggtccggaatgtgcaaggcgagttttgggatttggacttattattatgtacaattgggaaccatcaaaatgggcaaaagcaatgcttttgatatgctaaatctcaatttgggcattggccacatttttacagtgaaattcaaacaaatttttgatcaaatcaaccgaaaataattttccgaatatttttaaaataaatcaaatttcataagaaaatgcccactcgggcaaaatgtctcctcattattggaaaaagaaaaaagcaaatccccccccccggggtggaaattctccgaattctttgagcacaacgaatgtttttgcttcgccaacaaaaaaagcgggcgatgggggggggggagagaatgttttatttgtgactcacacttttgaccgacttttctcttcagaatgttacaattccaagaagagggagaaaaagggggaaaagaataaaaagaaaacaaaaattggctaattaaaattggattgaatttccgctttaattcaggccggtttcgcgggcgatgacgcgccccgcgcggtgtttccgtccattgtgggccgcccccgtcatcagggcgtcatggtcggcatgggacagaaggactcgtacgtgggagacgaggcgcagtccaagcgtggtattctgacgctgaagtacccgattgagcacggcatcgtcaccaactgggacgacatggagaagatctggcaccacaccttctacaacgagctgtgagtggtggtgccatcgtcagattggcattggcactcgccgtcggtcacttggccaatccgtccctttaaggcgtgtcgcccccgaggagcacccggtgctgctcacagaggccccgctgaacccgaaggccaacagagaaaaggtctatctgccaaatggaacagtgaaactgacggaatctccccttttcagatgacccaaatcatgttcgagacgttcaacacgccggccatgtacgtggccatccaggccgtgctgtccctgtacgcctccggccgtaccaccggtctcgtgttggactccggcgatggtatgcagccaaatcgttggcataatatcatagctatcaatctccatgcacaggtgtcacccacaccgtgcccatctacgagggttacgccctgccccacgccatcctccgtttggacttggccggccgtgacctcactgactacctgatgaagatcctcactgagcgtggttactccttcgtgaccacggccgagcgtgagatcgtccgtgacatcaaggagaagttgtgctacgtggcactcgacttcgagcaggtcggacatttggccaatttgatgccaaaattacccttcctcccgtcttggttcaggaaatggccactgccgcctcctcctcctcgctggagaagagctacgaactgcccgacggccaagtgatcaccgtcggcaacgagcgcttccgttgcccagaggcgctgttccaggtgagtgcccggcggagggcgcgtgcctatggcaacggcacaatttgatttggctctgttcagccgtccttcatcggcatggagtcggccggcatccacgagtccacctacaactcgatcatgaagtgcgacatcgacatccgtaaggacctgtacgccaacaatgtgctgtccggcggcaccaccatgtacccgggcattgctgaccgcatgcagaaggagatgaccgcgctggccccgtccaccatgaagatcaaaatcatcgctcccccggagcgcaagtactccgtctggatcggcggctccatcctcgcctccctgtccaccttccaacagatgtgagttgtggttgcattgggctgatctgacccaccaatgcttttccccctctgatcagttgcccaattagctgatcattgtccgttgttttccccctctgagcactcttttgcccttttctcaggtggatcagcaagcaggagtacgacgagtcgggcccgtccattgtccaccgcaagtgcttctgagcagcagctgcacgaccgcacggaggaggaggagaagaccaacgaagccgggacactcgccatccgccgacccattcgccaccccccaccaccatctgttttttgctgaaaattatgcaaaaatatttttgaataaaatctatgaacaaaaaaaaaaaaa

SEQ ID NO: 47681 - DNA, 2917 bp, Heterodera glycines
gtcaaattgctttttcaaaaatgccatctaaagctaatgcaattggtattgacctcggcacgacgtattcgtgtgttggagtcttccagcacggaaaggtggagatcatcgcgaacgaccaaggtgcagtaaagaccggacgtgctttccctcaaaatattgttaccatcccgaatttcaggcaaccgcaccacgccgtcctatgtcgcgttcaccgacaccgaacgtttgatcggcgatgcggccaagaaccaggcaacttttcacaaaatcaactgtttaagcagtttaaactgatttgtttgacaggtggcgatgaacccatccaacaccgtgttcgacgccaaacgtctcatcggacgcaagttcgacgacccggcggtgcagtcggacatgaagcactggccgttcaaagtggtgcagggagagggtgctcgtccgaaagtgatggtggaagtcaaaggcgaggacaaagcgttcttccctgaggtttgtgctgtttgctaaactgctccatccccccgccccagttgaaaattttgaatggaggcaatttcgtatgcttgattctttttcggaaaatctacaatctgaggaattaaagctttccgaaaaatgaaatttgggagggaagaggactctaaaagcaaccaaaattggcgtttgttgagtgtttgcttgttgtacttaaatgtgttttttctttgcaggaggtttcgtccatggtgcttatcaagatgaaggagacggccgaggccttccttggccagactgtcacggatgcggtggtcacagtgcccgcttacttcaacgactcgcagcgtcaggccaccaaggacgccgggaccatcgccgggctgaacgtgttgcgcatcatcaacgagccgacagccgccgcgattgcctacggcttggacaagaaggggcagggtgagcgccatgtgctcattttcgacttgggcggtggcactttcgacgtgtccatccttaccatcgaggacggcatcttcgaggtgaaatcgaccgccggtgacactcatctcggtggcgaggacttcgacaatcgaatggtttgattttcgaatttgccagcaattcaaaatggttcgaactaaggtttaagaaaaatgaaaaagatagtttggtcgaaccaacacttaaaatgaatgaaaagcattttcttttgcttgtttgaatttaaactgcttttccttcaggtcaaccactttgtcgcggagttcaagcgcaagcacaagaaggacctcagttcgaaccctcgtgcgttgcgtcgtttgcgtacggcctgcgagcgcgccaagcgcactctgtccggttccacccaggccaggtttgtttctttccctttttggcgggtcatttcacaaactcatttgccccatgtaaaactaattccttcaatttcagcatcgaaattgactctctcttcgacggcatcgacttctacaccaacatcacgcgcgcccgcttcgaggagctttgcgccgaccttttccgcaacaccatggaccctgtggagaaggctttgcgcgacgcgaagatggacaagtcccagatccacgacattgtgttggtcggcggctcgactcgaattccgaaggtgcagaagcttctctccgactttttctccggcaaggagctgaacaaaagcatcaacccggacgaggcagtggcctacggagcggctgtccaggcggccattctttccggcgacaaatcggaaactgttcaggtgaacgattaagcctacctatcttaaatttcgaattaaattttgtttttcttgtttgtttttttgactgttgtgtattcctttctttttaggacttgctgctgcttgacgttgcccctctctccctgggcattgaaacggccggcggcgtgatgacttcactcatcaagcgcaacacgaccattccgacaaagacgtcgcagacattcaccacctattcggacaatcagcctggtgtgctgattcaggtaaagcaacaggcatttccccttttgattgtttctgtgtgaaaactgttcacattgaggtctacgaaggcgagcgcgcgatgaccaaggacaacaacctgctgggcaagttcgagctcagcggcattccgccggcgccacgaggagtgcctcaaatcgaagtcactttcgacatcgacgccaacggcattctgaacgtgtcggcccaggacaagtctaccgggaagcagaacaagatcaccatcaccaacgacaaaggccgcctttccaaggaggaaattgagcgcatggtgcaggaggcggagaagttttccaaggaggacgaggtgcagcgtgaccgtgtgtctgccaagaacgccttggagtcctactgcttcaacatcaagcagacaatggaggactcaaatgtacgttttttgtggagtccttttctttttttttattccacctcccgtcgcaaatgattaaaattttggtagcgggcgttaacaattttctgagccctttacgaaattactgtcaatgggttgagtgagaccccctgggactgcggggtttttccctcctttctatcttttgattttaagctgaaggacaagatcagcgaggacgacaagaagaaggtgctggagaagtgcggtgaggtgctggcatggctcgacgccaaccaggcggcagagaaggaggaatttgagcaccagcagaaggaactcgaagggatctgcaatcccatcatcaccaagctctaccaagccggcggcgcaatgcccggcggtccaatgcctggcggagggatgcccggaggtggcggcgctgctggtgcgggaggagccggtggaccgaccatcgaggaagtggactaagcgagtcgatctcttcgcgatcattttttgtttgatcgattatttaattttaaaaa

SEQ ID NO: 47682 - DNA, 318 bp, Heterodera glycines
atgaatcactttgggctgacctttctgttcgtcgccgtttctctgctgacattgacgggcaaaacgatcactttggaggtggagagctcggacactgtggacaatgtgaagacgaagatccaagagaaggagggcgttccgccggatcagcaacggctgatcttcgccggcaaacagctcgaggacggacgaacgttggccgactacaacatacagaaggagtccacgctccacttggtcctccgtctccggggcggaaatgggaagagaaacacgagtaagaacaagaaaagcaacaaaaagcttgatcagaattga

SEQ ID NO: 47683 - DNA, 2053 bp, Heterodera glycines
gagatcactttggtccctacttctgatcaatcccgttaccctctcccaattttgtctgcaaaatgtcggacgactaccgcagttcgattggcccacggcctgcgttcaaccgcaactcaacagcctattcaagtacgggcggacctgtctcgggcggcaaccgcgtgctgaaaattgtcacggagacaatgtcatcgagcaccagcggcggcggcggtggcatgtcaccgtttggcgccaacgcggcacaaatccgtgactcccgtgatcgcgagaagaaggagctgagcgatttgaacgatcgattagccaattacattgaaaaggtccgcttcctcgaggcccagaaccgcaagttgaaggcggacctggacatgctgcaaggacgccgcggcaaggacaccatcaccatcaagacgatgtacgagagcgagattcagacggccaaaaagctgatcgaagacacgggccgatcaaagcacgagttggagcaggacgtggccaaactgcaacgtgacttggacgagcagcgccgcaaatacgaggaagctgttcgctcacgggccggtgaccgtgaaaagttggacgatttgctggtccaattgagcaatttggaggccgaaatcagcctgttgaagcgtcgcattgccctgctggaggaggagctgagcaaactgcgcaaggagaactcacgactgcaggccgacctgcagcgcgtgcgtgccgagttggatcaggagacgctgaaccgcattgactaccaaaaccaagtgcagacactgctcgaggagatcgacttcatccgacgctcgcatgaccaggagatcaaggacttgcaggcgatggccgcccgcgacacgaccagcgaaaaccgcgagttcttccgcaacgaattggcatcggccatccgcgacattcgcaacgagtacgacgtgttgaacaacaaagaccgtaacgacattgagtcgtggtacaagctgaaggtgcaagagattgagacgcaaagtgcacgacagaacatggagcagggctaccagaaggatgagctgaagcggctgcgcgttcagctgacggatttgcgcggcaaattgtcggatttggaagcgcggaactcgctgttggagaagcagatccaggagctgaactaccagcttgaggatgaccagcgcgcttatgaggacgcgctgaatgcgaaggatgcccaaattcgaaagatgcgcgacgagtgccaagcgctgatggtcgagctgcaaatgctgcttgacaccaaacaaacgttggatgccgaaattgccatttaccgcaaaatgctggagggcgaaggggacgggcccggcctgaaacagttggtggagcaggtggtgcgcaccaccggcatcaacgaggtggcggacacagaaacgatgcgtgtcgtcaagggcgagacgtcctcccgccagtcgtaccaacggtcggccaagggcaatgtgtccattttggagacgtcgccggagggcaaatacgtggtgttggagaacacgcaccgatcaaaggaggagaccattggagagtggaagctgaagcgtcgcattgatggcaagcgcgaaattgtgtacacattgcccgccaactttgtgctccgcccgatggcccgtctgaaggtgtgggcccgtaaccagggcggcctgcacgccccgccggatcagctgatcttcgatggcgaagaatcgttcggcgtcggctcaaacgtgcaaaccattctctacaatgcgcaaggagaagaacgtgccacgcacatccaacgttcaagccagacagctgcctgaagaggaagagagagataatgctgataagagtgatcactgggggacggaattttaaattttttaattattttcgaaaaatcgaaaaatgtccccccccccctcctaagaattgattttcttttttaattttcaaaaaattccccttatataaaattgattttttcaatgtccaaccgacatttaaccattaaattttaccaaattggggataaagtgacaaataatcgataaatttctgttgataaatt

SEQ ID NO: 47684 - DNA, 801 bp, Heterodera glycines
ggtttaattacccaagtttgagtcaaatttcccatttggccgtccatttaaccgcgtccgtccaagtcccacccaatccagcgccaattttgattaaaacatggccatgaacaccaattcaattcattgctcctccgcctcctcctccccgtccgttccgatgatgttgtccatgttctgcttcatcttcgccatttttttgcatcccgcttcttcgtccgatttgctgtcctcgtccgacgatgcgaagctgcagcaaatgctgtgcgcccgtttcccgggactcgcggagtgccaaccgaacgacgaagcgtcgcgtggcatcatgacgaagcgcaagtccgcttacatgcgctttgggcgtgcggcggccgctgccgacccatcggaagaatatgaaatggagaagcggaagagcgcctatatgagattcggcaaacgctcgccggcggaagagggggaaacgtaccaaatctgggcagccaatgagccggacgcccaaatggaaaagcggaaaagcgcttacatgcgcttcgggaagaggaagagcgcatacatgagattcggccgtaagtaatcaggcccatgacaaggcgatgaatgaaattttatcttggcaacgacatacgccaatcaatgcgtggccaattacacaccgtaacatccgattgtgttttgactgcgttaccgtattcttatttcccattgatccaattgatctctcacatttgtatatttagaaagctaattaaacgcggataatgttttaaccaaaaaaaaaaaaaaaaaaaaaaaaaaaaa

SEQ ID NO: 47685 - DNA, 1197 bp, Heterodera glycines
atgctgaggattgctctactcatctccattttggcactgtttggtgattgcatggacatgggaaaaagaaaattaggaggaatcagtattaatgagccaagtgaatatggaaccaaagaaaaagaagccatcgcaacaaaagaaaatgcacaaacatcaaaggacccgccgacatcggcgggtggtcaaaatgaagcaatcccttcaccaaaaaagccaagccccaaggggaagttgaaaagcgattttggcctaaacttagccaaggcttttccacggccggttccgaaaggcagaaggggcaaagaaaaagtcggcgaaaaaataagcgttatgaacacagctgaacgcattgaaaaaatggacattgcccaagacaaagctaaaatggaaatagacaatatagacaccaatgccaaacccaaacaaaatgaggataaagctccaaccatattccccaaatgtgcggacaacgtggaagtggaagtagagctcgatcgtaatatttttcgtttttctactacgcttgacacaatgatggaagatcttggaatgtacactgctgaaggcacaaaccagaaattgccggtttcaaatgtcagtagtacggtgatgcgagaagtgattgaatggtgcgagcatcacaaaaacgatgcctcaatagagccaatttatgaagaaattgctttggatgtgccaactggtaaagatgcggaggcatccgcaccaaatgctcaagctggagaagttgcggaggcagccgaatcaaatgccaaaccaaataatgaaaagcgtctcgtctttccaagctgggatgagaattttttggataaggaatggcctgagcttgttgatataattttagcagccaactatttgaacatcaaacttttgcttaccttcgcgaccacaatggttgataacaagtggatcaatggcaaaacgccgcaggaaattcgcaaggcattcggcgtcgaagagccgtacccgccgggacatccggaatgggcacgagttgagaaggagaacgagtgggaagaatcggacgaggaacgtgaggcacgccatgcaaaggaacgagaggaggaagaggagcgtgagagaaaggaagaacagaagcgtaaggaagaggaagcggaacgcctccatcaggaacaactgcagcaacaacagaatcaggaacagcaacctcagtag

SEQ ID NO: 47686 - DNA, 738 bp, Heterodera glycines
atgctgatcatggtcattgtgctgctcacgggaaagatagcttttgccgccacagatggcatgacggaccttaagttgatcaacgaggggctgaccacggacaaaattgcgtcccgctccatcttcctcactccgctgcaaatcattctgccgtgggtgctcggcaaacagacggccgggccgaagccgttgaacgtgttcttgtgggcgtacccgtaccgactggtgatgagtttggcactggcactgctcgtctactggacaccgtcatttcgcgaacccaacggggagtatccgtacttttattacgccatttggattggtgcctactatttgcaacaagtgtcctcctattgcattttcctctcaatgatggcgttcaatgcacaaatttcggaccccaaaattggcggcacttacaggaccctgctgaacacgctgaacaacttaggcggcaattggcctgtcacactgttcctgagcatcaccgattttttcaaccgtaaaaattgtgtggccaaaggcaccaaaattgtgctgggcgtatgcaccagcaaacatgacgaggagttgtgcaaagcgggcggtgatgcgtgcgaatttgtgatcgacggttattacatttctgtggcaatttgcgtggtcgtcggtctgctgtggtatcgaattttctaccggcgcatcaaatacttccagaagatttcccgccaagattggcgcgtgatcaaaacaaaatga

SEQ ID NO: 47687 - DNA, 580 bp, Heterodera glycines
attagcagcggattgtggaaaggccgatgcccgtgagtcaaaaggtttggcggattgcatcatgagatcctcaagtcggacggtcccatcgggtctctaccgcggcttcttcgtctccgtccagggcatcatcatttaccgcgccgcttacttcggctgcttcgacaccgccaaaatgctcttctccccggagggcaagcagatgaacttcttcgtcaactgggccattgcgcaggtcgtcaccgtgtcgtccggcgttctctcctacccgtgggacaccgtccgtcgtcgtatgatgatgcagtcgggccgcaaggacatcatgtacaagaacactttggactgtgccatcaaaatcatcaaaaacgagggactgctcaagggcatgttcaagggtgctttatccaatgtgttccgtggtactggcggtgcccttgttcttgcgttctacgacgaaatccagaaatatatccactgattgtgtgtgatcttcttagtatatttgtttgtgttgcgtcatattcggtcatttgggtaatgataaagaagataggtgtgttaaaaaaaaaaaaaaaaaaaa

SEQ ID NO: 47688 - DNA, 469 bp, Heterodera glycines
gcggtggcgccgccgttcgggcagcaacgattttacgctgaaaatgttcgattattcaaaaactgcggttaaaagggcaatgaaaacgatcacggaggtcgagccgatcactgcggtcagttttcatccgagcggagagttttttctatgcgcaactcggcatccgaccttgcgtctttatagtgccgaaacacagcaatgctttgtttctacaataccgaaggaccaacattctgattccattacggatgtgtgctattcggaaaatgcgcgaatgtttgtcacgggaagtcgtgatgggaatgtaaaagtttgggacggagtttccaatcgatgcattgagacttttacccgcgcgcatgacggagccccgatttgcagtgctcagttcactcgtaatggaaagtacgttctcacagtaggaatggcagtgtgcccaaattatgggaattgtccaccaatcgctgtt

SEQ ID NO: 47689 - DNA, 2828 bp, Heterodera glycines
atgaaaaaatcattcgtttcttttctgttttttacggcattgctcgtcattgtttgctcaaaagaggaggaagggggcgcaaaggaaaagaagtacggcacaatcattggtattgaccttggcaccacctactcctgtgttggcgtctacaaaaacggcagagtggagataatcgccaatgaccagggaaaccgaataacgccttcctacgtggctttcacaccagactcgggcgagcgtctgatcggagatgctgcaaaaaaccagttgactctaaacccggaaaacaccattttcgatgccaaacgactcattggacgggaattcaccgacaaaaccgtccaggacgatatgaaactttggccttttaaggttccgaaaagcacgaatatttaatgagaaaaaactatttttagatctacaacaaggcaaacaagccccatgttcaagtgaaagtcggtaacgaggataagcaatttgcggcggaggaggtttctgctatggttctgacgaagatgaaggaaattgcggagtcttacctcggtcacgaagtgaaaaatgccgtcgttactgtgccggcttactttaacgatgctcagcgacaagcaacaaaagatgcggggaccatcgctggactgaacgtggtgaggattatcaacgaacctaccgctgccgcaatcgcttatggtctggacaaaaaagaaggtgtgtgcaacagtctctgtgcccaactcattttttatatgcaatttcaggcgagcgtaacattctcgtgtttgaccttggcggtggaacattcgatgtctctcttctgacaattgacaacggagtgttcgaagtgttggccaccaacggagacacacatttgggaggtgaggactttgacccccggacaatcgaatactttatcaaactgatcaagaagaagaccggcaaggacttacgcaaggacaatcgcgcagtgcaaaaactccgccgagaagttgaaaaagccaaacgggcgctgtctgttcagcatcaagtcaaacttgaagttgagtcgctgattgacggcgaagacttctccgaaacgctcacccgagccaaattcgaagagctcaacatggacttgttccgagggacgcttaagccggtgcagaaagtgctcgaggatgccgacctgaagaaggaagacatccacgaagtcgtgttggtcggaggttcaacacgcatcccaaaagtccagcagctgctcaaggaattcttcaatgggaaggaaccgtcccgcggcatcaatcccgacgaagctgtcgcctatggtgcggccgttcaagcaggagtcatttcgggggaggagaactcagagtacgtggtgaaagggctgcactagtggtgggattttgtttttaatcgatttttaatataagtgagaatttcgaaaattttgaattactttttgttcgaatttgggtcctggattcgaaataggtcgaaatggttattatatccgtgatcagcgatcccgaaaaacctataagaaatgtttttacgacttttaaaaacttaagaaaatttttgtcaaaaaggtgtggcaccatctaaactattacccaaaatccgacataatttctccattttgcctgtccagtaagctccactttactcggggatagcactcgcacattggtcgaatacttaattgctttttaagaattgttctgttggatgtcaaccctcttacaatgggcattgaaactgtcggtggagtgatgacaaaactgatcactcgcaacactgtcattccgaccaaaaagtctcagatattttctaccgcggcggacaatcagccaactgtgactattcaggtattacaactacgataattattacaacgctggctatagtcgccagaaaaaagaacatttacattcgattgagtttcaatatttcccatgggttgtccaagcattggcttcgtccctatttaagcaatttttcgtagcattttgtgcttccaaagagaaggaaaaatggcggaaatctaagcataatagtagttaagacgcatttagtacaaagtgttttaaatgactgattgccaatttgtatctatattaaaatcccttttaaggttttaatttaaaaataattctcattaaaatgaaaaaattaacaggtcttcgaaggagaaaggccgatgacgaaagacaatcatttgttggggaaattcgacttgaccggcattcctcctgctccccgaggcgttcctcaaatcgaagtcacttttgagatcgatgtcaatggaattttgcacgtgactgccgaggacaaagggactggcaataagaacaaaattacgatcaccaatgatcacaaccgactgtcgccggaagagattgagcgaatgatcaacgacgcggaaaagttcgcagaggaggacaagaaaaccaaggaagtggtcgaagcgaggaacgagtttgagtcgtacgcctactcactgaagaaccaggtgaaacggttgtcctttgctagagttcattacgacaatttagctcggagacagtgaaaagttgggaggaaaactcagtgcggaggacaaaacgaccatcgaaggggctgtggatgaggccatttcgtggttggactccaacaaggacgcgccacctgaggagcttaaggagcggaagaaggacctcgaggccaaagtgcagccgatcatcagcaaactctacgcagggcagtcgcctccgcccggcagcgaaccgccgccgactgaggagaaggacgagctgtgaacggtggaatcaccaaggctaactgtgacgactttccttggtctatcccccttc

SEQ ID NO: 47690 - DNA, 1321 bp, Heterodera glycines; identical to SEQ ID NO: 47670

SEQ ID NO: 47691 - DNA, 1935 bp, Heterodera glycines
atggcagaagtcggaaactcgtacagaccgccgctaagcgaagagaaacaaaacgaactccgcgcaattgctcagaaaattcttcagccgggcaaagggattctcgctgctgacgagagcacaggtcgttgtgccatttcgaccgtttttaccccagccccataaattttaggttcgattggaaaacgcttcgatactattgggttggagaatacggagaacaatcgccgtcgctaccgccaacttttgttcaccacaccgagctttggacagaatcttagcggcgtcattctttttgatgagacattccgtcaggtgggcagacatcgcataattgggtccaattttaacgttttttagtcaaccgacaacggagtccgatttgttgacgtcatcaaaaaggcgggagccgttgctggcatcaaagtggacacgggagttgtgccattggccggcactctcgatgaggggacgacccagggtctgttttggagcaaaacccaaaaattcggaaagcaatgacacaacatttttaggcctcgataaattgtcggaccgctgtgccgagtacaaaaagggcggctgtgactttgccaagtggcgttgtgtgctgaacatcggtgcccacaaaccgtcccatttggcattgatggagaatgccaatgtgctcgcccgatatgcgagcatttgtcagcagaacggacttgtgcccatcgtggagccggaggtgctttgtgacggcgaccacagcttggaacgatgccagaaggtttgatttggattgttggccatcggttgcttttacaattagcccagtccaaccaatgtgcccaaatggccgccgtcttcgcatgctcccttttgcgaaatttttgcttttaaatggttatttattttggtactgaagtgtccattttctctgggactcagttgtcccaatgcttagatggcattggttcgagtttataccttgtgtttttagatttagctcatcaagagctttcgaatgataccaaatttgtccgaatttgagcgttttaaaaggtcaagagccctctttttcattcaaattttcgagttttaaaccggttcaaaaaccggtttaaatgcttttccgcgcccaattttaagcttttctatcgttctcagcacctaagaaaacctataaaagtgtttttgtgcgattttgagccgatactgtattcggcaattttaccgagagaaaatgttgaaacgcggatgagcatttaaaaactgacatcgggtgttttgttgcacaccttttcaatttcatttttaattgttgtatcggtctttgtttaggtgactgagttgactttggcctacacctacaaagcattggccaaccaccacatttacctggagggcactctgctcaagccgaacatggtcacccccggccaatcccactcgcccaaggccacgcccgaccaaattggtctcgccaccgtgactgccctccgccgttctgttccgattgccgtccccggtgcgtaatgagtgcctttccttcgcattttgcatttcctttttcaaggcattgttttcctctccggcggccaatccgagatcgaggctacacacaatcttaacgccattaacagtgtgcccgggccgaagccgtggacgctgtccttttcctacggaagagcgctgcagtcgtcagtgatcaaaaaatggaacggcaaagacgagaatttgggcgatgcgcagaaagtgttgctgcaccgtgccaaggtagggggggggcgactgatgatgcccagcaattggttcttttatgctgtcctcggtaacatttcatttctgactttcctttaggccaacggcgacgctcagcaggggaaatacaccggcgaggaggcagccgcgtctgccgctgaatcactttttgtggcaaagcacgcctattga

SEQ ID NO: 47692 - DNA, 504 bp, Heterodera glycines
gatttttcgggagcacaaacaataacaactggaaaagtattcaatattttgagttttatttttataataaagcatggaagactcccagcagaatattactgaacattcggtatcggcaccaaccactgatcgcaacgaatatgaagaactttccaaattggtcaacccaatctcaaaaccgcttgcaaacagaaaattggctaagaaagtctacaaattggtgaaaaaagcggcaaaagagaagggctttctgagacatggattggctgatgtgatgaaagccttccgaaagaatgaaaaaggaattatcgtcttggcagggaacgtttcaccgattgacgtgtacagtcatattcctgccatttgtgaagaaaagggtcttccttatgttttcactccgtctcgtgaacaccttggtctttgcgctggctataaacgtcctgcaattgtgcttttggtgaagcgacacgattcatacgcggatcctttcgatcaaacgcacga

SEQ ID NO: 47693 - DNA, 608 bp, Heterodera glycines
  unsure (1)..(608): unsure at all n locations
atattaaatggcgtggctcagtcgtgcgactttttgtcctcaccaattacaccaaaaagctgtcaaaacgccgttacagaaagcggtcacttcggcggcagagcgtgcgcttgacattgtcggcaatgcgtcgcgagtgcggcttcaggacttgagggacaacccgggcgcgaggacggtgggcaggcaagtgcgcgcgaagggccacaaccaagcgggtcacaccattggcgagttgcaacacgcgtcgaagccgccgctcggctgggtttgggacgactattacaaaccttggcagcggtcctttgacggcgacagacgcttcaacggggacataaatctccgccgtgaatacattcccatttctttggtcgagcttcagcgcctcatcgacttgggctggttggacacgagtcgactcgtcgacatcgccgcaatttgtgccaccaaattgttggaacagaaattcaagccggaattgcgtcagtttggcattcatctgactgatgaaggcgaagaaatattctcaactccgatcaatttggaggtccaatgggcctcgtgcactgcaattgctgccatcgaacgcgctggtggtcgaattcnga

SEQ ID NO: 47694 - DNA, 683 bp, Heterodera glycines
  unsure (1)..(683): unsure at all n locations
gcgtaagaccggagtgcgggaattggaagtgttgaagaagttgaacgaggccgaccgattggacaagtatcacattttacagctttacaggcaattttaccatcggaatcacttgtgtttggtcttcgaaaatctcagcatgaatttgagggaagtgctgaagaagtacggcaacaacgtcggccttcacatgaaagcggtccgcagttatgcccagcaattacttttggcaatgaaactgctgaaaaaatgcaacattttgcatgcggacataaagccggacaatattttgtcaatgccgcaaaatgttgtagcatctgttcacaatcagtctctcactcacatagtgtgaatgagacaaaaatgcttttgaagctttgcgattttggctctgcttgtcacgtgggcgacgcggagccggccccctatttggtgtcccgtttctaccgcgcccctgaaataatgctcgggttgccctacgattttggaatcgacctttggtctgtggctgtgactttttcatgatggatttgcgcgggaagttcccgaacaaggtgattcgaaaggcggtcttcaaggaccaacacttcgactacaactgcaattttttgtaccatgagacggacanagtcaccgggcaagacaaaagtacagtgctcaccaacatcaaattgttgcgcaat

SEQ ID NO: 47695 - DNA, 566 bp, Heterodera glycines
gatgtttggcaatattacatcatccagtcaggcttttacctttctctcctcttcagtctttttgcctttgacgttcggcggtccaaccattacgaaatggccacgcaccatttggccaccattttgctcctcttcatgagcttctctatcaattttgtgcgtgccgggacgctcattttgcttctccacgacagtgcggacgtttttcttgagcttggcaagctgttccgttatgctggctgggaccgggcggtgaccatcgacttctgtgtgttcatgttggtctggatcagcacacggcttgtctacttcccactgaaacttgtccggtatatgctgttcgacgcacccaagctcattatggagacctatcggtaaaaattgatggaccgacattcttcaaaaaccgatcatccctcgcgtctttttggccgttctttgtattttgctgctcttgcacatcttctggacctatttgttgatcaaaattgccatcaaatccgtgaagagtggcgttgatgacatcagggaagatgaggacgacgattcggaggaggaagcggaga

SEQ ID NO: 47696 - DNA, 514 bp, Heterodera glycines
atatttatttatttaaaatgtcttcgcataatacttcagttattgatgaaaatcgacgatggagtgacttacgctgtttaacagatagggcgtctacatttgccaattcaggattcgtccctggaatcaagaatttgaaagaagttcataaaatgccggtgctagttgttggtgctggtgggcttggctgtgaaatccttaaagacttggctttatctggtttccatgacattcatattattgatatggacacaatcgatctctcaaatttaaaccgacaatttctctttcgtgaaaatgacattggacgctcaaaagctgatgtggcggctgcctttatcgagaaaagggtgtttggctgtaaagttactccccataattgcaaaatccaggacaaatctctcgaattttatcgtaaatttttcattattatttgcggacttgactccattgaagctcgccgttggcttaatgcgactgtgtgctctttggttgaatttgatgacggaaataa

SEQ ID NO: 47697 - DNA, 608 bp, Heterodera glycines
gcttcttcgttttaaattcatgcagtttttcgacatgaatctgagatatgaccccgtccgtatcaatcaattgtatgaacaggccaaatggtccgtccttttggaggaggtcgaacacacggaggaggagtcatcattatttgcagcgctgcagttgcaagccgcgcttcagcgaaactctccggaccgcgaatctccggaacgtgacgaggtcgatgtactgcttgatgagttggaacagactttggacaccactgcctcactaagtcgccgtgatttaacatacgtgcctgagttgacagaatatctcaaatatttgaaacctaaaaaattgggttttaacaacttcaagagagcttactttacatttcgagacctttacttgagttattacaacacagctcaagatgcaaatgggcctccacttggtcactattatctcaaaggttgcgaggtcagccaggatttgagcgtctcgcaaggaaagttcaacataaaattgcaagtgccgagcagtgaagggatgtcggaactaatattgaagtgtgacacggagcaacagtttgccaaatggatggccgcttgtcgtttggcatctcgtggaaaga

SEQ ID NO: 47698 - DNA, 495 bp, Heterodera glycines
ccttctcaatgtgttgctacaggcgtatgattttcaacccgtcgagaaatttcaagcgtacgtacattgggccgccaaacattttgggatacaaatcgtagaaagttatgctcttgcacacacttctgagcttgtcaaggagtacaaggctggctcgaccattcccgtttcgcaatctgttttgaaaacgtacagcagagttgtgcgggttggacccgtccccggcatccaactccccctcttcattgcccttttgcaagcgcacgcacccgttgggatgaaaattgttgtgaagaaacattccccgcgcgacgaacgctgcagatatattcctgacccacaattggaagattttaaagaaacgttgcgtaatttggatgaccctgtcgtcaggaaacttttgggttgggaggcgtaacaaccgagtcaatggaaatgtacagtaattaatgcttactgttttaattctcgaaaataaaaaaagtgtgcaaaatt

SEQ ID NO: 47699 - DNA, 590 bp, Heterodera glycines
gacaacgtttctacttttacttctgaatctataagtactacttccctattttaaaataataattattaagtgaattttcgacttacctataaatgtttctgacccgcagcgaatacgacaggggagtgaacactttttccccggagggccgtctgttccaagtggaatatgccatcgaaactgtcaagcttggttccacaagcatcggaattcacaccaaagaaggcgttctttcggctgcggaaaggcgttcaatgagcaaattggtggtggacgactcaatgagcaaaatttcggaagttgagaagcacattgccgtcgcctcggccggtctcatcgcagattcacgcacttgggtcgaacacgcgcgggtggaggctcaacacttttggtttacttacggtggcaaaattcgggtggaagacattactcaaaaggtctcaagattggcactgcattttggagacgacgactcaactatcagtctcggccgtccgtttggagtttctatgctttttgccggcattgatcacacgggtgcgcatctcttccatttggacccgtccgggacgtacattaaatgtttggcc

SEQ ID NO: 47700 - DNA, 579 bp, Heterodera glycines
gcaccgatgtgctggtgattttgatgtcggacaacaatttggaagcgaagtacaccgggttcgagctgagttacaaatcggagggcacagatccgacagtaatttcaccaatggtaacagcgaagccgacaattgctataacgaaaaggccgccgaaaacattgaccaacattacgccaaagataacagtagaaacaacgccaaggataacgacaacgacggacacaatgccaaggataacgacggaaacttcgccaaggacaactacggaaacatcgccaaaaacaacgacaacttcggaaccaacgaccgaaacgacggcggaaccaactaccccaaaagaagaagaggggatttggagcaaatggggcggatggagcggatgttcggcttcgtgcggtgcgtgcggtcacaggagaagagtccgcacgtgtttcaaaggcaaatgcaagggggagtccggccaaatggagcgttgcgccttcggaatttgccctttggccaaacgccgaacaaaccgttgtcaaggtcgactggtaatgccatgcgatctgatggaaagcctcgagttcggcacgg

SEQ ID NO: 47701 - DNA, 539 bp, Heterodera glycines
tttttttttttttttttttttttcgtctgcgtgtttaacatatgcaaatcttattcaacaataaaagaaaaaaggggtttttatctaaggataaaaatcattccactggggaagcatcggttcttttctttccttccttcacatttttgatcagttcgtcaattgtttttgccctttctttgtcgccacagcctttttccagctgagcaaatcgcatcaaaatagtcaaatgtcttttcttctccgaacattgaaaaaaacgcttaagcaagttttgaaatgcgtcggcatcgttttgctgtaaaaggggcctcccgtactcaaaccatggctcaagttcgaggggccgaaaccttttaatcattgattcgtataattctccgatctcctcttctcttccttttgcgttcgtttgcttcttcaacagtccaatcaaataccgatgcatttgtatggaattggacacggcacacgcccttttgaacacttcctgcagcgattcttccgtccctaatgcaacttccaaattcaaataagca

SEQ ID NO: 47702 - DNA, 588 bp, Heterodera glycines
gcatatcctttgtccgaaatgtaatggtgtcggcggcgctaaggaaggggtcaaacaatgcgaaaattgtcgtggacgcggactggagattcacaacatgcaaattggtccgggaatgattcagcgaattcaaagagcttgttctgaatgtggcggtgagggggaaataaatcgcaacccgtgcaaacactgtggcggcaaaaaacggatcaaatcagaagagacaatcgaagtgcatattgagaaagggatgcgcgacgggcagcgactgatgttctacggaaagggcgaccaacagccggggctggagcctggcaacgtgatcattgtgctggacgaggaggagcatcccgtgttcacgcgaagaggcaccaacctcaccctgaacatgaaactgacgttgacagaggcattgtgtggctgcactaaacatgtggtgacgttggacaaacgcattctcagctttactcagttgcctggcgaggttatcaatcaccgcgacttctatgtaatccaaggcgaagggatgccgacccatcgtcacccggaccaaaaaggcgacctgattatccaattcttcgtggattt

SEQ ID NO: 47703 - DNA, 591 bp, Heterodera glycines
  unsure (1)..(591): unsure at all n locations
cgacgaagacaatgatggcatcacccaacttggtgctattggcagttggcctgtgactaacgaatggtcgacacctccggcgactgaactgccagaactcccgaatggtgtcggtactgatggtggcgttgtgtccgaacgactgatgctgtcaatcaacgagacagtgctcaaccaattgctgcaccagtttagatgggacttcaaaattatcgaagagaagatcccactgaacagctcgagcttgccggaggaaacgcgggacttttttgccaacctctgtccccagtgcatttttattttcaacgtgtcggctgacggacttcccagtatgaccatcgaagacgactccatcctgatcaaaatacacaaccgaattgctgccgaagttgagaatccaacaattggagagagcggacagaagaaaacggccatcgatctgacactttctctggccgtgcaactgatcccacaagtgcgggacggtattttccacacgcagctgaacctgaaggagcgcaaaattgacatgaaaaacaagacagcatttccgaaacagatgaagccggtggtggaggaactgctgcanga

SEQ ID NO: 47704 - DNA, 540 bp, Heterodera glycines
gtccaaataagcaatactccctttttcccaaatcttacaaatgaacatgaatcaacttttggttggccgttcgctgttcccaaaaatcatccgccctttctcgcacaccaaaccccttgccaagtctgaggctgacccggatgattacggctacttcccggacccaattgaacactcatggggtttggagaggaaaatgctcatcgctcgtctgaagggtgacgaccgctatgagccgaaggtgtatttccgcgctgaacataccacccgggactatccgaatttggtgccggtccatttgcaggacaaagtcgtcgggtgcctttgcgagccggacgcggagtacgtgaactattggcatattaggaaaggccagatgaagcgatgcgagtgcggacattggtttaagggcgtgcaagccgaccctgacagtttcgcctgaatgcgatggatacgaattggctttgaagtgataggagatcatataaaatgatcagttattttaattgtatttctaagttggttggataaatgtaaagc

SEQ ID NO: 47705 - DNA, 594 bp, Heterodera glycines
  unsure (1)..(594): unsure at all n locations
gaggcgtattgttagtcaaaaatggtgaattggccttggagtgcgaaacagcgcgacgaaccggcgcaagacaagcaaaaagttgtgaccactcatcccgaacccactcaaggcattcacggaatccgaaccattctgatgggtccacccggtgcaggaaaaggcactcaggctaccaaactggcgaaaaagtacgagtcgtgccacctgtccactggcgatctgctcagagccgagataaaagcaggcactccacttggccaaaaaatcaaagggctcgttgaagggggcgacttggtgtcggatgacattgtgtgtgagatgatcgacaagcatttgtccaccgccgagtgtcgcaacggattcattctcgacggttttccgcgcaacaccgcacaggcggagaagttggacgctctgttggagaaacgccagcgccctttgcaggcggcgcttgaattggcgttggatgactctttgctggtcaaacgcatcactggacgtctgttccacgtgccgtccgggcgcagttaccacgagcagttcaacccgccgaanaaggcgatgactgacgattntacgggcgaaccgttg

SEQ ID NO: 47706 - DNA, 638 bp, Heterodera glycines
ctttatcgaccacaacaacaagacgaccacctacaaccacccgcggactggtcggcctgttgggcctcttggtggtcccggcttacacatggctgccgacaaaacattcaaaaacaaagttgcccagttccgttatttgtgctattcaaacagcgtgcctaaccatgtgaaaatttctgtgacaagaaacaatttgttcgaggattccttccaagaaataatgagaaaaaaccccttcgacttgcgtcgtcggttgtacattcagtttaaggcggaagatggactggattacggtggaattgctagggaatggtttttcttgctctctcacgaagtacttaatccgatgtattgtctgtttatgtatgccaattcgagcaactacagtctgcagattaatcccgcttcttttgtaaatcctgaccacttgaaatattttgagttcatcggtcgcttcattgctatggcacttttccatggaaaatttatctacagtggtttcacgctcccattctacaagaaaatgcttaacagaaagatcactctcaaagacttggaatcggtcgacactgaattttacaattccattgtttggattcgcgacaatgacattgatgaatgcgacatggaattgtact

SEQ ID NO: 47707 - DNA, 469 bp, Heterodera glycines
gaatctataagtactacttccctattttaaaataataattattaagtgaattttcgacttacctataaatgtttctgacccgcagcgaatacgacaggggagtgaacactttttccccggagggccgtctgttccaagtggaatatgccatcgaaactgtcaagcttggttccacaagcatcggaattcacaccaaagaaggcgttcttttggctgcggaaaggcgttcaatgagcaaattggtggtggacgactcaatgagcaaaatttcggaagttgagaagcacattgccgtcgcctcggccggtctcatcgcagattcacgcacttgggtcgaacacgcgcgggtggaggctcaacacttttggtttacttacggtggcaaaattcgggtggaagacattactcaaaaggtctcaagattggcactgcattttggagacgacgactcaactatcagtctcggccg

SEQ ID NO: 47708 - DNA, 590 bp, Heterodera glycines
gctcagcgacttgttgcgattgtgactggcggtgcttcggggcttggctgtgcgactgttcgtcggttggtcgccaaagggttcaacgtttctctgttggatttgccaatgtctgaaggagcgaaagtggttttttaattgggcaccactgacaatgtgcttttctctccggtcgatatttcgtctgatgatcaagtgaaaaaggcaatggacgcaacaacggagaaatttggtggtctcaatgttttggtcaattgcgctggaatcgctttcgcgcagagattgtacaatccgtcgagcagagcccaaatggacctcgacaaaattcggcgactcatcgacgtgaacatcttcggcaccatcaacgtgatcagacacgccctcccgctgctgattgacaatgtgccggacgaaaacgaccagcgcggagtgatcatcaacacttcatcaattgcagcctttgaaggacaaatgggacagaccctttattccgcttcaaaaggtgccgttgcatcattaaccgttccattggcgcgcgattattccaacaatggcattcgcgtgatggcaattgctcccggcttaatgga

SEQ ID NO: 47709 - DNA, 659 bp, Heterodera glycines
  unsure (1)..(659): unsure at all n locations
ttgttaattgtttgataaataataaaataataattgcacaacgtcaatgcctccattatttcccgaaaaggtagagagcattcgtcacttgtccacaaaatcttgggaggcgacatttacgaaggattattnctcctatgaaggccaactccgttttctttcgcgcatgtgttacctcgcaatggcacattaccttttgtaccgtggagtgctccccaaaggagttttcaaacgccgaaagctcgaagatttggctatttactgtttcgatggcaacacgcgttggggacgtaaattgtcggagatgatgaaaggtatcagagaggccatcgaccaaaagtacatcaaacaagcattcgtgatgatcaacgaggacaaagaggacccggacgtcgcaactgaagttttctcagtcggtttttgttacaacgaacagcacacgatgactgtcttggatgacaaaggcaatcgtatcgtttcatttggctacaaaggggagaaggtttttcgaatgcaagtgaagcacatcatcaagaagctcagtgtggtcactaagaatctggagccgttgaaaaagggggccgtgccttatttgaaactcacttattacgagaacacgccggatgactacgagccgtcaatgttcaagcattgcgaga

SEQ ID NO: 47710 - DNA, 469 bp, Heterodera glycines
gttcttcgttatttttttaaaattgatcctcgcatatatgtacaccgataaatgacattgtcatttaacgaagctgcttccgttgtcaaaactttgaggacttcgccctctaatgacgaattgttggagatatacgcattgtataagcaagcgacctgtggcgacaacaacacatgcaaacctggcacttttgatttccgtgggaaggccaagtgggaggcgtggaaaaaaaagcaaggcatctctcaggagaaggctcggattgattatgtgaaaattgtcgaaaaaatggtggccaaatacggtgttaattagaaggagcaccaaaagaggcaatcacttagacccgatgctttaatattgtatttaaaaaacaaatattttataatattttgaatgctattattgaaaatatttgtgaacccgtatacaaaatgatcattgaaaaaaaaaaaaagaaaaaaaaaaa

SEQ ID NO: 47711 - DNA, 528 bp, Heterodera glycines
gacaattaattgtccaaataagtaaaagataatttactaatcaaataattactattggtttttgacagcaaattgtctgattgaatggcaaaaaagcagtacgaccttttgttcaaacttctgttgatcggcgacagcggagtgggcaaaacttgcattttgtacagattcagcgacgatgcctttaacacgtcttttatttcgaccattggaattgacttcaaaatcaagacgattgagctgagagggaagaaaataaagctgcagatttgggacactgcgggtcaagagcgttttcacacgattaccacctcatattaccggggcgccatgggcattatgatggtttacgacataaccaacgcgaagagcttcgacaacatcgccaaatggctgagatacatcgacgagcatgcctctgaagatgtcgtaaaaatgttacttggcaacaaatgtgacatgtccgaccgaagagttgtgccgaaggaacgcggggaaaaaattgcgattgaccatggcattcgtttc

SEQ ID NO: 47712 - DNA, 578 bp, Heterodera glycines
tgaaatgcgcacatcagcagcatcaacaggacaaaggcggtagtggacgaaaaacgacggctgccggtgcgtcagcagacgcggcttggattacgagtggtgtgttcatgcagcccattggtgatgaggactcccctcgagttggccggcaaacgtttggcagcaattcgatacgatagaaacaatcggctgatggccgaactgttttcgccctcttatttgcccgacccgcgcgcctttgtgccccaacagcgcattgaccattttcggcgtcagcgcatgtcgctggagcagcaccaagtgaagtccaacgaggagttggcccgcatggcggagctgttcagccagcgcaagcgggccatccaacgcgactcggaggcgtaccatgaaatgctgaaaaaagtgtgcgcagaacggccccgggtggaccagcagcggtgcgaagagctgaccgagcagtacaaggagcagttgttgaacgcatgggaccagttccagacaaagcaggccgcaatccaggccaaactggaagccgatcgacgcgcaaacccagtgttagccgaattgatcaccggaaa

SEQ ID NO: 47713 - DNA, 595 bp, Heterodera glycines
gaacataatcatcatttttcttttctttctaatattcaattttttgaattaacataattcttttggaatggctcctgcaccagaaaaggaaaaaactgaagataagaaactgaaagacgggcaaaaaccaaatgtgaccacggatcacgcacactgtttgagcaatgtccaaccaaatcttcccgtcaataaagtggtggtgcatccgctcgttctgcttagtgtggtcgaccacttcaaccgcgtgaacaaaacgcacaaagtcaatcgagtggtcggtgttttgcttggttgtatgaagcacgacaaaacccttgacatcgcaaattgttttgctgtgccttatgacgaggactccgagaattcgaacattttctttcttgatgctgattttctggaggacatgtttgggatgttttacaaagtcgcggcacgtgaaagaattgtcggatggtatcactctgggccgcgtctttgcaagaatgacattctgatcaacgaagtcatcaaacgctttaccccgaaccccgtgctggtcataatccaagctgctcaaggccgacaggatttggcactgccgacggatgcttatgtg

SEQ ID NO: 47714 - DNA, 590 bp, Heterodera glycines
ccaaaaccaaaaggacgccgattctgagcgaattttggcgagaaggaagcgaattgagctgtacaaagagaccaatgagcaagtgaagcgggaaaaattgcagaaggaacaggcacaggcgaacaaacaggaggaacagcgcagaagggaggagttgaagaagttgcaggaggagaacaaagagaacgagcggaggcgcaaactgaacgaacaggaggagattcagcgaaagttgcaatccgagaagttgaagaagtaccaggcgcaccctttcttccaacagttggtcaaagagcatggggaggcgatattcgacaaagttgaccctgacaaactcatcagagagaagcgaattcgttttgacgctgagcgacgcgagcagcagaccaaattgcaaaacttggagaagaaatatgaccacaccgtccgggcatttcatttggaggaaatggcactgtggaaacatttgtcggacgaacgccagagaatttacccgggacttcatgaggcttacgaaacaaaacgaattgaaaaggcggtaaaggagcgcgaattgtcattcgaaaaatatgcttatttggtgagcgcca

SEQ ID NO: 47715 - DNA, 544 bp, Heterodera glycines
atttgaatgcattcgggacaatttgctgactttcatcaaggccaacatgcgcaaaatgctcttcgacaagatttccgctgtccttgttcttgacactttggaagtcccgtcaccttcggatccctttcttcgtgaaattggcgacagcgatttggatgactgtttccgggctattgctgagattgccactgacgaattcgtcccccattcgcccgatggtccgtcccatattgtgcagggcggttgcgctcgcttcgtgttccgcaaactgttgcaggcggacccgggacggtgtgacggacaccgcctcagcgacttcctgaccgaccttccggccgacaatttgtcctcctggaccagcatggactgcggatgttacaccctggtggaggtgttcaagagcgggtcggacaaggcccgcaaggtgctcagacgggcgctcagtgtggccatgttgcagaattcgcatttgtccggcgccaagtctttgttggatttgctattgggcaaaggcaaagagcaaccgccgcgggaacattcggtg

SEQ ID NO: 47716 - DNA, 518 bp, Heterodera glycines
catcagtgactcggaagacgaacggcacaatccaagaaaagccatcaaactcccgggcacacggcacacagacatggccgaacggtccatccaccaacccgtcactgttaccaagatgggcttttgtccaactggtggttctttcgccgtcgtttcaacggaaggcgttgcactttactctctgttccaaatgcgaagattcgaccccttccaattggaaattgacgtggtccccaactccatcgtccaattttctctttccggcgaacacgcgaaagccatttcgttggcacttcggctcaacgatgccaaactgacgaggagagtggtcgaatccgttcccattttacaactttctgctgtcgttcgggggattgagctgatttacatcgaacgcctgattgtttggcttttgttttttgctgacaaaggccaccaaaagcatgtccatttttaccaattattggtccgagaaattcttattgcaaatgcatccaagctgaagcaatcagttgatc

SEQ ID NO: 47717 - DNA, 587 bp, Heterodera glycines
gacacgtggttgtccaataagaaagcattaaaatggcatcgaatttgacggttaaagttcaccccatcgtttacatgtccatcgtcgacgcctatgagcgtaagtcatcttcgaacatcaacagtcgcgtgggcaccgttcgttccgtggaaacaacggaaaaccgagcgttgggcacgttgttgggattttacaagaagaatgtcgtccaggtgacaagctgttacgccgtgccgttccgcgagacctccgacgacattcccgaaataaatgatgcattgaacagacaaatgtggcacatgtccaaaaggacttcgccgtccgaacaaatcgtcggatggttcttcactgtgcccgacctttctgaaatgtgtccgcattatcacggctattacacggggttagtcaatgaaacgccgcgaaaagaaccgccgcccattattctgatcaccatggatttcaccttttcgggagagagcgccgaccgacttccgatcaaagcatacgcggcacgcgaggcgggggtcccggggaaaggagcgactcaagcgacgattttctacccgttaaaagttgaaatggacgtg

SEQ ID NO: 47718 - DNA, 580 bp, Heterodera glycines
gatggaccatatgaagccgaaaatggtgcacgcttttctcacctcactcttttaccaaagacggagcaaaatgaacccatttctgaacacaatggttgtctgcggcatgcaaccggtcgagtttcatgccggataaattaagcctttcaccggcgtcatcgacatgcgtggcaatgcctatgaagttgaccatgtcgcgacagaaattggcaaatatttgcttcgccaaatgttggagacgcgacaaacgcaggcaaatggagcggaacaaatgagcaaagaagaagcacttcgaatggtcgcagcggcgttggaggtgtccgtcagtcgtaacagcagaacgggccaaatgttcgatgtttccactgtggacgccaacggagtgaaattccacgaccaattccaaataattggcaaatgggacgaaatcgaagtgtgtgacggcacttacaagtaaagcaacggaaaatgatggaagtgattggcacagaattttggatgttttggctcggatttggttgtcgatatgttaaaatgttttttttgaatcaaatgttctcaataatatttatattattgc

SEQ ID NO: 47719 - DNA, 539 bp, Heterodera glycines
gggatttgcgtctgtgtgcgaaaacgaccgttaggcaaaagggaattggcgagcagagaagtggaagtgatcaccgtgccgaatcgagaccatgtcattgtgcatcagcctcaagtgaaggtggacttgaccaagtatttggtcaaccacaaattccgctttgactacgtcttcaacgaagcggcgacaaatgaaatggtttacagattcagtgcccagccgcttgtccgaacaatttttcaacgaggattcgccacctgttttgcctatggccagaccggttctgggaagacgtacacaatgggagggatcatcgaaggacgacgccaggattgctcaaacggaatttacgccatgacagcacatgatgtgtttgcgatgcttcattctcctgagtatgccaatcagaaactgaccctctcgtgcagtttttttgaaatttatggttctaaggtgtttgatctcttgaataaaaaatcggtacttcgcattttggaggacggaaagcatttggtacaggtggtcgggctgagggagac

SEQ ID NO: 47720 - DNA, 489 bp, Heterodera glycines
tttttttttttttttttttttttcgtttatactttttaatcattgtatttaaactgacaatgagtttctaataacttggtttctattatattgatacaaattacggttttttggaagcatcatcaagctttttggcctcaattttgcctgccttttgaatgacattgtatccggaggttatcgattcgtcacgaaatgcagggaaaacctcccacggtgtgttcaagtcaaacttccggaactcttgtgtcatttcggttggctcataaatcactcggttcagctcgtggtcccaacgcagttcgacgtatccggacaatgggaagtcttttcgctggggatgaccttcaaacccgtaatcggtcaaaatacgtcttaagtctgggtggttgttgaaccaaaccccgtacatgtcgtagatttcacgttcataccattcagcaccggaaaagactggagtgatggaatcgattggagcaacttcgtcag

SEQ ID NO: 47721 - DNA, 258 bp, Heterodera glycines
ggggaggttaaatggcaaggtcaccgctgtttttactttccatttttattcgcactgaatttgtcctttgtgcagtaaaatcgaagaatcttttgaatctaaatgacgaaaattggcgaaacattctcagcggccaatggatgatggaatttcacgctccgtggtgccctgcctgcaaagacctccaaaaatcatggaattcattcgctgattggtcaaaggatttgaacataaatgttgcggaaatagacgtgacca

SEQ ID NO: 47722 - DNA, 442 bp, Heterodera glycines
gggaacccagccaccgttccattcgtcccaatctctggcttcaatggcgacaacatgttggagccgtctgacaggatgccgtggtttaaggggtgggcgatcgagcgcaaagatggcaatgcatctggcaaaactctgctcgaggctcttgactccattcttccgccgcaaagaccaactgacaagccgttgcgtttgcctcttcaggatgtgtataagatcgggggtattgggacagtgccggttggccgtgtcgagactggtgttctcaagcctggaatggtggtcacttttgctccgcaaggcatttccactgaagtcaaatcagtggaaatgcaccacgagtccttgccagaagcgcttccaggagacaatgtgggcttcaacgtgaaaaacatctctgtgaaggacattcgccgtggttcggtcgcgtccgactcga

SEQ ID NO: 47723 - DNA, 371 bp, Heterodera glycines
gggcaacaagatccatccacgccctcgtaaagtgttgcagctgcttcgtctgcgtcagatcaacaacggcgtattcgtcaagttgaacaaagcgacaatccagatgttgcgcattgctgacccgtacattgcgtggggctacccgagtcagaagatcattcgccagttggtgtacaagcgtggttatgccaaggagagtgggcagcgcattccgatcacggacaatgccattgttgagcgaaacatgggcaaatcggacgtgatctgtgtggaggacatgattcaccagatttggacagtcgggccccacttcaagcaagtgaccaactttttgtggcccttcaaactcagcaaccccgtgggcgggttca

SEQ ID NO: 47724 - DNA, 334 bp, Heterodera glycines
tttttttttttttttttttttttattaacaaaacaacaaaatttatcattcactcaaaaggaacggacaacaaaattggaaacgcaattccaagcttcggtgcggcatcacttcgcctttttagccttcagtttcttgttgtagaactcgagttctttgccctccaaaatgtacccatcgcagcgtccgctttggcctggtcgtgagcttatgcaagcgagaagtcgtccggcctggaactgttccagaagatgcggctccaccccggcggttttttggcgttccgtgtatttcttcagagtcgactttgagcgtttctgtgctcctccaatcc

SEQ ID NO: 47725 - DNA, 337 bp, Heterodera glycines
ttttgtactccatcattgtccggcgtgtccggacgaaagccggccaaacaggcaagcgcttcacaacagttgcgggccagtcggttaagtaccgcttggtggttcgtcttctcggaatgggcaacccctccttcgtccaacgtgtaatcgaagcgaaaaagatgaggtaagagttgccaaatgacacccgcttgaaacagttgcgtctgtaacaatgtgcacactgaaaaggcacaaacgcactccgtcgcagcgcaagccaaccgatggagagattcgaatctaagcagctggtaaatgctttggaacaacgttttcatttctgcaattttttcac

SEQ ID NO: 47726 - DNA, 325 bp, Heterodera glycines
  unsure (1)..(325): unsure at all n locations
tttttttttttttttgttttttttttggtggtcgtattcaggcgccagataatgaacatttttgatgttctcacggaatgtcttcacatggtggtgaatggtttttggtgcgacgcatccaattttgaccagtccgttctgttggatgaacacggaattgcacgtgaggttggcgtgcacaatgggcgggtcgcacgagtgcaagtaggacagtgcggtcaaaatttgacgcgtncaactcttccacgccttgatgttgagcagtgaacccgaggagcgtgccctttgcaaaaaacgcgacatcgaaccggaggacatgtattcg

SEQ ID NO: 47727 - DNA, 503 bp, Heterodera glycines
tttttttttttttttttttttttttgcaattttatgtgtttatcaatgaaagtgacgtttggagtaattggccaatcgcttttaaataaatgcaagcataaaattgagatcaaatgacccttctcgaacttctattgacctgattcattgaaatttgcaccaaaacagtattcattggattcaagagtccgtaaattcagcagaataactgattttgtcttgcaaaacttaggaacagccaaaaggcaacatcttttcgttggttttccgccaaattcaacgattcgtttttcaaaggttggctgattcccgacgaaataaatgtgcggaatttggtccaaaacaagcgggtcgcgtccagaaaaaggaaatccgggaagagtgtcggggactgtcgggaaaatatagcccatttccaacgtgcgttccatcaatgctaatgtgtcctttccgcgtgtcaaccgccgcaaatcattgatgttttgacctgatgtccccaaaaa

SEQ ID NO: 47728 - DNA, 426 bp, Heterodera glycines
gggcgacttcaggatgtacgctttctgcgtcaagatgccaagccggaggacaagagcaatgagcaaaacatccccccagggactgttgtcgacactgtcgttgtttttttcaaacgctccgagttcttccttaacagtcacgtggcgatcaagggcactgcttgtacgccacattacactgttctgcgggacgagaacgatatgtcgatggacacacttcaaacaatggtccattacctctgctttgggcatcaaattgtcacaaagccgacctcattgccctcgccggtgtacatcgccgatgaatatgcgaaacgcggtcgaaacatctactcacactacgccaagaacggtattgacaacagcaaaaatttgcagctcttcgcaaagaacaaaggggtggaatggccgctgcgcacttatgcg

SEQ ID NO: 47729 - DNA, 550 bp, Heterodera glycines
gggcatgtcgtctggtgtaatggtgaattccgaatgtcaaaacgctttccaacaactttcggaagggaaacgctatcgttacatcatctacaaaatagtggacaaggaagtgattgttgaggtggcagtttcttcggaagacattggctccactggaactgaaagttatgatgacaattcgaaggccgcgtatgaaacatttgtgaaagacctcaaggagcgaactgagggttttgtggactgtcgctacgcagtgttcgacttcaaattccagacacagcgccccggcgcaggcacttccaagatggataagattgtcttcattcagctttgcccggacggtgcgtcaatcaaaaagaaaatgctttatgcttcatctgcgtcggccatcaaggcgtctctcggaaccgctaaaattctgcaatttcaggtgtctgatgagtcggaaattgcccacaaggaattgctgagcaagctgaacgaacaataccgcgacaattgaatgattggttgggatatgatgtcctgcacattcctctcaatttttgtc

SEQ ID NO: 47730 - DNA, 376 bp, Heterodera glycines
tttttttttttttttttttttttttttcgtactcttttcgattgtttaatgaaaacaaattataaaggaagtggaattaagttcaaatatgttctgcgcttaaagttcacatcacttttctacaatgaaagggtgtttcaaagcatccgaacacgaaattcgtttggaggggtccaaagctgtcatcggagagttcagccggaagattgcgcaacaatttgatgttggtgagcactgtaactttgtctttgccggtgactttgtccgtctcatggtacaaaaaattgcagttgtagtcgaagtgttggtccttgaagaccgcctttcgaatcaccttgttcgggaacttcccgcgcaaatccatcatgaaaaagtc

SEQ ID NO: 47731 - DNA, 331 bp, Heterodera glycines
ttttttttttttttttttttttttctcactttcaaagcgaactttaagatggtcgggaacgtcctcttcagacacagaaccgagcacttcgccagtcgcacttttctttatgtagaccaacatgtacgcattcgtaaaactccgaccaactccttctggattctccccaccaaaatttgcagtcaccgcatcgcgtgaagtgacacgcgaaacgacatcatcatcgaatttacaccacctcggagagcccttcaaattcgtgtttatgaatgccacgtaatgtccgccgtggaaatcaccagaatggacaagcacagcataaagcaaatat

SEQ ID NO: 47732 - DNA, 467 bp, Heterodera glycines
gggatacaagaggaacttacaagtgctttcgccatacaaatatgccgggtatacccaacttatcaaaaccatcgatctcgagtcgtccgacgacacattgtttgctcgaaccaaggaggacggtggtcaattgctggttgctgccgttgagttatgccattggacgctaaggagttcgtcattgaatgcggagcagttgcgacgagacggagggttagatgctctgtacaaaacatttgagcggtgtgttccgatgattactgcttgttcactcgaaagcgaaatgccagtgcaagtttgtactcacgtgtgcaattgttttgccaccgctgcccgttttgatgcgtgccgtgaaaaaattgcagaaatgaaaacgttgttccaaagcatttgccaactgcttagattcgaatctctccatcggttggcttgcgctgcggcggagtgcgtttgtgccttttcagtgt

SEQ ID NO: 47733 - DNA, 410 bp, Heterodera glycines
gggggacaagtaattgtccaattaagatgaaagtcaaagtgatctccagacatccggatgaataccaacgcgagacaaaacatgacatattcaaggtgcctcggaattacgccgccccgcccgacccatttcagcagcaggtggagtacacgagagcactgaacgcggcaaagttggagcgcatgttcgcgaagccatttctggctgcctttgatgggcacaatgaggcggtcaatttgttggtcaaacatcccacccgtctgtccaccgttctgtccggtgcgcgtgatggccaagtccgagtgtggcatttggccactcgccgctgtttgcacgtcctccaggcacattccggccccatcaacggtctctctgttgatgcatctgacggtttgcactttgtcacggtt

SEQ ID NO: 47734 - DNA, 462 bp, Heterodera glycines
gggcaggactactcttctttctcaaggagggccaaaatgccaattattgacggggaccgacccaacttcaacatccccgaacttcctcataatctaaacacattgcttgatctttcggaagaagagatcctcaagacagataaggaagtccggcacctcaaaaaccaaaatgaggcgcttataagcgaagaaaaaaggattttggaggaaagtgccgaaagtcagttcgaatttgtccgccttcaagagctggaacaacttgtcagcaagttctgcgtatccgctgaagaatcttctttagacgaatgcaaaaaactgttccagaagctacataagcaatttgaggctgaatttaaaatgtatggacttgatgcgttggccatgccaattgtgcttccaaagataaagagatattttatggaatgggatccgttaaatcccgaacaaaccttttttggattt

SEQ ID NO: 47735 - DNA, 376 bp, Heterodera glycines
gggattcaactttctttctcgtgctcaattcgtggacaaaaatgtgcgacgaagaagttgcggctctcgtggtggacaacggctccggcatgtgcaaggctggtttcgctggcgatgacgcgccccgtgcggtgttcccgtcaattgtgggtcgtccccgtcaccagggcgtcatggtcggcatgggacagaaggactcgtacgtgggagacgaggcgcagtccaagcgtggtattctgacgctgaagtacccgattgagcacggcatcgtcaccaaccgggacgacatggagaagatctggcaccacaccttctacaacgagctgcgtgtcgcacccgaggagcatccggtgttgctcacagaggctccgctgaa

SEQ ID NO: 47736 - DNA, 512 bp, Heterodera glycines
gggtgcgatattatcaaaatttcatcgatggtcccaaatcgcgagcgttttgtgaagaggcgagcccgattagttggacagaacggagcaacgctaaaggcaatcgaactcctcacggaatgttttgtgcacattcagggcggcaccgtctcgtccattggaacacactttggactgaagcaagtcagaaaaattgtggaagattgcatgaaaaacattcatccgatttacaacataaaaacgctaatgatcaaaaaggagctgatgaaggatgacaaactgaggaacgaaaattgggaacgttttctgccaaagttcaaaaagaaggtgcaaaatgctaaagatatccgaaaaacgaagcaaaaatcaaaaaccaaatggaagacaaaggccgattacacaccatttccaccaccgcaaaaagcacggaaagtggacgaacaattggagacgggcgaatactttctcaatgagaaggtgaatcataaacagaaaaagatgaaacgcgaaca

SEQ ID NO: 47737 - DNA, 522 bp, Heterodera glycines
gggggcactttcattcgaaagcaagcggatcgattcacccagagcgttctcttcagcaaaaccttcacttttctccatattttgttaacaaaatgccaccaaaaccatccggcaagggagcgaagaaggcagtcaagtcgaccaaggcggtgcgcacgggagacaagaagcggagaaaggcccgcaaggagtcttactcggtgtacatctaccgtgtgctcaagcaggtccacccggacaccggcatttcctccaaagcgatgtccatcatgaactcgtttgtcaacgacgttttcgagcgcattgctgcggaagcctcgcgattggcccattacaacaagcggtccaccatctcctcgcgcgaaatccagacggctgtccgactgattctgcccggcgagttggccaaacatgccgtgtccgaggggaccaaggcggtgacgaagtacacctcgtcaaaatgagcaggagacgacgaatgcgggccacaatcactcaaatggacgtgcatgactatttttt

SEQ ID NO: 47738 - DNA, 494 bp, Heterodera glycines
ggggcgttaacaaggactcttatctcatcctggaaaaactgccacccgagtacgactcacgcgtgaaggccatggaagtggacgagcgtccgaaagaaacgtactcagacattggcggatgcgatagtcaaatcagagaattggttgaagcaattgttcttccgatgactaaaaaagatctcttcataaacattggcattcagccgcctaagggcgttcttatgtatggaccaccaggtacgggtaaaacgatgttggcacgtgccgttgccgctcaaaccaagtccacttttctgaagctggctggtccgcaacttgtccaaatgttcatcggagacggcgccaaattggttcgagatgcttttgcactggccaaagagaaagcaccgtccattattttcattgacgaattggacgcaattgggacaaaacgattcagttcggagaaggccggcgatagggaagtgcagcgaacgatgttggaattgcttacc

SEQ ID NO: 47739 - DNA, 628 bp, Heterodera glycines
catcactgctcccggcgaccgagtcacttacatgatcaacaagacctcttatgtcaaccccgagcatttggactacttccggtttgttggtcgtgtgatcgccaaggccatttatgacaacaaacaacttgattgctactttactcgtgccttttacaagcacgtcttgaacaagcatgttcggtaccaggacattgagagtgaggaccccgacctcttcaaatcgctggaatttttgctgaacaatgccgttgaggacctcggagccgagctgacttttactgttgaggtggaggagtttggtgtgcgatcgactcggcagttgttggaaaatgggaacaagacaacggtgaccgatgccaataaacacgaatacgtccatttgatgtgccaaatgaaaatgacaggctcaatacggcaacagttgaacgcgtttctcgagggtttctacgaggtcatccccaaaaagctcatctcgattttcaacgagcaagagttggaattgcttatctccggcctgcccgatatcgacatcgacgacctttgtgcaaacactgaatacaaaacatacacacggacgagtccgcaaattcaatggttctggcgcgctcttaaagctttcgatgcc

SEQ ID NO: 47740 - DNA, 393 bp, Heterodera glycines
ggggactcattccatcgccgctcactcattttcttccctttcctttgtcttccattcattccgcttttccctccccatttctcatttgttcttctccgcttcttctctccccgatgaatcactttgggctgacctttctgttcgtcgccgtttctctgctgacattgacgggcaaaacgatcactttggaggtggagagctcggacactgtggacaatgtgaagacgaagatccaagagaaggagggcgttccgccggatcagcaacggctgatcttcgccggcaaacagctcgaggacggacgaacgttggccgactacaacatacagaaggagtccacgctccacttggtcctccgtctccggggcggaaatgggaagagaaacacgagta

SEQ ID NO: 47741 - DNA, 465 bp, Heterodera glycines
gggtcagcgtcaaaattttttctgaagtcgaacgacgatgaggtgtttgaggttgaccgcaatgtgatccgtctctccaccacactcaacacgatgtttcaagaccttggaatggaccaggccgaggcgggtgaaaagatgtacaccgacccaattccattggcaaacgtcaacggtgcaattctccgtaaggtgattgcatggtgcaatcaccacaaggacgatgttccaactggcgaagatgcggagtcgaaagagcgtcgcactgatgacataccgagttgggatgtggagtttttgaaggtcgaccagggaacgctgtttgagctaattttggcagccaactatttggacgtgcgcgggttgctcgacgttgcgtgcaagacggtggccaacatgatcaaaggcaagtcgccggatgagattcgtcgcacattcaacatcaaaaacgatttcacgcccgaa

SEQ ID NO: 47742 - DNA, 471 bp, Heterodera glycines
ggggataataaagcatggaagactcccagcagaatattactgaacagtcggtatcggcaccaaccactgatcgcaacgaatatgaagaactttccaaattggtcaacccaatctcaaaaccgcttgcaaacagaaaattggctaagaaagtctacaaattggtgaaaaaaagcggcaaaagagaagggctttctgagacatggattggctgatgtgatgaaagccttccgaaagaatgaaaaaggaattatcgtcttggcagggaacgtttcaccgattgacgtgtacagtcatattcctgccatttgtgaagaaaagggtcttccttatgttttcactccgtctcgtgaacaccttggtctttgtgctggctataaacgtcctgcaattgtccttttggtgaagcgacacgattcatacgcggatcttttcgatcaaacgcacgagtcaacttatgcgctggtggtggaa

SEQ ID NO: 47743 - DNA, 504 bp, Heterodera glycines
gggggagcgtatcattgaagtgtctcattggggcggaaacatcgctgtggaggaaaacgtcgaaattttgcacaaaggagccaaactaaagggttcattttctcgacttgactttcaaatggatcgccgaggttcccgtcaacccgtcatcaaaaactttaagacaattttgccggctgcatccaatgacatttattatcgagatgagatcggcaacatctccacctcaaatgtttatccccgtgccgatcgtgttgaggttgagctccgcccgcgtttcccattgtatggcgggtggcgtacaaattacattttgggttacaacgttccaagtacgtcctttctccgtcattccggctcgaattttgcgatcaaaatgaaactgatggatcgtctctacgataatgctgttgtggaaaaactgtgtgtcaaaatcatattgcctgaaacgagcaagaacattaagctggtcaccccttactctgtgaagcgtcttcccgacga

SEQ ID NO: 47744 - DNA, 282 bp, Heterodera glycines
tttttttttttttttttttttttttttatgctttacatttatccaaccaacttagaaatacaattaaaataactgatcattttatatgatctcctatcacttcaaagccaattcgtatccatcgcattcaggcgaaactgtcaggggcggcttgcacgcccttaaaccaatgtccgcactcgcatcgcttcatctggcctttcctaatatgccaatagttcacgtactccgggtccgggtcgcaaagggacccgacgactttgtcctgcaaatggaccggca

SEQ ID NO: 47745 - DNA, 487 bp, Heterodera glycines
ggggattcacttactttattattctattgcgctattcttcttctgcaacacattaaacaacgacgcatgccggaggaactggtggcgctcagtcccggaacgcgtgtctccggccgctggaccatcatcaagaagcttggggcgggtgcgtttggagccgtctacttgtgtcaagaccgagatggaaggacaatggcagcactgaaaaccgaaccgatcgacgctcagcgaccactgctgtatatggaggcccacgtgttgctcagcctgaacgaacttcgatcaaacagtggacgccatttttgccgttgtctggaccttggacgcgatgaacaaccggatgccgattctggacagacgatggagttcaactacgttgtcatgtcgttggttggccgtccaatggacaaactccttcacgaatccggtgaccgcttcagccccggaactgcgatcggcacttcaattcaacttctcaaagcgctta

SEQ ID NO: 47746 - DNA, 414 bp, Heterodera glycines
agaaatttacattcgatcacttacgcaaaatcaaattcaatcattcggatgctcttcaatcatttgggcgaagcgactttccaaaaggccattcgcgattacttgaaaaagcaccaatacgcaaatgcagagaccaacgacctgtggaagagtttgtccgacgcttctgggattgatgtcaaagcactgatgtcttcctggacccaacagatgggcttccctttggttactgtcgaggaaaaaattttggatggagaccgtattgaattgcacttaaaacaatctcgctttttggccgatggaggtcatgacgaagcgaaccccgtttggcaagtgccgttcggagtcaccaccgcggcggacccgactcatccaaatgccaaatttttactgatgaaagccgaagacaaattc

SEQ ID NO: 47747 - DNA, 544 bp, Heterodera glycines
gtgaaatggcttctcgacccttggtctctatttataatgagaaaaatgagccaaccggcaagcaaatcaagcttccggccgttttccgggctccaattcgacctgacattgtgagcttcatccatgaccaaattcgcaaaaacaaacgacaagcgtatgctgtgtcaaccgctgccggtcatcaaacttccgccgagtcgtggggcactggtcgcgcagtggcgcgtattccgcgcgtccgtggcggtggcacccaccgctctggccaaggagcgttcggcaacatgtgtcgtggtggccgtatgttcgcaccgaccaaagtgtaccgtcgttggcaccgccgggttaatgtggcgcaacgtcgttacgccattgtgtccgcaattgccgcttcggcggttcccgcactggtccaagcgcgtggccatgtgattgaccagctcaacgaaattccgctcgtcatttcggacaaaattgagtcgttcacgaagaccaaggaagcggttggctttcttcagcgagcgcatttgtgggacgatgttga

SEQ ID NO: 47748 - DNA, 463 bp, Heterodera glycines
ggggattccatcgcccctcactcattttcttccctttcctttgtcttccattcattccgcttttccctccccatttctcaattgttcttctccgcttcttctctccccgatgaatcactttgggctgacttttctgttcgtcgccgtttctctgctggtaattgcgcccggctgcgatggcatgcaaattttcgtgaagacattgacgggcaaaacgatcactttggaggtggagagctcggacactgtggacaatgtgaaggagaagatccaagagaaggagggcattccgccggatcagcaacggctgatcttcgccggcaaacagctcgaggacggacgaacgttggccgactacaacatacagaaggagtccacgctccacttggtcctccgtctccggggcggaaatgggaagagaaacacgggtaagaacaagaaaagcaacaaaaagcttgatcag

SEQ ID NO: 47749 - DNA, 386 bp, Heterodera glycines
ctctgaacgacaccgaattgactgacttaagcattttgatgggcggagattcgacagcgaaactaagcggcggagggaatgccaacacaatgggcggaagtgatggattggctgcttcgattccgatgctttacccgccgcggtcccaaataaagcgccaaaagatgacttaccattgtaaattcggtgaatttggggtcatcgaaggccaattcaccgaacccagcggagtggcggtgaatgcgcagtgcgacattattgtcgcggacacgaacaaccaccgaattcaggtgttcgatcgcgagggccgcttcaaattccaattcggcgaatgtggcaaacgcgatggccaactcctctacccaaaccgcgtttctgtcaatcgc

SEQ ID NO: 47750 - DNA, 646 bp, Heterodera glycines
gggatcaaacggttggcacgcatcgaacggaccggccctatcacttttaggctatcgcaaggcggtgaatagggacgttttcgggggacaaatgttcgcgcaggcaattgccgcggcagaagcaacggtggacggcgacgaatttgcaccgaacgcggcccattcgatgttcattagaaaagcattcattgaccatcccatcgaatatattgtcaccagaacgcgcgacgggcgttcattttgcactcggacagtcgaagcgcgacagaacggcgaaaccgttttctgtgcgcagatttcactttgcgttaaggaacgctcttccattgaacaccaaacagaaatgccagcggaagtgccggagcccgaggagttggtgccgttcttcgagacggtccgtcgagtggtcaccgaacacgacgagggcaggacggagcgtaacggacggaccatcgctaaccttcgcgcggtgctcgaggacgagcagcaaccgtccgtcttcgagttccgacccattcattccgacatttttcttggcattcgaccccattcgcccacgccgattcgttactggttgaaatgcgccgttcctttgggtagcgaacggacaaataaggcactgaaccgcttcctgctggcatttata

SEQ ID NO: 47751 - DNA, 612 bp, Heterodera glycines
gggggaaatgccgtgacttgttccccgtttgtttcgaaggtgccaaggcaatggtccaaaaggggctcagctcgcattttcaggtttctcataacatcagcatttctccagcactcaatgggtatcgcttcggcgcgacttatgtgggatatatgcaggcgaccccagccgaagtctttcccgtttttttcggcgaaatggaccttcaagggaacacgcaggcgacggttctgcaccaaattggcaactttcgtggcaaatttcaaggccaaatccagcaaaacatgttggcagctgctcaattttcactggagcaccgtggacgactttccacgtacggattgacatttgccaacccgtcggtgagtgccaacaattgccagggcactttggttgcgcaaatgttgcggcgtgtcaccaaaaatctcgaccttggcgccgaatacatttaccatagggacgaacggtttcctggcaaacagtcgaacactctcagctacgccttgcgctacattcagcccacttggatattttcgggaactcttgcgccaaccgaactccatttgtgttactaccacaaacagagtgaacacttgcagttcggcgttgaat

SEQ ID NO: 47752 - DNA, 606 bp, Heterodera glycines
ggggacaagtaattgtccaattaagcgaaaacaaatttggttttctacgagtaagcaatgggcaaggaaaagatccatatcaatattgtggtgatcggtcacgtcgattccggcaaatcgactaccactggccatctcatctacaaatgtggtggaattgacaaacgtaccatcgaaaaattcgagaaggaggctcaggaaatgggcaagggatcatttaagtacgcttgggtgcttgacaagctgaaagccgaacgcgagcgtggtatcactatcgacatcgctttatggaaattcgagacaagcaagtactatgtcaccattattgacgctcctggccatcgcgacttcattaaaaacatgatcacagggacttctcaagctgactgcgctgtgctggtggttgcttgtgggacgggagagtttgaggctggaatttcaaaaaacggccaaacgcgtgagcacgctttgcttgcgcagactttgggggtcaagcagctcatcgtcgcttgcaacaagatggacaccactgaaccgccattcgccgaggcccgttacacggaagtgatgactgaagtgtccaacttcatcaagaagatcggttac

SEQ ID NO: 47753 - DNA, 565 bp, Heterodera glycines
gggaagccgaacgaacgcaattacggcatcggtgcggacggcctgcccattgaaggccgtctctaccagcagggcgactgctattacggcactttcaatttggtcagcggacaattcaacgagcacaaattcacgaacagtgagcccgcttattgcgggttggtgcgaattgtgcaggaggcggagcacaaaaaaaaacgtgcacgtgttaatccaatggcgaatccaacggaatccgatcatcggcgacaaatttgcctcacgtcatggccaaaagggcatcaattcattcctttggccccccgagtcgatgcccttttccgagtcgggaatggtccccgacattatttttaaccctcacggttttccctcccgtatgaccattggaatgatgatcgaaagtatggccggaaaggccgcagcaatgcacggcacttcttacgatgcatcgccctttgttttcaatgagcaaaatacggccattgaacacttcgggaaactcctggccaaatccggatacaattattacggcaatgaaacgatgtattcggggatcgatggacga

SEQ ID NO: 47754 - DNA, 562 bp, Heterodera glycines
gggagtacgtcctttctccgtcattccggctcgaattttgcgatcaaaatgaaactgatggatcgtctctacgataatgctgttgtggaaaaactgtgtgtcaaaatcatattgcctgaaacgagcaagaacattaagctggtcaccccttactctgtgaagcgtcttcccgacgaggtgcacaaaacgtacttggacacttttggtcgccctgtgattgttcttgaaaaggagaatcttatcaacaaccatatccagcccttcactctttactacgaattcgaccgcttttccatgctgtacgaacctttgcttattgttgtggcatttggcgcattgtttttggctgctgttattcttttccgtcttgactttagcatcgccggcaaggacgaaaaggaagccgcaagtggacaccagaaaaaggaatgagcaatttgaactaccttttgttaatttgatataaatattaatttaattatttattttgtttattcttttttgggttttataagtagtgaaataaagattacctattaccaaaaaaaaaaaaaaaaaaaaa

SEQ ID NO: 47755 - DNA, 684 bp, Heterodera glycines
ttcaagttcgaaatacaaaaagagtccgataagatcacgcactttttcttggtctgcgataaacttttgtagcaatcttggcaatttgggaatgaacacttccgaaagatgtactcgtccgtcatgcagcattcgaaggtcctttttttccgtccccgcgcccgggcctcgccgaattgagacgacaatgcgatttggcgggtgttcgcccgtcgcagcatgcttgacagcagcacacataatcgaaatcagctgagtgtcaaattggtcgaattcatccgaaagtaaaatgtcgaccattgtggaccaatccttgagcatggggcaaatgtcgatcagcgaatcaaccaaataggccgggtgacgatggacagcgccgtctatgaaaaatgtgaccaaatccttaatcagctggcgattttcagctggcggagtgagcagagaagtggaggaagtgagcagggaattatcggccgccgtcgaaaataattttgcattgacaaattctccagcagcagtggccaactggcgattgttgcaatagaccaactcataaagcggcacgcaagcacccgggtcgagaagagcggggaacgccctgtaaatgtgcgtcatcagttggcatgttttcgttgccacttccacgtccgtgtccaacaccatactcaccaaacgatctttgaa

SEQ ID NO: 47756 - DNA, 495 bp, Heterodera glycines
tttttttctttttttttttttttttttgcaaaacaacaaaatttatcattcactcaaaaggaacggacaacaaaattggaaacgcaattccaagcttcggtgcggcatcacttcgcctttttagccttcaatttcttgttgtagaactcgagttctttgccctccaaaatgtacccatcgcagcgtccgctttggagtggtcgtgagcttatgcaagcgaaaagtcgtccggcctggaactgttccaaaagatgcggctccaccccggcggttttttggcgttccgtgtatttcttcagagtcgactttgagcgtttctgtgctcctccaatccgcgccttctcattttcggtcaacttttgtccctttttgcgcgccaatggcagtgcgtaatgcgcttcataccattggcggaacggaatggcatcgattgagacgatcattcccttgaccaatgttttggtgcgcaccaattcgttgttggaagcgttgtac

SEQ ID NO: 47757 - DNA, 546 bp, Heterodera glycines
gactagtgatagtccaattaagattctgctggattgttatcatggttgctacttttgagaaactcgtaaagactgatggcaaagcgcccgatgaccttgaaaaacaagttgcaacggctttgtctgaattggcacacaattcagagatcaaggctcagctcagcgaactttattttgttggagcacaggaatacgaatttggaaacaaaaagtgtattctggtatggattcctgttccgcaacttcgagactaccaaaaaattcacccaaaattagttcgtgagctggagaagaaaatgagcgggtgtcatgtcatcttcattgccaagcgtaggattttgccaaaacctcaacgaggtaaaaaccgtaagccattgggacagaagcgtcctcgttcgcgaacactcactgctgtgcatgactcaattctcgcagacgttgtattcccagctgaagtggttggcaagcgaactcgagtcaagcttgacgggaaacaaatcatcaaagttcacttggacaaggcacaacaaacgaccgtcgaacaca

SEQ ID NO: 47758 - DNA, 613 bp, Heterodera glycines
gggggtttttaatttttgatatcatccgacagctaattatggcacggaatcggccaaatgctaatatcataacgagtgatctcggcgaggcacaaataaaaaagcacagaccaaaagacacgaggttactacaacagagactcgttgcatggcagcctattctgaccgctaaaacggtcattccgttggttttcagtataagcattttgttcatcccaattggaattgttcttcttcgcataagtcaatctgtccaggaatatgtcgttcaatatgtaaacgatgccaacgagtgcaaagactaccatgcgaatggccaatgcgcagtgaacttcactctgaatgaggacttcaaaggcgatgtttacttttattatgctctcgagaatttcttccaaaatcatcgtcgttatatgaaaagcagaaatgatcagcaattatcgggcattgattttttaaataccaaagattgtactcctttcgagaaagctccggacggtcgtccgatcgccccttgtggcgcaatagcaaattcgttattcaatgattcattccaactcaattatcttgggcgcaatggcaatggttatgcaaatatttcatggagtcacga

SEQ ID NO: 47759 - DNA, 435 bp, Heterodera glycines
ggggatttcgaagatccgcgaggaatatccggaccggattatgtgctctttctcagaggtaccatctcctaaggtctctgacaccggtgatgagccatacaatgccactctttccgtgcaccaacttgtggaaaacaccgatgagaccttgtgcattgacaatgaggccctctacgacatttgcttccgcacattgaaacttcagaatccgacttatggcgatctcaacacatctcgtgtctgtgacaatgtctggcgttacaacttgcctccgtttcccggggcaactcaatgccgacctccgaaagttggccgtcaacatggttccgttcccgcggctccactttttcatgccatgatgtgcgccgctttctgccaagggggcagctgcataccaagccttgtctgtgtcacaacttaccaagcaaatgtacg

SEQ ID NO: 47760 - DNA, 452 bp, Heterodera glycines
ttttttttttttttttttttttttgggcaaaaatacctgtatttaaccaacaaaacaaatatgtatattaacatgttgaattgacaacaaactttttttcttgtcattccttattcattcatctttatcaagaaatgtcgaaatggaattccttgtacgactggtccaactcctgcactcggacataaccgtcctctcccccaaacacaacaatgtcccccgtggggtcgaaaatgatggaattgatgggtcccaaatggcccctgaatcgggcaaattcctcttcgaaaatcaaatggtacagtcgggccacgaattgctccgctgttgtggccgtctgagtgacttccatgtgttcttcaccaccgcctaaaacgatgtggtcgcggctgggagagaccgaggcggtgttcaccgggcgattggacttgtacgttttcaaatgctgcaga

SEQ ID NO: 47761 - DNA, 627 bp, Heterodera glycines
ggggacttgaccggcattcctcctgctccccgaggcgttcctcaaatcgaagtcacttttgagatcgatgtcaatggaattttgcacgtgactgccgaggacaaagggactggcaataagaacaaaattacgatcaccaatgatcacaaccgactgtcgccggaagagattgagcgaatgatcaacgacgcggaaaagttcgcagaggaggacaagaaaaccaaggaagtggtcgaagcgaggaacgagtttgagtcgtacgcctactcactgaagaaccagctcggagacagtgaaaagttgggaggaaaactcagtgcggaggacaaaacgaccatcgaaggggctgtggatgaggccatttcgtggttggactccaacaaggacgcgccacctgaggagcttaaggagcggaagaaggacctcgaggccaaagtgcagccgatcatcagcaaactctacgcagggcagtcgcctccgcccggcagcgaaccgccgccgactgaggagaaggacgagctgtgaacggtggaatcaccaagtgctaactgtgacgactttccttggtctatcccccttccttccaccactatctctttggtttttcatttatttatgttattggta

SEQ ID NO: 47762 - DNA, 604 bp, Heterodera glycines
  unsure (1)..(604): unsure at all n locations
gggcgagcacatggtccaagcttgtctgctgttggcaagtaaaattgaagaagaacctcgaaaaccgcgtgacgtgctcaatgtgtacaatcgccttaagcaaatccatcatcggagaaatgcggtcgcatcacaacaccccgaagatttgcaaaagctgagcaaaaagtttgagcacttggagttgtgcagcaaaaggtaccaagagttgaagaacattgtgatcaaagcggaacgtcgactgcttaatgtgctcggatttgttgtgcacgttcaccacccgcacaaactcatctacatctatctgcacatccttgaccagctgaaaaatgatcaaaaaaagtacagtgcaagcgaaattcggaagagtcggcaactgttgcagaaggcttggagctttatgaacgacggtctgcggacggacatgtttttgcgctacaccccggagacaatcgcttgcgcatgcattcaactcgcggtccgaacagtggaccaaccaattgtgttgcccaccgaaccctntgcatggtttgaactgttcgatgccagtgaccgcgatgtgcgcgccatttcacagaccatntgggagctgtacacgcgcaaa

SEQ ID NO: 47763 - DNA, 659 bp, Heterodera glycines
gggcaacgctttggcaacaaatctttcaagaaatggttcgagcgcctcatgtcggatggacaaagtttgctgagcgatttgtttcccgaaaatttaaagtcagctgttcttgaaatctggccttatttgatggattcgtttggaaattccactcggattgattatggatcaggtcacgaaacttcttttctcattttcctcttctgtctgtacgaaattggcgtgctccattcgcccgacgatgaccgagcttccatcttaagggttttccatcgatatctgaaattagctagacgacttcagtgtgagtatcgaatggaacccgctggttccagaggagttcatgccattgatgactttcagtttttgccttttttgtttgggagcgctcagttaattgacaataaacagagacttatccccgattattatttgcgccccgacatggtgactcaacatcaagatgacaacctatttttcgaggccattcattacataaatcagactaaaatcggtcctttccatgaacattcaaatcaactttacaacatcagtgctgtgaatacttgggatcggatcaatgaaggaatgttcaaaatgtatgagggcgaagtgctgaaagaagttcctgtcgtacagcactttctttttggtagtct

SEQ ID NO: 47764 - DNA, 591 bp, Heterodera glycines
gggttcacaaagagtttcggggcggccggaggctatttggccggaaaatcgtcgcttatcgcccatctcaggcgccattcgccgaccagcttttactccttggcaatgtccgcgccggtggctcagcaagtgttcacttccatgtccatcataatgggtcgtgataacactgaccagggatggcgtcgcattgagcggtcggcacgcaacacgcgctacttccgccttcgactcaaacagatgggcttcattgtgtacgggtcgaacgattcgccggtcattccgataatgatttaccaccctaccaaatgcggactttgggggcgccttttgctggagcgcaaaatcagcgcggtggtcgtctcttttcccgccactgcaatgacagaaagtcgttgtcgcatttgtatcagtgcggcacatgacaaagagatgctggacagagtgttggatgccatcgacgaagttggcgacatcagtgccaccaaacattcgcacagaacgcaccgttaccgccaattggacgtgaaatggtgaacaaagaaaggggaggacggacacacgagaagagaagagacaatgacgggaaat

SEQ ID NO: 47765 - DNA, 568 bp, Heterodera glycines
gggagctaaattccgattttttaaaaatgtcactcactggtgggactgtaattgcgttagcctacaaaggcggagttgcgatggccactgaccgtacagtttttgcatccggtgttcatcgttttcagaacaatacgcgccaatatcggttgaataattattgtctgatttctttctccggagactttgccgaattccaatggttgcaaaatttgctggaacgccgtcagatggaattacagatcgacgcggggatggaccatatgaagccgaaaatggtgcacgcttttctcacctcactcttttaccaaagacggagcaaaatgaacccatttctgaacacaatggttgtctgcggcatgcaaccggtcgagtttcatgccggagaaattaagcctttcatcggcgtcatcgacatgcgtggcaatgcctatgaagttgaccatgtcgcgacagaaattggcaaatatttgcttcgccaaatgttggagacgcgacaaacgcaggcaaatggagcggaacaaatgagcaaagaagaagcacttcgaatggtcgcagcggcgttgga

SEQ ID NO: 47766 - DNA, 596 bp, Heterodera glycines
gggttcacaaagagtttcggggcggccggaggctatttggccggaaaatcgtcgcttatcgcccatctcaggcgccattcgccgaccagcttttactccttggcaatgtccgcgccggtggctcaccaagtgttcacttccatgtccatcataatgggtcgtgataacactgaccagggatggcgtcgcattgagcggacggcacgcaacacgcgctacttccgccttcgactcaaacagatgggcttcattgtgtacgggtcgaacgattcgccggtcattccgataatgatttaccaccctaccaaatgcggactttgggggcgccttttgctggagcgcaaaatcagcgcggtggtcgtctcttttcccgccactgcaatgacagaaagtcggtgtcgcatttgtatcagcgcggcacatgacaaagagatgctggacagagtgttggatgccatcgacgaagttggcgacatcagtgccaccaaacattcgcacagaacgcaccgttaccgccaattggacgtgaaatggtgaacaaagaaaggggaggacggacacacgagaagagaagagacaatgacgggaaataaaca

SEQ ID NO: 47767 - DNA, 486 bp, Heterodera glycines
gggtgatacgcaatgtgaagccatgggagcaggatccgcactatttcaaggaagtcaaaatttcggccttggcccttgtcaaaatggtgatgcacgcgcgcagcggggggaacatcgaaattatgggtttgatgcagggccgggtggacgccaacacaattattgtgctggacgcttttgcgctgccggtcgaaggcaccgaaacgcgggtgaacgcgcaggcccaggcctacgaatttatgaccaacttcagcgaaagttgcgaggcggttggccgtttggaaaaggtggtcggctggtaccactcccacccgggctacggctgctggctgagcggcattgacgtgaacacgcagtccatcaaccagcaattccaggagccctttgttgccattgtgattgacccgattcggaccgtcagtgcaggaaaagtggacattggcgcgtttcgcacttacccaaaaggttataagccgcccgatgagc

SEQ ID NO: 47768 - DNA, 454 bp, Heterodera glycines
tttttttttttttttttttttttttggaggaaaaaaagtatttttttaaaattaggaattttatgctcgaattgaaaaggaagaacacaaacaaagccaacaacaaaagaaaaacctaactaacagaatggaagaatgtcaaacaaaaattggatgggcgtcattggtcatcgattcgaaagcagaggcctttcactggacaaatttgcctctttccattattcgtaaacccacgcattctgcgcactttcccagtcgacgagttcttccgggttgaaccaatgggcaatttcacgggcggcagaagggaccgaatcggagccgtggcaaatgttacgtcccatctcaatgcaaaaattgccacgaatagtccctggggcactggccaacggattcgtagcgccgagcaaaacgcgaccctgtttaaccacattcaaacctttccaaaccattg

SEQ ID NO: 47769 - DNA, 442 bp, Heterodera glycines
ttttttttttttttttttttttttttaagtttgatccgatttatttactaaaaatccgacaaaaaacactagttaaaattaattacatatttgcgaaaatttgtgagaaaatcaatgaacaccatccgaatcacgagaacattgactggtcagcgccgctgtcgggctttagtgggggcattgagccggcagaagcggaggactgtcctgtcccgggcacgctcgggttcccctccaaatctttgtactccaacaccatttcgcgcggaatccgtctccactgtatgggggcgaacaccaaatacgaacaccggtcgtaagtgccgccaatttctcgcggaggggccgaaaagggcgcccgcatgagccaaacgcgttccactttatggaagcgccaatcccgcgaatacagttcggtcgccgccgccacttggtaaacttc

SEQ ID NO: 47770 - DNA, 370 bp, Heterodera glycines
ttttttttttttttttttttttttttacacccctatcttctttatcattacccaaatgaccgaatatgacgcaacacaaacaaatatactaagaagatcacacacaatcaggggatatatttctggatttcgtcgtaaaacgcaagaacaagggcaccgccagtaccacggaacacattggataaagcacccttgaacatgcccttgagcagtccctcgtttttgatgattttgatggcacagtccaaagggttcttgtacatgatgtccttgcggcccgactgcattatcatacgacgacggacggggtcccacgggtaggagagaacgccggacgacacggggacgacctgcgcaatggcccagttga

SEQ ID NO: 47771 - DNA, 482 bp, Heterodera glycines
  unsure (1)..(482): unsure at all n locations
gggcttactttattcatttaatatttatttcaatggcttttggacaaaagggaaaactgttggctgtcattggagatgaagacactgtggtgggctttctccttgggggagtcggtcaattgaacaaagcgcggaagcccaattttgtcattgttgacaaaaacacaagcgtcgccgaaattgaggacgcattccgcactttctgtacccgcgatgacattgcgattattctgataaaccaacacgtggcggagatgatccgataccaggtggaccaacacgtggccagcatcccggccgtgctcgaaatcccctccaaagaaatgccttatgacgcgtccaaagatagcattttgaaccgagcacgtggcctggtgaacactgacgacctcaagtcatagaagaagacattacaaaaaacaaattctcctttattagtcaatgaatgtgtttaattaattatgggaatgacgagaacctnc

SEQ ID NO: 47772 - DNA, 625 bp, Heterodera glycines
ggggccaattgtttgtttggcacaaatgtccttcgccaaatcgtgctcgttggccaaacattgtaagccgttgaccgctgcaccgccaaggcccgtgatcacatgggacaagcatgaacggatcagacggaacaaggaaatttgggacaacccaaagtcggttgtccaccggttgccacgccattaccaagaacgctactggaaaaattttgtgttggccgatcaaactgccgtaaattacaaagtgccaccttttcgattctactgggatgaacaccggaaaattgaactggaaacggagtatttcccaattctgccaatttactgtcctgaaatggaccaaggcttgtgggccggcgaaggcatcattaagggctattccgagtcggatgcgaaaatcaaaaagaaaattttgccgcgcgaatggcttcctcgtctgtggattccccacttgaatcttgtgccgttgtattcagaagtgttggacaaatactttaaagttactgtgactgaacgtttgcttcgggcggtggacaaacattttggcttcgacctttaccttttggaaacgcctgacattgacattaactcacgccttggtctggacctgaagcgactgattctt

SEQ ID NO: 47773 - DNA, 520 bp, Heterodera glycines
gggcgctcgcttctgttttacttcagcagcaaaaattctctgctgttgcatcatcgcccaataaaaatttgaatgctgtgcttatcgatgctgtacgtactccctttctccaatcgaatacaactttccgtgagctgttggctgttgatcttcaaagacacgctcttaaagcattggttgagcgaacaaaaataccttttgatgaaattggacacattatctgtggacaagtcgttcaggaatgcaaaacgagcaatatcgcccgtgaggctgcgatcaccgccggtttccctgattcgatcccttgcaatacggtcactctcgcgtgtatttcttccggcgtttcaattcaaaatattagcctaatgatttccactggctatttaaaggcgggcatcgctggaggagtcgagttactctctgactttccaattcgttacaacagaaaggttcgactttctctcatcgatttgcagaaggccaaaagttttggagagagatttaagcacctgaaaacagt

SEQ ID NO: 47774 - DNA, 491 bp, Heterodera glycines
ggggacaagaaattgtccatttaagcggatttgtataagtgaatggagaaattgctatcgccaaatattgccaatgctcagtcgacctcgacaacgacaacttcagcaacagcgtcgtccaataataaagaagagaatagcaaagaaaaggacgcggaacaaatttgtcactggattcgcgaactaagggagcacgaaaagcgagaaaatgcacttttgcagataagcaaacgtcgcgagggagtggaggacctcgccgtttggttgtggttctcttatgggacagtgagcgtgcttctccaagagatcattagcatttacccgttcattttgccgcccactctcaccgctgcccagtcaaaccgcgtctgcaacgcattggcactaatgcaatgcattgcctcccatcggaacacccgcaaacaatttctggacgctaacgttccgttgtacctttaccctttccttcacaccaccagcgattctcgtac

SEQ ID NO: 47775 - DNA, 484 bp, Heterodera glycines
gggcttcgacaactttttggttgcggactctgtggaggacgcgaagaaacacgcggcggacactttcgaccagctgaaggaggcggagaagaagcagaaggaagcgcatgacgaggaggagcgcaagaagttcgaggaggaagagaagaagcggaaggaagaagaggagaagaagccgaagaaggacgaagaggaggttgaagaggacgaggaggagaagaaggaggaggagcacgacgagctttaggacggcgcccgaccattggccttgtcactttccatcctcaatgattgcaccttcccgggttctccctcatctcttcttttcggttccaccttaataagcttcccactttacttaaatgtgccctcccccctccccccgtcgcctcttcaggtatttaatggcaatttgttatttaattggttcaagagggactgttcgatgattccttcgaccgcccacaatggtctctctcaccgc

SEQ ID NO: 47776 - DNA, 498 bp, Heterodera glycines
ttctttttttttttttttttttttttggcatcctcgtcattgctctctttttcctcctcctcttctttaattcccttcaccgcttttgccgcacgttccgctaaccttttcaccgtttttaaagaaaacagctccaaatcctcgcctatcgtcgggtcgtccccctcgtggaccatcttcagtttcttccgttcttccaagttgcgctttgccttcaacagttttctctttcgttttttcagcgttgccttttcttcggcttttgctggtctgatcagatcgtcgatctcttccaactctttgaattcagtattttcctccaactcctcgccagtatcaccctccaccatttcttcagccgattttacactttctttagacgctttttcctcctttttctgttcgtcaaccaatttcttacgccattttaaaatgcttctcagttcggcagggccacaaactttaatgtctttcaaacattctttgatttcattcggc

SEQ ID NO: 47777 - DNA, 474 bp, Heterodera glycines
tgaactgattgcttcagctaggatgcatttgcaataagaattcctcggaccaataattggtaaaaatggacatgcttttggtggcctttgtcagcaaaaaacaaaagccaaacaatcacgcgtccgatgtaaatcagctcaatcccccgaacgacagcagaaagttgtaaaatgggaacggattcgaccactctcctcttcagtttggcatccgagagccgaagtgccaacaaaatggctttcgcgtgcacgccggaaagagaaaattggacgatggagttggggaccacgtcaatttccaattggaaggggtcgaatcttcgcatttggaacagagagtaaagtgcaacgccttccgttgaaacgacggcgaaagatccaccagttggacaaaagcccatcttgggaacagtgacgggttggtggatggaccgttcggccatgtatgtgtgccgtgtgcccgggagtttgatg

SEQ ID NO: 47778 - DNA, 398 bp, Heterodera glycines
gggaacaaaggtggacatcctggaccaatttcatgaaattaaaattgccattggttacgaattgaatggacggcaaattgagtaccctccagcgaccgtcgatgattgggcaaatttgtgcgtccattacaaaacctttgagggttggcagtcgccaacgaccagtgcccgtcagtgggaacagttgccggacaaatgccgtgcctatttggagttcatacaaaatcaactgggcgtacccgtcgaatacatcggagttgggaagggacgggagcagctgattgtgcgcacgaataacggagggtgatagagaaagagagaagtcataattattgtttgtaaatttattttcgaagcatccaatctgccattctaaaaaaaaaaaaaaaacaaaaaaa

SEQ ID NO: 47779 - DNA, 596 bp, Heterodera glycines
gggacaacgacgaggaactgtcgctgggcgtcttcgagacgtacgcggtgttggtcaaaattttgtgcctcaaaccgatgctgatcatggtcattgtgctgctcacgggaaagatagcttttgccgccacagatggcatgacggaccttaagttgatcaacgaggggctgaccacggacaaaattgcgtcccgctccatcttcctcactccgctgcaaatcattctgccgtgggtgctcggcaaacagacggccgggccgaagccgttgaacgtgttcttgtgggcgtacccgtaccgactggtgatgagtttggcactggcactgctcgtctactggacaccgtcatttcgcgaacccaacggggagtatccgtacttttattacgccatttggattggtgcctactatttgcaacaagtgtcctcctattgcattttcctctcaatgatggcgttcaatgcacaaatttcggaccccaaaattggcggcacttacaggaccctgctgaacacgctgaacaacttaggcggcaattggcctgtcacactgttcctgagcatcaccgattttttcaaccgtaaaaattgtgtggcc

SEQ ID NO: 47780 - DNA, 533 bp, Heterodera glycines
gggagggaagctcggactgcagttaacgcaaaacccatagatacctgacgaggaagcaaatttcgcagcgattcaatttgatttttcaaagaatatccatattgaattagaaatgcttgctgaaggcgatgctaaaattgcgaatttcgatcatatttttactcgaaaattggaaacgtttagcaacaaatttgatgaaatattcccgattgatcaccaggaaggctctgattcatttaatcgcttgggaaaaattgcattgtccaatttactcggaggaattggagtttggcacggatattccttggtcaaaatcgacgaatccgaccagaacaactcatatggccccctttctctcatttccgcagtgccttcaagaccatttttccctcgtggttttttatgggatgaaggttttcataatttaatcattcgacattttgacccgcaacttacgcttcagattttggcttcttggcttgattcgatgaattttgatggatggatgccaagggaaatgattttgggttctg

SEQ ID NO: 47781 - DNA, 596 bp, Heterodera glycines
ggggttttccaatgactatctcctttgccgcttccaggccttccgtaattatgcaatcaaaaaagaaaggccgccaccagcgaagattcaagtgccgccacccgcaaacgaaactggccattggaaatatgagcgtgactactcctatgacctgcgttattcaaacccgatcaacaaatactccagttttaccaggttcattacgctcaccgcaacaggccacaaagaattgtgggcacttttcgcccttctgatgctttcgtcatctctggcgataggaattgtgttctatagccttggcaagatcgaagtttgggttgaccgaagcacctcaactccgccgtgggattgggcgcgagtacgtgacaaatattggaaatttccgacggttctctatgacccgaccggcattactcatgttcgactcagcccgatggagaaacttcaggacgaaatgctggaagctgctaaagaacgtggaacccgcgatgctaagggctattgggttggaaagcaataggaaaatggatgtaatttgatgtgttaactgttctttagcttgcgttctcatataatgtatacgtggagcaaataaa

SEQ ID NO: 47782 - DNA, 410 bp, Heterodera glycines
  unsure (1)..(410): unsure at all n locations
ggacgcggagagcgaaaccaacgaagtgcatttccgcgaaattccctcccacgtgctgcagaaggtgtgccattactttgcgtacaaggcgcgctacacgaacagcgcgacggaaatccccgaatttttcgtggcacccgaagtggcgctggaactgctgatggcggccaacttcctcgactgttgaccaaacaaacaaacaaaatttgatgcaaaaatggtagcaacgacagacagacgaaccgatggccagacaaaacactgactgattgtgattggcaccgatttggaatttttgtgccaaagataaagccaattattaatttgtgaacgacccacacaaatttgttttttgcggattcgtactttggcatctccttttggtttttgataaaatcgtggaaaaatna

SEQ ID NO: 47783 - DNA, 385 bp, Heterodera glycines
ttttttttttttttttttttttttttttaacacacctatcttctttatcattacccaaatgaccgaatatgacgcaacacaaacaaatttactaagaagatcacacacaatcaggggatatatttctggacttcgtcgtagaacgcaagaacaagggcaccgccagtaccacggaacacattggataaagcacccttgaacatgcccttgagcagtccctcgtttttgatgattttgatggcacagtccaaagtgttcttgtacatgatgtccttgcgggccgactgcattatcatacgacgacggacggtgtcccacgggtaggagagaacgccggacgacacggggacgacctgcgcaatggcccagttgacgaaaaagttca

SEQ ID NO: 47784 - DNA, 491 bp, Heterodera glycines
ggggaaaggccgatgcccgtgagttcaaaggtttggcggactgcatcatgaaaatcctcaagtcggacggtcccatcggtctctaccgcggcttcttcgtctccgtccagggcatcatcatttaccgcgccgcttacttcggctgcttcgacaccgccaaaatgctcttctccccggagggcaagcagatgaacttcttcgtcaactgggccattgcgcaggtcgtcaccgtgtcgtccggcgttctctcctacccgtgggacaccgtccgtcgtcgtatgatgatgcagtcgggccgcaaggacatcatgtacaagaacactttggactgtgccatcaaaatcatcaaaaacgagggactgctcaagggcatgttcaagggtgctttatccaatgtgttccgtggtactggcggtgcccttgttcttgcgttctacgacgaaatccagaaatatatccactgattgtgtgtgatcttcttagtatatttg

SEQ ID NO: 47785 - DNA, 497 bp, Heterodera glycines
ggggatgcgattacaaaaaatggaaaaatgagcacacggcaatttgcggaagcgacggattacggaccaaaacaaatttttgagaagttgttctttgatgacattaattatttgctttcgatggccgatctttggaaggagcggaagaaaccaacgccaattcactttatgcaagttattgacgaaggacttggtgggagtcggccgaatgaggacgagaacgagcattggggcgtatcgaaatgggctgaactgtttgaggactctctttttgcgcttgcggaaagataccgaggagctgtcaaggaaaagcgaatgctcatctgggacaaggacgacgagccggcaatgcaatttgttgcggcctgtgccaatctacgggcttacatttttggaatcggcacaaaaccattgtttgacctgaaagctatggctggcaacattatcccggctattgccacaaccaatgcctgtgttgctggaatgattgtcgtcga

SEQ ID NO: 47786 - DNA, 461 bp, Heterodera glycines
atttcatctgcggctcaactccgcttgagggcgtcgtcctcaactcaattagctccgcaaattggattaacgggacggtagatcaacctttaaaacttttgtttgcttccgatgagtcattacgggacattttcaatgattttctcgtcgtcgttgtgcgcgcttatgtgaacctttttcagacctttggtcacaatttgtcaagacaaatggacaaatttttgcgtgtaatttttgatgagtttggtgcactaatcattgaggccagcaaaatcgaggctgtattggaaacagcacgaattaatttggacgtggacaattcagactgccaaattcctaatatgcaacatttgttctccaatttctttttgcagacaattttggctctgatgcaccattactttagcatggcatttcaaatgcgtttggtccagccttatgagttccattacatttattgg

SEQ ID NO: 47787 - DNA, 435 bp, Heterodera glycines
ttttttttttttttttttttttttttttttggcaaataattaaaaaaaacaagcaaaataatatatagaaaatgaagacaaattgcgtccatttgaacttttcccggataaaaaatgcctttctcatgaaattgcttttgccggggaattcgcttttccctctccgttcgaaccgcgtaaaattttgttcagccaaaactgttccttacgcttttacgcgtcccattcagcagcttttagttttatcacatttgtaatttcacgagcccgtctgttctggccgtaataatcatggaagttcccctccgggtcgatcaggtacatgattacggtatggtccacaatgtaatcgtccgtccgtttcgtccgtggcccctcagaatggtaaacccgaaaagctttcgcaacttttgctatctgttctttgctgccggt

SEQ ID NO: 47788 - DNA, 309 bp, Heterodera glycines
gggggccaacggattggacaccgttttccctcagaccgactgcggttacagtccccacgccgagtttatttatacgacgacaaatgcgaaggacaaaggcggcggagagagaggcgctttgctctttttcgacgcggaatcattggaattactctataaaattgagtacccaaaacagggatgcatccgtgccttttggcacccgaaaataaaccaaattttggtcggtctgagcgatgggacgagcaaaatttactacgacccgtccatcagtctgcgcggggccctccaatgcgtcagcaaaccgat

SEQ ID NO: 47789 - DNA, 512 bp, Heterodera glycines
gggatttcaaaatacgacgtcgccgccgtcgtgcgtccaaaaagagtggcagcaacagcggtagcagctcaccacggcggaagaaaatggacagcaaatcgcttgagattgtaccacccaacaaaaaatggcgcatttccaatgaatttgtgtcgctgttccattccattttgtccggcatttgggcacttgccattctcacacgctttgatttccaccaaattgacgaccttgtcaacaaggattcgctcgacgcgcgttatttgacgtacatgtcctttggctatttggtgcacgactttatcgacttggtgatcaacgagcgttctgcccgcatcattgagctgctgttccaccatgttgttgtgctggtcgccttaatggtcacgcatttgtcctgcaaatttttgtacattatcacgcttggtttgctcatggaggtgaacagcattttgctccattcccgttcgttgtgcaatttgtatcgccagccgaaacagtcgaacttgttc

SEQ ID NO: 47790 - DNA, 559 bp, Heterodera glycines
gggtgatggatggatgaaaaaaagggcagcatttattatcgcatttgggaccatttgttctttggatttgccggcagaagcaaattcaaaagggttgctgagacgggttggcgcttcacttattattccatcatttggttcgtcggagtgtccgtgctctacaaagagccgcagttttccagtgtaatcgaatgctttcgcgagtggcccaaacatcacttgccaaatgatgtttggcaatattacatcatccagtcaggcttttacctttctctcctcttcagtctttttgcctttgacgttcggcggtccgaccattacgaaatggccacgcaccatttggccaccattttgctcctcttcatgagcttctctatcaattttgtgcgtgccgggacgctcattttgcttctccacgacagtgcggacgtttttcttgagcttggcaagctgttccgttatgctggctgggaccgggcggtgaccatcgacttctgtgtgttcatgttggtctggatcagcacacggcttgtctacttcccactgaaaacttgtccgg

SEQ ID NO: 47791 - DNA, 457 bp, Heterodera glycines
gggaaccatttcgaggcgttcattgagggtctctgccgcgtgctttacgacactctccgtccgctggtcgtccacaacccgcacctcgaaacactggcacaactgtgcactcttttgaaggtcgaaatgatcgacgagcgctgtgcgcgcttccgtcgtcccatccgaacgcttttccgccccctttctccgcgacttcgccaaccgaggcaatagcggaaaatgtgaataacatggccactgaattgtccaactctcgtgctggttttgcgcgagtgatgagtgaactcgtcgccgatattgttgaacgcattgtgtacagaacttcgctgttcgcccagtcggacattttggagtacaatgccgcccccgacgacttggtttatccggagcggctgatgatgatgcgggacatcaaccagggacggagcgtgacaagcgctgtttcgaccgattc

SEQ ID NO: 47792 - DNA, 559 bp, Heterodera glycines
tttttttttttttttttttttttttgactcggagtgattcatgcattacaattgaatagaaaaaataattgactgtaaaactgtccaggaatagttatcatttgtatcattcggctggatttgttgtacgtttcattaccgcctatcaacagctgacccattgttgttcttctggcacttccaatccgaccattctcgccgtttcttttaccgtcctttcacctcccttgaaatatttggctcggatttcgtctaaattccttttgcttcccaagtaaatggcatatgtttgtgctgagtggtgcgccttcgtagcttcacattgttttgtatttcggtgcaaactcagctgattgcgtaaatatttatgaagcgcggatttcgtcgtaaaactcttgtcggctcttttgagttctcgaaaaatttgtttgaaagttgtaattgcagttgagttgaaagaagccataaagatgaatgtctgagtttaatataatcagtagggatgcaacttttagtgacgaaaaatctcgaaataaacttaattggacaattacttgtc

SEQ ID NO: 47793 - DNA, 155 bp, Heterodera glycines
gggagcgctggaatgacaagcgttacaaaaaaaaccaatcttggaactcgttggaaagccgatcctttcggcggagcctgtatggccaaaggaattgttctcgagaaaattggcgtcgaagcgaaacagccaaattctgcgattcgaaaatgtgc

SEQ ID NO: 47794 - DNA, 573 bp, Heterodera glycines
gggtattaaggtaactttaatcggcgcaagtggaggcatcggccaaccgctcggattacttttgaagaagaacccttccattgcacacttggcactttacgatcttgtcggcactcccggagttgcggccgacctttcccatataaacaccccggcaaaagtgactggccatttgggaccagaccaacttgttgcagcgttggaaggtgctgacgttgtcattattcctgccggtgtgccacggaagcccggtatgactcgtgacgaccttttcaccacaaatgccggcattgtgcgggacatggccgaagcagccgcaaaaacttgtccgaaagctttcatgggcattataaccaatccggtgaactcgacccttcccatcgcctgcgaagtctacaaaaacaatgactgtttcgacccgcgacgcattttcggcgtcactcttcttgacattgttcgagcacaggcactcgtttcagaactaaaagggttggatgtttcccaaacaaaagtgtcggtggtcggtggccattccggagtgaccattgtcccacttctgtccagatgtacgcc

SEQ ID NO: 47795 - DNA, 636 bp, Heterodera glycines
ggggctcttttggttaacaaaaaggctgcttccgtgccggcggcacttctcgcaacttttttggcactgaatataacggaaaatgaagcgaatataactgagaagaaaaatcagaggcaaataggaggaaaatggaaatcgaaacgatcgaaaaagtacgacaagcaaatcggaaagattgatgcggaactgaaagaagcgattgagaccgaagcgaattttacgaaaacgcaattggccactcaaacgatcaaaaatgtcttcttgacatattgtcgtgttctgaagcgaatgcctgccaccgctttgcttcgccccgtcttggccggcttgtcgaagtttgtccatttgattaatgcagaactgcatgaggatttggcacgtcatctcgccaatttggtccatcagaagcaattcggcttctccgatgttttgcattgtgttcacaccgctgccgtcgttttggagggcgatggccgtctattgggcgtcgatctactcagtttttatcgggctatatttggcgctttgccgaatgtctgtttccaacccgagcaaacactatttacggacctttcgctgctttctaaatcgctgcatttgctcttcgtccgccgtcgtaagtcggccgtttcg

SEQ ID NO: 47796 - DNA, 549 bp, Heterodera glycines
ggggattgcaacattttccctgcatttccattccgtcttttcttattaaattttaaaaatgcttcgtttattggtttaacaccttcatgatgctgacttttccgactgtatcctttgttattgatgggattttgcggcgatctttagaatttgattttctcctccatcgtcaacaattatgtccaaattcgaaggagggttctcttctcatgattcctatggctatggtcaaatgccttccgctttcccttccattggtggcgctgcgcccagtgcgcctccttttggcttttctggagcaccgttcggctcgcatgcattcggaggcgatattccgagcccacttgacgcggaaatccaaattgttctgagggaaattcagtcggaagtgcatcagctagagaacagtggcgaatacggggaacaattgaaaaatgcgcgtcgactgttggccaccgaagcaaccaagctcgagaataacatcgacccagaatggctcgaagtggacatctcattacttctgatggcatatgagcaaagaattgaaac

SEQ ID NO: 47797 - DNA, 549 bp, Heterodera glycines
  unsure (1)..(549): unsure at all n locations
cgttgggagctctcctccctatagacctgcaggcggncgcgctgccccaaaagataagcagtggtaacaacgcagagtacgccggggacaggcgaattcggacttttgctataagcgcgttggagcaaatgtgcgaagatgcttcaatgaaaatgttggagaaggaatgcttgagcttggagtattaccctcatttggcaaacttatgcaaaaacagtgagcagaatgttcgtgtcgttgcgcttcgtattttgacaaaatttgcccttgtctaccctgaagagaaagtcatggcatcgttttgtttcaaaattcgtcttcatgacgatgctttctcaatcgtttgcgatgcaatgaatgatttggaagtaaaagttcgcgctcaagctgccaatctcttgggattttttgaaaacgtctctgagtcgttcctcgaccaaacattggacaagaaattgatgcggaatatgactatgttgaacactaatgtcagaaatacgaaaaatgcgttatctgctggtgttggttatatcggaggatggagcactg

SEQ ID NO: 47798 - DNA, 563 bp, Heterodera glycines
catttccggttcattcgacaaatgcctgaaggtttgggacattgaaaacacaggtgatcagaatggaatgccaatggcgggcaaaaacacaacgagaatgaactcgacaaagcgtatgcgaatggacgtgccaaagattactccgatggtcactttggaatcgcatcgcgagcctgtggtcggctgcgcgtggcatccgtccaacttgagccaggcgatcactgcttcatgggaccatcagctgatgctgcgggacctccaattggcaggccccatctccacgctgacttcgaataaagccttttccgcactttccgtctgtccggccaatggccttgtgcttacctcctctgtcgattcgttggttcggctttgggattttcgttccagggatggctcaatggtcaaggcatcgttccatggtcatgttggcgttgtgtccgatgtctgttggcactcaaccgaccagcatttgtttgtttcggccagctttgacaacacagttaaaatgtgggacgtccgcagccccagggcggctctatatgatttgatgggccattcgg

SEQ ID NO: 47799 - DNA, 559 bp, Heterodera glycines
  unsure (1)..(559): unsure at all n locations
gttcgacctcgagtgcttctccttactaaccgttacatcgaatcggacctttcgcccattttggtgatggccccaaccgcggcattgtgaacattcgtggcacttccgttgagtctccccacggcgtgcctttggacttattggaccgcagccttatcatcaggacgtcgagttacaaagaaaatgaaattggagagatactgaaaatccgtgcttctgatgaactcgttgaaatggaggatgccagcatcgcagtgctcgtccaaatagcattggaaacatcgatgcgttactgcatgcaactcatttcaactgccgacattttacgacagagaagaaaaggcgaaaaggtcactgaagaagatgtgagaaaggcgagaagtcttttcatcgatgtgaagcggtgcagaaaagagatggaaaagcacggggacagtttcatcaacgatttcaactgatcattccaaactgatttatttcattgttttttgttatttggaatgaatcgtcnctcnnaaaaaaaaaaaaaaaaaaaaaaaaaaaaaaacaaaaaaaaaaa

SEQ ID NO: 47800 - DNA, 661 bp, Heterodera glycines
atttcctggctggatggtgaaaggcatgccggaatccgggacgccgggccatacggacctcaaggcctacctgggccaaaaggcaatgctggactgccaggaatccctggattatcaggacaatcgcttgggggagtgaaaggcgagcctgggttgcccggactgcctggccgagacggtgtgccaggaccatcgggtgaaaagggcgactcgggtgtgccgggagtgcccggcttcgatggtgaaaagggatccgtcggagcgcctggatttccaggacaaaagggagaatcgggattgcccggcatacccggacaacgtggccaagacggaatgcctggatcgcccggatttcctgggcctgtcggagagcctggcccacttggtgaaccatgcttggctggcggaccaggcatgcctggacagcccggatttccggggaccaaaggcgaacttggcatgcccggctttcccggcgagaaaggtgaaccaggctttgcgggccaacctggtgttcctggcctgcccggtgctaaaggcgatgccggattgcctggacatcctggacctcagggtcttccaggacaggacggtcctcaaggcccagcgggtatggccggacctgagccgttgactcagcatgggcagaaaggactgcctg

SEQ ID NO: 47801 - DNA, 616 bp, Heterodera glycines
  unsure (1)..(616): unsure at all n locations
tacgtcgtcgacattgacatgtctcttgacgttgcgaaactgacccgggctgtcgggtcgcattgcgagcggacagttacgcactgcacatgattttgccaaacaaagtggacccattggtcagtctgatgatggtcgagaaagtgcccgactcgacgtacgaaatgattggcggattggacactcaaatcaaggagatcaaagaggtcattgaactgcccgtcaaacatcccgagttattcgaggctttgggcattgctcagccaaagggcgttcttctctacggaccgcccggtactggtaaaactttgttggcgcgtgccgtcgcccatcacaccgaatgcactttcatccgcgtgtccggctcggagctcgttcagaagtttattggggaaggtgcccgcatggttcgcgaactgttcgtgatggcaagagagcactccccttcaatcatttttatggatgaaattgattcgattggatcgtcccgtgtcgagggaagtcacgggggtgactccgaagtgcagcgcacaatgctcgaattgcttaaccaactcgacggttttgagcctaccaaanacatcaaagtgataatggcaacgaatcggatcgacat

SEQ ID NO: 47802 - DNA, 714 bp, Heterodera glycines
tgattgaatccccggagtgtttacacccattgagaaggcatctgctcatcttaaaggcggcgccaagaaggtggtcatctccgctccgtctgcggatgcgccgatgtacgtgatgggcgtcaacgaggacaagtacgacccggctaaggacgacgtgatcagcaatgcgtcgtgcaccaccaactgcttagctccgttggccaaagtgatcaacgacgagtttggcatcatcgaaggactgatgaccactgtgcatgcggtgaccgccactcagaagacggtggacgggcccagcggcaaacaatggcgagacggacgtggcgcggcgcagaacatcatcccggccagcaccggggcagccaaggcggtgggcaaagtcatcccggagctgaacggcaaactgaccggcatggcgttccgtgtgcccactccgaacgtgtccgtcgtcgacctgaccgcccgtctggagaagccggccccgttggacgccatcaaagaggcggtgaagaaggcggccaatgggaagctgaagggaattttggcgtacacggaggaccaagtggtgtccacggactttcttggagactcgcactcgtccattttcgacgccggcgcttgcatttcgttgaacccgcactttgtcaagctggccagttggtacgacaacgagttcggctactcctgccgtctggtcgatctgatcactcactgtgc

SEQ ID NO: 47803 - DNA, 650 bp, Heterodera glycines
gagcaaatgtgcgaagatgcttcaatgaaaatgttggagaaggaatgcttgagcttggagtattaccctcatttggcaaacttatgcaaaaacagtgagcagaatgttcgtgtcgttgcgcttcgtattttgacaaaatttgcccttgtctaccctgaagagaaagtcatggcatcgaagggtttcaaaattcgtcttcatgacgatgctttctcaatcgtttgcgatgcaatgaatgatttggaagtaaaagttcgcgctcaagctgccaatctcttgggattttttgaaaacgtctctgagtcgttcctcgaccaaacattggacaagaaattgatgcggaatatgactatgttgaacactaatgtcagaaatacgaaaaatgcgttatctgctggtgttggttatatcggaggatggagcactggcaaaaaaatgggtgatgacatgccgatcgaaaagctggaggacgaaagccaatctttgatccctaccggctcttgtggcgccttcgttaccgcactcgaagacgaatttatggcggttcgttaggcagctgtttactcactgggaaaacttgctaggaaccgacctgtttttgcgagtgcgtgcatcgatcatttggccgatatgttcaacgatgaaatcca

SEQ ID NO: 47804 - DNA, 658 bp, Heterodera glycines
attcatgaaaacgagagagagccgaggcatattattgaatttgatgttgaagaaagttttgcgcctgtgttctctggactttttgttgaacttaatgttttcaaagagatcatcaaaaaatttatatacaacataccatcaatttttgaacgttctatgtcatcctcaaattgtctcggttctgcacttacagttgcaaaaaatttaattaacgaaatcggtggacggataactgtttttaccgcatccatgccaaatctcggaattggtgctctgaaatgtttggaattcaacactgcaaaaaagatcgcatttacacctcaaattgacttttacaaaagtttggctctcgaatgtactggaaaacaaattgccattgaccttttcgttgtcggatgtcaaaacgtagatcttcgaacattatctgatatgtctcggttcagcagtggcaccgtgtaccatttccctgaatatcatttccttcgggaccaagtcgaagtcaaacggttccaaatgattttacgacgttactttattcgaaagcttggtcttgaggccgtgttgaggatacgttgctcgaggggactttctcttcacactttttatggaaatttcttcgtccgttccactgatttgctcgccttgcccaatgtgagtc

SEQ ID NO: 47805 - DNA, 655 bp, Heterodera glycines
  unsure (1)..(655): unsure at all n locations
attgtgctggacgcttttgcgctgccggtcgaaggcaccgaaacgcgggtgaacgcgcaggcccaggcctacgaatttatgaccaacttcagcgaaagttgcgaggcggttggccgtttggaaaaggtggtcggctggtaccactcccacccgggctacggctgctggctgagcggcattgacgtgaacacgcagtccatcaaccagcaattccaggagccctttgttgccattgtgattgacccgattcggaccgtcagtgcaggaaaagtggacattggcgcgtttcgcacttacccaaaaggttataagccgcccgatgagccgccctccgagtatcagacaattccgctgaacaaaattgaggactttggcgttcactgcaaacagtattattctttggatgtcacttatttcaagtcatcactggactccaaaatgttcgacgctttctggaacacttattgggtgagcacattgtgtgccaatccgttgcggaccaacgccgattacatcacggcacagttggccgatttgggcgccaaattgcagcaggtgaacacccgtcatggagcgtcatttcgtgaacggtttcgtaaggcggagcgggnacggggagaagttgggctgtgaagtgctccagggactgattgtg

SEQ ID NO: 47806 - DNA, 739 bp, Heterodera glycines
aatttaaaggaaattctataataataattgtcctaaaaaaatggtccaatacaaattatattattttgatgggcgcggtttgggtgaatccatccgtctgttgcttcactatgttggccaaccgtttgaggacatccgaattaaagacatggaagaatgggagaaaacgtacaagccgaaatttttttacggaaaggtcccagttttggaggttgacgggaagccattgggacaaagtgctacgattttgcgctaccttgccgaaaaatttggcttggccggcaaagatgaatgggaaaaagcgaaggctaacgaaatcatcgactttcaaaaggatgctaacactgatttggccccctatttatacgtcaaaatgggattccgccaaggcgatttggacaaattgcgtgccgaagtgttcgagccgggagtcaagcacattttgccactgtttgagaaacttttgaaggagtccgggtcagggtacatgctcaagtccggcctctcaatggtggactttcaagtggccaactttctgtacacgtttaccaagttggagccggagactatcaatgcgttcccggagctgatcaaatacgttgaccgtgtccatgcgctgccccaactgcagcagtatttgaagcagcgtccgcaggaccgctgatcagtgatcagaaaagtcgagattgaatgagaaaagaaaatcaatcattgagattaattcgataagttatgataa

SEQ ID NO: 47807 - DNA, 551 bp, Heterodera glycines
ggccgaaaattttagggctctgtgtactggcgagaaagggatgggcaaaagtggcaaaccgttgcactacaaagggtcgaagttccaccgcgtcattccgagtttcatgcttcagggtggcgattttactcgaggcaatgggaccggcggcgagtcgatctatggcgagaaattccccgacgagaatttcaaagagaagcataccgtcccgggactattgtcgatggccaatgccggccccaacactaacggctcgcagtttttcatcaccacagtgaaaacggagtggcttgacggcaaacacgtggtgtttgggcgagtcgttgagggcatggacgtggtgaagcaagtcgaagcccagggcaatcagagcggaaagacagcgaacgaaattaccatcgccgattgtggccagctttcgtgaaagcgacaaatttgtgcatcgttacagctcatttttgagataattaattattgttttgtaagtttttgcactttgttgctcgagaaatatggcgtgcaaaaaaaaaaaaaaaaaaaaaaaaaaaagg

SEQ ID NO: 47808 - DNA, 707 bp, Heterodera glycines
ccgaagagaccgccgtttgcatttggcctctgttgcgctcaatcgctttgttcttggagaaggaaacggaccgaaccaacgaaaattcgattttgaaaagctcaaaggagtgaccaaaacagtgacccaaaaccttaacaaagtcatcgatgtcaacgattacccaacggagtgctcaaaacgctcaaacaaacgccaccgtcccattggaattggtgttcagggattggctgatacttttatgctgatgcgttacccgttcaacagcgaacaggcgcgtttgctgaacaaacaaatctttgagaccatttattatggggcgctggaggcgtcttgtgagttggcggagaaattcgggccctatgagacgtatgaaggctcaccggtcagcaaaggcattttgcaatacgacatgtgggatgttgtaccaacggatttatgggactggccgctgctcaaaggacgcatttcaaagttcggtgttcggaacagtttgctggtcgcccctatgccaactgcttcgacagcacaaatcctcggcaacaatgagtccattgagccgtacacttcaaatgtgtacagccgtcgtgtcctttcgggagactttcaaattgtcaatccgcatttgatgaaggatttaattgaactcaatctttgggatgatcaaatgaagaacagactaatcgcggagaacggatcggtgcaga

SEQ ID NO: 47809 - DNA, 680 bp, Heterodera glycines
ttttagtgaattggatgcagactcggaccaggaaaatttacgcaccgaaactctgcggaaacaatttggcattgtgcgcgaagaaacgaacaaaagccacgtgatgcactacggcgacttgcaaattcaggacgaacacgtttctgagtttatgggcaaagagcaggcgcaaaagcgcaacgaacgcccaccatcaccgcacaaatttccaatgtttccttctcgagacattcccatgttcatgatggcacgccgtcagaatgagtctaagcagattcagcacaatctccgcgtggcgtggaaaaaaagaagctttctcgagcaaacgattaaacaaattgtgcaccaacttgtgcacgacatgaacaaccggcgacagattttgacgacttatccgcaacaaattcgcgacttggactgtcaccatgaggtggtgcacacgttcagcaatttctgcttcaaatttagcgaaaatccgtacgcgcttaaatatgcctatgttttggccaatttatgcgagcgacccgagttggacgccgaacgtatcaaaatggcactgattgaacagtgtgccgaagtcgaacttagcggtgtcatatgatcgaatttgaaaaacgcaatttgactgatattaatcctatcgaatccattttgattaaaaaatatccgaaataaaaagc

SEQ ID NO: 47810 - DNA, 421 bp, Heterodera glycines
ttaatcggaggccaatgggcacgtgcagttacgtactgaccggcacagagaaaggcttaaacgacacgttcggcacaacttgccacggggcggggagggcaatgtcacgtgcaaagtctcggagggcactgggctttgagcaagttctgaacagactgaaacagcagggcattgccattcgggtggcatctccaaaactcgtcatggaagaggctccggaatcctacaaaaatgtttgtgatgttgtggacacgtgtcatatcgccggaatttcgaaaaaggctgtgaaacttcggcccatcgctgtcatcaaagggtgaaggaaaattatgaattgtttatataatttatttaatttgttgattttaacaaaatttaatgaataaaatcttcatttcgaaaaaaaaaaaaaaaaaaaaaa

SEQ ID NO: 47811 - DNA, 502 bp, Heterodera glycines
  unsure (1)..(502): unsure at all n locations
ccccctttggaggtccactccagacctaaggacaaacctttctttgccgggctcgtcaaatacatggcatcaggcccgattgtcgctatggtttgggaaggtttggatgtggtaaacagggtcgcgttttgctcggcgctacgaatccgttggccagtgccccatggactattcgtggcaatttttgcattgagatgggacgtaacatttgccacggctccgattcggtgccttctgccgaccgtgaaattgcccattggttcaagccggaagaactcgtcgactgggaaagtgcgcagaatgcgtgggtttacgaatgatggaaagaggcaaatttgtgcagtgaaaggcctctgctttcgaatcgatgaccaatgacgaccatccaatttttgtttgacattcttccattctgttagttaggtttttcttttgttgttggctttgtttgtgttcttccttttcaattcgagcataaaattcctaattttnaaaaaaaaaa

SEQ ID NO: 47812 - DNA, 609 bp, Heterodera glycines
tttggtaccgaccaaacgggaacacttttgtgcaatgcgtagttgaccattttgcgcccgacgtgtacggaccttttatcctcgccttggccaactgtcccacccgactgagcgccgttttcgaaaatagtacggctgtcgtgtgatccaattcgtccttgaaaatgtcgtccaacccgtccatggcactgcgaatgccaacaacagcttggaaaaggaaatttccatccaaatattgcatgttctcattgaacccattctcaaaaatgcgtattcgttggcccaaaacgaattcgccaattacctcgtccaatttattatcaaatcgccctatctccgccgccgacgctgttacatcatcaaaactcacatcattcgcaacgtttaccatctctcgctgcttaaatactcttcgcacgtggtcgagcaggcttttaagcacgcggaggaccgctgcaactgtttggccatgttattccgggaggtgttggaggggtacaaaccttcaactgatggaaagcagcggactgctctgtatgaaatgctgttcaatcagtacggcaattacgtcgttcagaggatgatccccatcgcccgtgacgtgtacca

SEQ ID NO: 47813 - DNA, 675 bp, Heterodera glycines
caagaggaacttacagtgctttcgcctacaaattgccgggtatacccaacttatcaaaaccatcgatctcgagtcgtccgacgacacattgtttgctcgaaccaaggaggacggtggtcaattgctggttgctgccgttgagttatgccattggacgctaaggagttcgtcattgaatgcggagcagttgcgacgagacggagggttagatgctctgtacaaaacatttgagcggtgtgttccgatgattactgctggttcactcgaaagcgaaatgccagtgcaagtttgtactcacgtgtgcaattgttttgccaccgctgcccgttttgatgcgtgccgtgaaaaaattgcagaaatgaaaacgttgttccaaagcatttgccaactgcttagattcgaatctctccatcggttggcttgcgctgcggcggagtgcgtttgtgccttttcagtgtgcacattgttacagacgcaaccgtttcaagcgggtgtcatttggcaactcttacctcatctttttcgcttcgattacacgttggacgaaggaggggttgcccattccgagaagacgaaccaccaagcggtacttaaccgactggcccgcaactgttgtgaagcgcttgcctgtttggccggctttcgtccggacacgccggacaatgatggagtaca

SEQ ID NO: 47814 - DNA, 620 bp, Heterodera glycines
tttccgccggctgggacaaattgtaaggtgtggaacttggctacttgccgactgaagaccaaccgcttcggacacaccggctacatcaactcggtcaccgtatcacccgacggctcactttgtgcttccggaggaaaggacggctcggcaatgttgtgggacttaaacgacggcaaacacttgtacacagttgggcggcaatgacgtgatcaacgctttggcgttttcgcctaatcgctattggctgtgcgccgcggttggcccggtggtgaaaatttgggacttggagaacaagacggtggtggacgagctgaagttggacattgccagcaccaccgccgcaaatccgatgcgtgtatccaaaaaatcgtgtcgcccaatgcatttgattggcatggaccacggacggacagacgctgtttgccggatacaccgacaacatcatccgagtgtggcgcatagcttaagcgaaatgttatggacagacaaatcggcactgatcgtccttttgatcactacttgttgttgtggatgtacttcttttctgacgatatataaaagtatggttttatggccagccaaatggcactctgatggccaactggacaaattacaaacgg

SEQ ID NO: 47815 - DNA, 624 bp, Heterodera glycines
aaaatccagaaaaatattatggtggacaatgccaacgcgtcgatgggccttcgcctgtcctaccggtccacgtgcgtggacggccgaacgctgcaggacacgaacacgtgtgacggggtcaaagtgggcgacacggttgcgtttgaagtgacgctggaggcgctgcactgtgtgccgcaaagggacttcgccctgcacattgggccctccgggctggaggaggtgctcacgctgtacgtgcacgtcatctgtgactgcgactgtgaggacgagattgtttacaatgcgcccgaatgcaacggacatggcaatttggtgtgcggcatttgccaatgtgccgaaggctatgtgggcacccattgcgagtgcgaaagtggcggcgagtcggcggtggcgttggaagcgaagtgcaaaaaggacaacgacagtttggtgtgctcaggccgtggcatatgcaaatgcggtgtctgcgaatgcttcccacgagcgaatgcggatgaacttgtgtccggccaattctgtgagtgcggcaatttcaactgccctcgtcacgatcggctcctctgcggcggacatggcgactgcgtgtgcggcacgtgccaatgcgaaccgggatatacgggc

SEQ ID NO: 47816 - DNA, 657 bp, Heterodera glycines
gaggacagactacttaatgaggagaacgtgcgcctttttcgctacccttttctgaagaaccctttttgggatggacacttcgatgagaatgactccgaccgaatggcaggcaaagccctcgaatggctttcataccatttgaaattggcaaaaaatgacgaaacgaattacgacgagacactgaccagagtgatcagacttttggggttgagcatacagcggaaatggacggaagcgaagtcattggcggaagagatgtttatcacagttgctccatcggacaatgcgcggcaaatgatttattcctccatggaacaaatgcagcaatttttgaattttgacgaacagattgaagcggcggagaagcaaacggaaagagaaaaagacgaccaaaattcggaggaatcggagaaaatggcactgaaaaaattatttgagcaaaaaaagtgccgaatttgaaattaacaaagcaaaagcaaccgaaaaactttccgagatgttggcagtacgatttgagccaattttgcagaaggaggaggaacgaatgatggaagtgcaaaggaaacacttttgggaatgggccgaacgcagaaagcgactcattcacagtcaggcgcaacgcgcggaacatttggcacgactgaacgaaattcaaaa

SEQ ID NO: 47817 - DNA, 688 bp, Heterodera glycines
  unsure (1)..(688): unsure at all n locations
ggtcttcgaaggagaaaggccgatgacgaaagacaatcatttgttggggaaattcgacttgaccggcattcctcctgctccccgaggcgttcctcaaatcgaagtcacttttgagatcgatgtcaatggaattttgcacgtgactgccgaggacaaagggactggcaataagaacaaaattacgatcaccaatgatcacaaccgactgtcgccggaagagattgagcgaatgatcaacgacgcggaaaagttcgcagaggaggacaagaaaaccaaggaagtggtcgaagcgaggaacgagtttgagtcgtacgcctactcactgaagaaccagctcggagacagtgaaaagttgggaggaaaactcagtgcggaggacaaaacgaccatcgaaggagctgtggatgaggccatttcgtggttggactccaacaaggacgcgccacctgaggagcttaaggagcggaagaaggacctcgaggccaaagtgcagccgatcatcagcaaactctacgcagggcagtcgcctccgcccggcagcgaaccgccgccgactgaggagaaggacgagctgtgaacggtggaatcaccaagtgctaactgtgacgactttccttggtctatccnccttccttcccccactatctctttggtttttcatttatttatgttattggtatttttcaga

SEQ ID NO: 47818 - DNA, 758 bp, Heterodera glycines
attgtggtgccgtatttgcagagaattcacgaaaaggagcggaacaacacatgcccgaggtgtcccatgggcacaatgttcgattagggcagctgcaaatttcagctactccctatatcatttccgtttacaaagttcttggcgatttggtaaagaaggtcggccaacttcactacgaggacaccatttgcgacttgctttaccagttcaaatatatgtttgtcggctatgcgctcaaagaacaaaccgagattttcattctaaattttccggattcgatgcgtgaaaagttgaaatttttgttcacccattcgtcgacagcagcagcagcggtggaaaatcagcagcaaatgcttcagcaacaacagcagcaattggttggcattggatttgcacttggtcagcaactttcatttcccatggaatcagcaacacatcaacaacaacaacaagtactgcccttccaccattcacaacagcaacaacaacagcagccggcggcactgatcggaatgttgcagaggcaaagtcgcgaggacgaggggcagcaacagcaacaccaatcacgacaaaaccaagctgtgcaaatgcagcaacagaccaacacaaaccaacagcaagtggaacaaatgggcaccgctgggagcagcacaaccgcaagccaacagcaacagcagtccacgcctgccccattgtccgtgtcgtctgtctcttctgctgctctctctcccatttgatggttccgttttcctgcccgt

SEQ ID NO: 47819 - DNA, 695 bp, Heterodera glycines
tcccttaaacttcgctcgcctttcccctattaacgggccattcgaccgtgaagtgttctcttatttctccaactgctcacaaatgggcgtcaaagttgccatcaccggtggcagtggctttctcgccgctcatctcatcaaacgcctgagggcagacgcaaatgtggacgaaatcagaaccatcgacagaaagccgttcagacagctcggaacaattgtttgttcttcttcagatgattgccctccttcctccgtcggttttccctcactcattcatttccaatgcgatttgctggatgttgccaaacttgaaaaggcattggatggtgtcgacgtgttattccatttggccagaaaggctttcgaatatattttcttcgctgatcaaaaagcactgaatgatcgctacagcagagacaatttggaagccactcattcgcttctcaacaccattttcaaatgctccgttccgcgattggtccatgtcggagatgcctttgccaacattcccccgggcgacaactttggaagcgctgagcacatccatcgcggattgccctccaaatttttgcttggccattacggagagacgcggataaaggccgaattggccgggcgagaaaaatgcgggaaaatccttccaaacggacagcccttccacgcacttttcctccgtccgacttttgtgtacggcg

SEQ ID NO: 47820 - DNA, 549 bp, Heterodera glycines
gtgggagtccggtgcgcacattgattgccggcgcaggcgaactgcacttggagatctgcttgaaggacttggaggaggaccatgcttgcattccgctcaagaagtctgacccagtggtgtcctaccgtgagacggtcaccgaagaatccgaaattgtgtgcctgtccaagtcgcccaacaaacacaaccgtttgttctgcaaagccaggccgttgcctgatggactgccggaagccattgaacgcggcgacgtcaatccgacggacgacccgaaaaatcgtgctaaaatactcaccgagaaatttgaaatggacgcgaccgactcgcgcaaaatttggtgcttcggaccagagggcactggtgccaatttgctgattgacgtgacaaagggtgttcagtacttgaacgaaattaaggattcggtggtggccggtttccaatgggcaaccaaggagggtgtgctctgtgatgagaacatgcgcggtgtgcgttttgacatccacgacgtcacgctgcacgccgatgccattcaccgtggcggtggccaaa

SEQ ID NO: 47821 - DNA, 676 bp, Heterodera glycines
tccctgttctctcgggacggatgtcactgaatgcgtcattaatgtcccgtttttctacgaggaaaaccaacgccgcgctttgctgaatgcgggtcgaattgctggcctttcacttcgcctgatcactgacccggccgcgttggcctattgttacggcatgtataacggggcaaatcttcctccacctgaacagcccgctcggcttgttgcgtttgtcgatgtcggccattcgtctgttcaagccagtcttattgcattcagcgccggcaaagcggaggtgctcgccgcctctttcgatttgaccgttgggggcgtccatttcgatgcgttgttgcgcgactatttcaatgaggactttggcaaacgcttcaaaatcgacgcgaggaaaaccccgcgggcgtggctccgtttgttggatgaatgcgaaaagatcaaaaagcaaatctcggcaaacagtcagcccattccctttgcaatcgaatgctttgtgaaagacaccgacgtcaacggagtgatgcaaagggaccaattcgaacaattggcggaaaaactcttccaaaaagtgcaggaactgctccaacagctcattagtgacgcgaatgtgaaggtcggcgatattttcgacgtagaattggtcggggggtcgtcgcgaattccgcgcatcaaacaaattgtg

SEQ ID NO: 47822 - DNA, 472 bp, Heterodera glycines
catttgccttcgagcgatggcccttgtctacgaaaggcattgcattagcattggaccgtttgctgacactcgacacattgtcgaaatgttggccaaatgcacaaatgttgctgaaagggaccacttcttgttccttattaacaaactttcacttgacaaacaaaatgtacgtgaattgatctccgcaaatttgatctcacttttcatcgacattgcagtcttggcccatttgcataccaacagagcaaaacttcacggccaaacaaatgtgattgaggcaaccaaagatgcggcacattgtgaggagactgagccaaaagaatggtattacaacgaccggcagggccaacgccaaggaccgatttcgttcaaaaaaatgaagcgtttataccgcgacggtgtgctttttgagaagagtgaaatttgggcagaaggattggacaaatggtgccatttgtcgttagtttcccaa

SEQ ID NO: 47823 - DNA, 320 bp, Heterodera glycines
caactgcttagctccgttggccaagtgatcaacacgagtttggcatcatcgaaggactgatgaccactgtgcatgcggtgaccgccactcagaagacggtggacgggcccagcggcaaacaactggcgagacggacgtggcgcggcgcagaacatcattccggccagcaccggggccgccaaggcggtgggcaaagtcatcccggagctgaacggcaaactgaccggcatggcgtctccgtgctgcccactccgaacgtgtccgtcgtcgacctgaccgcccgtctggagaagccggccccgttggacgccatcaaagat

SEQ ID NO: 47824 - DNA, 338 bp, Heterodera glycines
cacgctcgcttctcccttgaaggcattttatgcaaatgtggcagtgaaacaaattgatgttacagggatgtccagcagtgttggaattcttcctacccatgtgcctacaattgcagtcttaaagcccggagttgtcaaagtccacgaacttgatggaaacgtctccaagtttttcgcttcttctggtaccctttcaatgaatattgacggctcgtgtcaagcgctcgctgaggaactttgttctcttagcgaactcaacgaacaggccatcaaaaatttgattgatgtcagccaaaagaaagcttctgacctcaatgcaactgatgtgcagaaggccg

SEQ ID NO: 47825 - DNA, 692 bp, Heterodera glycines
gtgggacaggcgaccttcgacttttgctataagcgccctggagcaaatgtgcgaagatgcttcaatgaaaatgttggagaaggaatgcttgggcttggagtattaccctcatttggcaaacttatgcaaaaacagtgagcagaatgttcgtgtcgttgcgcttcgtattttgacaaaatttgcccttgtctaccctgaagagaaagtcatggcatcgaagggtttcaaaattcgtcttcatgacgatgctttctcaatcgtttgcgatgcagtgaatgatttggaagtaaaagttcgcgctcaagctgccaatctcttgggattttttgaaaacgtctctgagtcgttcctcgaccagacattggacaagaaattgatgcggaatatgactatgttgaacactaatgtcagaaatacgaaaaatgcgttatctgctggtgttggttatatcggaggatggagcactggcaaaaaaatgggtgaggacatgccgatcgaaaagctggaggacgaaagccaatctttgatccctaccggctcttgtggcgccttcgttaccgcactcgaagacgaatttatggcggttcgtcaggcagctgtttactcactgggaaaacttgctaggaaccgacctgtttttgcgagtgcgtgcatcgatcatttggccgatatgttcaacgatggaatccaac

SEQ ID NO: 47826 - DNA, 521 bp, Heterodera glycines
gtggggcattgaacctgtcggtggagtgatgacaaactgatactcgcaacactgtcattccgaccaaaaagtctcagatattttctaccgcggcggacaatcagccaactgtgactattcaggtcttcgaaggagaaaggccgatgacgaaagacaatcatttgttggggaaattcgacttgaccggcattcctcctgctccccgaggcgttcctcaaatcgaagtcacttttgagatcgatgtcaatggaattttgcacgtgactgccgaggacaaagggactggcaataagaacaaaattacgatcaccaatgatcacaaccgactgtcgccggaagagattgagcgaatgatcaacgacgcggaaaagttcgcagaggaggacaagaaaaccaaggaagtggtcgaagcgaggaacgagtttgagtcgtacgcctactcactgaagaaccagctcggagacagtgaaaagttgggaggaaaactcagtgcggaggacaaaacgaccatcgaaggagct

SEQ ID NO: 47827 - DNA, 666 bp, Heterodera glycines
tgttttggacagttgttggccgaagaccaaattgatgttggctcagtcattttacgacgcgtccgttgtgctttgtaaggctgccgaattatcctcaaaatttttcggcgattttgcgcctcagtcattcttgcctcatttcaattacggcaaagcactcattgaggttgcgcgtctcgaatcgctacctattaaaccaccgatggatgacattgacgagagcgatgaggaggacgaaggagaagaagaacagggcgaggaattgcaaagcaaaaatgggactgaaaaagaagtggtggaagaccagcagaagacggaagaaaagggaggcgagaaagggacggacgaatgtgcggaagagagagacggagagcagcaggacgaagcggagaaggccgacaacgaaatggcagaagtgacattgaaaacagacaatgaggaggaggaggccgatgaagacggaggagacgaggacgacggccaaatcgcgtgggaaagcctcgaagtggcgcgaaaaatttgcgaaaatcacatgaaaagcgacgaagcgaagttatggacggagcgaaaatcggatgtgctggtggctttgggcgattgtatgaccgtgacggagaactttccacttgcgttggaggaattcacgagcgcactggcgattcggaa

SEQ ID NO: 47828 - DNA, 646 bp, Heterodera glycines
atggagaagaagggcttaagggtggcggagaaggcggcggaatgcacaatccaatggacatattcgaaatgtttttcggcggtggtggttttcgtggcggtggtgaaaaaccgaccaaggtcagagatactgttcatcagcttaccgtttcgttagacaaactgtacaacggatgcaccaaacacttgcgcatcacaagggcatatcctttgtccgaaatgtaatggtgtcggcggcgctaaggaaggggtcaaacaatgcgaaaattgtcgtggacgcggactggagattcacaacatgcaaattggtccgggaatgattcagcgaattcaaagagcttgttctgaatgtggcggtgagggggaaataaatcgcaacccgtgcaaacactgtggcggcaaaaaacggatcaaatcagaagagacaatcgaagtgcatattgagaaagggatgcgcgacgggcagcgactgatgttctacggaaagggcgaccaacagccggggctggagcctggcaacgtgatcattgtgctggacgaggaggagcatcccgtgttcacgcgaagaggcaccaacctcaccctgaacatgaaactgacgttgacagaggcattgtgtggctgcactaaacatgtggtgacgttgg

SEQ ID NO: 47829 - DNA, 655 bp, Heterodera glycines
gagcagcgaaagccggacggcgccggcgatggtcgacgtggagacggggagagacataaatccgcacattcccgagttcatcgagaaaacgccctggtatgtgccatcttcaggacccacgctcaagcaccagcggccacatcctgaacgccaaaaacagatgtcatcggttgctgaatggtaccctaagggcactaccgaacgcgtggcattcaaataccgtgacggggcttgtcaaaattgcggtgctttgggacataacagaaaaaattgctttgagaagcctcgattagtcggtgctaaatttacgaactcaaacattgctccggatgaccatgttctgccatccctcgaaatgggatacgacgcgaaaagggaccgatggaacgggtacaacgcggaggattattcattggtggcagctgagttcgaaaaaatggaggaaacgcggaaattgatcagagcggaacagctcaaagaggccggtgaggaggacaaaaaggcggaggaggacgaggacatttacgcggaagacgcgtcggcccccggacagtccgttgacatggactcgcggacgcgaataacagtgcgaaacctgcgcattcgggaggacaccgccaaatatttgtacagtttggacccgaatggagcatat

SEQ ID NO: 47830 - DNA, 672 bp, Heterodera glycines
taaactgcccgaaacaccgagtctaattgacgctactcaacagagattctgccaaagcgccttcgaattgctcagcggatatttgaccaaattcgacttggtccccatcttcaccatcgaagagttcgaacatttcttcctgccccgcgatgatgtcatttacacttatgtgattcagaacaacggagaggtcaccgacttggtcagcttctacagccttccctccacagtgatgcaccattcccaccacaaaagcataaaggcggcttattctttctacaatgtcgccgggagtgttccgctcagccaccttttgaacgatgcgttgattttggcaagaaatgttcgtttttttctttttgtttccgttcgtttgggtatatccaaatttgtttcacaatcagcttggctttgacgtattcaatgctttggatttgatggaaaacaagggaattctggaggatctcaaatttggcatcggagatggcaatttgcaatattacctatacaattggaaatgccccgacattccttctgatcggattgggttggttcttcagtgatcggacaagtcgaatttaattaagcaacccggatgaattcgaacaattttttactagcagttttactcttcgaattgttgccattttaaaaaatattttatgctttaca

SEQ ID NO: 47831 - DNA, 532 bp, Heterodera glycines
gaatatttttgttttgctttgcttcctgaagagaatacgcaactgaagatgcaaattttcatcaaaaccttgaccggaaagaccattactttggaagtcgaggcgagtgacacaattgaaaatgtcaaagccaaaatccaggacaaggaaggaattcctccggaccagcaacgtttgattttcgctgggaaacaattggaggatggacgcactttggccgattacaacattcagaaagagtccacgctccatttggtgctccgtctgcgcggagggatcattgagccgtcgttgcgcatgttggcacaaaagtacaactgcgacaagcagatctgtcgcaaatgttacgctcgtctgccgccccgtgccaccaattgccgcaagaagaagtgtggacactccaacgacttgcgcatcaagaagaagctgaagtagaggaccaaatgtttgctggacgaatgggattattgttgatcgaattatttgattttgtttgatgtcgtgagaagacaattttatgtaaaaaaaaaaa

SEQ ID NO: 47832 - DNA, 700 bp, Heterodera glycines
ttatcggcccgaattggaggagacttatctccacaatgctttgtacttcagggcagattgggccaggcgatttcggagaggtggtcagtgtgcgttccaaagacgacggcaaattgtatgcggtgaaaagctctttggacatttatcggaacagcgctgatcggcgtgaaaagctgcaggaagtgcaaaagcacgaaatgctgccgccccatcccaacctcatccatttcgtgaaggcgtgggaagagcgcggccgactttacattcagacggaactctgctctcaaagcttggacgacatggcgagggagcgccacgaaataccggagccagaaatctggtattacctgatcgactcattgatggctctcgaacacatgcattcccacgacatcatccatgttgacatcaaaccgtcaaacatcttcgttacttcggatggcatttgcaaacttggagactttggattggttttcgatttaaacaaagacgaccctcgcaaagcttctgaaggggacagcaaatatttggcagcggaagttttgaatgacaaaccgacgaaggcagctgacatattcagccttgggatgactattctcgaacttgcgaccgatttggacctgccaaacaatggacttttttggcatgaaattcgcgatcgaatgattgatgagaaatacattggctttctttctcccga

SEQ ID NO: 47833 - DNA, 680 bp, Heterodera glycines
gattgtcctttcgtccctttcttttccttccgccctctttttggccacttcctccccactttttctgccttctcccccactttcttccgccaatgctctcatcgtccccaaaggaatttgttgcgcctgtgggagaggtgcatgcgtttgtggtcaaatgtatgcaaagtgtcggcacttcggcggcgcacgccgcgcaattggcggaccttttgttggatgccgacatcgttggccattacagtcatggccttaaccgcctttgcatttacattgaggacgtcgcctcgggcgtaaaaggcgacggtgaaccgaaggtgctcaagcagaagggtgccaccgcttgggtggacgggtgcgatttgcttggcgccgtcgtcggtaatttctgcacagaattggccataaagttggccaaagagcacggcatcggctgggtggtgtgcaagcggtcgaatcattacggcatttgccaacattatgccaaaaagatagcaaatgccggcttgttgggactgtcgttcaccaacacttcgcccatcattttccccactcgctcttcccaaattggccttggcaccaacccaatcagttgttgtgccaattcacgcgaaaaaggcgacggattcattttggacatggcggcgtcgacagttgcgcttgggaaggtcgaaatcgca

SEQ ID NO: 47834 - DNA, 713 bp, Heterodera glycines
caggccgtgctgtccctgtacgcctccggccgtaccccggtctcgtgttggactccggcgatggtgtcacccacaccgtgcccatctacgagggctacgccctgccccacgccatcctccgtttggacttggccggccgtgacctcactgactacctgatgaagatcctcactgagcgtggttactccttcgtgacccggccgagcgtgagatcgtccgtgacatcaaagagaagttgtgctacgtggcactcgacttcgagcaggaaatggccactgccgcctcctcctcctcgctggagaagagctacgaactgcccgacggccaagggatcaccgtcggcaacgagcgcttccgttgccccgaggcgctgttccagccgtccttcatcggcatggagtcggccggcacccacgagtccacctacaactcgatcatgaagtgcgacatcgacatccgtaaggacctgtacgccaacaatgtgctgtccggcggcaccaccatgtacccgggcattgctgaccgcatgcagaaggagatgaccgcgctggccccgtccaccatgaagatcaaaatcatcgctcccccggagcgcaagtactccgtctggatcggcggctccatcctcgcctccctgtccaccttccaacagatgtggatcagcaagcaggagtacgacgagtcgggcccgtccattgtccaccgcaagtgct

SEQ ID NO: 47835 - DNA, 278 bp, Heterodera glycines
cgttgctctgtgcccacctggcagaagctgaccaccaagaggtggaggagcaaattgtgaagttggcccgcaaagggttgcgtccgtctcaaattggcgtgattttgcgtgattctcatggcgttgcgcaagtgcgtcgtataaccggcaacaaaattgtgcgcattcttcgatcaaaggggatggcaccagaaattccggaggatctttaccatctgatcaagaaggcggttagcatccgcaagcatttggagcgtttccgcaaggacattgactca

SEQ ID NO: 47836 - DNA, 653 bp, Heterodera glycines
gtgaatatttgaccccgggagatggtgggctgcacttcctcaaaaaggagtgcataacggcagccattccttatttggaacacgttatttacgaatggagtgatgagagtccccactttcacggggaattgttggagcaatacgtgctcaggtgcaatacgttgctcgggcagttcctccattcgctctcctctccgtcgattggtgttccatcttttgtcgccgaagatgatgaattatctatattgagaaggaaattacaatattttttggcgaccgaccagcattattcgattgaaagtgcaagagatctaattggggaagaccaaaatttgatggaggagagagcgatcattatggggaaattaggacagcatttaaacgcattgaaaatttatacggaaattttgatggatttcaatggcgcagaaagacactgccaaacttattacgatgaaagaaatgcatcgactcgcaacattttcttcgaccttttccattattatataaaaggcgaaatgcctcaaaaagaggtaattcaagttgaaagtgattacgaaattcggcgcaaaccaaacatttcggaggcgctgaagttgttcaaaaggcatccgaccaaaatagacacagtgggcgcttttgctctcattccg

SEQ ID NO: 47837 - DNA, 519 bp, Heterodera glycines
taccctctcgcactaattatcttcgccgacccgggaactcagtctccaatgtcaatgagtcacgcaaatttgcttaccgcactccgattgtttcagcacttctatacggaggccgtgaaaattatcgtgatcagataacaaacttcggttgggtgtgcacatgcttatcgcaacaccaggtcgtctgatcgatgtcatccaaaatgggctgattggcatggaggcgtgccgctttttggtgttggacgaggcggacagaatgcttgacatgggctttgagccgcagattcgtcggattgtgcaaatgtccggcatgcctcaaaagggagagcgtattaccgcgatgttttctgcgacctttccaagagacattcaaattctcgcccaagacttcctcatgcctgaatatgtgtttttggctgtgggaagagttgggtccacctctgagaacatcggtcaaaaaggtgtttgggttgaagagcacaacaaacgccatttcctgatggatttgctggatgc

SEQ ID NO: 47838 - DNA, 633 bp, Heterodera glycines
gtcgagtttttgcttaagaggggttggccaagtgcgtcgactggtcaatggccgttgtgacgggcggcgccgaaaaactgagagaagccgaacgcatcgcaaaagaaaagcgactccgattatggaagtcgttcaccgggtcctcctcaaccgtaaaaaatgcatttactgccaaagtggttgaaattggtctggtcgattctctttctgtgcttaaagacaatggagaggagatgaaagtgtacttctcatctttgcgtgcaccgagacgcgaaggcaccgatggaacttctggcggcgttcagcgccaattcaggcctctctatgacattccgtttatgtttgaagcccgcgagtttcttcgtcgtcgtcttatcggcaaatcggtccaagtgattttcgactacgtacagccaaagcaggaccaattcccggagaaaacgtgctgtacagtgatgttcaacaaccaaaacgtggccgtcatgctcattgagcgaggctttgcacgagcagtgcgtcacggccgtgacgacgacaatcgatcgccacaatacgacgcattgttcgccgcggaggcacaggcagagaaagacaaaaaaggaatttgggctgaaaagtgcacagaaaaaaaaa

SEQ ID NO: 47839 - DNA, 695 bp, Heterodera glycines
ttctattgcgctattcttcttctgcaacacattaaacaacgacgcatgccggaggaactggtggcgctcagtcccggaacgcgtgtctccggccgctggaccatcatcaagaagcttggggcgggtgcgtttggagccgtctacttgtgtcaagaccgagatggaaggacaatggcagcactgaaaaccgaacctttcgacgctcagcgaccactgctgtatatggaggcccacgtgttgctcagcctgaacgaacttcgatcaaacagtggacgccatttttgccgttgtctggaccttggacgcgatgaacaaccggatgccgattctggacagacgatggagttcaactacgttgtcatgtcgttggttggccgtccaatggacaaactccttcacgaatccggtgaccgcttcagccccggaactgcgatcggcacttcaattcaacttctcaaagcgcttaaggcgttgcacagcgttggatacctccatcgtgacattaaaccagcaaactcggccatcggcacgcctgagacgaacgaacagcgccttctctacctcctcgactttggaatggcgcgcaaatatgtcagagaggacggcacacaccggcgccaaagggacaccgcccgcttcagagggacgccaatctacgcaccaatctctgcgcacatcaaacgcgactacagccg

SEQ ID NO: 47840 - DNA, 673 bp, Heterodera glycines
tgattgcgattggcaggccttagtggtttgggagcaggttcattgaacgcaacaccacacgattcgaaccaagttgacacttcggaaactgtttacatcagttcattggctttattaaaaatgctaaaacatggacgagctggcgtcccgatggaggttatgggtttaatgctaggtgaatttgttgatgattatacggttaacgtgattgatgtctttgcaatgccgcagtctgggacgggagtttctgttgaggccgtcgatccagtctttcaggctaaaatgttggatatgcttaaacaaactggaaggcctgagatggttgttggttggtaccattctcacccgggatttggttgttggctttctggggtcgatataaacactcagcagagttttgaggcgttgtctgacagagcagttgctgttgtagttgacccaattcaatctgtgaagggaaaggttgtcatcgatgcttttcgcacaattaacccacaggcaattgcactaaaccaagaacctcgtcagacaacgagcaacatcggccatttgcaaaagccttcaattcaagcccttatccacgggctaaatcgccattattattccattccaattgcttatcgtacaaacgagaatgagcaacagatgttgcttaacctcaacaaacaaagtt

SEQ ID NO: 47841 - DNA, 679 bp, Heterodera glycines
taaaatggccctttatccgctttaatgagactaaaacaaatcgtggaagaagtttgatttcatgtcacaactttgattactgctttgaacgagatgcgcgaatcgcggagggctttgagtattggagatgcccaaggcgtcctccatattgcccaggaagagcaacagtcccaagtgcttggcaaattgatcccgacggcaaccgcttcaaaatggggcgagtgacagcaccccataatcatccacctatttttggccaacacaatataagggaggcgaatgaacgagttcgtgaagaagcgcgcagcgactttcctacgactagccgtaacattgtacgtgatgttcgatcagaaatgggaagaacaacaggcagaccaaacaacttctacacaataccaaagaaacgatatgattggcagagaaattggcgaggttttggccagagcacctctcgtcaccggggcatgccgaaaatgtggatttgttggccatttgccttttcaatgtcgaaattttattcaattgaaacccaatcaaaaattggacatcgacgtttcttcaacaagttcggaagaatatacgactccactgacagaccgcgaaggcaaaaaagccgcgaagaaaattaaaaaaagggagaaaaaggaactgaagaaattggaaaaactgaagaaga

SEQ ID NO: 47842 - DNA, 588 bp, Heterodera glycines
  unsure (1)..(588): unsure at all n locations
gagtggacaggaagtgattgttgaggtggcagtttcttcggaagacattggctccactggaactgaaagttatgatgacaattcgaaggccgcgtatgaaacatttgtgaaagacctcaaggagcgaactgagggttttgtggactgtcgctacgcagtgttcgacttcaaattccagacacagcgccccggcgcaggcacttccaagatggataagattgtcttcattcagctttgcccggacggtgcgtcaatcaaaaagaaaatgctttatgcttcatctgcgtcggccatcaaggcgtctctcggaaccgctaaaattctgcaatttcaggtgtctgatgagtcggaaattgcccacaaggaattgctgagcaagctgaacgacaaataccgcgacaattgaatgattggttgggatatgatgtcctgcacattcctctcaatttttgtcatttatacccaaatttaatgacgcttttatgttaaaatcaaatcatgtcacttgatcgccacaatatgtttattttaatatcgggtggataaataagacagtaattcnnaanaaaaaaaaaaaaaaaaaaaaaa

SEQ ID NO: 47843 - DNA, 717 bp, Heterodera glycines
gacgaaagctgaagaaagaggtgaaagagaaggaggagtcgtaccaggcgaggctgaagaagtgggaggagagggagaagagaatggccaaattatacgacaaagagagagaggaggaaaaacagaggcagaaaacgctgcaaaaggaggcgaagaaactgcgacagtttctggaggattacgtggacgaacgggacgacccgaagtattacaggggctcagcactgttccaaagaaaacgaaattacgaacgcgaaagggaggcggacgcaaaggaccgacacgaagaaagggcagaactggaggagataagaaggtccattttggaagaggaagtggtcagcaaaaaggaaggggacggcgaagaagcagacgaaagtggggacacttctggcagaatggacattgccgacgaacaaaaggcggaatgggaaaccgttggcgagacggcggcgatggtttctgggcctgttcctcctcctccccttcccagcgaggaaccgaccccagcccaagttgaaagtccgacgccagtgaagaaaaccatcgtgacgacgttacaacagaagcaagtggtgccgctgtcgaaactcaacggagtgttccaagaggaagaggaggatgaagtcgatacgttgcatcagatcgagaaaaagataaagcccttcgaaataacgcgagaggatcgattacaatcgatgacaccggaagaacgga

SEQ ID NO: 47844 - DNA, 673 bp, Heterodera glycines
cagaaattcgaatggtatcgacgacgtacagcgactcactgaagacgccgacgcggcacaaaacggacaattgccgtccaacaaaaacagaaagtacagctggatgagcttttcgtccgtttctgcttcggtgtctcccgactcgaatccctgcggtttgacgcgttttcaacgaatcgctgcgtttttcctttgcatttttgctgctggcttttgcttcacaacggctatgatgctcatccccgtcctcgtcctccaaacgcgcaaattcgctgctctgaataccctcggatctgtctttttcattgtcagttttggctttctgtggggccctttggcgtattgtcaatttctgttctccgagccccgtcgcgtggtcaccgccgtttatttgctcagtgttttggccactctttacacttctctgtggcttcaaagttcccttctcaccgtaatcactgccgcccttcaaacttttggcctcatttggtttcttctttcctatgtcccgggtggggaaaacggcctcaaatggatgggccgaatggcaaaaatggcgttttgtgcgcgtcagtcgtccactttggttttgcccatttgacgccagccgatgcgactgaatattaatttacctatttttgtttctcttttctgtttcctctttctttcattt

SEQ ID NO: 47845 - DNA, 712 bp, Heterodera glycines
gagtgcttcgtctgtttattacttcttcctgcccgtacttttttagggtttaattgtgtgattggtttaagtaaatttctcctcgtccgtcatgttttatcacgacttgcacgacaacgaaaatagccatgataaagagttaaaacagttggtacaaatggacgaccttgcaattcccaaatttgtaatgcctccgctcggcattaagccaaaaaaatttgtgcgcaaacattttgggccgaacagtcggcttccaatggcgcagtttctgaagggcactaccacactgtcctttgtgtacaagccgaagacaccgcaagacaaaggcggcgttattgtggcggtcgattcgcgtgcaacgggcggaacttacatcagctccaaaacggtagagaaaatcattccgatcaacgaccaattggtcgcgacgatggcaggcggtgcagcggactgtcagtattggacgcgggtggtgagcaaatattgcaatcttttcgaacttcgcgagggtacgcaaatttcggtggctgcggccagtaaatattttgccaatgttatgtacgactatcgtggccaagagctgggtgttcactcgatggtttgcggggttgacaagttcggcccttccatttacatggtcgaagctgaagggactcgcgtgaagattgacaccatttgttcactcggttcgggcatgttgcacgccatgtcc

SEQ ID NO: 47846 - DNA, 736 bp, Heterodera glycines
tgggaagactcgcgtcgacgtcgaacagaaacacgcgttgagttgcgcaagaagaagtgcaatgaggagatgatgaaacggcggaacatcaacttggagtgtgcggacgactctgccacatccgccgaagaactcgtaaccgacggggaaattggcgaaccgacgggccgtttgtcgcccgaaatgctatcgttggaagacgcagttgaagttttgcaaaaagagcaaaatgcggagagattccgattggcttttgagtcggtcaggcgcgttttgagtcgcagcaaatgccctccaattgacaaagtgatcactcttggctttccttgtgctctcgtccaggcgctccattatgacgatgacaaagtgaagtttgaggcagcttggtgcatcaccaacatcgtttctgggacttcggaacagaccatgaccatggtcaacgcgggtgcggttggtccgctgcttaaactgtgctcctctccttcgctcaaattgagtgaacaggctgtttggtgcattgccaatatggccggagatggcgttcaacttcgcgacctgctgatttccgagggtattctgccgttgcttgtcgggttggctgactgcgcggatactttgggcatttcgttcgtgcgcattctcacctgggccttctccaacttgtgccgccacaagaagccgcaagtgccattgcaaatgttagccgtaatggcaccgtcaatttccaaactgatca

SEQ ID NO: 47847 - DNA, 579 bp, Heterodera glycines
gttctaagctttctcttgccgaagatatggcattctggtcaacgaacagatgaggacaaatattgaagacgttttcgccgcgggcgatgtttgcacagcgaattggacagcaaaaagtccccattggaagcagatccgactctggacacaagcgcgacagatgggcttgttctgtgcccgatgtatgctcattgacaacgttttgctcgacatcgctttcgaacttttcacccacgtcacttctttttttggcttcaaagtgattttgcttggcgatttttcgggcgaacgattggaaaaaccctttgagaagaattatcggatcactgaaggctgcgaatatgtgaaggttctgacaaaggatcaccgtgtgcacggggcggtgttggtcggcgagactgacttggagggagcggttgaaaatctgattctgaaccaaaccgacattggtcaaattgagcaagtatttctagatcctgatttcgatcttgaagatttttttgattaatcccaattattttgcatttaatataccaaaactatatgataaattcaaaaaaaaaaaaaaaaaaaaaaaaa

SEQ ID NO: 47848 - DNA, 702 bp, Heterodera glycines
taatcctccatccgcccgtctccattcatttccaaattattcaaatcctacaataacaatacataaaaaatggagcattttccttctaaatttgttctctgcttgctcattgcattcatcgccgttccatgctctgttttggctctttctgctggcagccgcgtgtcgatgctcgcgtgccacaacaattaccgctcacaactggccaaaggcactgcggacaacaaatcgggcaaaatgccggctggcagcaatttgatccaacaaaaatatgattcgaatattgagtcggtggcgcagaagtgggccaacggatgctcaatgtcccactcgggttcatcagggatgggcgagaatttgtacatgactagttcatcgacaatttcggaagctgatgcgctgaaacaagcttgtgacatgtggtgggcggagttgaagcagttcggctttcagtcaagtcttgtgctggacatggctcagttcaacaagggcatcggacattggagccagcaagcatgggcctccactgctcaaattggctgtgccatggcacgttgtccgtcctccacctggaagacatgggttgtgtgcaactacaaggaggctggcaacttcttgaaccagccggtctacaaaaaaggtgccgcgtgcagcaagtgttcggattacaatggggcgacctgtgacagcgccagcggactg

SEQ ID NO: 47849 - DNA, 665 bp, Heterodera glycines
catcgtctgcaactttaatcccacgcagcgacgtgcccggcgcaacaatggcaagagaggactacggcttcgatgcaacggcggcggcagcggcggagcagtctcggccttcggcaaccacttcaacgccatattggcagcacgactccttggacatcgcccttaagccatcatccggaaggtcaggcaatcgcctgtccaccgcttcacggatgagatcaccgacgaggaactccaacaactctgcatggcggcaacggacgtcttcagaatgcagccgacgctcgtcaggattcagccgccggtcgtcgtcgtgggcgacatccatggacaattcacggacctgcagaggatcttcgacacgcatggctaccctccagagcagcagtacgtcttcctgggcgactacgtcgaccgaggcccccagtcactggaaacaattgttcttctcttctgctacaaggtcaaatacccggcgaacttcatgctgctgcgcgggaaccacgagtgcgccaacatcaacagagtgtatggcttcttcgatgagttcatcaaccgctacaagcgtccggatccctgccgcctctacgacctcttcaatcagacgttcgcctggatgccctacgtcggcctgatcggcgacaaaatcctgtgtatgcacggcg

SEQ ID NO: 47850 - DNA, 664 bp, Heterodera glycines
catcaaagacagcgcggcggtgcggccacaaaaaggacccgtccgacccgacgcaggcgctgtttctgctggctgagaatctggctgaacttatcgactcggtctgcaaaagtgaggacaaagaaaaactgttgcccgcactgcaagcagtttggaacaacacattgccctatttgaaagcgaaaagtgctaagaatgtgcgctttttcttggccagttcacaatttctcgcttcgatgagttcctacaattacatgcgttcggtgtggaagaaaaatgcgatggatttgctgtgggacaattcattcttcaaaatggacatccacgcgttgcgccaatggctgatcgtaatcgacaatttgatgaccaacgacaaaacatcgttcaaggaattgcttacgcggatcaccacctccacgtcgaccactctgtcaacactgatcaccagcaaggagcaggagtacgagatgcgtgcccagtacctgaagcggctggcgttcgtcattctcagctcggagctggaccaatatgcgggccaattaaacgaaatccaagaacggctgacagaaaatttacgtctttgccaagtgccggtgatccacacgcaggtgttcacgtgctaccgcgtgctgttggtccgcatgagtcccagttcatttgtgtc

SEQ ID NO: 47851 - DNA, 556 bp, Heterodera glycines
atactccctttttcccaaatcttacaaatgaacatgaatcaacttttggttggccgttcgctgttcccaaaaatcatccgccctttctcgcacaccaaaccccttgccaagtctgaggctgacccggatgattacggctacttcccggacccaattgaacactcatggggtttggagaggaaaatgctcatcgctcgtctgaagggtgacgaccgctatgagccgaaggtgtatttccgcgctgaacataccacccgggactatccgaatttggtgccggtccatttgcaggacaaagtcgtcgggtgcctttgcgagccggacgcggagtacgtgaactattggcatattaggaaaggccagatgaagcgatgcgagtgcggacattggtttaagggcgtgcaagccgaccctgacagtttcgcctgaatgcgatggatacgaattggctttgaagtgataggagatcatataaaatgatcagttattttaattgtatttctaagttggttggataaatgtaaagcatagattaaaaaaaaaaaaaaaaaaaaaa

SEQ ID NO: 47852 - DNA, 580 bp, Heterodera glycines
tgggtaggaaacgcgcactgttgacagtttcctgctgtgtgccatgatatcgaatgaaagggaacatttgtcgtctgaggctctcgaagctgctcgaatttgtgcgaacaaatacatggtgaagaattgcgggaaggacggctttacatgcgcgtccgaatccacccgttccatgtgattcgcatcaacaaaatgttgtcctgcgctggtgctgaccgtcttcagacgggaatgcgcggcgcctttgggaaaccccaagggttggtggcgcgtgtcggcatcggtgatatgctgatgtcggttcgtgtccgtgaccagcatcaagcccacgctcttgaagcattccgtcgagcaaagttcaaattccccggccgtcaatacatcgtcatttcgcgcaaatggggcttcaccccttttgaccgcgaagtttacgagaagcaccgcaaggaagggcgagtcattccggacggagtcaactgccgattcctcaagcaacacggaccattgacggaatggctcaaaaatccaatctgatcaattgtacgacggatatattcccttttatatgctttgttgatta

SEQ ID NO: 47853 - DNA, 698 bp, Heterodera glycines
ttaaatctactgctatttcgatgttctttgaactcgaacgcaaagacttggagttcgtcaaaggcgaaagccaagcagacattgagcaggtcgacgggaagagccaaagtacaacggtttcttgatcaatctgatcgactcgcctggccacgtggacttctccagcgaagttactgctgcgttgcgcgtactgacggtgctttggtggtggtcgactgtgtgtcaggtgtttgcgtgcaaactgagacggtgttgcgtcaagcaattgccgagcgtatcaaaccggtgttgttcatgaacaagatggaccgtgcgctgctcgaacttcagcttggccaggaggaattgttccagacattccagcgcattgtggagaacatcaacgtgatcattgccacttacggagatgatgatggaccgatgggtccgatccaagtggacccgtccattggcaatgtcggctttggctctggacttcatggttgggctttcacattgaagcagtttgcggagatgtacgctgacaagtttggagtccagattgacaaattgatgaaaaatctgtggggcgatcgcttcttcaacatgaagaccaagaaatggaccaacaaccaagagcccgagaccaagcgaggtttctgccaatttgtgttggacccgatcttcaaagtgttcgacgctgtgatgaacatcaaaaa

SEQ ID NO: 47854 - DNA, 666 bp, Heterodera glycines
acctttaatttgtctttctatgcctcttcattggacttctgtggacactcgcaacgcacttttgtgcgccgccgttccttccattggcgccttcgtgggctcgacgatggccatcaaagatcaggaattggttcaatttctcaagaatcaaaactttccttctttcgcccgttgttgcaaatacaattatttgctggccaacacttccgtcaccattccgttcggttacgcttcttatttggtctacaaaattggaggaggtgtcagttgcaccgactcaaaaatcgcattgggactgtacggtgcgacgctgctcagcggctgttttttggtgccaacgctcaaaaaacatgataccaaggcgctgactgccaacgctgttgtccttgccggaccttccgtcgccacttctgtggctttctacaacatcgacaagatttccgcttattggaccatgcccttcactcttttggccattttatacgctggacttacggtgaaggcgaattgctggaactcaaagcttacaacctatgaggcgagttctggtggaaaaaatgagaataagaaagcggactcctgctctgattagatacgatgatgatcaatatctctttttgatcgtttatttttgttaaatcatcgcttgtttgattgggaataaat

SEQ ID NO: 47855 - DNA, 627 bp, Heterodera glycines
ccacggaaatgatccattgcgttgtttgggccagagtttgttcaataactttttggcgagagtgaccctgatgacgatgtttctcctgagacggtcacttccgatggaatgggcgaccaaaaaaactcacaaacaatggataatgatgggacgaccaccaatggaagtgttatttttgctgacaatgggaatagtagtgctaatgatgcgattacaaaaaatggaaaaatgagcacacggcaatttgcggaagcgacggattacggaccaaaacaaatttttgagaagttgttctttgatgacattaattatttgctttcgatggccgatctttggaaggagcggaagaaaccaacgccaattcactttatgcaagttattgacgaaggacttggtgggagtcggccgaatgaggacgagaacgagcattggggcgtatcgaaatgggctgaactgtttgaggactctctctttgcgcttgcggaaagataccgaggagctgtcaaggaaaagcgaatgctcatctgggacaaggacgacgagccggcaatgcaatttgttgcggcctgtgccaatctacgggcttacatttttggaatcggcacaaaaccattgtttgacctgaaa

SEQ ID NO: 47856 - DNA, 700 bp, Heterodera glycines
taatgaggacgcgccggtctgcgaccctggcttggtcacatctggcacgttttggtctcgacatcaaaaaattccgcaagaccgaaaaaacgactttggaaatagaacttgatgcgaatttaaagcacgaattctcggcaattcaagaagaaggattggagttggtcaatgtgagtgggcctggctacactgggctgataacctcggctcttcttgttacatcaattcggctctccaagttctgcttattgtccctgactttgtccgtgcgtttactgaagaactgttgctaagaaaacaaccacccgaaataaatgaggatttcgccgctcaattggctaaaatcttcgtcgcgatgaaatcgggggattattcgcgagaagacaacaaacatggtgccgaaaaggagaagggcattcgaccgacgacattccgtcggattgtgggccgaaaccaccccgaattttcaactgcaaaacagcaagatgtggaggaatatgttcgctttctgtttgagaaggtcgacgcgtgctccgacctctcctcggaaaatcccgtcgctgcgttccgatttcgtctggtcactcgtttcctggacgaactttcagattgcgttcgctattctttccgtactgacaacattttatcggttgcaattccaatggacttgtgcaaggagtctgacactgttgtgaatggg

SEQ ID NO: 47857 - DNA, 482 bp, Heterodera glycines
aaggcaacggcgccttccagaagggcatgccgtttataggcgtaccacggcaagaccgggcgcgtgttcaatgtgaccaaacatgcgctgggcgtcgtcgtaacaagcgtgtcttctatcgcatcatcccgaaacgcatcaatgtccgtgttgagcatgtaatccttccggctcccggctcttttttctgcagcgatgcaaagcgaatgacttgcagaagaagcagcacaaggagggcaacgcaccgtttgtggcgctgaagcggaagccgaaggagccccggggggcgcacttggtcaaagtgaagagcaccaaagttgagcggctggctcccgtcaaattcgaaattgtcgcttgaggcattatgggggcaaacgaatgcacgagcacagaaaaccaaccaacaattgttatttttaatttgttgatccgtttcgtgttaaagaaaaagttttggaaaaaaaaaaaaaaaaaaaaaaaaa

SEQ ID NO: 47858 - DNA, 752 bp, Heterodera glycines
ggagcttgagcgaggaggaacggtcaagactgctcactgaaattgcaatgcaagaatcgcgcgtttccgaaatgcgattcgaagttaagaacaaaacggatgagatgaacaaactgaaggcggaggttgaaagtgggaagacaactgcacacatttacaacccgggcaatggtcatttgccgaccgaattcaatgacccggacgatctgacaaacgcccacattgaattgagtacattccacgagggagacgtcaacaatgtgatgccacagcgtgaattggatcggaccaacttcactgatcaggacatgtcgttgaagaacaaactcgagttgcttacaaaggagttggacaatgcgcgagacgagcgggcgatcactgactttgatgtgctgcacatggaaaacaagaaacaaggccgtgacagatataagactttgcgtcaaattcgcagcggcaacacaaagcggagaattgaccaatacgaaaatatgtaatgctcaaaacatttggagtttgctggatggacacaattaaaaacaaaaaagacttccatatcatttgtttaacattaagacggagaatggacgaaaatatttaaattcaaatttatttttaaaattatttccaatgggaggaaaccgatttttgtttgcccatttttgcctaatttcttctcatttttgtccaaattcttcagaccagttatatcatccatccatcgtcaatttcatttaatgactattatttat

SEQ ID NO: 47859 - DNA, 723 bp, Heterodera glycines
atcgcgttggccgcagtgcgcaatgatgccgagctgaaattgttggccgagtacgcggttgactacgcgcattcaattggcctcgttggacgcagtggggatgacaagtacaaacactccaacgatgtgtcagtggcgcctccaatcgccctgttgccgtcgccgttcccccgcgagttgtacgagcaggccactgacgcgcaacagtcgctgaacgaactgtacttccgcatcgcatgcgaccacgacttcctgatggaggcgtacaaggacgtgatcaagggcgacccgttccatgccaaactgattgagttggccaaagtcatccaaaaggagggcatccgacagccgctgatggttggactgcaacgagctgattatttatcccactggaatgaagcagcgcaaaaaatggagcttaaacaagtcgaagtgaacccgggccaaattggcggccccggggcggctactgccgtttcaaagtgccaccgtaaaatgctggacaaggtggagattatgcacggcaaaaaattgccaattatggcgaaggcagttgtgccagaaaatcgcccggggccaggaattgcgcggaccctttaccaagcctggaaaatgttcggcgacccaaacgcaatcattttgtatgtcaatcaacccgacctgttcccggtgtgccactttgagcagctccaatttgtgatgttccaagtggaaaagctggct

SEQ ID NO: 47860 - DNA, 658 bp, Heterodera glycines
  unsure (1)..(658): unsure at all n locations
atattcccacaaataaacaaaaacataaaaatgaatggccttcgtccgtccaaaacatttctgattttattgtcaatttcaatttgctggcaactgagtgttgtgagttcaagcccaacaacccatgacattgcccaatcagctgaagttcaaagcgagtctgaagaacaacttccactactttcaccagcaacgccaagtgaacaacaacaacaaagtgccgacactctggccaccacatattgcgtggaaaatgttgagaaggacgaagtgcttttgaagcaatacgttcgggacgcaaaagactgggcattggcccacggattggttttgccagcacttccatttcgatgcaaaaacgaagaatgcaaagaagccaacaaagcattgaacattgtccctgcggacgttgtgaaaattgcgccatttactcttttcccgtcgcccttcccacgcgaactttttgtccaagcgcagaaagtgcacaaagccatccaattaatgtattttcgcgccgcgtcgaactttgaatttttgaaaggtgtgcacaagggactgctgaaaacagaccaaaatttcatagaaacttttaaaagcattgaaagcangacacttggaaggcattaagcaaccgctgactttgttctgcacagagcag

SEQ ID NO: 47861 - DNA, 676 bp, Heterodera glycines
cctccgctcgtttccatggccttctccccgcgatcaattggacactattctgaccgttctcgatgatgcaactgctgacaatcgattggcacttcacactttgttggcaaagtccaatttggcagattccaactgtgtatcccaatgtcttaaaaaattgctgcattctctgcgtcgttttcccatggacaaattttctatttttggttgtctcagtggtatcgggcagaaccattcttcattagttcagcctttggtgaatgattggttggatgttcatcccatttttgacacccctgaacaaagtatcgacgatgacttttatttggcccgactcatcctcgtccttaacgctgcatcccatcggtcagtgctctgttcgcttattccctcttatgcactgaaacattaccgttatttgcgtcgttcttggcctgagattgttcccaaaattctcgaatttgatcatgaaaagttacaccaatgcgattcctcaccgtttttatgcccttttttggctgttgggccggaggataaaacaattgagaaggaaaatgatgctaaaactgctagagtactcgagcctagcagagaatttagaaacaatgaaaccattcgattcgttgctggtttaccaacggggatatttatccgaattttgctttgcaatgtaacg

SEQ ID NO: 47862 - DNA, 714 bp, Heterodera glycines
  unsure (1)..(714): unsure at all n locations
tggaatttctgcgcacagtcgacggacgtcgtgttggacacgatttggtgccgagccaattgtgcgagttcgaggcgtacaattgcttactaaaacagaaactgctgcctgccctgaaccatttattttgggtcgacaaatgcaattacggcacaattgtgcaccctctctatgcccaacaggtncaccttcccatacaacatttattacatggaaaggagacggagacgaatggacacaacagtcagagcgatcaggaagaaccaacaacagctaacttcggatgcaattcaggcactgaatttactttcggcaaagttgtcagacaacaaatatttctgtggcgacaagccatgctctatcgatgcgctcgtcttcggctgtttggctccgctgctgcgcacccctttgcccaatgatcggcttcagcttcacctttcggccaccccaaacctcgtccgattcgtcgattccattttgagtatttatttgccactgcccgaaaaagtgatcaaggaacaggcgatggcgagaaaaaagtggcaaaaactgaaaatggacgcccaacagacaatggaagagggccgaattgagagggaactgcgcaaggcggagaagaaggagcgcaactccatgcaccacattctgttcttcgccatcagttcaattaccatctcacttctgttcgcccttcacacgggcattatcgtagtg

SEQ ID NO: 47863 - DNA, 678 bp, Heterodera glycines
cgcgttctgttttacttacgcagcaaaattctctgctgttgcatcatcgcccaataaaaatttgaatgctgtgcttatcgatgctgtacgtactccctttctccatcgaatcaactttccgtgagctgttggctgttgatcttcaaagacacgctcttaaagcattggttgagcgaacaaaaataccttttgatgaaattggacacattatctgtggacaagtcgttcaggaatgcaaaacgagcaatatcgcccgtgaggctgcgatcaccgccggtttccctgattcgatcccttgcaatacggtcactctcgcgtgtatttcttccggcgtttcaattcaaaatattagcctaatgatttccactggctatttaaaggcgggcatcgctggaggagtcgagttactctctgactttccaattcgttacaacagaaaggttcgactttctctcatcgatttgcagaaggccaaaagttttggagagagatttaagcacctgaaaacagtcgcctccaattggttctctcctgagttgccggccgtaagcgaattcacaaccggcgaagtgatgggcaattacggggaccgattggctgccgctttttgtgtgtccagacgagagcatgatgagttcgcaattcgatcccatactttagccgacaaagcttttagag

SEQ ID NO: 47864 - DNA, 688 bp, Heterodera glycines
ttgcttatctaatggaagtgagagacgcgtaccattttaaaaatgccagtgccattgtttacgaatatttcccaaaagggacacttttggatcttaccaatgtctacaaaaagaacggaacggtggtgggcggtcttcttgccacttttttcggcattcatttggcacgtgcgctgcgccaagtccacgagacggccaacataattcacgcggatgtcaagccggacaacgtcatgctgttgacggctgccttgaatgcacatgattcgctggacaatttgctcaaaacccccgtgctgaagctaatcgactgggggcgatccatcgacatgaaccatttccaaggagtcgaatttcacggaaaagcgggcaccgaaaatttcgattgtgtcgaaatgaagacgggcatgccatggactttccagactgatttctacggtttctgtgccacaatgtacgtgatgatgaatggcgaatatctggtgaccttcaaatactcacaaacggacaaagttgttcccgtgaagcagctgaagaggcgcatggctctgtacgacgtgtggacgcagttgttcgaccagttcctgaacattcccaactgcaaacagctgccaaaatggttaaatacattggaccaaatggaaagccgactggccgaggctgtgaaaacggagcctttggagtggaa

SEQ ID NO: 47865 - DNA, 445 bp, Heterodera glycines
  unsure (1)..(445): unsure at all n locations
ggacagcaaaagattggaaatggcacggaaagggctgaacgttcacatggttttcctcccccaatttcgccccaatgtttggcattatcgccggcctttccgttgttcttatcattgccattgttttcattgtcgtcggattgctcagcatggaacccgcgaaggattcgattatctatcggatgacaacaactcgcctaaagaaggactgattgtgagcaaagtgtgggagagagtgccgtgccgaaaaggaaaagtccgtcccccattaaatgatttgtttcatttgatagtgaatggtcacccaccctttgtcggtgttgcaatccgcaacgaatcatcaaaacatttaattttatagaatgtctatttcttcccattcattgtaatcatgtagagaataaattttttattttcagaanaaaaaaaaaaaaaaaaaaaaaaa

SEQ ID NO: 47866 - DNA, 649 bp, Heterodera glycines
gaagataacgatacggaaagtatttgcggtgaaattgtggctcaagaaagtggcgaaaacactgcaaatcaacagaatcagactcaacagaatacaaccttcgaggaattgggggtcaatgatgaactttgcaatgcatgtgagagcctcggatggactaagccaatgcctattcagcaaaaagtgatccctttggctctaaaaggccgcgacataattggattagcagaaacaggttcggggaagactggtgcgttcgctctgccaattcttcaagctttgatggattctccgcagcatctttttgcacttatattggctccaaccagagaactcgcttttcaaattagtgaacaatttgaagcccttggggccacaattggacttaatgtttgtataattgttggcggcatcgatatgacatcacagacactttctttggcaaaacgtcctcacattatcgttgcaactcccggccgtctcgtcgatcatttggaaaataccaaagggttcgacctgcgcactgtcaaatttcttgtattggatgaagctgatcgaatcttaaacatggattttgaagtggaacttgacaaaattttgaaagtattgccaaaggctcgtaaaacttatcttttctcggcgacaatga

SEQ ID NO: 47867 - DNA, 660 bp, Heterodera glycines
  unsure (1)..(660): unsure at all n locations
gacctgcagttttagcangaatggggcattttaactggcttcgaaagtatgcactttgccacggctttcttccgctcgctctatgacttggtggtggggcccggagaaaaacaatgggcgcgaagttgttggccccactttccacggggatgaattttaccaagatcgtcttgaccgttggtacccgtccattcgatttcgcaaaaatgacgaagtgatcacgcccattcgccacaaggaattgggagattggaagaagttgagcattgaggagaagaagcttatctaccgctactccttccgtcaaactttggccgagtttgaggcattgacgccttatggctatctcacagtcactttgttcttttctatgcttgggcttactattctgtacgcttcgtttgttaggacttacgtgacaaaattcaatgaccgattgcctgacactttcgatgatgaatataaagaaagtcaggccgagcgccgtgtggtactggaaaggggcaatccttatggaccggcctactactacgattacgagaaaaatcgttggaaggactgaagtggacggaaaagtcctactcgaaattcgttggagtgttttttaattttagggggatttttaatggacatttcaaatttgcacattttttcgtaaat

SEQ ID NO: 47868 - DNA, 714 bp, Heterodera glycines
ccaatgactttgactcgtccgcaaaatcccaccgacgaattgagtccttatgggcccgaattggagccgggaaaagcaccggaagtaattgcccgcacagtcgcgtcaatgcctcccgaaaaaatgttcgaattgatgcgatccatgaaggaaacggtgaacaacaatccgcaaatggcgcgccaacttttgatggaaaatccgcagctgtcgtatgcattgctgcaggctcaagttgtgatgcgagtggtggacccgaagattgcctaccaaatgcttcatcgtgaacatgctcagccgcttgtaccgccgacttccatccccactcatatccctcaacaatttgctggcaaaccccctcaattgcctccccaattcaacatacctccgccctccgtcccctctcatcagtttcaaatgcaacctcctcccttggtgccaggccaatttcaccacggatttccatccatgggcatggctccgccttcgctactgcaacagcagcagcaacagacgccttttacacaacaaaagccgacacccatcgctcctttggcagtgcctccggcagcgaccgctccgcaacagcagcaggctgttactccacctccgcttagccaacaagcacagcaaagcaacagcgacaatttggacgatgagcagcatgcgcaaatgcttatccgcgtgctgcaactcaccgatgagcaaattcgt

SEQ ID NO: 47869 - DNA, 569 bp, Heterodera glycines
tatttcgttgctctgatcaagttaactgtcttctactgctgtacaacaaaatgccccgtcatcgtgcaaagcctcgttcttttcatgccggattgaaattccccgtcggtcgtgtccatcgcaagatgaagaagggtccgtatgccaaacgtctcgcgaacggagtgccggtctacatgactgctgtgctggaacacatcacgggcgagctgctcaagaaaattggcgagatcacgcaggccgaaggcatgaagcgtctcagtgcatttcacatccgaactgcagcgcgcgatgacgacgagttgaggaagctgttctctggcgtctctcttgccgaggtgtgcgtgctgccggagctcgaatcggatgtggagcaatcatcggaaggaagtggcgagtccgactccgatgaagaaagtacggaagggagcgcgagcggaagtcaggagggtggcggtgctgctgctgcgcagcaatgagaggaggattgaattctcgagaccgccgtgataacattgactgccaatttaaaagaggatagattgtgtctctgtctgtgatatatacat

SEQ ID NO: 47870 - DNA, 612 bp, Heterodera glycines
cccaaaaactgataaaaaaaaatggcgttcctctcccgtctctccatccttccaaattcgccaatttcgctgcttgcagtttctttggccgttttggctttcgtcgctttggcatcggccaatccgccgacggcacgcgaaacggcgccaaatgcacagcaaaacaatgccaattcagtggcaactggggaaattgcgaaaaatattgcggaaaagatggagcggatgaatgagttcattaaggcgaagaagttcatcgatgcacataatttggcatttgagaagggcgaagtgtcgttcaaagttgcgccaaaccatctgatgcattttacacctgcccaatataatcgaattcgcggcttgcaaatgcgcagcaaccgacaacggcacaacatggcaactctggcgggaaacagcagtactttgccggaaaagttggactggcgcgagaaaggggcggtgaccggggtcaaagatcagggggactgcggctcgtgttgggcattcagtgccaccggtgccattgagggagcattggcacagaaaaaagcgtcgaaaattatttcattgtccgaacaaaacctggtcgactgttcgtccaagtacggtaac

SEQ ID NO: 47871 - DNA, 592 bp, Heterodera glycines
tctaaatttcttcgctttttaatttttgctctccaaacaacaaaaatgtccggacgaggaaagggcggcaaagcgaaaacgggcggcaagcagaagacgcgttcatcacgggctggacttcaattccccgtcggacgtctccaccggctgttgcgcaaaggtcactacgcggaacgcgtgggcgccggcgcgcctgtctatctggcagcggtgttggagtacctggcggcggaagtgctcgagttggccggcaacgcatcgcgggacaacaagaagacgcggatcaacccacgccacttgcagttggctgtgcgcaacgacgaggagttgaacaagcttctctcgggcgtcaccatctcgcagggcggtgtgttgccgaacattcaggcggtccttctgcccaagaagacgcagcacgacgaaagtcagtgagcggaggcgaggagagaaagcatcaaacaaaactatcccaaacggccctctttagggccacaatcattcaaatggacggattgacatgctttttaatttttttgttttggattttcaatgatgtgtataaaaaacgatgcgaaaaaaaaaaaaaaaaaaa

SEQ ID NO: 47872 - DNA, 595 bp, Heterodera glycines
gtggttggaggtgttcacacggactggtacactcgcttggacaagcagcgaaagaaatgggcatgtcggtgaacaagcgcaaggagggcatggcattgcacgccatttacatcagcacattgcacgactatgacgagggatttttcggcgacgaccgcgtgttggccgccgccgtgtggcgctcatttttccttcagcagccggacgtgagcccggcacaaatcaaccgggtggtccgttacatgagggcaacgatgacctcgctggcacggatggacgacactcgcctgttgaccgacggcattgagcgctgggatgtggcggaagagttggcacgcctggtgagcgcggaacagtttggcaccattccggcagcgccgccttcgtcctcgatggatgatgatggccgcaactcggcacaaccggcgccaaaagtggcggcatcaaattaactcattacttgtaataagcagacccatttaaaaaaacattgtttattatttgttttgtttgttgttagtgttattattattctctgtctcttctcttttgtttttgtgaatttcaattgtgccgattaaacttgtaaattttg

SEQ ID NO: 47873 - DNA, 540 bp, Heterodera glycines
cataacttagaagctccaatcgccaaccatagaaaatgtgcaaccaaaaatttgctgatctcatggtggacaatgggctccgattgttcaaggaccagtttctccggcgatgactgcgccccgctcggtttttacttccattgcgggcctgccccgtcatcaaagcttgatggtcagcatgggacaaatgactattcgtaggagactatgtgtactgcaatcaccgtatcctgacaacccaactacccattgtgatcacgggatgggctccaactgggacgacctgtacaatatcttgaaccacaccttctacaacgagctgcgtgtcgcccccaatgagcaccctgtgctggtcacaaatgtcccgctcaactccttatgccaacattataaaagatgaccctgatgatgttccaaacgttcaatacatcgtctatttacgtggtcttacatacacaagcttttcctttactccttcggccgtaccatcaatctcgtgatggactccggcgatggtgtcacccacaccgtgcccatcta

SEQ ID NO: 47874 - DNA, 643 bp, Heterodera glycines
tcaagcttgcccggtacgcattggcctgagggcgtttggcgaaacatgcgaaagtcggctgctgagttgtcaatgcttggcatgttcctccttacgggcataatgcttttctccaccgccatttacttcttcgaacgcgacgaacccaactcaaaattttactctatcccttctgcttggtggtggtgtgttgctacaatgactactgtcggttacggcgatttggtgccggtgactacgggcgggaaggtcgtcgctgccattgcctcagtgtgtggcatcatcgttttggcctttcccatttcaatgatcatcgacaaatttgccgagtccacaggccatggccaacgcgtttttgacgaaacggtggcacagggcgaagttccgttggaggccaacaaaagcaatgttttgttggggtcgccgacggggcgaggaatgagcaggaggaggaaaagcgaaacggaaagccaaaggaaagcgaaaggaaaagccaaaggaaagcgaaacgaaaagccaaaggaaagcgaacgaaaagccaaaggaaagcgaaacgaaaagccaaaggaaaagccaaaggaaaatccaaaggaaagcgaaacgaaaagccaaaggaaagcgaaaggaaaaaaaaaaaaaaaaa

SEQ ID NO: 47875 - DNA, 649 bp, Heterodera glycines
accacggaaatgatccattgcgttgtttgggccaagagtttgttaatcaactttttggcgagagtgaccctgatgacgatgtttctcctgagacggtcacttccgatggaatgggcgaccaaaaaaactcacaaacaatggataatgatgggacgaccaccaatggaagtgttatttttgctgacaatgggaatagtagtgctaatgatgcgattacaaaaaatggaaaaatgagcacacggcaatttgcggaagcgacggattacggaccaaaacaaatttttgagaagttgttctttgatgacattaattatttgctttcgatggccgatctttggaaggagcggaagaaaccaacgccaattcactttatgcaagttattgacgaatgacttggtgggagtcggccgaatgaggacgagaacgagcattggggcgtatcgaaatgggctgaactgtttgaggactctctttttgcgcttgcggaaagataccgaggagctgtcaaggaaaagcgaatgctcatctgggacaatgacgacgagcatgcaatgcaatttgttgcggcctgtgccaatctacgggcttacatttttggaatcggcacataaccattgtttgacctgaaagctatggctggcaacattat

SEQ ID NO: 47876 - DNA, 739 bp, Heterodera glycines
tttctcggacctggctcggtcggagttatcggattccagcagccgacttaacggttaaacaattgactcaaacactgaaggaaatgcatgccaaaaaaatgtacggcgaattgacattttatctcgaagcatgcgaatcgggctcaatgtttgaccacacattggcgcagagtttgaaaatttacgcagtcaccgcggccaatggcgacgaatcgagctggggctgtttttgcgacaccaaatttttgcccggaaattgtttgggcgatcttttttcagtgaattggatgcaagactcggaccaggaaaatttacgcaccgaaactctgcggaaacaatttggcattgtgcgcgaagaaacgaacaaaagccacgtgatgcactacggcgacttgcaaattcaggacgaacacgtttctgagtttatgggcaaagagcaggcgcaaaagcgcaacgaacgcccaccatcaccgcacaaatttccaatgtttccttctcgagacattcccatgttcatgatggcacgccgtcagaatgagtctaagcagattcagcacaatctccgcgtggcgtggaaaaaaagaagctttctcgagcaaacgattaaacaaattgtgcaccaacttgtgcacgacatgaacaaccggcgacagattttgacgacttatccgcaacaaattcgcgacttggactgtcaccatgatgtggtgcacacgttcagcaatttctgcttcaaatt

SEQ ID NO: 47877 - DNA, 471 bp, Heterodera glycines
tgaagagatgtgagcaaatcgccgccgaatgcggctaaggctgagaagagacagcgaaaggaagcggaggaggtgagtaagacggaggaggacgaagccagagaggaggaagaggatgaggagggccagcagcaggagaagccggaagccaacaccaaggatgaagaaaagcggaggaaaaagaaggtcaaacttctgttccacgacattcaaacgcttgacgtcagtacgagcgatgtgtacgtttgggtgttcgacccgactccgttgtggaagaaatgtgttggcattctgatcgtcctcggcaccatcggaggctgtctgttcccgctgtggcctgattggctacggcttggcatttattacctttctgtgattgggattgccctctttggacttttgctcggtgtcgcatttgctcggacaattctttttggcctcgtttggttgttcactctgggccgtcatcgc

SEQ ID NO: 47878 - DNA, 561 bp, Heterodera glycines
  unsure (1)..(561): unsure at all n locations
gaagggttggcacgtgtgacattgcgccggatggacaccgtccgctcgcggctggcagccgccggttcactcgtccaattccgtaagcatttgcgccaggcgctgcgccagcgcttggaccgtctgtacagtgacaaaatggcacgcgcagacgtggcatttgacaccgatgccgcggcaagggaaggcattgacgaagtgttgcgcaattacatggacgctcaatattatggtgacatttctattggctctccaccgcaaaacttcaccgtgattttcgacaccggttcctcaaatctttgggtgccgtccaaaaaatgctcatttttcgacctcgcatgccgctaccatagtaaatatgaccacaaaaaatcgtccacctatcagccggacggacgcgaagtggcaattgaatacggtaccggatcaatgaaaggcttcgtctccaaggacacggtttgcattatggacggtatgtgtgtggaaggtcangagttcgcggaggcgacaagtgaaccaggcgacacttttgtaaacacaaaagctgacggcattctcggc

SEQ ID NO: 47879 - DNA, 460 bp, Heterodera glycines
attgaaactttggccttttagatctacacaaggcaaacaagccccatgttcaagtgaaagtcggtaacgaggataagcaatttgcggcggaggaggtttctgctatggttctgacgaagatgaaggaaattgcggagtcttacctcggtcacgaagtgaaaaatgccgtcgttactgtgccggcttactttaacgatgctcagcgacaagcaacaaaagatgcggggaccatcgctggactgaacgtggtgaggattatcaacgaacctaccgctgccgcaatcgcttatggtctggacaaaaaaagaaggcgagcgtaacattctcgtgtttgaccttggcggtgggacattcgatgtctctcttctgacaattgacaacggagtgttcgaagtgttggccaccaacggagacacacatttgggaggagaagacttcgaccagaggacaatcgaatact

SEQ ID NO: 47880 - DNA, 385 bp, Heterodera glycines
ccggagtgtttacacccttgagaacgcatctgctcatcttaaaggcggcgccaagaaggtggtcatctccgctccgtctgcggatgcgccgatgtacgtgatgggcgtcaacgaggacaagtacgacccggctaaggacgacgtgatcagcaatgcgtcgtgcaccaccaactgcttagctccgttggccaaagtgatcaacgacgagtttggcatcatcgaaggactgatgaccactgtgcatgcggtgaccgccactcagaagacggtggacgggcccagcggcaaacaatggcgagacggacgtggcgcggcgcataacatcatcccggccagcaccggggcatccaaggcggtgggcaaagtcatcccggatctgaacggc

SEQ ID NO: 47881 - DNA, 327 bp, Heterodera glycines
tattttcttccctttcctttgtcttccattattccgcttttccctccccatttctcaattgttcttctccgcttcttctctccccgatgaatcactttgggctgacttttctgttcgtcgccgtttctctgctggtaattgcgcccggctgcgatggcatgcaaattttcgtgaagacattgacgggcaaaacgatcactttggaggtggagagctcggacactgtggacaatgtgaaggagaagatccaagagaaggagggcattccgccggatcagcaacggctgatcttcgccggcaaacagctcgaggacggacgaacgttgg

SEQ ID NO: 47882 - DNA, 524 bp, Heterodera glycines
cagctgaaacttcgcgctagtgctatgactgttcagtgtcagacgatcttgcgcagttacggagagccggtgatggacaagcatcgcacccttcttcagatcatcacgtattttgccagtgcgtacaactccaccattgagggcacatcgcgtaacattgaaaccaccgaactttgtggcggtgctcgaatcggttacattttccacgaaaccttcaaaagagctcttgagaagctgaatcccatcgagaatttgagcacttatgacattttgacagcgatcaaaaatgcgacgggtacgagacccgcgctttttgtcccggaagtgagttttgagttattggtgaagcgtcaaattcagcggttggaagagccgagtttggaatgtgtcaatttggtctatgaagagatgttgaggatcgtgcagcactgtggtttcgaaattcagcaagaaatgcaaaggtttccccgattgtatgagaaaataagcgaagtcatctcccttttgttgagcaatcgtttgtc

SEQ ID NO: 47883 - DNA, 633 bp, Heterodera glycines
tgtggaaaatttcccacctaaaaacatcgacgacattcgtggagaactgacaagaaccttaaattggcttaacactcctttcgccgagcaccaaaaacgattgaatatggacgaatttcgcgtgcgaatgtctgacttcgaatgggcccttcgcgtggtcaaaccatcggcgaaacgagagggattcgcgacggtgccggacgtgcgatgggaggacattggggcattgaacgcagtcagagaagagttgaaatgtaccccatacaaaagcccgaactgttccaacactttggcacttccgcacagccgcaaggcattttgctgagcggaccgcccggttgtgggaagactttgttggcaaaagcggtggccaatgagacgggcatgagttttatcagtgtgaaagggcccgaactgctgagcatgtacgttggcgaaagtgaaagggccgtcaggacagtgttccaaagggcgcgtgattcggcgccgtgcgttgttttcttcgatgaaatcgacgcgctgtgcccaaaacggtcgcaaagagagaacagtggtagttcacggctggtcaatcaattgctcaccgaaatggacggattggatggacggagaaatgtttttctgatcggagcc

SEQ ID NO: 47884 - DNA, 482 bp, Heterodera glycines
  unsure (1)..(482): unsure at all n locations
cactttcttccgttccttagcaacctttctccctttcctttaatcctaattcactttctttctcccattttcacaatctgatgctcctctccactagacacatttatcctgcattcagtcgattaatctttctttcttcatattgcaaaaccatcggaacatcgccaatttgcattttcaataaaaatctgtcgtcgacaatgagtgcttatcaaacaattgaaaagggttctcttcatacccttaactatcgcgtattttttaaaaattcggatggaaaattgatttctccttggcatgacattcctctctatgcgtccgagtcaaacaaattgttcaacatggttgtcgagattccgcggtggactaacgctaaaatggagattgccactaaggaagtgatgtctccaattcgtcaagacgagaaaaagggtcttccccgcttcgtcaacaatattttcccgcaccgcggatacatttng

SEQ ID NO: 47885 - DNA, 594 bp, Heterodera glycines
cataaattaaaaaagatgcgagatctgttcatcgaagacaacagcccgatcactccggcccggcttgccgaactgatcagacatttctacgcgttgggatggatgcgcgataacggcggaggaatggcggtcctttgcaacggcgccgtgttcggttcgcccacttcggtgcagaaggagaaagtgtccgaaaatgatctgtttgtaattgatgctacgaccggcacagtactgaaacggccgcaaaacgcggcgagtgttccgagtgccacctgcggactgttaatgaacacaggtctgaactgcgtaattcacacccactccaaatacgcaaatcttgtctctcagttggtcacgggcaacgaattcgccatccaaaaccaggagatgattcagggggtcgagaatcgtagcagcggactccgtctcgacaacgtcgaccgcctcgttgtgcctatcgttgattctgagttaaacgaacaaatgctcagtcctgttttgctccgaactttggacaaatacacagaagcatcggccattttggtgcgtggccaccgcttttttgtgttcggctctcactgctggcagtctacc

SEQ ID NO: 47886 - DNA, 686 bp, Heterodera glycines
caagaaggttttgtctgttccaaagccaaaaaatcaaaaaagcattcgttgacaaaatgggcatttccgacaacgatgtccaaaagcagcttcgccatatgatggcatttattgagcaggaagctaacgaaaaagcagaagaaatcgacgcaaaagcggaggaggagtttaacattgagaaggggaaattggtgcaacagcaaaggcagaaaatcatggaatattacgagaagaaagagaagcaagtggagctgcagcgcaagattcagaggtcgaatatgcaaaatcagagtcggttgaaatgtttgaaggcgcgggacgaccatttgaaaaatgtgttggaggaggcacgcgccaatctcagcaaaatttcggcggacagagagcgctatccggccattctcaaaggacttttgcttcagggccttttccaattgctcgaaagcaaagttgtgttgcgatgccgcaagaaagacgaggaaatggtggcgaggattttgcccgaatgtttggaggaattccagcggacgtggggcaatcgaagcgaagtgaaaattgacaatgagtactttttgtccccggaaagtgcgggcggcgtcgaattgttggccaaagacggcaaaatccgcgtctcgtccactttggaagcgcgtctcgacctcattgccgacaaaatcactccccaa

SEQ ID NO: 47887 - DNA, 422 bp, Heterodera glycines
  unsure (1)..(422): unsure at all n locations
tcttctaaaaatggtcctgctttttctccattggcactgatttttctctgttcgctgtttgcttttattgtaatgatgcgcaaacatcgcaagtactggtccaaccgtggcatttcgtcctcatccccgcagctgatcagtggcaatttcggctcgctgaacggcaatcacctgagcatgtnccagctgatggattggaccagacagtacggcaagcagtacggtgtccagtacggttggcgcaacgcgttggtgactcctgacccggcaatggtccacgagttgcttgtcaccaaatttgaatattcccacgcaagaaatctttcgcccatctttggcaattgggacacaaacaaatggatcagcatgttcttggccacgggaggccggcggaaaaggctccgaacgattgcgaacccggc

SEQ ID NO: 47888 - DNA, 545 bp, Heterodera glycines
gaatcgccatgaccggggaaccgaaaacgccttcctacgtggctttacaccagactcgggcgagcgcctgatcggagatgctgcaaaaaaccagttgactctaaacccggaaaacaccattttcgatgccaaacgactcattggacgggaattcaccgacaaaaccgtccaggacgatatgaaactttggccttttaagatctacaacaaggcaaacaagccccatgttcaagtgaaagtcggtaacgaggataagcaatttgcggcggaggaggtttctgctatggttctgacgaagatgaaggaaattgcggagtcttacctcggtcacgaagtgaaaaatgccgtcgttactgtgccggcttactttaacgatgctcagcgacaaacaacaaaagatgcggggaccatcgctggactgaacgtggtgaggattatcaacgaacctaccgctgccgcaatcgcttatggtctggacaaaaaagaaggcgagcgtaacattctcgtgtttgaccttggcggtgggacattcgatgtctctctca

SEQ ID NO: 47889 - DNA, 693 bp, Heterodera glycines
  unsure (1)..(693): unsure at all n locations
gtgtatggatgacaaagaaaccagacccaaaacaaagggggcgaatgaatccaagcgtgnaaatttggaccgggagtatggtgnctgcancttcctcaaaaaggagtgcataacggcagccattccttatttggaacacgttatttacgaatggagtgatgagagtccccactttcacggggaattgttggagcaatacgtgctcaggtgcaatacgttgctcgggcagttcctccattcgctctcctctccgtcgattggtgttccatcttttgtcgccgaagatgatgaattatctatattgagaaggaaattacaatattttttggcgaccgaccagcattattcgattgaaagtgcaagagatctaattggggaagaccaaaatttgatggaggagagagcgatcattatggggaaattaggacagcatttaaacgcattgaaaatttatacggaaattttgatggatttcaatggcgcagaaagacactgccaaacttattacgatgaaagaaatgcatcgactcgcaacattttcttcgaccttttccattattatataaaaggcgaaatgcctcaaaaagaggtaattcaagttgaaagtgattacgaaattcggcgcaaaccaaacatttcggaggcgctgaagttgttcaaaaggcatccgaccaaaatagacacagtgggcgc

SEQ ID NO: 47890 - DNA, 457 bp, Heterodera glycines
cgccgggtggcaaagatgtttatgaaggcgtaaaaatcgactacagcggaaccgaggttaaccctgaaaatttcgaagcggtccttttgggcgatgagcagcgatcggagggaaagccggtgctgaaaagcactgaaaaggacaaagtgttcgtgtacttctcggaccatggcgcggtcggagttatcggattcccagcagccgacttaacggttaaacaattgactcaaacactgaaggaaatgcatgccaaaaaaatgtacggcgaattgacattttatctcgaagcatgcgaatcgggctcaatgtttgaccacacattggcgcagagtttgaaaatttacgcagtcaccgcggccaatggcgacgaatcgagctggggctgtttttgcgacaccaaatttttgcccggaaattgtttgggcgatcttttttcagtgaattggatgcaagactc

SEQ ID NO: 47891 - DNA, 677 bp, Heterodera glycines
cacttttttagggtttaattgtgtgattggtttaagtaaatttctcctcgtccgtcatgttttatcacgacttgcacgacaacgaaaatagccatgataaagagttaaaacagttggtacaaatggacgatcttgcaattcccaaatttgtaatgcctccgctcggcattaagccaattttttttgtgcgcaaacattttgggccgaacagtcggcttccaatggcgcagtttctgaagggcactaccacactgtcctttgtgtacaagccgaagacaccgcaagacaaaggcggcgttattgtggcggtcgattcgcgtgcaacgggcggaacttacatcagctccaaaacggtagagaaaatcattccgatcaacgaccaattggtcgcgacgatggcaggcggtgcagcggactgtcagtattggacgcgggtggtgagcaaatattgcaatcttttcgaacttcgcgagggtacgcaaatttcggtggctgcggccagtaaatattttgccaatgttatgtacgactatcgtggccaagagctgggtgttcactcgatggtttgcggggttgacaagttcggcccttccatttacatggtcgaagctgaagggactcgcgtgaagattgacaccatttgttcactcggttcgggcatgttgcacgccatgtcc

SEQ ID NO: 47892 - DNA, 583 bp, Heterodera glycines
  unsure (1)..(583): unsure at all n locations
acagaaccgcatgcctggtatgggcggaggccatcagcagcaaggaatgcgttaccagggacagccgagaggaatgcaacaacaacagcaggctcaacagccacaaattgcctattcgtcgtatccgcagcagcagagccgtggcggcatagcaccgcagatgggtggcggagcgagtggcggtggagccannacgctggccactgtgatcacttcttcaacacaccaggagccgttgaacacacagctgcttaccgaggctaacataaccgcacaaaagcaaatgcttggtgagcgtctgtacgcgatggttgcgcgttgcttccgggatggtgatgtcgagaaaatcggcaaaatcacgggaatgcttctcgagatggaaaatgccgagattgtgttgttgcttggagacgaggaaatgttgcgtttgcgcgtggacgaagcagcaacagtgctttaccaggccacgggtcagaaggaggcgcagtaggataaatgaagtggatggattggatgaataaattgatgagtaaaaggaaaatcaaaaaaattgatatgttatttggcttctttgtctgagtaa

SEQ ID NO: 47893 - DNA, 404 bp, Heterodera glycines
tatctgacctgcagttttagcagaatgggcattttaactgcttcgaaagttgcactttgcccggctttcttccgctcgctctatgacttggtggtggggcccggagaaaaacaatgggcgcgaagttgttggccccactttccacggggatgaattttaccaagatcgtcttgaccgttggtacccgtccattcgatttcgcaaaaatgacgaagtgatcacgcccattcgccacaaggaattgggagattggaagaagttgagcattgaggagaagaagcttatctaccgctactccttccgtcaaactttggccgagtttgaggcattgacgccttatggctatctcacagtcactttgttcttttctatgcttgggcttactattctgtacgcttcgtttg

SEQ ID NO: 47894 - DNA, 342 bp, Heterodera glycines
cacattgccctatttgaaagtcaaaagtgctaagaatgtgcgcctttttcttggccatttacaatttctctcttccatgagttcctacagttacatgcgttctgagtggaagaaaaatgccatggattctgctgtgggacaattcattcttcaaaatggacttccgcgcgttgcgccaatggctgatcgtaatcgacaatttgatgaccaacgacaaaacatggttcaaggaattgcttactcggatcaccacctccacgtcgaccactctgtcaacactgatcaccagcaaggagcacgagtacgatatgcgtgcccattacctgaagcggctggcgttcg

SEQ ID NO: 47895 - DNA, 561 bp, Heterodera glycines
cccctgttgtggtgttggccgggtctttgttggacgctgcagaaaaacttcttgccaaggaattcatccgaccaccatttccgactcattccaacgggcggccacattttctgaaaaagttctcgaggaaatggccacacccattgacattaacgatgacgacgagttggtgaagctcgccatgacgagtttgaactcgaaggtcgtttcgcaatattcccatcttttggcaccaatggcggtgcaggcagtgaagaaactgatgagttcaccggaggactcaagtgtcaatctgaagttgattaaagtcgttaaaaagttgggcgaaacggtggaggagtcgcagctcattgagggggcgctgatcgatcagaaatcgatgggccacggaggccccgcgcgggtggagaaggcgaagattggcctcatccaattccaaatctcaccaccaaagcccaacatggaaaatcaagtggtcatctctgactatgctcaaatggaccgtgcgctgaaggaagaacgaaattacattttggaactgtgcaagcaaatcaaaaaggc

SEQ ID NO: 47896 - DNA, 597 bp, Heterodera glycines
cacaattgaggagatcttgcgcaagcgccaagtggaaatgacatcgttcagcgacgaagtggagcaccgttaccaggccaagctgcaggaacagctgcaggccatgcgggacgactttgacaatcgcattgcgcagaaccgtgccgaggtcgatgagctgtaccgcaacaagctgggcgaggcggctgaaaacgcgaacagaaaccgtgacttggcggccaaggcgcgcgaggaagcggcaatgtggcgcgtccgtgttcaggacttggagaactccagcaaagaccatcagggcatcgtcgagtcgctgaaccgtcgtgttaaggacttggaggcggcgttgcgccgcgcgcacgaggacgccgacattcgcattcaacagcgcgacgaacagattgagcaactgcagaaggaaattgcgttgatgatcagtgactaccaggacttgttggatgtcaaagtgcagttggacaccgaattgcaggcgtaccagaagatgttggagcaggaggagaccagattgcacattacgccgtcgaccagtccgaacacgtcggttgtcgggcagaacatcagcacgcctaacatggtcatttc

SEQ ID NO: 47897 - DNA, 621 bp, Heterodera glycines
tgggaggatgtgctgccgttccggcatcccttcgccgtgttgggcgattatttgcgcaaatggcaaggggcaactgacatcgaaccgcgtacaattgggtcgggtgctgttatgacagcaacgcctttttacgaagtcgcgatttacgtggacaaacagcaaattgttggacaatcgggcggtgaattcccttgggttgcgttggatttggccgctcataatggactgcttcgcctgtggcgagtggctgaccatccgcgcgtgttcccattcaaatttgaggaagtgtacgcgacccgatttgagcatgcccagcagagaaaccatcggttgagcgacgtttgcggagaaaacaccgacttgagtctgtacacgcccgaagaactggccagagacccaattgacatggtcgacatgtgcaaccagtactacacgaagatacggcccgatgtgggcattcccctgcggcgaaggcaacggcataagttctcccgtgggacgatcagtcggctgagtaggcgatttttggtcaagcccaccattttcaatatctgaacacaacccgacacacttttgttgatctgcgacgaattatgatcattttgctttttgtttgaattc

SEQ ID NO: 47898 - DNA, 607 bp, Heterodera glycines
aaataaaaaagatgcgagatctgttcatcgaagacaacagcccgatcactccggcccggcttgccgaactgatcagacatttctacgcgttgggatggatgcgcgataacggcggaggaatggcggtcctttgcaacggcgccgtgttcggttcgcccacttcggtgcagaaggagaaagtgcccgaaaatgatctgtttgtaattgatgctacgaccggcacagtactgaaacggccgcaaaacgcggcgagtgttccgagtgccacctgcggactgttaatgaacacaggtctgaactgcgtaattcacacccactccaaatacgcaaatcttgtctctcagttggtcacgggcaacgaattcgccatccaaaaccaggagatgattcagggggtcgagaatcgtagcagcggactccgtctcgacaacgtcgaccgcctcgttgtgcctatcgttgattctgagttaaacgaacaaatgctcagtcctgttttgctccgaactttggacaaatacacagaagcatcggccattttggtgcgtggccacggcttttttgtgttcggctctcactgctggcagtctaccaaagtgatgttggagtg

SEQ ID NO: 47899 - DNA, 630 bp, Heterodera glycines
gtgattttaagaagcttctctcttttgatacaaatggacttcgaaaatggtggccgtgatacaggggcgagttcgggcctcggcaaagcaacggccgttttgttcgctcggaatggctaccatctctcactttgtggccgtaatgaaagagcgttggagggagtggcgtcgaattgtttggcagagggcggactgacccgagaacaggttctgacaataattggcgacgtttgtgaggagaaaacgcttcaaaacattgtgaaacgaacggatgaaagctttggacgaatcgatgttttggttaattgtgccggtgttattgcgtccggaggagccgaaaacactccgacttcagttttggatggtttgatgaatgtgaatgtgaaaagcatgatcagactaagtcaattggttgttccgtatttggagaagacgaaaggaagcattgtgaacgtgagtagcatcgctggcatttgcgcgtttcctgctgtgacttactattgcatttcaaaagctgccgttgacaaatttacggaatgcctttccatggaattggcaccgaaaggcatccgagtcaatgccgtcaaccctgcactaatcgtcaccgaattgcatttgcgttcgggaatg

SEQ ID NO: 47900 - DNA, 637 bp, Heterodera glycines
caagaaattgtccgttaagcgcgttgacattattcctgcaaataccttaacaattattcgtaactatgagcgattccgggcggtcatctattattcgaaaaagctcatcttccaagctcatccgacaatttgccgagatgaacattcccaccaacggcgatgaatatttggaccgaggcgagtcggctaaaagggagaaacgattcgtattcgaatgtgcgtgggaagtggtgaacaaagttggaggcatttacactgtcctgcggacgaaggcgccgattagcacagacgaactgggcgaccagtattacatgatgggtccctacgtggaggaaagagttcgcctggaagtggaggtgttggagccggagactgcaaatctcaagtacacgttggaccaaatgtatgactggggtttccgcgttgtgtacgggcggtggctgattgacggatatccgaaagtgttgctgttcgatgttgggtccgccgcttggaaattggatacatggaaacatgagttgtgggaaaagtgcagtatcggtgttccgttcctcgaccgcgaggccaatgattgcatcattttcggctttttagtggcaatatttctcaaatcgtttttggactcatccgaaaattt

SEQ ID NO: 47901 - DNA, 560 bp, Heterodera glycines
tgggctttcttaaacttatggaagaggctaaactgcatggaaagtcgacatttgcttccttctctacaaaatgggttaaagatgcacgtttcaaggcagtagagaaaatgcgtgaccgcgaggcttacttcaaggattacgttgaagaactctacaagaaggaaaaggaggagaaaaggaaggagcgcgaaaaggccaaggatgaattcaaagctcttctgagtgagcaaaatgatctgagacgcaattcaatctgggctatcgtgaagaaacggctggacaaagaagcgcgctacaagaacaaacatttggacagtgaaacgcgtcaacgccttttcgaggagcacgtgaaagactgtccggagccaactgaggaagaggaggaggaagccaaacggttggcggctgaatctctcgaggcttcaaatggcaagcggcgaagtgatcacgacggagtggaaaatggggagaaaagaaaacggaaagaaccgctgactgcggaagaaaaggcattggaagagcggaagagagaagtggcggaggaactcggagagcatcta

SEQ ID NO: 47902 - DNA, 593 bp, Heterodera glycines
ctgccttctgtgactgttgttcgcctcccctttgctcatctgtgacgacgacacttcgtgaacgaacatgacggacactgcaaatcgacagcgacgcggccgaggcgagagacgcacacgagtgcttctacgcgacagtgccaagaaaatcaccaaagcgtccattcttcgtctggcccgacgcgccggtgtcgcccgaatcaacgcaagagtctacgacgaggtccgtgccgcgctgcgctcgtacttggaaaccatcattcgagacgcggccatctactgtcagcacgagaggcgcaagaccatgaagagccgggatgtggtacacgcactgaagcgccagggcaatttgatgtacggcttcgaacaataagcgcaaggaggaggaggatggatatatttggaaccggcaccatatgatattttcggataatattattattgtacatatgtgtgtatatgcctatattgtatattgttatgtcgatgctattgtacaccatttatccgtgtagttgtgacccgttattattattgtctttgtgtattgatattgtgtatttggtacgataaagactggcgattttgaaaaa

SEQ ID NO: 47903 - DNA, 640 bp, Heterodera glycines
tttcctattttattatctgctgaaacgcttacaacagattagcgatgattccgctcaatttgcaaattgctgagtctgctctgaaggtcctccaaacaaaaacgcccgggggagaaattgagcaaagtgcgacggcgggagctctctgtacaaacaatacgtgcaaaaaagtgttcaccggtcccgatatctattccgaagagtgcgttttccacccgggcaatgccgtttttcacgaagggctcaaatactggtcgtgttgtgggcgcaaaaccaccgattttaccacatttttggaccaattgggttgcactcggggcaaacactgctggaaaaagaaggaaattgtcacaaatgcgcgcgaagattggttccaacgaggtggccaagtgcacatcacaatttactgcaagggagcacttccgagcgaaacatccgccaaatcggacggtctgacattggaagtgaccatcaacgggtccaccaaacggtacgaactgttcggggaaattgcgccgtccgaaagtgtggtcattatcagcgaacgcaaagtggaaattgtgttgaagcaagtggccaaaattgggtggacaaaacttctaaaggaacaaacgacgggattggcacaatcttcggactg

SEQ ID NO: 47904 - DNA, 682 bp, Heterodera glycines
ccttaagttattttactggcctgcacaacatactcaaaaggttctttgcgcatgtttcgccttcgcttttaaagaagcccctcaacgacccatttccgattgctgcgtggcgctcgcacccggccaacatggccaaaggtgtgaagttcgatcacgacaacgcgttcgtgcgattctgccgctactatctatggcattactgttggagtgggcgtcagtacggtcttcaattctacgaccaggcattcgaaccgcatcccgtagtccaagaggcactgcgccggctccgtcttaaggacccctaccagtacgaccttcgtctgcagcgtattcttttggccagtcaattgggctcaaagaatgagcgactgccgaagaacatgtggacaaaatgggacgacgagacattctatctgaacccgtattttaacgaaattgaggaggaaaagctggagcgtgaagccagcacgggcatgaagccgggataccaactcaaagagcagatttaggggacagacattgtgttgtgaacgattagtcgcggaggaaaagcacattgcgtttgttgatactgttgccggagagaaattgatttgatgagtgattgttcacaacttttaggacgacatgtgttatgttcatttaacgtgaagtaataaagcgattattctcaaaaaaaaaa

SEQ ID NO: 47905 - DNA, 363 bp, Heterodera glycines
agagacgcacacgagtgcttctacgcgacagtgccaagaaaatcaccaaagcgtccattcttcgtctggcccgacgcgccggtgtcgcccgaatcaacgcaagagtctacgacgaggtccgtgccgcgctgcgctcgtacttggaaaccatcattcgagacgcggccatctactgtcagcaccataggcgcaagaccatgaatagccgggatgtggtacacgcactgaagcgccagggcaatttgatgtacggtttccaacaataagcgcaaggaggaggaggatggatatattaggaaccggcaccatatgatattttcggataatattattattgtacatatgtgtgtatatgcctatatt

SEQ ID NO: 47906 - DNA, 495 bp, Heterodera glycines
  unsure (1)..(495): unsure at all n locations
ccctgatttggccccctatttatacgtcaaaatgggattccgccaaggttatttggacaaattgcgtgccgaagtgttcgagccgggagtcaagcacattttgccactgtttgagaaacttttgaaggatctctggtcagggtacatgctcaagtccggcctctcaatggtggacttcctgcggccaaccttctgtcttttttaccaagttggagccggagactatcaatgcgttcccggagctgatcaaatacgttgaccgtgtccatgcgctgccccaactgcagcagtatttgaagcagcgtccgcaggaccgctgatcagtgatcagaaaagtcgagattgaatgagaaaagaaaatcaatcattgagattaattcgataagttatgataagacaaagctttttttctttaaacagaatattgaaaaatatttgatctttttaatcatataaagaaattaaatctggccaaccnntcccccaaaaaaaaaa

SEQ ID NO: 47907 - DNA, 698 bp, Heterodera glycines
ggatgtaagcccttagtttttctaaacacacggttaaaattgagcctactgcccttggtagagattttactgaggcgttggtggagcgtttaaatcgtcaatttgctaattacgttataccaaatgtcgggctgtgcattactttttacgactttaaaaaatacggcgcttcttacatattgcccggtgacgcatcaacgcatacgcctgtcctattccgttatgttgtttttcaaccaatgataaatgaaattcttgagggcaacatactgcgctcgaaccaggaagggatcacaatcagtatgcagtttttcagcgacataacagttgcgccagacaaattgcctgcagtttctaaatttgatgagtctgttcaagtttggagatgggagtatcaaaatgaaaatggtgatatcacgccattctatatggatccaggaaaacgcgtaaggtttgttattgttttttggtatagcaatgatttgaatttttctatattttcccgcgtgtgctaggcattcatttttcccggctcgtctattagctccgccgggaccctccctcaccccttctcccggtctcaaattttaagaaattatccaatgctttaaaaacttttggtgtaaaatcaacaacaacaaaaaatatgcgcggcacattcaacataaagaatagtccggcggtgcagataagctatt

SEQ ID NO: 47908 - DNA, 641 bp, Heterodera glycines
ctacaggacgcgttcacagacatgagctcgcctctgactcgttcccgatgaagttggtcgacgacctgatctacgagttcaagggtcgccatgtcgtgcgaaaggagggcgaaattacgatgagcggggcaaatccgtcagcggaggaaattgacgagggcactgaagaggcggtggaacgcggcattgactttgtgctcaaccatcgactacaggagatgaattgttacgagaaccaggcaacatttaaaggctacgtcaaggacttcatgaaaaagatcattgagtacatggagaaggagcagaagtcggctgacgaaattgctgcgttcaagaagaagatccaggcctgggttgtctcattgctggccaaagaccgtttcaagaatctcgcattctttatcggcgaaaacatggccgagggcaagggcgaaggacaggtggccattgttgagtaccgtcaggagaatggtgaggaagtgcccactctgatgctgatcaaggaggcgctcattgtggagaagtgctgacgacgacgacaagcgatatacgagaaatgcgcgcgatattattattataacttttttgctttaatatgatatggtgacacaatgtccagttactattacatattgttgttg

SEQ ID NO: 47909 - DNA, 661 bp, Heterodera glycines
  unsure (1)..(661): unsure at all n locations
catcggaaaaacgatgaatttgaaagcgtgcccaactttggccaccgccaccgttttcttccaccgcttttatatgtttcacacgtttgacgaacatcatttgcatatgactgcgttggcctgcttttttttggccggaaaagtcgaagaaacgcctaaaaagtgcaaagattttttgacggtggcccgagaattatacccccaccatttcacagcaaaagtaacgccggacgatttgatgcttatggagcgagttctgctccaaacaattcgctttgatctccacgtggaacatccctacacttttttggtccaatatgccaagggctttcgcatggacaaggaatacatgagcaaaattgtgaccaacgcatggacatttgtcaacgattcgctcggcacaacactgtgccttttgtgggagcccgaggtcattgccattgcccttttgtacatgtccttcaaaatggagcgcatggaggagcagcaaatcggacggacattccattttgacgcgagcacagagtggtggaatttgtatgtgcaaaatttgaccgtgcccatgatggacgacatttgtcacaaagtgttggattccatcgcaccagcgaacggagaggacgcgccaatggcaaacggaacaaaaaattgacagatntaa

SEQ ID NO: 47910 - DNA, 615 bp, Heterodera glycines
gtatcgcaatctgctgctccgcttttgcttgaaggacgagaaggcgcagcgcatccttttaggaggcattgaacaacttgtgcaaaacaacaaggacattctcatgtcgaagactgcccacatcataaaagcgctttatgacaacgacatttgcgaggaggacgtcattttagcttgggggagcaagccgagcaagaaatttgcggacaaggaagtggtgaaagagatgatcaaagttgcccagcccgtgcttaaatggctcaaggaggcggaagaagggtcggacgagtcggaggacgacgatttggacgttgcatttgacgatcgaagccgcgacattgggatgacagtggaggtggaaaagggagcaaaggatggggtcacccgtgtacagaacggccaaattgcaaccaatggcaaaatggacgatgggaatgcagacgacattgacattgacaatatctgattgtgagtgcatggcgcggtggacggtaattcagtgatgttgcaagaatttgtgatcgtatgccgaagactttcacccaccccttttgttcattgcgataccaccacatttttgttcgcttttatcgtaaaaaacttattgtagatgtt

SEQ ID NO: 47911 - DNA, 560 bp, Heterodera glycines
gagaaggcgcgacgttacgacgacatggtggaggccatgaaaaagctgatcaagttggacccaaatctgaccctggaggagcgcatttcgttgtcaacggcttacaaaggtgcgatggcttctcgtcgtacgtcctggcgtgctttggtctccatcgaggaacggaccggcgcgagtttgagcgatgcacaacaacaggtgttggagaactatcgtgagaaggtgcagaatgaactggtgaacacttgccaagaacttttgacatgcatcaacgaagtgctgtttccgaaggcgtccgacgtggagcagaaggtgttctatctgaagatgaaagccgactactaccgttacatttccgaagtcgcgacggacgaagaccgatccggtgttgtcgaactcgccaaagttgcctaccaggaagcgattgacatggccggcgacaaaatcccagcgaccaatccgactcggtttggtcttgcgctcaacctcgccgtgttcaactacgagatcttaaattcggtgaccgaggcacgcaaagtgatccaaactgctctcgactt

SEQ ID NO: 47912 - DNA, 578 bp, Heterodera glycines
cgttcttgtgggcgtacccgtaccgactggtgatgagtttggcactggcactgctcgtctactggacaccgtcatttcgcgaacccacggggagtatccgtacttttattacgccatttggattggtgcctactatttgcaacaagtgtcctcctattgcattttcctctcaatgatggcgttcaatgcacaaatttcggaccccaaaattggcggcacttacatgaccctgctgaacacgctgaacaacttaggcggcaattggcctgtcacactgtccctgagcatcaccgattttttcaaccgtaaaaattgtgtggccaaaggcaccaaaattgtgctgggcgtatgcaccagcaaacatgacgaggagttgtgcaaagcgggcggtgatgcgtgcgaatttgtgatcgacggttattacatttctgtggcaatttgcgtggtcgtcggtctgctgtggtatcgaattttctaccggcgcatcaaatacttccagaagattccccgccaagattggcgcgtgatcaaaacaaaatgatgtgtgtctgtctgtctgtctgtatgtgatgatgaac

SEQ ID NO: 47913 - DNA, 593 bp, Heterodera glycines
tgagctctgcatttaactaaaacttttaaccaaacagaaaaaatgttcgtaaaaacattttcgaataaaaccgttgttttaatgtggacccgactgaactgtccgtcgagcaactgaaggcactgatcgctgaggaggaggaaattgctgtgccggaccaaagacttgtctttgctggttgccagcttgtggatggaactctgctcaggacttatggagttgatgctgattcaaccatccaccttgacctcagattgcttggtggtgggaagaagcgtaagaagaagcaatacactggcccgaagaagcagaagcatgttcgcaagaaggtcaaactcgccgtgttgaaactttacaaggttgttagacattacaattgagagaaaaggtaaaattttgaagattgatgacaatggaaagattcatcgacagcgtttggaatgcaattcggccagctgtggagccggaattttcatggcgaagcacaaagatgggcgtttctactgcggcaaatgtcatcaaacattgaaggaaaagaaatgagtgcttgttgagaattattgaatggatagccgttgatgctattttggttt

SEQ ID NO: 47914 - DNA, 733 bp, Heterodera glycines
attcgctgacagatgcgaccccgaatccgagaaatcaaggaagctcggcgcaggaaattgccggtgttgttgccttcatgggtttttgctgccaattccatggaccgccgtttaaaggacactttaaatgtcatcacttcagagaaacaccttgacactcataaaactccactttttgctggatgtgaaatcacagtgtccggcttccccggcgccgaccgcgttgacattggccgtctcgtcgagttgcacggcggggtgttcaccggacagatgaaccgttcttcgtgtacgcatttaatcgcagccacaaattcgggcgaaaaattccgtaaggcgcgcgaatggggcactgtttgggtggtgacgagccgatggcttcgcaaatgcattgaaacgggatatcgtttatcggagagtcgttttgcgcattcacacgacgaagacacacagcaaagggtttccccaagtttttctctgataacgaaaaaatgaaagatatttgaattcgtatttgccgttcgaattaagtcgaaagagaaattaggatcggattccccgacactggaaccccagaaaaactatatcaaaaatcttttttcggaaagagagcccattacattattcccgaccatttttattgagttttatagccattggattgttgtgctaaatatcaaaaattgctaattatatcattgtttttattttttaaaattattttgtgcttaat

SEQ ID NO: 47915 - DNA, 658 bp, Heterodera glycines
ttatggctgtcggacagaacagaagatggggaaaaagggagcaaagaagaaggccgtcgactccatttacgcgcaaggaatggtacgacatcaaagcgcccgcaatgttcacacaccgaaacgttggcaaaactttagtgaaccgcacccagggaacacgcatttcaagtgactttaggaagttccgattgatctgcgaagaagtgcaaggcaaaatttgtttgaccaatttccgcgggatgacattcaccagggacaaactgtgctccattgtcaaaaagtggcatacactcattgaggccaatgtggcagtgaagaccaccgacggtttcttactccgactcttttgcattggctttaccaaacgaaatgccaatcaaatcaagaagacgagctatgcaaagacatctcaagtacggatgattcgtgccaaaatggtggaaataatgcaaaaagaggtctcttccggcgacttgaaagaggtggtcaataagctgatcccggactccatcggcaaggacattgagaaggcgtgctccttctactacccgttgcaggacgtttacatccgtaaagtgaacgtgttgaagaagccgaagttcgagctgggcaaattgctggagatgcacggcgagggtgccggaacggtcgccactat

SEQ ID NO: 47916 - DNA, 597 bp, Heterodera glycines
ccttcggcagcagaattgtcacccccgaacactttcctcggcgtttctctcgcttctccgtttgactatgcggctgctcgagaatacaccgcttacacccaaggaccggacatttggatcaccacggcatatgtggtgacaatctttggcattcaatggtacatgaaggaccgcaaaccgatgcaactgacgctgagcctcagactgtggaacctttggttggccatgtttagcactgccggctgtctggtgaccagctacgcgctgctcagagagattggcacctacgggctggtcagctcgtacacgaactgtcgcgacttcttcgagggattcaccggcttgtggacctggtggttctgcatgtcgaaatttgccgagttgggcgacacttacttcatcgtcctgcgcaagaagcccctgatgttcctgcattggtaccaccacgtggccacgctcaactacggtctgatgtcctacgtggacaacaccgcgttcaacacatggattgtgtggctgaacttcagtgtgcacgccgtcatgtacacctattactttttggccgcctgccgcatccgtctgcccgcttggttcgcc

SEQ ID NO: 47917 - DNA, 488 bp, Heterodera glycines
ggagaccatcttaacactcgaaccggatgtgatgcttaaacttaattacaatttgaccgtccacacgccctaccgccctttcgaaggccatctgattgaaatgaagactaaaattggcagacaattgtcagaaattgagttcgacttggaatcaatcagaccaatgtcaagcgaatttctgaagaactctctgctgagtgatgcgatgtttctttactccccttcacaaattgccttggcagcggtgaaattcggcatggataaagcattgggagaagtccgttcctccactttaatggtcgactttctcgccgctttgctcgacgtggacatcggcgacgctggcggaagacgcacagcagacattttgcagttggagaaactgcaagttcggcttgaccaaatctgcaaattggttctacaacaatttgcccagggcgtaagtgccgaagaaagcgcatcccttcaaataaaaaaaaaacaaaaaa

SEQ ID NO: 47918 - DNA, 726 bp, Heterodera glycines
tcctttgtcttatagttatacggaactacataaaatggcggatcagctaaccgaagagcaaattgccgagttaaagaggctttctcgctgttcgataaggacggggatggcacaattaccaccaaggaattgggcacggtcatgcggtcgctgggtcaaaaccccacggaggcggagttgcaggacatgatcaacgaagtggatgcagacggaaacgggaccattgactttcccggattcctcacaatgatggcacgcaaaatgaaggacacggacagcgaagaagagattcgggaggcattcagagtgttcgacaaagacggcaatggcttcatctctgcggccgaactgcgtcacgtgatgacaaatttaggagagaaactgacagacgaagaagtggacgaaatgatcagggaagcggacattgacggggatgggcaagtcaactacgaagaattcgtaacgatgatgacgacgaaataatcgcttcggcacagccctcaacaccgtcactgcatcgatcttttcatttccttcgttcatttaaattatctcctctccacccatccattcattcaccgaccatttttcccgtggattcgattgattttatgtattctataattttttatttgcttttccgtgttcttttgagcagatactgagaatatttgtattgcgttttcttggtctccatcccatcaatcgtctcgtacacctttaatt

SEQ ID NO: 47919 - DNA, 600 bp, Heterodera glycines
gaaagggatttgctttacattgactttaattttaaattttacaagggaaattactattaagtaataacttgtcctaaaaaatggtccaatacaaattatattattttgatgggcgcggtttgggtgaatcaatccgtctgttgcttcactatgttggccaaccgtttgaggacatccgaattaaagacgttgaagaatgggagaaaacgtacaagccgaaatttttttacggaaaggtcccagttttggaggttgacgggaagccattgggacaaagtgctacgattttgcgctaccttgccgaaaaatttggcttggccggcaaagatgaatgcgaaaaggcgaaggctaacgaaatcatcgactttcaaaaggatgctaacactgatttggccccctatttatacgtcaaaatgggattccgccaaggcgatttggacaaattgcgtggcgaagtgttcgagcctggagtcaagcacattttgccactgtttgagaaacttttgaaggagtccgggtcagggtacatgctcaagtccggcctctcaatggtggactttcaagtggccaactttctgtacacgtttaccaagttggagc

SEQ ID NO: 47920 - DNA, 682 bp, Heterodera glycines
cacgtattccgcagcaccgacagcaaagttcaatgcacggcatccaacaacaccacagcgagaggccactcgtgcggggaaagacgtcgccctatgggtttttcgtcaaaatgtgttatgaggaacacaagaagaagtacccaaacgaatgtgttcaggtcaccgaaatctccaagaaatgctcccagaaatggaagacaatgaccgacgacgagaagaagcgtttctttgagttggcacaaaaggacgccgagcggtaccaagcggaagtggcggcgtatgggggcgaagacgttttgaagcgaaaaaaacgggccaaaaaggacccaaatgcgcccaaaagagcgctgtcggccttcttctttttctcgaatgagaagcgtcaggaagtgtccggagagcatcccgaatggaaagtcgggcaaattgcgcaggaactcggcgttcgttggaaggcactttcggacgaagagcgcgcgatttacgaaaagaaggcccaggaggacaaagagcgatacgctgaggaaatgcgtgcctatcgcaacgattctgctctgtcgtccggcacttgtcagaagccctcttacctggagggagggccgtccatgaccactgctgagcatgtgctgcagtcgcagggcggtgctcacgtggtgagcacatcggcgggcggacagccgca

SEQ ID NO: 47921 - DNA, 627 bp, Heterodera glycines
agggtattggagtccgtcatttttatttgtttgttatttatttgctgacatggctcaattagctgttgcagctcctctgccgccaacgacaaatgcaacagcggccactgctacaccggcggcaccgtcttacccaatggcttcgctttacgtcggcgaccttcaccctgaagtcactgaatcgttgctcttcgagaagttcagcgtcgtcggtcccgtcctctcaatccacgtttgtcgtgatgctatcagtcgtcgttcgctcggctatgcttatgtgaacttccagcagacatcggatgccgagaaagccttgaattcgatgaattttgactgtgttttgggcaaacaaatccgcataatgtggtcgcagcgtgacccgagcattcgtcggtcgggatccggcaatatttttatcaaaaacttggacaaggacatcgacactaagaacttcttcagcactttttcggcctttggtcgaattttgagttgcaaagttgccacagactccgacggcaaaagcaaagggtacggcttcatacattatgcgagtgaggacgacgcaaataaagcaattgagaagattaacggaatccatgttgacggaaagacagtgtttgccgggaa

SEQ ID NO: 47922 - DNA, 578 bp, Heterodera glycines
acctctttcggccggacaatttcgcttttggacagagtggcgcgggaaacaattgggcaaaaggccattacacggagggtgctgagttggtggacaatgtgctggatgttgtgcggaaaaaagcggaaggctgtgactgtctgcagggctttcaactcactcattcactcggaggaggcaccggctcaggaatgggcactctactgatttcgaagatccgcgaggaatatccggaccgaattatgtcctctttctcagtggttccatctcctaaggtctctgacaccgttgttgagccatacaatgccactctttccgtccaccaacttgtagaaaacaccgatgagaccttttgcattgacaatgaggccctctacgacatttgcttccgcacattgaaacttcagaatccgacttatggcgatctcaaccatctcgtgtctgtgacaatgtctggcgttacaacttgcctccgtttcccggggcaactcaatgccgacctccgaaagttggccgtcaacatggttccgttcccgcggctccactttttcatgccaggatttgcgccgctttctgcc

SEQ ID NO: 47923 - DNA, 636 bp, Heterodera glycines
tggagaaggaatgcatccaatacaaaaagtcgttggaccatttgttgcgccggcgtgcggactgtccatttgacgtggaggcatcgcgcatcaaattggacgctttaaaatcagaagagcgcgacctattggaacaactgacgctgttggaagacgaggaacggacactgcttcatgaattggatacaaaacaggaggagcgcaagaaaattggtgaacgagacgagcaactttatcgacagttgcgagacaaccacagtatactcattgaacaatcggatgagcagcggtcatttaaattgcaaatcaatcaggccaatgaacaaattcgacgtctgtctcgcatgaatgtgcttgatcttgtgttccacatttgggtggatggagagtacggcacaataagcggcttccggttgggtcgactgcggcatgaccaagtggaatggagtgagatcaatgccgccttgggacagacggcctttttgttaaaggtcatcgctgaacggctcggtctcgattttgttggctacgagttggtcccatgtggaagcacatcactcatccgaattctgcccaaaaatggtggcactaccactgcttcatcaacaactgctccagccgcacatgccgtcgagg

SEQ ID NO: 47924 - DNA, 565 bp, Heterodera glycines
cacttttcgtggtggcgagaacgtcgtcgacttttgttttgctccatttaatagacagattttgtattccctggcagtcggtggtgctgtgaacactttcgacttggccaggtgcactggccaggacacattcttcgaccagggctgtgtccgtgccacgtgtctttcgtgcagtccttcgggccaattcatcgcctgcggttctaacacgggaattgtcaatgtttacgacctgacaaaactctctccgagtttggccaagtcgaatgcaccaagaccagtacggatgttcgaccagctgaccactttggtgtcattcgttcgctttaacaacgactcgcaaatgttggcatttggttctgcagtgaagcgtatgtccggtcgcgtggccaattgttcttccggaagcgtatttcaaaatttccctgctaaacaagagcacttcgccagcgacaaattcacaacttgcgatttttccccgaatagtgcctttttttcctttggcacaaaacaaggaaagatgagactttaccagttacaccattctgatgtttactaaattttg

SEQ ID NO: 47925 - DNA, 612 bp, Heterodera glycines
  unsure (1)..(612): unsure at all n locations
gccttgttgatcgacatatgacacacaatgaagaaacctactgggttccttccttcgtagagacaacgttttgccaattggttgcgtgatgcgagggattggtgcgtgagcagaaatcgcttctggggcacaccgattaacctttgggtgagcgacgacttccaagaaatggagtgtccaggatcaatcgacgaattggagcgattgacaggcacaaaagtcactgatcttcaccgagagaacattgaccatcttcaaatcccctcaaaaacgggccacggaatgctcaaacgtgtcactgaagtcttcgactgttggtttgagtcgggttccatgccttatgcccaacaacattatccatttgaaaactcagaagtttttgagcacaatttccccgctgattttattgcggaaggcattgaccaaacccgtggatggttttacactttgttggtcatttccaccgctctgttcggccgtcctccattcaaaaatttggtctgcaatgggctcgttttagcctcggacggaagcaaaatgtcaaaaagcaaaaagaatttcccaaatccgttggatgttgtcagaaagtacggagcggatgccttacgtntg

SEQ ID NO: 47926 - DNA, 708 bp, Heterodera glycines
gaattcttagccgggcaagggattctcgctgctgacagagccaggttcgattggaaaacgcttcgatactattgggttggagaatacggagaacaatcgccgtcgctaccgccaacttttgttaccacaccgagctttggacagaatcttagcggtgtcattctttttgatgagacattccgtcagtcaaccgacaacggagtccgatttgttgacgtcatcaaaaaggcgggagccgttgctggcatcaaagtggacacgggagttgtgccattggccggcactctcgatgaggggacgacccagggcctcgataaattgtcggaccgctgtgccgagtacaaaaagggcggctgtgactttgccaagtggcgttgtgtgctgaacatcggtcccacaaaccgtcccatttggcattgatggagaatgccaatgtgctcgcccgatatgcgagcatttgtcagcagaacggacttgtgcccatcgtggagccggaggtgctttgtgacggcgaccacagcttggaacgatgccagaaggtgactgagttgactttggcctacacctacaaagcattggccaaccaccacatttacctggagggcactctgctcaagccgaacatggtcacccccggccaatcccactcgcccaatgccacgcccgaccaaattggtctcgccaccgtgactgccctccgccgttctg

SEQ ID NO: 47927 - DNA, 570 bp, Heterodera glycines
acgctcttaaattgcttacaataccgtcctgaaactcgccaggcgaagaaagaacgtcttcgtcaacgagctcaggatcgagcagatggaaagcaagagaaactgacgaaacgtcctcctgttgtccacttcggcattaaggatgttgtcaaagccgtggagaacaaaaaggccagcttagttgtcattgcacacgacgttgacccaatagaaattgtgatttgcctgccggcaatttgccgcaaatttggagtgccgtatgccattgtgaagggaaaagcatttctcggtcaagttgtctaccgcaagactacttctgccgtgtgtctttgcgacgttaatccggaggacagaaacgcgcttaaaaatttggctggtgttgcggtcaccaatttcaatgaacgcggtgatgaacttcggaagaattggggaggtgcgatcatgtcccagcgttcgcaagcacgacaggctaagattgaaaaggctcgccagaaggatgttgggcagaaagtttgatgttagttatcaaaaattgttgtttctctgttgatgataaaatttgttgacttc

SEQ ID NO: 47928 - DNA, 626 bp, Heterodera glycines
tgggatgtgatctgatcgtcgatgcacgcggagtggtcccaactctgaccatggaagagcgattgtccagagctttctcttgccgaagattatggcattctggtcaacgaacagatgaggacaaatattgaagacgttttcgccgcgggcgatgtttgcacagcgaattggacagcaaaaagtccccattggaagcagatccgactctggacacaagcgcgacagatgggcttgttctgtgcccgatgtatgctcattgacaacgttttgctcgacatcgctttcgaacttttcacccacgtcacttctttttttggcttcaaagtgattttgcttggcgatttttcgggcgaacgattggaaaaaccctttgagaagaattatcggatcactgaaggctgtgaatatgtgaaggttctgacaaaggatcaccgtgtgcacggggcggtgttggtcggcgagactgacttggagggagcggttgaaaatctgattctgaaccaaaccgacattggtcaaattgagcaagtatttctagatcctgatttcgatcttgaagatttttttgattaatcccaattattttgcatttaatataccaaaactatatgataaattcaattttg

SEQ ID NO: 47929 - DNA, 660 bp, Heterodera glycines
gctccttaagcttaaaaaacagacatcattcagtattatttataagaacaccaaaaatgcgtgaagtgatctctattcatgtgggacaagcgggcgtgcaaattggaaatgcttgttgggaattgtactgcttggaacatggcattcagcccgatggaaaaatgccatccgaccaaaacaaccaagacgattcgttcagcaccttcttctcggaaacaggcaatgggcgtcatgttccgcgtgcggttatggtcgacttggagccaacagtgatcgacgagatccgcactgggacttacaagcatctcttccaccctgaacagctcatcactggaaaaggagacgcggccaacaactacgctagaggacattacacagtcggcaaagaaatcatcgaccccgtcttggatcggattcgtcgcatcgcggataactgcaccggacttcaaggctttctcatcttccattcgttcggtggtggcactggctctgggttcacatcgctgcttatggaacgtctctctgttgactatgggaagaagtctaagctcgagttctccatctaccctgctcctcaagtgtccaccgctgtcgttgagccgtacaattcggtgcttactacgcacacgactctcgaacactctgactgtgcatttatgg

SEQ ID NO: 47930 - DNA, 557 bp, Heterodera glycines
tggttttcgtggcggtggtgaaaaaccgaccaggtcagagatactgttcatcagcttaccgtttcgttaggcaaactgtacaacggatgcaccaaacacttgcgcatcacaaggcatatcctttgtccgaaatgtaatggtgtcggcggcgctaaggaaggggtcaaacaatgcgaaaattgtcgtggacgcggactggagattacaacatgcaaattggtccgggaatgattcagcgaattcaaagagcttgttctgaatgtggcggtgagggggaaataaatcgcaacccgtgcaaacactgtggcggcaaaaaacggatcaaatcagaagagacaatcgaagtgcatattgagaaagggatgcgcgacgggcagcgactgatgttctacggaaagggcgaccaacagccggggctggagcctggcaacgtgatcattgtgctggacgaggaggagcatcccgtgttcacgcgaagaggcaccaacctcaccctgagcatgaaactgacgttgacagaggcattgtgtggctgcactaaacatgtggtgacgttg

SEQ ID NO: 47931 - DNA, 570 bp, Heterodera glycines
gcgcgttgtcgtggcgggaacattaaacatcgcggacttcgtcttgataccggaaactttgcttgggcttctgaagggtgcactcgcaaaacgcgtatcatcgacactatgtacaacgcttccaacaacgaattggtgcgcaccaaaacattggtcaagggaatgatcgtctcaatcgatgccattccgttccgccaatggtatgaagcgcattacgcactgccattggcgcgcaaaaagggacaaaagttgaccgaagatgaggaggcgcggattggaggagcacagaaacgctcaaagtcgactctgaagaaatacacggaacgccaaaaaaccgccggggtggagccgcatcttctggaacagttccaggccggacgacttctcgcttgcataagctcacgaccaggccaaagcggacgctgcgatgggtacattttggagggcaaagaactcgagttctacaacaagaaactgaaggctaaaaaggcgaagtgatgccgcaccgaagcttggaattgcgtttccaattttgttgtccgttccttttgagtgaatgataaattttgt

SEQ ID NO: 47932 - DNA, 666 bp, Heterodera glycines
agcttggcctggctttggcgcaaaggaattcaattcggcagctgatttctgttttcttgcagtaaatttgttgtacggattcgattgcttccaagaacaacaatctgatgaaaatcaccgccgtacaattcgtctgatcagcgccactttgcctgacgatggggcaaattcattccttacgcgttttggctggtctattttggattatcaggcgaccgaactgttcgatttcgccctgcaattagccaacccaaacagtcccactttgttgtccaaatcccattattatgcaaaggttcgtcttcaatacgcgcaattgttggatgaattgggcggattcaaacatgcggttgagctctatcgactcgagaattccaaccattcgaagacaccgtcgcctcctccactcgttccttctgttcacaaaaccaaattagctcatctcaaaaggcaggaccatgagccaacacctgccgttgctcctgctccacctacttttctaccagtgcagttgcagtcggcatccaaagaggaccatgcgccaaccccttttgccgttgctcctgcttcacatactttccaaccagtgcagtcggcctccacgcagggccaagagccaacggcttttgcagttgctcctgcttcacaaactttcctaccagtgca

SEQ ID NO: 47933 - DNA, 574 bp, Heterodera glycines
tgattaatacgaattggaattggccaaatcgctgcacgcgatggccaccaataccaatgtgataaagaacttcttcaaaaaaattcgtatcgcggaacaaaattatatgaaaatgttcacggacgaagtggaagcattcaaagaccgtctgagaaaacgcgcgcgggacaaaagggaggcgatgctaagcgaaacggaggtggaggagaagaaaaagcgtgtggcccagtcgccaggagggcttgacccgcaagaagtgttcgactcactgcctgcggaaatgcaagaagcgttcgaaacacagagcatggcaaagatatttgaagtggcgaagagcatggactccgaggtgttcaagtaccatttggatcgctgcactgcctccggactttggattccaaacgcaaaggaagccgagggacatggacaagaggaggaggagaagaaggaaacggaggagaaatgaccgatgctcaactcaaagatatggtaaaccatgagaatacgtttaagtcgacttataatatttaattatttatgaccatttaaatgcaaataaagatattttcccatc

SEQ ID NO: 47934 - DNA, 710 bp, Heterodera glycines
  unsure (1)..(710): unsure at all n locations
atcgaagagaagatccactgaacagctcgagattgccggaggaaacgcgggacttttttgccacctctgtccccagtgcattttattttaacgtgtcggctgacggacttcccagtatgaccatcgaagacgactccatcctgataaaatacacaaccgaattgctgccgaagttgagaatccaacaattggagagagcggacagaagaaaacggccatcgatctgacactttctctggccgtgcaactgatcccacaagtgcgggacggtattttccacacgcagctgaacctgaaggagcgcaaaattgatatgaaaaacaagacagcatttccgaaacagatgaagccggtggtggaggaactgctgcaggatatgatcaaggacgatgtatggccggctgtaaagcgcggcattgagccactgatttacgtgaagggcgtggagttgccagcaaactgcggagtggaccctaagtctgcccaattgcactttggacaccgcaaaatcggcgcctctgccaaactcaacatcaaagagatttccctcagtcactgcgtcgaacagttcaagagcaaattgcctgacccggccaccctgttcaagatcaacgggacatctttttagtatttaaaatgatctcttncgccttcatgtgcatttactcccacttgattgtttattgtacattgcatcgcctattactgtg

SEQ ID NO: 47935 - DNA, 557 bp, Heterodera glycines
cactttcgccggtggagggggaattgccgaactgctgacaagaatacactccgtcttcgtccgcccttttctcgccgcccccttcggcgtcggccccttcctctgcaatcaaaggggggagcgatttgacctccgacgaaatgttcaccggggaaggcttttcccagcaaggcttgcttaattacgctgtcggattcttcaaaaaaggtcgtctttttttgttaccggtggacaaaaccttcgaaatgcgaaagcccttgcgggggaccattgagcgcgagtcgacggcgcgtaccaccgcattaaagccgtcttcgtccgtctcctccacttcgacacgttccgttgccgctgattctgctccttccggcactgcgtccgcttcgtcgtcttccgtcgctgttgccgcgccgttgcgcattcgctttgcacgtgccgaaaatgacttgcaacgacgccgccgagagcagtcgtccttctacaagcagaagctggtggagcaggaccagtggattccgctcaaagtggagcacagagatttgttggaaatgtacgaa

SEQ ID NO: 47936 - DNA, 523 bp, Heterodera glycines
ttgcaaagtgaacgggatgcttttggatgggaagaaagtgtttgttggaaaatttttgccacgttccgctcgtgacagcaaattggtgatccgtccagtcgtttcaccaatgtttatgtgaagaattttggtgatgcaatgaattcggagaagctgagcgaattgttttcacagtttggcgaaatcatcagtgcaaaggtgatggaggatgacagcggcaagtccaaggggttcggcttcgtcgcttacaaggaccatgaaagtgctgcgagggcggtggagaagatgaacgaggtttcggtgcccggcagtgagaaggtcgagcaaaagtttacggtgtgccgtgcgcagaagaagagcgagcgccaggctgagctgaagcgtcgttacgagcagtacaaagctgagcgcatccagcgttatcagggagtcaatctgtacgtcaagaacctgcacgataccatcaatgatgagacacttcgaagcaattttgaatcctacggaaacatcacaagtgcaaatg

SEQ ID NO: 47937 - DNA, 556 bp, Heterodera glycines
ctaaaaggttctttgcgcatgtttcgccttcgctttaaagaagcccctcaacgacccatttccgattgctgcgtggcgctcgcacccggccaacatggccaaaggtgtgaagttcgatcacgacaacgcgttcgtgcgattctgccgctactatctatggcattactgttggagtgggcgtcagtacggtcttcaattctacgaccaggcattcgaaccgcatcccgtagtccaagaggcacttcgccggctccgtcttaaggacccctaccagtacgaccttcgtctgcagcgtattcttttggccagtcaattgggctcaaagaatgagcgactgccgaagaacatgtggacaaaatgggacgacgagacattctatctgaacccgtattttaacgaaattgaggaggaaaagctggagcgtgaagccagcacgggcatgaagccgggataccaactcaaagagcagatttaggggacagacattgtgttgtgaacgattaggcgcggaggaaaagcacattgcgtttgttgatactgttgccggagagaaatt

SEQ ID NO: 47938 - DNA, 559 bp, Heterodera glycines
caaaaagcccttcgaccacaaacagcttctgactttgttttgtcgacgaagtctacacttttggttcggaaatctcgtcacaatgaaatggtggtccgatctttggctcaaggagggttttgcttcattcacgcaatatttgttcaccgacaaaaactaccctgaatttaaaatttggtccgatttcgtcgacgcggaagtggtcagagcgatggctttggactctctgcgcagtacgcatccaatcgaggttcctattgataacccaaatgaacttgaagaaatttacgattcgatcacttacgcaaaatcaaattcaatcattcggatgctcttcaatcatttgggcgaagcgactttccaaaaggccattcgcgattacttgaaaaagcaccaatacgcaaatgcagagaccaacgacctgtggaagagtttgtccgacgcttctgggattgatgtcaaagcactgatgtcttcctggacccaacagatgggcttccctttggttactgtcgaggaaaaaattttggatggagaccgtattgaattgcacttaaaa

SEQ ID NO: 47939 - DNA, 634 bp, Heterodera glycines
  unsure (1)..(634): unsure at all n locations
tcatgagacggcgcgtgccatcaactatgccgttgaagcgtgccatccgctttctggagaatgtacgggagaagaaggagattgtgccgttccgccacttcaacggcggcgtgggacgcaaagcgcaggcgcaagcgtggggcacaacacagggacgttggccgaaaaagtccgccgagttccttctccaacttctcagaatgcggagagtaatgccgaggtgaagggcctggacgtcgaccatttggtcattgaccacatcgtcgtgcaagcggccgccaaaatgcgtcggcgcacttaccgcgcgcacgggcgcatcaatccgtacatgagttcgccgtgtcacatcgaagtgattctgaccgagaaaaaggacgtcgttgcgaagccggccggcgcattggtcaaagtgaagaaagagtcgaagaagaagcagcgacggcaattggcacgtggcgaattctgagtgacccgaggacatccccgaaccacactctctttgtgcggcttgttttgttatttggtggcgataaaatttgttgaacccnnnnaaaaaaaaaaaaaaaaaaaaaaaaaaaaaaaaaaaaaaaaaaaaaanggaaaaaaaaaaaaaaaaaaaaaaaaaaaaaagtcc

SEQ ID NO: 47940 - DNA, 744 bp, Heterodera glycines
caaaattcttattgcaaattctccgatggaccaggacaaaataaaagttttcggaagcagaattcgagtggattcagtggcaaaaattgccgaattggaacaagcggaaaaagacaaaatgaagcagaaagtggagaatatttgcaatcacggcatcaatgtgttcatcaatcgtcagctcatttacaataccccgaacaattgttcgctgatcggaaagtgatggccatcgaacacgccgactttgagggcatcgaacgattggcacttgtattaggtggcgaaattgcttcaacatttgacagtccatcggaggtgaaattgggtagctgcaaactcattgaagaagtcaccgttggcgaagacactttgctccgcttttccggtgtcccgcttggcaatgcgtgttccgttgtgcttcgtgggtccacccagcaaatcattgatgaagcagaacgttcgttgcacgacgcgctttgtgtgctgagtacgcatgtgaaagaccaacgcgtggtgcccggggcgggcgcatcggaaatgctcatggcaatggcagtgatgggcgaaagtcaaaaggtggccgggaaggagtccatcgcaatggaagcattcgcacgggcactcgccaaattgcccacaatcatttgcgacaacgccggactggacagtgccgaaataatttcgcatgtgtgagccgaacacagcaaatggaatcgccaatttggcattgatgttgaaaatggt

SEQ ID NO: 47941 - DNA, 550 bp, Heterodera glycines
  unsure (1)..(550): unsure at all n locations
acaaaagcccttcgaccacaaacagcttctgactttgtattgtcgcacgaagtctacacttttggttcggaaatctcgtcacaatgaaatggtggtccgatctttggctcaaggagggttttgcttcattcacgcaatatttgttcaccgacaaaaactaccctgaatttaaaatttggtccgatttcgtcgacgcggaagtggtcagagcgatggctttggactctctgcgcagtacgcatccaatcgaggttcctattgataacccaaatgaacttgaagaaatttacgattcgatcacttacgcaaaatcaaattcaatcattcggatgctcttcaatcatttgggcgaagcgactttccaaaaggccattcgcgattacttgaaaaagcaccaatacgcaaatgcagagaccaacgacctgtggaagagtttgtccgacgcttctgggattgatgtcaaagcactgatgtcttcctggacccaacagatgggcttncctttggttactgtcgaggaaaaaattttggatggagaccgtattgaatt

SEQ ID NO: 47942 - DNA, 630 bp, Heterodera glycines
gacgcgaagaggtgttgcccaatggaagttgtgcctggtcggtgctgccatttttctctgttttgccttgctttacccgagcgtcttctcaccgatgctttccaatttgttcggcggcggtacccagcggcaacagccggcggccgcggaccgaccgatgcatccgtcgatgatggggccgaaccaacagcagcagcagcagagggaacgtgcccatcgccctcccccacaccatccaggcgcatccatgcgaatgccggacatgcacaaccaacagcagcaacaacaacagggcgggttttggagtggaaaaagcggtggttcgatggcatggatgttgcccttctacaccgttggcgttgtgtgctttttgctctacacattgttcaagtcgaagaccaaacggcaaaaacgacgtcgcgaccgaccgcttgaccttttgtatggcgacgacgacgacgatgaaggaacggaggacggcttggaatatggtgttcgtggtgcgaaactccgctcggtgcagcacagactgcgcaaaacggagcaggcgatggcggacattctcagccaattggagcaaatttcggcccattcaaaggacattaatgatgacgacacaaaagcagcgga

SEQ ID NO: 47943 - DNA, 647 bp, Heterodera glycines
gatgatatggacgacctgaagtatgttgtggaattcgacttcctcggcaaagactccatccgctattacaaccgtgtgccggtggaaaagcaagtgttcaaaaatctgaagctttttatggaggagaaagacccgggggacgatttgttcgaccgattggatacgagttcgttgaaccaatacctgaatgaactgatggacggactgaccgcgaaagtgtttcgtacgtataacgcgtcgatcactctccaagaacagctggacaaactgacaaatccttccgattccgtccacgagaaaatgctttcctacaatcgtgcaaatcgtcaggtggccatcctttgtaaccatcaaagggcagtgccaaaaacgcacgaaaagtcgatggaaaatttggagaataaaataaaagagaagaagcaggagtacaaggagttgaaggatcagctgaagaagatcaaatcggtggacgagaaaatggcaaaaaaatacgaaagattgaaggaacagatcgccaaactgaacacacagcgcacggacaaggatgaaaacaaacaaattgcactgggaacctcaaaactgaactacttggatccgaggatttcggttgcatggtgcaaaaagaatgacgtgcccgttgagaaaat

SEQ ID NO: 47944 - DNA, 668 bp, Heterodera glycines
atatggaatgccgaaggacgaattatgcacggagaatgccattatgctcaggcggttcaaccgtttcccattgatcatcgaccccagcggacaatccatcgaattcatttgcaaagagttttcccagcatctggcaaggaacatcaaaagggaggatcggtggcaacaacggttcaactgactagttttaatgataattcgttcagaaagaatcttgagtcagcgcttcgttttggcacaactttgcttgtgcaagatgttgagtcctatgatccgatcctcaatcctgtgttgaatagggaggttaagcgaactgacggacgtgtactgatcacaattggtgaccaagacattgacttgtctccagctttcaaaatatttctctttacgcgcgattcttcggttgaattcccggcggatgtgtgctcacgtgtaacttttgtgaactttacgataactcgtgctagtcttgaggcgcaatgccttcaccaagtgctgcgcagtgaacggccggacatcgacaagaaacgaaatgatcttctgaaattgcaaggagaatttgcagttcgactgcgacatcttgaaaaggctttgctaaacgcactgaacgagtgcaagggtaaaatactggacgatgactccgtgatcgcgacgctggagaaactgaa

SEQ ID NO: 47945 - DNA, 400 bp, Heterodera glycines
aaaatgatactatcttcacttgactgctcgtctcgacactttgccaccgcatcagcggcggccaaatgggggccggctgttgagccaattcaggaaaaaactacgcttctgcccaatgggctctctgtggcgtcggtggaactgcagggcccaatttcccaattgatgtttgctttccgttccggtgcgcgctttgagcaacacgactaagccgggctgacccatcagttgcgcaacgcaatcggcaccgattcgattaattacttgggtgttcgccttttgtgggtgacgggtcaatcgggcgcaacgctgcaggccaaactctctaaggatttgatgttggtgcatatgtcggtgcctcgtacaatgtctcccgttgccatctccgttctcggcgact

SEQ ID NO: 47946 - DNA, 593 bp, Heterodera glycines
tcccctcggatgcttctaagggccggaagttccaagggtttgaagagaattggtgatttgcccacggagacgtcgtttgtgcggttacaatggcgcggaatggtcgccacgtgttcaccggagggaaaggcgccgtcaaaatgtgggacatcggagagcgtattggccttgcttcgtctgtcggtggttccatttccccctcctcgtcgaccatcgccgatggaaccaatggccgagtgggcagtgccgagccgtggacacccgtgaacacttttccatgtctgaaggacagttacgtccgctcttgcaaactttttccggatgcatcaacgcttattgtgggtggagagacgaggaccatttgtgtgtgggatttaaacagtgaaaaggtgaaagccatgctcgactgcgatgctgaggcgtgctacgctttggccatttcggccgactgtcgcttgtgcttcgcctgctgttcgagcggttccattgtcatttgggacttacaaagtgaacaaaaagttgcccaactcgatggacacactgacggggcgagttgtgtggatttgaatggcgatgggttgcgactttggact

SEQ ID NO: 47947 - DNA, 670 bp, Heterodera glycines
ctacatggtcgacccgattgacgagtactgcgtccagcagctcaaagaatacgacgggaagaagttggtcagtgtgaccaaggaaggccttgagctgccagagagtgaggaggagaagaagaaatttgaagaggacaaggtcaagttcgagaagctgtgcaaagtcattaaggacatcttggacaagaaagtccaaaaggtttctgtctcaaaccgtttggtctcttctccgtgttgcattgtgaccggagagtacggatggtctgccaacatggaacggatcatgaaggcccaggcattgcgtgactcctccacaatgggatacatggcgtccaaaaagaacctggagatcaaccctgaccattcaatcatcaagtctttgcgcgaccgtgttgagaaggagcaggacgacaaaactgcaaaggacctcgttgtgctgctgtacgaaacttctctgctcacctccggcttttcattggaggacccgcaacagcatgcgtcgcgaatttaccgaatggtgaaacttggacttgacatccccgacgaggaggagccggccgagcaacagccgagcacttcgggcgagccgacaattgcggagaaaattgctggtgccgaagatgatgcctcgagaatggatgaagttgactgaatggtgacatcgtctatc

SEQ ID NO: 47948 - DNA, 485 bp, Heterodera glycines
caaattgcagccgcatgaatttcaaggaggaacattcaccgtgtctaacttgggaatgtttggaagtgtcgaccattttacggccatcataaacccacctcagtcctgcattttggcaattggctctgcgcgtcgaatgctcgtccctatggaagaggaagacaaatcggatttttctaacgtttccgcgcattctcttcgctgaaagtaactttgagctgtgatcaccgagtggtggacggtgcagtgggcgccgtttggcttcagaatttcaagcagtttatggaagagccatttacgatgatcctttggggcacaccggggaatgtctttttaattgtttctcctcattctcggcccaattattaggcttccgtggttgactctctcctagcgatgacttacaataggataaaaataccttacaattagcgggtgaaaattgtcattgtttttgttagagtgaatgataaattataattttg

SEQ ID NO: 47949 - DNA, 732 bp, Heterodera glycines
ggcattctctctcctctgtttttactttccttaaaagcggcaatgaccagtcgaattttgagctgcaatttgcgaaggtacttctccaagatgaaccaacacatcgagttcggcacaacgaagagcgcttcgtccgacaaacaatcgccgccttcccctacaaacaatcaaacgcaacacgagggaatgagtcaggaatgtcgggagcaaatcgagcagatggaaaggctgaagagcgacaacgaaatgctgaccgacaaatacaaaagaacacttgcggacatggaaaacttgcggaagagaacgcagcggcaaattgaggaggcaaaactttttgcaattcagccattttgcaaggatttgctggaggtggctgatgtgcttgacttggcgttgaattcgttggaaaaaatgaaaacggaggacggtgccgcctccttggacagtggagtgaacaaagggatcaaaatgacgaaggaagtgttgctgaagacgttcaaaaagcatgggcttgtaccggttcaacccgaaggacagaagttcgacccgaatttgcacgaagcggtgtatgaaataccgaaggaccagtcagataggcctgccggtcacattgcgcatgtgttgaacattgggtacagtttgcacgaccgtccgattcgaccagccaaagtgggcgttgtgaagatggaatgatggccaatgtcagcgtcattttgtgtctacgtgcctttg

SEQ ID NO: 47950 - DNA, 636 bp, Heterodera glycines
cattttcttccctttcctttgtcttccttcattccgcttttccctcccatttctaattgttcttctccgcttcttctctccccgatgaatcactttgggctgacttttctgttcgtcgccgtttctctgctggtaattgcgcccggctgcgatggcatgcaaattttcgtgaagacattgacgggcaaaacgatcactttggaggtggagagctcggacactgtggacaatgtgaaggagaagatccaagagaaggagggcattccgccggatcagcaacggctgatcttcgccggcaaacagctcgaggacggacgaacgttggccgactacaacatacagaaggagtccacgctccacttggtcctccgtctccggggcggaaatgggaagagaaacacgggtaagaacaagaaaagcaacaaaaagcttgatcagaattgatcagcagcgaacgcaccatcacatgattgattggcacagtgattttccaccaccaaattcacaacacttttcccttttccgggttatctttgatttccattttcggttattgttttctgtttttctcctctatcttttgtaaaattctgttactttgatctttagttttatcatttatcatcgcatatatag

SEQ ID NO: 47951 - DNA, 666 bp, Heterodera glycines
tgtcggtggagtgatgacaaaactgatacctcgcaacactgtcattccgaccaaaaagtctcagatattttctaccgcggcggacaatcagccaactgtgactattcaggtcttcgaaggagaaaggccgatgacgaaagacaatcatttgttggggaaattcgacttgaccggcattcctcctgctccccgaggcgttcctcaaatcgaagtcacttttgagatcgatgtcaatggaattttgcacgtgactgccgaggacaaagggactggcaataagaacaaaattacgatcaccaatgatcacaaccgactgtcgccggaagagattgagcgaatgatcaacgacgcggaaaagttcgcagaggaggacaagaaaaccaaggaagtggtcgaagcgaggaacgagtttgagtcgtacgcctactcactgaagaaccagctcggagacagtgaaaagttgggaggaaaactcagtgcggaggacaaaacgaccatcgaaggagctgtggatgaggccatttcgtggttggactccaacaaggacgcgccacctgaggagcttaaggagcggaagaaggacctcgaggccaaagtgcagccgatcatcagcaaactctacgcagggcagtcgcctccgcccggcagcgaaccgccgccgactga

SEQ ID NO: 47952 - DNA, 672 bp, Heterodera glycines
agcgcgttcctaattttgccatttctaagggtctttttcaagtcgaggatgtcttcgcctccttcctcagtccttccccaggatgttttcattctgtccgctgtgcgcactccgatcgcttcttttcgctcatcctttgccagccttaatgccgttgatttgggcactttcgttgctaccgaagcgatccaaagggccggcttaaggcctgaccaagtggaagagacggtgactggctgtgtgctcagcgctgggtcgggccaaaatgtgtcacgccaaatcgcgattaaatccggtatccccgaggcgaggcaggcgtacactgtgaacaaagtgtgctcttccagtcttaaggcattgattttgggtacccaatctgtgcagttgggacaacgttccatggttttggtggttggcgttgaaagtatgagtcaggcaccattttacttggcgcgtggtgacaacaattacggggatatcaaacttttggattccatccaacgcgatggcatttcggacgcaatgctcggccaaccgatgggtgtttgtgctgagaaaacggttgctgaatttggcttcacgcgtgagcagcatgacgcgtatgcactcgcctcctatgctcgtgcgactcgcgcgtgggcgggcggcgcttttggtgcggaaattgtgccg

SEQ ID NO: 47953 - DNA, 704 bp, Heterodera glycines
tcgccgctcctcattttcttctcctacctttgtcttccttcattccgcttttccctccccatttctcatttgttcttctccgcttcttctctccccgatgaatcactttgggctgacttttctgttcgtcgccgtttctctgctggtaattgcgcccggctgcgatggcatgcaaattttcgtgaagacattgacgggcaaaacgatcactttggaggtggagagctcggacactgtggacaatgtgaagacgaagatccaagagaaggagggcgttccgccggatcagcaacggctgatcttcgccggcaaacagctcgaggacggacgaacgttggccgactacaacatacagaaggagtccacgctccacttggtcctccgtctccggggcggaaatgggaagagaaacacgagtaagaacaagaaaagcaacaaaaagcttgatcagaattgatcagcagcgaacgcaccatcacatgattgattggcacagtgattttccaccaccaaattcacaacacttttcccttttccgggttatctttgatttccattttcggttattgttttctgtttttctcctctatcttttgtaaaattctgttactttgatccttagttttatcatttatcatcgcatatatagaagttatcatagtccacatttctgtccctttttatttatttttttgactataaaa

SEQ ID NO: 47954 - DNA, 569 bp, Heterodera glycines
tttcccaagacagatggcacaagcggcgaaagactggggggaagcgaaaccccattcacaaaaaacgaaagttcgaaatgggacggccggcagcaaatactaagattggtcctaaacgaattcatttggtgcgttgtcgtggcgggaacattaaacatcgcggacttcgtcttgataccggaaactttgcttgggcttctgaagggtgcactcgcaaaacgcgtatcatcgacactatgtacaacgcttccaacaacgaattggtgcgcaccaaaacattggtcaagggaatgatcgtctcaatcgatgccattccgttccgccaatggtatgaagcgcattacgcactgccattggcgcgcaaaaagggacaaaagttgaccgaagatgaggaggcgcggattggaggagcacagaaacgctcaaagtcgactctgaagaaatacacggaacgccaaaaaaccgccggggtggagccgcatcttctggaacagttccaggccggacgacttctcgcttgcataagctcacgaccaggccaaagcggacgctgcgatgggtacattttg

SEQ ID NO: 47955 - DNA, 545 bp, Heterodera glycines
catcccaaaaactgataaaaaaaatcggcgttcctctcccgtctctcctccttccaattcgccaatttcgctgcttgcagtttctttggccgttttggctttcgtcgctttggcatcggccaatccgccgacggcacgcgaaacggcgccaaatgcacagcaaaacaatgccaattcagtggcaactggggaaattgcgaaaaatattgcggaaaagatggagcggatgaatgagttcattaaggcgaagaagttcatcgatgcacataatttggcatttgagaagggcgaagtgtcgttcaaagttgcgccaaaccatctgatgcattttacacctgcccaatataatcgaattcgcggcttgcaaatgcgcagcaaccgacaacggcacaacatggcaactctggcgggaaacagcagtactttgccggaaaagttggactggcgcgagaaaggggcggtgaccgaggtcaaagatcagggggactgcggctcgtgttgggcattcagtgccaccggtgccattgagggagcattggcacaga

SEQ ID NO: 47956 - DNA, 593 bp, Heterodera glycines
gaattaaaaatgtgtattcgaaggtctacgatgtgccaagacgtccgttcgagaaagagcggcttgaccaggagttgaaattgatcggcgagttcggcctgcgcaacaagcgtgaggtgtggcgtgtcaagctgtcgttggccaaaattcggaagcgtgcccgtgagctgttgacgctggaggacaaggacccgaagcggttgtttgagggcaacgcgctgttgcgccgtttggtccgcatcggtgtgctggaggaggacaagatgaagctggattatgtgctcggcttgcgcgtcgaggacttcatggagcgtcggctgcaaacccaagtgttcaagctgggcttggccaagtccattcaccaggcccgtgtgttcatccgtcagcgccacattcgtgtccgtcgtcaagtggtcaacatcccatcatttgctgtccgtctcgactcccaaaagcacattgatctgtccgcaaagtcgccgtacgctggcggtcggcctggtcgtgtcaagcgaaagaatgcgaaaaagggtgccggaggcggcggctcgggtggcgaggaggaggactgatcaatgaaaaattgtttttgt

SEQ ID NO: 47957 - DNA, 706 bp, Heterodera glycines
caccggcggtggcggacggaggaaaaataaaactctgttcggcatttcacaagcagtgcatgccgaacatcctcaacagcaattgtccgaattcgctggtggcatttcgcctgtcgacgccgtgccaatgccaaccgcggccaatgactgcaacaataattccatcgaagacattcaatcggaccgccgaaggggcccaattgatccgacaaacttcgaccatttggtccgtctgagtgagctcatccgttccatggccgaccttggcactttgcagcccgagttcggcataatctgtggctccggattgggcgcaattgccgaccaaatggagggggcgcggattttgcctttctccgaggtgcccggctttccacagccgagtgttattgggcacaaagggaatttggcgttcggtcggattggtggtcacttttgcatgtgtcttcagggccgtttccacccctacgaacacaaaatggacatggcattgtgtacgatgcccgtccgtctgatggcttttctcggcgttcgcacaatgatcgtctcaaacgcagccggcgcactgaacggcgacttccaaacgggcgacctaatggtcatcaaagatcacatctttctgcccggactgtccggttactctccgctgcttggcatttccgacccccgtttcggctcgcgttttgtctctcttcataatgcgtac

SEQ ID NO: 47958 - DNA, 580 bp, Heterodera glycines
aaatggacaacagcaagcgataacgaagaagcgtaaagctgtgcaagccggaattttcaaggccgaattaaacaactttctcatgaaggagttggccgaggacggttattccggtgtcgaagtgcgtcgtgcaccttcccgtactgaagtgatcatcatggcgacgcgcacccaaagtgtgctcggcgagcgcggcaagcgcatccgcgaactgaccgcactcgtgcagaagcggtttggctattccgctggacaaattgagctctatgccgagaaagtgtccagccgtgggctttgcgcggtggcccaatgcgagtcattgcgttacaaattggtcggtgggctcgccgtgcgtcgtgcgtgctacggtgtgctgcgcttcatcatggaaagtaatgcccgtgggtgcgaaattgtggtcagcggcaagttgcgcggtcagcgtgccaaggcgatgaagtttgtggacggagtgatgatccattcgggtaacccggtcaccgagtacatccaagaggcggttcgccacgtgcaaatgcgacagggcgttttgggcatcaaagtgaagatcatgttgccg

SEQ ID NO: 47959 - DNA, 611 bp, Heterodera glycines
ccttttctaatccttttctttctggggattgatctgcagaaattcgtgaattcagcttttacccaagacaccgaagagaaatattgtgtggaaaacattgaaagcgacgaaaaagttttaatggaacgaattcgcgacgcgaaagattgggcactgactaatgggctgacttttccggtgccaagaaggaaactgaaatgtgacgcatgtgacaaaatcaatgagaatgttgttttggacgacatggcacagtttgtgccctttacactttacccttcgccattcccacgcgaattgttcgaccaggcgatggatgtcaacaaaacccttcttttgatgtatttccgtgcgtcgttaccgtctaattttgaatttttgaaagaattgcataaaagtgttctggctgtgagtccgtcgctaagaagtactgctgatctaatcgaaagaaagcataaggagggcattcgacagccattgatgttgatttgcataagagcggattatatggccagcgaagaaattgatgaaaaaagcaatgagaaaaaatatgcgctaaaacagattgaattgaatggcggctcaattggcggctacggcactcctcagcccct

SEQ ID NO: 47960 - DNA, 548 bp, Heterodera glycines
cagacaccatttatgacgaggatgaagttctatgtggcatgtggccgaacaattcggggaatttcactccgttggttggcggacctgagtatgtacactgtttgctgccgccacttgaaaatttggcgaacattgaggagactgtcgtgcgtgacaaagcggtggaatcgttgcaaaaaatagcagaaaaacacagtgcagctcaactcgaggaatatttcattccgatggttctgcgattgtcagctggtgattggtttacttcgcgcacctccgcttgcggattgttcagcgtggcatacgctcgtgccaatcctgctcaaaaaactgaattacgtgccgcattccggtgcctctgtcgcgacgatacaccgatggttcgccgtgctgccgcatccaaattgggcgactttgccaaagtgcaggaggaggactatttgaaaaatgaaatcacccaaatgtttgaggacttggccaaggacgaacaagactctgttcgactgctttcagttgaggctggcattgtgatcgttggtctgttgtccgaa

SEQ ID NO: 47961 - DNA, 690 bp, Heterodera glycines
  unsure (1)..(690): unsure at all n locations
gagactggtgttctcaagcctggaatggtggtcacttttgctccgcaaggcatttccactgaagtcaaatcagtggaaatgcaccacgagtccttgccagaagcgcttccaggagacaatgtgggcttcaacgtgaaaaacatctctgtgaaggacattcgccgtggttcggtcgcgtccgactcgaagaacgacccggcaaaggagaccaagagcttcacagctcaagtcatcatcatgaaccacccgggtcagatcgctgctggttatactcccgtgttggactgtcacaccgcgcacatcgcgtgcaaattcgccgaactcaaggagaaggttgaccgtcggtctggaaagaaagtggaggacaacccgaaggcgctgaaaaccggcgatgctgggatcgtcgatttgattccaaccaagccgatgtgtgtggaggcattcacggactacgctccgcttggtcgtttcgccgttcgtgacatgaggcaaaccgtcgctgtcggtgtgatcaaggcggtggagaagactgaaggcggtggaaaggttaccaagtcggcgcagaaggctgctgcccctggtgggaagaagaaatgagaaacgctgataattggaatggattcgatttttggatttgnttgtgtttttttggccgtggaataggcccgttaactttgggttttgttggat

SEQ ID NO: 47962 - DNA, 606 bp, Heterodera glycines
ggcgctaatgagatgaacctgaggttgatgggaatgcctccacaattgagcagtattttaacaacaaatacggtcgtcgtctggactacccaaaccttcctttgattgcaatgaattcgagatttgccaatgagaagcgagtgaattactacccaatcgaggttttggacatcattgacaatcagcgagtcaccactcagcaacaaactccgacaatgattcagcagtcaatcaaaaagtgtgccattccaccattagtcttcaagcgtcaggttcacaacactgcgaagtctattcatctctgggacagtgaatatctagacgaggcagggattaaattgactaccgagccaattgccctcagagctcaccagctcaaccatcctgaagtcaaagctggcgacggtaacatgcagaggccgatggtggaaggttctgctgcttggcgaatcaacagtgcgctggtccctcaatcggtgtttgctgacggtacttacagttggatgttggcgtgctttgttcaacttggtggtcgcggtcttagcgagccagaccttcacaaatttatccaactgcttgaagaccaggcaaaaagacgaagcctta

SEQ ID NO: 47963 - DNA, 731 bp, Heterodera glycines
attgtccttcgactacacatttaatctcacgaacggacgtgccctggtgcaacaatggcaaaggaggaatactgtttcgatgcaaaggcggcggcagcggcggggcaatctcgtcgtccttcgacaacggcatcagtacttgtgcaaggagatggccagtcaagcagatttgtggatgcgatcatcagaaaagtcacgcagccgcctcttcaacgcttcacggatgagatcaccgacgaggaactcaaacaactctgcaaggcggccacggacgtcttccggatgcagccgacgctcgtcaggatccgcccgccggtcgtcgtcgtcggagacatccacggacaattctcggatctgcagaggatcttcacaacgcatggccccccgccggagcagcagtacatgttcttgggcgactacgtcgacagaggagcacactcgatggagacaatcatccttctcttctgctacaagatcaagtacccatcgaacttcatgctgctgcgcgggaaccacgaatgctccaacatcaacaaagcttatggcttctacgaggagatcgaccgccgttacccgcgaccgggcgctcgtcgactcttcgacctcttcaatcaagtcttcgcctggatgccattcgtcggactgatcggcgagaagatcctctgcatgcacggcggcatctccgacaagatgcgcagcctcgatcaactcagcaccctgcgtcgacacac

SEQ ID NO: 47964 - DNA, 725 bp, Heterodera glycines
acctgttttggacatcggtcgcacacgaccattgccgtgcccaacgcacaactgatcaaagcgccccttatcactggcgaaagtgcgcttttggctcccgtcctttaccgcggcattgcgctggtcgcggatgaactgggccctttgcaaatgattttgatgaccgcttcatccaccgcgtactcacataaccccaacaaaacggttgaagagcatccttcggctgttggcaagtcgacaattcttttgggagctttgcaggcccggaacaatgcccgtgtcattttgtccgggtctttggactttttttcgaacaaattttttactgcgacggtgaaccaagcggggggccacactgccaatgccgtaaaaagtgggaatcagcaattggctgcgtccgtcctcaaatggttgctcaaagagtccggagttttgcgcataaaatcagtgaaacatcacactgttggccaaaagtccccgcccgccgagtacacaattatggacgatgtgcgatatgaaattggcattgaggaattgcagaacggaaaatgggtgcccttccaaggcaaagatgttcagttggaatttgttcgaattgacccatttgtgcgcgtcactctgaaaaacaacaatggcaaattctcagctgaattaaaatccccgacgtttacggcgtgtacaaatttttggtggattaccaccgaatcggatacactcatttgact

SEQ ID NO: 47965 - DNA, 608 bp, Heterodera glycines
acatgttgatgttcagcgattggcttgttgacattccaggactttgtccaccgagtggacaatgcttccgtcgccggtcggacgtcgcactttggttgtggccaacagaggcgaaacgcgagtgtacttcaaaaatgggcatttggccaccaatttccattcacttttgccgggaggaaatgccaaaacgaaaggttctctgaccattttggacgccatttttgacgcgaagaagcggaagttgtacctgcttgatttgctctggtggaacaagctgctgtacacggacatggaattcaccgcgcgtcgcttctttctccagtcgcgcattgacgaaatgaacgaggacattgagcggaaaaacagcagggccagcatcagcaaaaatcaggaacgaaatggttgcaaaattgcggagcaggacaaaatgtcgtcttccgaaatctcgccgtacgaaatgtcaccgccgagcgacacgtcgccggaacaaaacgccgtcgagccaaaatctcgccgtgacattaaatttgtgcctgtgccctcttgcgcttgttctccggacgaaattggccaatttatgcgcaccctttttccattccgtctcgacg

SEQ ID NO: 47966 - DNA, 696 bp, Heterodera glycines
gcgttcagcaccttcttctccgaaacaggcaatgggcgtcatgttccgcgtgcggttatggtcgacttggagccaacagtgatcgacgagatccgcactgggacttacaagcatctcttccaccctgaacagctcatcactggaaaagaagacgcggccaacaactacgctagaggacactacacagtcggcaaagaaatcatcgaccccgtcttggatcggattcgtcgcatcgcggataactgcaccggacttcaaggctttctcatcttccattcgttcggtggtggcactggctctgggttcacatcgctgcttatggaacgtctctctgttgactatgggaagaagtctaagctcgagttctccatctaccctgctcctcaagtgtccaccgctgtcgttgagccgtacaattcggtgcttactacgcacacgactctcgaacactctgactgtgcatttatggttgacaatgaggccatctacgatatttgtcgtcgaaatttggacgtggaacgcccttcttacaccaatttgaaccgtttgatttcgcaagttgtctcttcgataaccgcttcacttcgatttgatggtgctttgaatgtcgatctcactgaattccagaccaatcttgttccttatcctcgaattcactttcctcttgcgacttattctccagttatctcagctgag

SEQ ID NO: 47967 - DNA, 600 bp, Heterodera glycines
ttagaaaaatggacaaaaagatgaaggaaatggagcagaaaacgacaaaaacaaaacggcgaaagaaagagaaagacacagaaaatggaggaacaaatcgggaaaagccaaaggacagtgaaaaggaaaatttggatggacgcatttcgaagagaaacaaaatgcaatcggaggaggcgacggtggacgccgaatgtgccgaattgcgggggaatgccaaagtgttcgtcgatgggaagggccgttgctacgacgtaatgctcagccaaacgaacattcagcagaacaacaacaaattctatctgatccaattgctgtgcaaccaaacggcggccaacaaattttgggtttggtttcggtggggccgcgtcggattcaaaggacagacgaatttggtgccttttgggacggactttgacggagcgttggaattatttcacagaaaattcactgacaaaacgcaaaatgatttcctaacggacattaaaaagttcaaaaaagtcgccggcaaatacgacctaatcaaaattgaccactcgcgagaagtgacgacggaaaccgaaagggacgcaaaagtgagaagaaaagttgcaaaaaccg

SEQ ID NO: 47968 - DNA, 551 bp, Heterodera glycines
agaacttaatttgaggatacattgaaaatattaattagacttcaaaatgggtatttcccaagacagatggcacaagcggcgaaagactggggggaagcgaaaccccattcacaaaaaacgaaagttcgaaatgggacggccggcagcaaatactaagattggtcctaaacgaattcatttggtgcgttgtcgtggcgggaacattaaacatcgcggacttcgtcttgataccggaaactttgcttgggcttctgaagggtgcactcgcaaaacgcgtatcatcgacactatgtacaacgcttccaacaacgaattggtgcgcaccaaaacattggtcaagggaatgatcgtctcaatcgatgccattccgttccgccaatggtatgaagcgcattacgcactgccattggcgcgcaaaaagggacaaaagttgaccgaagatgaggaggcgcggattggaggagcacagaaacgctcaaagtcgactctgaagaaatacacggaacgccaaaaaaccgccggggtggagccgcatcttctggaacagttcc

SEQ ID NO: 47969 - DNA, 459 bp, Heterodera glycines
caatggtggggagaattaaaaatgtgtattcgaaggtctacgatgtgccaagacgtccgttcgagaaagagcggcttgaccaggagttgaaattgatcggcgagttcggcctgcgcaacaagcgtgaggtgtggcgtgtcaagctgtcgttggccaaaattcggaagcgtgcccgtgagctgttgacgctggaggacaacgacccgaagcggttgtttgagggcaacgcgctgttgcgccgtttggtccgcatcggtgtgctggaggaggacaagatgaagctggattatgtgctcggcttgcgcgtcgaggacttcatggagcgtcggctgcaaacccaagtgttcaagctgggcttggccaagtccattcaccaggcccgtgtgttcatccgtcagcgccacattcgtgtccgtcgttaagtggtcaacatcccatcatttgctgtccgtctcgact

SEQ ID NO: 47970 - DNA, 246 bp, Heterodera glycines
acaaccggtgttgctcttgagcacgatggaccgtgcgctgctcgaacttagcttggccggaggaattgttccagacattccagcgcattgtggagaacatcaacgtgatcattgccacttacggagatgatgatggaccgatgggtccgatccaagtggacccgtccattggcaatgtcggctttggctctggacttcatggtcgggctttcacattgaagcagtttgcggagatgtacgctgaca

SEQ ID NO: 47971 - DNA, 630 bp, Heterodera glycines
  unsure (1)..(630): unsure at all n locations
gccgattctcgtaataacaatggatccaccggcggtggcggacggaggaaaaataaactctgttcggcatttcacaagcagtgcatgccgaacatcctcaacagcaattgtccgaattcgctggtggcatttcgcctgtcgacgccgtgccaatgccaaccgcggccaatgactgcaacaataattccatcgaatacattcaatcggaccgccgaaggggcccaattgatccgacaaacttcgaccatttggtccgtctgagtgagctcatccgttccatggccgaccttggcactttgcagcccgagttcggcataatctgtggctccggattgggcgcaattgccgaccaaatggagggggcgcggattttgcctttctccgaggtgcccggctttccacagccgagtgttattgggcacaaagggaatttggcgttcggtcggattggtggtcacttttgcctgtgtcttcagggccgtttccacccctacgaacacaaaatggacatggcattgtgtacgatgcccgtccgtctgatggctnttctcggcgttcgcacaatgatcgtctcaaacgcagccggcgcactgaacggcgacttccaaacgggcgacctaatggtcatca

SEQ ID NO: 47972 - DNA, 379 bp, Heterodera glycines
aagacgctaaaaaatggcacaacagcaagcgataacgaagaagcgtaaagctgtgcaagccggaattttcaagggccgaattaaacaactttctcatgaaggagttggccgaggacggttattccggtgtcgaagtgcgtcgtgcaccttcccgtactgaagtgatcatcatggcgacgcgcacccaaagtgtgctcggcgagcgcggcaagcgcatccgcgaactgaccgcactcgtgcagaagcggtttggctattccgctggacaaattgagctctatgccgagaaagtgttcagccgtgggctttgcgcggtggcccaatgcgagttattgcgttacaaattggtcggtgggctcgccgtgcgttgtgcgtgcta

SEQ ID NO: 47973 - DNA, 274 bp, Heterodera glycines
  unsure (1)..(274): unsure at all n locations
cnttgggcgttgaacacacgcgcaaagaattttgattaatctccttacagacaccatttatgacgaggatgaagttctattggcattggccgaacaattggggaatttcactccgttggttggcggacctgagtatgtacactgtttgctgccgccacttgaaaatttggcgaacattgaggagactgtcgtgcgtgacaaagcggtggaatcgttgcaaaaaatagcataaaaacacagtgcagctcaactcgaggaatatttcattccgatg

SEQ ID NO: 47974 - DNA, 511 bp, Heterodera glycines
tttaagatcgggggcattgggacagtgccggttggccgcgtcgagactggtgttctcaagcctggaatggtggtcacttttgctccgcaaggcatttccactgaagtcaaatcagtggaaatgcaccacgagtccttgccagaagcgcttccaggagacaatgtgggcttcaacgtgaaaaacatctctgtgaaggacattcgccgtggttcggtcgcgtccgactcgaagaacgacccggcaaaggagaccaagagcttcacagctcaagtcatcatcatgaaccacccgggtcagatcgctgctggttatactcccgtgttggactgtcacaccgcgcacatcgcgtgcaaattcgccgaactcaaggagaaggttgaccgtcggtctggaaagaaagtggaggacaacccgaaggcgctgaaaaccggcgatgctgggatcgtcgatttgattccaaccaagccgatgtgtgtggaggcattcacggactacgctccgcttggtcgtt

SEQ ID NO: 47975 - DNA, 571 bp, Heterodera glycines
taaggggctggaaagaaaaggcgctaatgagatgcaaattgaggttgatgggaatgcctccacaattgagcagtattttaacaacaaatacggtcgtcgtctggactacccaaaccttcctttgattgcaatgaattcgagatttgccaatgagaagcgagtgaattactacccaatcgaggttttggacatcattgacaatcagcgagtcaccactcagcaacaaactccgacaatgattcagcagtcaatcaaaaagtgtgccattccaccattagtcttcaagcgtcaggttcacaacactgcgaagtctattcatctctgggacagtgaatatctagacgaggcagggattaaattgactaccgagccaattgccctcagagctcaccagctcaaccatcctgaagtcaaagctggcgacggtaacatgcagaggccgatggtggaaggttctgctgcttggcgaatcaacagtgcgctggtccctcaatcggtgtttgctgacggtacttacagttggatgttggcgtgctttgttcaacttggtggtcgcggtcttagcgagcca

SEQ ID NO: 47976 - DNA, 517 bp, Heterodera glycines
tgttttggacatgggccgacacgaccattgccgtgcccaacgcacaactgatcaaagcgccccttatcactggcgaaagtgcgcttttggctcccgtcctttaccgcggcattgcgctggtcgcggatgaactgggccctttgcaaatgattttgatgaccgcttcatccaccgcgtactcacataaccccatcataacggttgaagagcatccttcggctgttggcaagtcgacaattcttttgggagctttgcaggcccggaacaatgcccgtgtcattttgtccgggtctttggactttttttcgaacaaattttttactgcgacggtgaaccaagcggggggccacactgccaatgccgtaaaaagtgggaatcagcaattggctgcgtccgtcctcaaatggttgctcaaagagtccggagttctgcgcataaaatcagtgaaacatcacactgttggccaaaagtccccgcccgccgagtacacaattatggacgatgtgcgatatgaaat

SEQ ID NO: 47977 - DNA, 467 bp, Heterodera glycines
aacccgtacaggacatgttgatgttcagcgattggcttgttgacattccaggcactttgtccaccgagtggacaatgcttccgtcgccggtcggacgtcgcactttggttgtggccaacagaggcgaaacgcgagtgtacttcaaaaatgggcatttggccaccaatttccattcacttttgccgggaggaaatgccaaaacgaaaggttctctgaccattttggacgccatttttgacgcgaagaagcggaagttgtacctgcttgatttgctctggtggaacaagctgctgtacacggacatggaattcaccgcgcgtcgcttctttctccagtcgcgcattgacgaaatgaacgatgacattgagcggaaaaacagcagggccagcatcagtaaaaatcaggaacgaaatggttgcaaaattgcggagcaggacaaaatgtcgtcttccgaaatctcgccgtac

SEQ ID NO: 47978 - DNA, 625 bp, Heterodera glycines
gcctccgaccaaacaaccagacgattcgttcagcaccttcttctcggaaacggcaatgggcgtcatgttccgcgtgcggttatggtcgacttggagccaacagtgatcgacgagatccgcactgggactacaagcatctcttccaccctgaacagctcatcactggaaaagaagacgcggccaacaactacgctagaggacactacacagtcggcaaagaaatcatcgaccccgtcttggatcggattcgtcgcatcgcggataactgcaccggacttcaaggctttctcatcttccattcgttcggtggtggcactggctctgggttcacatcgctgcttatggaacgtctctctgttgactatgggaagaagtctaagctcgagttctccatctaccctgctcctcaagtgtccaccgctgtcgttgagccgtacaattcggtgcttactacgcacacgactctcgaacactctgactgtgcatttatggttgacaatgaggccatctacgatatttgtcgtcgaaatttggacgtggaacgcccttcttacaccaatttgaaccgtttgatttcgcaagttgtctcttcgataaccgcttcacttcgatttgatggtgctct

SEQ ID NO: 47979 - DNA, 545 bp, Heterodera glycines
tctttttggcacttcctcccccactttttctgccttctcccccactttcttccgccaatgctctcatcgtccccaaaggaatttgttgcgcctgtgggagaggtgcatgcgtttgtggtcaaatgtatgcaaagtgtcggcacttcggcggcgcacgccgcgcaattggcggaccttttgttggatgccgacatcgttggccattacagtcatggccttaaccgcctttgcatttacattgaggacgtcgcctcgggcgtaaaaggcgacggtgaaccgaaggtgctcaagcagaagggtgccaccgcttgggtggacgggtgcgatttgcttggcgccgtcgtcggtaatttctgcacagaattggccataaagttggccaaagagcacggcatcggctgggtggtgtgcaagcggtcgaatcattacggcatttgccaacattatgccaaaaagatagcaaatgccggcttgttgggactgtcgttcaccaacacttcgcccatcattttccccactcgctcttcccaaattggccttggcac

SEQ ID NO: 47980 - DNA, 551 bp, Heterodera glycines
attgtgggatatatgcaggctcccccagccgaagtctttcccgtttttttcggcgaaatggaccttcaagggaacacgcaggcgacggttctgcaccaaattggcaactttcgtggcaaatttcaaggccaaatccagcaaaacatgttggcagccgctcaattttcactggagcaccgtggacgactttccacgtacggattgacatttgccaacccgtcggtgagtgccaacaattgccagggcactttggttgcgcaaatgttgcggcgtgtcaccaaaaatctcgaccttggcgccgaatacatttaccatagggacgaacggtttcctggcaaacagtcgaacactctcagctacgccttgcgctacattcagcccacttggatattttcgggaactcttgcgccaaccgaactccatttgtgttactaccacaaacagagtgaacacttgcagttcggcgttgaatttgaggcgaatttcaagcttcaggaggtgaacacgaccttcgcctatcaaattgaagtgcccgactctctgactctgag

SEQ ID NO: 47981 - DNA, 493 bp, Heterodera glycines
tcacactcgtcaaagtaatcttcgggagtgcatagggtcaaattcaaaaacgaattggaacgaaacatcactatcaaattgggctatgcaaatgcaaagatctttcgttgctccaatatcaaatgtccccggccgcattgctacaggtctgctgggtccagcactcccgaccgtttcccatgtgaacggcccaattgcggtggtgactttgtgtgtgttcgccatgtttctttcgtcgactgtcctggccacgacattctgatggccacgatgcttaatggtgctgctgtcatggatgctgcgcttcttctggtggccggcaatgagccgtgccctcagccgcaaacttcggagcatttggctgctgtggagataatgaagcttaaacaccttctgatcctgcaaaacaagattgaccttatcaacgagtctcaagcaaaggaccagcatgatcagatcaagagttttgtggaaggcactgtcgccgactcgg

SEQ ID NO: 47982 - DNA, 378 bp, Heterodera glycines
  unsure (1)..(378): unsure at all n locations
ggggggggggggggngtggggggggcgggaaggggcgggcggacgcggcncggcctcgaataactgcgagggcgggggcgattcccaacgagggttcggtgccaggcagtgataaggtcgagcaaaagtttacggtgtgccgtgcgcagaagaagagcgagcgccaggctgagctgaagcgtcgttacgagcagtacaaagctgagcgcatccagcgttatcggggagtcaatctgtacgtcgagaacctgcacgataccatcaatgatgagacacttcgaagcaattttgaatcctacggaaacatcacaagcgcaaaggttatgtgtgatgagcatggtcgctccaaaggattcggttttgtgtgctttgaaaagg

SEQ ID NO: 47983 - DNA, 311 bp, Heterodera glycines
  unsure (1)..(311): unsure at all n locations
ccattctgaacggtgactgtggcgtttcaacgtcgacggctgttaaatcgcagcaaatcaatgagatgacgagtaaagactactactttgactcatacgcacattttggaattcacgaggaaatgttgaaagacgaagttcggacggtgacttatcggaacgcaatttaccacaaccgtcacctcttcaagaacaaagtggtgatggacgntcggtnnntccgggacgggtattctttcgatgtttgctgctcgcgccggggcaaagaaagtttttgcggtggaatactcgaaaatggccacccaatcgaa

SEQ ID NO: 47984 - DNA, 627 bp, Heterodera glycines
taattcttcgacaccaactacaacaacaacagcagcacattgacaacgacttggtgtcgcagagccccgggacgctgtcggaggagcgttttgcgagcgactacgaactggtgtcgctgagccctgggacacgagtgtgcggccgatggaccatcatcaaagagcttggacagggcgcgtttggcaccgtcttcttgtgcaaggacaccaccaccgggcgacaggcggcgatgaaaacggagtcagcagacgcggaaccattcctttggcaggaggctgcaatcatgcgaagcgtgcacagtcgaggggcccaggcacggagcatttttgtcgctgttttgacgagggcaaggacatccaacgggacgcaaaacgcgggacattggtctcgttcaactacattgtgatgtcgctgattggacgtgggctatttggactcctgagcaaggcgaacgacaaattcagtcccgggacagcgattggcgtgtccatccagctgctgcaggcactgaagaccctgcacaacatcggctaccttcatctggatgtcaaaccggagaatgccgtcattggacgacgggaaaagcaatgagcgccaactgatcttcttaatcgactttggacttg

SEQ ID NO: 47985 - DNA, 531 bp, Heterodera glycines
ggggggggggggggggggggggggaggggaggggccggggggggggaccttgcaatgactttgagtcgtcctcaaaaggcaccgacgaattgagtccttctgggcccgaattaggagccgcggaaaagcaccggaagtaattgcccgcacagtcgcgtcaatgcctcccgaaaaaatgttcgaattgatgcgatccatgaaggaaacggtgaacaacaatccgcaaatggcgcgccaacttttgatggaaaatccgcagctgtcgtatgcattgctgcaggctcaagttgtgatgcgagtggtggacccgaagattgcctaccaaatgcttcatcgtgaacatgctcagccgcttgtaccgccgacttccatccccactcatatccctcaacaatttgctggcaaaccccctcaattgcctcccgaattcaacgtacctccgccctccgtcccctctcatcagtttcaaatgcaacctcctcccttggtgccaggccaatttcaccacggatttccatccatgggcatgga

SEQ ID NO: 47986 - DNA, 682 bp, Heterodera glycines
  unsure (1)..(682): unsure at all n locations
atagcgagtcttcacgcaaggagtggacaaggagaagcagttcttgaagttcttcgccatgaatttggcttcgggcggtgccgctggcgccacttcgctgtgttttgtgtaccctttggactttgcgcgaacgcgtttggcagcggatgttggaaaggccgatgcccgtgagttcaaaggtttggcggactgcatcatgaaaatcctcaagtcggacggtcccatcggtctctaccgcggcttcttcgtctccgtccagggcatcatcatttaccgcgccgcttacttcggctgcttcgacaccgccaaaatgctcttctccccggagggcaagcagatgaacttcttcgtcaactgggccattgcgcaggtcgtcaccgtgtcgtccggcgttctctcctacccgtgggacaccgtccgtcgtcgtatgatgatgcagtcaggccgcaaggacatcatgtacaagaacactttggactgtgccatcaaaatcatcaaaaacgagggactgctcaagggcatgttcaagggtgctttatccaatgtgttccgtggtactggcggtgcccttgttcttgcgttctacgacgaaatccagaaatatatccactganttgtgtgtgatcttcttagtatatnttgttttgtgttgcgtcatattcggtcatttgggtaatgataa

SEQ ID NO: 47987 - DNA, 564 bp, Heterodera glycines
  unsure (1)..(564): unsure at all n locations
tgaagatctgatcaaccttacaaaangaggcggttaaattgcccgactctgagcagcatcgaccggacgacgccgtgtccattataaacagtgcattcagcaacagaaaatcgttcagctgtccaaaaactaaaagcgaccttctaaccggcacttcgacggcaaatttaagtcccgaggacattggcattatcgcatcaatgggcgactcattggccaccggtgccgggctttggccgcggacggacatcgaattccgcggtgccgcctttcccattgttggtgatgcgacaattgatggtctcgtcaccgtccccaacattctgcgcgagtttatcgactccaatttgctcttcggagtttctcacggaatgggccaacgcgaccaattgcccgaaaaccaactgaatgtggcagtcagtggggcgagcagttcttcgatgcctggacaggccgtcgaattggtgagacggatgaagcgacttcgggaattggatgtgttcaacacttgggctttgattattgtcaccattggaaccgaagaggtctgcaaaaattgcacgg

SEQ ID NO: 47988 - DNA, 689 bp, Heterodera glycines
tcccgcatttgtcaattattcgaaacccgcaaggcccaactttcgcacttcagagttgaaaaatattcgttggcacgcgacgtgctctctgtgcagaagagaccggtcatctacgaagaactgttccaacacgcgcctttggtggtgatgaatgggttttccagtgaagacggcagcaaaaaaacatttacaattggtgcagacggtggtgcagaatatgttcccttccatcgacgtggacagagtgaaactcgcgtccattcgtcgcactttgctattaaactacgacacagaggacggactgatggagttcagacaatactccataaagtcagtgcccgcgggcgtttctcgttcggccaaaaaactgatgcagagcaaagtcccagacctgtccaagtacaaagacatcagtgacttcatgctcaaaccggagcagttgagtgacagcgaatttgaaggcgaacagacggaattggagctcacgcaggatattggcggacggggcaaaaaacgaggacagcaaaccaaattgaggttgatggaaattggaccacggatgacattacgtttgatgaaaattgaggaaggcgtcaacgcgggcactgctctttggacacactcttcaacttaacatcagattcatattccaaacacgtttattttgtttttatgcaagtgcgagaacc

SEQ ID NO: 47989 - DNA, 438 bp, Heterodera glycines
cacataattcaatgttggaagttgttctggaatatttgccatcgtggattcgcactcttaattcgttcatcgattatgagggtcagcgtaagtctgaacgtttttttccaggttattttgattgtccacggtgtgcttgggttttttgctggttatctcactcaacagctgtcggtgactatgtacagcgtcggagttggatttctgacctcttgtctgattgtgcttcccccttggccgttttaccgtcagaaccctttgaattggcaaccaaatagtccggtagaggaagacaaagctgcgaatccgtcatcatcatccggcaataagaattcaaaaaagactcgttgagtgtgatcataattcgatacggtttccttgtacactttcttattgttgataaaccgcttctgttgcaaaaaaaaaaaaaaaaaaaaa

SEQ ID NO: 47990 - DNA, 578 bp, Heterodera glycines
tgttatgggcttgtggcgcgcacccctcagccggtcactgcttgcactcaaagcgatgttgagattaaagtgcacaaatttttcattgtctcgcaagcagagcctcggcttccgcttcaacttgaagacgcggttcggcccgacaacgaccaagaggaattggccgtagtcaaattggacactcgtttggacaacagagtgctcgacttgcgaacgccaacgagtcaggcaattttccgtttgcagggcggagtttgcgacgcctttcgcaagattttgtcctctcgcggtttcatggaaattcacactcccaaaatcatttctgctgccagtgaaggcggtgcaaacgtttttgaggtttcttacttcaaaggccatgcttttctggctcagtcgcctcaactttacaaacaaatggcaattgctggtgactttggccgcgtgtttaccattggctccgtttttcgggctgaagacagtaatacgcatcgtcatttgaccgagtttattggccttgatcttgagatggctttcaatttccattaccacgaagttcttcaaactattgctgagatgtt

SEQ ID NO: 47991 - DNA, 400 bp, Heterodera glycines
ctgtggttgggtgactccattctgaaggtgctcgccgaaaacactacgaaccggacctgaagctgaacttgcgttttgaaattgaagtgctctgcagggagctgaacgttaacctgagaagcattgaggttggcggctacctgaaggagcagcgacgtttgcccagattggtgccgccctccaaacttggcacagccgcagcatcttcaacattggcacaatgtcagttgccgccaatccaaccaccgcacattggcgctgggatttcgtcacacagcacggcagattatacgccaactgacatagcgaacatcctcgctgaaatgagcatctcccggaaatattcaccggccagttatacgcccggcggatcgcaacaacaagtttcatcaataacagc

SEQ ID NO: 47992 - DNA, 427 bp, Heterodera glycines
cctcgaagacattcaatcggaccgtcgaaggggcccaattgatccgacaaacttcgaccatttggtccgtctgagtgagctcatccgttccatggccgaccttggcactttgcagcccgagttcggcacaatctgtggctccggattgggcgcaattgccgaccaaatggagggggcgcggattttgcctttctccgaggtgcccggctttccacagccgagtgttattgggcacaaagggaatttggtgttcggtcggattggtggtcacttttgcatgtgtcttcagggccgtttccacccctacgaacacaaaatggacatggcattgtgtacgatgcccgtccgtctgatggcttttctcggcgttcgcacaatgatcgtctcaaacgcagccggcgcactgaacggcgacttccaaacgggc

SEQ ID NO: 47993 - DNA, 664 bp, Heterodera glycines
acatgctgtctattttcttgcagaatatggcacgaaccaagcaaacagcccgcaaaacccaatcccaaaaaggcttttcgtcgagcagtggcagccaacacatgcagagtcaactgcacaacttgagaaaacagttggctacgaagcgtcccaacccaaaacgagggatcggatacaaagaattgcctcctgttaaaatagcccaaaaacgtcatcataagaaaggagcattggcacttaaagagatccgcaagtaccagaagagtgtgaatctgctcatcccgcgccgtcctttcatgcgtttggtccgcgaagtcacccaggacatgtcgcagtcgaccgacctgcgctggcagggcttggcactgctggcgattcaggaggccgccgaactgtacttggtctcattgttcgacgacaccaatctttgcgccatccatgccagtcgagtgaccataatgccgaaggacatgcaactcgtgcgcaaaattcgtggagagacttttcttaagccgttgtcctcgcagtactgatcgaagaaaatggtggtggttgatttcatagtcgatgacaatttgaatatgatatttttcgcaaatctcttttgtattctcgacccattccattttcactattatcctactttgtccaaaccccaaaatct

SEQ ID NO: 47994 - DNA, 729 bp, Heterodera glycines
gattgtcactgccctcttccaattgaaaagaatggacgagccgcttctgcaggaaaacccaaatcgttttgtcattttccccatcaaataccatgacatatggcaattttacaagaaggcagttgcttcattttggacagttgaggaggttgatttgtcaaaggatatttccgattggaaaagcttaactgataatgagcgattttttatttctcgagtacttgcattcttcgcagcttctgatgggattgtcaacgaaaatttagtggagcgctttgctcaagaagttcaagttccagaggctcgctgtttttatggtttccaaatagccattgaaaacattcattctgaaatgtattcgctgttgattaactcttacgttaaggatttggaggaacgtgctaagctttttaatgccattttcgagttcgaatttatcaaaaagaaggccgactgggcccttcgttggatcgcaagttccgaagcgtcttttgcggagagactcgttgcatttgctgcggttggggggattttcttctcggggagttttgctgcaattttttggcttaaaaaacgaggccttttgcccggtctgacgcacagcaacgaattaatttcgcgtgacgaaggtttacaccgtgactttgcctgtcttctctacacccacctcaaaaacacgccacccaaagaacgcatctacgaaatcatctcggacgcggtaaaaattga

SEQ ID NO: 47995 - DNA, 735 bp, Heterodera glycines
tgactttgactcgtttcaaaatcccgccgacgaattgagtccttatcggcccgaattggagccgggaaaagcaccggaagtaattgcccgcacagtcgcgtcaatgcctcccgaaaaaatgttcgaattgatgcgatccatgaaggaaacggtgaacaacaatccgcaaatggcgcgccaacttttgatggaaaatccgcagctgtcgtatgcattgctgcaggctcaagttgtgatgcgagtggtggacccgaagattgcctaccaaatgcttcatcgtgaacatgctcagccgcttgtaccgccgacttccatccccactcatatccctcaacaatttgctggcaaaccccctcaattgcctccccaattcaacatacctccgccctccgtcccctctcatcagtttcaaatgcaacctcctcccttggtgccaggccaatttcaccacggatttccatccatgggcatggctccgccttcgctactgcaacagcagcagcaacagacgccttttacacaacaaaagccgacacccatcgctcctttggcagtgcctccggcagcgaccgctccgcaacagcagcaggctgttactccacctccgcttagccaacaagcacagcaaagcaacagcgacaatttggacgaggagcagcaggcgcaaatgcttatccgcgtgctgcaactcaccgatgagcaaattcgtatgttaccacccactgaacgtgccca

SEQ ID NO: 47996 - DNA, 690 bp, Heterodera glycines
ggccatgctttcgccaattcctaaaagaattggagggataaacattggtgcggatgcgcagaaagaaaattttgcgctgaatgaattggtcagtgagggcgacttgcgcgagtgccttttgctcgcggggggcgacgggactgacacggacgactcacagatggcctatgggttggccggagaattgcttaaggcggttcgaaatgaagccgaacagcgcatttcggcgcgcatggcattggaggacaaagacaaagcggacctttaccagaacatcacaaagttgaagtcccaattggccataaaacgtgaacaagtctcatctctccgttctgttcttcgttccaacaaaagttcgaccgaaagtgtgctccaatgtttgcgggaaaaatttgagtccgaatttcgactgaaagacgaggccaacgaagtgttgcgcaaccaactcaagcagttcaaagaggacgccgccactttcgcctctcatcgcgcgactttcactgcacgctccgaggagttacagcagcaagtggaaagtctgcaggactcattgaaaatggcggaggaagagaagaaaactatcaatcagctgctcagaatgagcatacaacagaaattggcactcactcagcgattggaggagttggagatggacagggaacgacagatgcaacaagccaacagccgaag

SEQ ID NO: 47997 - DNA, 645 bp, Heterodera glycines
gattgtcctttcgtccctttcttttccttccgccctctttttggccacttcctccccactttttctgccttctccccactttcttccgccatgctctatcgtccccaaaggaatttgttgcgcctgtgggagaggtgcatgcgtttgtggtcaaatgtatgcaaagtgtcggcacttcggcggcgcacgccgcgcaattggcggaccttttgttggatgccgacatcgttggccattacagtcatggccttaaccgcctttgcatttacattgaggacgtcgcctcgggcgtaaaaggcgacggtgaaccgaaggtgctcaagcagaagggtgccaccgcttgggtggacgggtgcgatttgcttggcgccgtcgtcggtaatttctgcacagaattggccataaagttggccaaagagcacggcatcggctgggtggtgtgcaagcggtcgaatcattacggcatttgccaacattatgccaaaaagatagcaaatgccggcttgttgggactgtcgttcaccaacacttcgcccatcattttccccactcgctcttcccaaattggccttggcaccaacccaatcagttgttgtgccaattcacgcgaaaaaggcgacggattcatttttgacatggcggcgt

SEQ ID NO: 47998 - DNA, 561 bp, Heterodera glycines
tcggcgcgaccatgtgggattatgcaggcgaccccagccgaagtctttcccgtttttttcggcgaaatggaccttcaagggaacacgcaggcgacggttctgcaccaaattggcaactttcgtggcaaatttcaaggccaaatccagcaaaacatgttggcagccgctcaattttcactggagcaccgtggacgactttccacgtacggattgacatttgccaacccgtcggtgagtgccaacaattgccagggcactttggttgcgcaaatgttgcggcgtgtcaccaaaaatctcgaccttggcgccgaatacatttaccatagggacgaacggtttcctggcaaacagtcgaacactctcagctacgccttgcgctacattcagcccacttggatattttcgggaactcttgcgccaaccgaactccatttgtgttactaccacaaacagagtgaacacttgcagttcggcgttgaatttgaggcgaatttcaagcttcaggaggtgaacacgaccttcgcctatcaaattgaagtgcccgactctctgactctgagg

SEQ ID NO: 47999 - DNA, 583 bp, Heterodera glycines
caaagcaatttcgggagtgcatagggtcaaattcaaaaacgaattggaacgaaacatcactatcaaattgggctatgcaaatgcaaagatctttcgttgctccaatatcaaatgtccccggccgcattgctacaggtctgctgggtccagcactcccgaccgtttcccatgtgaacggcccaattgcggtggtgactttgtgtgtgttcgccatgtttctttcgtcgactgtcctggccacgacattctgatggccacgatgcttaatggtgctgctgtcatggatgctgcgcttcttctggtggccggcaatgagccgtgccctcagccgcaaacttcggagcatttggctgctgtggagataatgaagcttaaacaccttctgatcctgcaaaacaagattgaccttatcaacgagtctcaagcaaaggaccagcatgatcagatcaagagttttgtggaaggcactgtcgccgactcggcccccataattccgatttctgcccaacttaaatacaacatcgacgtcatttgtgagtatttgtgtaagaaagtgcccattcctccgcgtgacttctcttct

SEQ ID NO: 48000 - DNA, 578 bp, Heterodera glycines
ctctagactttctgcggtactacacttcggcctccggcgaggaacctgcagcttcaggactatgtttcgcgcatgaaagagaaccaaacatgtatctattacatcaccggcgagtccaaggacgttgtccaaaactcctccttcgtggagcgtgtgaagaagcgcggcttcgaggtcatctacatggtcgacccgattgacgagtactgcgtccagcagctcaaagaatacgacgggaagaagttggtcagtgtgaccaaggaaggccttgagctgccagagagtgaggaggagaagaagaaatttgaagaggacaaggtcaagttcgagaagctgtgcaaagtcattaaggacatcttggacaagaaagtccaaaaggtttctgtctcaaaccgtttggtctcttctccgtgttgcattgtgaccggagagtacggatggtctgccaacatggaacggatcatgaaggcccaggcattgcgtgactcctccacaatgggatacatggcgtccaaaaagaacctggagatcaaccctgaccattcaatcatcaagtctttgcgcgaccgtgttgagaa

SEQ ID NO: 48001 - DNA, 475 bp, Heterodera glycines
cagggcggtggagaagatgcacgaggtttcggtgccaggcagtgagaaggtcgagcaaaagtttacggtgtgccgtgcgcagaagaagagcgagcgccaggctgagctgaagcgtcgttacgagcagtacaaagctgagcgcatccagcgttatcggggagtcaatctgtacgtcaagaacctgcacgataccatcaatgatgagacacttcgaagcaattttgaatcctacggaaacatcacaagtgcaaaggttatgtgtgatgagcatggtcgctccaaaggattcggttttgtgtgctttgaaaaggcggatgaagcaaccaacgctgttgtggaaatgaacaacaaaatcatcgaaaacaagccgctttacgtcgcgcttgcgcaacgtaaggaagaccgcaaagctcaactggcctcgcagtacatgcagcgcttagccgcgatgcgcatgcagaaccctgctggcctc

SEQ ID NO: 48002 - DNA, 709 bp, Heterodera glycines
cttaagaggaagtttataatacaaatatattttgaatgagccaaacacacattctgaacggtgactgtggcgtttcaacgtcgacggctgttaaatcgcagcaaatcaatgagatgacgagtaaagactactactttgactcatacgcacattttggaattcacgaggaaatgttgaaagacgaagttcggacggtgacttatcggaacgcaatttaccacaaccgtcacctcttcaagaacaaagtggtgatggacgtcggttccgggacgggtattctttcgatgtttgctgctcgcgccggggcaaagaaagtttttgcggtggaatactcgaaaatggccacccaatcgaaaaaaatcatcaaagacaatcagatggacggagtcattgaggtcatccacagcaaaattgaggacattgagcaattgccaggcggaattgaacatgtcgacgtcattgtttccgagtggatgggctactgcttgttctacgagtccatgctcaacactgtgatctatgccagagacaaatggttggcatccgacggcattctcttcccggacaaagccacgctgtttttgtgtgccattgaagaccgtcagtacaaagatgagaagataaactggtgggataacgtgtacggcttcaacatgtccagcattcgtcagcttgccattactgagccgttggtcgatgtggttgaccg

SEQ ID NO: 48003 - DNA, 634 bp, Heterodera glycines
aggaatcgttaagtacatgcgaggacaagccggacccagctcgaaagaactcaaaagcatcagtgactttgacaaatttgtggatggcgatgacgttagcgttattgggctgtttgaaggagaaagcaagctgaaggactcctttcataaagtggccgacaccgagcgtgaccgtttccgctttgcgcattcctctaacccggatttgctgaagaaaaccggatacaccgacgacattgtggtgtttgtctcgaagaagttgcacaacaaattcgaaccgaacgaatttcattacgatggcaattatgacacggacaaaatcaaaaacttcctcctctacgaaaccaatgggttggctggaattcggacccaaggaaatctcttccaatttacgcatcgtccattggttgttgtttactacaccgtggactacttgaaggacccgaagggttctaactactggcgaaaccgtgtgctcaaagttgcgcaggattacaagcgcaaagtgcactttgccgtcagcgacaaggaggaattcgctcaggaagttgaacaaaatggccttgcggaccgtaaggaaagcgacaaaccgttggtggcggcaatcactgtcgatggaaagtacccaatgaac

SEQ ID NO: 48004 - DNA, 453 bp, Heterodera glycines
acatgtgcgacgaagaagttgcggttctcgtggtggaaacggctccggcatgtgcaaggctggtttcgctggcgatgacgcgccccgtgcggtgttcccgtcaattgtgggtcgtccccgtcaccagggcgtcatggtcggcatgggacagaaggactcgtacgtgggagacgaggcgcagtccaagcgtggtattctgacgctgaagtacccgattgagcacggcatcgtcaccaactgggacgacatggagaagatctggcaccacaccttctacaacgagctgcgtgtcgcacccgaggagcatccggtgttgctcacagaggctccgctgaacccgaaggctaacagagagaagatgacccaaattatgttcgagacgttcaacacgccggccatgtacgtggccattcaggccgtgctgtcgctgtacgcctctggccgtaccaccgg

SEQ ID NO: 48005 - DNA, 495 bp, Heterodera glycines
caagcggagaagacttcgccgcctgtctcgtcgaggcaatccgagccatcaatcgagggactaaccccgaacgaattcctcagggctcttcgggctatattttgtaaaaacttacaaggggaagtgatcggtgtgttcaagccaaaaaatgaggagccttacgggtcattaaatccaaaatgggttaaatgggcgcacaaattgctctgtccttgctgttttggtcgttcgtgccttgtcccgaatcagggttatctctcagaggcgggtgcttcgctggtggaccaaaaattgggcctggacattgtgccaaggactgcgattgtggcattggcagcacccaccttttactatggacgaattgataggacggtgacgaacacaaaagaacaaattgccaggaattatcccgacttgggccggcacttcaagcgcatcggattgccaccaaagcggggcagtttccagctgtttgtccgtggcttcaaagatgcc

SEQ ID NO: 48006 - DNA, 613 bp, Heterodera glycines
acattaattcttcgacaccaacgacaacaacaacagcagcacattgacaacgacttggtgtcgcagagccccgggacgctgtcggaggagcgttttgcgagcgactacgaactggtgtcgctgagccctgggacacgagtgtgcggccgatggaccatcatcaaagagcttggacagggcgcgtttggcaccgtcttcttgtgcaaggacaccaccaccgggcgacaggcggcgatgaaaacggagtcagcagacgcggaaccattcctttggcaggaggctgcaatcatgcgaagcgtgcacagtcgaggggcccaggcacggagcatttttgtcgctgttttgacgagggcaaggacatccaacgggacgcaaaacgcgggacattggtctcgttcaactacattgtgatgtcgctgattggacgtgggctatttggactcctgagcaaggcgaacgacaaattcagtcccgggacagcgattggcgtgtccatccagctgctgcaggcactgaagaccctgcacaacatcggctaccttcatctggatgtcaaaccggagaatgccgtcattggacgacgggaaagcaatgagcgccaactgatcttctt

SEQ ID NO: 48007 - DNA, 496 bp, Heterodera glycines
cccgaattggagccgggaaaagcaccggaagtaattgcccgcacagtcgcgtcaatgcctcccgaaaaaatgttcgaattgatgcgatccatgaaggaaacggtgaacaacaatccgcaaatggcgcgccaacttttgatggaaaatccgcagctgtcgtatgcattgctgcaggctcaagttgtgatgcgagtggtggacccgaagattgcctaccaaatgcttcatcgtgaacatgctcagccgcttgtaccgccgacttccatccccactcatatccctcaacaatttgctggcaaaccccctcaattgcctccccaattcaacatacctccgccctccgtcccctctcatcagtttcaaatgcaacctcctcccttggtgccaggccaatttcaccaccgatttccatccatgggcatggctccgccttcgctactgcaacagcagcagcaacagacgccttttacacaacaaaagccgacacccatcgctc

SEQ ID NO: 48008 - DNA, 706 bp, Heterodera glycines
ggcgctgaacttcgccttcaggacacttataagcgagtcttcacgcaggagtggacaaggagaagcagttcttgaagttcttcgccatgaatttggcttcgggcggtgccgctggcgccacttcgctgtgttttgtgtaccctttggactttgcgcgaacgcgtttggcagcggatgttggaaaggccgatgcccgtgagttcaaaggtttggcggactgcatcatgaaaatcctcaagtcggacggtcccatcggtctctaccgcggcttcttcgtctccgtccagggcatcatcatttaccgcgccgcttacttcggctgcttcgacaccgccaaaatgctcttctccccggagggcaagcagatgaacttcttcgtcaactgggccattgcgcaggtcgtcaccgtgtcgtccggcgttctctcctacccgtgggacaccgtccgtcgtcgtatgatgatgcagtcaggccgcaaggacatcatgtacaagaacactttggactgtgccatcaaaatcatcaaaaacgagggactgctcaagggcatgttcaagggtgctttatccaatgtgttccgtggtactggcggtgcccttgttcttgcgttctacgacgaaatccagaaatatatccactgattgtgtgtgatcttcttagtatatttgtttgtgttgcgtcatattcggtcatttgggtaatgata

SEQ ID NO: 48009 - DNA, 493 bp, Heterodera glycines
ctaagacaacattattgattgtgttgcccaactcgtcgccaattgtgctgttgcacaaccttggaaaacagtcggtgaacgcgcttgcgcttggtcgtaaatcagtgcacaacgatgtccaattgcccaactttgacgcgtacccgaacgatattgaccaaagacccggctcaacggttccatgtgactgaggacaggcgcaaaggcgtgtcaagcttcatcttttatggagtgggcggcgccattacgttgatgacagcaaagttcggcgtccgaaaagcggtcacttacaaatggatgccacgggaccaagccgcaatggcatcgaccgaaatcgaccttagcttggggccattgggcaagacaaagacatttgattggagtggtaaggccgtgtttgtcaagcatcggacggacaaggaaattgagcgcgaacgtgcggtggaagtgggcaaactgcgtcacccggaacgggacgaggaccgtgtgctga

SEQ ID NO: 48010 - DNA, 656 bp, Heterodera glycines
cagtgaagaaaggaaccctgaagatctgatcaactctgagctttctgcggttaaattgcccgactctgagcagcagcgaccggacgacgccgtgtcgattataaacagtgcattcagcaacagaaaatcgttcagctgtccaaaaactaaaagcgaccttctaaccggcacttcgacggcaaatttaagtcccgaggacattggcattatcgcatcaatgggcgactcattggccaccggtgccgggctttggccgcggacggacatcgaattccgcggtgccgcctttcccattgggggtgatgcgacaattgatggtctcgtcaccgtccccaacattctgcgcgagtttatcgactccaatttgctcttcggagtttctcacggaatgggccaacgcgaccaattgcccgaaaaccaactgaatgtggcagtcagtggggcgagcagttcttcgatgcctggacaggccgtcgaattggtgagacggatgaagcgacttcgggaattggatgtgttcaacacttgggctttgattattgtcaccattggaaccgaagaggtctgcaaaaattgcacgggtccaaatacaaaggcactcgtccaggcattggacattttgaaccgtgggattcacaaagcactggtgattttgt

SEQ ID NO: 48011 - DNA, 376 bp, Heterodera glycines
gagttgatgcgctcgaacgatgtagtcgatgccgagcgggttgcgcacgctctcgaccacgtccgcgccgaacatgacgccggctcctctgttgttcggggcgacgcctgtgatgctcgtcgacgggtcggcccaaaggaggtcaatttccagcgaacgaagcagtggctcggtctgcgggcgaagcaagttgctgagctggtccaggctgcagatctgattggagatgccaccgtgcatgcagaggatcttctcgccgaccagtccgacgaatggcatccaggcgaagacttgattgaagaggtcgaagagtcgacgagcgcccggtcgcgggtaacggcggtcgatctcatcgtagaagccatacactctgttc

SEQ ID NO: 48012 - DNA, 654 bp, Heterodera glycines
aactttcccgcatttgcgcattattcgaaacccgcaaggcccaacattgcacttcagagttgaaaaatattcgttggcacgcgacgtgctctctgtgcagaagagaccggtcatctacgaagaactgttccacacgcgcctttggtggtgatgaatgggttttccagtgaagacggcagcaaaaaaacatttacaattggtgcagacggtggtgcagaatatgttcccttccatcgacgtggacagagtgaaactcgcgtccattcgtcgcactttgctattaaactacgacacagaggacggactgatggagttcagacaatactccataaagtcagtgcccgcgggcgtttctcgttcggccaaaaaactgatgcagagcaaagtcccagacctgtccaagtacaaagacatcagtgacttcatgctcaaaccggagcagttgagtgacagcgaatttgaaggcgaacagacggaattggagctcacgcaggatattggcggacggggcaaaaaacgaggacagcaaaccaaattgaggttgatggaaattggaccacggatgacattacgtttgatgaaaattgaggaaggcgtcaacgcgggcactgctctttggacacactcttcaacttaacatcagattcatattcc

SEQ ID NO: 48013 - DNA, 476 bp, Heterodera glycines
gagattgataagcaactactattctaaattctttattccacataattcaatgttggaagttgttctggaatatttgccatcgtggattcgcactcttaattcgttcatcgattatgagggtcagcgtaagtctgaacgtttttttccaggttattttgattgtccacggtgtgcttgggttttttgctggttatctcactcaacagctgtcggtgactatgtacagcgtcggagttggatttctgacctcttgtctgattgtgcttcccccttggccgttttaccgtcagaaccctttgaattggcaaccaaatagtccggtagaggaagacaaagctgcgaatccgtcatcatcatccggcaataagaattcaaaaaagactcgttgagtgtgatcataattcgatacggtttccttgtacactttcttattgttgataaaccgcttctgttgcaaaaaaaaaaaaaaaaaaaaa

SEQ ID NO: 48014 - DNA, 566 bp, Heterodera glycines
aaacattcccaaagaatcaattgtcgatgtttatgggcttgtggcgcgcacccctcagccggtcactgcttgcactcaaagcgatgttgagattaaagtgcacaaatttttcattgtctcgcaagcagagcctcggcttccgcttcaacttgaagacgcggttcggcccgacaacgaccaagaggaattggccgtagtcaaattggacactcgtttggacaacagagtgctcgacttgcgaacgccaacgagtcaggcaattttccgtttgcagggcggagtttgcgacgcctttcgcaagattttgtcctctcgcggtttcatggaaattcacactcccaaaatcatttctgctgccagtgaaggcggtgcaaacgtttttgaggtttcttacttcaaaggccatgcttttctggctcagtcgcctcaactttacaaacaaatggcaattgctggtgactttggccgcgtgtttaccattggctccgtttttcgggctgaagacagtaatacgcatcgtcatttgaccgagtttattggccttgatcttgagatggctttcaatt

SEQ ID NO: 48015 - DNA, 481 bp, Heterodera glycines
  unsure (1)..(481): unsure at all n locations
ttaactttctttctcgtgctcaattcgtggacaaaaatgtgcgacgaagaagttgcggctctcgtggtggacaacggctccggcatgtgcaaggctggtttcgcgggcgatgacgcgccccgtgcggtgttcccgtcaattgtgggtcgtccccgtcaccagggcgtcatggtcggcatgggacagaaggactcgtacgtgggagacgaggcgcagtccaagcgtggtattctgacgctgaagtacccgattgagcacggcatcgtcaccaactgggacgacatggagaagatctggcaccacaccttctacaacgagctgcgtgtcgcacccgaggagcatccggtgttgctcacagaggctccgctgaacccgaatgctaacagagagaagatgacccaaattatgttcgagacgttcaacacgccggccatgtacgtggccattcaggccgtgctgtcgctgtacgcctctggccgnt

SEQ ID NO: 48016 - DNA, 380 bp, Heterodera glycines
ctgaaggtgctcgccgaaatacacaacgaaccggacctgaagctgatcttgcgttttgaaattgaagtgctctgcagggagctgaacgttaacctgagaagcattgaggttggcggctacctgaatgatcagcgacgtttgcccagattggtgccgccctccaaacttggcacatttttagcatcttcaacattggctcaatgtcagttgccgccaatccaaccaccgcacattggcgctgggatttcgtcacacagcacggcagattatacgccaactgacatagcgaacatcctcgctgaaatgagcatctcccggaaatattcaccggccagttatacgcccggcggatcgcaacaacaagtttcatcaataacagc

SEQ ID NO: 48017 - DNA, 674 bp, Heterodera glycines
atttaaaaattttgggttgtacacatgctgtctattttcttgcagaatatggcacgaaccaagcaaacagcccgcaaaacccaatcccaaaaaggcttttcgtcgagcagtggcagccaacacatgcagagtcaactgcacaacttgagaaaacagttggctacgaagcgtcccaacccaaaacgagggatcggatacaaagaattgcctcctgttaaaatagcccaaaaacgtcatcataagaaaggagcattggcacttaaagagatccgcaagtaccagaagagtgtgaatctgctcatcccgcgccgtcctttcatgcgtttggtccgcgaagtcacccaggacatgtcgcagtcgaccgacctgcgctggcagggcttggcactgctggcgattcaggaggccgccgaactgtacttggtctcattgttcgacgacaccaatctttgcgccatccatgccagtcgagtgaccataatgccgaaggacatgcaactcgtgcgcaaaattcgtggagagacttttcttaagccgttgtcctcgcagtactgatcgaagaaaatggtggtggttgatttcatagtcgatgacaatttgaatatgatatttttcgcaaatctcttttgtattctcgacccattcccattttcactattatcctactttgtcca

SEQ ID NO: 48018 - DNA, 603 bp, Heterodera glycines
caattgaaaagaatggacgagccgcttctgcaggaaaacccaaatcgttttgtcattttccccatcaaataccatgacatatggcaattttacaagaaggcagttgcttcattttggacagttgaggaggttgatttgtcaaaggatatttccgattggaaaagcttaactgataatgagcgattttttatttctcgagtacttgcattcttcgcagcttctgatgggattgtcaacgaaaatttagtggagcgctttgctcaagaagttcaagttccagaggctcgctgtttttatggtttccaaatagccattgaaaacattcattctgaaatgtattcgctgttgattaactcttacgttaaggatttggaggaacgtgctaagctttttaatgccattttcgagttcgaatttatcaaaaagaaggccgactgggcccttcgttggatcgcaagttccgaagcgtcttttgcggagagactcgttgcatttgctgcggttggggggattttcttctcggggagttttgctgcaattttttggcttaaaaaacgaggccttttgcccggtctgacgcacagcaacgaattaatttcgcgt

SEQ ID NO: 48019 - DNA, 711 bp, Heterodera glycines
ccaatgactttgactcgtccgcaaaatcccaccgacgaattgagtccttatgggcccgaattggagccgggaaaagcaccggaagtaattgcccgcacagtcgcgtcaatgcctcccgaaaaaatgttcgaattgatgcgatccatgaaggaaacggtgaacaacaatccgcaaatggcgcgccaacttttgatggaaaatccgcagctgtcgtatgcattgctgcaggctcaagttgtgatgcgagtggtggacccgaagattgcctaccaaatgcttcatcgtgaacatgctcagccgcttgtaccgccgacttccatccccactcatatccctcaacaatttgctggcaaaccccctcaattgcctccccaattcaacatacctccgccctccgtcccctctcatcagtttcaaatgcaacctcctcccttggtgccaggccaatttcaccacggatttccatccatgggcatggctccgccttcgctactgcaacagcagcagcaacagacgccttttacacaacaaaagccgacacccatcgctcctttggcagtgcctccggcagcgaccgctccgcaacagcagcaggctgttactccacctccgcttagccaacaagcacagcaaagcaacagcgacaatttggacgatgagcagcatgcgcaaatgcttatccgcgtgctgcaactcaccgatgagcaaatt

SEQ ID NO: 48020 - DNA, 578 bp, Heterodera glycines
acgcgtaaaaatcgactcagcggaaccgaggttaaccctgaaaatttcgaagcggtccttttgggcgatgagcagcgatcggagggaaagccggtgctgaaaagcactgaaaaggacaaagtgttcgtgtacttctcggaccatggcgcggtcggagttatcggattcccagcagccgacttaacggttaaacaattgactcaaacactgaaggaaatgcatgccaaaaaaatgtacggcgaattgacattttatctcgaagcatgcgaatcgggctcaatgtttgaccacacattggcgcagagtttgaaaatttacgcagtcaccgcggccaatggcgacgaatcgagctggggctgtttttgcgacaccaaatttttgcccggaaattgtttgggcgatcttttttcagtgaattggatgcaagactcggaccaggaaaatttacgcaccgaaactctgcggaaacaatttggcattgtgcgcgaagaaacgaacaaaagccacgtgatgcactacggcgacttgcaaattcaggacgaacacgtttctgagtttatgggcaaagagcaggcgca

SEQ ID NO: 48021 - DNA, 637 bp, Heterodera glycines
cagaatttcctaaaagaattggagggcataaaaattggtgcggatgcgcagaaagaaaattttgcgctgaatgaattggtcagtgagggcgacttgcgcgagtgccttttgctcgcggggggcgacgggactgacacggacgactcacagatggcctatgggttggccggagaattgcttaaggcggttcgaaatgaagccgaacagcgcatttcggcgcgcatggcattggaggacaaagacaaagcggacctttaccagaacatcacaaagttgaagtcccaattggccataaaacgtgaacaagtctcatctctccgttctgttcttcgttccaacaaaagttcgaccgaaagtgtgctccaatgtttgcgggaaaaatttgagtccgaatttcgactgaaagacgaggccaacgaagtgttgcgcaaccaactcaagcagttcaaagaggacgccgccactttcgcctctcatcgcgcgactttcactgcacgctccgaggagttacagcagcaagtggaaagtctgcaggactcattgaaaatggcggaggaagagaagaaaactatcaatcagctgctcagaatgagcatacaacagaaattggcactcactcagcgattggaggagttgg

SEQ ID NO: 48022 - DNA, 695 bp, Heterodera glycines
gcaaaaatgcctcgctatgatgcgaccgatgacttgtcaggagcggaatatttggccagcatttacggcacagaaaaggacaaagtgaattgttccttcttcttcaagattggcgcatgtcgacacggggacaactgtttgcgggcacaccacagaccgaccttttcgaacacagtgctgctcaagcacttctaccagagtcccattgtgaacccggcacaggcggacgctttcgacaaggtcggtaaaaaggatgagcttgagcagcgccattttgatgagttttacgaggaagtgttcaccgaacttcaacgcacttatggtcctgttgaggaattgaacgtttgtgaaaacattggcgagcacatgattggcaatgtgtacgtgaagtttgtttatgaggaggacgcagaaaaagccgtacaaggcctggagaatcgatggttcaacgggcagcccatctacgccgagctgtcccccgtgtccgactttcgcgaggcgcgttgtcgccagcacgaaatttccacctgttcaaagggcggattttgtaatttcatgcacctgaaagatgtgtcggatgaagtctacgaacgttgttacgcaaatcgtggtgcgcgctaccgcagcacacgtcgccacgaccgcttttatgctgatgatggctacgaccgtcgcgaagggggcaacagggatcg

SEQ ID NO: 48023 - DNA, 726 bp, Heterodera glycines
aacaacaaacctacctaaaaatacgtcctactttgtttcttacgtttctgtctgataaaagggaaaataaagaaaatggcgcaagcagttgctgctgttgctcccgcacctaatgcaaacgcagcctcggctcaggcaacccaaccgcaggttatggcaccatcctatccgttggcttctctctatgtcggcgatcttcatccggatgtcactgaggcaatgctctttgagcggttcagcaatgctggtcctgtgctctccattcgtgtttgtcgtgacgcgatcactcgtcgttcgcttggctatgcctatgtgaattttcagcagccggcggatgccgaacgtgctttggacaccatgaactttgatatgatcctgaacaaaccgattcgcatcatgtggtcgcaacgtgacccaagcattcgtcgctcgggtgctgggaacattttcatcaaaaacttgggcaaggaaatcgacacaaaggccatctacgacaccttttccatgtttggaagcattctgagttgcaagatttccactgacattgatggaggaagcaaaggatatgggttcatccattttgagactgaggaagcagcgaacagtgcaattgcgaaagtgaacgggatgcttttggatgggaagaaagtgtttgttggaaaatttttgccacgttccgctcgtgacaagcaaattggtgatccgtccagtcgtttcaccaatgtt

SEQ ID NO: 48024 - DNA, 342 bp, Heterodera glycines
  unsure (1)..(342): unsure at all n locations
ggtcctggaggagttttggcccggccagaatgtgaagatcggccatatgacaatgaattcttttcgagaagtgaacagacattcagaattgccaattgcacgcataaagaaaataatgaaaatcgaggaaggcgtgaaaacccagatgatcagtgccgaagcgcctgtactgctcgcaaaggcggccgaactttttatcgaagaattgaccctccgcgcttggctgaacaccaacgacaaccgccgtaaaaccatccaaaagtcggacatcgccgccggggcggccaaaagcgaaatgttcgactntctcattgacatcctcccgcgcgacgagctgcaaaa

SEQ ID NO: 48025 - DNA, 541 bp, Heterodera glycines
  unsure (1)..(541): unsure at all n locations
ccacttaaacattgaaattatgcgagaaaacccgaagctgctccgtgtgcggaaatggtttggcatccgcaaagagttggccgccattcgcacagtgtgttcacacattgaaaacatgatcaaaggcgtgactgttggatttcggtacaaaatgcgctcagtgtacgcgcattttccgattaacatcacgctgcaggagaacaacaccgtcgtcgagattcgaaacttcttgggcgagaaatttgtgcgccgtgtcggactaccgcaaggcgttagcgctgtaatgtccaccaagcagaaggacgagttgatcatcgacggtaccgacatccaaaaagtgtcccaggccgctgctcgtatccaacagtcaacgactgtgaaaaacaaggacattcggaaattcctggacggcatttatgtgtccgagaaggtggccattgccgatgaatgagcacacaaagacaaaaaacccattgttaccccttttttgttggtcagaatggataaagaaatgttgcnnnnnaaaaaaaaaaaaaaaaaa

SEQ ID NO: 48026 - DNA, 601 bp, Heterodera glycines
  unsure (1)..(601): unsure at all n locations
cgcgcagataaggctagatggcttcggccgcgccgcccctcggcccttctttggggcagcgaggcgtaaacgtggcgaacttctgcaaggagtttaacaatttgacttcgactattcgatttggtacaaatttgcctgtgtctatccacgtcaaaccggacagaacttacgaaattgacattagcactccgaccaccgagtggcttctgcaacaagcggcggggatacgacgtaaccggcaggaggaaggagaaatcgtcggaatgatttcggtgaaacacgtatacgaaattgccaaagtcaaatctcaagacaaatctctcattggagtgccgttaaaagaaatttgtcaattggtcattgagagagcggattcgattggcatcaaagtgcaaaatgaagatttagacccggaagaatataggaaattcctggaacatcgtcaggaagttgtgcaaagacaattggaggaaatagcgaagcaagaagaggccaagctggccagaacatgatcggattttgattcattgttttctttttctcttcagcttatgaatgaacgtcaagttgtgtaattacactcattcgttcgcnaaaaaaa

SEQ ID NO: 48027 - DNA, 682 bp, Heterodera glycines
atgtgattgacagtggcgaggtcgatgtgttcgtcatggcgagttcgtgttgagcattaaggagggaggttcatttggcgagttggcactgatttatggcactccgcgcgcagccaccgtagtcgcgaagacgaacacggtcaaactgtgggccatcgaccgcatcacttaccgcgccattcttatggggtcgacgatgcgaaagcggagaatgtacgacgaattcctgagcaaagttcagattcttgccgacttagacaaatgggaaagggcaaatgtggcggatgcgttggaacagtgccaattcccctcgggcacccacgtggtggagcagggacatcctggggacgaattcttcatcattgtggagggcgaagctgaggtgctgcagagaccgaacgacgacgcgcccttcgaagtggtcggaaaattgggaccctctgactatttcggggaaatcgccctccttctcgatcgccctcgtgccgccaccgtcgtggccaaaactctgctgaaatgtctgaaattggaccgggcacgatttgagcgcgtgatgggtccggtgcgtgagattctcaagcgcgacgtgtccaattacaattcgtacgtgaagctgatgacttgacgagccggcagatctttggcggccaaagaattgatcgccgatcactctcccccccac

SEQ ID NO: 48028 - DNA, 566 bp, Heterodera glycines
  unsure (1)..(566): unsure at all n locations
ccagatcgtcttgaccgttggtacccgtccattcgatttcgcaaaaatgacgaagtgatcacgcccattcgccacaaggaattgggagattggaagaagttgagcattgaggagaagaagcttatctaccgctactccttccgtcaaactttggccgagtttgaggcattgacgccttatggctatctcacagtcactttgttcttttctatgcttgggcttactattctgtacgcttcgtttgttaggacttacgtgacaaaattcaatgaccgattgcctgacactttcgatgatgaatataaagaaagtcaggccgagcgccgtgtggtactggaaaggggcaatccttatggaccggcctactactacgattacgagaaaaatcgttggaaggactgaagtggacggaaaagtcctactcgaaattcgttggagtgttttttaattttaggggatttttaatggacatttcaaatttgcacattttttcgtaaatttcttattcagtttttacgattgataaagttgggtttcagtaaanaaaaaaaaaaaaaaaaaaaaaa

SEQ ID NO: 48029 - DNA, 616 bp, Heterodera glycines
cattctcttctcgccaagccttctccgcatttggttaagccgccggttctcctcaacaaataacacacaaccatcatgtcggaaaagaaggtcaaaaaggtgaagaagaagcccaggaccggctccgaggcgagctccttcgaccagaagaccatccaggagttcaaagaagcatttggcattatggaccaggacaaagacggagtgatcagcaagcaggacctgaaggacttgtacgccacactcggagttgtggcgagcgactcgcagatggacaacatgctcaaggaggcaccggggccaatcaatttcaccgttttcctgacactgttcggagaacgactgactggcactgaccccgaggcgacaattatcggcgcctttcaaatgttcgacaaaactgactgtggcgaaatcacagaagagacattgatgaaaattctgaagaacaaacggggggagccattgacggaggacgaagtgcaagggatgtacaagggaaccctccaattagtggaggcaaagtggactacaaggcattcgcgcatttgatcacgacaggcgcagcggaggagttggccaaagtgggctaagcggggccatggacggacggtgg

SEQ ID NO: 48030 - DNA, 636 bp, Heterodera glycines
gtgcgcccgtcaaattcatactgtccgttcccggcatttgaggcggcgcccgcggacggaggcaacgcgacggttgaaaaggcccccgacttttccccgccgtcccccgacgtagtcgaactgagcgccttcctgggccaggaactgtccaagtcggagcggcctgagttgggcggtgccaatattgtgatcagcggtggccgagggctcaaatcgggcgaaaacttctcattgctctatgcacttgccgatgtgatgggcgccgcggtgggcgcctcccgggcggcggttgatgcgggctatgtgcccaacgacatgcaagtgggccaaaccggcaaaattgtggcaccgcaattgtacatcgcggtgggcaccatcggtgccatccaacacttggccggcatgaaggacagcaaagtgattgtggccatcaacaaggacaatgacgcgcccattttccaggttgccgactttgggctcgttgcggatttgttcaaagctgtgcccgagctaacggaacagctcaaaaaggcgaacaaataatttgggtcagcaattgaaaaaataatagacaaatggaaatatcaaatatatatttaaaattcacaattttgtatgtgtacacaaaatcatcaa

SEQ ID NO: 48031 - DNA, 719 bp, Heterodera glycines
cagaaaaagttattctcatgttgacctcgtggtgatgtgcgacggatttgacggagagagaggcaccaatgtggcgggaggacgaggctattttctgaaaggaccgttggtgttccttgaacaagcgctcatcgcattggcattgcaaatgctcaacaaaaagggcttcacgccgctttacacgcccttttttatgcgcaaagacgtaatgcaggaggtggcacaactcagccaattcgacgaagagctttacaaggtgaccaccgcaaaaaagacggacgcagccaatgaagacggctctcccgacgagaaatatctaatcgcaacttctgagcagccaatcgccgcctttcatcgtgacgaatggcttaacccatcggatttgccaatcaaatatgccggaatgtccacctgttttcggcaggaggtcggaagccatgggagagacacccgcgggattttccgtgtgcaccaattcgagaagatcgaacaatttgtcatctgttccccatttgacaacgaatcgtggaagcacatggacgaaatgattgacaatgctgaagagttttgcaaagtgctcggccttccctaccgaattgtggccattgtttcggccgaactgaacaacgcggcggcaaagaaattggacctcgaggcgtggttcccgggcagcggtgcatttcgggagctggtttcatgctccaactgtacagattacc

SEQ ID NO: 48032 - DNA, 698 bp, Heterodera glycines
tcaaaaaaaaaatcgacaaattataaaacacaaaaaaaattgacaaaacaacaaaaaactacctaaaaaacacacatccaactttgttcctcgcgtttctctctgataaaaggaaaataaaagaaaatggcgcaggcagttgctgctgttgctcccgcaccaaatgctaacgcagcctcggctcaaacaacccaaccgcaggttatggcaccatcttatccgttggcttctctctatgtcggcgatcttcatccggatgtcactgaggccatgctctttgagcggttcagcaatgctggtcctgtgctctccattcgtgtttgtcgtgatgcaattactcgtcgttcgcttggctatgcctatgtgaattttcaacaaccggcggatgctgaacgtgctttggacaccatgaactttgacatgatcctgaacaagccaattcgcattatgtggtcgcaacgtgatccaagcattcgtcgctcgggtgctgggaacattttcatcaaaaacttgggcaaggaaatcgacacgaaggccatctacgacactttttccatgtttggaagcattctgagctgcaagattgccactgacattgagggaggaagcaaagggtatgggttcatccattttgagactgaggaagcggcgaacagtgcaattgcgaaagtgaacgggatgcttttggatgggaagaa

SEQ ID NO: 48033 - DNA, 765 bp, Heterodera glycines
ggattggcgcagtgcactgggtcattgatacgatgattatggtcggacattctttcggtggctatttggcctcgtcctatgcccttgagcatccgtcgcgggtgcgacatttggtgctggtcgacccttggggtttccctgaaaggccacaaattgaacaattgcacatcccaatttggatgcgtgtcttcggcagattgctctctctgttcaaccctttggccactttgcgtgcggctgggccttttggcgctcggctggtgaaaaaattgcgttccgaccttgggattcgctatgctcaccaggacccggacgccatttacgaatacatttaccaatgcaatgcgatggaacccacgggcgaaattgcatttggaacaatgtccaagaattttgggtgggctaagcgaccgatgattaatcgtttcggtgggataagtccatctgtgccggtcactttcatttggggtggaaaatcgtggatggacccgggcccggcctatgaaattcaatacaggaggcaagatgcctatgtggatgttcagattgtcacccgtgccggccatcacgtctacgccgatgcgccagcggacttttgccgactgttggcccacgtttcggacatggtcgacggcgactcggacttggccggctcggcggatatggaagatgcgatggaccgaatggcagatactttgccatcgatggcgtcgcaaaaaatggcatggctaatgcaacagagtacaacagcaacagaagcagcga

SEQ ID NO: 48034 - DNA, 817 bp, Heterodera glycines
  unsure (1)..(817): unsure at all n locations
agggaaattacctcgcggctgaaacccggcattgaaaattcggagcgtcgtttcgatgtgcacaaattcacttgcgccgctttggaattgcccgacttttcggacttcgcccgactccgtccgttaattgacgcactcattgctgaattggatctcaacgatttcctcggctgcaccgcggcgctcgaaatgctggcggagacggccgccacggcgccaaagtgtgtgcctttttttggccaaattggcctcctggacaaagtgtacgcgctgttcatccgaaccaaggaggagccggacatgggcatcattcacattgcgtgcattcgcttcttcgcctatctgtgcaccaccgatgacaacgcattgaccaaatttcccaaattcacggccgatgttttcgacgcggtgttcagatttgatgcattcgacgtcacgcgtcgtcagttggccttcgaaacgttggcagtgatcagttcgaccagcggggccaagcagatattctcgcagaacgaaactctctacaacatgcaacgggcgatgagcaatttggctgtggcggtggcaacggccgccgagccgtcgctgaaggcgcgtcatttggaagcagttcggatgttttttgatcggattgccgacgaaagcggttgccaacccgaacagaaatgcaccgccgcgtccgctgnagctgaagagcagctgctccaccggtggttccgctggttgggcgaaccgttcccccggctgttgctccaatgtgtcagggatcccatctncgaagttcagttggccgctctccgcgtgctgatggcactga

SEQ ID NO: 48035 - DNA, 738 bp, Heterodera glycines
caatttccgtcgggaaggtgtccgagtgatcaagacatcggaaaaacgatgaatttgaaagcgtgcccaactttggccaccgccaccgttttcttccccgcttttatatgtttcacacgtttgacgaacatcatttgcatatgactgcgttggcctgcatatttttggccggaaaagtcgaagaaacgcctaaaaagtgcaaagatttgctgacggtggcccgagaattatacccccaccatttcacagcaaaagtaacgccggacgatttgatgcttatggagcgagttctgctccaaacaattcgctttgatctccacgtggaacatccctacacttttttggtccaatatgccaagggctttcgcatggacaaggaatacatgagcaaaattgtgaccaacgcatggacatttgtcaacgattcgctcggcacaacactgtgccttttgtgggagcccgaggtcattgccattgcccttttgtacatgtccttcaaaatggagcgcatggaggagcagcaaatcggacggacattccattttgacgcgagcacagagtggtggaatttgtatgtgcaaaatttgaccgtgcccatgatggacgacatttgtcacaaagtgttggattccatcgcaccagcgaacggagaggacgcgccaatggcaaacggaacaaaaaattgacagatttaaatttttgtattttttttgttttattttaaaaaatatttttttg

SEQ ID NO: 48036 - DNA, 680 bp, Heterodera glycines
taaaacttggcaaaactcttattaattgccgttaaagattgatttgaagaatggctgccatgaatcctgaatatgactatctcttaaattgctgttgatcggcgattctggtgttggcaagtcgtgtctgttgcttaggtttgcggatgacacctacacagagtcgtacatttcgaccatcggcgttgatttcaaaattcgcaccattgagcttgaggggaagacgattaaacttcagatttgggacaccgccggacaggaacgcttccgcacgattacgtccagttattatcgcggagcacacggaatcattgttgtttacgacattacagaccaggactccttcaacaacgtcaagcaatggctccaggaaatcgaccgatacgcatcggagagtgtgaataaacttcttgtcgggaataaatgcgatttgaccaccaaacgtgcgatagagacgaatgttgccaaggagtatgccgaccaattgaacattccattccttgagacttctgccaaaaactccactaatgttgaacaggcgttcatcacaatggccactgaaatcaaaaatcgcatgggccctcttcaacaggccggtggcaatgcgtccgccgtgcgcattggtccgtctcagccggtgcaggacaaaaaaacgggcggatgttgctgagttagccaac

SEQ ID NO: 48037 - DNA, 703 bp, Heterodera glycines
  unsure (1)..(703): unsure at all n locations
caattgttgttgcaatcgccgcgacttgctgattcgccaattaccgggagctaatcggacgcttaccaaagattatggcaaatgatgcaaatatctttgtcgccgcaagtgccaccaaatgtgtgatgcttttcgccaaaggattgcgtgccgaattcacgcctcacgtgtcgttggttgtcccggtgatcttcgacaagttcaaagtggagaaacggttgctcagagatgctctcgtcgagtgcatcgatgtcatcgcagcatataccagtttcgaccacctaagcaaggccttgctcgaggctatgacctccaaacagaatccgagtcagaaatcacagacggatttgttcatctaccgcctgttccgttctcttccggccaaagacgttcccaagggtttgctgaaggatttggtggccattctgagcaaacatggctttgatgccgcttccgaagtgagggactcttcttttgctgcgttgggtgccattatgaaatgcattggggaaaaggccttgggctgtttcatttcacccgaattggccaaagatgcgaacaaaatggccaagattgctttaaaacgtgacactgcttaggtatttttttatttgcttagaaattttcccatatttttgttaaattttagaccatttattntctattttttttaccccattttccatgtatttgataaatgaga

SEQ ID NO: 48038 - DNA, 677 bp, Heterodera glycines
gaattggcactgattttgctctgttcggtgtttgcttttattgtctgatcagtggcaatttcggctcgctgtacggcgattatccgagcatgttccagctgcgggattggaccagacagtacggcaagcagtacggtatccaatacggttggcgcaacgcgttggtgatttctgacccggcaatggtccacgagttgcttgtcaccaaatttgaatatttccacgcaagaaatctttcgcccatctttggcaatttggacacaaacaaatggatcagcatgttcttggccaggggaggccggtggaaaaggctccgaacgattgcgaacccggcattttcggtagcgaatctgaaaaagtgcatgtggctcattgacgattcagttaaaaatgccatcaattttctggaaaaagcgcgcaacgaaggcaaatcttttaacattcaaaggcatttcgtagaaatgagtttcgatgtgatcgcccgtgtggcgttggggcagcgcgagtcgcgacagtttgagactgaaatggcacacctggcgattgagtcgatgcaaaaatacaataacactccgttcgattacgtcggcttcgctttcccgtggttcggcattcattttttggaaccgttcatcagttggagcggaatattgcgcaaagacccgctaattatactg

SEQ ID NO: 48039 - DNA, 719 bp, Heterodera glycines
caaaaaatgaaattggccatcaaacggttgcattggaatgaaactgatgggatttggtatgactacgacttggagagagaagctcattccaatacctattacgtgtccaatgcattgccgttatattcaaaatgttacgacgacgaggatgacgtcacgccgtacaaagttttcgagtatctgaagcgtgaaggtgtgctcaacttcaccagaggcatcccaacttcgttggcaatgggcagcatccagcaatgggacaaggagaacgcatggccaccgatggtgcacatggtagttgaagcatttcgaacaagcggtgatctaagtcttatgaaagccgcggaacaaatggcaactcaatggttggtcgtcaattataaaggttatgtatcaacctatgcgatgttcgagaagtacaacgtttccatgatcaatgaagagggcgttggtggttcaggaggtgaatatgaggttcagaagggatttggttggacaaatggtgttattttggatttgttggacaagtacgggtccaaaatctccgtctccggtgcggctgtccccaacggcgttcgttttcttcctctcgctttggttgtgcttttgttcatgaccgtagttgaaattgctattgcacaatgtttttgatgtatttctgggtaattctctgatactgacgtaattcatcttttttgtatcatcatgcattatcataaact

SEQ ID NO: 48040 - DNA, 643 bp, Heterodera glycines
ccgtcttcgtcttccttttactatatttccttgcatattcgtcgtcattgttcaactgcgctgattcgcatggctgatgctgaacatcccactgatgccgctgttgtggacaacttcgagacgcgcgctcgccgcttcttcgacctgatcaacgacggcaacatccaacaacttcgtgtgctgatcgatgcgctggacgccgacgagctgaacattttgctgcggtggatggttgatccagtggagcgcgactacacccgatcacgatcagcactttggagtgccttttttcgacaacacatcgacattgttgatctcttgttggagaagggcgccgatccgaatgagccggtggttggccgtgagaacgacattaacacgaacttgacgcctcttttcgttgctgccctccatgcacattttccgctgtgccgtgtgctcgtcgaccgtggtgccaacgtggacttgggatcggactttgccacaacgccgctgatgatggcttgcaaaagatcgcaaatggaaattgtcgcatttctcatcgagaatggtgccgacatcaatctgcagaatggtgacggcgaaacggcattgatgatcgcctgttcaagggcaaatgtggacattgtgcgcttgttgctgt

SEQ ID NO: 48041 - DNA, 661 bp, Heterodera glycines
  unsure (1)..(661): unsure at all n locations
caagtctattgacgttgcaaactgacccgggctgtcgggtcgcattgcgagcggacagttacgcactgcacatgattttgccaaacaaagtggacccattggtcagtctgatgatggtcgagaaagtgcccgactcgacgtacgaaatgattggcggattggacactcaaatcaaggagatcaaagaggtcattgaactgcccgtcaaacatcccgagttattcgaggctttgggcattgctcagccaaagggcgttcttctctacggaccgcccggtactggtaaaactttgttggcgcgtgccgtcgcccatcacaccgaatgcactttcatccgcgtgtccggctcggagctcgttcagaagtttattggggaaggtgcccgcatggttcgcgaactgttcgtgatggcaagagagcactccccttcaatcatttttatggatgaaattgattcgattggatcgtcccgtgtcgagggaagtcacgggggtgactccgaagtgcagcgcacaatgctcgaattgcttaaccaactcgacggttttgagcctaccaaaaacatcaaagtgataatggcaacgaatcggatcgacattttggacccggcactgctcaggccangtcggattgatcgtaaaatcgaatttcctgcacccga

SEQ ID NO: 48042 - DNA, 377 bp, Heterodera glycines
  unsure (1)..(377): unsure at all n locations
aatagaaatgctttgcaatttccgcaacttcaattgttcgtcctcgcggcacttttcgctcgcttctgttttacttcagcagcaaaaattcgctgctgtttcttcaccgcccaataaaaattggaatgctgtgcttatncgaagcgatgcgtttgaagtcaaccagcatcgtccaggatgatgcaatcactgaacatggccatgatgaccacgggcatggacaccacgcagtcaattatgggccgccgattacctatgactacactcctataccatctcaaccttataagaaggtctataaggaactgaagcagaaattcatcacgtatttggcgatgagcttcgtctttttcatgttttgctgttacgttggctat

SEQ ID NO: 48043 - DNA, 615 bp, Heterodera glycines
ttttcctttgatgaaagccgccgttgtgggcgaaggcgccgttggggcgagcgttgcattggccatccgtcgagcacatcccaatgccaatatcactgttttctcggaccgggactttgaaaagaccaccagttacggaccggaaggcatttttcgggttgatgtgccgggaacggagcgattggccaaagagtcattcgaattttgggcgaaaaccgaaagggacgagttggcccacaaaactggcgttcgcctcatttcgggctattgccaatccaacgacagaaaatggatcgaagcgcaagaaagttcaatgtccgacattgtgtacaattggaagtggctcagtgagcgcgaattgcgcacacttttcgtccgtccgtattgttatggcgcccattacaccacttacgcggcggagggtcggctgtatgtgccgtggctccgtgcccaattggtggccgaaagtggccaagggcttttgcatttccaacgccaacgaattgaatctttggagcagttgatcgactcaggtcagttcactttggtggtgaattgtgccggattggaagggggacgattggccggtgacgatggcacttccgtttacccaaa

SEQ ID NO: 48044 - DNA, 678 bp, Heterodera glycines
caacgagactgaaacaaggacctgcctgcactgccgcagtcgaaccgcttaaccaggaagagaagaaaaaggaggaatcgtcgggtccttcggaggtggaacatgcgcagaatatggaaaatgtgcccgaaaagtatttacctgagactgaaataaaaggcctgacatttactgtcgcgatcgaaccgcttgaccaggaagagaagaaagatgaaagtgtgacagatgagcgtgagcccagggctgataaagaggaattgtcaggtccttcggaggtggaacatgcgcaaaacgacgtggaaaatatgcccgaaaactgcttgcttagcgacgatactgaaacaaagggcttgaccaacagccacaagactccgttattggcaggatgccaaatcaccgcttccggtttcatgggcactgaccgtgttaaaattggacgtttggtcgagttgcatggcggtgttttcactgggcagatgagtcgtgccacttgcactcatttgatcgctgctgcgagttcgggcgagaagtacaggcgagcacgtgaatggggaactgtcaaagtggtcaccagtgagtggctgttcaaatgcgacgaaatgggctatcgtttgcgtgaggaccattttctgttggacaacgacggtgagaaacgacgttcgtcagcggacatcgaat

SEQ ID NO: 48045 - DNA, 702 bp, Heterodera glycines
actttattattctattgcgctattcttcttctgcaacacattaaacaacgacgcatgccggaagaactggtggcgctcagtcccggaacgcgtgtctccggccgctggaccatcatcaagaagcttggggcgggtgcgtttggagccgtctacttgtgtcaagaccgagatggaaggacaatggcagcactgaaaaccgaaccgatcgacgctcagcgaccactgctgtatatggaggcccacgtgttgctcagcctgaacgaacttcgatcaaacagtggacgccatttttgccgttgtctggaccttggacgcgatgaacaaccggatgccgattctggacagacgatggagttcaactacgttgtcatgtcgttggttggccgtccaatggacaaactccttcacgaatccggtgaccgcttcagccccggaactgcgatcggcacttcaattcaacttctcaaagcgcttaaggcgttgcacagcgttggatacctccatcgtgacattaaaccagcaaactcggccatcggcacgcctgagacgaacgaacagcgccttctctacctcctcgactttggaatggcgcgcaaatatgtcagagaggacggcacacaccggcgtcaaagggacaccgcccgcttcagatggacgccaatctacgcaccaatctctgcgcacatcaaacgcgactacagc

SEQ ID NO: 48046 - DNA, 630 bp, Heterodera glycines
taattgtcctaaaaaatggtccaatacaaattatattattttgatgggcgcggtttgggtgaatccatccgtctgttgcttcactatgttggccaaccatttgaggacatccgaattaaagacatggaagaatgggagaaaacgtacaagccgaaatttttttacggaaaggtcccagttttggaggttgacgggaagccattgggacaaagtgctacgattttgcgctaccttgccgaaaaatttggcttggctggcaaagatgaatgcgaaaaggcgaaggctaacgaaatcatcgactttcaaaaggatgctaacactgatttggccccctatttatacgtcaaaatgggatcccgccaaggcgatttggacaaattgcgtgccgaagtgttcgagccgggagtcaagcacattttgccactgtttgagaaacttttgaaggagtccgggtcagggtacatgctcaagtccggactctcaatggtggactttcaagtggccaactttctgtacacgtttaccaagttggagccggagactatcaatgcgttcccggagctgatcaaatacgttgaccgtgtccatgcgctgccccaactgcagcagtatttgaagcagcgtccgcag

SEQ ID NO: 48047 - DNA, 423 bp, Heterodera glycines
  unsure (1)..(423): unsure at all n locations
caccgaatgttaccggcactttgcacttgggncacgcactgtccaccgctgttgaggacaccatcgcaagatggcatcgaatgtgcggtcggactgtgctgtttgtgcccggctgtgaccatgcgggaattgccacccaagtggtggtggagaagaagctgaagcgcgagcggggactcagtcggcacgacctcggccgggccgactttgtgaaggaagtgtggaagtggaagaacgaaaaagggcacataatttatgaccaactgaaaaaaatgggcgccggcgtcgattgggaccgagtggtgttcatgatggacccgaaaatcatgcgcgctgttactgaagcatttgtgcgaatgcacgagaagggtgtcatttaccgaagcanacggctcgtcaattggtcatgcgcattaagttcag

SEQ ID NO: 48048 - DNA, 762 bp, Heterodera glycines
catggcaccccgaagtggtgcagaaaattgggcatacccaattgtgcgactggtggagtgtcggcgttattctctacgaaatggtctacggacgaccgccgtttttgtcgcagcgcgacgacccggcggaaacgcaatttatgatagtgcattggagacgctttttggacttgcgaaacgcgatgggtgtgcgtttgtccaaacagtgcgtggattgtgtggccaaattgtgctgtgaccaggagaaccgactgggacatcgcaacggggccaaggacatcaaagcacacccgtggttcaagggcatcgattttgccaatttgcgcaacactttccccgaatatgtgccacgagtgcagaatcccgaggacacgtcaaactttgacacctttgaagtggagaacgaggaattgatcagaacaaatggaaatggaaacgaccgattaaaatgcgcggcgtacggcggcgggaagccattgggaccgaatttcatcgatttcacttttcggcacttctttagcgagggaatgtgccctccggcacggggccggtctccgcaagtcaggccaagtttggccccgcttatggagagttcgactgaaggaggaaacgcagcaaaatcgccggcgggcgaagtcttcgccaaaccgaaacaaattgtgacgattacgggtaaagcaaaagtggtgccattcacatcatcaaaacgtgtgccggcaccttcgattccttctgattcgtctaaagcaacaacagtcaatc

SEQ ID NO: 48049 - DNA, 704 bp, Heterodera glycines
cctcttctgtagtccttaagtaagccccgaaaatggctgatgaagccaatctccgcccaagatggtggtggtaaaaacatgcaatggatgtacgagggtgccaaatcggtggtcaatcgggaggactatttgctgggcaaaaagatcgacaagaatttcgagatgttctctgatgttgttgtccatgaccaggaggaggagaagcgggatgcattcttccagcagagccttctcaagccgtccacatccgcccacactgctccttccgccgctcgtaatcagcacaaagtgtccgctttggacacgcgtgttgtacgaactgaagacccattggtggctctgaaattccaagaagagcatcgacggcgtcaacttttggagaatccgttgctcaaactgaaggcgcaacgtgtgcttcgcaaagcgtttgagaaagagttgaaaaaggcggtcaaaaagaagagcagcaaaaggaagaaacgaaaacggtcgtcatcaccgtcttcctcatcgtccttttcatcgccagaacgaagaaaggaggaacagaaacgacggcggcaccaccaccaccaccgacggagtgaggggaggaaaagtggggacagtgaaagagaagggagggcaaaaaggagcagccgaagcagtagcagaacggagcgacacagacgacgacggtcatccgccgggtcgtcgaggcggag

SEQ ID NO: 48050 - DNA, 723 bp, Heterodera glycines
  unsure (1)..(723): unsure at all n locations
gcgcaatttaggccggaccgggtctgatgctgttggacagaagtggccaaggcaaagtttaccatctgatcactcgccgtcgctttgaccaaatgtccgtcatggagggacagaacattttggtgacaatcagcggaaagaaacggcgcgtccgcgtttattacctctcgtggctgaagcaaaagattctgcggactgaagggttgcaacagacggagaaaaggaacggatggacaaatgtcggcgaattccaatgcgccactcatttcaaaatcgtgcgctatgagcgcatcaaatttttggtgattggcattgaggactccatttccatttacgcgtgggcacccaaaccttacaacaaattcatggccttcaagagttttggccaattgtcccatgcgccggtaatcgtcgatttgaccatcgaagagaacgcgcgtctgaaggtgctttacggcagccttgccggcttccacgccatcgacttggactcggcgtccatttacgacatttactcgcctcaacagagcacaatgtgccaagggatgtgcccgcattgcattgtgattctgccgaataccaacggaatgcaattactgttgtgctacgataatgagggcgtctacgtgaacacttacggcaaaattgtgaagaatgtccaattgcaatggagcgaaattccctcttccgttgcttacatttccacaaaccaaataatgggnc

SEQ ID NO: 48051 - DNA, 734 bp, Heterodera glycines
gcacacattcgacgctgcccgtgcccgaatcgatgttggcaccgccacgggcatccgaatgaaaactttgccaaccagtgggcgcggcgcgaaagagcatttggagttcactgaacggaatgaattcggagcagcgacagttgtttttcggacgcattctccacgtttggccctacccgtgggaacgccgtgccatcacattgccccagacgacgcttgctttcaccaacatttgttgttccggatacattacggccaaagtgtgcggcgatgtctttttggtggatccgaaaatcggctggctgagttcgttgcggtcggtgcccacgttgatcccgaatgtggtcgttgccttctccaccgtggtcgcctcttctctgctcttccaccgttttgtgtacgtcccgttcattgaacacgagggccttctccataccaaaagtatcttctggcgaactttcggcatcaactttatgactgccgctgctgtgccgtgtatgttcgcaccggtggcagcgcattaccacaacatccgcattttggcggctgccggcaaaccgcccatcccggccaacgcggtgttggaccttatcgtcacctgttgggaatccactcgctctgtctggcgcaaattgcctctgatagtggccataaattttacaacggttttgctggcaactgttgcgatggcatggggttgcgaccggcttcataccacaatgcatttggactcg

SEQ ID NO: 48052 - DNA, 650 bp, Heterodera glycines
aatttcttccaaatggccgggagtccccaactgtccgcgtctttgtcgacaactttcaggcgctttcgtcccgtgtttttctcccgactcgaaggcgcttggaaaacgtatgccgaagaacaggaagaaagggtgatttccgatttggaagcctttgatctcttttacatttgtcgtaaagaggcagaacataaccaaaatgttgactctcttgagctgatgaaacatttccccgtactttcaacctttgacaaaatgctgctcctcagttcagaattgttcaacattgagtttagggaagtcacaaatgattatgaaaatcagagttttgagcgttgcgacccatcggttcgacttttcgatgtgactgataatgcaacaaattcaagaataggctttttgtacgttgacattttttcacgcgaaactaagaaaatcggccgtggtcaatggctctctatgcttggaaggcctcctaatcaactccgtgacttggacgctttggtttattttttgggtgcccatccccactccgaaaatgaacacgaatcgttcctccatcatgaagaattgagtgaaatgctgtccgcttttggccgtgctcttcaacttttactctcccgggctccgtgccatttcctttcgctttc

SEQ ID NO: 48053 - DNA, 764 bp, Heterodera glycines
accttatgccggaacatgcatgttttcttctgcgcttccctccgctcggatggacggttatttgactgctcagattcaattccccgcttggtttggcaaacgttcgaccggacagaaaaggcaaagattgatgcgacaacctttgctccatacccatctaaaaatcaccgggagcagtcaagcacttgtccaggattatctgagcattttgcgagaccgactttaccgtccattggtcgagaaggaaagcgggggcgttaaggatgtgttggaagtgttcaacaattatttccttcttcgcgaagacaccgaagcgatcagtgaattgggcgtttggccattggcaggcaaaacgcggaaggatttggcagcgatggtcagcacaaaggcaaagtcggcactgacgcgacagctgaacaaggagaagagagtgcttcccttcagccagggagtgatggtcaaaacgggggcgaggagaaagggtggcggagagagcagcaaaggaggaggagtaatggaattaaaagaggaaaagaatgacgacattgaggaagaggaggaatttaacaacccagacgaggaggaagatgaagcattgctaattggccttgatttctgaagaaattaattttgcaatctccggacattccgtcgaaaattgagactcactgttgtcacatttgtagcacatactagcattgttttccaatgtactattcccatttgtcagctcatcgattatttatttgatttttcttaataaa

SEQ ID NO: 48054 - DNA, 722 bp, Heterodera glycines
gcctaagtggaagtttccccgaaaagcgattcgaatgcatttgattcgaaacatcggcaaaagacgtgcacaatttcaaaacaaagacagcccgaaaaagggattcgccaaaattctgagctgaacaaattcgaacggaggaatgattcgctttttgggttttacaaaaagcaacgcatcgttcccgactcggaatgggaccgtttctgtgagatttttgccacggagttgccctcgtcgtttcgcattcaacgaagtcttccggagagggattgccttgccaatttccttgagcaacactttttcaagcaaatcgcttccattgcggcgacttcggagagtgacggcgttggcattcatccgccaaaatctgtcccttttgtgccctatgcctaccagactaaaatgccgcgctcaatgcttagacggcacccaattctaaaggaattccacgagtttttggtcaatgaaactgaattggggaacatgagcagacaggagacgtgcagcatggtcccaccacttttgttggatgttcagccccaccacagagtgctggacgcctgcgctgccccgggcagcaaaaccatgcaaataattgagctgatgcacgagcactgtcccaacccagaatggtttgtgctggccaatgactccgattacaaacggtgctatttgttggttcggcaaacattgaagcgaatgccaaccgcaaatgtggc

SEQ ID NO: 48055 - DNA, 619 bp, Heterodera glycines
gtgattgacggtgcttctccgctcgccatctgttgcccttccgcatttgtattggtccttcgcgttgccgttgctccgtttctcgtggctgctccaatccgtccaatttgtgtgccaaatgcggcacagtttttacgatatccatcgccagagggcattggtggagcagtgttcgttggcattgcattggtcgttggtgctcgttcagctgtactttttgccggacaatttggcccgtctccaatatttcctcgtctccaatctgttcgccggtttcctcatcgcacacgtggtcacctacaaccactactccaccgacaaattcgcatatgacgacccaatcctggagaactttgcctgtctgcagctgtacaccacgcgtaacatgcggcccggcccgttcatcgattggctttggggtggtctgaactatcaaattgagcaccatttgttcccgacaatgccgcggcacaacctgaagaaggtgatgccgttggtgaaggaattctgtgccgaaaatgacatcccttacatggtggacgattatttcacgggctttcgactggtcatcgaacatttgcgccgagtggcggaagcggccacagaaacgctggtcagc

SEQ ID NO: 48056 - DNA, 578 bp, Heterodera glycines
gcaattgccgagttaaagaggctttctcgctgttcgataaggacggggatggcacaattaccaccaaggaattgggcacggtcatgcggtcgctgggtcaaaaccccacggaggcggagttgcaggacatgatcaacgaagtggacgcagacggaaacgggaccattgactttcccgaattcctcacaatgatggcacgcaaaatgaaggacacggacagcgaagaagagattcgggaggcattcagagtgttcgacaaagacggcaatggcttcatctctgcggccgaactgcgtcacgtgatgacaaatttaggagagaaactgacagacgaagaagtggacgaaatgatcagggaagcggacattgacggggatgggcaagtcaactacgaagaattcgtaacgatgatgacgacgaaataatcgcttcggcacagccctcaacaccgtcactgcatcgatcttttcatttccttcgttcatttaaattatctcctctccacacatccattcattcaccgaccatttttcccgtggattcgattgattttatgtattctataattttttatttgc

SEQ ID NO: 48057 - DNA, 322 bp, Heterodera glycines
  unsure (1)..(322): unsure at all n locations
cggaggacaagagcaatgagcaaaacatccccccagggactgttgtcgacactgtcgttgttcaccccaaacgctccgagttcttccttaacagtcacgtggcgatcaagggcactgctcgtacgccacattacactgttctgcgggacgagaacgatatgtcgatggacacacttcaaacaatggtccattacctctgctttgggcatcaaattgtcacaaagccgacctcattgccctnncgcnnccgtgtacatcgccgatgaatatgcgaaacgcggtcgaaacatctactcacactacgccaagaacggtattganc

SEQ ID NO: 48058 - DNA, 593 bp, Heterodera glycines
ccgtgctttattcggatccaccctttttctgacttccttttatgaatgcgaacagaaagagggtgactctacgaagtgcgacgatattgaatacagaatcaaagacgcgctcccgcaaactcaactcaacgcctatttgacaattgagaaattcaggcagaaactcagcgagcaaaagaactttgttcctttcggagaactcatcacaaagttttgccttaaaggtggggaaagtgaagggaatggtgacacaccgtctgaactcatcaaactcacagttttttcttaattttttcgttttataattcaaatactaatttcagattcagagattgaacataactttatactttataaattcgagaaaaaacagcaaaacgatgctcaatttgaccagggctgtaaatttctggagcgagtgcaagcgttggcccattggtacatcgatgcggtctcttacactgacaatgatgaccatcgttatttcaattattttctgtttgccgtgcgtccatcttccgatggcgatggttcttccgtccatcgattcgccggttacgtcaatttgtaccgtttttaccaccatccggaca

SEQ ID NO: 48059 - DNA, 750 bp, Heterodera glycines
gttttttgcaatgtttgttatttttgccaattttcgcaaatcaatctacaattacgatacctatttttaacttgcactaaaatttacgcaatatgtcgttgaacacggcgaatacgccggacggacgtggggttatcatttacagtggtgaaatgattttgcttttcgttcgcgaggttaatctttcttttgacaaattcactaacgccgcgttcaaaggcacaaagaagggcaacctttacctaaccacgcacagaatcattttcaataacactgaaacttcgtctcgcggcaatttcaagtcgttgtcaatgcctttcggatgcattcgaaatgtgaagttggaacagcccacctttggcgccaattatttggctggcgaattggtcgcacagccggacggaaattgggaaggaggagtgaattggaaattgacgttcaatcggggcggatgcatcgaattcggccaagctttgcagaaaaccagcgaaatggccaataacttttgtcctcggcccgcaaatgcgccgccgccgtacgctccgccgcctggcgcttattactcaccaccacccgcttattattggagcggaggccaattcaacggataccaggcgccggtccacgcgtttccagaccaaccgccgccggaaagtgtgttcatgtacgagcaaccacctccatatgcgggggattgggccaattcgtggtcaaaatccggtcccatacccgtcgaatacgcccctgtat

SEQ ID NO: 48060 - DNA, 678 bp, Heterodera glycines
ccgcattataatgatgaatgtaacgaaatgcttaatcggcgaccaagaaaatttgaaaacaaactcagtgcatgtggtgatcagaagaattttaaggccatgcttgagaatttcaactctttacgcgttaacaggcaattgtgcgacgtcgaaattgagtgccagggaaaatcgcttttggtacataaagttgttttggccgcgacaattgattattttcgcggtttatataattttggaatggtcgacgcgcaggcggacaaaattgaaatcaaagaagtgtcattcataggactaagtcaaatcattgacttcgcttatacttacgaggtgaaaatcaacgaggaaaacgtcagagaattgttacacgcagcaaattatctcggagtaacttttgtgaaggatggctgtgagcattttttgataaaattgatgacaattgaaaactgtctcgggttgcgagaactctctgatcagcacagttgcgaacaacttcttgccgcaattgaggcatttatgcttgaacattttatggaaatttgccacaaagaagaatttatggcattggattcggtgacaacattagagcgactggcgaaaagtgacgatctaaacataacagacgaacggtttttgttcgaattcctcgtcaaatgggttgagatggacaaaaccggg

SEQ ID NO: 48061 - DNA, 654 bp, Heterodera glycines
gggcaaatactcctcgcgctgggcacaagttggcacgtgtggtgcttcaaatgtgccgaatgtgccgccgtccttcagggcgaatatatggcacacagcgggcgcccattgtgtttgagggattacaaccaaatgtttggggtcagatgctgtgaatgcgaccgattcattgctgggagagtgctcgaggccggtggctacaaattccacccgacttgcgctcgctgttcacgctgtcagctgcccttcgacgacggggccgagatgtacatgcagggcaacgagatatggcacccgaattgtgagcactaccggacgacggagaacattgcaatttcgaagcccagcgtaaagggcagcaaattccaatcgcaatttggccagcacctcacttacatgtatatgttgccggagactgaacagactttgctgaaacatccgatcgcgccgaatccgccccagccaactcagtaccacacgccgcaggggccggtgatcaaaatacggaagtcgcgctattcaatgctgaagacggggatgcagcggctcaccgaagacttggaacggactcggccccgttctcgctcctcttccgtggacaacgacgaacccattgaattggctcatttccccggcgccaaagtgcccgacaaa

SEQ ID NO: 48062 - DNA, 260 bp, Heterodera glycines
acaattgccgagttcaagaggctttctcgctgttcgataaggacggggatggcacaattaccaccaaggaattgggcacggtcatgcggtcgctgggtcaaaaccccacggaggcggagttgcatgacatgatcaacgaagtggacgcagacggaaacgggaccattgactttcccgaattcctcacaatgatggcacgcaaaatgaaggacacggacagcgaagaagagattcgggaggcattcagagtgttcgacaaa

SEQ ID NO: 48063 - DNA, 710 bp, Heterodera glycines
tggagggttacctccgtggcccaacggatgggtcacgcaaattgccaccaacccattgtataagaatatgttggtgtcggcctcaagagacaaaaccatcatcgtttggatgcttgatgagagtgggtcggtgctaaacggcaaaccgatcaaatcattgcacggacatggacactttgtttccgatgttgtcatgtcctcggatggacagtacgcactgtccggctcctgggacaaaacattacgactgtgggacttgaacacaggacaaacgactcgtcagttcgtctcccacacccaggatgtgctgtccgttgctttctccgccgacaaccgtcagattgtgtctggatcgcgcgataagaagatcaaactgtggaatacacttgcccagtgcaaacacaccatcgtggaggagtgccattccgattgggtgtccaccgtgcgcttttcgccttctcatgcgaacccagtgattgtatccgccggctgggacaaaattgtcaaggtgtggaacttggccacttgccgactgaagaccaaccacttcggacacaccggctacatcaactcggtcaccgtatcacccgacggctcactttgtgcttccggaggaaaggacggctcggcaatgttgtgggacttaaacgacggcaaacacttgtacacattgggcggcaatgacgtgatcaacgctttggcgttttcgc

SEQ ID NO: 48064 - DNA, 670 bp, Heterodera glycines
gcaaataaatgcatttgattaacttaatcgccctctttttcatgcttttcggcccatccgtccagcaatacacaaaaacgccaacgaatgaggacaaagaagcggctgtaattgtacaacaaattccgatcgcaattggccctgggcaatgccgacaataaattgggcggcaacaaaatgccaaaggcgggcaacatgcgcaagtttgaatgggacgaaaacttggccaaacttgcggatgaatgggccaacaaatgcacattatcgcactcgtggaacggctgggcaggcgaaaatttggcaatgaatggcggaacattttcgaacaaggatggcttcgagtacgcttgcggtcgctggtgggacgaactgaaccgttacgggttcaacccggatctgattatgaccggggaaaacttcagtggcatcggccattggactcagatggcgtgggccgacaccgaccgaattggctgtgccatggcacaaaactgcccaaataccaattggaaaacatatgtggtctgctggtattacacgggtggtaattactttggtgcgcctgtctatttggccggggagccgtgcagcaaatgcaaagcaaatgacaaatgtgacaaagccacgggactttgctctcaatgaaggatgaaatattatgaaaattgaa

SEQ ID NO: 48065 - DNA, 161 bp, Heterodera glycines
ttaaactgttctaaggaaatggctcaacttcttgctggagagaaagttgtgctgagtgacggttcgaaggtagaagcggaagtgttccttaaggacaaagtggtcgctgtttacttctccgccgggtggtgcccgccgtgtcgcgcgttcactcccaaact

SEQ ID NO: 48066 - DNA, 678 bp, Heterodera glycines
  unsure (1)..(678): unsure at all n locations
gattaaattggcatttggcgcgttgggaagtcaccgcccatacaaaaaaagaaagaaaaaatccttttaatcactccgatttacccattcccttactttatccattctaaagttctttgctgtttcgctttttgctctccaaccaacaaaaatgtccggacgaggaaagggcggaaaagcgaagacggaggacggaaagaacaaatcgcgctcatcccgggctggacttcaattccccgtcggacgtctccaccggctgctgcgcaaaggtcactacgcggagcgcgtgggtgtcggcgcgcctgtctatctggcagcggtgttggagtatctgacggcggaagtgctcgagttggccggcaacgcgtcgcgagacaacagaaagacgcggatcaacccacgccatttgcagttggctgtgcgcaacgacgaggagttgaacaagcttctctcgggcgtcaccatctcggagggcggtgtgttgccgaacatcaacccggttcttctgcccaaaaagtcgcagcacagcgaagtcagtgaatgagcggagatggacgagggccaacagacgaaagaaaaaccagcccaaacggtgtcctttttagggccacaatgactcaacctttattgaatctgactaatgcgtttttttgtattttaatgacataaatntttatt

SEQ ID NO: 48067 - DNA, 703 bp, Heterodera glycines
aaaaaaagttatttctgatgaagctcattcagcttcttcctttctgtttctccatttcggcacttttgctgccgttccaaaccgatggcatgcaaattttcgtcgaaacataattggccgagtaatacactggaggtcgagagttcggacagtatcgagaatttgaagcggaagatcactgacaaggagggcattcccgctgatgaccagcgtttgatctttgccggcaagcagctcgaggacggacgaacgttagccgactacggcgtgcagaaggaggcaaaaattcatttggtcctccgtcttcggggcggaatgcaaattttcatcaaaactttgaccggcaaagtcatcacgctggaggtggacagcatggacagtgtcgagaatgtgaagcggaagatcactgacaaggagggcattcccgctgatcatcagcgattggtttttgccggcaaacagctcgaggacggccgaacgttggctgactacggtgtgcagaaggaggccactgtacaccttgtgctgcgcctacggggcggcggatcgatgatgaactttgatgatgatgtgctctgatgatcagcagaattgatcaataccctgacaattatacaaacatatagctcggtttgatcgaaatcaaatcaatagtttaataataaacctaacaggtagcgtaaaaaaaaaaaaaaaaaaaaaa

SEQ ID NO: 48068 - DNA, 707 bp, Heterodera glycines
aaaaagttattctcatgttgacctcgtggtgatgtgcgacggatttgacggagagagaggcaccaatgtggcgggaggacgaggctattttctgaaaggaccgttggtgttccttgaacaagcgctcatcgcattggcattgcaaatgctcaacaaaaagggcttcacgccgctttacacgcccttttttatgcgcaaagacgtaatgcaggaggtggcacaactcagccaattcgacgaagagctttacaaggtgaccaccgcaaaaaagacggacgcagccaatgaagacggctctcccgacgagaaatatctaatcgcaacttctgagcagccaatcgccgcctttcatcgtgacgaatggcttaacccatcggatttgccaatcaaatatgccggaatgtccacctgttttcggcaggaggtcggaagccatgggagagacacccgcgggattttccgtgtgcaccaattcgagaagatcgaacaatttgtcatctgttccccatttgacaacgaatcgtggaagcacatggacgaaatgattgacaatgctgaagagttttgcaaagtgctcggccttccctaccgaattgtggccattgtttcggccgaactgaacaacgcggcggcaaagaaattggacctcgagggcgtggttcccgggcagcggtgcatttcgggagctggtttcatgctccaactgt

SEQ ID NO: 48069 - DNA, 605 bp, Heterodera glycines
ttcttccaaatggccgggagtcccaaactgtccgcgtctttgtcgacaactttccggcgctttcgtcccgtgtttttctcccgactcgaaggcgcttggaaaacgtatgccgaagaacaggaagaaagggtgatttccgatttggaagcctttgatctcttttacatttgtcgtaaagaggcagaacataaccaaaatgttgactctcttgagctgatgaaacatttccccgtactttcaacctttgacaaaatgctgctcctcagttcagaattgttcaacattgagtttagggaagtcacaaatgattatgaaaatcagagttttgagcgttgcgacccatcggttcgacttttcgatgtgactgataatgcaacaaattcaagaataggctttttgtacgttgacattttttcacgcgaaactaagaaaatcggccgtggtcaatggctctctatgcttggaaggcctcctaatcaactccgtgacttggacgctttggtttattttttgggtgcccatccccactccgaaaatgaacacgaatcgttcctccatcatgaagaattgagtgaaatgctgtccgcttttggccgtgctcttca

SEQ ID NO: 48070 - DNA, 630 bp, Heterodera glycines
caacacgcatccaaaagtccgcggctgctaaggaattcttaatgggaaggaaccgtcccgcggcatcaatcccgacgaagctgtcgcctatggtgcggccgttcaagcaggagtcatttcgggggaggagaactcagaaattgttctgttggatgtaaccctcttacaatgggcattgaaactgtcggtggagtgatgacaaaactgatcactcgcaacactgtcattccgaccaaaaagtctcagatattttctaccgcggcggacaatcagccaactgtgactattcaggtcttcgaaggagaaaggccgatgacgaaagacaatcatttgttggggaaattcgacttgaccggcattcctcctgctccccgaggcgttcctcaaatcgaagtcacttttgagatcgatgtcaacggaattttgcacgtgactgccgaggacaaagggactggcaataagaacaaaattacgatcaccaatgatcacaaccgactgtcgccggaagagattgagcgaatgatcaacgacgcggaaaagttcgcagaggaggacaagaaaaccaaggaagtggtcgaagcgaggaacgagtttgagtcgtacgcctactcactgaagaaccagctcgga

SEQ ID NO: 48071 - DNA, 611 bp, Heterodera glycines
acaaaaaacgttcattttcctcgacacggagtatatgagaccgtctttctacgaaaatgtgctgaaagtgtggaaatcggtgaccaataatcagtcgcgtgcgattttcggcttcaccggggaggactcaatgggaaagtcggccttcccggccatagaggcggcgccctgcttcagcagctccttccctgagattttcaatgggcgaagggacattccttgtcttatcccttgcgccatcgaccaggacccctattttcggatgagtcgcgacgtcgcccctcgtcttaaatacccaaagccctccctcatctacagcactttcctgcccgcgttgcaaggcgctcagagcaaaatggcggcgagtgaggccaattcgtgcatttatttggacgacactccaaagaaaatcaaagagaagatcaacaaatatgcgttcagtggcgggagggacacaaaggaagaacaccgccaatttgggggcgactgtaccgtggacacttccttccaattcctgcgctttttcctcgacgacgacgaaagattagaagatataagagagcaatacgcaagtggtgctatgttttccggcgaactcaaggcgattgcta

SEQ ID NO: 48072 - DNA, 730 bp, Heterodera glycines
ataagagatctctaaaatgattatacgcagcaaagccgtccaacttttgacttgctacagaaataggatcaccagaaaactacaatattcgactacggagaatgtgccggtgaatgtgcctgagccggtcatttcctcctccaacatggcacagttccgcaagggagcgggcggtcgttccagcttctcgggcaatgtcattacagtttttggcaacaccggatttaccggccgaagggtggtcaatcggttggccagacacgcaaatcagctaattttgccgtaccgctgcgattcgtattttctcagagaattgaaagtgccttgtgaccttggccaagttctgttttttcctttccaattggacgacgatgaaagcattcggaaggcagtcaaatacagcaacgttgtgatcaatatgatcggcacatatgtcgacacaccgaattattccatttatgacgccaatgtggagggtgcgtggagaattgcgcgcatttgtcgggaaatgggcgtggaacggctgatccatgtgagcgcattgaacgcggacccatcgtacaaaacgcaattcatcaaaaatggcgcctttctgaaaagcaaaggcatggccgagcatgcggttcatgccgaattcccaagtgccaccatcattcggccctctgtgatgtacggcgacattgaccgtctcatttataatctgatcacccgttggcgcgttgacccgttc

SEQ ID NO: 48073 - DNA, 795 bp, Heterodera glycines
ccagtttgaggagggacaaattaattttgaatttctccctgtgcatttaaacataacaatgcggtctttttgcacgagtaattcgctgagtgttttctccaattttcgtttcattcaaaaattgctgtctgtgctgcgaaaagttgcaggaaaatgtcatctgagtcaaatatggagaatttccccgtcaaattggacatggattatatcaaacggttggcacgcatcgaacggaccggccctatcacttttaggctatcgcaaggcggtgaatagggacgttttcgggggacaaatgttcgcgcaggcaattgccgcggcagaagcaacggtggacggcgacgaatttgcaccgaacgcggcccattcgatgttcattagaaaagcattcattgaccatcccatcgaatatattgtcaccagaacgcgcgacgggcgttcattttgcactcggacagtcgaagcgcgacagaacggcgaagccgttttctgtgcgcagatttcactttgcgttaaggaacgctcttccattgaacaccaaacagaaatgccagcggaagtgccggagcccgaggagttggtgccgttcttcgagacggtccgtcgagtggtcaccgaacacgacgagggcaggacggagcgtaacggacggaccatcgctaaccttcgcgcggtgctcgaggacgagcagcaaccgtccgtcttcgagttccgacccattcattccgacatttttcttggcattcgaccccattcgcccacgccgattcgttactggttgaaatgcgccgttcc

SEQ ID NO: 48074 - DNA, 581 bp, Heterodera glycines
  unsure (1)..(581): unsure at all n locations
gaagtcgcctgctccgcctacagctgtgcgcgacacttcacgtgttgaaatggactgctgccgcggttggctcacggacggactttctcggcacgaaggagcgcatcgaacagggcaatttcttcagggatgttctcgacaaggcattggccatcaacccggaggagtacaccctgcttcacatgcgcggcaggctcgtcctctcggtggcttctctgtcgtggattgaacggaaggcggccaccgtccttttcggcccgccgcccgaagtttcactcaacgaggcgaccagagacttcacggcggtgttggagttggcaccggattggctggagaacactctcttcctggccaaggcgtatttggccaacagcgacagggaaagtgcggtgcaccatttgaaacagctgatcgattcctaccagcagaacgaaaacgacaaggaccagcccgaggcactgaaggaggccaaggcgctgctcaagaagcacgggagaaaatgacctcaatgaaactcacccatagatcttcttaatggactcattaaaggatttgcaaannaaaaaaaaaaaaaaaaaaaa

SEQ ID NO: 48075 - DNA, 668 bp, Heterodera glycines
  unsure (1)..(668): unsure at all n locations
aattgcgtgtccatatgagaaggagcagaaattctaacataaggcacttcttggtgacgaaaaagcgaggttgggncctttctttcatgtacgatgcgcccgctggcattaacaaaaagaaggaggaagggccggaaccgaaattcgaatggcaaaggaaatacaatgcaccgcgtgaagaatgggcgaaaggaaatgaactcatccaggaccaacctttcggaattcaggtgcgaaacgttcgctgtgtcaaatgtcgcgcgtggggtcatttgaacacggaccgcgaatgcccactgtatggtatgagtggaaatgctgaagaccatggctatgcaaataatccctccgatatcattcgtgatttaaatgtcgaaaagaaaacaaagactgtctctgatgtcacgaccaatgagcagattgatataaaaccgaaaattgaggtgcgcaaaagccacgaagagaagaaaaagaagcgacgccattactcatcggaagaagaggaagaggggacggaagaagaagaaaagaagccggaaccgatcgatcaggaacaattgctggtgaacatgcgtgaggagcacaatttgaagttcaagaccggcattctgattggtcttcgagcggacgaacacataaaaaaaatgtcagcgatggttggaggatgg

SEQ ID NO: 48076 - DNA, 368 bp, Heterodera glycines
aagggaccgcaagaaagtcgagaacgtgaagcacagcggcaacctgaccattgaacaagtgatcaacatcgctcgtcagatgcgcccccgttcaatcgcacgaaaattgcaaggcaccgtcaaggaaattttgggcaccgctcaatcggttggctgtaccgtcgatggacaacaccctcacgacattgtggacatgaccagggcgggagagattgaagtgccagaagaatgaacggaccggtgatacgctgagaaagtttggagaaagaatcaaatttgttgttgtgttttggacttttccgttaaatttgatttattttaaaaaaaaaaaaaaaaaaaaaaagaaaaaaaaaaaaaaaaaaaaaaaa

SEQ ID NO: 48077 - DNA, 527 bp, Heterodera glycines
tatgcaaattgaaacggacgaacttcgcgaagccgaacaaagggaatttatgatgtgttcagcctgaaggcatcagttaataccagcaacatggtcctatttgacgctgccggatgtctaaggaagttcgactcgcccgagcagatttgcctggaattcttcgagtgccgcagggaattgtacaagaagcgcaaacgctacctcgaaggaatgctgcaagcgcaaagcgaccaactcagtgaaaaggcacgcttcatcgtgatgaagatcaaaaacgagatacacatcgaaaacaaacggaaatcggctatcgtagagcagctgcagaagcacaagttcagaccggatccggtgaaacggtggaaggacgaacagaagcggaaagagttggagctgtgcggagaggcaaatgtgtcagacgacgaagaggacgaagacgaacatgcggaccaagcagttgatgaggccttggagaagcgctgctctgattatgactaccttgttgggatggccatctggaaactctc

SEQ ID NO: 48078 - DNA, 722 bp, Heterodera glycines
ggcgatggtacacccctgttgtggtgttggccgggtctttgttggacgctgcagaaaaacttcttgccaaggaattcatccgaccaccatttccgactcattccacgggcggccacattttctgaaaaagttctcgaggaaatggccacacccattgacattaacgatgacgacgagttggtgaagctcgccatgacgagtttgaactcgaaggtcgtttcgcaatattcccatcttttggcaccaatggcggtgcaggcagtgaagaaactgatgagttcaccggaggactcaagtgtcaatctgaagttgattaaagtcgttaaaaagttgggcgaaacggtggaggagtcgcagctcattgagggggcgctgatcgatcagaaatcgatgggccacggaggccccgcgcgggtggagaaggcgaagattggcctcatccaattccaaatctcaccaccaaagcccaacatggaaaatcaagtggtcatctccgactatgctcaaatggaccgtgcgctgaaggaagaacgaaattacattttggaactgtgcaagcaaatcaaaaaggccgggtgcaatgtgctgctaatccaaaagtccattttacgcgatgccatcaacgaaatggcgctgcattttttcgcaaaaatgaaaattatggtgatcaaagacatcgagcgggatgacatcgaattctatgccaaaatcctcgggtgtcg

SEQ ID NO: 48079 - DNA, 493 bp, Heterodera glycines
gaagatgttgaacacgggcccgtccaggccccctaatcataaattgttggcatgggacgggcagaaggaaatgaagggccgatcaagaatgcccgagccatttctgacgagcaagcccatcggctgatctacgagaaggagttggcaccgttcggtgccaatccgatgattgcgcaggacgcggtcagccaaatgttggacgtcagcgtggacaacgcgctggggccaaatgtgcgcgagaatttgctgaagaatttgagcggcaaacaattggcacagcttccgttggcgcctctgcccaaaatgaagaagtcggactcggacaaattggcaaagcgcaagcaccaaatcacacatttggccaccgtggctgtttcgcgtgaggaacaactcaaagacaaatgggcggacagcaaacagaccaaaaagatgagccgtcagaagctcggattctgaattcagatcagtctgtcctcctcaaatttacggtgtt

SEQ ID NO: 48080 - DNA, 684 bp, Heterodera glycines
cccccgcggactggtcggcctgttgggcctcttggtggtcccggcttacacatggctgccgacaaaacattcaaaaacaaagttgctcagttccgttatttgtgctattcaaacagcgtgcctaaccatgtgaaaatttctgtgacaagaaacaatttgttcgaggattccttccaagaaataatgagaaaaaaccccttcgacttgcgtcgtcggttgtacattcagtttaaggcggaagatggactggattacggtggaattgctagggaatggtttttcttgctctctcacgaagtacttaatccgatgtattgtctgtttatgtatgccaattcgagcaactacagtctgcagattaatcccgcttcttttgtaaatcctgaccacttgaaatattttgagttcatcggtcgcttcattgctatggcacttttccatggaaaatttatctacagtggtttcacgctcccattctacaagaaaatgcttaacagaaagatcactctcaaagacttggaatcggtcgacactgaattttacaattccattgtttggattcgcgacaatgacattgatgaatgcgacatggaattgttctttgtggttgattatgacctacttggtgaggtcaaaacgcatgagctgaaggagaatgggactgaaattgctgtaactgaggcc

SEQ ID NO: 48081 - DNA, 599 bp, Heterodera glycines
ggttattacccagttgagctggtttctttctattataaaatgacactgccatcgtccacatttgatccggcaaagggtggaactggacgcaatgaaggcgatttagcgaagctttctaacaatattctagcagggacatgccttcgcatatgacattgaagtacagacaaaaaggacaggcccaccccgaggaagtcgttgcaaagaacctccgccgtgacattgaggaacgtgagcagcattcgcgtgagcgtcgttcacgggattctctggacagttttggcacgggtcccacaaacaaaaaacaacgcgttgaggacacttcatctgcacgtaatcttgacgctgatgaaccatttgatgagctcaacgaggacgacaccgacttggacgaagactctgataacgaggccgaacttatggcggaactcgagcgcattcgcaaagaaagagctgcggaaagggcctcaaaagaggcgaaagaacgcgaagaacaggaacgcattcgagaagagaacattctccatgggaatccgctgctgaaccccgcatcgtcggagtttaaggtcaaacgccgttgggatgacgatgtcgtcttc

SEQ ID NO: 48082 - DNA, 716 bp, Heterodera glycines
ggcacgcgactccatgacaccttttttctttaagaccggcactttaacagaattcccggaagattaccttgaaagtgtcagaaaagtgcattctgagggcggtttcggttctattggctatcgctacgattggaagttggaagaagcgcagaagaatttgctgaggacgcacaccaccgccgtttctgcccgtcagctttaccttctcgcacaaaaacctttccaaccgtccaaaatgttcagcatcgaccgcgtgttccgcaacgaaacattggatgccactcacttggccgaattccaccaagttgaaggtgttgtggcagaacgaaacctctcactagcgcatgtcatcggacttttcactgaattcttcaggaaatgcggaattgaaaatctacgcttcaaacccacttacaacccgtacaccgaaccatccatggaaatttacgcttttcacaccggactgaacaaatgggtggagattggcaattcgggcatgtttaggcctgagatgtcgcttccgatgggacttccggaagacgttgccgtggctgggttcggtctctccctcgagcggccaaccatgatcagatacggcatttccaacataagagagctttttggacataagattgatctcgaaatgatctacagaaaccctttgtgcaggttggagcagaaaaactagtgacgaaatgggagtgccaataaacatt

SEQ ID NO: 48083 - DNA, 738 bp, Heterodera glycines
gagttcgttgaaccatacctgaaggaactgatggacggactgaccgcgaaagtgtttcgtacgtataacgcgtcgatcactctccaagaacagctggacaaactgacaaatccttccgattccgtccacgagaaaatgctttcctacaatcgtgcaaatcgtcaggtggccatcctttgtaaccatcaaagggcagtgccaaaaacgcacgaaaagtcgatggaaaatttggagaataaaataaaagagaagaagcaggagtacaaggagttgaaggatcagctgaagaagagcaaatcggtggacgagaaaatggcaaaaaaatacgaaagattgaaggaacagatcgccaaactgaacacacagcgcacggacaaggatgaaaacaaacaaattgcactgggaacctcaaaactgaactacttggatccgaggatttcggttgcatggtgcaaaaagaatgacgtgcccgttgagaaaatattcagcaaaacgcaacgcgacaaattccgctgggctctcgacatggcgaaggaggacttcattttctgacacttcctcgcaaccctttccgatttcccttcacccccttttactcgctgttccttacttttggagagtgcccctttcctctcaatcactctcttctgctggacctaaactagtagttgtttatatcttgtcatgcctagtttgtgtgagcgtttgttttcatatgtctgatgattggttcgtatt

SEQ ID NO: 48084 - DNA, 651 bp, Heterodera glycines
catttgaaaatctttcttccgtctctttaacaattgttttgcatttgtcgtgttatgcttgtaaaatcatttcttggtccgacgaaactttgtcaatttcgtttgtcgttctttcacaattcggtggtaaaaatgaattctgataatttccgcgttgaacgcgacactttcggtgaactacgtgttccttctgatcgctattatggagctcaaacggcaagatcgatgcaattcttcaaaatcggaggacccgaggagagaatgcctttgcccgttattcatgcatttggccatctgaagaaggctgcagcaacagttaaccaagattttggattgaattctaaagtggcagcggcgatttgtgaagctgcggatgacgttatttctggcaaattggatgagcattttccgcttgttatttggcaaaccggaagtgggacgcagtccaacatgaatgtgaacgaagtcatctcgaacagagcaattgaaattctcggaggcgaacttggctcgaagactcccgtacatccgaatgaccacgttaatatgtcccaatcgagcaatgacacttttccgactgcaatgcatgtcgcggtggccgttgagataaacactcgtcttttgccttcgctgcgtttgcttcacgacgaa

SEQ ID NO: 48085 - DNA, 294 bp, Heterodera glycines
aaatgtgcgacgaagaagttgctgctctcgtggtggacaatgggtccggaatgtgcaaggccggtttcgcgggcgatgacgcgccccgcgcggtgtttccgtccattgtgggccgcccccgtcatcatggcgtcatggtcggcatgggacagaaggactcgtacgtgggagacgaggcgcagtccaagcgtggtattctgacgctgaagtacccgattgagcacggcatcgtcaccaactgggacgacatggagaagatctggcaccacaccttctacaacgagctgcgtgtct

SEQ ID NO: 48086 - DNA, 525 bp, Heterodera glycines
atatttgaaaaatgtctggacgcggaaagggtggcaaagcaaagtcagggggcaaggccaagtcgcgttcttcacgtgccggactgcaattccctgttggtcgtcttcatcgccttttgcgcaaaggtcactacgccgagcgtgttggagctggtgcccctgtgtatttggcagcggtgttggaatatctcgctgctgaagttttggaattggctggcaatgcttcgcgtgacaacaaaaagacgcggattaatcctcgtcatctccaactcgctgttcgcaatgacgaagagcttaacaaacttctttctggtgtgaccatcgcccagggtggcgtgctgcccaacattcaagcagttcttctgcccaagaaaacccatggagaaagtcagtgaggggcaactggcattgtgacggccaatacgaaaatcgcaattgagaaacaggacgacgatatttcctttccattttttggttgtaaattcacatttttccagtatgatgaatgatggtctgaaaaaaaaa

SEQ ID NO: 48087 - DNA, 416 bp, Heterodera glycines
gcgtgcaaattcgccgaactaaggagaaggttgaccgtcggtctggaaagaaagtggaggacaacccgaaggcgctgaaaaccggcgatgctgggatcgtcgatttgattccaaccaagccgatgtgtgtggaggcattcacggactacgctccgcttggtcgtttcgccgttcgtgacacgaggcaaaccgtcgctgtcggtgtgatcaaggcggtggagaagactgaaggcggtggaaaggttaccaagtcggcgcagaaggctgctgcccctggtgggaagaagaaatgagaaacgctgataattggaatggattcgatttttggatttgttgttttttttggccgtgaaataggcccgttaactttgggttttgttggataaaatttgtttcaaaaaaaaaaaaaaaaaaaa

SEQ ID NO: 48088 - DNA, 479 bp, Heterodera glycines
catgttcgtttttgctaatcggttagcaactttacgagggccgatggaactacaaagaaggatgcaccgctgaaaaaatggccagggcaggtttcttctgcactgagaagcgaaagaagccctctgacgcagcgaaatgttacatttgccactgcacgaaatgtattgggacccggaggacgaaccgtgggaagagcacaaaaagcaccgcccggactgtcctttggtgaccatcggcaaacaaaatgaggaggaattcactgtgcctgaagtgctccttttgcttgcatatgaacacagcaccaaaatgtacccagttgcggatgcgtcaatgaaagaattggacgtgttgatgaagcaattgttggcggacacgcaaaaggcagtggaagggatttgaaagcgaatgccacggatctcaaacaacaatttctctcatcaccttttgtgtgacattatttacgaaaaagtttgacctc

SEQ ID NO: 48089 - DNA, 556 bp, Heterodera glycines
atcgctgtggcggaaaacgtcgaaattttgccaaaggagccaaactaaagggttcattttctcgacttgattttaaatggatcgccgaggttcccgtcaacctgtcatcaaaaactttaagacaattttgccggctgcatccaatgacatttattatcgagatgagatcggcaacatctccacctcaaatgtttatccccgtgccgatcgtgttgaggttgagctccgcccgcgtttcccattgtatggcgggtggcgtacaaattacattttgggttacaacgttccaagtacgtcctttctccgtcattccggctcgaattttgcgatcaaaatgaaactgatggatcgtctctacgataatgctgttgtggaaaaactgtgtgtcaaaatcatattgcctgaaacgagcaagaacattaagctggtcaccccttactctgactaagcgccttcccgacgaggtgcacaaaacgtacttggacacttttggtcgccctgtgattgttctcgaaaaggagaatcttatcaacaaccatatccagcccttcactct

SEQ ID NO: 48090 - DNA, 662 bp, Heterodera glycines
ataagaacttaatttgaggatctacattgaaaataattaattagacttcaaaatgggtatttcccaagacagatggcacaagcggcgaaagactggggggaagcgaaaccccattcacaaaaaacgaaagttcgaaatgggacggccggcagcaaatactaagattggtcctaaacgaattcatttggtgcgttgtcgtggcgggaacattaaacatcgcggacttcgtcttgataccggaaactttgcttgggcttctgaagggtgcactcgcaaaacgcgtatcatcgacactatgtacaacgcttccaacaacgaattggtgcgcaccaaaacattggtcaagggaatgatcgtctcaatcgatgccattccgttccgccaatggtatgaagcgcattacgcactgccattggcgcgcaaaaagggacaaaagttgaccgaagatgaggaggcgcggattggaggagcacagaaacgctcaaagtcgactctgaagaaatacacggaacgccaaaaaaccgccggggtggagccgcatcttctggaacagttccaggccggacgacttctcgcttgcataagctcacgaccaggccaaagcggacgctgcgatgggtacatttttggagggcaaagaactcgagttctacaacaagaaa

SEQ ID NO: 48091 - DNA, 666 bp, Heterodera glycines
ctatgccctcgtcgatttggcactccgtcgaccgatatttcgtccacagacactctgaatgcgttgggtttgttgttgactgggcttccttcctccttccaagccttcttcttggatcgaattgaggagtccttcgaatggtcccaaatcgcctctgccgacgctgacccttcgcaattgttcgagtcgcttagccacgaagtttacctccactcggacagtcgcattctctcgatgctggccctaatccattcattttgtcaacatggcggcaataattcgctttcgattattcccgatttcgtgatcaaccgacttgcccacaaagtggacaatgaggcacagctggtgtatttccttcgcattgtggtgccgtatttgcagagaattcacgaaaaggagcggaacaaacacatgcccgaggtgtcccatgggcacaatgttcgattagggcagctgcaaatttcagctactccctatatcatttccatttacaacgttcttgccgatttggtgcagaaggtcggccgacttcactacgaggacagcatttgcgacttgctttaccagttcaaatatatgtttgtcggcaccacgctcaaagaacaaaccgagattttcattctaaattttccgtattcgatgcgtgaaaaattgaaattttta

SEQ ID NO: 48092 - DNA, 697 bp, Heterodera glycines
ttgagatgaatgacattttggccaggtggcgacgaatacggaaacgacgaaaaatgttggcaatgccattttatatgaaacagtattgactctaatggaaacaaaaagtgaaagcggcttgcgagttttggccgtgaacattttgggtcgttttttgcttaacaccgacaaaaacattcgatatgttgcacttaacactctgctcaaaactgttgcaattgatttccaagcagtgcaaaggcatcgcaccactgtggtggaatgtctgaaggatgccgacatttccatcaaaaagagggctcttgaactttgctttgcccttatgaaccaaacgaacatcgcgagcatgtccaaggagattataattttcctcgaaactgccgactccgatttcaaagctgagtgttcttctaaaatgtacgttgcgacggagcgcttctccccgagtcttgtttggcatttggacacaatgataaacgtgctgcaattggcagctaaccatgtacctgatgaagttgtcagtgcgatgattcagctcatctcttcccagcaggaactgcagcattacgcaaccgtccaattgtttcatgcctccaaacgggaacacatagtaaatgctcagcccttaatgcaaatcgcattttggagcattggcgaattcggtgatttacttgtcactccgggaaatacggaggat

SEQ ID NO: 48093 - DNA, 603 bp, Heterodera glycines
agcccatcccaaaaactgataaaaaaaatggcgttcctctcccgtctctccatccttccaaattcgccaatttcgctgcttgcagtttctttggccgttttggctttcgtcgctttggcatcggccaatccgccgacggcacgcgaaacggcgccaaatgcacagcaaaacaatgccaattcagtggcaactggggaaattgcgaaaaatattgcggaaaagatggagcggatgaatgagttcattaattattttagggcgaagaagttcatcgatgcacataatttggcatttgagaagggcgaagtgtcgttcaaagttgcgccaaaccatctgatgcattttacacctgcccaatataatcgaattcgcggcttgcaaatgcgcagcaaccgacaacggcacaacatggcaactctggcgggaaacagcagtactttgccggaaaagttggactggcgcgagaaaggggcggtgaccgaggtcaaagatcagggggactgcggctcgtgttgggcattcagtgccaccggtgccattgagggagcattggcacagaaaaaagcgtcgaaaattatttcattgtccgaacaaaacctggtc

SEQ ID NO: 48094 - DNA, 586 bp, Heterodera glycines
acgagttttgagcgttgcgacccatcggttcgacttttcgatgtgactgataatgcaacaaattcaagaataggctttttgtacgtcgacattttttcacgcgaaactaagaaaatcggccgtggtcaatggctctctatgcttggaaggcctcctaatcaactccgtgacttggacgctttggtttattttttgggtgcccatccccactccgaaaatgaacacgaatcgttcctccatcatgaagaattgagtgaaatgctgtccgcttttggccgtgctcttcaacttttactctcccgggctccgtgccatttcctttcgcttccattggctccttattacgcttcggacttcgacgcaaatgattttatgcctgcttttatgaagttttgcatatacaagccaagatttcttggacttttgagtagtccgaattcgcaaaatggacaacaattatgtgacgaaaaggcaacaacttatgccaaagcgctgcagcgcgcgactttttgggattcgcaccgtatccttttctggaccgatttcgacctaacgatccacaacatgcaagactggagaaaaaaat

SEQ ID NO: 48095 - DNA, 291 bp, Heterodera glycines
ccacggctgaaattgtcgcattttctcttttcccgtcgcctttcccgcgccaactttttgaacaagcgaaaaatgtgcagatggattttaatttgttatattttcgcgtatcaaatgactacgaatttttggtagaaacttatgtagaactggcaaaaacgaacgaacaaatccgaatgcatttgcaaattttgaagaaaacgcacgaagaaggcatcaaacaaacaaaatccattatgttggccacagtcttcggattatatgtgccatgaggcaaaaaataatgacgaa

SEQ ID NO: 48096 - DNA, 691 bp, Heterodera glycines
  unsure (1)..(691): unsure at all n locations
gcatggacttcgaactgtttgatgagaaggcaaaagagaagcggtctttgcgtctctcccgtgaccaattggacctgttgaacttgaactacgggtcgaacgacgcgcggttcagcatcacatcctattatcagggaactgcttggtgttcttgtcacattaataaaactccccctgcctgacaaattggtcatcttttttatcgacggcncaatcacaaagagcgacgtgcttggccatgtcattccagcaattggtggcacttgggcccattccggggttgcagagctgtatactggcatcaaaaagaacggatatcaaatggtttatttgtcttcgcgtgccattggacagtcccactacacgaaaacgtacctgcagaacttcgcccaggggtccaggactttgcccgacggacccgtccttctctcgccttcttccgttctgatggcattcagaaaggaggtcattgaacggaaacccgaggagttcaaaatcgcatgtctcaccgacctgaaatcgctgttccccgtnggacagccattctttgccggatttggcaatcgcgaaacggacgttaaatcgtctcttgcggtccaaattcccccggaaaggatcatgattattgacccgcaagggtcgctcagaagggcggacaacaaagcgggtggttacgtgtccgattacccaa

SEQ ID NO: 48097 - DNA, 720 bp, Heterodera glycines
tgagcgtctccaatgatcgtttgttccgaacacttcacacatggcagtacaacggctggcgactcagtatatgtaccttcccccaatggattgatctgaaagggcaggattcggttccggaaactgtacaccaggttgtctgtatggtcgatccatgtgaggacaaaagttggattcggcttcgttcaaagcctggccaatcagttcagaccgattctgtccacgcacgtgatcagcttcggcccggaagcgacaacccagaaacactgtcggaggcggtcaaagtgttaaaaggggaatatttggtgaaagcagtcgaagagcacaaaatggaccaagcgatcgttttctgtcgaaccaaattggactgtgacaacatggagaagtttttggcgccacgcgggtacaaatgcgtttgtttgcacggcgaccgaagcgcggacgaacggacgcggaatttgctttcgtttaaggaaaagatagtgcgctttctcatctgcacggacgtggcggcacgaggcctcgacatcaaaggggtgccctatgtggtcaatgtgacattgcctccggcggaagaaaaggcgaattacgtccaccgaattggacgagtcggccgagcagaacgaatggggctggccatttcgctggtgtcgacagtgcccgaaaaggtgtggtaccaccaatgtcggagtcgaagagccaactgcaacaacacgcggg

SEQ ID NO: 48098 - DNA, 558 bp, Heterodera glycines
cattttgcttttagaaaatacatctttgcttctctaacaaatcttctctcttctttcattcaaataaaatgccaccaaagccatcgggaaaaggggcgaaaagggcagtgaagtccaccaagacggtgcgcacggctgacaagaagcgtaagaagtctcgcaaggagtcgtactcagtctacatttaccgtgtgctgaagcaggtccaccctgacaccggcatctcgtccaaggccgtgtctattatgaactcgtttgttaatgatgtgttcgaacgcattgctgccgaagcatcgcgtctggcccattacaacaagcgctcgacaatctcttctcgtgaaattcagacggcggtgcgtctcatccttccgggcgagttggcaaagcatgccgtttctgaggggaccaaagccgtgaccaaatacacctcgtcgaaatgagaccgtcgaaaggacgtgaccaaaacacacacacccatcccaaacagttctctatataactataagaaaaaagaaaaaccgttttctctgtattatgactctttgattttttcttttg

SEQ ID NO: 48099 - DNA, 757 bp, Heterodera glycines
ggacagtgcgaagtcttcgccgcctcttccgacctgttccccagcgaaacgatggaagttgttccccaacaaccggcggatgtggcggaggagcacaaagccattggcggtgctgaggaaattgcggtgaacgatgttcagccctccgctgccggggacgcgcagcagcagttcaattccgagcagttggaggagtgcgatcggccgcccgacgctgaggacgacgtcagcgccttttgggtggacggcgactcgcacgaattggtcgcgatgacaattgtcaatgagttgcttttcacgcagaaaatttcgcctggaggagcgcctgtttttgccacaaggtatgacgtggacacaattgtttggcagctcgacccaaacgtctcgccaagtgatcagaaacagaacaatgttttggtcaaccatctcttcactttgaacgcctttggctacattcaggcaggtcaccaggacaaacgctttttgggctgttctcccgacgggcgctatgccgcactgatcaatcggaccaaccattgcttcctctactttcaaaattcggccatttcgagcgagcacgaactgaagaatcgtcggacgggcaaacgagcggaacacatcgccaaacaattggtgctttcgatgtccgacttggacaaggagttcgacccgaacgattcgtccaacgaattcatcgcatttcatgcgacggcggaaaccctctttctgcttactcgctgcgcaatttatgccgtgg

SEQ ID NO: 48100 - DNA, 692 bp, Heterodera glycines
caatgcccttgcatgcgtgccacaatgtggtggggccaaggatgggcggggctaattcgtcgcttggccgtgcttacacgcccgggggaggaggtgccaaccacaacaacggaggaacgtccggacaatcggtcgcacggcacgctgaccattccggcattggccagccgtgctccatccacttgcgcgaactgcccacgctgaacacccatttgacttctcccgcagcagccgtcgctctcggcctcatttatctgcgaacgggcgattgttggatcagagaaacgctggcaattgctgacacattttacgagattgaccaaattcgtcctgacatgctaatgattcgcactttttcgcgttgccttgtcgatttcgaagacattaaatgcacgagagaatgggtcgatgcccaaattccgcagataattcgtaaatatgtcaaacgctttttggaagtcaagtccaaggaggacatgtggtggtccgatttcaatgacatggccacagttgcaaaagcttatttctatggttttgctggtgcttctttcgcaatggctttacgttttgcctcaaaatgggaaattaaagcacttcaagtcattcaaagtttttacgaaattctcaaaactgacacgagtgaacttgccacgtcaacggagggacattcaccagtcgatctggcacatcaa

SEQ ID NO: 48101 - DNA, 617 bp, Heterodera glycines
tgttactttccgactcacgcgctgaacttcgccttcaagacacttataagcgagtcttcacgcaaggagtggacaaggagaagcagttcttgaagttcttcgccatgaatttggcttcgggcggtgccgctggcgccacttcgctgtgttttgtgtaccctttggactttgcgcgaacgcgtttggcagcggatgttggaaaggccgatgcccgtgagttcaaaggtttggcggactgcatcatgaaaatcctcaagtcggacggtcccatcggtctctaccgcggcttcttcgtctccgtccagggcatcatcatttaccgcgccgcttacttcggctgcttcgacaccgccaaaatgctcttctccccggagggcaagcagatgaacttcttcgtcaactgggccattgcgcaggtcgtcaccgtgtcgtccggcgttctctcctacccgtgggacaccgtccgtcgtcgtatgatgatgcagtcgggccgcaaggacatcatgtacaagaacactttggactgtgccatcaaaatcatcaaaaacgagggactgctcaagggcatgttcaagggtgctttatccaatgtgttccgtggtactggcggtgccctt

SEQ ID NO: 48102 - DNA, 547 bp, Heterodera glycines
ccatcccaaaaactgataaaaaaaaatggcgttcctctcccgtctctccatccttccaaattcgccaatttcgctgcttgcagtttctttggccgttttggctttcgtcgctttggcatcggccaatccgccgacggcacgcgaaacggcgccaaatgcacagcaaaacaatgccaattcagtggcaactggggaaattgcgaaaaatattgcggaaaagatggagcggatgaatgagttcattaaggcgaagaagttcatcgatgcacataatttggcatttgagaagggcgaagtgtcgttcaaagttgcgccaaaccatctgatgcattttacacctgcccaatataatcgaattcgcggcttgcaaatgcgcagcaaccgacaacggcacaacatggcaactctggcgggaaacagcagtactttgccggaaaagttggactggcgcgagaaaggggcggtgaccgaggtcaaagatcagggggactgcggctcgtgttgggcattcagtgccaccggtgccattgagggagcattggcacag

SEQ ID NO: 48103 - DNA, 641 bp, Heterodera glycines
cactttcgctccgcgcgcagttcgcccctcggcaccgcccttctcccgcctttcccgtgccgtccttcgctccatttgcttttcttctgtttggctttttggtcggcctctgccttttgttgactttcgctgttccctttcgctgttggcttctcaaaaagaaaggcattccttcgggcgtcgttggctcctcatcctccaccgattcggccatcgcattgttgaagcagttccaacagaagcggcacagcccggcgcccctccagcgacaagcgccgcttggtttcgagcaaagctgttcagcatccgtcgatggggtgactctcgtccaacggagtatcgctttggacctccaacttatggaagtgttcgcccgggggcgatacggcgagttgcgaaaggcattttacagggggacggtggtggcggtgaagatattttatacgacggaggaggaatcgtggcagaacgagcgcgacatttaccagtgccaaatgctcaaccacgagaacattttgcaatttgtggcggcggacattctcagcagcgtcgagtcacttacccaaatgcttcttatcaccgacttccaccctttgggcccgctttacgactttttgcgtgccaacggtcgtctcagtttg

SEQ ID NO: 48104 - DNA, 692 bp, Heterodera glycines
agtggaccttgtcgcgcaaagcctcactgttaatccgaacatggccatcttcatacaatgaatccggggcattctggacggtccaacttaccggacaatctcatgcaacagttccgttctcttacgatgacatctcctgatcgtgggctgatcgctgaagtcatgcttttttctcaaggatttcaatctttcgagagactcgcaaacaaaattgtcctattatttactctctgcaaggaacagctttcgaaccaatgtcattacgactttggattgcgtgctttgaaatatgtgcttgtttcggccgggaatatcaaacgcgatgcgattcaacgttcttacgatgaaccaagccagagcggggatggagctggagaacaggcagtggcaagccaaatgtctgaacaacaaatgctcttccaatccgtgtacgacactttgacaccgaagcttgtctctgaggatatcactctttttaaatcgcctttgcatcaatttttccctgacaacagcccaaaacaagtggaaagcctcaagaacgaagttttgagcatctgcaaaaccgaacacttctcatgttcacctatcactggggagaagggaaatctttggctggagaaagttcttcatgtttaccaaatcaccaatcgcaatcatggcctaatgcttgtcggtgcgagtggatcgggcaa

SEQ ID NO: 48105 - DNA, 701 bp, Heterodera glycines
acatggctttgtgcaagcatggactgcgccttccgcagttcatatcttcaacgaaatacggcgatggctcggaatgcgtccaaatcaccgcagctgttggtcctttactgtgatcagcttttttttataagtgcacgcaacatggaggacgagaagatggatgagaacctggatgctttgatgaccgtcttcatttacatcgacgacaaggacatgttccaagcgtttttccacaagtttttgtgcaagcgcctcgtctacgacacgtcagccagcgaggagcaggagcgatgcatgatcgcaaagctgaagcacatgtgcgggttcgagtacacctccaagttggagcgattgctgactgatgtcgcgctgagcagggaccactccgagcaattcaagcagcagccgaggacatccaacgttgacttctccgtcattgtcgtcatgtcgagcgtgtggccactgcagcagccggtcaaattcgaaatcccgcgtcctctcctcgactgcattgactcctacactcagtactacaccaaccgtttcaatggccgtaagctgacctgggcgttgcaaatgtgccgcggtgaattggtctcgacgagcaacactttcccgtcgaaatactcatttttgtgcaacacgcaacatattgccgtcctcatgcagttcaacgaacgcaacacgtacacacttggcga

SEQ ID NO: 48106 - DNA, 374 bp, Heterodera glycines
  unsure (1)..(374): unsure at all n locations
cattcgccgtttggctcgtcgtggaggcgtcaagcgcatctccggcctgatctacgaggagactcgctcagtgctgaaggtgttcttggagaatgtgatccgtgacgcggtgacgtactgcgagcacgcgaggaggaagactgtcgccgccatggacgttgtctacgcgctgaaacgccaaggccgcacgttgtacggatttggcggttgagcgggacgggaagaacggaggaggagaggaatcatcaaacaaaactatcccaaacggccctctttagggccacaaccattcaaatggacggatatgctttatcaacttattttaacgataaatttgatcttttgtnaaaaaaaaaacaaaataacaaaaaaaa

SEQ ID NO: 48107 - DNA, 541 bp, Heterodera glycines
cagcgcacatttctctctctccatttcttctcttctttaacaacaaaatgccaccaaaaccttccggcaaaggggcgaagaaagcggtgaagtccaccaaagcggtgcgaacgggcgacttgaagaggcgtaaggctcgcaaggagtcgtactctgtgtacatctaccttgtgctgaagcaggttcacccggacaccggcatctcctccaaggcgatgtccatcatgaactcgttcgtcaacgacgttttcgagcgcattgccgcggaagcctctcgtctggcccactacaacaagcgatcgaccatctcttcgcgcgaaatccaaacggccgtccgtctgattctgcctggcgagttggccaagcacgccgtgtcggaggggaccaaggcggtgacgaagtacacctcgtcaaagtcgacttcggtgtccggcaagggagctcggcgcgtgaacaatcgagacgtgtcacagaaagacagcacggctcatgcctctaatcattcggcggaaacgttttccgactcattggtgacggaaga

SEQ ID NO: 48108 - DNA, 525 bp, Heterodera glycines
  unsure (1)..(525): unsure at all n locations
aagcatagtgctagttttccgctnatctctgcttttacactcttatttagtaaaaatgtttccggctacaaaattgttgaccacactttcgatgccattgtggtgggcgcaggcggcgcctgtcttcgagctgcgatgggtctttcggaggggggaatgaaaacattcgctactaccaaactgttcccgactttttcacacactgtggcggcccaaggcgggataaatgccgcattgggaaacatgaacccggatgattggcgatggcactcttatgacactgtcaaaggaagcgattggcttggtgatcaggacgctctcccttatatgaccagggaagcgccccgggcggccatcgactcggaaaactacggaatgcctttttcgcgcacggaggagggaaagatttaccaacgcgcctttggaggacaaagcaatgattttggacgcggtggtcaggcgcacaggacgtgttgtgtcgcggatcggaccggcccttctctgctgcacactctttacggcgct

SEQ ID NO: 48109 - DNA, 350 bp, Heterodera glycines
cctccgtttatgcgaccacgcatttcgtctttatcgtcaatttttcgtgctcgacgattcggccggcacgcgggcttcgatgactcccacaacgcccgcctcgctgcttttctccttttggcccgttcagccccattccaaccatttcgaggcgttcattgagggtctctgccgcgtgctttacgacactctccgtccgctggtcgtccacaacccgcacctcgaaacactggcacaactgtgcactcttttgaaggtcgaaatgatcgacgagcgctgtgccgcgcttccgtcgtcccatccgaacgcttttccgccccctttctccgcgacttcgccaaccgacgcaa

SEQ ID NO: 48110 - DNA, 639 bp, Heterodera glycines
tcgcgacatggttgtctgttctgcgtacgggcacgagttgcccaaatatgggataaaggttggactgacaaactatgccgcagcttacgctaccggacttttgttggcacgtcgccacctgaacaaattgaaattggacagcgtttataaaggcaaagaaaatgtggacggagaggactttgacgttgagcaggaaggggacaatccgaacccgttcacatgtgtgctggacactgggctcgcccgcacaaccaccggcgcaaaactgttcggagtcatgaaaggagttgcggacggtggcattcacgtgcctcatagtgagactcgtttctttggctatgacccggaagagaaaaagtacagcgcagaagcccacagagaccgcatttttgggaaacacgtggctgactacatggcccacctgaaggaagaggacgaggaagcgtacaagcgtcagttctcccagttcatcaagaatggcatcgagtcgggaacgttggaagaaatgtataagaaagcgcacgatgccatccgcgcggatccgtccttcacgaaaaaggaaccaaagaagccaaaggagcaaaaacattggaacaaaaagaagtacacactgaccgagcgcaaacaccgtgtggccaa

SEQ ID NO: 48111 - DNA, 593 bp, Heterodera glycines
caacttcaactgtctgctactgctgtacaacaaaatgccccgtcattgtgcaaagcctcgttcttttcatgccggactgaaattccccgtcggtcgtgtccatcgcaagatgaagaagggtccttttgccaaacgtcttgcgaacggagtgccggtctacatgactgctgtttctgttcacatcacgggcgatctgctcaagattatcggcgatatcacgcagtccgaaggcatgaagcgtctcagtgcatttcacattcgatctgcagcgcgcgaaaacgacgagttgaggaagctgttctctggcgtctctcttgccgaggtgtgcgtgctgccggagctcgaatcggatgtggagcaatcatcggaaggaagtggcgagtccgactccgatgaaagtactgaagggagcgcgagcggaagtcatgagggtggcggtgctgctggtgcgcagcaatgagaggaggattcattctcgagaccgccgtgataacattgacttccaatttaaaagaggatagatctctctgtctgtgatatatatgtctattgcaaatatgtccatgtctctgtgacattgccttcttgctgct

SEQ ID NO: 48112 - DNA, 556 bp, Heterodera glycines
caaaggcgaagaatggtcggacattccgataagcgaatgccgaatggccgagttggtccggcactttttcgccttgggttggatgtgcgacaacggcagcggaatggcggtccgagtgaaagactatcggacgggcgaacatttgattctgaactcgtccaattcgttggatattgatattttttcggaaaacgatttatttgtgatgaaaatgaacggcgaaattttgaaaagcccgtcaaaatcggaccgatctccgacggcgccgttttatttactgcgcgacaatccggatttggcctgtgtcattcacactcactcaaaatgggcaaatctgatcacccaactgatcagaggagacgagttcaaaatttcaaaccaggaaatgattcagggttgtgaaaatcgtctcacaaaaggccgtctggataacattgacgtgctagtggtgccaattgtgcagacagagatcaatgagcatctgctttatccaattctgctgaggacgctgaagcaaaacgcgggggcaagtggcattttagtgcgtgggcacggc

SEQ ID NO: 48113 - DNA, 643 bp, Heterodera glycines
ccaaaagcgcttcttctcatcgccttcgccttcaaaacttagaagcaccaatcccaaccagaaaaaatgtgcgacgaagaagttgctgctctcgtggtggacaatgggtccggaatgtgcaaggccggtttcgcgggcgatgacgcgccccgcgcggtgtttccgtccattgtggttttctcccgtcatcagggcgtcttggtcggcatgggacagaaggactcgtacgtgggagacgaggcgcagtccaagcgtggtattctgacgctgaagtacccgattgagcacggcatcgtcaccaactgggacgacatggagaagatctggcaccacaccttctacaacgagctgcgtgtcgcccccgaggagcacccggtgctgctcacagaggccccgctgaacccgaaggccaacagagaaaagatgacccaaatcatgttcgagacgttcaacacgccggccatgtacgtggccatccaggccgtgctgtccctgtacgcctccggccgtaccaccggtctcgtgttggactccggcgatggtgtcacccacaccgtgcccatctacgagggttacgccctgccccacgccatcctccgtttggacttggccggccgtgacctcactgactacctgatgaaga

SEQ ID NO: 48114 - DNA, 496 bp, Heterodera glycines
cgaggagtacgacccgaccattgaagactcgtatcgaaaacaggtacttattgacggtgagacttgtttgctggacattttggacaccgcaggacaggaagagtattcagcgatgcgggatcagtactttcgcacgggtgagggctttctgctggtcttcgcgctgaacgatgtccttttcttcgagaacatccatgcctaccgtgaacagatcagacgggtcaaggacagtgacgaagtgccgatggtgttggtgggcaacaaatgtgacttggcacagcgcgccatggaccagcgctccatccaggagttggcccgctcatttggaattccgttcattgaaacgagcgcaaaaacgcgacggcacgttgacgaggcattccatgcattggtgcgcgaaattcgtaaacacaaggacaaacaccgggagaggccgaaacggagaaagcgctgtgccgtcctctgacgaaagaaggggaaaatttaaaccaaaaaa

SEQ ID NO: 48115 - DNA, 680 bp, Heterodera glycines
ccttccggctgagtgggacggtcggctcggcactttgagcgtggagcaactcggcggtgacaatttcgaatggaccgtcgcggttcagaaaaagttcaccggggttggtaaggctagtgcgatcgacttggacttggcctgctccgtccccgttggctccgatcacttggccgatttggtcgacctttgctacaaatttcgacatacagactctgcgggagatttgctcccttccactgaatacactctgtgccgtcttttactggaattcggcgaatttggcgttttcatgaatttgcttaatgacccgatcaactacggcatctttcccaatgagcacatttgctgcatgttcctcgaccattttctcggctccgctcagttgcaatatgcggccaaaattgccatttatgtgatgctgcaggaaatgttcgacttccctttgctcacttttctcgccactcgcgcccttctcgagtggacgcaaggggaacgaaaactcgatgagcaaatccatccgaaaatggcaccttctctggaggacgagactaacttcaatgaggagaacgtgcgcctttttcgctacccttttctgaagaaccctttttgggatggacacttcgatgagaatgactccgaccgaatggcaggcaaagccctcgaatggctttcataccatt

SEQ ID NO: 48116 - DNA, 767 bp, Heterodera glycines
gatgacacggaggagcagcgggtgatacgcaatgtgaagtcatgggagcaggatccgcactatttcaaggaagtcaaaatttcggccttggcccttgtcaaaatggtgatgcacgcgcgcagcggggggaacatcgaaattatgggtttgatgcagggccgggtggacgccaacacaattattgtgctggacgcttttgcgctgccggtcgaaggcaccgaaacgcgggtgaacgcgcaggcccaggcctacgaatttatgaccaacttcagcgaaagttgcgaggcggttggccgtttggaaaaggtggtcggctggtaccactcccacccgggctacggctgctggctgagcggcattgacgtgaacacgcagtccatcaaccagcaattccaggagccctttgttgccattgtgattgacccgattcggaccgtcagtgcaggaaaagtggacattggcgcgtttcgcacttacccaaaaggttataagccgcccgatgagccgccctccgagtatcagacaattccgctgaacaaaattgaggactttggcgttcactgcaaacagtattattctttggatgtcacttatttcaagtcatcactggactccaaaatgttcgacgctttctggaacacttattgggtgagcacattgtgtgccaatccgttgcggaccaacgccgattacatcacggcacagttggccgatttgggcgccaaattgcagcatgtgaacacccgtcatggagcgtcatttcgtga

SEQ ID NO: 48117 - DNA, 587 bp, Heterodera glycines
ataggagaaaaagctggaaaacatcgagaaagagttgcgtcaagtgaaggagttgtacgacaccaacaaagagtttaagtctttcattgacaacccaattctgaataagcaaaagaaaaaggaggccgttgaggatgtgctgaagaagcagggcgtctcacaacaagttcagaacttcttcggccttttggcggagaatgggcgaatcaacaaattgaccggtgtcgtgagctccttcgaaacaataatgcgagcgcatcgcggagaacttcacgtggaagtcgcaagtgccgagcccctcgacaaaaaacacgaacaatcgctgaacgacgccctgcaaaagtttgccacgcgtggacagaagctgaacttgactttcactgtgaagccggacttggttggtggactggtggtgaacatcggcgataaatatatcgatttgtcaatggcaacacgccttaagaaaatggacgcggtggtaaagggatcgatctgatcaatttttgttagcacgacagaattagccgatgacttgacagttccgaatgttcttttgtttttattgtctcaaataccatattattact

SEQ ID NO: 48118 - DNA, 641 bp, Heterodera glycines
catctcccgctcttccggtctaccaatttacgactccgccaaccgccgagtggaggatttggaatgtcgtctgtgcaacaaattcatccttaatcgcataaaggcttccacatcctttggcatctgaacaccgacctcaacatcgtccgttacggctgcaaacactgcaacttcaagcatgaccgtcctcaatcggtcgctgcgcatggcattcgagagcacggcgacgaagcatcgtgtgaagatttgctgtacaacttcgaggacgagctcaagcaaatgtccaaggcgtgctttggcgtggagcgtttattcgaaaaggaaatacgccgacgcaatcgcttagaacgttttgcgcgatgttcgactgaaaattcctcggcgggccgtgccgaggacgacgacaattcccagcacggaaacaacgagtccaaactgtcacagcaaattgttcgccgccgttctcaacagcatatcatgaatctgagagtctcgttgaagtctgaaaatgttgatcgcgactggacgcccaaagagccggtgaggaaacgacgaagcgggggtcgtcgtttcttcggatcgaggggtaggaagccaatgtcgcgtaaggcgcgggatgtgatgatcaaactgcgcgatgt

SEQ ID NO: 48119 - DNA, 728 bp, Heterodera glycines
gattatttgctggttcctgccttgtgcagaacggctccgctatcagccactcgggtgggccaattcgtacgagttcaccgacgcagacttccgagtcgcgtgcgatactctcgattccactgttgacatggtcgcacagaacagggcgaatgttaagccggataaattaccatggctggctctccggactctgctctctcagtgcatttacggaggaaaaatcgacaatgattttgatcaggtgcttctcgatactcttctcgacaaactgttcacatcaaattcatttgacgctgactttattctcattgaaaacatcggagtgaacgccttgaacatgccagacgaaactaactcaaaggatggtttgatcaactgggttattaacatcaaagccttacaaaagcctaattggattggacttccaaacaacgcagaaaaagtgcttatcgccgaaagagggtaagaatttatacggaagatgatcaaaatgtcggacgatgaacttgcatacgaagcggatgatttggaacgtaacaagcaagcccctacctggatggttcaattttctggacagtgcaaatcttggctcgatgctttgccacaacaactacagcgtcttcgacggactaaagaaaatgtgcgcgatccgttgttccgattctttgaacgtgaaatcaacttgggcgccagacttttgtccgatattcgacgtgacctcaacgaat

SEQ ID NO: 48120 - DNA, 652 bp, Heterodera glycines
  unsure (1)..(652): unsure at all n locations
caatctgtacgtcaagaacctgcacgataccatcaatgatgagacacttcgaagcaattttgaatcctacggaaacatcacaagtgcaaaggttatgtgtgatgagcatggtcgctccaaaggattcggttttgtgtgctttgaaaaggcggatgaagcaaccaaggctgttgtggaaatgaacaacaaaatcatcgaaaacaagccgctttacgtcgcgcttgcgcaacgtaaggaagaccgcaaagctcaactggcctcgcagtacatgcagcgcttagccgcgatgcgcatgcagaaccctgctggcctcatggggacaatgtatgcgcctgccagcggtggatttttcctgccacaggccatccagaaccaacgtgctgcgccgttcatgcaaacaccgaatctgtccggggcacaaatgcgtggcgctgtccctcgctggaacaatatgggcggtttcaaccatccaatgcaaggctacatgatgggtccagctgttggcggtcagttcggcggtgctaatcaaattgctcgtggaggacctcgctccggtggatgggtggtggcggtgggaatgcgtcagtacggnggacaaccccgtcagcaacagaaccgcatgccgggcatgggcggaggtcatcagcagcaa

SEQ ID NO: 48121 - DNA, 595 bp, Heterodera glycines
acaccgacatttctctcctgaacatgtccgagaaatttgtcggcaaatggaatttggagtcgtcggagaactttgacgacttcatgaaggaggtcggcgtcaactttctcacccgcaaggccgccggctgtgtcaaaccggtgctggaattcgaagtgtccaacgccggcgagcactggaagatgacgtccacgtcgacgttcaccacctggaactgcgagttcgacctgaacaaggagttcgaggtgaagacggccgatggacgcacggtgaagaccatcttcgcctacgaaaacggcaagctgaccgagaagcagtccaagctcaaggacgacgagaaggacagctactacgagcgctacatcgatgaaagcggcaaactcgtcattacgatggaagccggctcggtgaaggccaagcgcgtgtacacgaaggcggcctgagaaccgaagaagatgacgccgatctccgaagacgacggacgcttctgacccgttttcgtcattcttgaggccttttgatccgcaattcttaatttccatcttctaatttatttaatgcgatcaataaaagggttctctctgagaaaaaaaaa

SEQ ID NO: 48122 - DNA, 747 bp, Heterodera glycines
gagtccgaacactgaaaaaaaaagaaaattgggaaaggctgcgcggaagcgattggcagttgaacgaacgatcgaatcggacataatattcgacaatttggaagaacaaatgctctttcagcattcttccgactttcctttcttccataccccgtcgaatcagaaatcgaaaaatcttcgaaattccattctttgcgccgcgacggtcgaatatttcgccctttccgtcgcgtttgccttctctccgtcgaccaattcctccaattcgcttcgtccgtcgttcgttcgttctccgtttgaccgccattcattgcgtaattacacaaaagatcagaacaatggcgggattgacggcggactgatcggcgccccccggagcgaatactcagccgatgcaatgcgaagcgggggacaattggcggcccgggagggcgagcagctcctcggtctgctgagaatgtgccgtcagaaatcgctgaaacgttcgcaacacaatttggaggggctttgctccgcacttttccaaatggccaaagaacagcgaaggcgaaaacggagggacattttggggagggaaaggcaccaaaatgaaatggcaacgaaacgtccttttttgccaattggggaggacgaagagcaatggctatggtggtagcagaaaaggacaggacaaaaaggagagattctgctgatcagtcggaacggagagagattcaaatcgaagcgatcggaaaaagaaaatcagaa

SEQ ID NO: 48123 - DNA, 682 bp, Heterodera glycines
aactgcctcgggaccccgccggagaagaaatcctgttcctgggcgactacgtggaccgtggcgcgcaatccgtggagaccatatgctgctgctttgctacaaggtcaaatatccgacatcgattgtgctgctgagagggaaccacgagacgagcaacatcaacgcaacgtacggcttcaaaaaggaactggaggaacgctatccggcccattcgcaagccctgttcgacagcttcaatgacaccttcgcgtggatgccgctgaccgggctaatcggccaaaaaatattatgcatgcatggaggcatcagcgacaaaattcgaagcattgaacagctcaaacaattggaacgcccgatgctgctaccgccgaccgatagtctgcacattgaccttatgtgggccgacccgatggaagcgcaaggacaactaccgaatccacgaggcgcaggtgtcctgttcggcgaagatgtggttatcagaacttgccagctgctgaagatttcgtgcatcatccgagcgcaccaattcatccaatccgggtatgagccaatgttcaaccaacgactcatcaccgttttctctgcacccgcctacacaggccaaacaaacacgggcgcggtactggaagtgaagacgtcgagccactttaccactcactttttcccgccccaatcccagtga

SEQ ID NO: 48124 - DNA, 608 bp, Heterodera glycines
ggtggaattggcactgattttgctctgttcggtgtttgcttttattgtctgatcagtggcaatttcggctcgctgtacggcgattatccgagcatgttccagctgcgggattggaccagacagtacggcaagcagtacggcatccaatacggttggcgcaacgcgttggtgatttctgacccggcaatggtccacgagttgcttgtcaccaaatttgaatatttccacgcaagaaatctttcgcccatctttggcaatttggacacaaacaaatggatcagcatgttcttggccaggggaggccggtggaaaaggctccgaacgattgcgaacccggcattttcggtagcgaatctgaaaaagtgcatgtggctcattgacgattcagttaaaaatgccatcaattttctggaaaaagcgcgcaacgaaggcaaatcttttaacattcaaaggcatttcgtagaaatgagtttcgatgtgatcgcccgtgtggcgttggggcagcgcgagtcgcgacagtttgagactgaaatggcacacctggcgattgagtcgatgcaaaaatacaataacactccgttcgattacgtcggcttcgctttcccgtg

SEQ ID NO: 48125 - DNA, 752 bp, Heterodera glycines
acacttaatttcggtgattttccttattttttggcgcttgacaatttttggctggcaatgacaacgaaaagtgagggggatgaaaataattctgtggatgagaatggcgagccctctggcaatcacgcggagaattgcagcaccgggccctcttcgcctgccccgtcagtgtcctgcgaggcgtgcggtaccaatttctcacaacttgagaaggatgcttttgccgcagtacgcgaaatggcgccgtacgtcaaaaccatcgccatttccgaaatactatcccgcactcccgagctcatattcctcaacattgtcactttggaaaatgagagttattgcgtggaactcactcaacgaggctggcgggtgagttccgaccgtctcgactgtatgaacggagacattcaaaagttggaaatgcacgtcacttactacgacgccattgagcagctgttggacagcttaagcgagcagtaccgcgagaattttggcgccgcactctcttcaaaactggccgctctgcagacggaacagaagcaaagacagcaggacggagaatcagagggaaacggcggaggggcggcagagagaagcgacgcggggcaaaggacggacgacgagccgaactgacaatgagcggagcaaagaaaggcacagaatgtttgtccattttgattgtcccacccttcgttggtctgttactcatttacacttctccgaggcgagtgtcccatttctcttccattcccttc

SEQ ID NO: 48126 - DNA, 534 bp, Heterodera glycines
ccgtccccctttcattgcgcgggttgtgcgctatgtgaaaaagccggtaatgagaagaaactcgtcgtctgtgttggctccgtgacggacgacaagcgcatttacaccgttccggcgatgactgtctgtgcgttgcgcttcaccgacgcggctcgcgcgcgaatcatcgctgcgggcggcgagtgcatcactttcgatcagttggcattgcgtgcaccaaagggcgagaacacgctgctgttgcagggacgacgaaaggcgcgcgaggcggagaagcacttcggaccgccaccgggagtgcctggcagtcacgcgaaaccgttggttcgcgcgaagggaaggaaattcgaacgtgcacgcggtcgccgaaagtctcgcggttacaagaactgaggaattcctgtttcgctttgttgagatatattcccttgtcatgttacctttttgttatggaagtgaaatctttcttatccataatcaaagaaaaaaattgttgatttccaaaaaaaaaaaaaaaaaaaaaaaaaaaaaaaa

SEQ ID NO: 48127 - DNA, 630 bp, Heterodera glycines
taaatcgaaagggccgtgcactgtgctgttcagggtccgaatacattgttcatgccgtacatttggctattctggcccatcaattacgtttgctgatgaccgtaccaaaagtgtccgatgagttgttgaccaccgatgtgcatgagccgagtgtttgtcgactgaatttggcccgtcttttgcttctctttgtcaaggactttgaattgagcaatatcgaatacgcaataaattactgtttttttgcgcgcgactttaagttggacacaccttccgcggacaatgccacaattagacaagaaggtcggagtgtttttgtggctgctgtcagccgaatagtgttcatgtccggccatcgggaagcgattttgggccgattggactctcaggggaacagagtccccggtctcattgacaaatttaaagacgccatggacatttgcgaattgattgccagcattgccttcgacactcatgtccagggacactctcttgctgcgtgtcacctttacgcattggcaaagtgtcacgaaaaagccataaaattggcaaattgccaactctccatgtgcgtgtccaatccaatggccaaagaaacttgtgagatggtcgaatgtgccaaatggttgg

SEQ ID NO: 48128 - DNA, 600 bp, Heterodera glycines
caattggcaacgaaagcggcgcgcaagtcggccccgtcccggggggcgtgaagaaaccgaccgataccgtccgggaccgtcgcactgcgtgaaatccgccgctaccaaaaaagcaccgaactgctcatccgcaaattgcccttccaacgattggtgcgcgaaattgcccaggacttcaaaacggacttgcgctttcaatcggctgccatcggcgctttgcaggaggcttctgaggcttatttggtcggtctttttgaggacaccaatctttgtgccatccatgcaaagcgcgtcaccatcatgccaaaagacattcaattggcccgtcgtatccgtggagaacgtgcttgaaatggtgggcggtgcgtccgctgctgctttggtggaggatgagcaatgaatgactctgattgagctgaccttcgttcgatgattccaatgattgcgttcccctggcgatgtcttttcccctaaatgttccatcccttttaacttttggtgagcaatgtttctcttcttttccatttttgcttctttctttccattgctctgtaaatttgtcagctgtttcctttctgcataaaaaggggagccaacaca

SEQ ID NO: 48129 - DNA, 631 bp, Heterodera glycines
ctctttccttttgtgttacgacaactttcattgctctctctccaatggcacgaaccaagcaaactgctcgcaagtcaacgggaggaaaggcgcctcggaagcagctcgcgaccaaggccgctcgcaagtcggcaccggccaccggtggagtcaagaagccgcatcgttaccgccctggtaccgttgcgcttcgcgaaattcgccgttaccaaaaatcaacggaattgctgatccgcaaactgccattccaacggcttgtgcgtgagatcgcccaggacttcaagacggacctgcgtttccagtcaagcgcagtgctcgctctgcaggaggctagcgaggcgtacttggtcggactttttgaggacaccaacttgtgtgccatccatgcgaagcgcgtgaccatcatgccgaaagacatccagttggcacgtcgcatccgtggcgagcgcacgtgagaagtggaagcgaagaagtaggaaggagatggtggtgtgatcgtaacaaaactaacccaaacggccctctttagggccacatttggcaaatggacggataagacagtggttgtgtttttgaataaaatttgttttttcattttgctttgattgaattttgacgtttaacataaaca

SEQ ID NO: 48130 - DNA, 446 bp, Heterodera glycines
gtgatgagaatttaacagagaaaccacccagcccgggattctctcatggccacgccgggcccaacacaaacggggtcacaattctttgttacgactgtgaagactgaatggttggacggtaaacacgtcgtattcggtcgcgtcactgatggaatggatgtggtgaaagctgttgaagctcaggggtctcagtccgggcgcgcttcgaaagacattatgatcgctgactgtggacaattgtcgtgagaatagggccaagaaaaaccggattttccaatgttatgaatggtattgaaacaagttaaggcaatctctaattttaattattgagggcgatgataaatttgtgatttattaaaaaaaaaaaaacaaaaaaaaaaaaaaaaaaaaaaaaaaaaaaaaaaaaaaaaaaggccaaaaaaaaaaaaaaaaaaaaaaaaaaaagg

SEQ ID NO: 48131 - DNA, 687 bp, Heterodera glycines
  unsure (1)..(687): unsure at all n locations
caattgttgttgcaatcgccgcgacttgctgattcgccaattaccgggagctaatcggacgcttaccaaagattatggcaaatgatgcaaatatctttgtcgccgcaagtgccaccaaatgtgtgatgcttttcgccaaaggattgcgtgccgaattcacgcctcacgtgtcgttggttgtcccggtgatcttcgacaagttcaaagtggagaaacggttgctcagagatgctctcgtcgagtgcatcgatgtcatcgcagcatataccagtttcgaccacctaagcaaggccttgctcgaggctatgacctccaaacagaatccgagtcagaaatcacagacggatttgttcatctaccgcctgttccgttctcttccggccaaagacgttcccaagggtttgctgaaggatttggtggccattctgagcaaacatggctttgatgccgcttccgaagtgagggactcttcttttgctgcgttgggtgccattatgcaatgcattggggaaaaggccttgggctgtttcatttcacccgaattggccaaagatgcgaacaaaatggccaagattgctttaaaacgtgacactgcttaggtatttttttatttgtttagaaattttcccatatttttgttaaattntagaccatttattttctattttttttaccccattttccatg

SEQ ID NO: 48132 - DNA, 639 bp, Heterodera glycines
gcgaaaacaatttggttttctacgagtaagcaatgggcaaggaaaagatccatatcaatattgtggtgatcggtcacgtcgattccggcaaatcgactaccactggccatctcatctacaaatgtggtggaattgacaaacgtaccatcgaaaaattcgagaaggaggctcaggaaatgggcaagggatcatttaagtacgcttgggtgcttgacaagctgaaagccgaacgcgagcgtggtatcactatcgacatcgctttatggaaattcgagacaagcaagtactatgtcaccattattgacgctcctggccatcgcgacttcattaaaaacatgatcacagggacttctcaagctgactgcgctgtgctggtggttgcttgtgggacgggagagtttgaggctggaatttcaaaaaacggccaaacgcgtgagcacgctttgcttgcgcagactttgggggtcaagcagctcatcgtcgcttgcaacaagatggacaccactgaaccgccattcgccgaggcccgttacacggaagtgatgactgaagtgtccaacttcatcaagaagatcggttacaacccagccaccgttccattcgtcccaatctctggcttcaatggcgacaacatgttgg

SEQ ID NO: 48133 - DNA, 714 bp, Heterodera glycines
ggaagcctgcgaaactgtttcggagccgaacgcttcgcgcaccgttccaagagacgcttgttcttatcggtcctaccgggcggagaagagaaaggccaacgacttggaatacatcaccgaaagacacaaaagcgacacattgcgcgaggctgagccaacgacggccggcggggggcgaaaagttaggacttacgaaatgagtgacgaagagagggccgagttcgaagtgtccgccccattacgcgatgcgctggagacaatcgacacccatttggcgggcggtgccaatgccaacacaaaagaggagcaggcggagatggaatgggcgtacaaatactgtcaacacgagtggatgaagctgacgataaaggaaaatgcgaatgcctacatcgtggagcaattcatcgacgcattggaggcattttcgaaccgattgatggaaaaggtggtgaacatgacggaccagaacgggaacaccgcgctgcactacgccgtgtccaacgaaaacttcgacgtcgtttccgtccttttggactccaaagtttgccgagtagacgaaatgaacaaagcggggtacagtgcgttggtgctcggcgcgttgtgtgagctgcggaacgaaacggaatgtgccattgtgcaacgactgtttcagatgggcaacgtcaatgccaaggcgatgaagcactcccaaactgctttgatgctcgccgcttt

SEQ ID NO: 48134 - DNA, 678 bp, Heterodera glycines
cagccccggaactgcgatcggcacttcaattaacttctcaaagcgcttaaggcgttgcacagcgttggatacctccatcgtgacattaaaccagcaaactcggccctcggcacgcctgagacgaacgaacagcgccttctctacctcctcgactttggaatggcgcgcaaatatgtcagagaggacggcacacaccggcgccaaagggacaccgcccgcttcagagggacgccaatctacgcaccaatctctgcgcacatcaaacgcgactacagccgccgggatgacattgagtcgtggttctacatgctgattaaattctacaaaggctctgtcccttggaatagccttcgcgacaaaaatgagattggcctgtacaaatgtcgccggatggaggaccagccacccgaggtgcgacgccaggccatcgacgaactgactgctggatgtcctcccgaatttaccgagatcctatcctacattgacggactgcagccggaaagccgaccagactacgagatgatcgagaggttgctgcgcggatatctcaccaggaaaaacatccaggagcatccgtacgactgggaggagggacgcaaaaaaacacaaagcgcgcaatgagaggaggaagaagaaccactcgcaagaggaagtgagcagcgccgttctgaccaattg

SEQ ID NO: 48135 - DNA, 625 bp, Heterodera glycines
  unsure (1)..(625): unsure at all n locations
tactgctcccggcgatcgantacttaatgatcacaagacctcttatgtcaaccccgagcatttggactacttccggtttgttggtcgtgtgatcgccaaggccatttatgacaacaaacaacttgattgctactttactcgtgccttttacaagcacatcttgaacaagcatgttcggtaccaggacattgagagtgaggaccccgacctcttcaaatcgctggaatttttgctgaacaatgccgttgaggacctcggagccgagctgacttttactgttgaggtggaggagtttggtgtgcgatcgactcggcagttgttggaaaatgggaacaagacaacggtgaccgatgccaataaccacgaatacgtccatttgatgtgccaaatgaaaatgacaggctcaatacggcaacagttgaacgcgtttctcgagggtttctacgaggtcatccccaaaaagctcatctcgattttcaacgagcaagagttggaattgcttatctccggcctgcccgatatcgacatcgacgacctttgtgcaaacactgaatacaaaacatacacacggacgagtccgcaaattcaatggttctggcgcgctcttaaagctttcgatgccgag

SEQ ID NO: 48136 - DNA, 609 bp, Heterodera glycines
aagtgttttggactctcagctgaaacagtcgtcgaccgtgccactgaattgcgttacattggtggaatatatgctgggaacataaagccggctcagtttctctgtcttacactcaaattgctccaattgcaacccgacaaagacataataattgaatttataagacaagacgacttcaagtatgtccgtgctttgggtgccatgtatatccgtttggtatttaattccgtcgaagtcttcaaatacttggaaccgctgtacaacgattaccgaaaactgcgttacatgaacagaatgggaaaattcgagttgctatacatggatgaatttgtcgacaatttgttaagagaagaccattattgtgatatacagctgcctcgtctacagaaacggcaagcactcgaagaaaaggaccaactcgagttgtacgcttccgccttggacgaagacttagagcgtctttccaccgactccgaagatgagcaggagacgcggaaagcacggccaattatcgtttctcggcgccgaagtcgctcgcgcagccgtggccgaagtcggagcaaatcgagagaacggagacgccgatcactttccacggatgaccgtcgg

SEQ ID NO: 48137 - DNA, 675 bp, Heterodera glycines
taaggccttaagcctgctaattgacatcttgaacctcaaaccttctcctgtttaaaaaacgacaaattttttgatggctgctgtagtcacaaacaatagcaaggaattcatcgtcggtgtgaagtacaagctcaagcgcaaaatcggtagcggatcttttggcgacatttacctcgccatcaatattcataatggtgaagaagtggcggttaaacttgagtcagtcaaggctcgccacccgcagcttctctacgagagcaaggtgtacaaaattctgcaaggaggggttggcattccgcacattcgttactacggcatcgagcgcgactaccactgcctggtgatggatttgctgggtccttctctcgaagacttgttcaacttttgttgccggcgcttcacgatgaagactgttctgatgcttgccgaccaaatgatcggacggattgagtacatgcatgtgaagaactttattcatcgggacatcaaacctgacaattttctgatgggtatcggtcggcattgcaacaaactcttcatcatcgattttggattggcaaaaaaataccgtgactcgcgcacgcgcatacacattccctaccgagacaacaaaaatctgacgggcaccgctcgctatgcgtcaatcaatgctcacatgggtatcgagcagtcgcg

SEQ ID NO: 48138 - DNA, 517 bp, Heterodera glycines
tgatattcgtgatgaagccagccgtgagggcggtggaaacaatttttggggcgatgaaattccaaaaaagttgcgcgaaatgagccgtgccgagctcagtggccatattctaatgcaaaaagttcacccattctctgctccgaattacatggtccggccaaatgagcgcgtgcagcacggaaatgtcgtcaccgagctgagcactttcggcactctgctgggccatgtgaatacaaaggcggtgctgcacaacgcgcagcagggccattacgcacgctcaaaaccggaaggggcaacggagggcggcgtttacgggggcggaggcgttgtcgactcgccattcttattttaggagaaggggcggggaatgaaatgtagtattattgtatatactattatacaagtactgtattctttatttctctcttctgtcatttaatgaataaaattcatggtcaaaaaaaaaaaaaaaaataaaaaaaaacaaaaaccacaaaaaaaaaaaaaaaaaaaaaaa

SEQ ID NO: 48139 - DNA, 558 bp, Heterodera glycines
gtggaagggcgccgatccgaatgagccggtggttggccgtgagaacgacattaacacgaacttgacgcctcttttcgttgctgccctccatgcacattttccgctgtgccgtgtgctcgtcgaccgtggtgccaacgtggacttgggatcggactgcccaacgccgctgatgatggcttgcaaaagatcgcaaatggaaattgtcgcatttctcatcgagaatggtgccgacatcaatctgcagaatggtgacggagaaacggcattgatgatcgcctgttcaagggcaaatgtggacattgtgcgcttgttgctgtcacacggtgcaaatgtggagcaaacggattacgaaggattccgtttcgcacttaagaacgctgccaatgagggccatttggaggtgtgccgtctgctggtggaggagtgggccgcagatgtcaaccaacagaccatccaagatcgaaccactgcactgatttgcgctgccagccgaggagatttggccatcgcgaatttcctcatcgaacatggtgccgaccttcaacatgttgacgtggt

SEQ ID NO: 48140 - DNA, 656 bp, Heterodera glycines
acaaaatttgtcttgttattcgttcgtctttacacggtcaaacccgcaaaagaaatgggaaaggaaaagatccatatcaatattgttgtgatcggtcacgttgactccggaaaatcgactaccactggtcatctcatctacaaatgtggtggaattgacaaacgtactatcgagaaattcgagaaggaggctcaggaaatgggcaagggatcatttaagtacgcttgggtgcttgacaagctgaaggccgaacgcgagcgtggtatcactatcgacatcgctttgtggaaattcgagacaagcaagtactatgtcaccattattgacgctcctggccatcgcgactttatcaaaaacatgatcacagggacttctcaagctgactgcgctgtgctggtggttgcttgtggaacgggagagtttgaggctggaatttcgaaaaacggccaaacgcgtgagcacgctttgctcgcgcagactttgggggtcaagcagctcatcgtcgcttgcaacaagatggacaccactgaaccgccattcgccgaggcccgttacacggaagtgatgactgaagtgtctaacttcatcaagaagatcggttacaacccagccaccgctccattcgtcccaatctctggcttcaatggcgacaacat

SEQ ID NO: 48141 - DNA, 678 bp, Heterodera glycines
gtgattgtcttgctaaaattgatacccgccaagaacaacgtcgcagttcaacaaaaaaggcttcaccaaaatgcggttaatatgcatcaaacggttcttgagaaccgtcgacagcgagaacatgataagaaatttggcaaaacggtgcagaatgaagtcgttgacagaaactcaactctgaaacgggtttttagatgcattttcgtgaatattgcgtctgttctgttagtccttgctttgactttgttcattgatctgattgggccatcattcttctcaaaattcgttaagtatttgggctctttgcttctcgtccccatttttggcactgttcgtcttttatcgattctttggttcgctgatgttgccagtgcggcacttaaatatcgtggtcaatttggccagaaaatcacggatttgtcacacgccgcctccgactttgtccatgccatcttcctggaactcatctttcttctccaagcaatgtttatcattagcatcgaagtgccaattctgtccaattggtcttgctgttttgcgtcatttttgtttcatttgacctttagcctcggctttgtgtacatgtctctgctccactctttgtacagtttcgattacatttggatgagcaacggagtgactttgaattctcgactcgccctcattgagcgccggtgg

SEQ ID NO: 48142 - DNA, 682 bp, Heterodera glycines
ggtgatggaggaaattgtgcaagtgcggcgaacggcggctaagttcgacagcgccggaccaatccagcgaaagtcgtttcaaccaattggaacggaatttggagctgttccaggaaaatgcgcgtcatatgggagtgatcgccagtgacttcacttccaaaagtcaggagccgttgaatcagaaaattcacactctcatctcgggccttcaggttcttgaccaactcaaaagccaattcaccgatgttcgtgttcccattgaattgttggactatttggaccgtggtcaaaaccctcagctgtacaccaaagaattgttggaacgcacgcggcagaggaacaaagaactgaacgggaagacggagatgtacaggaagttccaggcgtgtcttctgcaggaactccaccgcgaaatgccttcggacgtggaggaatacgtgcgcattcgaaaaccgagcggaatgaatggggcggcagcgggaaacgcaatggcaaattcggcgatggcagcggaggaaacacagcacgcgatggagtgacggactgcgtgcaaatgacggggtgagttggtcagcgaattcgccaaaaagtgagggcgcggaacgttttgtgaaggaattctggccgattatcagagagaacaacccgaacatcgaataccgactcacccgttcgcacaccg

SEQ ID NO: 48143 - DNA, 576 bp, Heterodera glycines
taatttttcaaaaatgtctgacacaaagaagaactcgttcagcgggctaagttggctgagcaagctgagcgctacgatgacatggctcagtcgatgaaaaaggtgacggaattgggtgcggagttgagtaatgatgagcgcaacctgttgtcggttgcatacaaaaatgtggtcggtgcgcgttgttcctcgtggcgcgttatctcgtccattgaacagaagactgagggctcggagaagaagcagcagatggccaaggagtatcgggagaaggtggagcaggagttgcgagagatctgtcacgacgtgctggatttgctcgacaaatatctgatcccgaaggctggcaacccggaatcaaaggtgttctacctgaagatgaagggtgactactaccgctacctggctgaggttgccaccggtgacgaccgaaacgctgttgtcgagaagtcgcagcagtcgtaccaggaagcgtttgacattgccaaggacaaaatgcagcccacccatcccattcgtcttggtctggcgctgaacttctctgtgttctactatgaaattctgaactcaccggga

SEQ ID NO: 48144 - DNA, 661 bp, Heterodera glycines
acccaggaaaactctttatgagccgggtggcaaagatgtttatgaaggcgtaaaaatcgactacagcggaaccgaggttaaccctgaaaatttcgaagcggtccttttgggcgatgagcagcgatcggagggaaagccggtgctgaaaagcactgaaaaggacaaagtgttcgtgtacttctcggaccatggcgcggtcggagttatcggattcccagcagccgacttaacggttaaacaattgactcaaacactgaaggaaatgcatgccaaaaaaatgtacggcgaattgacattttatctcgaagcatgcgaatcgggctcaatgtttgaccacacattggcgcagagtttgaaaatttacgcagtcaccgcggccaatggcgacgaatcgagctggggctgtttttgcgacaccaaatttttgcccggaaattgtttgggcgatcttttttcagtgaattggatgcaagactcggaccaggaaaatttacgcaccgaaactctgcggaaacaatttggcattgtgcgcgaagaaacgaacaaaagccacgtgatgcactacggcgacttgcaaattcaggacgaacacgtttctgagtttatgggcaaagagcatgcgcaaaagcgcaacgaacgcccaccatcaccgcacaaattt

SEQ ID NO: 48145 - DNA, 586 bp, Heterodera glycines
  unsure (1)..(586): unsure at all n locations
tcacgcagcaatcgttccaattgaagttgaggaaactgcaacgatcggcgaagtcaaacgaaagatccaacaggtcaaaggcgcagaatacccagcggagaaccaaaagctgttttttaacgggagagtgctcgaggatgccatgttggtctctgagctgtactcntcggcgccgaaattcattgtcttcatggtcatgcgaaaacccgcgcaagcatcgtcaactgttcggccagcaacatcctccgcatcgccacaaaagaacacatcgacagcggacggacaggcgccgaaggcggagaagtcggcggagaacaaagcgacgggggcgacttccaacacatcggtggcccagccgggagcagcaacgggagtgccggcagagcatgcgcaaaccgtggccaacatcgaagccatgggttaccctcgccaggaagtcgttcgtgcgctgcaagccgcgttcttcgacgccgaccgtgccgtggagtatttgtgcaatggcatccctgagggactttctctacaaaagtcaaattctgatgctgacaatgatgcggtcaatgaagaatgggaacttatggaatca

SEQ ID NO: 48146 - DNA, 638 bp, Heterodera glycines
taacggtggaaaagaacgttttctgcaattgtgcatcgattgcaacggatgtttcgtcattcagaagttagttgagaacggttcaaaagaaaccaatcaaatgttgctcaatttggtccgtcctttcgcctttaaaatggtgctcaatcgttttgcttgtcgcattgtccatatgctcgtcgttaatttgtccgggtcccaagtccgccaattgttctgccaacagttcaaaggacacgagaacactttggtcaccgaccaaaacgggaaccattttgtgcaatgcgtagttgaccattttgcgcccgacgtgtacggaccttttatcctcgccttggccaactgtcccacccgactgagcgccgttttcgaaaataagtacggctgtcgtgtgatccaattcgtccttgaaaatgtcgtccaactcgtccatggcactgcgaatgccaacaacagcttggaaaaggaaatttccatccaaatattgcatgttctcattgaacccattctcaaaaatgcgtattcgttggcccaaaacgaattcgccaattacctcgtccaatttattatcaaatcgccctatctccgccgccaacgctgttacatcatcaaaactcacatcattcgcaacgtttacc

SEQ ID NO: 48147 - DNA, 422 bp, Heterodera glycines
tcgttgaaaaatgggcattttcgacaacgatgtccaaaagcagcttcgccatatgatggcatttattgagcaggaagctaacgaaaaagcagaagatatttacgcaaaagcggaggaggagtttaacattgagaaggggaaattggtttctcatcaaaggcagaaaatcttggaatattacgagaagaaagagaagcaagtggagctgcagcgcaagattcagaggtcgaatatgcaaaatcagagtcggttgaaatgtttgaaggcgcgggacgaccatttgaaaaatgtgttggaggaggcacgcgccaatctcagcaaaatttcggcggacagagagcgctatccggccattctcaaaggacttttgcttcagggccttttccaattgctcgaaagcaaagttgtgttgcgatgccgca

SEQ ID NO: 48148 - DNA, 482 bp, Heterodera glycines
caagaagaaggaggagttgatgaaaatgttggaagaacagaaaacggagctggccagtctgcaggtgtccaaggtgacgaacggggcggtgtccaaactgtccagcatccacgtggtgcgcattatcattgcccgcattctcaccgtgatcaaccaggcgcagaagatgatcttgctcaagttctacaagggcaagaagtatcgtccgattgaccttcgcttcaagaaaacgcgtgccatgcgcagagagttgaccaagcatgagctttcattgaagacacacaaacagaaggtcaaagaacgccgttgtccaacgcgtatttatgcgcttaaggcgtgaagcggccacagcctcggcgatgtgtttcgacagagagggaaatgtgacgaggattttgatggatcaaatttttttgttgttgttgaccaacttttaaatgataaaaaaaaaacaccccttcttcaacaccaccataaaaaaa

SEQ ID NO: 48149 - DNA, 384 bp, Heterodera glycines
cgagggactccggcatttcgttggctcaatccaccacctcgcattatagctgttttgccaaaatttattttccaactttgttcgacttcgggttcaagcagtattcgcttgacaccgttgaactttcccaagttccgcacaaagccttccgcagcattaacgccgatcgattttataccctttggggtcactaacagaagaacagttccaacggcggttcattctgatcgattgtcgctatccttacgaatacgatgcgggccacatttggtactcactgaatttgtgggagaccacttccattgagaagctcttctacccagaagaggaagaacggttcggcgaaattattgtgcgaactcccatcttctactgcgagtactc

SEQ ID NO: 48150 - DNA, 304 bp, Heterodera glycines
gcaacggagagtggcgcgtgttcagcggaaatgagatgggcattctgctgacgtggtgggcgtggaccaattggcgtgccgccaacccaacggcggactcttcgcgggtgttcgtcctccattcggccgtctcttcccaaatggtcgccacaatggccaaaaaggagggcttcaaagcggcgcattcgtcgacgggctccaaatacataagcaatttggcacacaaattgcggtcagaacgcaacaccgttattgccggctgggaggagtccattgggtttactcccggatcaacgctggacaa

SEQ ID NO: 48151 - DNA, 569 bp, Heterodera glycines
gcctccattatttcccgaaaaggtagagagcattcgttacttgtccacaaaatcttgggaggcgacatttacgaaggattatctctccaatgaaggccaactccgttttctttctttcatgtgctacctcgcaatggcacattaccttttgtaccgtggatttttttccaaaggagttttcaaactccgaaagctcgaagatttggctatttactgtttcgatggcaacacgcgttggggacgtaaattgtcggagatgatgaaaggtatcagagaggccatcgaccaaaagtacatcaaacaagcattcgtgatgatcaacgaggacaaagaggacccggacgtcgcaactgaagttttctcagtcggtttttgttacaacgaacagcacacgatgactgtcttggatgacaaaggcaatcgtatcgtttcatttggctacaaaggggagaaggtttttcgaatgcaagtgaagcacatcatcaagaagctcagtgtggtcactaagaatctggagccgttgaaaaagggggccgtgccttatttgaaactcacttattacgagaaca

SEQ ID NO: 48152 - DNA, 630 bp, Heterodera glycines
tgtactattcgtggcacaatttggaaatgatcaagcagtgatcctttttgtacatggaagtctatacagtcatttgatgcttgagtctcgacaaattgtgaacacattagaggaaataacatcaagaaaaatcaaaagccgcttcattaccctaaaagaggctttcagtcgtttaaaaattgaccccgttgacaaatcactgatttttgatgataaatatgtggtggctgttctggttgatcgcattggtcgagaaatttccgacgcagaattggcactttgtgttgaatttgagcgttcaacagccattaaaagtcggccgatgtcattctttgtgtctcatacgaagagaatgcaacaggtgctttcaacgcctggcattgttgagcgtttctttacgggacccggggaagaagggatggcccaagcaattcgaaaagtgcaaataaaaggctggccaatcggtgccgacgaaaacattgaggaaggcatacgacagaaagctatggaaaatccacaagattatgtgctgaaggccaatgattgtggcccaacaggaacgtattttaatgaggacatggtaaagaaattgaaaagtatggcgcccgctgagcgcgatttttactacct

SEQ ID NO: 48153 - DNA, 601 bp, Heterodera glycines
  unsure (1)..(601): unsure at all n locations
atctccgcatttgtntaagccgccggttctcctcaacaaataacacacaaccatattgtcggaaaagaaggtcaaaaaggtgaagaagaagtccaggaccggctccgaggcgagctccttcgaccaggagaccttttatgagttcaaagaagcatttggcattatggaccaggacaaagactgatcgatcagcaagcaggacctgattgacttgtacgccacactcggagttgtggcgagcgactcgcagatggacaacatgctcaaggaggcaccagggccaatcaatttcaccgttttcctgacactgttcggagaacgactgactggcactgaccccgaggcgacaattatcggcgcctttcaaatgttcgacaaaactgactgtggcgaaatcacagaagagacattgatgaaaattctgaagaacaaacggggggagccattgacggaggacgaagtgcaagggatgtacaaagggaaccctccaattagtggaggcaaagtggactacaaggcattcgcgcatttgatcacgacaggcgcagcggaggagttggccaaagtgggctaagcggggccatggacggacggtggagga

SEQ ID NO: 48154 - DNA, 423 bp, Heterodera glycines
ccgcaaacatttcccatttttgtcggagatctttcgcccgaaatcgacaataaaactctcaaagatgcttttgttccgtttggagatgtttcggactcaaaagtcattcgcgacccgaccactttgatgtccaagggctatggctttgtctcttttccaaagcgcgaggaagcggagcgtgcaattgagcaaatgaatggccaatggctggggcgaaggacaatccgaactaattgggccactcgtaagcctggcgcaatgggcggtggagttgaatattcgagcaaaccgacggtggacgaaattatggcgcagacgagtccagaaaacacgtccgtttatgttggtggtgttcctcccggtgcgacagaggaagacatacggtcgactttcagacgattcggaaacatcgtggacattcgc

SEQ ID NO: 48155 - DNA, 529 bp, Heterodera glycines
gacaacattattaattatgttgcccaactcgtcgtcaattctgctgttgcacaaccttcgaaaacagtcggtcaacgcgcttccgcttggtcgtcaagcagtgcacaacgatgtccaattccccaactttgacgcgtatcgcaacgaattgaccaaagacccagctcaaccgtcccatgtgactgaggacaggcgcaaaggcgtgtcaagcttcatcttttatggagtgggcggtgccattacgttgatgacagcaaagttcgccgtccgaaaagcggtcacttacaaatggatgccacgggaccaagccgcaatggcagcaaccgaaatcgacctcagcttggtgccattgggcaagacaaagacatttgagtggcgtggtaagcccgtgtttgtcaagcatcggacggccaaggaaattgagcgcgaacgtgcggcggaagtgggcaaactgcgtcacccggaacgggacgaggaccgtgtgctgaagccggaatggtccgtgctgatcggcgtgtgcacccacctc

SEQ ID NO: 48156 - DNA, 493 bp, Heterodera glycines
cgcattatgaggaaatcagcagcagagagaccaaaaagtggcggcgcaaaaggaggcggacaaagagaaaaagcccaaatacgcccatttgttggccaaagcgcacaaacagcgcgagctgagcaaactgttggtggaggataacacttacaaaaaggaacgcgaaaaggaggcgggccaatttgaggacgaataattgttcgtcacgggggcgtaccgacagcaaattgaggagagggaacggcacaaaacggagatggagcgggaggaggcactcgaaaagatgcgagacgtgcgggaccagaaaatgtggcggcaagcattcaatcgaacaatgcttgagaatatttcccgcggtccattgaccgaagaggggaaaatggaagaagacgacggagcggaagaaaaacggattaaaacggaggcgaaaacggaaaagatggcaaaaatgggagtgaaagaggaggcaatatataaaaaaaaaaacaaaaaa

SEQ ID NO: 48157 - DNA, 601 bp, Heterodera glycines
taagctgatgttattttcttactcgtttttttaatcgtttgtaaggcgttttttgttcgtttggtctgactttattcatcagtggttttttaaatcatggatcacaactactggcaagcacatccgaacaacccgcttgtgaatcgacctgaacggaatggaacgaccgaacagaatggggcgatgagttcatgttcccatccccaaagagcttctggagagcctaaccaactcaatgttgtgctcgtggatgggactgaagttgttgttaagatccacaatgttttgtgctgctatgaattgcccatgcacattgacttacgacaggtcgcttatggcagcataaatgtggactataacagagcaaaagggattttgcacaaacagttgcgcaagccgtcctgttcaattcgaattgcaaacagtggcaaagtggtgattcacggctgcaaaagcgaagaagattgcaagagagtggcacgcgcaattggccgaatgatccaacgtaacacgggacggttggaccagcggatttgcatccgtaactacagggtttctaacatattggctacttgtcgaatgccttttgatattcgtattc

SEQ ID NO: 48158 - DNA, 442 bp, Heterodera glycines
ctgtacctatttatgtcgaacctctactgactccccattttcgcgcatctccaaaaataaaatttgaaaaatacgcctccaaaagacgacagatgactgtgacatcgacaaaaaaacaattctttttctatctcatttaaggacattactctacacgacgtatgggccagcaatttgttttctcgaatttgccaaactgctcgacctcatcgacgactatccattcgtggccatggacaccgaataccccggcgttatcgctacgccggtgggccaattccgcagcaaggaggacttcaattatcaacaactcaggctcaatgtggactgcttgaagctcatccaggtcggcttcactttgatgaatgagaagggtcagttgccacccgcccgtgacattttccaattcaatttgcacttcgatccgagcaccgattcgttc

SEQ ID NO: 48159 - DNA, 574 bp, Heterodera glycines
acataattcttttggaatggctcctgcaccagaaaaggaaaaaactgaagataagaaactgaaagacgggcaaaaaccaaatgtgaccacggatcacgcacactgtttgagcaatgtccaaccaaatcttcccgtcaataaagtggtggtgcatccgctcgttctgcttagtgtggtcgaccacttcaaccgcgtgaacaaaacgcacaaagtcaatcgagtggtcggtgttttgcttggttgtatgaagcacgacaaaacccttgacatcgcaaattgttttgctgtgccttatgacgaggactccgagaattcgaacattttctttcttgatgctgattttctggaggacatgtttgggatgttttacaaagtcgcggcacgtgaaagaattgtcggatggtatcactctgggccgcgtctttgcaagaatgacattctgatcaacgaagtcatcaaacgctttaccccgaaccccgtgctggtcataatccaagcttctcaaggccgacaggatttggcactgccgacggatgcttatgtggaagtccaggaagtgcacaatgatggttct

SEQ ID NO: 48160 - DNA, 404 bp, Heterodera glycines
cattaatgctattttggatggtactgacggtgatgaagcgctgaatttgaatgatttggatgaaaaagaggttcttggtgatgacgaggaggaccaacaccaaaatcaacacacaacaaaagaagaagtggaagacctttacgacgaagccatggctccgtccggtgcactctctgaaaagcgcgagtcggctgaagttatttcgtcgttgccaagttcgattcagcacaaatcgtcgtttgccatgcctatgatgatcaaatctgagcccggcattgctggcgggtcgcaaagtggcaaacgctactgctgctacattggcaatatgacttggtggaccacagacgatcaactccagaaactgattcaaaccctcggcgtcgacgatatgattgacgtgaaat

SEQ ID NO: 48161 - DNA, 523 bp, Heterodera glycines
cctttcgtctttctgccttttgctggccacaacacacacatttccctaacgaccttcgaccgactacgacacgacgcgtacgatgaacgaggaatactgcttctctacttcgactgttgttgcacagagctgggcccaaacaaacttccgaccagtggacgagcaaccgaacagccttgtggacacgctcatcgccaaactttcgtgcacgactttcgagcagttcacttccgaagtcagtgctcaggacattcacaagctttgcgatgtcaccgtcggtgttctccagcaacagtcaatgctcatccatctgcagcctcctgtggtcctttgcggcgacatccatggccaatttcgggacttgctgagaatcttcaagacgatgggctttccgccggacaagaagtacctcttcctcggggattacgtcgaccgcggcacgcaaagcctggaaacaatggtcctgctcttctgctacaaagtgaaatatccggacagtgtcatccttctgcgcgggaaccac

SEQ ID NO: 48162 - DNA, 604 bp, Heterodera glycines
tgaaaattccgtctccgtccaaaatgcctgagttaccttttaagaccatcacgcagcaatcgttccaattgaagttgaggaaactgcaacgatcggcgaagtcaaacgaaagatccaacaggtcaaaggcgcagaatacccagcggagaaccaaaagctgatcttcaacgggagagtgctcgaggatgccatgttggtctctgagctgaactttgcggcgccgaaattcattgtcatcatggtcatgcgaaaacccgcgcaagcatcgtcaactgttcggccagcaacatcctccgcatcgccacaaaagaacacatcgacagcggacggacaggcgccgaaggcggagaagtcggcggagaacaaagcgacgggggcgacttccaacacatcggtggcccagccgggagcagcaacgggagtgccggcagagcatgcgcaaaccgtggccaacatcgaagccatgggttaccctcgccaggaagtcgttcgtgcgctgcaagccgcgttcttcgacgccgaccgtgccgtggagtatttgtgcaatggcatccctgaaggactttctctacaagagtcaaattctgatgctgacaatgatgcg

SEQ ID NO: 48163 - DNA, 657 bp, Heterodera glycines
caaatttggttttttacgagtaagcaatgggcaaggaaaagatcctatcaatattgtggtgatcggtcacgtcgattccggcaaatcgactaccactggccatctcatctacaaatgtggtggaattgacaaacgtaccatcgaaaaattcgagaaggaggctcaggaaatgggcaagggatcatttaagtacgcttgggtgcttgacaagctgaaagccgaacgcgagcgtggtatcactatcgacatcgctttatggaaattcgagacaagcaagtactatgtcaccattattgacgctcctggccatcgcgacttcattaaaaacatgatcacagggacttctcaagctgactgcgctgtgctggtggttgcttgtgggacgggagagtttgaggctggaatttcaaaaaacggccaaacgcgtgagcacgctttgcttgcgcagactttgggggtcaagcagctcatcgtcgcttgcaacaagatggacaccactgaaccgccattcgccgaggcccgttacacggaagtgatgactgaagtgtccaacttcatcaagaagatcggttacaacccagctaccgttccattcgtcccaatctctggcttcaatggcgacaacatgttggagccgtctgacaggatgccgtggtt

SEQ ID NO: 48164 - DNA, 617 bp, Heterodera glycines
ccattgtggtggtgaattctctctccatctgtcctccatgcgctcttactctttccgggtttgcccgcccattccagcaaagagtgcattcttttgattgccagcttaagttccgtcgatgcgtcccctctccgccacactttcgagcagctcaaaatgcgttccgtccgctgctccatcgtttcatttggtgccgaagtgttcgcatttaaacgcctttgtgcgacaacggagggcaaatacagcgttgccctggacgaacagcatttggagcttctgcttgacgaacatgtccaaccgccgcccgtccaacgccgtccgggtcagcaggactcaatcgtccgcatgggctttccccaactccgccgcgtgaccgaaccgtccttttgtgcgtgccatgaattgaacggcgaagcggcgccaccgagtgccattgacggggctgctgatgagaaggcttcgtcctcggcactgccgcgcgctttcttctgtcctcagtgcgggtcgcgctactgccaaacgccggtggagtgccgaatttgtggtcttttgctgctcaccgccccacaattggcccgggcccaccaacacttggaggcgttgcccacatttgcgga

SEQ ID NO: 48165 - DNA, 526 bp, Heterodera glycines
ttctcgaacatgccgaatatacagaagctcttgaactatactgagcattttaactatccctatgtcagcgaagtgacatattacgagcagttgttgaagattggacaaggaacatttggcgaggttttcaaggcgcgttgcaagcgaactggcaaattggtggcactgaaaaaaattttgatggaaaatgaaaaggaagggtttccaataactgcacttcgcgaaataaaaatgctacaaaggcttcgacatcagcacataactgaactggtggaagtgtgcacaagcaaacaaaagagtgggaaggagaaattctgcttttacttggtgttcaccttttgcgagcacgatcttgccggtctgttgagtaacacccaagtgaaaattcgactggtggacatcaaaacgatgatgcagcacattctgcgcggattgcacaaaattcactccagtcaaatattgcatcgcgacatgaaagcggccaatgtgttgattactggtgacgggggtgctcaaattggcagat

SEQ ID NO: 48166 - DNA, 511 bp, Heterodera glycines
cagagaaagcgattatggcgaacccttttgatgacgacagtgacgaattcattcgcaaaatccgggccggccgtggaattgaaccgacaaaaagtttacaacgcccgcagcttcgcaaaacattgaggaccaaattgccgctgatgagaaggccattgagcgttacttgcaggcgtcgttggacagcacacagcgctcccgacaacagctgagctcatccgaggggttggccgagtccaccgcacgggaattgttggagcaacgggaaaagttggaacgggccgaacagaatttggacaccattcaccacaccactcagcacacacagcgcagcctgaacagcttgaagtcgtggtttggtgggctggtcagaaacaaactttcacgagcgccaaaagggttgggcacggcaaatgccaatgccaacaatcagcagcaacaactggaacagaccgtgcagcaacaacatcagcagcgtccgctgcatgcccatttggtgcagtcgtctgct

SEQ ID NO: 48167 - DNA, 520 bp, Heterodera glycines
attgcgcgaaaatttctgctgagttagtcggagattaagatttctccaattgccgtgttcgaagtcgaacgtaattgggcttacgcaatgcaaatgaaatttgagatgatcgattcgccactttctcgcaaaaaatttcacatgagacaaaaattgcgtcgggcagtgaaaagtgctcattttttacattcgcttattgatgacaatccgctggtccacgaggtcactcgtgttgaaactgtttcttacgtgtctttcatcttcggcagtttggaactcgaactgaaaaattggaaacgagccatcgaaacttttgacagagcaagaatcggttactccgaactgcttgagcaagtccgaaacagcgatctcagcgaaacttatgctacaaagtgtcgcgaggtcgaaaatctgctcattttgtgccgggctcagacaggagatgcgaatgttctgctttcaactgtcagttcagtaaatctcaatgcttctgaagatgaccggaagccttcgcccgagc

SEQ ID NO: 48168 - DNA, 436 bp, Heterodera glycines
  unsure (1)..(436): unsure at all n locations
attaactgcaaggtcaaagctgtttggatcttactttttatttaatttatttaatggcttttggacaaaagggaaaactgttggctgtcattggagatgaagacactgtggtgggctttctccttgggggagtcggtaagaaatggaacagtcaaaaaggcgttaatgcttgaaaattcacagaaaatggtaacaattgtcggttttaggtcaattgaacaaagcgcggaagcccaattttgtcattgttgacaaaaacacaagcgtcgccgaaattgaggacgcattccgcactttctgtacccgcgatgacattgcgattattctgataaaccaacacgtggcggagatgatccgataccaggtggaccaacacgtggccagcatcccggccgtgctcgaaatcccctccaaagaaatgccttatgacgcgtnc

SEQ ID NO: 48169 - DNA, 529 bp, Heterodera glycines
caattctcggatctgcagaggatcttacaacgcatggccccccgccggagcagcagtacatgttcttgggcgactacgtcgacagaggagcacactcgatggagacaatcatccttctcttctgctacaagatcaagtacccatcgaacttcatgctgctgcgcgggaaccacgaatgctccaacatcaacaaagcttatggcttctacgaggagatcgaccgccgttacccgcgaccgggcgctcgtcgactcttcgacctcttcaatcaagtcttcgcctggatgccattcgtcggactgatcggcgagaagatcctctgcatgcacggcggcatctccgacaagatgcgcagcctcgatcaactcagcaccctgcgtcgaccacacacaaggccaccactccgttcgctcgaaattgatctactttgggccgatccagcgcaaggcatacgaggcgtcgtcccgagtaccagaggagcgggcatcctgttcggcgaggacctggtcgcccaaatactcactcggct

SEQ ID NO: 48170 - DNA, 500 bp, Heterodera glycines
taattttcccttttctgacacaaaaaatgacaataaaacctcctttcttttggacgaattcacaaaaattcaaatcaatgaaatttccaatgaatgcgaagcgacaaatttggcttgtcaaaaagaaaggacgcgaagttttaaggttatgaccaattacgaaatgatcaaagtggagagagtgggcgccgacgacgtcgtcgcactgatcactctgaaccgaccgaaggcactgaacgcattgtgcagccaattgatggacgagctcgcccattccctcacttatttggacaaagacgacggagtccacgccatcgttctcaccggcagtgaaagggctttcgcagccggcgccgacattaaggaaatggtgccgaagaaatttgccgaggttttcggtggcggctttttggagaattggtcccaagttgcgactgtacgaaagccgacaattgcggcggtcaacggacacgctctcgggggtggatgtgagttggcta

SEQ ID NO: 48171 - DNA, 678 bp, Heterodera glycines
ctatggctttgtctcttttccaagcgcgaggaagcggagcgtgcaattgagcaaatgaatggccaatggctggggcgaaggacaatccgaactaattgggccactcgtaagcctggcgcaatgggcggtggagttgaatattcgagcaaaccgacggtggacgaaattatggcgcagacgagtccagaaaacacgtccgtttatgttggtggtgttcctcccggtgcgacagaggaagacatacggtcgactttcagacgattcggaaacatcgtggacattcgctactttaagccgcaaggatacgccttcgtgaaatacgagaccaaattggccgccgggaaagccatccacgaaatgaacagcaacaaattcatgggccaaacgcttcgtctcaattggggcaaagtcgatggcggcgggaccaagacgaccgagccgacttcttttgggacaaatacggcgccgactggcatgttcaattcgagctctaccgcctcttcccaagcagcgagtgcgcagatgcagcagtattggcagtattaccagcaatactaccagcagaacccgctttggaatggttattggcagggcggcgctaccggaaatggacaacagaagtgaaagacggacggagataaataaagcggatggattgtgttattgggtcgagcgatg

SEQ ID NO: 48172 - DNA, 658 bp, Heterodera glycines
  unsure (1)..(658): unsure at all n locations
taaagttgaggtcgccgttgagcacccacggcgatagaccaacggtggacgacataatgcaaacgggcagatttggagacggccgattggtgaagatggaagtggactatagcgctcaagtggacagtcagttgatagtggcagacaatttggccaaggaggggaagactgccgaggcaattgagtccttggaaaagctggaaaaggacagtcgcataaattgcgacatgcgttccaaccagcgcctgttgtgccacatggtcaaattggcatttgacgcgaataattggcaattgctctgcgaaactgcgaagacattgtgcaagaagcgtctgctgatcaagtcgagcatcaagaaaatggtccaagaatgctgcgaaatggtgccaaaagcgccagacgcgtcgtccaaatcgacgctcatcgacacactccgcgcagtgactgcgggaaagatttacctagaggtcgaaagagcgcggctgaccaaacaagtggccgaaaagttggaagccgagggaaaattggacgaagcgcgcgaaatgatgatggaactgcaagtggagacgtacggcacgatggaagtggaggaaaaggtcaattatttgctgcatcaaatgcgcctntccattgccaataatcattttacgcgtgcttc

SEQ ID NO: 48173 - DNA, 488 bp, Heterodera glycines
attaaattttttgattaaaaaagacgtggcttttgtacttattaagccttctgctgagcagaacaaaacgttccctgtgcttgtggtgatccatggcggtgcttatgaaattggctcttcggcacgttacacaaagtacgaagtgatcggccaacgatttgtgacagacgcaaattcgcgaggcattgtttttgtgagcattcagtatcgattgggagtgatgggatttgccaccaccggagatgaggaacttcccggcaatttgggcatttgggaccaaatttcggcacttcaatttgtcaaggacaacatcgcggagtttggcggcgacccgagccgagtcactgtgtttgggtacagtgccggctcgggaagcacggctttgctgagcatttcgccgaaaagccgagatctcttccagcaagcgattcgcatgagcggcacaccgttttcggtgtccggcagcggcacttttgtggcggaagaga

SEQ ID NO: 48174 - DNA, 637 bp, Heterodera glycines
tcctggtgatgacgggtaacggaggataagggttcgactccggagaaggggcctgagaaatggccactacgtctaaggatggcagcaggcgcgcaaattacccactctcaacgcgaggaggtagtgtaataaattcttattgtagtaaaaatgtccgaaaataagtccgaaggtggcgctgaaaagaagaagagcggtggattcaacacgaagaagtttttgttggacctcgcatccggcggaactgctgctgcagtctcaaaaaccgctgttgcacccatcgagcgcgtcaagctgttgttgcaggtgcaagatgcttccattcacatcaccgcggacaaacgctacaaaggcatcatcgacgtcctcgtccgtgttcccaaggagcagggctttctgtcgttgtggcgtggtaacctggccaacgtcatccgttactttccgactcaggcgctgaacttcgccttcaaggacacttataagcgagtcttcacgcaaggagtggacaaggagaagcagttcttgaagttcttcgccatgaatttggcttcgggcggtgccgctggcgccacttcgctgtgttttgtgtaccctttggactttgcgcgaacgcgtttggcagcggatgttggaaagg

SEQ ID NO: 48175 - DNA, 653 bp, Heterodera glycines
ggtacgggttgtgcggcattggcggaattctctcttgcggtatcactcacaccgccattgtcccgttggatttggtcaaatgtcggattcaggtcgaccctgccaaatacaaagggatcatcggcggcttcaaagtcactctccaagaggagggcgtccgcggcttggccaaaggctgggcacccaccgccattggctattcaatgcagggccttggcaaattcggactgtacgaaatgttcaagaatgtgtacgccgggatgatcggcgaggaattggcttacagctgccgtacctatttgtacttggccgcctcggccagcgcggagttcttcgccgacatgatgctggcgccgatggaggccaccaaagtgcgcatccaaacatcgcccggagcgccgccaacgctgcgcggctgtgcgccgttcatttaccggaccgagggactgatgggcttctacaagggactgccgccgttgtggatgcgccaaatcccgtacacaatgatgaaatttgcctgcttcgagcgcaccgttgaactgctctacaaacatgtggtgcccaagccaagagccgaatgcaccaagcctgaacagttggtggtcacattcatcgccggatacattgcgggcgttttctgtgcgatcgtttct

SEQ ID NO: 48176 - DNA, 495 bp, Heterodera glycines
  unsure (1)..(495): unsure at all n locations
ttaatggctgcgcgaaagactgttgcacgccgtgcccgaccgcaacgggcgaccagcaatgttttcgccatgttcgaccagccacaaattcaggagttcaaagaggcgttcaacatgatcgaccaaaaccacgacggatttatcgatgagcacgacctgaaggacatgttcgcttctcttgggaaggaagtctcggaaaagttcattgaaaatatggtcaacgatgcatcgggttctatcaatttcacaatgtttttaacgctttttggggagaaattgactggcactgaccctgaagaggtgatcaaaaacgcattccaatgttttgatgaggacaacagcggaacaattgcagaggatcgcttgagagagcttctcaccacaatgggagaccgatacaccgaggaacaggttgatgaactgtttcgtgatgcgccaatcaaaaatggccgctntgactacgtggaattcacgcgaatgctcaaacacgggacg

SEQ ID NO: 48177 - DNA, 535 bp, Heterodera glycines
tccccttcctgctccttttccccttcctccgcctcctcttgctctgacagtccctcatccaaggccggccctgctaagtggccatgttttggccccccgtccattgcccacttgggaggaaatccgtgccgctgtgcccaaagagtgttttgaaaagtctctccttcgttctctgctctattcggccatggattttctcctccttggcgttgctttacgcctgtgtgccttttgtggacacagatttcggactgatcggactgtttgtctggtactgcttgctcggcatgtatgtgtcctctctgttttgccttggccatgactgcggccacggcactttttccgattggacatgggtcaacgacattttcggccatatttcccacgctttgctaatggtgcccttttggccatggcaaaaaagccaccgtcaacatcaccaattcacttctcatgtggacaaggacaaaggtcatccctgcgtgttggaagatgactacgaaggtggcggatggctgcgaaaacattttgctaa

SEQ ID NO: 48178 - DNA, 629 bp, Heterodera glycines
aaaaaaaaatccttcctataaaaaattctatggcgaaattaattttgcatttggtagcgcattattggtggtgttgtttgtgatttgctgtgtcaattttgccgatgccactcagccaaatgaagatgataatgaagccaaagaccaacttttggccattggcgcatttgaacttaaaaggatggcacagtatgccatagaatggtgccacaacaatgcactgattttaaggcgaaaggaggatgagggcaacagaggcgatgctgccctatttcctccattgactttgtttccgtcgccattcccacgcgacgcttttgaacaagcgctgaaagcacaaaaggcgatgaatttgctttattttcgcgttgcgcgtgactatgaatttttgatgaatgcctacaaagatgtgatcaaaggggacgagcatattgccaaattggtggacattttgaagaaagtccacgaggagggaattcggcaaccgatcactgtgatgctgcagagagcggactatttattagatgttgtggagaacaatgatacaaacgaagtcaaatatgagccaaaacaggtcgaagtcaacactggtgccatcggagcaactgggctcaagcgacggaccaccg

SEQ ID NO: 48179 - DNA, 241 bp, Heterodera glycines
ttttttttccttttttttttttttttttcgcttcttctcttcctcctcgaacttcttgcgctcctcctcgtcatgcgcttccttctgcttcttctccgcctccttcagctggtcgaaagtgtccgccgcgtgtttcttcgcgtcctccacagagtccgctaccaaaatgttgtcgaaaatggggcccgacttgacctgccaaatgtttattccgatggggccccaattttttcgcaagtag

SEQ ID NO: 48180 - DNA, 483 bp, Heterodera glycines
tagtggagaggagaggggaagcaactccaaaggaagcggaaacgatgctacagcaacaacaaatgccaacattgaacagtgccatcagcaaaatagaccaaagcagcaacatggtggagcagtaattgcagcaataaggacgacgacaatgacaacaacaataacattaccactgcacattgctgttgaaaataactaaacaacaatgatcgagtttctattgctgaacggcgccaaaattaacggattggacggtgggaagaacacgccgctgcatttggccgccgaacgtggccatacaataattgtctatcaattgttgaaacgaaatgcagagaaaacgcaccaaaatgtgaacggacggacggcgttggaattggcggtggaacggtgccatgccgacattgtgacactgctccgactgcacgacatgaaggaggagttcaacgacgaccaaaactcgacaatggacgaaacagtgga

SEQ ID NO: 48181 - DNA, 596 bp, Heterodera glycines
ggaccggctgatgaactgaaccgtgccgatgggtggctgaagttcgccatgagttgaccaatgttaccaaatgtatcatcgaattcgccaaaatggtcaaagagtttctggagttggagcaggaccacaaaatacacgcattgaaaaagacaacgttcgacttggcaatcattgcaatggcacaacactatcatcagcaaagtcaaacattgcatgtgaacaatttggtgctgcccgtgtaccaatttcgctgttcggacagaaaggacgaggaatttggcaaagagtttatcagtcggcttcagtacctcagctcattccaattgacttccactgaaaccgcccttttgtccgcctttgtgcttatggaccaatcccaggcgcccggcatggaagcgtttgtgggacagttgaagagctgtttggggggtcagttgcaccagcggatgccggacggggacgaggcattgcgccaactgctcgagttccttccgcgcctgcgggaattggcaaaaacgcatcgcaaatgtttgggacgcttccgattacaaatggtggaccagcaaagcgaacaccaaacggacagaggcgccgcg

SEQ ID NO: 48182 - DNA, 503 bp, Heterodera glycines
ggcaagaaagcacaagtccaaattggaaatgttatgcctattggagaacttccggaaggtacgaccgtctgcaatttggaggagaaggccggtggccgtggacgtttggcaaggacttcaggtaattatgccattatcgtcgcacataaccccgacacgaagcgcacgcgaattcgtcttccatctggtgccaagaaggtcgttccatccgccaaccgtgcaatgattggcattgttgctggcggtggtcgcacggacaaaccgcttttgaaggcaggccgagcctaccacaaatataaggtcaaacgcaactgttggcccaaagttcgtggtgtggcaatgaacccggtcgaacatcctcacggaggaggaaaccaccagcacatcggccatccgtcaacggtcaaacgaggaacgagtgcaggccgaaaggtcggactgatcgccgcacgtcgcaccggacgtattcgcggaggaaagcctgagaagcgcggaaaggagga

SEQ ID NO: 48183 - DNA, 636 bp, Heterodera glycines
tattttcttccctttcctttgtcttccttcattccgcttttccctccccatttctcatttgttcttctccgcttcttctctccccgatgaatcactttgggctgacttttctgttcgtcgccgtttctctgctggtaattgcgcccggctgcgatggcatgcaaattttcgtgaagacattgacgggcaaaacgatcactttggaggtggagagctcggacactgtggacaatgtgaagacgaagatccaagagaaggagggcgttccgccggatcagcaacggctgatcttcgccggcaaacagctcgaggacggacgaacgttggccgactacaacatacagaaggagtccacgctccacttggtcctccgtctccggggcggaaatgggaagagaaacacgagtaagaacaagaaaagcaacaaaaagcttgatcagaattgatcagcagcgaacgcaccatcgcatgattgattggcacagtgattttccaccaccaaattcacaacacttttcccttttccgggttatctttgatttccattttcggttattgttttctgtttttctcctctatcttttgtaaaattctgttactttgatccttagttttatcatttatcatcgcatatat

SEQ ID NO: 48184 - DNA, 549 bp, Heterodera glycines
tacaaggcgaaacggacctccaacttgaacggattaatgtctactataacgaggcccatggtggcaagtacgtgccccgcgctgtgcttgtggacctcgagccgggcacaatggactcaatccgtgccggaccttacggtcagcttttccgtcccgacaacttcgtgttcggacaaagcggagcgggcaacaactgggccaagggccattacaccgagggagccgaattggtggataatgtgttggacgttgtgcggaaggaggcggaggggtgcgactgtctgcaaggctttcagctcactcattcgctcgggggaggcaccggttcaggaatgggaactctgttgatctcaaagattcgggaagaatacccggaccgtattatgtcttcgttttctgttgtcccttcgccaaaagcttctgacactgtggtcgagccttacaacgccactctttccgtccaccaactcgtagagaacactgatgagactttttgcattgacaatgaagcgctttacgacatctgtttccgcactttgaagcttcaaa

SEQ ID NO: 48185 - DNA, 632 bp, Heterodera glycines
  unsure (1)..(632): unsure at all n locations
attttcttttttttacccctttgacgacaaacagaagcagcaatgagtggttgggatgcgtacattcagtcattgacttccagttgtgcggagattactcgcgtggccataattggcaattcggacgcgagtgtttgggccaggactgaaggggagaacgaattcaaggcgagtgaacctgagctcaagaaacttgtcggccaattcgatgatctttcgcaagttccgtccgtcggtgccgacctcgagggaattcattacattgtgccgcgaacggatgaaaatcttatctttgggaagagggacaaaacgggctttttcgctgtgaagaccaagtccgccattctgatcgccatttacaaggacgaggaaagtgtcgtcggcgccgacgtgcgaggggcggtggagaaaatggccaaataccttgaggacgccggttaccgagccgttgctcggtttcctaaacgacttttgtgttgccaaacgaaaagtgctgagaatggctntgacttattcttccaaatgcattccttttccatcccaaatgatcacttattattttattattacacattctgtgaagtgcgcgtgccgatttcttttttattatttgacctttggatgtgaataat

SEQ ID NO: 48186 - DNA, 398 bp, Heterodera glycines
ctgcagttgctctttcgccagcgcacatgcgctgacacctgaacgggtcggctgtgctcaggcaatgggtcactgtgccgcttcgttggaccacgccgatttggtgctcaccgagttggagaacatcgccaaatgggagcacaccaaaaaaggcatttctggcggcgtcggcggggccgccggcagcggaagctcttcctcgggcggtggcattttttcatacattcgagactattcctttggtcggactgtcgacgtcgaggtgctcaatttgcgcgcgactttggtgctcagctacggctacgtggtgttctactgccccaccgagggattggtcctccgccttcagcagacggtgctgcccttcctgcgccaatacacggcaaatgcaaaaaaaa

SEQ ID NO: 48187 - DNA, 502 bp, Heterodera glycines
taatatttgaaaataccttctctcttaattctcttctaaaaatggtcctgctttttctccattggcactgattttgctctgttcgctgtttgcttttattgtaatgatgcgcaaacatcgcgagtactggtccaaccgtggcatttcgtccccaaccccgcagctgatcagtggcaatttcggctcgctgtacggcaattatccgagcatgttccagctgagggattggaccagacagtacggcaagcagtacggtgtccagtacggttggcgcaacgcgttggtgatttctgacccggcaatggtccacgagttgcttgccaccaaatttgaatatttccacgcaagaaatctttcgcccatctttggcaatttggacacaaacaaatggatcagcatgttcttggccaggggaggccggtggaaaaggctccgaacgattgcgaacccggcattttcggtagcgaatctgaaaaagtgcatgtgtcccattgatgattcc

SEQ ID NO: 48188 - DNA, 693 bp, Heterodera glycines
actctttttggttcctgtgctcattgtttggcctctttttgctctttttcctatgcttccgtgccggcattcgatgtttgaaacgtgttgagaatgtcacccgttcaccagtgtttgagcatttgaccacttcgctggacgcccttccgacaattcacgcgtttggccaaacccaacgctttgtggagcagctgaagcaacacttggatgagaacagtggtgctttgttcctctaccattcggcaatgcggtggcaggcggtgtggcttgacctgttggtggtcgggctgaccttcttcgtctccctgttcattgtgctgctcaccgggcgcattgacccggcggaggccggtatggccattgcatttgctatgcagatgagtggcatttttcaatttgcggtccgttctcaaactgaactggaggccaaactgacgtcagtggaacgcgtcagcttctattacaagaacatcgaggtggaatcggacaaagatggagatgacccggctgaacttggcccggcctggccccaatcgggcacattggaatttgatcatgtcattctccgttatgtgcctcaaatgaatccggcactcaatgacgtgtccttcattatttattccggacaaaaagttggcattgtcgggcgtaccgggagtggcaaaacgtcgctgtgcaatgcactgtttcgcc

SEQ ID NO: 48189 - DNA, 661 bp, Heterodera glycines
cagcagcagcagaagcacaacacgaagatagtggagaggagaggggaagcaactccaaaggaagcggaaacgatgctacagcaacaacaaatgccaacattgaacagtgccatcagcaaaatagaccaaagcagcaacatggtggagcagtaattgcagcaataaggacgacgacaatgacaacaacaataacattaccactgcacattgctgttgaaaataaccaaacaacaatgatcgagtttctattgctgaacggcgccaaaattaacggattggacggtgggaagaacacgccgctgcatttggccgccgaacgtggccatacaataattgtctatcaattgttgaaacgaaatgcagagaaaacgcaccaaaatgtgaacggacggacggcgttggaattggcggtggaacggtgccatgccgacattgtgacactgctccgactgcacgacatgaaggaggagttcaacgacgaccaaaactcgacaatggacgaaacagtggaaagtttcatcggcgatttggcagcaaagcaacaacatttgcgcattaaaagtggacaatcggagccaaaaccaaataatgaggaagagggggaggagaaaattgtggaaaagttgtgatttgatgaataacgaccaacaaaacagtgaaa

SEQ ID NO: 48190 - DNA, 201 bp, Heterodera glycines
cttaagctaagaaaatttgtcttgttattcgttcgtctttacacggtcaaacccgcaaaagaaatgggaaaggaaaagatccatatcaatattgttgtgatcggtcacgttgactccggaaaatcgactaccactggtcatctcatctacaaatgtggtggaattgacaaacgtactatcgagaaattcgagaaggagggc

SEQ ID NO: 48191 - DNA, 579 bp, Heterodera glycines
atatgcaaatgttgttgagtggcgggtgggcgatgccaccggacttcagtttgacgagggcagtgttgatttggttttcactaattggttgttgatgtacttggctgatcaggaagcggtacaatttgttgccaatgctcttcaatggcttcggcctgacggttatctccatttgcgcgagtcgtgctcagaaccttcgacaaaaaaatctgctgatcactcaaccaccacaaccactaccagcacttcatcatcctcatcctcgtcgttgcacaacaattcgaagccaaatccgacccgttaccgcttctcatccgcctacatccaactgttgcgctccctccggcacacagacgtgcaaagcggaacccagtggcgcttcgatgtgcagtgggcgtgctcagtcggcgtgtacattgagcgacaatcaaactggcgtcaagtgcattggctggccaaaaaaagtgcgtgtaacatcagcagaaaacagcatcccaaaatctattggatcgttggccacccaatttgctgaccaatggcccacggaacagcgacaatttgacggacgaatggacgaac

SEQ ID NO: 48192 - DNA, 499 bp, Heterodera glycines
taaaatgcctcgcattttggcaaaagttgaaggcaagggcaacggaataaagactgttattgcgaacatgcccgaaattgaaaggcactgtcccgtccaccgacctatccgacaaaatattttggctgtgagctgggagcgcagactaactttgacctgaagaatgagcgttatattgtcaatggggaacacgatgccaacaaactccaggatattttagacggatttatcagaaaatttgtgctttgtccgagctgtgacaacccggagactgtgctgaccgtaaagcgtcaagtgatcaatggaaagtgtaaggcttgtggacacgcttttattgtggatccaaaacagaagctgtcgacattcattctgaaaaatccaccgcctcctgacaacatagagagcgaaaaggaagtgaaaagcgacggcggattgccagctgaggagagtaacgatgtaccagtagtcgacaactcgggtggctgtgatgccgggtcga

SEQ ID NO: 48193 - DNA, 611 bp, Heterodera glycines
  unsure (1)..(611): unsure at all n locations
ttcgtctttctgccttttgctggncacacaacacacacatttccctcaacgaccctcgaccgactacgacacgacgcgtacgatgaacgaggaatactgcttctctacttcgactgttgttgcacagagctgggcccaaacaaacttccgaccagtggacgagcaaccgaacagccttgtggacacgctcatcgccaaactttcgtgcacgactttcgagcagttcacttccgaagtcagtgctcaggacattcacaagctttgcgatgtcaccgtcggtgttctccagcaacagtcaatgctcatccatctgcagcctcctgtggtcctttgcggcgacatccatggccaatttcgggacttgctgagaatcttcaagacgatgggctttccgccggacaagaagtacctcttcctcggggattacgtcgaccgcggcacgcaaagcctggaaacaatggtcctgctcttctgctacaaagtgaaatatccggacagtgtcatccttctgcgcgggaaccacgagtgcagcaacatgaaccgagcctatggcttcttcgaagaggttgaacgtcgctatgggtagatggatgcttacgctctttggaacc

SEQ ID NO: 48194 - DNA, 539 bp, Heterodera glycines
  unsure (1)..(539): unsure at all n locations
aaagcaacgaatcgattaccagctctcttaacaaaaccttcgcctctcccatttcgacgacaaaatgcctccaaaaccatccggcaaaggagcgaagaaggcggttaagtcgaccaaggcggtgcgcacgggagacaaaaagcggagaaaggcccgcaaggagtcttactcggtgtacatctaccgtgtgctcaagcaggtccacccggacaccggcatttcttccaaagcgatgtccatcatgaactcgtttgtcaatgacgtgttcgagcgcattgcggcggaagcctcgcgattggcccactacaacaagcggtccaccatctcatcgcgcgaaattcagacggctgtccgactgattctgcccggcgagttggccaagcatgccgtgtccgaggggaccaaggcggtgacgaagtacacctcgtcaaaatgagcaggagatgatgaaagcggtggtgatcggacggaaaaaactatcccaaacggccctctntagggccacaatcactcaaatggacgcgaatgacacttttttt

SEQ ID NO: 48195 - DNA, 536 bp, Heterodera glycines
caggcagcggttctttgtctacgccattgcacccgcagtggcaccggacggccatttgtattcatttgacatcgatgagaaacgtgccaaaactgttcataatgatctcaaactccacggtttgtcccaaaatgccactgtgctttgccgtgacgtgtcccagcatggctttgccgcaaccgattgtgcggagaaagagtggcgttgtgacggcgttttcctggacttgcccgccccgtggttggccattggccatgcccacaaagtgttgcttcaaaacgggcccgagcgccgtccgtctcggctggtcagcttttcgccatgcattgagcaggtgcagcgggtgtgtgccgagttggagcagcacggctttgtggacattgagacggttgaggtggtgccacgaaaactgaaggtggtcgacttgccctgcgaaagtttgtccgaatacgcagccaaaggagcgaacgcacagacattcttccagaaagaatctcagcagaacaacactgattgtgaacagcaacggcagaagg

SEQ ID NO: 48196 - DNA, 649 bp, Heterodera glycines
gggtggattcgctccttccgaatctgctgcccctataacggtgcgaacggttctgtgccttcaggaagtaaagctggaccaactccgcaaaatggtgctaacggcgtcgccgctactggagcaaacaccgttcctctcggctcaaatggaaatgtggttccgagtgcgcccgtgccacgagttggctcctcattgcctcctccttcgtgcattgggtgggccgcgacaatcggaaaacgacacagggacgaatacattggtgactttgtctaccaggctccgcgacgtgaggagaaaattgatgtcattgcaagcgttgtcaggagatgcattgagtccttcaaaaagaacaggaacaaactaccactacgcgtggtcattttgcgcaacggatgtaccgagggacaattcgaatatgtcatgaaatatgaaattccgctggtcaagaaggaactggaggaattgggttgcaccgcaaaacttactgtgattgttccaaaccgacttcaggatgtacgctttctgcgtcaagatgccaagccggaggacaagagcaatgagcaaaacatccccccagggactgttgtcgacactgtcgttgttcaccccaaacgctccgggttcttccttaacagtcacgtggcgatca

SEQ ID NO: 48197 - DNA, 632 bp, Heterodera glycines
agaggaaggggacaaaagaaaaagaagaccagaagatcaggagaaatacacggaggatgaagagctgaacaagaccaaaccgatttggactcgcaatcccgatgacatttcaaatgaggagtatgcggagttctacaagagcttgtcaaatgactgggaggaccatcttgctgtcaagcatttcagcgttgaaggccaactcgaattccgtgctctcctcttcgtcccccaacgcgctccgttcgatctctttgagaacaaaaagagcaagaatgccatcaagctttatgtccgtcgggttttcatcatggagaactgcgaggagctgatgccggagtacctgaacttcatcaaaggagttgtcgactctgaggaccttccgctgaacatttctcgtgaaactttgcaacaatcgaagatcttgaaagtcatccgcaaaaaccttgtgaagaagtgcatggaccttttcgaggagatttctgaagacaaggacaacttcaaaaagttctacgagcaattcgcgaagaacattaagcttggtattcatgaggactcggtgaatcgtaaaaagctctcagactttctgcggtactacacttcggcctccggcgaggaaccatgcagcttcaagg

SEQ ID NO: 48198 - DNA, 698 bp, Heterodera glycines
  unsure (1)..(698): unsure at all n locations
catttttttttctatttcgcgttctgtcatcgtatatatttaagcgaattattttaccaaattcatttttatacgaatgttttgtcaactccaatgtttttttatacttttgtatatcaacataatgtttttcctgttgtagcataaatgagcattttaactgcttcgaaagtgtgcactttgccacggctttcttccgctcgctctatgacttggtggtggggcccggagaaaaacaatgggcgcgaagttgttggccccactttccacggggatgaattttaccaagatcgtcttgaccgttggtacccgtccattcgatttcgcaaaaatgacgaagtgatcacgcccattcgccacaaggaattgggagattggaagaagttgagcattgaggagaagaagcttatctaccgctactccttccgtcaaactttggtcacatttcgtcgtacattttctttggcattagcattatttcgattcgatagcttattattattttttctgtttaggccgagtttgaggcattgacgccttatggctatctcacagtcactttgttcttttctatgcttgggcttactattctgtacgcttcgtttgttaggacttacggcattcagttataggtactttgactcttatttatatnttttgaacagtgacaaaattcaatgaccgattgcctgacactt

SEQ ID NO: 48199 - DNA, 520 bp, Heterodera glycines
  unsure (1)..(520): unsure at all n locations
cacatgcttttcctttgccgtctgactgaaaataccccaccactaaaaggggagccggacaaagtccttctgcgcgtgtattttaacccagaaacggaaagtcatttggtggcagagtctgttattttcacccttctctctgaacgacacctggggccgaaactctatggaatattcagcgggggccgtcttgaagaatacattccgtcacggccacttacttgccatgaaattgcgttgcccaccatggccaacaaaatagccaagaggttggctcgagtccatcaacttgaagtgccaatttggaaagaaccggaatatatttgtgacgcgcttgaaaggtggcttattcaattgaaacaaatgcccagtggttctcgtgatttcgatttgccggctgaaagtcacgaatgggctcctccgagcataaattgcgaagatttacagaaagaaattgagcacctgaggagattgattgtaaagagtcggagtctggttactntctgtcataatgatcttc

SEQ ID NO: 48200 - DNA, 443 bp, Heterodera glycines
  unsure (1)..(443): unsure at all n locations
gaaagtgggcaattctacgtgccggatgagcccaaactcgcatttgttgtccggatcaagggaatcaacaagatccatccacgccctcgtaaagtgttgcagctgcttcgtctgcgtcagatcacaacggcgtattcgtcaagttgaacaaagcgacaatccagatgttgcgcattgctgacccgtacattgcgtggggctacccgagtcagaagatcattcgccagttggtgtacaagcgtggttatgccaaggagagtgggcagcgcattccgatcacggacaatgccattgttgagcgaaacatgggcaaatcggacgtgatctgtgtggaggacatgattcaccagatttggacagtcgggccccacttcaagcaagtgaccaactttntgtggcccttcaaactcagcaaccccgtgggcgggttcaagaagaagtcc

SEQ ID NO: 48201 - DNA, 622 bp, Heterodera glycines
aaaaagagattttttaaagaattacaaattaataattctgatgaagcttattgagcttcttcctttctgtttcgccgtttcggcacttttgctgccgtcccaaaccgatggcatgcaaattttcgtcgaaacattaattggccgagtaatcacactggaggtcgagagttcggacagtatcgagaatttgaagaggaagatcactgacaaggaaggcattcccgctgatgaccagcgtttgatctttgccggcaaacagctcgaggacggacgaacgttggccgactacggcgtgcagaaggaggcaaaaattcatttggtcctccgtcttcggggcggaatgcaaattttcatcaaaactttgaccggcaaagtcatcacgctggatgtggacagcatggacagtgtcgagaatgtgaagcggaagatcactgacaaggagggcattcccgctgatcatcagcgattggtttttgccggcaaacagctcgaggacggccgaacgttggctgactacggtgtgcagaaggaggccactgtacaccttgtgctgcgcctacggggcggcggatcgatgatgaactttgatgatgatgtgctctgatgatcagcagaattgatc

SEQ ID NO: 48202 - DNA, 483 bp, Heterodera glycines
gtgaagaatgctgatggtaacacttctgccgtctgttggaccttggacgtagtgaacaacggaatgctacgtctggagatacggtgttcaactacgttgtcatgactgtggttggcactccgttggacaaacttattcgaaacgcgggcgatcgcttcagtccgggaaccgcaatcggcatgtcaatccaattgctgagtgccatcaaggctcttcacaatgtcggttttcttcatcgcgacatcaaaccagcaaacacagcgattggacgggcggagaccaacgaacaccgacttctctaccttatcgacttcgggatggcccgtcaatttcttcggcccgatggtacgcagcgacgtccgcgagcctccgcgaatttccgagggacgccaatttacgcaccgatctctgcacatatcaagcgtgactacagccgcaaagatgacgtcgaatcgtggttctatgtcatggtcaaattctaca

SEQ ID NO: 48203 - DNA, 521 bp, Heterodera glycines
  unsure (1)..(521): unsure at all n locations
ttgtgcaagcgcctcgtctacgacacgtcagccagcgaggagcaggagcgatgcatgatcgcaaagctgaagccatgtgcgggttcgagtacacctccaagttggagcgattgctgactgatgtcgcgctgagcagggaccactccgagcaattcaagcagcagccgaggacatccaacgttgacttctccgtcattgtcgtcatgtcgaacgtgtggccactgcagcagccggtcaaattcgaaatcccgcgtcctctcctcgactgcattgactcctacactcagtactacaccaaccgtttcaatggccgtaagctgacctgggcgttgcaaatgtgccgcggtgaattggtctcgacgagcaacactttcccgtcgaaatactcatttttgtgcaacacgcaacaaattgccgtcctcatgcagtacaacgaacgcaacacgtacacacttggcgaactgcacgtcgctcttggcaccgactntcccggcgatcagctgtgcgctgctgttcaatcc

SEQ ID NO: 48204 - DNA, 496 bp, Heterodera glycines
tttgcagaactgtggaccgaattcgtttccaaatgctattctttaaaacggtccggtcgagcagtgtccgcaccaacagcagcagaatgccgcgccgctgtcccaccgccccacggcattttccctccccgcaacttcgcctttctcaacaatttcatcggtgggctcactgccgtcggagccaacaacgcccacagaaagaatgagcacaggaaatgtgatgatgatgatgagcccgaaaagaatggacaaaggaaacggaggagagaaaggacaaagacagaaagccccgggcaaagagcggccaaaggacggcaaagagcgcgtgcacaagtgcgaccagtgccaaaaggcgttccgcttcaagtccaacctgttcgagcacaaatcgctgcatttgggcagcagcagtcggaaccctttcgtgtgccctttctgctccaaaacgtgccgtctgaagggcaatctgaagaagcatttgcaagtgcacgtcacc

SEQ ID NO: 48205 - DNA, 296 bp, Heterodera glycines
ggtggtctggcgggtcaaaggatgggtgaccgaagtgaaaaaccgggaatgtgcggctcgtgctgggcattcagtgccaccggcgcattggagggacaacacgtgcgcgacaagggacatcttgtttcactgtcggaacaaaatctgatcgactgctcgaagaagtacggaaacatgggctgcaacggaggcatcatggacaacgccttccaatacattaaggacaacaaaggtatcgacaaagagacggactacccctacaaggccaagaccggctaaaagtgtttgtttaagcg

SEQ ID NO: 48206 - DNA, 373 bp, Heterodera glycines
  unsure (1)..(373): unsure at all n locations
acccatcgtgtttccgatgaccaaanaggatggtcaaaagcgcagagaacgccttcatgactgtgtgggggaacataatgtgcgaatggtggccaaatattactcgcggatcactttccaacgaatggccaaacttctcgaattcggaattgagcaaatggaagcctttgtgtgcaaaatgattgtcgacggagtaatccccgaagtgaaaattcaccgcccttcgcaaattatttatttgagcccgaaaaagaacggcgcagaagtgctggacgaatgggtttttaacgttcgcaaattgaccgacacaatgaacaaagtcagccacctgatcgcaaaggaggaaatggttcacggattgcaaattcctcag

SEQ ID NO: 48207 - DNA, 548 bp, Heterodera glycines
aacgattgaacgcactctcgaggcgcatccgaacggccgaccagtccttgatgtcattcgccaactttttcagagtcgcatcagtcaaacaatttcctgtgcaaactgcttgcggaccagtgaaacggtcggtgaataccgttctctacagattggcattgatggccatagcactctcatctcggctatccaagctttttttgcgccagaaccactgagagactttcggtgtgaccagtgccgggagactaattgtgtgactcggtccagcagattcactcagcttcccgaattgctcattgttcagcttaaccgttatgttctagcaagcaatggaaaccttcgcaaattacaaaacgccgtgcattacccacgccttttgaccgaacttggaggcgagggaatcccggactatgagctgtgtgctgtgatgattcatgaagggaagagcactaattcaggacattactacgacgtcattcgtgacccggtcatcgaccgttggtttacctacaatgacgaaacggtgaatcaaaagcgcacagctt

SEQ ID NO: 48208 - DNA, 492 bp, Heterodera glycines
gggcattgaaactgtcggtggagtgatgacaaaactgatcactcgcaacacttgtcattccgaccaaaaagtctcagatattttctaccgcggcggacaatcagccaactgtgactattcaggtcttcgaaggagaaaggccgatgacgaaagacaatcatttgttggggaaattcgacttgaccggcattcctcctgctccccgaggcgttcctcaaatcgaagtcacttttgagatcgatgtcaatggaattttgcacgtgactgccgaggacaaagggactggcaataagaacaaaattacgatcaccaatgatcacaaccgactgtcgccggaagagattgagcgaatgatcaacgacgcggaaaagttcgcagaggaggacaagaaaaccaaggaagtggtcgaagcgaggaacgagtttgagtcgtacgcctactcactgaagaaccagctcggagacagtgaaaagttgggaggaaaactcagtg

SEQ ID NO: 48209 - DNA, 465 bp, Heterodera glycines
acagattttggattgaattctaaagtggcagcggcgatttgtgaagctgcggatgacgttatttctggcaaattggatgagcattttccgcttgttatttggcaaaccggaagtgggacgcagtccaacatgaatgtgaacgaagtcatctcgaacagagcaattgaaattctcggaggcgaacttggctcgaagactcccgtacatccgaatgaccacgttaatatgtcccaatcgagcaatgacacttttccgactgcaatgcatgtcgcggtggccgttgagataaacactcgtcttttgccttcgctgcgtttgcttcacgacgaattgtcgaaaaagtcaaaggaatttgagcacatcatcaaaatcggccgtacccatactcaagacgcggttccgctgactttgggtcaggaattcagtgcttatgtcactcaaattggaaacggaatttcgcgtgtg

SEQ ID NO: 48210 - DNA, 503 bp, Heterodera glycines
tgtgcgcccggagaagttggctgattgtttcgcggaaattctggagaaactaactgaggaccaaggcagagatgatgtcgatgtgcgtgtgattgtctatcagtctcatgccggagcaattattggcaagcagggcagcaaaatcaaggagcttcgtgaactgatgcaagcacatatcaaagttttccaagaatgcgcaccccaatccacggatcgcgttgttctcataaccactcaacaatccaaaatgccggatgcaattaagcacctgatggagtttatgcgcgaggtgccaattaaagggccaaccaaaccatacgatccgagtagccacgaccctcgcattgtgcagtgttatgggggcttcagcggaccaatgccaccacctccaatgggtggtccaccgatgggaatgcatggaggcggaggaggttatgcaagttttggaccacgtggcggaccgcctatgcctggtggaatgggaatgcccggtggttttatgc

SEQ ID NO: 48211 - DNA, 660 bp, Heterodera glycines
acgaaaatttgtgctttgtccgagctgtgacaacccggagactgtgctgaccgtaaagcgtcaagtgatcaatggaaagtgtaaggcttgtggacacgcttttattgtggatccaaaacagaagctgtcgacattcattctgaaaaatccaccgcctcctgacaacatagagagcgaaaaggaagtgaaaagcgacggcggattgccagctgaggagagtaacgatgtaccagtagtcgacaactcgggtggctgtgatgccgggtcgaacggcgaagatgacgaggattgggcgcctgaacccgttgaagacgaggaaaaactttcgggacaaatcggcaaattggtcattgacaaggacttggacaaatctgtggatgagcgccttgacttgttgcatcagttcttcctcaaggcggtcaagaacaacacgattcaggacagcaagatgatgttaaacgaagctgaacgtctggaacttaaatcgaaggcaccgctgttgctggccgatgttttgttcgacaccaatgtcatcactcagatcaaacaacatcgcaatctgctgctccgcttttgcttgaaggacgagaaggcgcagcgcatccttttaggaggcattgaacaacttgtgcaaaacaacaaggacattctcatgtcgaa

SEQ ID NO: 48212 - DNA, 716 bp, Heterodera glycines
  unsure (1)..(716): unsure at all n locations
tgaaaaaaaatgctttctaacatttattttacaataacgaaatgcgactgtatgcggctgtcattttttcccgccgttcgtcaggttcatcagatgcacacgcaatctgccgttgaaaaagcaaaaggagcgaggcctgaggagggtattccgctaaagggagaacctcacagaccgccttcactattcgacgacatcggaaagtaccacctttacgagccattgcccaaagtaccgaaggactttaaagaatttcctgaacgcgacttggtcaattttccctacccggaaaaggctgaatacccgccaagaactcgtttcgttgccatccccgactcatggtgtcgtgaaatcgaaaaagtcaccggaacttcggggccctatttgttttttggtggacttttggccttttcttctcaacaaagagattattatcatggaagagaatttctgttgctttgtgttcggatggattaacatttaccttttcttccacacggcttttcgttataaatttgaaaagtacgtatacaaagttacccgtgaacgatttggcaaaatgaaagcttacattgacaatgaattgaaggaagccgtcgagttccgcaagacttcaaaggagcacgccgactcgttgaaagcagtgcatgaaaactttcccacaatnttccaagagaatttggcgctgcaacttgaagcgacctaccgaaaaatgt

SEQ ID NO: 48213 - DNA, 747 bp, Heterodera glycines
  unsure (1)..(747): unsure at all n locations
ccaacggatgggtcacgcaaattgccaccaacccattgtataagaatatgttggtgtcggcctcaagagacaaaaccatcatcgtttggatgcttgatgagagtgggtcggtgctaaacggcaaaccgatcaaatcattacacggacatggacactttgtttccgatgttgtcatgtcctcggatggacagtacgcactgtccggctcctgggacaaaacattacgactgtgggacttgaacacaggacaaacgactcgtcagttcgtctcccacacccaggatgtgctgtccgttgctttctccgccgacaaccgtcagattgtgtctggatcgcgcgataagaagatcaaactgtggaatacacttgcccagtgcaaacacaccatcgtggaggagtgccattccgattgggtgtccaccgtgcgcttttcgccttctcatgcgaacccagtgattgcatccgccggctgggacaaaattgtcaaggtgtggaacttggccacttgccgactgaagaccaaccacttcggacacaccggctacatcaactcggtcaccgtatcacccgacggctcactttgtgcttccggaagaaaggacggctcggcaatgttgtgggacttaaacgacggcaaacacttgtacacattgngcggcaatgacgtgatcaacgctttggcgttttcgcctaatcgctattggctgtgcgccgcgggtggcccggtggtgaaaaattgggacttgg

SEQ ID NO: 48214 - DNA, 313 bp, Heterodera glycines
atccggagaacctttagaaagtcatcgttgttggacgtaaactcccaactgcaaatgacccaaatccgacactgcatgaaatggttatttttgccagcaaccacgtcgttgctaagtctcgcttctggtacttcactagcatgttgcgtcgtgttaaaaaaacacacggagaaattatttcatgtcaagaggtcttcgagaaaaagcctggctccgtgaagaactttggcatttggctccgctacgattctcgtactggacaccacaacatgtaccgcgagtatcgcgatgtttgtgaagcgggtgctgttac

SEQ ID NO: 48215 - DNA, 744 bp, Heterodera glycines
caaaaaaaggcgtcgaatttgtgctggtcggccatccaaaaggtcattccggtgacagtatccatcaccagatgaaatcaacgaattgagcaccgaagtgttcacccaaagtgtgctcatttccacggtcaatcgaatcaaaaacagaagcagcggagaaacgatggagaacattgtcaacaaaacgaacgtcaaaatgggagggctaaactatgcactgccaatcatcagtgacggcatgcccatggagacattggtgatcggttttgccgtcaaccaccccgccggtggtttcggcatggattcggaccagaaaaatggcaacggaagcaatggcacaagcgacacgggcagtgacgcggcgagtgacaatggcaacggcgccaacggacacaaaccgcagaaaaagccgcaagtcttcgagaagagcgtcccgtcagtggtcgggtattccgcaaacattggagagaataacaatttcgaatttgtcggcgactacaaataccaagaagcacgacgtgacgaaaaattgcaaatcattgaccatattgtgcgccattgccttgaaatgtacaaacagcgccgaaacaacaaaaacccctcatcattgatcatctaccgcaatgcatgtggcgaaggattttaccaacatcttttggcctacgaagtgcccgttggtcaagcgcttgttggccgaacgttgcaatggcacgaagctgacactgattgtcgtcaacaaattgc

SEQ ID NO: 48216 - DNA, 463 bp, Heterodera glycines
  unsure (1)..(463): unsure at all n locations
ttcccaaacttaagaaattctacgagggagctgaaaaaggcaggcaaaaacttcgaggttttgttcgtctcgcgcgaccgtgctgctaaagacctcgtcgaatattaccgtgaccacacggcgcttgggcctacctcgaattcggaaacccgaaaattcaggaacttctcgagaagtacgaagtgaaaaccattccgacttgcaaagtgataaaacccgacggaacgatcgttgtcaatgacgcacgaaccgaagttcaggaaaagggcgtggagaatgcacttggtctttgggaggaatggctgggattctatgaagcttgaaaaagcccattggcaagcgaaccgacgaacgaaggataatttgataaactttcctcaatgcttatttatatagccttaggcatttcaacattccccgataaagtaatcgcgtggcnnaaaaaaaaaaaaaaaaaaaaaaa

SEQ ID NO: 48217 - DNA, 214 bp, Heterodera glycines
aagatgaaggaaattgcggagtcttacctcggtcacgaagtgaaaaatgccgtcgttactgtgccggcttactttaacgatgctcagcgacaagcaacaaaagatgcggggaccatcgctggactgaacgtggtgaggattatcaacgaacctaccgctgccgcaatcgcttatggtctggacaaaaaagaaggcgagcgtaacattctcgtgt

SEQ ID NO: 48218 - DNA, 780 bp, Heterodera glycines
tatgcgaacttgtaccactcagaagaatttgctccattctgtgcttatgaatttgcaaagcaagcatcacttcttggcattatgtgcgttgcgattgataagacggatcatcggtttgaaggacgacacgtacattcgacacatttgtgacaagggcactttggaccaaattgtgcagtgtttcgtcgccaatgggcagcgttacaatttactcaattcgtctctcattgaacttttcgaatttataaaaagggaacggatttatccgctcattgagtacctaatcaacaaccattgggagaacacattcagcaaagtggactatgtgcaaacttttgtcaaaatgcacgacatttgggaggctcatttggccaacaaatctgacgagggcgaaaaagtgaaagaaaatggccagacgacgccattggccatgactccgccgaatgcccaatggcgcaaagagagagaacatgacgacgaggaattgttcttcagcaaggacgatgatgacgaaatgccgaccgctcagtgtcgaaagtcgggcgtcgaccccctcttcccgtctcttctcagaaagcggaaagctaatgatgaggacggaattgccagtgttttcggtgggaatatcactccgccagcgggcggcgcagtgtccgtcagcaggatatccaaaatagtgattcgaatgagcagcaaagagccatcgtcggccgctgtcccattggtaacggcgggtggggggcagtccaagcgcagcacatacaaatgaccaaaatcttc

SEQ ID NO: 48219 - DNA, 782 bp, Heterodera glycines
  unsure (1)..(782): unsure at all n locations
gcggcacagccggcggccgcggaccgaccgatgcatccgtcgatgatggggnccgaaccaacagcagcagcagcagagggaacgtgcccatcgccctcccccacaccatccaggcgcatccatgcgaatgccggacatgcacaaccaacagcagcaacaacaacagggcgggttttggagtggaaaaagcggtggttcgatggcatggatgttgcccttctacaccgttggcgttgtgtgctttttgctctacacattgttcaagatcatgtttaagtcgaagaccaaacggcaaaaacgacgtcgcgaccgaccgcttgaccttttgtatggcgacgacgacgacgatgaaggaacggaggacggcttggaatatggtgttcgtggtgcgaaactccgctcggtgcagcacagactgcgcaaaacggagcaggcgatggcggacattctcagccaattggagcaaatttcggcccattcaaaggacattaatgatgacgacacaaaagcagcggaaaagaatgttaatgacccaaacattgccaatgctcaaaacgaagaagaaaatgccgaaacgttgcaagaaaaggatggcacattaagggaagcgcaaagtgcaaaggttgagcaatcattgcgcgagttgaaaatgttgtccgatctgtgcaaaagtgaccggcgattgagacgganattgcgtgccgncgcacaacgacagcagaaccttcattcatcctnctnctcgtccgccaacagtgacaacgaatttctgggatgaggaa

SEQ ID NO: 48220 - DNA, 586 bp, Heterodera glycines
  unsure (1)..(586): unsure at all n locations
atcgttgttggacgtaaactcccaactgcaaatgacccaaatccgacactgcatgaaatggttatttttgccagcaaccacgtcgttgctaagtctcgcttctggtacttcactagcatgttgcgtcgtgttaaaaaaacacacggagaaattatttcatgtcaagaggtcttcgagaaaaagcctggctccgtgaagaactttggcatttggctccgctacgattctcgtactggacaccacaacatgtaccgcgagtatcgcgatgtttgtgaagcgggtgctgttacgcagtgctatcgcgacatgggcgctcgtcaccgcgctcaagcggatcgcattcagatcatcaaagtgcaaaccatcagtgtggcggactgcaagcgagccggggtgaagcaatttcagaactccaagatcaaatttccgcttcctcaccgtgtgaattccaagcgacgcaatatgactcctttcacgacacagcgtccgagaactcattttgtgtagagaaagaaatgagacgacttgtatttccgatttgttgattaaagttgttgtgctaaaaaaaaaaaannaaaaaaaaaaa

SEQ ID NO: 48221 - DNA, 502 bp, Heterodera glycines
gaattattgacgtgttttgaattcgttcgccatttagcccccctccccatctctgttccgtaacaaattaattgaaatgcgttgctgctgctgctgctgttgttgatgttgctgctgttgcttgttggccccggtgttcggatgttccgtctccaaatgccgttccaacttttggtaggaggtgcaacggcgtactgcttgctgcacagcttacaccgtcccgagtccgccttgcgctgcgcttttgccaacaaatcggcagtgacgagcccatggaccatgaccaaatgccgttccaaacctaataatgtgtagatgatgtacaattgtaatcaagggagtaggacatgatggacaattatagatttaaatcgcggagcaagtcgtttaccgccctattttttttaatttttaaaacagaaaattgaaagaaaaggaaaaaaaaaaaaaaaaaaaaaaaaaaaaaaaaaaaaaaaaaggccaaaaaaaaaaaaaaaaaaaa

SEQ ID NO: 48222 - DNA, 710 bp, Heterodera glycines
cagctgaacacctccaattcttcggaatcgccttccattgaaaatccgcctttgattccttccgccgtttatccgtccactccgagtgcgccgccccctccccaagttcagctgagtgcgcttgtccttcccccttcgtcacgatcctttaacgtcgaaagtcccatctccgatttaaactctccacaaatttcgaaccgtcaaacaaataaaacttcggcactatcaatgccccggggcacgaccaaaacggtggcacagcgaaggggcgggcggagaccgcgagaagcggaagatcaccagctaacggatgaggacaaagaccgacgggcgaagcgacgcgagcgcaacaaacaagcagcggcacggtgccgacggaggcgggaggagaaaatgcaaagtttgcaggaacaggtggacgaattgcggaagcaaaatgaacgccgggagaatgaaatccgaaaaatgcgagaaaaagagcagcgacttttggaaatgttgcgactgagaaacggcggaattgtgcagcagcagttgcaccaccatttgcaagcagttcacgtccaacaacagcaccaatccgtcgctgatcatccgactgtcagtcggcccacttctcttcttcagccttttctggtcggactgaataacaaaaagagattctgcgaagccccggcagtgccatcctcgtcctcttcagcagcatcacg

SEQ ID NO: 48223 - DNA, 602 bp, Heterodera glycines
  unsure (1)..(602): unsure at all n locations
ttctgttgacagtttcctgctgtgtgccatgatatcgaatgaaagggaacatttgtcgtctgaggctctcgaagctgctcgaatttgtgcgaacaaatacatggtgaagaattgcgggaaggacggctttacatgcgcgtccgaatccacccgttccatgtgattcgcatcaacaaaatgttgtcctgcgctggtgctgaccgtcttcagacgggaatgcgcggcgcctttgggaaaccccaagagttggtggcgcgtgtcggcatcggtgatatgctgatgtcggttcgtgtccgtgaccagcatcaagcccacgctcttgaagcattccgtcgagcaaagttcaaattccccggccgtcaatacatcgtcatttcgcgcaaatggggcttcaccccttttgaccgcgaagtttacgagaagcaccgcaaggaagggcgagtcattccggacggagtcaactgccgattcctcaagcaacacggaccattgacggaatggctcaaaaatccaatctgatcaattgtacgacggatatattcccttttatatgctttgttgattaaattgttggatnaaaaaaaaaaaanaaaaaaaaaaaa

SEQ ID NO: 48224 - DNA, 711 bp, Heterodera glycines
  unsure (1)..(711): unsure at all n locations
accgtagttgtcacatagatggcatcaaaaattgttccattgccgtttcgccctctttaactttttgcgtcgtccattgccttcgttggtctttcgtcgttctcttttcaaatcgccattggacgcgccgttctgtggcatttacaggacaaatggcgggatttgccggacggatgacattttggtgtgccaacgcaagatggactatcaccttggagcaaatgtccgtcatcaacggggtcggaaccagcacttgttgaaagctaattgtgacgggacggttgtgatcacacgcggcaaaacgttcgaagagttcaagcaggagtatgagcgtgagtcggtttcgaggcgtgcggcatttactcgcggcaccattttcactgttcttttttatccgggcatttttgttggcattttggcggtcatcagtgtcatgtctcatcgctggcacacttatcatggcactggccgtgaacttcgccccgtgtcgaacgccttcgtccgctttgtcgccgctttcttcggttgttacagctattttccctacaacactgaccccgaccctgaaccaatcgctgtcgttgaaaaggaatgagtggtgaagaggaaatacgatttaggcaagcaaccacaacactttggtctttttattgttatttccctggcacataaacacagaccaaatgccaaaaaaaaaaannaaaaaaaaan

SEQ ID NO: 48225 - DNA, 522 bp, Heterodera glycines
aagaggacgaaggggaagaggaatcgaccacttatacgaacattttgggcgaagaaaaggacgtgacgaagggcgtgggagcgatgttgaaattggccggccaaaagggctatttggagtcgggcgagcggaggctggaggaaggcaaactgaagcacctggagagcaaacgcttctccaaagttgagcagggacgatatgacattgaggacaaaacgatgcgaaagttggaacgtatgggcacagcggggacagggccaactcgtccattccccgagaaagcggagtacgaaccgaagattgaaataaattatgcggatcaaaagggccgcattttggacccaaaggaagcatttcgcgtcctttcgtggaaattccatggcaaagggccgggcaaaaagcaggcggaaaagcacgcagcacaagtggtgaagcgggaaaagctgaagaaaatgaactccatggacacgccgttgggaactttgaacaaacaatcgaagaagcaggagcaactgcaagcgc

SEQ ID NO: 48226 - DNA, 679 bp, Heterodera glycines
tccttctgcaacacattaaacaacgacgcatgccggaggaactggtggcgctcagtcccggaacgcgtgtctccggccgctggaccatcatcaagaagcttggggcgggtgcgtttggagccgtctacttgtgtcaagaccgagatggaaggacaatggcagcactgaaaaccgatttttctacgctcagagaccactgctgtatatggaggcccacgtgttgctcaccctgaacgaacttcgatcaaacagtggacgccatttttgccgttgtctggaccttggacgcgatgaacaaccggatgccgattctggacagacgatggagttcaactacgttgtcatgtcgttggttggccgtccagtggacaaactccttcacgaatccggtgaccgcttcagccccggaactgcgatcggcacttcaattcaacttctcaaagcgcttaaggcgttgcacagcgttggatacctccatcgtgacattaaaccagcaaactcggccatcggcacgcctgagacgaacgaacagcgccttctctacctcctcgactttggaatggcgcgcaaatatgtcagagaggacggcacacaccggcgccaaagggacaccgaccgctttagatggacgccaatctacgcaccaatctctgcgcacatcaaacgcgactacagccgc

SEQ ID NO: 48227 - DNA, 722 bp, Heterodera glycines
tctgtcaattttccgctgacggccaatggttggccagcgcatgtgcggacaaaaccgtgaagatttggagcaccgttgacgggaaattggagaatactatccaaggtcataaattgggaatcagcgacgtttgttggtcgtacgacaaccgaatgattgtcagttgttccgatgacaaaacattgaagttgttcgatgtgcaacagggaaaaacattgaaaactttccgtggtcatcataattatgtattctgttgcaatttcaacccttaatcgactcttttggtctctggctcattcgatgaaacggtgcgcatttgggacattcggaatggcaattgcgtgcgcactttgcccgcccgttcggaccccgtcagcgccgttgcgttcaaccgggacggctctttgatcgccaccagcagctacgacgggctggtcaggatttgggagaccagcagtggccaatgcatgaccaccctcttcgacaatgagaatccgccagtttcatttgtcaaattttcgccaaatggtaaatacattttggccgctacaatggacagccagctgaaactttgggacttcaataagggaaagccgctaaaatcctaccaaggacacgtcaacaaaaaatattgcatttttgctaatttctctgttaccggaggcaaatgtatcgtcagtggctcagaggacaatcgcatttacatttggaatttgcagaca

SEQ ID NO: 48228 - DNA, 612 bp, Heterodera glycines
tgggtgcttgtggaacgcgagagtttgaggctggaatttctaaaaacggccaaacgcgtgagcacgctttgcttgcgcagactttgggggtcaagcagctcatcgtcgcttgcaacaagatggacaccactgaaccgccattcgccgaggcccgttacacggaagtgatgactgaagtgtctaacttgatgcaattatttatcggttacaacccagccaccgttccattcgtcccaatctctggcttcaatggcgacaacatgttggaaccgtctgacaggatgccgtggtttaaggggtgggccatcgagcgcaaacatggcattgcatctggcaaaactctgctcgaggctcttgactccattcttccaccgcaaagaccaactgacaagccattgcgtttgcctctccaggatgtgtataagattggaggtattgggacagtgccggttggccgtgtcgagactgatgttctcaagcctggaatggtggtcacttttgctccgcaaggcatttccactgaagtcaaatcggaggaaatgcaccacgagtccttgccatgagcgctttcaggacacaatgtgggcttcaacgtgaaaaacatctctgtga

SEQ ID NO: 48229 - DNA, 524 bp, Heterodera glycines
gtacggaaaagaaggtcaaaaaggtgaagaagaagtccaggaccggctccgaggcgagctccttcgaccagaagaccatccaggagttcaaagaagcatttggcattatggaccaggacaaagacggagtgatcagcaagcaggacctgaaggacttgtacgccactttttgagttgtggcgagcgactcgcatatggacaacatgctcaaggaggcaccggggccaatcaatttcaccgttttcctgacactgttcggagaacgactgactggcactgaccccgaggcgacaattatcggcgcctttcaaatgttcgacaaaactgactgtggcgaaatcacagaagagacattgatgaaaattctgaagaacaaacggggggagccattgacggaggacgaagtgcaagggatgtacaaagggaaccctccaattagtggaggcaaagtggactacaaggcattcgcgcatctgatcacgacaggcgcagcggaggagttggccaaagtgggctaagcgggg

SEQ ID NO: 48230 - DNA, 393 bp, Heterodera glycines
  unsure (1)..(393): unsure at all n locations
gncccccctccccatctctgttccgtaacaaattaattgaaatgcgttgctgctgctgctgctgttgttgatgttgctgctgttgcttgttggccccggtgttcggatgttccgtctccaaatgccgttccaacttttggtaggaggtgcaacggcgtactgcttgctgcacagcttacaccgtcccgagtccgccttgcgctgcgcttttgccaacaaatcggcagtgacgagcccatggaccatgaccaaatgccgttccaaacctaataatgtgtagatgatgtacaattgtcatcaagggagtacgacatgatggacaattatagatttaaatcgcggagcaagtcgtttaccgccctatttttcttaatttttaaaacacaaaattga

SEQ ID NO: 48231 - DNA, 758 bp, Heterodera glycines
tcccctatttgaaagcgaaaagtgctaagaatgtgcgctttttcttggccagttacaatttctcgcttcgatgagttcctacaattacatgcgttcggtgtggaagaaaaatgcgatggatttgctgtgggacaattcattcttcaaaatggacatccgcgcgttgcgccaatggttgtatttaatcgacaatttgatgaccaacgacaaaacatcgttcaaggaattgcttacgcggatcaccacctccacgtcgaccactctgtcaacactgatcaccagcaaggagcaggagtacgagatgcgtgcccagtacctgaagcggctggcgttcgtcattctcagctcggagctggaccaatatgcgggccaattaaacgaaatccaagaacggctgacagaaaatttacgtctttgccaagtgccggtgatccacacgcaggtgttcacgtgctaccgcgtgctgttggtccgcatgagtcccagttcatttgtgtccatttggccgtcgatggtcaccgaattggtccatgtgctggcacaaattgaccaccaactcacttcaacaacaccaacaagcagttccggaggcagcttcttcgcccgttgatgaacagaaatcggcgcgtgacgagcagtgcatgcagctgttcttggccgcttgcaaattgcttgagacgctgtgcgcacttccctccggttacatgtcgcagtttcaaatgtgtcgctggacattcatttccccgatgaatgccgtg

SEQ ID NO: 48232 - DNA, 676 bp, Heterodera glycines
gtgggctcttctgcgtccttaagtattttttcgttgctctgagcaagttaactgtcttctactgctgtacaacaaaatgccccgtcatcgtgcaaagcctcgttcttttcatgccggattgaaattccccgtcggtcgtgtccatcgcaagatgaagaagggtccgtatgccaaacgtctcgcgaacggagtgccggtctacatgacatgctcgtgctggaacacatcacgggcgagctgctcaagaaaattggcgagatcacgcaggccgaaggcatgaagcgtctcagtgcatttcacatccgaactgcagcgcgcgatgacgacgagttgaggaagctgttctctggcgtctctcttgccgaggtgtgcgtgctgccggagctcgaatcggatgtggagcaatcatcggaaggaagtggcgagtccgactccgatgaagaaagtacggaagggagcgcgagcggaagtcatgagggtggcggtgctgctgctgcgcagcaatgagaggaggattgaattctcgagaccgccgtgataacattgactgccaatttaaaagaggatagattgtgtctctgtctgtgatatatacatttattgtgaatatgtccatgtctctttctgtgacattgtcttcttgctgctgaataataaatttcgaaaaaaaaaaaaa

SEQ ID NO: 48233 - DNA, 566 bp, Heterodera glycines
caaaaactgataaaaaaaatggcgttcctctcccgtctctccatccttccaaattcgccaatttcgctgcttgcagtttctttggccgttttggctttcgtcgctttggcatcggccaatccgccgacggcacgcgaaacggcgccaaatgcacagcaaaacaatgccaatacagtggcaactagggaaattgcgaaaaacattgcggaaaagatggagcggacgaacgagttcattaattattttagggcgaagaagttcatcgatgcacataatttggcatttgagaagggcgaagtgtcgctcaaagttgcgccaaaccatctgatgcattttacacctgcccaatataatcgaattcgcggcttgcaaatgcgcagcaaccgacaacggcacaacatggcaactctggcgggaaacagcagtacttcgccggaaaagccggactggcgcgagaaaggggcggtgaccgaggccaaagatcagggggactgcggctcgcgttgggcattcagtgccaccggtgccatcgagggagcattggcacagaaaaaagcgccgaaaaa

SEQ ID NO: 48234 - DNA, 746 bp, Heterodera glycines
cacgtcggaatcccgacccatcgaagtgcacagttgaaggagcaggcgaaggaggagcgcgctcagcggcaattgaaaatatccatgaaggaagagatagaaagtgcgcagcgtgagttggaagtagcacaagggcgaattcggcgcctggaagatcaaatttacgagctgattgatgcatagcgattgctggaagaaaaggagcacgagctacaaacattgaacactgaattggcatcagagagagctatgagcaaggaggaacgggcaagactgctcactgaaattgcactgcaagaatcgcgcgtttccgaaaagcgattcgaagttaagaacaaaacggaggagatgaacaaactgaaggcggaggttgaaagtgggaatggccatttgccgaccgaattcaatgacccggacgatctgacagcccacattgaattgagtacattccacgagggcgacgtcaacaatgtgatgccacagcgtgaattggaccgaaccaacttcactgatcaggacttgtcgttgaagcgcaaactcgagttgcttacaaaggagttggacaatgcgcgagatgagcgggcgatcactgactttgatgtgctgcacatggagaataaaaggcatgctcgtgacaaatacaacacattgcgccaaattcgcagtggaaatacaaagcgacggattgatcaatttgaaaatttgtgaggagcgggcatttttgccttgagagaacaattcattgc

SEQ ID NO: 48235 - DNA, 712 bp, Heterodera glycines
tcgcttttcgaagaatacccaaaatgtcttttggtcggtgtcgacaatgttgggtcgaaacaaatgcaggaaattcgcggggcaatgcgagggcatggtgaaatattgatgggaaagaacacaatgattcgcaaagccatccgtggaaatcttcaaaaattcccgttgcttgataatttgttgccttacattgtcggcaacgtcggattcgttttcaccaacgaggatttgggtgatgtgcgcaaaaaactgttggagacaaacgaggcgcgcctgcaaaggctggtgccattgcgccatgtgacgtgcgattgccgcctcaaaacagtggaatgggtccagagaagacgtccttcttccaagccttgcaaattccgaccaaaatttcgcgtggtaccatcgaaattctcaacgaggtccatctgatcaagactggggagaaagtcggcgcttccgagtcagccttgcttaacatgttgggcattcaaccgttttcctacggactggtcgttgagcaggtttttgacaatggggctgtttactcgcccgatgtgcttgatgtgacgacggctgatctgcttgcacgtttccaacaaggtgtgctcaatgtggccgcactttcacttggcatcggctacccgaccaaggcatcggcgcctcatctgattgccaatgctttcaagaacttgttggccgttgctgccgaaacgga

SEQ ID NO: 48236 - DNA, 681 bp, Heterodera glycines
  unsure (1)..(681): unsure at all n locations
accttctctcttaattctcttctaaaaatggtcctgctttttctccattggcactgattttgctctgttcggtgtttgcttttattgtaatgatgcgcaaacatcgcaagtactggtccaaccgtggcattccgtccccaaccccgcagctgatcagtggcaatttcggctcgctgtacggcgattatccgagcatgttccagctgcgggattggaccagacagtacggcaagcagtacggtatccaatacggttggcgcaacgcgttggtgatttctgacccggcaatggtccacgagttgcttgtcaccaaatttgaatatttccacgcaagaaatctttcgcccatctttggcaatttggacacaaacaaatggatcagcatgttcttggccaggggaggccggtggaaaaggctccgaacgattgcgaacccggcattttcggtagcgaatctgaaaaagtgcatgtggctcattgacgattcagttaaaaatgccatcaattttctggaaaaagcgcgcaacgaaggcaaatcttttaacattcaaaggcatttcgtagaaatgagtttcgatgtgatcgcccgtgtggcgttggggcagcgcgagtcgcgacagtttgagactgaaatggcacacctggcgattgagtcgatgcanaaatacaaatattcaattg

SEQ ID NO: 48237 - DNA, 813 bp, Heterodera glycines
accttctctcttaattctcttctaaaaatggtcctgctttttctccattggcactgattttgctctgttcggtgtttgcttttattgtaatgatgcgcaaacatcgcaagtactggtccaaccgtggcattccgtccccaaccccgcagctgatcagtggcaatttcggctcgctgtacggcgattatccgagcatgttccagctgcgggattggaccagacagtacggcaagcagtacggtatccaatacggttggcgcaacgcgttggtgatttctgacccggcaatggtccacgagttgcttgtcaccaaatttgaatatttccacgcaagaaatctttcgcccatctttggcaatttggacacaaacaaatggatcagcatgttcttggccaggggaggccggtggaaaaggctccgaacgattgcgaacccggcattttcggtagcgaatctgaaaaagtgcatgtggctcattgacgattcagttaaaaatgccatcaattttctggaaaaagcgcgcaacgaaggcaaatcttttaacattcaaaggcatttcgtagaaatgagtttcgatgtgatcgcccgtgtggcgttggggcagcgcgagtcgcgacagtttgagactgaaatggcacacctggcgattgagtcgatgcaaaaatacaaatattcaattgcccagactgcggacactgagaaagaagtggcattctccggacaatcggtgataacgccaaaatcggtcactgttgggcttaaactgagggacgaagacggcacggcacatttgaataacctctgctgattaa

SEQ ID NO: 48238 - DNA, 619 bp, Heterodera glycines
tatatttgaaaatcacttctctcttaattctcttctaaaaatggtcctgctttttctccattggcactgattttgctctgttcggtgtttgcttttattgtaatgatgcgcaaacatcgcaagtactggtccaaccgtggcattccgtccccaaccccgcagctgatcagtggcaatttcggctcgctgtactgttattatccgagcatgttccagctgcgggattggaccagacagtacggcaagcagtacggtatccaatacggttggcgcaacgcgttggtgatttctgacccggcaatggtccacgagttgcttgtcaccaaatttgaatatttccacgcaagaaatctttcgcccatctttggcaatttggacacaaacaaatggatcagcatgttcttggccaggggaggccggtggaaaaggctccgaacgattgcgaacccggcattttcggtagcgaatctgaaaaagtgcatgtggctcattgacgatccacttaaaaatgccatcaattttttggaaaaagcgcgcaacgaaggcaaatcttttaacattcaaaggcattccgtacaaatgagtttcgatgtgatccccccgtgtggcgttggggcaa

SEQ ID NO: 48239 - DNA, 735 bp, Heterodera glycines
  unsure (1)..(735): unsure at all n locations
gcaatgtctgtgcctggctctaacctccgcaacagggcgaggacgccgaggagcggctgatcaacgaggagtacaaaatctggaagaaaaactgcccgttcctttacgacatggtgatgactcatgcgttggaatggcccagtttgaccgtccaatggctgcccgacgtgcaacgacaggagggcgccgactacacaatccatcgcctcattttgggcacgcacacgtcggacgagcagaatcatttggtcatcgccaaactgttactgcccaacgacgacgcacagtttgacgcgtctcgctacgacactgaccgaggcgaatttggtggctttggcacagtgaccggcaaaattgaggtggaaatcaaaatgaaccacgagggcgaggtgaaccgggcccgatacatgccacagaatccggttctgattggcaccaaatcaccctcctcggaggtgtacgtctttgactacacgaagcatccgtccacgccggctgacgtggagtgcaagccgcagttgcgactgcgtggccacaccaaggagggatacggcttatcctgnaacaacaatttgcctggtcatttgttgagtgcctccgacgacatgaccgtgtgcctgtgggacattcaagcggcgactgcgaatgccaacttttttggacgcaaaatccatttgcacagcacacactgcgngtgttgaggacgtggcatggcacgttttacatgacacagtc

SEQ ID NO: 48240 - DNA, 552 bp, Heterodera glycines
taccttgtcgaagtgagcgagaaggcgcgacgttacgacgacatggtggaggccatgaaaaagctgatcaagttggacccaaatctgaccctggaggagcgcatttcgttgtcaacggcttacaaaggtgcgatggcttctcgtcgtacgtcctggcgtgctttggtctccatcgaggaacggaccggcgcgagtttgagcgatgcacaacaacaggtgttggagaactatcgtgagaaggtgcagaatgaactggtgaacacttgccaagaacttttgacatgcatcaacgaagtgctgtttccgaaggcgtccgacgtggagcagaaggtgttctatctgaagatgaaagccgactactaccgttacatttccgaagtcgcgacggacgaagaccgatccggtgttgtcgaactcgccaaagttgcctaccaggaagcgattgacatggccggcgacaaaatcccagcgaccaatccgactcggcttggccttgcgctcaacttcgccgtgttcaactacgagatcttaaattcggtgaccgaggcacgc

SEQ ID NO: 48241 - DNA, 594 bp, Heterodera glycines
cactgaatttgtgggagaccacttccattgagaagctcttctacccagaagaggatgaacggttcggcgaaattattgtgcgaactcccatcttctactgcgagtactcgcagaaaaggggacccaaaatggctcttgcactgcgagaatttgaccgggtccggaacgagtcgcgttacccatacgtggactacaaggagatttaccttctggaccggggctaccgatacttcttcaaggaacgcaaatttggcaagtactgtactccacaagcgtacgtgcaaatgtgggattcggcgtacacagaacagcgcaagcgatttgattcgcatcgtcgtggaaagaaaaggcggaggaacaattaattaggtggagagggcactacgaaaatttatgaattgctttgtttgtttgttagtgctttttttgtatattttgtcttggtttaatcatcggaattgtctctattcatttactatttttctgtccatcctcatttccctcattatctatcgctttggtctgtttctctcgcattccttttccactcactttcgatatttttcccctattgtgcgaataaagaagactgga

SEQ ID NO: 48242 - DNA, 409 bp, Heterodera glycines
acaaatcttctctcttctttcattcaaataaaatgccaccaaagccatcgggaaaaggggcgaaaaaggcagtgaagtccacaagacggtgcgcacggctgacaagaagcgtaagaagtctcgcaaggagtcgtactcagtctacatttaccgtgtgctgaagcaggttttctctgacaccggcatctcgtccaaggccatgtctattatgaactcgtttcgcaatgatgtgttcgaacgcattgctgccgaagcatcgcgtctggcccattacaacaagcgctcgacaatctcttctcgtgaaattcagacggcggcgcgtctcatccttccgggcgagttggcaaagcatgccgcttctgaggggaccaaagccgcgaccaaatacacctcgtctaaatgagaccat

SEQ ID NO: 48243 - DNA, 749 bp, Heterodera glycines
gctccttaagcttaaaaaacagacctgcattcagtattatttataagaacaccaaaaatgcgtgaagtgatctctattcatgtgggacaagcgggcgtgcaaattggaaatgcttgttgggaattgtactgcttggaacatggcattcagcccgatggaaaaatgccatccgaccaaaacaaccaagacgattcgttcagcaccttcttctcggaaacaggcaatgggcgtcatgttccgcgtgcggttatggtcgacttggagccaacagtgatcgacgagatccgcactgggacttacaagcatctcttccaccctgaacagctcatcactggaaaaggagacgcggccaacaactacgctagaggacattacacagtcggcaaagaaatcatcgaccccgtcttggatcggattcgtcgcatcgcggataactgcaccggacttcaaggctttctcatcttccattcgttcggtggtggcactggctctgggttcacatcgctgcttatggaacgtctctctgttgactatgggaagaagtctaagctcgagttctccatctaccctgctcctcaagtgtccaccgctgtcgttgagccgtacaattcggtgcttactacgcacacgactctcgaacactctgactgtgcatttatggttgacaatgaggccatctacgatatttgtcgtcgaaatttggacgtggaacgaccttcttacaccaatttgaaccgtttgatttctca

SEQ ID NO: 48244 - DNA, 392 bp, Heterodera glycines
ccggtgttgctcatgagcaagatggaccgtgcgctgctcgaacttcatcttggccaggaggaattgttccagacattccagcgcattgtggagaacatcaacgtgatcattgccacttacggagatgatgatggaccgatgggtccgatccatgtggacccgtccgttggctatgtcggctatggctctggacttcatgggtgggctttcgcatcgaagcagcgatgcggagatgtccgctgacaagtttggagtccagcaggccacattgatgaggactctgtggggcgatcggttcttgacgggaagacctcggaaatggaccaacaaccagggaccccgggaccatgcgagggttctcccaatctgtgctggacccgatcttcagcggg

SEQ ID NO: 48245 - DNA, 706 bp, Heterodera glycines
tttgcagaactgtggaccgaattcgtttccaaatgctattctttaaaacggtccggtcgagcagtgtccgcaccaacagcagcagaatgccgcgccgctgtcccaccgccccacggcattttccctccccgcaacttcgcctttctcaacaatttcatcggtgggctcactgccgtcggagccaacaacgcccacagaaagaatgagcacaggaaatgtgatgatgatgatgagcccgaaaagaatggacaaaggaaacggaggagagaaaggacaaagacagaaagccccgggcaaagagcggccaaaggacggcaaagagcgcgtgcacaagtgcgaccagtgccaaaaggcgttccgcttcaagtccaacctgttcgagcacaaatcgctgcatttgggcagcagcagtcggaaccctttcgtgtgccctttctgctccaaaacgtgccgtctgaagggcaatctgaagaagcatttgcaagtgcacgtcaccagcgcggaggacttggaatgcttgtgggaacgctctttctcacgcagttccggtcgtccgagtaaaaatgcaccgcccgctccgttgccaaagcccggcgacgacctcggcatggtgccggtgctcgtctctcagcaggatgcttcttcctcctctccatttggctccccccccaccatcaaatggactttgccccaaaatcgaagtgcc

SEQ ID NO: 48246 - DNA, 508 bp, Heterodera glycines
atgcggttaattcgaccaacgcggtgcgcacggaaaacaaaaagcggaaaaaggccctcaaggaatcttactccgtgtacatctaccgtgtgctcaaacaagtccacccggacaccggcatttcttccaaagcgatgttcatcatgacactcggttgtcaatgacgtgttccagcgcattgctgcggaagcctcgcaattggcccactacaacaagcggtccaccatctaatcccccgaaattcagacggctgtccgactgattctgccctgcgagttggccgaccatgccgtgtacgaggggacctaggccgtgacgaagtacacctcgttaaaatgagcaagacatgatgaaatcagtggtgatcagacaggaaaaactatcccaaactgtgcctctttaaggccacaatcactctaatggacgcgaatgacactttttttgctgtcttgcatgtgaacgcaaataaatcggctttacgcttaaaaaaactgttgaaaacggcggc

SEQ ID NO: 48247 - DNA, 795 bp, Heterodera glycines
  unsure (1)..(795): unsure at all n locations
ccctgagacggtgttgcgtcaagcattgccgagcgtatcaaaccggtgttgctcatgagcaagatggaccgtgcgctgctcgaacttcagcttggccaggaggaattgttccagacattccagcgcattgtggagaacatcaacgtgatcattgccacttacggagatgatgatggaccgatgggtccgatccaagtggacccgtccattggcaatgtcggctttggctctggacttcatggttgggctttcacattgaagcagtttgcggagatgtacgctgacaagtttggagtccagattgacaaattgatgaaaaatctgtggggcgatcgcttcttcaacatgaagaccaagaaatggaccaacaaccaagagcccgagaccaagcgaggcttctgccaatttgtgttggacccgatcttcaaagtgttcgacgctgtgatgaacatcaaaaaggacgaagtggcgaagttggtggagaagctgaacatcaaactgaccttggaggagaaggaacaggagggcaagccattgctgaaaacgatgatgcgcaaatggttgccagccggtgacactatgcttcagatgattgtcatgcatttgccatcgccagtcacggcgcanagataccgcatggaaatgctgtacgaagggccgcatgacgacgaggcgggcggttgcaatgaaaaactgcgaccccaacggaccactgatgatgtacatctcgaagatggtgccaacctctgacaagggcgcttctacgctttcggtcgtgtgtttgctggcagagtc

SEQ ID NO: 48248 - DNA, 683 bp, Heterodera glycines
tgtagatcgggggtattgggacagtgccggttggccgtgtcgagactggtgttctcaagcctggaatggtggtcacttttgctccgcaaggcatttccactgaagtcaaatcagtggaaatgcaccacgagtccttgccagaagcgcttccaggagacaatgtgggcttcaacgtgaaaaacatctctgtgaaggacattcgccgtggttcggtcgcgtccgactcgaagaacgacccggcaaaggagaccaagagcttcacagctcaagtcatcatcatgaaccacccgggtcagatcgctgctggttatactcccgtgttggactgtcacaccgcgcacatcgcgtgcaaattcgccgaactcaaggagaaggttgaccgtcggtctggaaagaaagtggaggacaacccgaaggcgctgaaaaccggcgatgctgggatcgtcgatttgattccaaccaagccgatgtgtgtggaggcattcacggactacgctccgcttggtcgtttcgccgttcgtgacatgaggcaaaccgtcgctgtcggtgtgatcaaggcggtggagaagactgaaggcggtggaaaggttaccaagtcggcgcagaaagctgctgcccctggtgggaagaagaaatgagacacgctgataattggaatggattcgatttttggatctgttgtt

SEQ ID NO: 48249 - DNA, 679 bp, Heterodera glycines
cagtgccggttggccgtgtcgagactggtgttctcaagcctggaatggtggtcacttttgctccgcaaggcatttccactgaagtcaaatcagtggaaatgcaccacgagtccttgccagaagcgcttccaggagacaatgtgggcttcaacgtgaaaaacatctctgtgaaggacattcgccgtggttcggtcgcgtccgactcgaagaacgacccggcaaaggagaccaagagcttcacagctcaagtcatcatcatgaaccacccgggtcagatcgctgctggttatactcccgtgttggactgtcacaccgcgcacatcgcgtgcaaattcgccgaactcaaggagaaggttgaccgtcggtctggaaagaaagtggaggacaacccgaaggcgctgaaaaccggcgatgctgggatcgtcgatttgattccaaccaagccgatgtgtgtggaggcattcacggactacgctccgcttggtcgtttcgccgttcgtgacatgaggcaaaccgtcgctgtcggtgtgatcaaggcggtggagaagactgaaggcggtggaaaggttaccaagtcggcgcagaaggctgctgcccctggtgggaagaagaaatgagaaacgctgataattggaatggattcgatttttggatttgttgttttttttggccgtgaaat

SEQ ID NO: 48250 - DNA, 412 bp, Heterodera glycines
  unsure (1)..(412): unsure at all n locations
tttttctccttgggggagtcggtcattgaacaagcgcggaagcccattttgtattgttgacaaaacacaagcgtcgccgaaattgaggacgcattccgcactttctgtacccgcgatgacattgcgattattctgataaaccaacacgtggcggagatgatccgataccaggtggaccaacacgtggccggcatcccggccgtgctcgaaatcccctccaaagaaatgccttatgacgcgtccaaagatagcattttgaaccgagcacgtggcctggtgaacactgacgacctcaagtcatagaagaagacattacaaaaaacaaattctcctttattagtcaatgaatgtgtttaattaattatgggaatgacgagaacctnnnaaaaaaaaaaaaaaaaaaaaaaaaaaa

SEQ ID NO: 48251 - DNA, 507 bp, Heterodera glycines
cgccaccaattgcgcgcacgcgtgaatgtctagacaaaaccgacagttgctcacgttcaacacagcgccattctcaacatcattgcaccaaaatggcacgccgtactaagaaagaaggagccgtgaaaggtgtcgtccaacttgaaccttcgacgggcgctgaaggaaatttatccgggcaaagaaatctcattgcgtgcgttgaacattatgaactccttcgtcatggatgccttggatcgcattgcaaccgaggcgacgcgcatggcccactacgaccggtgcaagaccgtcacgcttcgcgacatggagttttcgtgccgactgtgcctgcccgacaccatggccaaacatgcgaaccaaaaggctcagaagacggtgaccaagttctacgctgcataagtgcgggaccggatgagaaggacggatatgccacgtggcgaatttgcgatgatgcatatgggagcgctgcgagcacactcaacttttggacgaccgccggatgat

SEQ ID NO: 48252 - DNA, 695 bp, Heterodera glycines
tgactttctgcggtactcacttcggcctccggcgaggaacctgcagcttcaggactatgtttcgcgcatgaaagagaaccaaacatgtatctattacatcaccggcgagtccaaggacgttgtccaaaactcctccttcgtggagcgtgtgaagaagcgcggcttcgaggtcatctacatggtcgacccgattgacgagtactgcgtccagcagctcaaagaatacgacgggaagaagttggtcagtgtgaccaaggaaggccttgagctgccagagagtgaggaggagaagaagaaatttgaagaggacaaggtcaagttcgagaagctgtgcaaagtcattaaggacatcttggacaagaaagtccaaaaggtttctgtctcaaaccgtttggtctcttctccgtgttgcattgtgaccggagagtacggatggtctgccaacatggaacggatcatgaaggcccaggcattgcgtgactcctccacaatgggatacatggcgtccaaaaagaacctggagatcaaccctgaccattcaatcatcaagtctttgcgcgaccgtgttgagaaggagcaggacgacaaaactgcaaaggacctcgttgtgctgctgtacgaaacttctctgctcacctccggcttttcattggaggacccgcaacagcatgcgtcgcgaatttaccgaatggtga

SEQ ID NO: 48253 - DNA, 718 bp, Heterodera glycines
  unsure (1)..(718): unsure at all n locations
aacgaatcgttaagtacatgcgaggacaagccggacccagctcgaaagaactcaaaagcatcagtgactttgacaaatttgtggatggcgatgacgttagcgttattgggctgtttgaaggagaaagcaagctgaaggactcctttcataaagtggccgacaccgagcgtgaccgttttttttttgcgcattcctctaacccggatttgctgaagaaaaccggatacaccgacgacattgtggtgtttgtctcgaagaagttgcacaacaaattcgaaccgaacgaatttcattacgatggcaattatgacacggacaaaatcaaaaacttcctcctctacgaaaccaatgggttggctggaattcggacccaaggaaatctcttccaatttacgcatcgtccattggttgttgtttactacaccgtggactacttgaaggacccgaagggttctaactactggcgaaaccgtgtgctcaaagttgcgcaggattacaagcgcaaagtgcactttgccgtcagcgacaaggaggaattcgctcaggaagttgaacaaaatggccttgcggaccgtaaggaaagcgacaaaccgttggtggcggcaatcactgtcgatggaaagtacccaatgaacaaggaattcagcattgagaatctcaaacaattcgtcgaggatctgncagcgggcaaattggagccatacttcaagagcgagcc

SEQ ID NO: 48254 - DNA, 506 bp, Heterodera glycines
tacggaagccaagcggagaagacttcgccgcctgtctcgtcgaggcaatccgagccatcaatcgagggactaaccccgaacgaattcctcagggctcttcgggctcatattttgtcaaaaacttacaaggggaagtgatcggtgtgttcaagccaaaaaatgaggagccttacgggtcattaaatccaaaatgggttaaatgggcgcacaaattgctctgtccttgctgttttggtcgttcgtgccttgtcccgaatcagggttatctctcagaggcgggtgcttcgctggtggaccaaaaattgggcctggacattgtgccaaggactgcgattgtggcattggcagcacccaccttttactatggacgaattgataggacggtgacgaacacaaaagaacaaattgccaggaattatcccgacttgggccggcacttcaagcgcatcggattgccaccaaagcggggcagtttccagctgtttgtccgtggcttcaaagatgcc

SEQ ID NO: 48255 - DNA, 687 bp, Heterodera glycines
agtttcgctctttttgtctacggacccgaacccgagcacggggaccaatactcggacaaaacgccaattgccgccgctttttgccgcgtgcgcgacgcactttttttcgtggagaacgtttatgcgagagcccatccgtgagaaattgttgcccgacccggtgaagccgccatggcaccagccgaagatcacggtggtgatggaaatgcgcaatgtgttggtgtgtccaaagtgggagtacaaaaagggccattactttgtgaagcgacccgcgctcgactactttctcgacatggtcggctatcccaacttcgagttggtcatacacacatcggaaacgatgatgcaggcggcgccggttgtgcaacagttggacccgaagggctcacgcatcagcaacgcgctgttcagagagtgcaccaaaacgcggttcatcgacgggacggcgatgaaagatctttcccggctcaaccgcgacctgtccaaagtgatttacatcgactgggacccgcaggcattccagctgaacccggagaatgtgctgcgagtgcccaaatgggagggcaacatggacgacacgacattgattgacttggcggagctgctcaaaaccattcatctctccgacattgacgacgttcggcccacgctgcagttctattcacagtttgacaacccaatgcagga

SEQ ID NO: 48256 - DNA, 492 bp, Heterodera glycines
taagacaacattattaatgatgttgcccaactcgtcccaattgtgctgttgctcaaccttggaaaacagtcggtgaacgcgcttccgcttggtcgtcaatcagacgcacaacgatgtccaattgcccaactttgacgcgtaccgcaacgaattgaccaaagacccacctcaaccgtcccatgtgactgaggacaggcgcaaaggcgtgtcaagcttcatcttttatggagtgggcggcgccattacgttgatgacagcaaagttggtcgtccgaaaagcggtcacttacaaatggatgccacgggaccaagccgcaatggcatcgaccgaaatcgacctcagcttggtgccattgggcaagacaaagacatttgattggagtggcaagcccgtgtttgtcaagcatcggacggacaaggaaattgagcgcgaacgtgcggtggaagtgggcaaactgcttcacccggaacgggacgaggaccgtgtgctgaa

SEQ ID NO: 48257 - DNA, 566 bp, Heterodera glycines
  unsure (1)..(566): unsure at all n locations
catttttgcttgtcgacgacagcacaccacagccgaaaagcgcttcttctcatcgccttcgccttcaaaacttagaagcaccaatcccaaccagaaaaaatgtgcgacgaagaagttgctgctctcgtggtggacaatgggtccggaatgtgcaaggccggtttcgcgggcgatgacgcgccccgcgcggtgtttccgtccattgtgggccgcccccgtcatcaaggcgtcatggtcggcatgggacagaaggactcgtacgtgggagacgaggcgcagtccaagcgtggtattctgacgctgaagtacccgattgagcacggcatcgtcaccaactgggacgacatggagaagatctggcaccacaccttctacaacaagctgcgtgtcgcccccgaggagcacccggtgctgctcacagaggccccgctgaacccgaaggccaacagagnaaagatgacccanatcatgttcgagacgttcaacacgccggccatgtacgtggccatccaggccgtgctgtccctgtacgcctccggccgtaccaccggtctcgtgttggactc

SEQ ID NO: 48258 - DNA, 644 bp, Heterodera glycines
tcacgtttgtggcattgtgtgcggcaatttgatgcagggcttttcgctcggcggatggaaagaacagcacaatgtgcaccacgcggcgcccaacgtggacggaagggacggcgacttggacttgttgccgctgtgggcgaccatcggcacacaactcaaacgcattgacggtgcttctccgctcgcccatctgttgcccttccagcatttgtattggtccttcgcgttgccgttgctccgtttctcgtggctgctccaatccgtccaatttgtgtgccaaatgcggcacagtttttacgatatccatcgccagagggcacttgttgagcagtgttcgttggcattgcattggtcgttggtgctcgttcagctgtactttttgccggacaatttggcccgtctccaatatttcctcgtctccaatctgttcgccggtttcctcatcgcacacgtggtcacctacaaccactactccaccgacaaattcgcatatgacgacccaatcctggagaactttgcctgtctgcagctgtacaccacgcgtaacatgcggcccggcccgttcatcgattggctttggggtggtctgaactgtcaaattgagcaccatttgttcccgacaatgccgcggcacaacctgaaga

SEQ ID NO: 48259 - DNA, 459 bp, Heterodera glycines
ttggatgtgtgcggacgactctgccacatccgccgaagaactcgtaaccgacggggaaattggcgaaccgacgggccgtttgtcgcccgaaatgctatcgttggaagacgcagttgaagttttgcaaaaagagcaaaatgcggagagattccgattggcttttgagtcggtcaggcgcgttttgagtcgcagcaaatgccctccaattgacaaagtgatcactcttggctttccttgtgctctcgtccaggcgctccattatgacgatgacaaagtgaagtttgaggcagcttggtgcatcaccaacatcgtttctgggacttcggaacagaccatgaccatggtcaacgcgggtgcggttggtccgctgcttacactgtgctcctcttcttcgcttaaattgagtgaacaggctcgttggtgcattgcccatatggccggagatggcgttcaacttcg

SEQ ID NO: 48260 - DNA, 752 bp, Heterodera glycines
ccaactgtaaatggaaatggctttggcttgaccaatgggacacatttcgctgatgacttttctgagtccattaaagacgttggtattattggtatcgaactttactttccaaaatcctacgcgaaccaagaagaccttgaaaaatttgacaatgttacatcaaataaatatgtgctgggacttggccaacaagaaatgtgcttttgccatgagaatgaagatgtttgttcactttcgctgactgttacagctgcactgatggacaattacaaggtcaatccaaaggacattggctttctcgcggttggcaccgaaacattggtcgacaaaagcaaaagtgtgaagtcagtgttaatggatttgtttgccgattcgggcaacatggacttggagggcgccgacgagaaaaacgcgtgtttcggtgggactcaggcgttgttccatgccgtcgattggatgtacgctaattacgcaacagaaaaacgccttgccatcgttgtctgtgctgatgtggcagtttattcggctgggcccgcccgatgtacgggcggtgccggtgcagtggcctttctgattggaccaaatgcaccgattgcacttgaacgtggccttagggcatgccattctcaaaatgtttacgacttttacaagccaattgtaggcgttagcacgcaattcccacgagtggacgggccaaacagtgtggagacctatttgaacgccgttgacatgtgttacgggcgattttgtga

SEQ ID NO: 48261 - DNA, 771 bp, Heterodera glycines
  unsure (1)..(771): unsure at all n locations
ataattgtcctaaaaaatggtccaatacaaattatattattttgatgggcgcggtttgggtgaatccatccgtctgttgcttcactatgttggccaaccatttgaggacatccgaattaaagacatggaagaatgggagaaaacgtacaagccgaaatttttttacggaaaggtcccagttttggaggttgacgggaagccattgggacaaagtgctacgattttgcgctaccttgccgaaaaatttggcttggctggcaaagatgaatgcgaaaaggcgaaggctaacgaaatcatcgactttcaaaaggatgctaacactgatttggccccctatttatacgtcaaaatgggatcccgccaaggcgatttggacaaattgcgtgccgaagtgttcgagccgggagtcaagcacattttgccactgtttgagaaacttttgaaggagtccgggtcagggtacatgctcaagtccggactctcaatggtggactttcaagtggccaactttctgtacacgtttaccaagttggagccggagactatcaatgcgttcccggagctgatcaaatacgttgaccgtgtccatgcgctgccccaactgcagcagtatttgaagcagcgtccgcaggaccgctaatcactgatcagaaaagtcgagattgaatgagaaaaganaatcaatcattgagattaattcgataagttatgataagacaaagctttttttctttaaacagaatattgaaaaatatttgatcttttttatca

SEQ ID NO: 48262 - DNA, 514 bp, Heterodera glycines
ttccgtgcgtcgtggctactggggcaacaaaatcggaaaaccgcatacggttccatgcaaggtcactggcaaatgtgcatctgttctcgttcgactcattcccgctcctcgtggtaccggcattgttggtgcgcctgtgcccaaaaaattgctccaaatggctggcattgacgattgctacacttccgccgttggccagacggcaactctgggcaactttgccaaggcgacttactacgccatccaacggacatattcctacttgacgcccgatctttggaaagagaacgaattgccgagaaatcctctggatcacattggcggtggcggggcgcaataagcgcagcgaggagagacagtggtgaaaaaagcacggaatgttatgtttttctctgatttgttggactgataaaattttttgttgaaaaaaaaaaaaaaaaaaaaaaaaaaaaaaaaaaaaaaaaaacaaaaaaataaaacaaacgcgccaaaaaaaaaaaaaaacaaaaaaaaa

SEQ ID NO: 48263 - DNA, 724 bp, Heterodera glycines
  unsure (1)..(724): unsure at all n locations
aaaaaaaatctgaatggtgagcgctcagagtgattctcctgttcctaattggctgcttaacatcggaccaatttcttgccatgcgtggaacaaggacaaaactcaattggctgtttcgccttccaacaacgaaattacatattcgctcgttcggagaccgtttggaacccgttgcacgtgctaagagaacacgacttgctgatcaccggattggattgggctccgaatactaatcggattgtttcatgttcgcacgacaaaaatgcatttgtgtggacatgggaggctgaaaagaacagttggaaaccggagatggtggtcgttcggataaacagagctgccacctgtgtcaaatggtcgcccaacgaaaacaaattcgccgttgggacgggtgcgcgtttagtcgctatttgttattacgaacgtgaaaatgactggtgggtagcgaagcaaatcaaaaagctgattcgttccactgtcacctcattgaattggcatcccaacaacattttgttggctgttggcgcctgcgacttcaaaacgcgtgttttttctgcttatgtgaaagagattgacgaanaaccaacgccaaacccttgggggaccaaaatgccattggggagaattgctcaaggagtaccagtcgaccggatgggtccatgacttggccttttctccctccggttgtaaacttgcctgggtctctcatgattcgtccattgct

SEQ ID NO: 48264 - DNA, 841 bp, Heterodera glycines
  unsure (1)..(841): unsure at all n locations
ctgagagaaggcgacgagggcactccggcgaaggaagtcgaaactcggcacccgcaaaagggcatcgacgaattggtggcacagctgggccattacaacgaaaacatttgccgagatgcgatccatggtgttcgccttctgttaaaaactcgcctgatcagttgaggaggcatttgcgcagaataatcccggccatcggttctgtaattattcgcgagctaaaatcgaccgcaactcgcaatcagttgaagctgctgatcgaaatggtctgtgaagtgcccgaggaagtgatcagttcccatttcgtcctttttgtggcttcgttctcaccgggatttccgatgttcgttcatctgttcgatcactgtgcttcgacattttatcacttttattgcgcaaatatgtacagttgtgtcggaaaaatcgcgaaatattcgatgcgtttttgcaactgatggaaggtcaacggaagccagaaaatcgtaccaaattgcttgattccttgtcccaatttgtcactgtcttcggcgatgaagcgaacagcaacaacaaattgtggcccgagcgcactttggacatttcatttgaaaacggagaggcaacgattcgttcgccctctctctctttgctcccttcgccagcctatttccattttcccgtcctttgtccgtccaacgatggcacaacttcggacggcacttcgccgcttatgacgcgggacggactgctcaattgttgcaaggttctctgcccattattagaggcagtgattcgggccgangaagacgctgacggcacanaattcagctcaacatgggcagaactcacaatgtcgtctctc

SEQ ID NO: 48265 - DNA, 574 bp, Heterodera glycines
gctgactgctccgtgctggtggttgcttgacgtacgggagaccatgaggctgaaagcctttaaaccggccacaatcatcaccgccctttgctcggcatactatggggcgaacatagctcttttccatcttgcagcacaatggacacgactgaacccgcgttcttcgaggacctttacaccgacagagatgagctgaattgtgacaacttcttctaggaacatgggctacaatcccgcccaccgtatcattcttcccagtctctgggttcaatggccactacatgttgctccctgctgacaggatgccagggctatccgggtgggctatccatcaccaacatcgtactgcttatgctacaactttggttcagtgctctagccttccttgatcccacaaatgcaccaactgcacaatccgctgcgacagcctgttcaagatgcgtatgaaatcgggggtactgtgacagcgcctatctggccgttcccaacactggtgtatctcgatatctatcaatggcccgccactagtcgctcctcacacgtatttgcacgaccccatacactgcgtcattga

SEQ ID NO: 48266 - DNA, 294 bp, Heterodera glycines
aattatttgggctgtatatcggagagatatgaacaccgatgacagaaggctgaatgcttgggctccaattaaaaagctgaatcaataccaatcagaggaggaggaacacaaacaattgatgttcttccaacgaaagtcgcaacacattgaaaaaaagcggaaacttttggaagaaattgatttcgcattgccgaaaaaggcgcaaaagtcaaaagcaaaaacagaggaacaaaaagcaaagagagaagaagcaactgaatcaaaagataaaaaaaaaaaaaaaaaaaaagaaaa

SEQ ID NO: 48267 - DNA, 651 bp, Heterodera glycines
cagggattgcctctgtaaattttccgctgacggccaatggttggccagcgcaagtgcggacaaaaccgtgaagatttggagcaccgttgacgggaaattggagaagactatccaaggtcataaattgggaatcagcgacgtttgttggtcgtacgacaaccgaatgattgtcagttgttctgatgacaaaacattgaagttgttcgatgtgcaacagggaaaaacattgaaaactttccgtggtcatcagaattatgtattctgttgcaatttcaaccctcaatcgactcttttggtctctggctcattcgatgaaacggtgcgcatttgggacattcggaatggcaattgcgtgcgcactttgcccgcccattcggaccccgtcagcgccgttgcgttcaaccgggacggctctttgatcgccaccagcagctacgacggcctggtcaggatttgggagaccagcagtggccaatgcatgaccaccctcgtcgacaatgagaatccgccagtttcatttgtcaaattttcgccaaatggcaaatacattttggccgctacaatggacagccagctcaaactttgggacttcaataagggaaagccgctaaaatcctaccaaggacacgtcaacaaaaaatattgcatttt

SEQ ID NO: 48268 - DNA, 680 bp, Heterodera glycines
  unsure (1)..(680): unsure at all n locations
tctgagcgaagtgttttcacgtttggcgaaatcatcagtgcaaaggtgatggaggatgacagcggaagtccaggggttcggcttcgtcgcctacaaggaccatgaaagtgctgcgagggcggtggagaagatgaacgaggtttcggtgcccggcagtgagaaggtcgagcaaaagtttacggtgtgccgtgcgcagaagaagagcgagcgccaggctgagctgaagcgtcgttacgagcagtacaaagctgagcgcatccagcgttatcagggagtcaatctgtacgtcaagaacctgcacgataccatcaatgatgagacacttcgaagcaattttgaatcctacggaaacatcacaagtgcaaaggttatgtgtgatgagcatggtcgctccaaaggatttggttttgtgtgctttgaaaaggcggatgaagcaaccaaggctgttgtggaaatgaacaacaaaatcatcgaaaacaagccgctttacgtcgcgcttgcgcaacgtaaggaagaccgcaaagctcaactggcctcgcagtacatgcagcgcttggccgcgatgcgcatgcagaaccctgctggcctcatggggacaatgtatgcgcctgccagcggtggattnttcctgccacaggccatccaaaaccaacgtgctgcgccgttcatgcaaacaccga

SEQ ID NO: 48269 - DNA, 795 bp, Heterodera glycines
  unsure (1)..(795): unsure at all n locations
tgtttgccggaggaggaggattactttgtgtggtctgcaattgacccgggcattggcagcatcgctcattcactgaaacatttggacgacgaacgcaagctgttggaccgtttcgagcgttttgtgtgcaaaatgattgaacccgtcgctgccaaattgggctgggaacccaaagagggagaaactatacacgttggacgtcttcgtgccctgctcctcagccgtttgtcacattttcgccatcaaccgactattcaaatggcactttccaaattcaatgccctcatcgagaaaggcgtcgatgttgtcccggacttgcgaaagctcattttccgtgccgtaggctctacaaatgatgaaaaaaatcattgctgcattgaaaaatttgatggagacatcgggctacgcacaagtggagttgtcatgtgtattaggacttggccagtgttcggacttgaaaatgctcgaggacattttcaattatggtgttattcaaggcaaaatccgcgaccaggacctttatcttttgttcgcggcaacggaaatggcaccgatggcgtgctgtggacatttcgcatgggactttttcaaaaacaatttcgcacttttgatcgagaagtacggcagcgtcaacagcaacgtgttcttgcattgctttgactgcgtgacttcgggtttctgttcgaatgccatggccgaggacatttatggagttttttaaaaagaattggacgaacattctctgaaaacattggagcggnctcttcgtcaagccgtcgaatccattaaagtcaa

SEQ ID NO: 48270 - DNA, 294 bp, Heterodera glycines
gaattatttgggctgtaacggaagagatatgaacaccgatgacagaaggctgaatgcttgggctccaattaaaaagctgaatcaataccaatcagaggaggaggaacacaaacaattgatgttcttccaacgaaagtcgcaacacattgaaaaaaagcggaaacttttggaagaaattgatttcgcattgccgaaaaaggcgcaaaagtcaaaagcaaaaacagaggaacaaaaagcaaagagagaagaagcaactgaatcaaaagataaaaaaaaaaaaaaaaaaaaagaaaa

SEQ ID NO: 48271 - DNA, 833 bp, Heterodera glycines
  unsure (1)..(833): unsure at all n locations
ccttttgcgttatgttgtgttgagcatgccccatcttttgccggaacagaccatttcgacgcgttcagaagtgcccaccaaaagggtgcctttgcttcttcgccccgtcgtcctctgctcatttccatcgacgaatgctccgtcgctttggaggaggccagcatttcgcacaatttcagtcgcctttccaagtcactcgacattctcttgggccgtgcaactgtggagcagcaattctgctactacgagctgatcctcaaggcgatgagtctctctttggacggaaaatggccacgggcactcgtcgacaaattgcaattggcctgggaacgttttgacagcgttattccccgtcgtcttcacgaggattctgtccgtctttggttgtcctccgctaatgccgccaaaatcagtgggctcgaccagcgcgacaactcctttctcattgcccacacgccgttggttctgttccgcgttgactcacgcattttccgcagtcccccgcacttgcgttgcctttgtcgttcgctgtctttttatttggccgcttcacgcgacatgaacacgctgcagttggtccgttcttctctgaacagctccaaaagcgaaattgaggagaaagaagctctgctccgttcttttggtggcactcaacgattggccgttgttcaaacatacattgaactttgtgacgacgaggacggcaccgaaattgatgacattgangagattcggcagaatttatgctcacaaatccaccaattgtttattgcggacacccatcttccaagctcgtccatttcaatatgtatcccctcaggcttgtccctgtc

SEQ ID NO: 48272 - DNA, 726 bp, Heterodera glycines
tttcggccggacaatttcctttttggacagagtggcgcgggaaacaattgggcaaaaggccattacacggagggtgctgagttggtggacaatgtgctggatgttgtgcggaaagaagcggaaggctgtgactgtctgcagggctttcaactcactcattcactcggaggaggcaccggctcaggaatgggcactctactgatttcgaagatccgcgaggaatatccggaccgaattatgtcctctttctcagtggttccatctcctaaggtctctgacaccgttgttgagccatacaatgccactctttccgtccaccaacttgtagaaaacaccgatgagaccttttgcattgacaatgaggccctctacgacatttgcttccgcacattgaaacttcagaatccgacttatggcgatctcaaccatctcgtgtctgtgacaatgtctggcgttacaacttgcctccgtttcccggggcaactcaatgccgacctccgaaagttggccgtcaacatggttccgttcccgcggctccactttttcatgccaggatttgcgccgctttctgccaagggggcagctgcgtaccaagccttgtctgtgtcagaacttaccaagcaaatgttcgatgctaaaaatatgatggcggcgtgtgacccgcgtcatggccgttatttaacagtcgcggcgatgttccgcgggcgaatgtcaatgcgcgaagtg

SEQ ID NO: 48273 - DNA, 360 bp, Heterodera glycines
atcacacatcaagcacccacaaagccagcccgacaacagcgacaacaacagcaatggcgcaacttccaccagaggacgtcgcaacaatgcccacgcataatgtcgtcttcaacgccccgttctacaacaaggccacctactacatgcgggtgatcaaccctgggacgaagcgcatcggctacgccttcaagaccaccaaaccgaagcgcatcaacatgaacccgccgaacggagtgctcggcccaaaggagtccgttaacgtggccgtctcctgcgacgccttcgaccccggcagcgatgacaccaatggcgaccgcgtgaccgtggagtggaccaacacgccggacccattcgccaccg

SEQ ID NO: 48274 - DNA, 592 bp, Heterodera glycines
catgctgtgtgcacatgatatcgaatgaaagggaacatttgtcgtctgaggctctcgaagctgctcgaatttgtgcgaacaaatacatggtgaagaattgcgggaaggacggctttacatgcgcgtccgaatccacccgttccatgtggttcgcatcaacaaaatgttgttttgcgctggtgctgaccgtcttcagacgggaatgcgcggcgcctttgggaaaccccaagggttggtggcgcgtgtcggcatcggtgatatgctgatgtcggttcgtgtccgtgaccagcatcaagcccacgctcttgaagcattccgtcgagcaaagttcaaattccccggccgtcaatacatcgtcatttcgcgcaaatggggcttcacccctttttgaccgcgaagtttacgagaagcaccgcaaggaggggcgagtcattccggacggagtcaactgccgattcctcaagcaacacggaccattgacggaatggctcaaaaatccaatctgatcaattgtacgacggatatattcccttttatatgctttgttgattaaattgttggatctataaaaaaaaaaaaaaaaaaaaaaaaa

SEQ ID NO: 48275 - DNA, 776 bp, Heterodera glycines
gttgctgcgctttggaggccgtcctcggtggtgccttacggggacgcccattccaacaaactttgggaccttttctcactcatacgctttttgcgaatttctcccttttccgaagagaaaatgtggaaggaattcattatgacttcgtcaggaacaagtgctcaaaggttgaatgttattgtgaagagtattctgctccgtcgtaccaaaaatcaaatttgtacggaaacgaaccgaccgattgttgacctgcaaccaaagaagtacgagctggtcaccctggaactccaaaaacttgaacagcattgttattcaattttgtttgaggcatccaagcagaaggtgcgcgagttgcttcgagacggtgcatttggtggctgtggcactcttcggcggtttaagcccggggcgaaaatcaaaaacccattcattgggggcggtgctcggatggccgtcgatgccaatttcaaagcttactcctgcattctttcactgctgctccgacttcgtcaggcgtgtgttcacctgtctctgaccaggaatgcaattgacattgacgcatttaaacaagacgagggtgagacggacagcgatgcggagaatttagttgcgaaagccctcgaaatgtcaatggctcaaatgggtctcgaagaagaagccctcgagagaaataaggagcgggaaaagggacgaaggcagcaaatcgaacgcctttttgagaaggaacaccaaagcaccaaagtgaacgctttgatgaaccgtttggatggagtcgt

SEQ ID NO: 48276 - DNA, 702 bp, Heterodera glycines
tattgcggaaaagcggagcggatgaatgagttattaaggcgaagaagttcatcgatgcacataatttggcatttgagaagggcgaagtgtcgttcaaagttgcgccaaaccatctgatgcattttacacctgcccaatataatcgaattcgcggcttgcaaatgcgcagcaaccgacaacggcacaacatggcaactctggcgggaaacagcagtactttgccggaaaagttggactggcgcgagaaaggggcggtgaccgagggggactgcggctcgtgttgggcattcagtgccaccggtgccattgagggagcattggcacagaaaaaagcgtcgaaaattatttcattgtccgaacaaaacctggtcgactgttcgtccaagtacggtaacgagggctgtgacggtggactgatggacagcgcatttgaatatgtgcgagacaacaacgggttggacacggaggagtcgtacccgtacgaggccgtaacgggcaaatgccaattcaaaaatgagaccgtgggcggcactgtcgttagcttcaaagacttgaaggaaggcgacgaagagcagctgaagattgccgtcgccacaattgggcccatttccgttgcgctcgatgccagcaatttgtccttccaattttacaaaaccggcgtttattacgagcggtggtgcagcaaccgatacttggaccacg

SEQ ID NO: 48277 - DNA, 711 bp, Heterodera glycines
tcttctccgctctccgttttccgctcattgtcttctccccccattttcggcaggcaaatgggaaatgtttttggctcttctgtcgctgctgctgatgaggaagacaattttgaggagcgcactcgtcaattcttcgccttcgtcaaccagggaaacattggacaattgcgtgcgctggtcgactcgctggacgcggatgagctgagcatttggctgcagatgaaccaaccggatgtccaacatgctcggcccgcactcgtgaacgcaattttgaatcggcgcacagaaacggctgttttcttgttggagaagggtgctgatccgcatcagaccatgattggccaactgaacggcttgaacatgaatgtgacaccgctttgggccgctgtcgtttttgtcaatttggagctgtgccgtgcgctgatcgcccatggtgccaacattgaaatgggcacggactctggtgaatcgccactgctgtgcgcatgtttcaatggcaatttggagatcgccacttttctcgtcgagaatggcgccaacgttaatctcgcggacactgacggaatgacgccattaattgccactacctttttgctgcgtctcacttcgccaacaattctctccgatctcaacatcaattcaagcaattccggcacactgtgtctcgatgtgtttgctgaagaaatgattttgatgggccaaatgcgacga

SEQ ID NO: 48278 - DNA, 655 bp, Heterodera glycines
attaaactgaaagtatgattattcttgagcaaacaatagggtaattgcggaacttttggaaatgaaatttaccaatgcccgaacaaacagtaaatttgataccgtcgatgttgtgttcgccgattttgatggcattttataccatgcatcaaatccggatggaggcgacaaatcaaagcttatgctgagcatttcattgaaattttacaaagagcttcaagaacatggtgcagatgaactcattcgctcgatttatggcaaatttttgtcggaaagtccagaggctggctacagcgtgtctttggtctacgatgtggctgacattcctgaaaatttcactgcgctcgttgagcaggcgtcctatctgaaacgaaactgttttgcctcggtgtttgaaaaatattttcaattccaagaaagcggccaggagggcgagaagagagcggtcattcattaccgggaagacgaaacattatttatcgaggcaaaatcggaccgggtgactgtcattttcagcacgttgttcaaagacccggacgatgtggtaatcggcaaagtgttccttcaggagttccgtgaggggagaagggcaagtcaaactgcgccacaagtgctctattcggtgggcgaacctccgttagaactgaggaataac

SEQ ID NO: 48279 - DNA, 742 bp, Heterodera glycines
ttgtgactttgccaactggcgtagtgtgctgaacatcggtgcccacaaaccgtcccatttggcattgatggagaatgccaatgtgctcgcccgatatgcgagcatttgtcagcagaacggacttgtgcccatcgtggagccggaggtgctttgtgacggcgaccacagtttggaacgatgccagaaggtgactgagttgactttggcctacacctacaaagcattggccaaccaccacatttacctggagggcactctgctcaagccgaacatggtcacccccggccaatcccactcgcccaaggccacgcccgaccaaattggtctcgccaccgtgactgccctccgccgttctgttccgattgccgtccccggcattgttttcctctccggcggccaatccgagatcgaggctacacacaattttaacgccattaacagtgtgcccgggccgaagccgtggacgctgtccttttcctacggaagagcgctgccgtcgtcagtgatcaaaaaatggaacggcaaagacgacaatctgggcgatgcgcacaaagtgttgcttgaccgtgccaatgccaacggcgacgcttagaatgggaaatccaccggcgaggaggcagccgcgtctgccgctgaaatcactttttgtggcaaatcacgccctattgaaacagaactgtggaatatgccatgaataggccccgaatccgatattccctcatcatatatttttacctgggag

SEQ ID NO: 48280 - DNA, 284 bp, Heterodera glycines
gtgaagcggtggtacaaccagagtacttttttttttttttttttttttttttttttttcgcttcttctcttcctcctcgaacttcttgcgctcctcctcgtcatgcgcttccttctgctttttctccgcctccttcagctggtcgaaagtgtccgccgcgtgttttttcgcgtcctccacagagtccgctaccaaaatgttgtcgaaaatggtgcccgacttgacctgccaaatgtctattccgatggcgccccaatcttttcgcaagtaaaggtcgtcgtccg

SEQ ID NO: 48281 - DNA, 718 bp, Heterodera glycines
  unsure (1)..(718): unsure at all n locations
cagagaaagcgattatggcgaacccttttgatgacgacagtgacgaattcattcgcaaaatccgggccggccgtggaattgaaccgacaaaagtttacaacgcccgcagcttcgcaaaacattgaggaccaaattgccgctgatgagaaggccattgagcgttacttgcaggcgtcgttggacagcacacagcgctcccgacaacagctgagctcatccgaggggttggccgagtccaccgcacgggaattgttggagcaacgggaaaagttggaacgggccgaacagaatttggacaccattcaccacaccactcagcacacacagcgcagcctgaacagcttgaagtcgtggtttggtgggctggtcagaaacaaactttcacgagcgccaaaagggttgggcacggcaaatgccaatgccaacaatcagcagcaacaactggaacagaccgtgcagcaacaacatcagcagcgtccgctgcatgcccatttggtgcagtcgtctgctgacgaatttgccggggccatcggtggcggaggcggcggcgttcancccccgcaacagcactcgctgaactcctcgtcacgcgcgtacattcagggcactcgttgggaggcgatggacgacaaaattgacaacaatttggatctgatgagtgcccatttgggccgactgagaacgtttggcgtcgcgctgggcgacgaggtgcaggacc

SEQ ID NO: 48282 - DNA, 479 bp, Heterodera glycines
gttgcccgactgggtggactaggtgaactggggcaaaaacaaagagttgacaccaatcaatcccgaccggtactgcgtagctcgtggcactccctccgctcgacgatatgtacatctccttcaccggcaagtgtcggcccgttccccaacgtgtctggcggaaaaaatcgacatggtgttacacccattcacttcaccatggcttccggagcagtgattcttaaggctttgcaatcgatcgatgaaatcaaatgggtggagaaagactgatgcactggtggactgcaaactgaccgaacagggccagaaggatctggaccgcattgcgtcacacctgcctgacagagccgaacaatgaagatttcaacagatagatggggagaacaagttcacttttctgttgttgacgcttgtgctttcgacactcatagaaacatgaaaggagttgactgttcagcggatgcggcgactattgcaaa

SEQ ID NO: 48283 - DNA, 640 bp, Heterodera glycines
tggaaagagcgggagaaaaaacgggcgaaagcgaggaaacaagtgcggttgttggcaatgaattggatgttcacgcggacattttggaggaaatgcgtggcaaggccattttcaagaagtctttcatcgcttcgggaattccttcggagtttggcaaatatcgtcctttgccatccgacagaaaatgttcccgcaaaggctgcgccagcgacccgcccccggccactcattgtcagcccggacattcttctgaaaatgggactgtccaaccgacgaaaacgagcagtttgatcagctcaaagaatggatgcgctgaggcggaggaggagcaatgcctttttgtggaacattttggcccaattccccaatacagcgaaacggacgaaaaagagaatttgcggctgcggaaattgcacgaagtcgcattagaaatttatcagaaacaacgcgcttatgttatgaaattgcaactgattgggctcaattatccgaggcatttgaatgactgtgaaaaaagaatgaacaaaaaattgctccattccaaacacgtcatcagacgaatcgcggatcactttcagactattttaaatgttcatcttacgtttttgcataatttttatgacaaaattcttaaatggga

SEQ ID NO: 48284 - DNA, 157 bp, Heterodera glycines
gtgatgactgaagtgtctaacttcatcaacaagatagggtacacacccagccaccgttccattcgttccaatctctggcttcaatggcgacaacatgttggagccgtctgacaggatgccgtggtttaaggggtgggccatcgagcgcaaagatggc

SEQ ID NO: 48285 - DNA, 674 bp, Heterodera glycines
  unsure (1)..(674): unsure at all n locations
gtgattttctttttcttacctctttgacgacaacagaagcgcaatgagtggttgggatgcgtacattcagtcattgacttccagttgtgcggagattactcgcgtggccataattggcaattcggacgcgagtgtttgggccaggactgaaggggagaacgaattcaaggcgagtgaacctgagctcaagaaacttgtcggccaattcgatgatctttcgcaagttccgtccgtcggtgccgacctcgagggaattcattacattgtgccgcgaacggatgaaaatcttatctttgggaagagggacaaaacgggctttttcgctgtgaagaccaagtccgccattctgatcgccatttacaaggacgaggaaagtgtcgtcggcgccgacgtgcgaggggcggtggagaaaatggccaaataccttgaggacgccggttaccgagccgttgctcggtttcctaaacgacttttgtgttgccaaacgaaaagtgctgagaatggctttgacttattcttccaaatgcattccttttccatcccaaatgatcacttattattttattattacacattctgtgaagtgcgcgtgccgatttcttttttattatttgacctttggatgtgaataataaaaaggtgtaacgccgaaaaaaagannnnnnnnnnnnaaa

SEQ ID NO: 48286 - DNA, 476 bp, Heterodera glycines
aacctgttgtcggttgcctcaaaaagtggtcggtgcgcgtcgttcctcgtggcgcgttatctcatccattgaacagaagactgagggctcggagaagaagcagcagatggccaaggagtatcgggagaaggtggagcaggagttgccagagatctgtcacgacgtgctggatttgctcgacaaatatctgatcccgaaggctggcaaccctgaatcaaaggtgttctacctgaagatgaagggtgactactaccgctacctggctgaggttgccaccggtgacgaccgaaacgctgttgtcgagaagtcgcagcagtcgtaccaggaaacgtttgacattgccaaagacaaaatgcagcccacccatcccattcgtcttggtctggcgctgaacttctctgtgttctactatgaaattctgaactcaccggacaaggcgtgccaactcgccaaacaggcgttcgatgatgcgattg

SEQ ID NO: 48287 - DNA, 677 bp, Heterodera glycines
tggaatttctgcgcacagtcgaaggacgtcgtgttggacaacatttggtgccgagccaattgtgcgagttcgaggcgtacaattgcttactaaaacagaaactgctgcctgccctgaaccatttattttgggtcgacaaatgcaattacggcacaattgtgcaccctctctatgcccaacaggtcaccttcccatacaacatttattacatggaaaggagacggagacgaatggacacaacagtcagagcgatcaggaagaaccaacaacagctaactttggatgcaattcaggcactgaatttactttcggcaaagttgtcagacaacaaatatttctgtggcgacaagccatgctctatcgatgcgctcgtcttcggctgtttggctccgctgctgcgcacccctttgcccaatgatcggcttcagcttcacctttcggccactccaaacctcgtccgattcgtcgattccattttgagtatttatttgccactgcccgaaaaagtgatcaaggaacaggcgatggcgagaaaaaagtggcaaaaactgaaaatggacgcccaacagacaatggaagagggccgaattgagagggaactgcgcaaagcggagaagaaggagcgcaactccatgcaccacattctgttcttcgccatcagttcaattaccatctca

SEQ ID NO: 48288 - DNA, 782 bp, Heterodera glycines
  unsure (1)..(782): unsure at all n locations
gtggtggtctgctgggacaatttgcggtttaagcagtcagaagtgtgtcaagtcgggcattctccacccctttggccacattctgcaggacggggacaaaatcggctgtcattttcagccgcagaatgacccaattactcttgcaaaaatggccgtggttggtacgcctggtgtgattttctcgatgtctcatctgaaggacgcctttttggtctccagccgtggcacttccgcacttccaatggaccgtttccaatttccgacattgcgctacgacttcaccatgcgtcaattctattccagtgcacaaatgggatcggagtttttgttcgcttgcaataacattgtgcagcgtgcccgttacgacgagaaggaagggatgttgttcactttaaacatcaacggcttttgattcgacagcgtttaaacggcgatgtggaaatcttctgccggcctcgccaaatcatttgttcgcctgaactcagcaccgtccacctgcgcaccgccaacgttgagatggaagttcagaccgacaaaaaggcctatgtgaagtacgggtcgaagcgtgtgcacgtgtcgcggagtgggatggtcgtgtcgaatgagaactgttccgcatcgatggaccacattggccgcattgtgtccgcctcttaacttaatgggccgtggtgccaaagtgtaattatgccataatgtgtctagtttctgctattcttttccttcccacaccgatgttaaagtgtactcatgtcctgaatttctgcgatctcattattntg

SEQ ID NO: 48289 - DNA, 601 bp, Heterodera glycines
acagcggactgggcgcaaccgaatttgtaacgtccaaaaatgcgcttcaattgcttagccgggcctcggaattggtgctcgactcagaaagagtgctgaacagtgaacacacgacgaatgaaatcaaagaatgtttgaaagacattaaagtttgtggacctgccgaactgagaagcattttaaaatggcgtaagaaattggttgacgaacagaaaaaggaggaaaaagcgtctaaagaaagtgtaaaatcggctgaagaaatggtggagggtgatactggcgaggagttggaggaaaatactgaattcaaagagttggaagagatcgacgatctgatcagaacagcaaaagccgaagaaaaggcaacgctgaaaaaacgaaagagaaaactgttgaaggcaaagcgcaacttggaagaacggaagaaactgaagatggtccacgagggggacgagccgacgataggcgaggatttggagctgttttctttaaaaacggtgaaaaggttatcggaacgtgcggcaaaagcggtgaagggaattaaagaagaggaggaggaaaaagagagcaatgacgaggatgacaaataaaaaaaaaaaat

SEQ ID NO: 48290 - DNA, 764 bp, Heterodera glycines
  unsure (1)..(764): unsure at all n locations
ttaattgcgtgtccctatgataaggagcagaaattctcacaataaggcacttcttggtgacgaaaaagcgaggttgggcctttctttatgtacgatgcgcccgctggcattaacaaaaagaaggaggaagggccggaaccgaaattcgaatggcaaaggaaatacaatgcaccgcgtgaagaatgggcgaaaggaaatgaactcatccaggaccaacctttcggaattcaggtgcgaaacgttcgctgtgtcaaatgtcgcgcgtggggtcatttgaacacggaccgcgaatgcccactgtatggtatgagtggaaatgctgaagaccatggctatgcaaataatccctccgatatcattcgtgatttaaatgtcgaaaagaaaacaaagactgtctctgatgtcacgaccaatgagcagattgatataaaaccgaaaattgaggtgcgcaaaagccacgaagagaagaaaaagaagcgacgccattactcatcggaagaagaggaagaggggacggaagaagaagaaaagaagccggaaccgatcgatcaggaacaattgctggtgaacatgcgtgaggagcacaatttgaagttcaagaccggcattctgattggtcttcgagcggacgaacacataaaaaaaatgtcagcgatggttggaggaggaagaggaaaaactnttgaggcttttctgaaagactggatgagaaaaacgaagaaattaatgaaaaaatcatgaagactgaagtgagcgatggctcc

SEQ ID NO: 48291 - DNA, 713 bp, Heterodera glycines
taagtttcttttcctcctcctccatacattttcgcctcctcatgtcccctccctgctccttttccccttcctccgcctcctcttcctctgacagtccctcagcagaaggccaagcccagcaaaatggccaagttttggccccccgtccattgcccacgtgggaggaaatccgtgccgcggtgcccaaagagtgttttgaaaagtctctccttcgttctctgtactatttggccatcgatttgctcgtcattggcttcctttacgccgttgtgccttttgtagagacaaatttcggactgatcggactgtttttctggtactgcttgctcggcatgtttttgtcctctctgttttgcgttggccatgactgcggccacggcactttttccgattggacatgggtcaacgacattttcggccatatttcacacgctttgctaatggtgcccttttggccatggcaaaaaagccaccgtcaacatcaccaattcacttctcatgtggacaaggacaaaggtcatccctgggtgttggaagatgactacgaaggtggcggatggctgcgaaaacattttgctaagattcccttgtccggactgatcagcctcgcgccaaagaaactcgcacaaataggagtcaagcatttgccggtgagagggacagaggctggccatataaggtggaatcccatttacactgtcgccggtctcccc

SEQ ID NO: 48292 - DNA, 709 bp, Heterodera glycines
cagctggtggcggtcagttcggcggcgctaaccaaattgctcgtggaggacctcgctccggtggtggcggaggaatgcgtcagtacgggggacaaccgcgccagcaacagaaccgcatgcctggtatgggcggaggccatcagcagcaaggaatgcgttaccagggacagccgagaggaatgcaacaacaacagcaggctcaacaaccacaaattgcctattcgtcgtatccgcagcagcagagccgtggcggcatagcaccgcagatgggtggcggagcgagtggcggtggagccaacgctggccatgtgatcacttcttcaacacaccaggagccgttgaacacacagctgcttaccgaggctaacataaccgcacaaaagcaaatgcttggtgagcgtctgtacgcgatggttgcgcgttgcttccgggatggtgatgtcgagaaaatcggcaaaatcacgggaatgcttctcgagatggaaaatgccgagattgtgttgttgcttggagacgaggaaatgttgcgtttgcgcgtggacgaagcagcaacagtgctttaccaggccacgggtcagaaggaggcgcagtaggataaatgaagtggatggattggatgaataaattgatgagtaaggaaaaatcaaaaaaattgatatgttatttggcttctttgtctgagtaaatgcttatctgttagaaaaaaaaa

SEQ ID NO: 48293 - DNA, 329 bp, Heterodera glycines
ggacctcccatccggcggatctgctgctgcactctcaaaatccgctgttgcacccatcgagcgcgtctagcatgttgttgcaggtgcaagatgcttccattcacatcaccgcggacaaacgctacataggcattatcgacgtcctcgtccgtgttcccaaggagcagggctttctgtcgttgtggctgtggctacctgaccaacgttatacgttactttccgactcaagcgctgtactttgccttcaacgacacttataagcgattcttcacgctaggagtggacaacgtgaatcagttcttgatgttcttcctcatgaatttggcttc

SEQ ID NO: 48294 - DNA, 522 bp, Heterodera glycines
tggaaaagttgggaggaaaactacgtgcggaggacaaaacgaccatcgaaggggctgtggatgaggccatttcgtggttggactccacaaggacgcgccacctgaggagcttaaggagcggaagaaggacctcgaggccaaagtgcagccgatcatcagcaaactctacgcagggcagtcgcctccgcccggcagcgaaccgccgccgactgaggagaaggacgagctgtgaacggtggaatcaccaagtgctaactgtgacgactttccttggtctatcccccttccttcccccactatctctttggtttttcatttatttatgttattggtatttttcagatcttgattctgtttttgtttttttttggatttatcctatctcatttcttgatcgagttgttgtgtggatatgtacggttttgttgactattttgtgcagcgttatatataaattctgcgataaaaaaaaaaaaaaaaaaaaaaaaaaaaaaagggaaaaaaaaaaaaaaaaaaaaaaaa

SEQ ID NO: 48295 - DNA, 758 bp, Heterodera glycines
caggaaaactctttaatgagccgggtggcaaagatgtttatgaaggcgtaaaaatcgactcagcggaaccgaggttaaccctgaaaatttcgaagcggtccttttgggcgatgagcagcgatcggagggaaagccggtgctgaaaagcactgaaaaggacaaagtgttcgtgtacttctcggaccatggcgcggtcggagttatcggattcccagcagccgacttaacggttaaacaattgactcaaacactgaaggaaatgcatgccaaaaaaatgtacggcgaattgacattttatctcgaagcatgcgaatcgggctcaatgtttgaccacactttggcgcagagtttgaaaatttacgcagtcaccgcggccaatggcgacgaatcgagctggggctgtttttgcgacaccaaatttttgcccggaaattgtttgggcgatcttttttcagtgaattggatgcaagactcggaccaggaaaatttacgcaccgaaactctgcggaaacaatttggcattgtgcgcgaagaaacgaacaaaagccacgtgatgcactacggcgacttgcaaattcaggacgaacacgtttctgagtttatgggcaaagagcaggcgcaaaagcgcaacgaacgcccaccatcaccgcacaaatttccaatgtttccttctcgagacattcccatgttcatgatggcacgccgtcagaatgagtctaagcagattcagcacaatctccgcgtggcgtgggaaaaaa

SEQ ID NO: 48296 - DNA, 596 bp, Heterodera glycines
  unsure (1)..(596): unsure at all n locations
tggatgaaattgagaaaatgattgatgttgtggacattttgcaccgagaagaagccaccattccaattgagccccttttcatttcggtggaccctgagagggacaccgccgaacggattcgcgtttattgtgcagaattttcgccaaaacttcgcgggtttaccggcagcaaagaacagatagcaaaagttgcgaaagcttttcgggtttaccattctgaggggccacggacgaaacggacggacgattacattgtggaccataccgtaatcatgtacctgatcgacccggaggggaacttccatgattattacggccagaacagacgggctcgtgaaattacaaatgtgataaaactaaaagctgctgaatgggacgcgaaaaagcgtaaggaacagttttggctgaacaaaattttacgcggttcgaacggagagggaaaagcgaatgccacggcaaaagcaatttcatgagaaaggcattttttatccgggaaaagttcaaatggacgcaatttgtcttcattttctatatattattttgcttgttttttttaattatttgccnnnnnaaaaaannaaaaaaaaaaaaaaaaa

SEQ ID NO: 48297 - DNA, 529 bp, Heterodera glycines
  unsure (1)..(529): unsure at all n locations
ttttttntttttttccncccgcagatgcggtcaaaaaaacccacactgcttcntccnanaccaaccgcggccacagcnccccaccgccgactttatttatacgacgacacatgcgaaggacaaaggctgcggagagagaggcgcttcgctctttctctacgcggaatcattcgacattctctataaacttgagtacccaacacagggatgcatccgtgccttttggcatcccgaaaataaaccaaattttggtcggtctgagcgatgggacgagcaaaatttactacgacccgtccatacagtctgagcggggccctccaatgcgtcagcaaaccgatgaaacggtcgctagagtccgagatggtccgctaggaattggtcctctccccattgactctcgaaatgttccaaccgcgctgcgaatacggtcaggaaaaggaagtgacggagtggcgcattccgacattcttgccgatgctaaccaaacagaagcggccccaatttcggcagcccgccgtaatgccaatgt

SEQ ID NO: 48298 - DNA, 713 bp, Heterodera glycines
agcgctcgaatgtacttgtacttggtgcacaaatcgtcccaattccattgacccggctcttcgtcgctttgggcgtttcgatcgcgagattgacattggtattcctgacgcaattgggcgtttggaaattctgcgcattcacactaagaacatgaaattggcggacgacgtcgacttggaaaagattgctaatgagtgtcatggctatgttggtgccgatttggctgcactgtgctctgaggcggcaatgcagcaaattcgtcaaaagatggagctgatcgacttggaatcggaaaatattgatgcggaagtcttggcgcaattggctgttactatggacgactttcagtttgcactcggtaaaaacagtccgtccgcgttgcgtgaaaccgtcgtcgagactccgaatgtcacttgggaagacattggaggccttgaaaatgtgaagagggaattacaggaattggtccagtacccggttgaacacccagagatgttcctcaaattcggaatgcaaccatcccgcggtgtcctcttctacggtccgcctggttgtggaaaaactttgcttgcgaaagcaattgcacgcgagtgccaagcaaacttcataagcatcaagggccccgaactgttgaccatgtggttcggcgagtccgaggccaacgtgagagatgtgttcgacaaagcacgtgcagctgctccatgcgtgctgt

SEQ ID NO: 48299 - DNA, 486 bp, Heterodera glycines
  unsure (1)..(486): unsure at all n locations
caagggcaacggcgccttccagaaggcatgccgttcaaggcgtaccacggcaagaccgggcgcgtgttcaatgtgaccaaacatgcgctgggcgtcgtcgtcaacaagcgtgttcgccatcgcatcatcccgaaacgcatcaatgtccgtgttgagcatgtgaaaccgtccggtttcttgctcgagtttctgcagcgatgcaaagcgaatgacttgcagaagaagcagcacaaggagggcaacgcaccgtttgtggcgctgaagcggaagccgaaggagccccggggggcgcacttggtcaaagtgaagagcaccaaagttgagcggctggctcccgtcaaattcgaaattgtcgcttgaggcattatgggggcaaacgaatgcacgagcacagaaaaccaaccgacaattgttatttttaatttgttgatccgtttcgtgttaaagaaaaagtttcgaannanaaaaaaaaaaaaaaaaaaaaaa

SEQ ID NO: 48300 - DNA, 856 bp, Heterodera glycines
  unsure (1)..(856): unsure at all n locations
taaacgaagaaacgttcagaaatttagttacctttggcctttgctcagctctttcaagtgttttaaaaccaaaatgcaaaatgctttacgtgccaaattggccgagttacagaacagcagacgaacaaaagaagaagaaaaggagcagcagaaagaggaaccaccacaaaaattagatttttccctcttcgacgactccgaattcgcgaatcgttcgtgggtcgaactcattgaagaggaggaggcggcggcgcggaagacgcaaaaaacaaaagcggcgaccgctgaaacgaccgccgcgtccgctgcccctccaattgcttctgttgctgcggtcgcttcgtcttccgcttcccccagcaataagcgacgcaacagcgaaagagcggagaaggaagagaatgtgccgaaggcgcaaaagttcgacttttccctcttcgacgactccgactttgccaaccgttcgtgggtcgacatcattgacgaggaggagagggagcggagcaagagcacggcactgtccaccactccgtccgttgtctcatcgtccgcgcccaacaaacgccgtcatattttgccaactccacaaaaaggatgggcggagccgaacacaggttggtgcacggacgaagcgacgttggaacggcgggacaaggaactgcagaagatgaaggagaagccgtcataaaggagcgcttatggcaagagccgaaccatgaaattgtggccaagttgctntcgatgggtttcactgaaaacgcagctaaaaaagcggcgctnttcacanagaacgaatcagcggaatcggccattaattggattcttcagcattctgacacactgatgtaaacgatcc

SEQ ID NO: 48301 - DNA, 722 bp, Heterodera glycines
catgaatctgagattgaccccgtccgtatcaatcaattgtatgaacaggccaaatggtccgtccttttggaggaggtcgaacacacggaggaggagtcatcattatttgcagcgctgcagttgcaagccgcgcttcagcgaaactctccggaccgcgaatctccggaacgtgacgaggtcgatgtactgcttgatgagttggaacagactttggacaccactgcctcactaagtcgccgtgatttaacatacgtgcctgagttgacagaatatctcaaatatttgaaacctaaaaaattgggttttaacaacttcaagagagcttactttacatttcgagacctttacttgagttattacaacacagctcaagatgcaaatgggcctccacttggtcactattatctcaaaggttgcgaggtcagccaggatttgagcgtctcgcaaggaaagttcaacataaaattgcaagtgccgagcagtgaagggatgtcggaactaatattgaagtgtgacacggagcaacagtttgccaaatggatggccgcttgtcgtttggcatctcgtggagagacaatggccgattcttcgtacaattcggaggttgaatccattaagaaagtgctgcagatgcaagcagggagggcagcggcagcgcaaaacggtgcacaaaacaagaagaaatcgcaaccggtgcagctgcccacggatttcaattcgga

SEQ ID NO: 48302 - DNA, 741 bp, Heterodera glycines
gcgttcctctcccgtctctcctccttccaattcgccgatttcgctgcttgcagtttctttggccgttttggctttcgtcgctttggcatcggccaatccgccgacggcacgcgaaacggcgccaaatgcacagcaaaacaatgccaattcagtggcaactggggaaattgcgaaaaatattgcggaaaagatggagcgggtgaatgagttcattaaggcgaagaagttcatcgatgcacataatttggcatttgagaagggcgaagtgtcgttcaaagttgcgccaaaccatctgatgcattttacacctgcccaatataatcgaattcgcggcttgcaaatgcgcagcaaccgacaacggcacaacatggcaactctggcgggaaacagcagtactttgccggaaaagttggactggcgcgagaaaggggcggtgaccgaggtcaaagatcagggggactgcggctcgtgttgggcattcagtgccaccggtgccattgagggagcattggcacagaaaaaagcgtcgaaaattatttcattgtccgaacaaaacctggtcgactgttcgtccaagtacggtaacgagggctgtgacggtggactgatggacagcgcatttgaatatgtgcgagacaacaacgggttggacacggaggagtcgtacccgtacgaggccgtaacgggcaaatgccaattcaaaatgagaccgtgggcggcactgtcgttagcttcaaagac

SEQ ID NO: 48303 - DNA, 659 bp, Heterodera glycines
accgcgaagaggtgttgcccaatggaagttgtgcctggtcggtgctgccatttttctctgttttgccttgctttacccgagcgtcttctcaccgatgctttccaatttgttcggcggcggtacccagcggcaacagccggcggccgcggaccgaccgatgcatccgtcgatgatggggccgaaccaacagcagcagcagcagagggaacgtgcccatcgccctcccccacaccatccaggcgcatccatgcgaatgccggacatgcacaaccaacagcagcaacaacaacagggcgggttttggagtggaaaaagcggtggttcgatggcatggatgttgcccttctacaccgttggcgttgtgtgctttttgctctacacattgttcaagtcgaagaccaaacggcaaaaacgacgtcgcgaccgaccgcttgaccttttgtatggcgacgacgacgacgatggaggaacggaggacggcttggaatatggtgttcgtggtgcgaaactccgctcggtgcagcacagactgcgcaaaacggagcaggcgatggcggacattctcagccaattggagcaaatttcggcccattcaaaggacattaatgatgacgacacaaaagcagcggaaaagaatgttaatgacccaaacattgcca

SEQ ID NO: 48304 - DNA, 493 bp, Heterodera glycines
tgtggtgggctttctccttgggggagtcggccaattgaacaaagcgcgggagcccaattttgttattgatgaccaagacacaagcgtcgtccaaatcgaggacgcgttccacactttctgtacccgcgatgacattgcgattattgtgataaaccaacacctggcggagatgatccgataccatgtggaccaacacgtggacagcatcccggacgtgctcgaaatcccctgcaaagaaatgccttatgacgcgtccaaagatagcatattgaaccgagcacgttgcctggcgaacactgacgacctcaagtcatataagaagacattacatgaaacaaattatcctttattagtcaatgaatgtgtataattaattatgggaatgacgagaacctacatacacatttcgacttttggacttttcttggtactccaaaacccagacattatgcacaacaaaatttggttttcgtcggaaacgatcgctgtctgg

SEQ ID NO: 48305 - DNA, 658 bp, Heterodera glycines
  unsure (1)..(658): unsure at all n locations
ccgtgaagaacttcggcgacttattggacactgaaaaaataaggaagtgttcggtaagttcggggagatcaccagtgccaaagtgatggaagacgctgacggcaaaccccgagggtttggctttgttaactacttggagcacgagaatgccgcgaaagcggttgagcaaatgcatggcagtttggtgcctaatgggaagcctgaccagaagttcaccgtgtgtcgagcacagaagaaaagtgagcgacaagctgagctgagacgccgttacgagcaatacaaatgcgagcgcattcagcgttacaatggaacgaatctgtacgtcaagaatcttgtggacacaatcaatgacgaaacactcagaggttacttcgactcttacgggaaaatcaccagcgtgaagattatgtgcgatgagagtggccgttcgaagggtttcggttttgtgtgttttgagcacatggaagcagcttcgaaggctgtcgtggagatgaacaacaaaatcatcgccggcaaaccgctgtatgtcgcacctgcgcaacgcanagaggaccgcaaggcgttgcttgcttctcagtacattcagcgcttggcctcaatgcgtttgcaaaacccaaccgggattttggggacgatgtacgcgcctgctaacggcggc

SEQ ID NO: 48306 - DNA, 422 bp, Heterodera glycines
tcaaaagttgggacaatgccggcgatggaaacatttgggcggtgctggtggccgggtcgagcggatggttcaattacagacaccaggccgacatttgccacgcttatcacacgctgttagcccatggagtggccaaagagcgcattatcacgatgatgttcgacgacattgccaacaacaaacacaacccatacccaggaaaactctttaatgagccgggtggcaaagatgtttatgaaggcgtaaaaatcgactacagcggaaccgaggttaaccctgaaaatttcgaagcggtccttttgggcgatgagcagcgatcggagggaaagccggtgctgaaaagcactgaaaaggacaaagtgttcgtgtacttctcggaccatggcgcggtcggagttatcggattcccagcagccgactta

SEQ ID NO: 48307 - DNA, 683 bp, Heterodera glycines
tgaagttgttgtggaattcgacttcctcggcaaagactccatccgctattacaaccgtgtgccggtggaaaagcaagtgttcaaaaatctgaagctttttatggaggagaaagacccgggggacgatttgttcgaccgattggatacgagttcgttgaaccaatacctgaaggaactgatggacggactgaccgcgaaagtgtttcgtacgtataacgcgtcgatcactctccaagaacagctggacaaactgacaaatccttccgattccgtccacgagaaaatgctttcctacaatcgtgcaaatcgtcaggtggccatcctttgtaaccatcaaagggcagtgccaaaaacgcacgaaaagtcgatggaaaatttggagaataaaataaaagagaagaagcaggagtacaaggagttgaaggatcagctgaagaagagcaaatcggtggacgagaaaatggcaaaaaaatacgaaagattgaaggaacagatcgccaaactgaacacacagcgcacggacaaggatgaaaacaagcaaattgcactgggaacctcaaaactgaactacttggatccgaggatttcggttgcatggtgcaaaaagaatgacgtgcccgttgagaaaatattcagcaaaacgcaacgcgacaaattccgctgggctctcgacatggcgaagg

SEQ ID NO: 48308 - DNA, 495 bp, Heterodera glycines
accgccttggagcactttttgatggcggaacgcgacagatcggtgttgcgcatcatgaaacgcaatcgggagctggagaacgaggtgatgaaggatgtgccgggatggaagaccggcacttggtacggcgagccggtctatttacgttgggcgacaaatggattgaaccgaatgcaatggaggtcagtcctcatttgtccttccgagactcggacttcaaccactattatcgactcaatacgctgcggcctcagcgcaaatgttaacgtggagaaaggaaggaaggcttttgactctgagtccatttgaacaaattaaggacgttgtttgcggtgtgtgcgccacaaattaattgtgctggcattgtttcgcataaatgttttgtttgtatgcgaggatcgaaaagttagcggatgagaaaaagaaggaattggccaatgagtaccggccggtgtgcgtgagggtatttggggtgaaaggacattcgggcggaag

SEQ ID NO: 48309 - DNA, 519 bp, Heterodera glycines
  unsure (1)..(519): unsure at all n locations
cttgctggagagaaagttgtgctgagtgacggtccgaaggcacaatcggaaccgttccttaaggacaaagtggcctgtgccacttgcttctgcgggcgagacccggaatgtacgcgctctccctaccaaacttaaaagatcgtacgaggaaccttagagagggaagctaaaacttcaaagataagggagcataatgcgaccatgctgataaacacctcaagccatattaccgaaaccaccacagaacttgggcctacctctagttcagaaacccgattactctcgaacttctcgagaagtacgaagtgaaaaccctttccacttgcacaactattaaaccccacggaactatcgttgccaatgacgcacgaacctaaggtcnagaaaacggcgtggagaatgcacttggtctttgtgatgaatggctgccattctatgaagcttgaaaaatcccattggctagcgaaccgacgaacgaaggataatttgataaactctcctcaatgcttatctatatag

SEQ ID NO: 48310 - DNA, 600 bp, Heterodera glycines
  unsure (1)..(600): unsure at all n locations
taaactgttctaaggaaatggctcaacttcttgctggagagaaagttgtgctgagtgacggttcgaaggtagaagcggaagtgttccttaaggacaaagtggtcgctgtttacttctccgccgggtggtgcccgccgtgtcgcgcgttcactcccaaacttaagaaattctacgaggagctgaaaaaggcaggcaaaaacttcgaggttttgttcgtctcgcgcgaccgtgctgctaaagacctcgtcgaatattaccgtgaccaccacggcgcttgggcctacctcgagttcggaaacccgaaaattcaggaacttctcgagaagtacgaagtgaaaaccattccgacttgcaaagtgataaaacccgacggaacgatcgttgtcaatgacgcacgaaccgaagttcaggaaaagggcgtggagaatgcacttggtctttgggaggaatggctgggattctatgaagcttgaaaaagcccattggcaagcgaaccgacgaacgaaggataatttgataaactttcctcaatgcttatttatatagccttaggcatttcaacattccccgataaagtaatcgcgagaaaaaaaaannaaa

SEQ ID NO: 48311 - DNA, 708 bp, Heterodera glycines
catttttgcttgtcgacgacagcaccacacagccgaaaagcgcttcttctcatcgccttcgccttcaaaacttagaagcaccaatcccaaccagaaaaaatgtgcgacgaagaagttgctgctctcgtggtggacaatgggtccggaatgtgcaaggccggtttcgcgggcgatgacgcgccccgcgcggtgtttccgtccattgtgggccgcccccgtcatcaaggcgtcatggtcggcatgggacagaaggactcgtacgtgggagacgaggcgcagtccaagcgtggtattctgacgctgaagtacccgattgagcacggcatcgtcaccaactgggacgacatggagaagatctggcaccacaccttctacaacgagctgcgtgtcgcccccgaggagcacccggtgctgctcacagaggccccgctgaacccgaaggccaacagagaaaagatgacccaaaccatgttcgagacgttcaacacgccggccatgtacgtggccatccaggccgtgctgtccctgtacgcctccggccgtaccaccggtctcgtgttggactccggcgatggtgtcacccacaccgtgcccatctacgagggttacgccctgccccacgccatcctccgtttggacttggccggccgtgacctcactgactacctgatgaagatcctcactgagcgtggttactccttcgtgacc

SEQ ID NO: 48312 - DNA, 495 bp, Heterodera glycines
tcacgttttgacattagattttgccgaaagtagaatacactggtacaactttggtgggcatggaatgctttggcggaattgtcgttgctactgattctcgttcttccagtggaacttatatatcgaatcgcacaaccgacaaaattaccatgcttaacgaccgtattgtgatcctgcgagcgggcactcaagcagacacacaggctttggccgatatcgtcatgtattatgcggaagcgcatgcgatcatggacgaagaggatgagattaccgtgcgcaacgttgccaattacgcccgcaaaatgcactacaattatcgcggacaactcaacagcacttttcttgtggctggttacgactccctcaacatgggtcaactgtatgtcatcccaggcggaggatacaccacgcggcacccttattatacgtctggcagtgggtcgtcatacatcccagaatatctccaaaaccaatggaaggaagatttggacggag

SEQ ID NO: 48313 - DNA, 614 bp, Heterodera glycines
ccgactccattggcggagaaagaggcaacggagagtggcgcgtgttcagcggaaatgagatgggcattctgctgacgtggtgggcgtggaccaattggcgtgccgccaacccaacggcggactcttcgcgggtgttcgtcctccattccgccgtctcttcccaaatgggcgccacaatggccaaaaaggagggcttcaaagcggcgcattcgttgacgggcttcaaatacatacgcaatttggcacacaaattgcggtcggaaggcaacaccgttattgccgcctggggggagtccattgggtttactcccggcacaacgctggacaaagacggcgtttcttccgccgcggtctttgctgaaatggccaattggctgcgcacccaaaaaggcgtttcgctgcgtgaacagctcttccgcctcttctccatctacggctttcacctccaacgcaattcgtattggggggtcaaatcgacggaagtgacgaagaaattatttgcggaccttcgctccgattatcccgaaacgattgggcagaatttcgatgtgaaatttgtgcgcgacttgacgacaggttatgacaacgctcaaccggatgacagggccattctg

SEQ ID NO: 48314 - DNA, 762 bp, Heterodera glycines
  unsure (1)..(762): unsure at all n locations
gggcacaaacatccgcccgtctgtttttcgactttgcacatctcaagcagatcactggcggcgaatacaccaccaaaccgttacaaatcaatcggttgggcggacggtgtccaattacgaggaaaaagctgtgcatacacatcggtggcggtgtcaagtttgactatttcatgctcaacttgcacccgcgcggtccaaccgttgccgaccaaacgtacgacgagcgcgtgatcgaagtgcgccgtgacccaaaccgaacgccgtacattgcgctagtggcgggtgtcaagggaaagcgttggatatacgccacgcaaaacatgcaggccggtcaaatcatccaaacaacgtgccacatcccggaacggccggtcatcggctgtgagggcaacgcctacccattgggcgctttggtcgaagggacaatggtgaattcgattgagcttcatcggaacaacccgaattcacacgtggtcatcaccgaagcgggcggttgcgccgaaattatccgacacatggacgaattcactgttgtccggatgccgaacaaatatgagtacgcggtgcgtaaggaatgcatggcnggttgttggaaaactgtcacacgtggactgggaaaaaaagcagtggggctctgcccaaatgcatcgtcggtttggctttcgcatggccagcgggcccagcaaacggcgccgtgaccaataccagggcaagaaacatccgcgtaatccgcccctgtgcaccattgacggagtgcgaccg

SEQ ID NO: 48315 - DNA, 748 bp, Heterodera glycines
  unsure (1)..(748): unsure at all n locations
cattctcttctcgccaagccttctccgcatttgtntaagccgccggttctcctcaacaaataacacacaaccatcatgtcggaaaagaaggtcaaaaaggtgaagaagaagtccaggaccggctccgaggcgagctccttcgaccagaagaccatccaggagttcaaagaagcatttggcattatggaccaggacaaagacggagtgatcagcaagcaggacctgaaggacttgtacgccacactcggagttgtggcgagcgactcgcagatggacaacatgctcaaggaggcaccggggccaatcaatttcaccgttttcctgacactgttcggagaacgactgactggcactgaccccgaggcgacaattatcggcgcctttcaaatgttcgacaaaactgactgtggcgaaatcacagaagagacattgatgaaaattctgaagaacaaacggggggagccattgacggaggacgaagtgcaagggatgtacaaagggaaccctccaattagtggaggcaaagtggactacaaggcattcgcgcatttgatcacgacaggcgcagcggagggagttggccaaagtgggctaagcggggccatggacggacgggnagaaanganntgncnngggccnangccaaccagtgacctgccgattcgggggaaaaccgatcatccatcccgtcgttctttccatccttacgatcgatcacccttttccccctcgcccattgtatctcctt

SEQ ID NO: 48316 - DNA, 782 bp, Heterodera glycines
  unsure (1)..(782): unsure at all n locations
ttctgtagtccttaagcttaaaaaacagacatcattcagtattatttataagaacaccaaaaatgcgtgaagtgatctctattcatgtgggacaagcgggcgtgcaaattggaaatgcttgttgggaattgtactgcttggaacatggcattcagcccgatggaaaaatgccatccgaccaaaacaaccaagacgattcgttcagcaccttcttctcggaaacaggcaatgggcgtcatgttccgcgtgcggttatggtcgacttggagccaacagtgatcgacgagatccgcactgggacttacaagcatctcttccaccctgaacagctcatcactggaaaagaagacgcggccaacaactacgctagaggacattacacagtcggcaaagaaatcatcgaccccgtcttggatcggattcgtcgcatcgcggataactgcaccggacttcaaggctttctcatcttccattcgttcggtggtggcactggctctgggttcacatcgctgcttatggaacgtctctctgttgactatgggaagaagtctaagctcgagttctccatctaccctgctcctcaagtgtccaccgctgtcgttgagccgtacaattcggtgcttactacgcacacgactctcgaacactctgactgtgcatttatggttgacaatgaggccatctacgatatttgtcgtcgaaatttggacgtggaacgaccttcttcaccaatttgaaccgtntgatttctcaagttgtctcttcgataaccgcttcacttc

SEQ ID NO: 48317 - DNA, 441 bp, Heterodera glycines
  unsure (1)..(441): unsure at all n locations
ttacttggttgagtaccgccagaagcagcgccaattggtcgcgttgaaacgggaagcgaagaaagtgggcaattactacgtgccggatgagcccaaactcgcatttgttgtccggatcaagggaatcaacaagatccatccacgccctcgtaaagtgttgcagctgcttcgtctgcgtcagatcaacaacggcgtattcgtcaagttgaacaaagcgacaatccagatgttgcgcannttgctnngacccnngtacattgcgtggggctacccgagtcagaagatcattcgccagttggtgtacaagcgtggttatgccaaggagagtgggcagcgcattccgatcacggacaatggccattgttgagncgaaacantggggcaaatcggaccgtgaatcctgtgttgggagggaccatggattcaccagattttgacagt

SEQ ID NO: 48318 - DNA, 691 bp, Heterodera glycines
tggagaggaaggggacaaaagaaaaagaagaccagaagatcaggagaaatcacggaggatgaagagctgaacaagaccaaaccgatttggactcgcaatcccgatgacatttcaaatgaggagtatgcggagttctacaagagcttgtcaaatgactgggaggaccatcttgctgtcaagcatttcagcgttgaaggccaactcgaattccgtgctctcctcttcgtcccccaacgcgctccgttcgatctctttgagaacaaaaagagcaagaatgccatcaagctttatgtccgtcgggttttcatcatggagaactgcgaggagctgatgccggagtacctgaacttcatcaaaggagttgtcgactctgaggaccttccgctgaacatttctcgtgaaactttgcgacaatcgaagatcttgaaagtcatccgcaaaaaccttgtgaagaagtgcatggaccttttcgaggagatttctgaagacaaggacaacttcaaaaagttctacgagcaattcgcgaagaacattaagcttggtattcatgaggactcggtgaatcgtaaaaagctctcagactttctgcggtactacacttcggcctccggcgaggaaccatgcagcttcaaggactatgtttcgcgcatgaaagagaaccaaacatgtatctattacatcaccggcgagt

SEQ ID NO: 48319 - DNA, 673 bp, Heterodera glycines
tggggcggaacattcttggttgagtaccgccagaagcagcgccaattggtcgcgttgaaacgggaagcgaagaaagtgggcaattactacgtgccggatgagcccaaactcgcatttgttgtccggatcaagggaatcaacaagatccatccacgccctcgtaaagtgttgcagctgcttcgtctgcgtcagatcaacaacggcgtattcgtcaagttgaacaaagcgacaatccagatgttgcgcattgctgacccgtacattgcgtggggctacccgagtcagaagatcattcgccagttggtgtacaagcgtggttatgccaaggagagtgggcagcgcattccgatcacggacaatgccattgttgagcgaaacatgggcaaatcggacgtgatctgtgtggaggacatgattcaccagatttggacagtcgggccccacttcaagcaagtgaccaactttttgtggcccttcaaactcagcaaccccgtgggcgggttcaagaagaagtccaaccattttgtggagggaggcgactacggaaaccgcgaggaccaaatcaacaaattgcttgaaaaaatgatctaatttcggaaacaattgcgatgagttgatgtgcagcggacggcacgcttttgttgttgttattttacagataaactttttttgg

SEQ ID NO: 48320 - DNA, 613 bp, Heterodera glycines
cacttactttattattctattgcgctattcttcttctgcacacattaaacaacgacgcatgccggaggaactggtggcgctcagtcccggaacgcgtgtctccggccgctggaccatcatcaagaagcttggggcgggtgcgtttggagccgtctacttgtgtcaagaccgagatggaaggacaatggcagcactgaaaaccgaaccgatcgacgctcagcgaccactgctgtatatggaggcccacgtgttgctcagcctgaacgaacttcgatcaaacagtggacgccatttttgccgttgtctggaccttggacgcgatgaacaaccggatgccgattctggacagacgatggagttcaactacgttgtcatgtcgttggttggccgtccaatggacaaactccttcacgaatccggtgaccgcttcagccccggaactgcgatcggcacttcaattcaacttctcaaagcgcttaaggcgttgcacagcgttggatacctccatcgtgacattaaaccagcaaactcggccatcggcacgcctgagacgaacgaacagcgccttctctacctcctcgactttggaatggcgcgcaaatatgtcagagag

SEQ ID NO: 48321 - DNA, 421 bp, Heterodera glycines
acctgttcgggccccctgtggttgggtgtacgccattctgaaggtgctcgccgaaatacacagcgaaccggacctgaagctgaacttgcgttttgaaattgaagtgctctgcaaggagctgaacgttaacctgagaagcattgaggttggcagctacctgaaggagcagcgacgtttgcccagattggtgccgccctccaaacttggcacagccgcagcatcttcaacattggcacaatgtcagttgccgccaatccaaccaccgcacattggcgctgggatttcgtcacacagcacggcagattatacgccaactgacatagcgaacatcctcgctgaaatgagcatctcccggaaatattcaccggccagttatacgcccggcggatcgcaacaacaagtttcatcaataacagcccat

SEQ ID NO: 48322 - DNA, 746 bp, Heterodera glycines
  unsure (1)..(746): unsure at all n locations
tctgcagcctcctgtggtcctttgcggcgacatccatggccaatttcgggacttgctgagaatcttcaagacgatgggctttccgccggacaagaagtacctcttcctcggggattacgtcgaccgcggcacgcaaagcctggaaacaatggtcctgctcttctgctacaaagtgaaatatccggacagtgtcatccttctgcgcgggaaccacgagtgcagcaacatgaaccgagcctatggcttcttcgaagaggttgaacgtcgctatgggcagatggatgcttacgctctttggaaccacttcaaccaaacattcgcatggctcccttacgtcggattgatcgggaacaaaattttatgcatgcacgggggcatctcggacaaattcaccagcctggaacaactaaacgatctgcgcccgacgaccgaaccgccaaacccgtcacttgagattgacctgctctgggccgatcccgtgcctggcatccaaggagttcgtccgaacaacagaggggcgagcgtgcaattcggcgaagacatggtccacaaaatctgcaatttgcttggcgtcgacttaatcatccgggctcatcaggttgtccaaggtggcgtcgaattttttgctgatcgccgactcatcacactgttctccgctccacattacgagaatatgcacaacacgggagcaatcatcgcaattgcgggaggatctcagctacaccgttcatacctttncgccattg

SEQ ID NO: 48323 - DNA, 806 bp, Heterodera glycines
  unsure (1)..(806): unsure at all n locations
tctttctgccttttgctcgnccacaacacatacatttccctaacgaccttcgaccgactacgacacgacgcgtacgatgaacgaggaatactgcttctctacttcgactgttgttgcacagagctgggcccaaacaaacttccgaccagtggacgagcaaccgaacagccttgtggacacgctcatcgccaaattttcgtgcacgactttcgagcagttcacttccgaagtcagtgctcaggacattcacaagctttgcgatgtcaccgtcggtgttctccagcaacagtcaatgctcatccatctgcagcctcctgtggtcctttgcggcgacgtccatggccaatttcgggacttgctgagaatcttcaagacgatgggctttccgccggacaagaagtacctcttcctcggggattacgtcgaccgcggcacgcaaagcctggaaacaatggtcctgctcttctgctacaaagtgaaatatccggacagtgtcatccttctgcgcgggaaccacgagtgcagcaacatgaaccgagcctatggcttcttcgaagaggttgaacgtcgctatgggcagatggatgcttacgctctttggaaccacttcaaccaaacattcgcatggctcccttacgtcggattgatcgggaacaaaattttatgcatgcacgggggcatctcggacaaattcaccagcctggaacaactaaacgatctgcgcccgacgaccgaaccgccaaacccgtcacttgagattgacctgctctgggccgatcccgtgcctggcatccaaggagttcgtc

SEQ ID NO: 48324 - DNA, 757 bp, Heterodera glycines
  unsure (1)..(757): unsure at all n locations
caattccttcggtcggctcctccacattctaaattcaactccactgcttgggattggctgacggaatatcaaagggacgcagcacctattccgatgaatattttatgcagagcatgtcaagtcggtcgttcctatggactcgtttcccactgtcgaacttcgtccaaatggcaattgagcagcttgggtccacatatgccaatgacaaaatgcaaaattattttacttttttggtgtctttgttcggcattttgattgaaaactcgacagctgacggaactgttgatgaccaactccttgccagattgatgccgtttttaagcgttgcattgaagtccaaattggaagccttcaaatgtgccggcattatgttgctgatttgtttggcggtgaacgttgcgacgcttgacaatgagacggttcaaaatgcactgaaattgttactgtacaaactccgtcccaacacttttccgttggtgcttcgggcggtgtgtgtgctctgtcagcgattgtcgttggacactctgccgaggaatgcaacattgcgaatcgtctacaatgatgacgaattgaaagcgacgacggagatccaaaaattgatggaactcttcgacttgagtcattttctggtgcctttttggcggattctcgttgacgcatacagaaccggagaaaacgaaacatggcgtgacgcctatctgacgatgctcctcaaaacgatggacttggangggaatggacagattccaagcagaaa

SEQ ID NO: 48325 - DNA, 264 bp, Heterodera glycines
tcaggaagtgctttttgacgaggctgggaaaacggtgtgcggagttgcgacgggcgatgttggaattacaaggacggaagcccaaaggagagctttgaacgcggcatggaactcaaagcaaaatgcacaatttttgctgagggctgtcgtggccatctgacaaagtcagtcattgaaaaattcggcctcagtgagggcagagacccgatgacttttggaattgggctgaaagagctgtgggaaattgacccgtcaaagcatcgg

SEQ ID NO: 48326 - DNA, 523 bp, Heterodera glycines
ttcttcttctgcaacacattaaacaacgacgcatgccggaggaactggtggcgctcagtcccggaacgcgtgtctccggccgctggaccatcatcaagaagcttggggcgggtgcgtttggagccgtctacttgtgtcaagaccgagatggaaggacaatggcagcactgaaaaccgaaccgatcgacgctcagcgaccactgctgtatatggaggcccacgtgttgctcagcctgaacgaacttcgatcaaacagtggacgccatttttgccgttgtctggaccttggacgcgatgaacaaccggatgccgattctggacagacgatggagttcaactacgttgtcatgtcgttggttggccgtccaatggacaaactccttcacgaatccggtgaccgcttcagccccggaactgcgatcggcacttcaattcaacttctcaaagcgcttaaggcgttgcacagcgttggatacctccatcgtgacattaaaccagcaaactcggccatcggcacgcctga

SEQ ID NO: 48327 - DNA, 803 bp, Heterodera glycines
gttaacgacgagcgacgcctgaaattgcgcgcggaatggaacgcccagaattgccaagacatgcacaaaaaggccatctacggactgtttctcggctttgactgtcctgaaataaatggcaccatcgaggattggctttgggccaaattgttccattgtaaatttgccgttgacccggcacgggcacttcgccaactccaaacgacactttgcactcagcatggcgaacgctattttgttggcgaaggtggcagccatttgatttatttttccgtccttttgttcaccggtcaaatcgaaagggccgtgcatgtgctgttcaggtccgaatacattgttcatgccgtacatttggctattctggcccatcaattacgtttgctgatgaccgtaccaaaagtgtccgatgagttgttgaccaccgatgtgcatgagccgagtgtttgtcgactgaatttggcccgtcttttgcttctctttgtcaaggactttgaattgagcaatatcgaatacgcaataaattactgttttttgcgcgcgactttaagttggacacaccttccgcggacaatgccacaattagacaagaaggtcggagtgtttttgtggctgctgtcagccgaatagtgttcatgtccggccatcgggaagcgattttgggccgattggactctcaggggaacagggtccccggtctcattgacaaaattaaagacgccatggacatttgcgaattgattgacagcattgccttcgacactcatgtccagggacactctcttgctgcgtgtcacctttacgca

SEQ ID NO: 48328 - DNA, 627 bp, Heterodera glycines
  unsure (1)..(627): unsure at all n locations
atatttcgtgccctgaacacttcactgtctgctactgctgtacaacaaaatgccccgtcatcgtgcaaagcctcgttcttttcatgccggactgaaattccccgtcggtcgtgtccatcgcaagatgaagaagggtccgtatgccaaacgtcttgcgaacggagtgccggtctacatgactgctgtgctggaacacatcacgggcgagctgctcaagattatcggcgatatcacgcagtccgaaggcatgaagcgtctcagtgcatttcacattcgatctgcagcgcgcgaaaacgacgagttgaggaagctgttctctggcgtctctcttgccgaggtgtgcgtgctgccggagctcgaatcggatgtggagcaatcatcggaaggaagtggcgagtccgactccgatgaaagtactgaagggagcgcgagcggaagtcaggagggtggncggtgctgctggtgcgcagcaatgagaggaggattcattctcgagaccgccgtgataacattgacttccaatttaaaagaggatagatatctctgtctgtgatatatatgtttattgtaaatatgtccatgtctctgtgacattgccttcttgctgttgaataaatatattagcac

SEQ ID NO: 48329 - DNA, 254 bp, Heterodera glycines
  unsure (1)..(254): unsure at all n locations
ggacaagaaattgtccttaagcctattattaacattttctaaaatttccaatgggctggtggcaaaggaaaagcgggcaaggacagcggaaaagcaaagtctaagaaaatcatctcgcgcagtgccagggctggcctccaattcccggtgggacgcatccatcgcttcttgaagaagcgcacaacaagcaccggacgagtcggcgccaccgccgccgtgtacagcgcagcaattctggagtatctgacggncga

SEQ ID NO: 48330 - DNA, 724 bp, Heterodera glycines
  unsure (1)..(724): unsure at all n locations
cctagtttttttntctgaagaaatgaagcagccagaaccaataattaacaaagaaaatcttcgcccagccaatcagccaagcaataaaatgcatgaaggaataaattattcggagttcggaaaggaatggaacgaaaaacaatggaccctttctgactttgacattggacgtccgctcggcaaaggaaaattcggaaatgtttatttggcgcgcgaccgaaagtatcgcattccggtggcgcttaagatcctcttcaaatctcagctggtcacagggaatgtggagcaccaattggtccgtgagatagaaattcatgcccacctcagacacccgaacattttgcggatgttcaactattttcacgacgataagaaagtgtacctcatattggagtacgctcttcatggcgaattgctcaaagttttgcaaaaaagtcgtcggttctctgagtcaacttctgcccagtacatctttcaagtgtccgatgcgctcaattattgtcactcaaaaaaggtcatccatcgtgacatcaaacccgagaatattttgctttgtgccgatggtaaaattcggattgccgactttggttgggctgtccacgccaaaaataggcgtcagacaatgtgcggcacacttgattacttgccacctgaaatggtcttgaaacgacaacacgatgaanaggtcgattattggtcagtgggcgttttatgctacgaattt

SEQ ID NO: 48331 - DNA, 637 bp, Heterodera glycines
catcttctgtagtcctaaagctatacaaattccctttgcctaacttgcctcttcattggacttctgtggacactcgcaacgcacttttgtgcgccgccgttccttccattggcgccttcgtgggctcgacgatggccatcaaagatcaggaattggttcaatttctcaagaatcaaaactttccttctttcgcccgttgttgcaaatacaattatttgctggccaacactgccgtcaccattccgttcggttacgcttcttatttggtctacaaaattggaggaggttttgattacacggacacgactgttgcattgggactgtacggggcgacggtgctcagcggctgttttttggtgcccgtgctcaagaagcaggatactaaggcgctgactgccaacgctgttgtccttgccggactttccgtcgccacttctgtggctttctacaacatcgacaagatttccgcttattggaccatgcccttcactctttgggccattttctgcgctggacttacggtgaaggcttgaaatgtttgaagtcggctgcctttttctggattgtcattttatgttaactcatcttttgttgagttaggaatattttacttccaagtaaattgtctcgaccaaaa

SEQ ID NO: 48332 - DNA, 695 bp, Heterodera glycines
agatgccgaattgtggacggagttgtgcaaaatttgcggcaacaattgcagtatttctggccaatgaagaggacgaggaccaacagcttgacgaggaggacgaagccgcacttttgtccgccttcagaaaaatggttgcgttcgccagcacaatcgacgtgcctgtaaatgtcgaattttgggacatgtgcatggctttgtttcaaaattcgcatcgatttcggtcggctgatttggttgaaaaggcgatgcttttgtgctttcttcttctcagctgggaaatgaaacgatttgtggcggcacaagaacatggagaggagactatcgaaacattgaagaaaaaacgcgaccaatttttgaggacgacaaagtccattctgcgcgacttcgctattggcgttcatgtgcatttgtgacattttgattttatttaattggaaacttgctgctgacaatggccctgaccatcccatccattctttggcaattaaattggacagggaaatggcctttcggctcggtgactttgtcatggacaatgtcttcgtgttggaagagaacgattctgttcgtgatctgaatgagcctgagcgaattcaattaatggccaaacgacgcaacattctcgcgcagtacagcaaactgttcatttgtggcttattgccgattatcgaaagcgttggcattcttaggca

SEQ ID NO: 48333 - DNA, 429 bp, Heterodera glycines
  unsure (1)..(429): unsure at all n locations
gtgtgaaagccgcggaacaaatggcaacctcaatgnngttggtcgtcaattataaaggttatgtatcaacctatgcgatgttcgagaagtacaacgtttccatgatcaatgaagagggcgttggtggttcaggaggtgaatatgaggttcagaagggatttggttggacaaatggtgttattttggatttgttggacaagtacgggtccaaaatctccgtctccggtgcggctgtccccaacggcgttcgttttcttcctctcgctttgattgtgcttttgttcatgaccgtagttgaaattgctattgcacaatgtttttggtgtatttctgggtaattctctgatactgacgtaattcatcttttttgtatcatcatgcattatcataaactatcaataacaaaaaaaaaaaaaaaaaaaaaaaaaa

SEQ ID NO: 48334 - DNA, 703 bp, Heterodera glycines
gcttttcgacgacagcacacacacgccgaaaagcgcttcttctcatcgccttcgccttcaaaacttagaagcaccaatcccaaccagaaaaaatgtgcgacgaagaagttgctgctctcgtggtggacaatgggtccggaatgtgcaaggccggtttcgcgggcgatgacgcgccccgcgcgatgtttccgtccattgtgggccgcccccgtcatcagggcgtcatggtcggcatgggacagaaggactcgtacgtgggagacgaggcgcagtccaagcgtggtattctgacgctgaagtacccgattgagcacggcatcgtcaccaactgggacgacatggagaagatctggcaccacaccttctacaacgagctgcgtgtcgcccccgaggagcacccggtgctgctcacagaggccccgctgaacccgaaggccaacagagaaaagatgacccaaatcatgttcgagacgttcaacacgccggccatgtacgtggccatccaggccgtgctgtccctgtacgcctccggccgtaccaccggtctcgtgttggactccggcgatggtgtcacccacaccgtgcccatctacgagggttacgccctgccccacgccatcctccgtttggacttggccggccgtgacctcactgactacctgatgaagatcctcactgagcgtggttactccttcgtgaccac

SEQ ID NO: 48335 - DNA, 705 bp, Heterodera glycines
gaagcatgccgcggaacatttggcatcgacgtggacacgcttcgggagcaaaacatgtattcggagggggacattacacattacgggatgcatttgcaccaatgcaacattcgccgatgttggacagaatgccaaaaattggcaaattacgaccagcgaaaattgaagctccaagagtgcaattccaggaataaatttttgaaacgaggcatttacatggttccgacaaagtttggcatagcttttggtttcaagcgacttaaccaggctggagctcttgtcaatgtgtacactgatggttccgtgctaatttctcatggcggaatggaaatgggccaaggattgcacacaaaaattctccaaattgcttcaaggtgtcttggaattgacgtttcaacgattcaaatcattgacacggccaccgacaaagtgccaaatgcgagcgcaaccgctgccagcgttggaagtgacgtcaatgggttggctgtgaaaaacgcatgcgaaattttattaaaacgattggagccgttgagaagcgaactgccaaaagaagccagttggaaagatttggtgatgcacgcctattccaacagagtgcaattgtctgcgactggatttgctatcattcattctgagcctcctgatttcgtagaaagtcgtggctccgaatcgtacagttattgtgtttatggggtcggatgtgcg

SEQ ID NO: 48336 - DNA, 621 bp, Heterodera glycines
tagggaagattcacgacggcgattttctaaagtgactcgaggcgctttgcaatggccttgtcggaatttatgctgaaccgcgctatggaacttctggacgattttttcgcatcagtgacattacaaaaccaaacactggaaatggtcttaacgcggagaacacattcatcacacaccaagtcttttggaagatcagcgtcaaacaatatttcgaggatacctatcggaaaacgcttcagtaccctaaagcaccactcctcgtcaattatcgcagaattggggacccggcgtattatcccatggaggtttgctttgttttggatggtcaacgcgtcaaaagttctcaacaaaatcctgagcaaattcgtgaaatgatcaaagagactgccattccgcccaccgtttgcgagtgcacaacgaacgggtgaaggagtcgcttcagttggtcaacaacgaatacttgacaaaagcgtccgttcattttgacacaacgccactccatgtcgattaccgtgttcttggtccgccagcaactctctatcggaacaaccatcgtgtcactcctgccacgtcaaactgtgaatggcgtccgggtgacgctttggtgaatgcccaaattgg

SEQ ID NO: 48337 - DNA, 380 bp, Heterodera glycines
catcgtctgcaactttaatcccacgcagcgacgtgcccggcgcaacaatggcaagagaggactacggcttcgatgcaacggcggcggcagcggcggagcagtctcggccttcggcaaccacttcaacgccatattggcagcacgactccttggacatcgccctttttccatcatccggaaggtcaggcaatcgcctgtccaccgcttcacggatgagatcaccgacgaggaactccaacaactctgcatggcggcaacggacgtcttcagaatgcagccgacgctcgtcaggattcagccgccggtcgtcgtcgtgggcgacatccatggacaattcacggacctgcagaggatcttcgacacgcatggctaccctccag

SEQ ID NO: 48338 - DNA, 726 bp, Heterodera glycines
  unsure (1)..(726): unsure at all n locations
gctggccacaacacaacatttccctaacgaccttcgaccgactacgacacgacgcgtacgatgaacgaggaatactgcttctctacttcgactgttgttgcacagagctgggcccaaacaaacttccgaccagtggacgagcaaccgaacagccttgtggacacgctcatcgccaaactttcgtgcacgactttcgagcagttcacttccgaagtcagtgctcaggacattcacaagctttgcgatgtcaccgtcggtgttctccagcaacagtcaatgctcatccatctgcagcctcctgtggtcctttgcggcgacatccatggccaatttcgggacttgctgagaatcttcaagacgatgggctttccgccggacaagaagtacctcttcctcggggattacgtcgaccgcggcacgcaaagcctggaaacaatggtcctgctcttctgctacaaagtgaaatatccggacagtgtcatccttctgcgcgggaaccacgagtgcagcaacatgaaccgagcctatggcttcttcgaagaggttgaacgtcgctatgggcagatggatgcttacgctctttggaaccacttcaaccaaacattcgcatggctcccttacgtcggattgatcgggaacaaaattttatgcatgcacggnggcatctcggacaaattcaccagcctggaacactaaacgatctgcgcccgacgaccgaaccgccaa

SEQ ID NO: 48339 - DNA, 674 bp, Heterodera glycines
ggaagaagaaattgaaaatgtgcacggaacggaagaaaacgaaaatgcgatggcggaaaatgaaaatggcgggaattctgttgaaatggcggacgaatccgaattggaccctttggatgcttatatggcagaaatttcccagaaaaacaaaggcggcgatgagaagaaggcgcgagttctggtcataggcgccgtatcaaaaagtgcaccaaacaaaggcgacatcgtcgaacctgaggatgagacggttccgataaccgacgaattggacattgagcaaacggcctccagtttattggccaaagggcgaatgctcgcacaaactgaccatacaaaagtctattatcgaccattccgcaaaaatttctacgtggaagtcccagagattactgcgatgtcgaaaaaggaagtggacgaatatcgcaaagaattggaagagatcactgttcgtggcaaaaatgtgccaaagccgatcaaaagttggtcacagtgcggagtcgaccttaaaatgctcaacatacttaaaatccataattatgtgaagccgaccccaattcaagcacaagcgattcctgccattatgagtggacgagatttgattggaattgcgaagaccggcagtgggaagactctcgcctttctcattcctatgttccgccatgtgatggatcagc

SEQ ID NO: 48340 - DNA, 269 bp, Heterodera glycines
  unsure (1)..(269): unsure at all n locations
tcatttcgacctgaatgtacgctgcggtttcttcttcgcgtccgatggaagattggaaatctgagttagctatgccagacaaggaccttcgatacaaaacatctgatgtgactgcgactaagggcgttgaatttgaggaatttgggctcactcgcgaccctcttaaaggcatttttgagaangggtgggagcatccaantcccggtcaggaaccgtnntttggaattgcccttcccggcacaaaaattttcccttccccccaaaagggc

SEQ ID NO: 48341 - DNA, 624 bp, Heterodera glycines
  unsure (1)..(624): unsure at all n locations
tttgggacactgcacgccaggaatcctttcgctcctcacccgttcctattaccggggcgcggctggcgctttgctcgtttacgacatcactcgacgcgacacgttcaaccatttgacctcgtggctggaagacgctcgtcaacactccaattccaacatggtgataatgctgattggcaacaaaagtgatctcgaagcgaggcgtgaggtcaaaaaggaggagggggagcagttcgctcgcgagaatggacttgtctttatggaaacgtcggcgaaaacggctgccaatgtggaggaggcattcattgatacggccaaggaaatttacaggaagatccaggagggcgtgtttgacattaacaatgaggccaacggcatcaaactcggtcctcaacacccgcccagttcgccaagctctcccggtggtgcgccgttaggacgtgcgagcaactgttgctgaatttgaccaacggaatgcgaaagtgaaaaaagaccgcaccgtcagaaactcacgccctcccccccccccttcccctccctctgtggataaatcaaagatttctcacaaatctgtatctttgacaaatttgtcgatcaagtcagcatcataaatacctattaant

SEQ ID NO: 48342 - DNA, 251 bp, Heterodera glycines
gatcaacggttggcacgcatcgaacggaccggccctatcacttttaggctatcgcaaggcggtgaatagggacgttttcgggggacaaatgttcgcgcaggcaattgccgcggcagaagcaacggtggacggcgacgaatttgcaccgaacgcggcccattcgatgttcattagaaaagcattcattgaccatcccatcgaatatattgtcaccagaacgcgcgacgggcgttcattttgcactcggacag

SEQ ID NO: 48343 - DNA, 650 bp, Heterodera glycines
ataaaactgggactgagaacccatgggacgaagaaaagcgcaatcagattctccaaccgcacatgtgatggtcgaaagtcacgcatttatgacggaaaagtgtcctcgtttcgagttgaaccgaacaatccatttgggaggtgaatcattctcgattgaagacctgttgggccaaggcggatttgcgcgtgtttacagggccaattcacgtgaagatggttgcacttatgccatcaagtacgaatccccggcttgcccatgggaagtgtacatttgtagcgcactcaaaagacgcattccatcccaattcgctgcttatctaatggaagtgagagacgcgtacattttcaaaaatgccagtgccattgtttacgaatatttcccaaaagggacacttttggatcttaccaatgtctacaaaaagaacggaacggtggtgggcggtcttcttgccacttttttcggcattcatttggcacgtgcgctgcgccaagtccacgagacggccaacataattcacgcggatgtcaagccggacaacgtcatgctgttgacggctgccttgaatgcacatgattcgctggacaatttgctcaaacccccgtgctgaagctaatcgactgggggcgatccatcgacatgaaccattt

SEQ ID NO: 48344 - DNA, 751 bp, Heterodera glycines
  unsure (1)..(751): unsure at all n locations
atcaaaagtgttttgttgaaaatggcaccacagtcngcagataatacaagaaactcactttgcaatcgaagacatcatgatgaaattaggcgactatgtcagccaatggacgcgttaccaggcactttgggactttaacaggaaatgctttttgagcgacttggaacggacttgtgcaattggatgaaggtgcttttggacaccaaaaaagctcgaacaatggtcgactctccggaaacgcgccacaatatttttccgtttgtggtcgacttcactcgggtccaatcaaaagtgtccataaaatacgacttctggcaacgtgaagttctcaataaatttggaagcgcattgggctcatcaatgcagcagtttttttccgacatctcaaaagacagacatgagttggagtcgcaaagcattgattcgaccaacaccagttccaccgtggctttgattatgcacgtgcaatcattgaaaaagcgaataaaagcctctcaagaacaggttgacactttcttgtccggacaaaagcttctgactgtgcatcgttatccgtttcctcaatcatggctatatgctgaaaatgtcgagggtgaatggtctgcacttttggacgtcttaaatcgaaaggatgtcgcgattcaatctcaagttgccaatcttcaaacgcgcattttggaggaagaacagttgctggagaagcacatcaacgatttatttgctgaatggaacaaatcaaaaccggttcatg

SEQ ID NO: 48345 - DNA, 577 bp, Heterodera glycines
ttctgctggattgttatactggttgctacttttgagaaactcgtaaagactgatggcaaagcgcccgatgaccttgaaaaacagttgcatcggctttgtctgaattggcacacaattcagagatcaaggctgagctctgcgaactttattttgttggagcacaggaatacaacatttggaaacaaaaagtgtattctggtatggattcctgtggcctacttttagactgccaaatgattgacccaaaattagactcgtgagctggagaagaaaatgagcgggtgtcatgtcatcttcattgccaagcgtaggattttgccaaaacctcagcgaggtaaaaaccgtatgccattgggacagaagcgttctcgttcgcgaacactcactgctgtgcatgactcaattctggcagacgctgtattgccaactgaagtgggtggcaagcgaactcgagtcaagcttgacgggaaacaaattatgaaagttcacttggacaaggcacaacactacgaccgtcgaacacaacgtggacaccttttggcatctgtacaagcgactgactgggaaggatgtgggt

SEQ ID NO: 48346 - DNA, 739 bp, Heterodera glycines
  unsure (1)..(739): unsure at all n locations
gaaaaaagcccggccacgtggcggcggcggaggttttccggggataggcaatctcttcggtgttgggcagtcgactgcacgggtcatcaacagagaggacgtgaaaacggcgtttgcggatgtggcggggtgtgaagaggcgaaaatcgaaatcatggaatttgtcaactttctgaagaaccccgcacaatacaaagcactgggcgcaaaaattcccaagggtgctcttctgactggccctccgggcactggtaaaactcttctcgccaaagcaactgctggcgaagcaaatgtgccatttatcactgtgtccggttccgagtttttggagatgttcgtcggtgttgggcctagccgagttcgggacatgtttgaaatggcgcggaaaaaggcaccatgcattctgttcattgacgaaattgacgctgttggacggaaacggggcggaaggggcgccatgggaggccactccgagcaggagaacacactgaatcaattgctggtcgaaatggacgggttttcaactgatgaatcgaacgttgtggtcatcgctgccacaaaccgcgtggacattctcgaccccgcgttgatgcgtccgggccgatttgatcgacaaatattcatccccgttcccgacatcaaaggccgtgcttccatcttccgcgttcatttgacaccaatcaaaacaaccttggacaaaatcgagctttcccgcanacttgctgcgcacacgcccgga

SEQ ID NO: 48347 - DNA, 202 bp, Heterodera glycines
agttgtcacataagcgatcgaattcacaccctttaatttggctatatgcaaatcttcgtcaaaactctcaccgggaagaccatcacccttgaggtcgaggcgagcgacaccatcgagaacgtgaaagcgaagatccaggacaaggagggcatcccgccggaccagcagcgccttatcttcgctgggaaacagctcgaggacg

SEQ ID NO: 48348 - DNA, 325 bp, Heterodera glycines
ctcgatgttctgtgaagcgggtgcgggtacacagtgctatcgcgacatgggtcgctcgtcaacgcgctcaagcggatcgcattcagatcatcaaagtgcagaccagtgactgtggcggactgcaagcgagccggggtgaagcaatttcacaactccaagatcaaatttccgcttcctcaccgtgtgaattccaagcgacgcaatatgactcctttcacgacacaccgtccgagaactcattttgtgtacagaaagaaatgagacgacttgcatttccgattggcgataaagttgctgaggtcaaacttctatctttttggacgcc

SEQ ID NO: 48349 - DNA, 709 bp, Heterodera glycines
tggggccgtccggcgcaagaaaagtgcatttgatgatcatcatacattcggaagggtctgatgaggaagaagaagttgaggaagaacgaaagtcggaaaaatgggccaaatgcgatgccaacagaagcgcttttgccgctgtcaaatgttgctttgaaaaattggacaatcatttgccttggaagttcaaaaggaatctaaacggagaaacattcggcagacatttctcccaatggtttcactttttggagagcggccaattcagtattttactccatgggcttggttcaaaacgtcgaattttggaggattttcgcgactttctgtccctccgaaaccgtcggtcgttcgtcggtgatggtctcaacccttccgacacaatgccaaaaatgattgaccgaatgacggaagagctaaaactgaagggaatggccaaaacgaaggaaaaatctgtcgaagcggcggcaaaagctttacgaaatgctgtcgatgctcagctgcgttttccgattgttttcattttgctgaatatcgactcgccccaactgagatctcgggaacatcagaaggccctttccgtgttggccaagtcgagcaaagtccaactgatcgcttcggttgaccacgtcaacgctgcgctcatttgggaccaatcccttcgcgatgcgttcgcttggcttcacttcccaatttcgactttccattgcta

SEQ ID NO: 48350 - DNA, 213 bp, Heterodera glycines
  unsure (1)..(213): unsure at all n locations
gaagcgatgagacagggncagtgcagcagtagcaattcgtagcaaagattatgctgttgtggtcgcacttatgcgtgcacaaaacgagctttcttcatatcagcagaaagttttcaaattggacgatcatctcggcttgtctatgtctgggcttatttcagatggacgcattttggcacgctttatgcaaagtgaatgcgccgagtttcgctg

SEQ ID NO: 48351 - DNA, 204 bp, Heterodera glycines
  unsure (1)..(204): unsure at all n locations
agggaaatcgacacgataggcctctacgacactttttcctgtttggaagcattctgagctgcaagattgccactgacattgagggaggaagcaaagggtatgggttcatccattttgagactgaggaagcggcgaacagtgcaattgcgaaagtgaacgggatgcttttggatgggaagaaagtgtttgttggaaaatttgngc

SEQ ID NO: 48352 - DNA, 452 bp, Heterodera glycines
attccgccgtcaaaacggacgttttgccggcgccgtttatgaaaaatgtgatcggagcatttgcggaactgccggattggcatttcatcgtcaaaatcgagccggacgacgaacaaagccggaggatggctgagaacgtgcccaacattcgccttacttcgtgggcgcctcagcccgccattctctcccatccccgcctccgtctgttcattacccacggcggttacaactctttgctggagggtgcacaaagcggcactcccgtgctcagcatcggattcttcgcggatcagcgaaggaatgcattggttgcgcagagaaacggatggggaagggcatttgaaaattggaaactgttggaaggaatgaacgaattcagagagacggtcaaggagatgtgggaagaggacaacgaccatttgagcagggccgccaatcgagtgaagacaatt

SEQ ID NO: 48353 - DNA, 227 bp, Heterodera glycines
catctgctatcttaaagcggcgccaagaaggtggtcatctccgctccgtctgcggatgcgccgatgtacgtgatgggcgtcaacgaggacaagtacgacccggctaaggacgacgtgatcagcaatgcgttgtgcaccaccaactgcttagctccgttggccaaagggatcaactactagtttggcatcatcgaaagactgatgaccactgtgcatgcggtgaccgc

SEQ ID NO: 48354 - DNA, 582 bp, Heterodera glycines
ggcgtttcgatcgcgagattgacattggtattcctgacgcattgggcgtttggaaattctgcgcattcacactaagaacatgaaattggcggacgacgtcgacttggaaaagattgctaatgagtgtcatggctatgttggtgccgatttggctgcactgtgctctgaggcggcaatgcagcaaattcgtcaaaagatggagctgatcgacttggaatcggaaaatattgatgcggaagtcttggcgcaattggctgttactatggacgactttcagtttgcactcggtaaaaacagtccgtccgcgttgcgtgaaaccgtcgtcgagactccgaatgtcacttgggaagacattggaggccttgaaaatgtgaagagggaattacaggaattggtccagtacccggttgaacacccagagatgttcctcaaattcggaatgcaaccatcccgcggtgtcctcttctacggtccgcctggttgtggaaaaactttgcttgcgaaagcaattgcacgcgagtgccaagcaaacttcataagcatcaagggccccgaactgttgaccatgtggttcggcgagtc

SEQ ID NO: 48355 - DNA, 305 bp, Heterodera glycines
tggtttttctctattaacagagataaagaaatagtacgccaaaaagcgaaccttccgccacttctctttccccgtgcatttgacggatccgaataaaatccgatgtcgccttcgtccatttctattcttttgggggcccagtggggcgacgaaggcaaaggcaaagtgttggattttctcatcggacatcacaggattgacattgtcgcgcgatgccaaggcggtaacaatgcgggccataccgttctggcaaatggccgcgagtatcatttccaccttttgccttccggattggcctcagataa

SEQ ID NO: 48356 - DNA, 721 bp, Heterodera glycines
acggtgtgccgtgcgcagaagaagagcgagcgccaggctgagctgaagcgtcgttacgagcagacaaagctgagcgcatccagcgttatcagggagtcaatctgtacgtcaagaacctgcacgataccatcaatgatgagacacttcgaagcaattttgaatcctacggaaacatcacaagtgcaaaggttatgtgtgatgagcatggtcgctccaaaggatttggttttgtgtgctttgaaaaggcggatgaagcaaccaaggctgttgtggaaatgaacaacaaaatcatcgaaaacaagccgctttacgtcgcgcttgcgcaacgtaaggaagaccgcaaagctcaactggcctcgcagtacatgcagcgcttggccgcggtgcgcatgcagaaccctgctggcctcatggggacaatgtatgcgcctgccagcggtggatttttcctgccacaggccatccagaaccaacgtgctgcgccgttcatgcaaacaccgaatctgtccggggcacaaatgcgtggcgctgtccctcgctggaacaatatgggcggtttcaatcatccaatgcaaggctacatgatgggtccagctggtggcggtcagttcggcggcgctaaccaaattgctcgtggaggacctcgctcccgtggtggcggaggaatgccttattaccggggacaaccgtgccaccaacagaaccgcctgcctggtatggg

SEQ ID NO: 48357 - DNA, 778 bp, Heterodera glycines
  unsure (1)..(778): unsure at all n locations
cattaaaataacattaattcaccataaattaaaaaagatgcgagatctgttcatcgaagacaacagcccgatcactccggcccggcttgccgaactgatcagacatttctacgcgttgggatggatgcgcgataacggcggaggaatggcggtcctttgcaacggcgccgtgttcggttcgcccacttcggtgcagaaggagaaagtgtccgaaaatgatctgtttgtaattgatgctacgaccggcacagtactgaaacggccgcaaaacgcggcgagtgttccgagtgccacctgcggactgttaatgaacacaggggtcgagaatcgtagcagcggactccgtctcgacaacgtcgaccgcctcgttgtgcctaccgttgattctgagttaaacgaacaaatgctcagtcctgttttgctccgaactttggacaaatacacagaagcatcggccattttggtgcgtggccacggcttttttgtgttcggctctcactgctggcagtctaccaaaatgatgttggagtgttacgagtacctctttgagttagcctgcgaaatgatcaaatacaaattgccattggtgccaaaatcgccgaaaattaaaataatgcgccaattcacacgtaacacgacgacggcatagganaggaatgtgccgacggagggcgacaaaagcgatggaaggaaagggcggaagattccttagtggcacaaagggtctttagaatgaaaaggctatcgatgacgctttcccattgacacattttgcgag

SEQ ID NO: 48358 - DNA, 517 bp, Heterodera glycines
ttattatttgcggacttgactccattgaagctcgccgttggcttaatgcgactgtgtgttctttggttgaatgtgatgactgaaataacccaaaatccacaccatagtgccgttgatcgatggtggaaccgagggattcaaaggaaattcacgtgcgattattcctttcatgacgccgtgtattcaatgcacgatagatctttacacttcccaggtcaactttccgttgtgtacaattgctcacacacctcggcttgctgagcattgtgtggaatatgtaaaagttctgctttgggaaaaggagaagccttttgggcaagacgttaaattggatgctgatgaccctgctcatgtccaatgggctttccgtgctgctcaacaacgcgcgaatgagtatgaaataaaggatgtcgatttgcgactcagccaaggcgtgctcaaacgtataatcccggcagtgggttcaaccaatgccgtcatagcgggaagctgcgctcttgaggcattgaaactggca

SEQ ID NO: 48359 - DNA, 509 bp, Heterodera glycines
aaagtgctcccctatgttgactttttgtttggcaagtaaacagagatgcattggtttacgcaaaaactccataaatcggaaaaacggacgttggggacatcccattgtatttgactgaaaagtgagaaagtgaacggtgagatgaaacggatagtcatgataacacagggccctttgccggttttggtggcccatgaccgcgaactcactcagtttccagtggagccaatttcggaggacaaaattgtggacaccaatggggcgggcgatgcattttgtggaggctttttggctgcattttccaccggccgctctttggatctttgcgtccgtgctggtaattttgctgctcgtacaattatttaacacattggctgcacttttccaaatgaatgtgcttatttagaatgagttaaaaatgtgcgcacaatccttctcaaattgttaaatttacagttctatgttttattaaatttattcgtaattttttaataaatattcgtaccctc

SEQ ID NO: 48360 - DNA, 524 bp, Heterodera glycines
cggtcaatcgaaagggccgtgcattgtgctgttcagggtccgaatacattgttcatgccgtacatttggctattctggcccatcaattacgtttgctgatgaccgtaccaaaagtgtccgatgagttgttgaccaccgatgtgcatgagccgagtgtttgtcgactgaatttggcccgtcttttgcttctctttgtcaaggactttgaattgagcaatatcgaatacgcaataaattactgtttttttgcgcgcgactttaagttggacacaccttccgcggacaatgccacaattagacaagaaggtcggagtgtttttgtggctgctgtcagccgaatagtgttcatgtccggccatcgggaagcgattttgggccgattggactctcaggggaacagagtccccggtctcattgacaaatttaaagacgccatggacatttgcgaattgattgccagcattgccttcgacactcatgtccagggacactcttttgctgcgtgtcacctttacgcattggca

SEQ ID NO: 48361 - DNA, 703 bp, Heterodera glycines
  unsure (1)..(703): unsure at all n locations
cattttcttccctttcctttgtcttccattattccgcttttccctccccatttctcatttgttcttctccgcttcttctctccccgatgaatcactttgggctgacttttctgttcgtcgccgtttctctgctggtaattgcgcccggctgcgatggcatgcaaattttcgtgaagacattgacgggcaaaacgatcactttggaggtggagagctcggacactgtggacaatgtgaagacgaagatccaagagaaggagggcgttccgccggatcagcaacggctgatcttcgccggcaaacagctcgaggacggacgaacgttggccgactacaacatacagaaggagtccacgctccacttggtcctccgtctccggggcggaaatgggaagagaaacacgagtaagaacaagaaaagcaacaaaaagcttgatcagaattgatcagcagcgaacgcaccatcacatgattgattggcacagtgattttccaccaccaaattcacaacacttttcccttttccgggttatctttgatttccattttcggntattgttttctgtttttctcctctatcttttgtaaaattctgttactttgatccttagttttatcatttatcatcgcatatttagaagttatcatagtccatatttctgtccctttttatttatttttttgactataaaacttttggaca

SEQ ID NO: 48362 - DNA, 474 bp, Heterodera glycines
  unsure (1)..(474): unsure at all n locations
cagatcgctgctggttatactcccgtgttggactgtcacaccgcgcacatcgcgtgcaaattcgccgaactcaaggagaaggttgcccgtcggtctggaaagaaagtggaggacaacccgaaggcgctgaaaaccggcgatgctgggatcgtcgatttgattccaccaagccgatgtgtgtggaggcattcacggactacgctccgcttggtcgtttcgccgttcgtgacatgaggcaaaccgtcgctgtcggtgtgatcaaggcggtggagaagactgaaggcggtggaaaggttaccaagtcggcgcagaaggctgctgcccctggtgggaagaagaaatgagaaacgctgataattggaatggattcgatttttggatttgttgttttttttggccgtgaaataggcccgttaactttgggttttgttggataaaatttgttcgantaatacatacaacctccaatggcat

SEQ ID NO: 48363 - DNA, 636 bp, Heterodera glycines
tcgaacactctgactgtgcattatggttgacatgaggccatctacgatatttgtcgtcgaaatttggacgtggaacgcccttcttacaccaatttgaaccgtttgatttcgcaagttgtctcttcgataaccgcttcacttcgatttgatggtgctttgaatgtcgatctcactgaattccagaccaatcttgttccttatcctcgaattcactttcctcttgcgacttattctccagttatctcagctgagaaggcctaccacgaatcattgtcggtttccgaaatcaccaacatgtgctttgagccgtccaaccaaatggtcaaatgcgatccacgtcacggcaaatacatggccgtgtgccttctctaccgaggtgacgtcgtcccgaaggatgtaaatgcggccattgcttcgatcaaaacgaaccgttcaattcaattcgtggactggtgcccgaccggcttcaaggttggtatcaattatcaacctccgactgttgttcccggcggtgacgttgccaaagtcccacgtgccgtgtgcatgttgtccaatactaccgcaattgctgaggcttgggctcgtttggatcataaatttgatttgatgtacgccaaaagggcatttgtgcattgg

SEQ ID NO: 48364 - DNA, 596 bp, Heterodera glycines
gttcacgcgtttttccacagtttttgtgcaagcgcctcgtctacgacacgtcggccagcgaggagcaggagcggtgcatgatcgcaaagctgaagcacatgtgcgggttcgagtacacctcaaagttggagcgtgtgctgactgatgtcgcgctgagcagggaccgttccgagcagtacaagcatgcagccgagaacatgcaacgttgacttctccgtcattgtcgtcatgtcgaacgtgtggccactggggcaggcggtccaattcgacatcccgcgtcctctcctcgactgcattgactcatacacccagtactacaccaaccgcttcaatgggcgtaagctgacttgggcgttgcaaatgtgccgcggtgaattggtctcgacgagcaacactttcaaggacaaatactcatttttgtgcaacacgcaacaaattgccattctcatgcagtacaacgaacgcaacacgtacacacttgacgagctgcacgtcgctcttggcaccgactttcccgctgatcagctgtgcgccgttgttcaatccttggtcaagacgaatctgctgaagctcaccagcgcccatgggacagcttt

SEQ ID NO: 48365 - DNA, 718 bp, Heterodera glycines
  unsure (1)..(718): unsure at all n locations
cgaaagcctgaaaaaattaaagagcaacttctgggcgagaatgcttcaggcccggtgttggtggagcccgacaaccccaaaaatgtgcttgtaagacgcattacgctggtttcggacgaccaagttaagcacagcatggacctccccgcaaagggtgacttcgtcttctgcgtgaaagaaagctgcacctatcggatacgcttcgaattcgttgttcagcgtgaaattatatgcggactcaaatacgcacacaaagtgagtcggcttggcgtcggagtgaccaaagagttgtacatgctcggctcctacggtccccggcacgaaccgtacacttacgaaacatcaccggaggaggcgccttcgggaatattaagccggggaaaatatcgagtacattccctcatcaccgacgacgacaaaaacatttggttggattggtcgtggcacatcgaaatcgcaaagagttggtaaattgttaagcgtcgatagattttgtggctcctttttgaatactcaattcgttatcaaaatttcaaaaatcaaaaaaagggccataatttgttaaatttgttccacccttgcccttcacttattccttttattcatgtgacattcttttgtacttcatccgttaattgcccaaaccaaaagttgttagagcacgaaattttgcaagtgacccctttacctactatatgttgacctnccgcattatgtc

SEQ ID NO: 48366 - DNA, 242 bp, Heterodera glycines
  unsure (1)..(242): unsure at all n locations
cggccgtgctgtccctgtacgcctccggccgtacaccggtctcgtgttggactccggcgatggtgtcacccacaccgtgcccatctacgagggttacgcactgccctcacgccatactactttttggacttaggccggcccggtaaccctatccttatcttccctcgaagaaaatatccccccttgggggcgggggggtccccccccttttttnggaccccccccgggggggggggggggaa

SEQ ID NO: 48367 - DNA, 111 bp, Heterodera glycines
tcaagcgtggtattctgacgctgaagtacccgattgagcacggcatcgtcaccaactgggacgacatggagaagatctggcaccacaccttctacaacgagctgcgtgtcg

SEQ ID NO: 48368 - DNA, 128 bp, Heterodera glycines
gtgattgggcgtccgactcgcggaatttagtttcggcttctcaggacggcaaattaattgtgtgggactcgtacaccacgaacaaagtacatgccattccgctgctgtcttcctgggtgatgacttgc

SEQ ID NO: 48369 - DNA, 214 bp, Heterodera glycines
ggtttttgagaaaagcttttatcaaacttttttgtaatttattggcttatcaaatgcttccgtctaatcctgacgacaaaatagatgaggtcgacaagattctttcaaaacttgatggaaaaattgaacgtaaaatggaccctttgatgtgtcgccataaccaaagacagaaatgcacaaattgtctcccattggacccctacgatgaaaaatt

SEQ ID NO: 48370 - DNA, 273 bp, Heterodera glycines
  unsure (1)..(273): unsure at all n locations
cntttttgaagagatttcttcccgattcaactcgaaagaattgaccgatgtgacgagggtggactgtgggggagggagtgttctgccgggcatggcggacgcccattcccaccccgtgttctctggcgatcgggtgcatgaatttgcgatgaaactcgctggtgccacttatatggaagtgcaagcagccgggggcggaattcacttttcaaccgaaaagacacgtgaagcaaccgaagagcaattgctggaggactttttggagattgctct

SEQ ID NO: 48371 - DNA, 430 bp, Heterodera glycines
cattaccctaacatacagaatgtgaaatcgctcgaaaaagtctgtgagcagcttattcgcggcgcaaaggacgagaatttggtggtcaaaggcccagtgagaatgcccacaaaaattctgcgcattaccacacgcaaaacgccgtgcggagaggggtcgaagacttgggaccgtttccagatgcgcatccacaaacgcatcatcaatctgaacagctccagcgacgtgctgaagaaaatcacgggcatttccattgagccgggcgtggacgtggaggtgacaattgcggagtcgcccagcaattaaacagcgcgtgccgaggggcggacggagagatttcccttttttgttgttgcgttcgctctattgttgctttatgccacaaaattgaaaaaaaaattgttgcaaaaaaaaaaaaaaaaaaaactac

SEQ ID NO: 48372 - DNA, 438 bp, Heterodera glycines
gttgtccgaattcgctggtggcatttcgcctgtcgacgccgtgccaatgccaaccgcggccaatgactgcaacaataattccatcgaagacattcaatcggaccgccgaaggggcccaattgatccgacaaacttcgaccatttggtccgtctgagtgagctcatccgttccatggccgaccttggcactttgcagcccgagttcggcacaatctgtggctccggattgggcgcaattgccgaccaaatggagggggcgcggattttgcctttctccgaggtgcccggctttccacagccgagtgttattgggcacaaagggaatttggtgttcggtcggattggtggtcacttttgcatgtgtcttcagggccgtttccacccctacgaacacaaaatggacatggcattgtgtacgatgcccgtccgtctgatggg

SEQ ID NO: 48373 - DNA, 246 bp, Heterodera glycines
ggccgcaaaggcggagttctcaagagcttgtcaaatgactgggaggaccatcttgctgtcaagcatttcagcgttgaaggccaactcgaattccgtgctctcctcttcgtcccccaacgcgctccgttcgatctctttgagaacaaaaagagcaagaatgcctcaagctttatgtccgtcgggttttcatcatggagaactgcgaggagctgatgccggagtacctgaacttcatcaaaggagttg

SEQ ID NO: 48374 - DNA, 203 bp, Heterodera glycines
  unsure (1)..(203): unsure at all n locations
ggccgccaaggagcgatcgaattcacaccctttcaatttggctatcatgcaaatcttcgtcaaaactctcaccgggaagaccatcacccttgaggtcgaggcaagcgacaccatcgagaacgtgaaagcgaagatccaggacaaggagggcatcccgccggaccagcagcgccttatctntcgctgggggaaacagctcgagg

SEQ ID NO: 48375 - DNA, 325 bp, Heterodera glycines
ggccgccagggcggaattcagaaaagggatttatttcaccccaggcattggccaggcgagttcaatgggcagtcttttgttgacggccggtgccaagggaatgcgcacttcgctgcccaatgctcgcattatggtccatcagccgagcggtggcgcttacggacggcggcggacattgtgatcagagcggaggagatcaaccgaatgcgaaaacggctcaacgaaatctatgccatgcacacgggccaaacggtggaaactattgaccaggcattggacagggatcgtttcatgagcgcactggaggcccaagagttcgggctgg

SEQ ID NO: 48376 - DNA, 627 bp, Heterodera glycines
  unsure (1)..(627): unsure at all n locations
ccctctagagcggccgccaagcaacagcagcagaagcaaaaatggctgacttcgacaaacacgctgcccagcgcgaggcggagtctctccgcactttggccttcttcggcgtttgcctgtccaccgtggccacggttatcgctgtgctttccgtgccgttcgcctaccagcacttctagcagatcggcgcccaaatgcagaacgaagtggacttctgcaaaatgcgctccggcaacatgtggcgtgaggtcacccgcacccaggcctactccaaggtgtcgcacgacagccgtcacaagcgtcaggcaggcggttgctgtggctgcggagtgtcgcccccgggcccgcccggaccccctggcccatcgggacaacccggcggagacggacaacccggaggctcaggacagcccggagcaccaggccaggcagctcctcgcccgtacccgccaagcggcggatgcgtgccgcaatgtgaggccgcccagcccggactccccggcccgcccggaccccccggacccgagggacagaacggccaacccggacagtcggcaccgcccgcgtctcctggccgncccgggccccagggacctcctggacccgatggacagcccggcaaccccg

SEQ ID NO: 48377 - DNA, 496 bp, Heterodera glycines
ggccgcaacttcaacaacaccaaacatcgtctccatccctcgtttctttgtcatttctccgtttgctcactttttgcccgcttgaaccttcactttcttaacaccacgaactttcttctggcggttctttcgctccttgcgttgctttcgtcctcccttctttttttctgaccaacgccttgcctcaacaagcgatatttggcctcaaagcgcttggcgtagtcgagtgagtcgtacacatttgcaaaccctgtgctgcgacctcctccaaattgacaccggaaaccgtacgcaaccacaacatcttgggtcgtcttgtacaacttggccagcctctcacgcacctcggatttgggcacagaagcgcgattcggatggagaatgtcaacaaccatctgtttacggaaaagaagtcgattgttgagcactttgcgcgtgtgcaatgtgataacaccaccttcgaccattttcactttttttattagctcaaacttgg

SEQ ID NO: 48378 - DNA, 262 bp, Heterodera glycines
ggccgccaagcaagtttgagcttaaaaaacagacatcattcagtattatttataagaacaccaaaaatgcgtgaagtgatctctattcatgtgggacaagcgggcgtgcaaattggaaatgcttgttgggaattgtactgcttggaacatggcattcagcccgatggaaaaatgccatccgaccaaaacaaccaagacgattcgttcagcaccttcttctcggaaacaggcaatgggcgtcatgttccgcgtgcggttatgg

SEQ ID NO: 48379 - DNA, 426 bp, Heterodera glycines
ggccgccaagccttcgactacacatttaatctcacgaacggacgtgccctggtgcaacaatggcaaaggaggaatactgtttcgatgcaaaggcggcggcagcggcggggcaatctcgtcgtccttcgacaacggcatcagtacttgtgcaaggagatggccagtcaagcagatttgtggatgcgatcatcagaaaagtcacgcagccgcctcttcaacgcttcacggatgagatcaccgacgaggaactcaaacaactctgcaaggcggccacggacgtcttccggatgcagccgacgctcgtcaggatccgcccgccggtcgtcgtcgtcggagacatccacggacaattctcggatctgcagaggatcttcacaacgcatggccccccgccggagcagcagtacatgttcttgggcgactacg

SEQ ID NO: 48380 - DNA, 233 bp, Heterodera glycines
ggccgccaaggccatcagcagagaaaatgaccgagtcggacagtcgcattcgggcgtacaaattcgttgcctattcggccgtcactttctccatcgtggccgttctctctgttgtggtcactctgcccatggtgtacaattacgtagcccacgttcggcgacagatgcagcacgagctcggcttttgcaagggctcagccaaggacatttacgtggaggtgaaccatatgaag

SEQ ID NO: 48381 - DNA, 572 bp, Heterodera glycines
ggccgccagagccttccgcagatcggcgcccaaatgcagaacgaagtggacttctgcaaaatgcgctccggcaacatgtggcgtgaggtcacccgcacccaggcctactccaaggtgtcgcacgacagccgtcacaagcgtcaggcaggcggttgctgtggttgttgagtgtcgcccccgggcccgcccggaccccctggcccatcgggacaacccggcggagacggacaacccggaggctcatgacagcccggagcaccaggccaggcagctcctcgcccgtacccgccaagcggcggatgcgtgccgcaatgtgaggccgcccagcccggactccccggcccgcccggaccccccggacccgagggacagaacggccaacccggacagtcggcaccgcccgcgtctcctggccgccccgggccccagggacctcctggacccgatggacagcccggcaaccccggagagtctggccaacccggccagcccggcaaactcacccaggccccgccctccctcggaccgcctggcccagcatgaccccctggccagcccggacagcccggcga

SEQ ID NO: 48382 - DNA, 242 bp, Heterodera glycines
ggccgccaaggtttgagcgatcgaattcacaccctttcaatttggctatcatgcaaatcttcgtcaaaactctcaccgggaagaccatcacccttgaggtcgaggcaagcgacaccatcgagaacgtgaaagcgaagatccaggacaaggagggcatcccgccggaccagcagcgccttatcttcgctgggaaacagctcgaggacggacgcaccctggccgactacaacatccagaaggag

SEQ ID NO: 48383 - DNA, 433 bp, Heterodera glycines
ggccgccaaggattagctgaatttgacttctctttgtgcgaacgtaatcatgcactgaagcgacaaatggacggcgaaggttttggtaaacagttcgaaaacatgacgaagatgacgagctcgggaacaacggttgttggggctattttccaggatggcgtcgttttgggtggtgattcgcgatccactcaaggcaatataattgctaacaaaaacagtatgaaggtacattacctaaccgacagaatttatgcttccggggccggaggagctgctgacttggaaaaagtttcccaaataatcagtgcggagttgcggttgttcgaattgaatagtggacttcaggcccgcgttgtcatggcggttcgtcggttgcgccaatacctttttaaatatatgggtcacgttagctgctattatttggtcggtggtg

SEQ ID NO: 48384 - DNA, 264 bp, Heterodera glycines
ggccgccaaggcgacagcgaaaatgaccacggggaaagcggagcgaaaccgaagggcatttcggcttccggcggttggttttcggcattcaaatcgctggtgggcaccaaacagcttgcccgaggcgacattgagccggcgatggagaaaatgaaggaaatgctgatcacaaaaaatgtcgcgtcggaacctgctgaacgcatttgtgagtcggttgctgccaaattggagggcaaagtgatcggaacgttcaaccgagttgcg

SEQ ID NO: 48385 - DNA, 463 bp, Heterodera glycines
ggccgcctagcgcccgaattgttaaacaaatcagtcggaggattagctgaatttgacttctctttgtgcgaacgtaatcatgcactgaagcgacaaatggacggcgaaggttttggtaaacagttcgaaaacatgacgaagatgacgagctcgggaacaacggttgttggggctattttccaggatggcgtcgttttgggtggtgattcgcgatccactcaaggcaatataattgctaacaaaaacagtatgaaggtacattacctaaccgacagaatttatgcttccggggccggaggagctgctgacttggaaaaagtttcccaaataatcagtgcggagttgcggttgttcgaattgaatagtggacttcaggcccgcgttgtcatggcggttcgtcggttgcgccaatacctttttaaatatatgggtcacgttagctgctattatttggtcggtggtg

SEQ ID NO: 48386 - DNA, 413 bp, Heterodera glycines
ggccgccaagttcttcctcgaggaggagggacgcgagggccgtccgttcaaccagaatttaacgccaggctccgtaatccaagagaaggtgacgcgcgcggacatcacggaattctttcttcagccccacgcaccgattcagggaacgggcaaacccgtagaatacgccatgttggaggatgagattggcatcagcatggacgaattgcaaggagtgattatggcgttgtcttactcgcatcagattgtcaatgttgcggtgagcatgcccgagcctgtataccaagcccacgaattggccaagcgagggaaaaacaatttcgtgactttgaagcgtttcaagccggagcgtgtgccaaagattgacaagcaaattgtggcaaagggtggcaagcgtcagatcatttcaattg

SEQ ID NO: 48387 - DNA, 545 bp, Heterodera glycines
ggccgccaagaaccaacagcagcagaagcaaaaatggctgactttgacaaacacgctgcccagcgcgaggcggagtcgctccgcactttggccttcttcggcgtgtgcctgtccaccgtggccacggttatcgctgtgctttcagtgccgttcgcctaccagcacttccagcagatcggcgcccaaatgcagaacgaagtggacttctgcaaaatgcgctccggcaacatgtggcgcgaggtcacccgcacccaggcctactccaaggtgtcgcacgacagccgtcacaagcgtcaggcaggcggttgctgtggctgcggagtgtcgcccccgggcccgcccggaccccctggcccatcgggacaacccggcggagacggacaacccggaggctcaggacagcccggagcaccaggccaggcagctcctcgcccgtacccgccaagcggcggatgcgtgccgcaatgtgaggccgcccagcccggactccccggcccgcccggaccccccggacccgagggacagaacggccaacccggacagtc

SEQ ID NO: 48388 - DNA, 547 bp, Heterodera glycines
ggccgccaagctcctctgacgctcttgacaagatccgttaccaggcgctgaccgacccgtctcagatggagagtgggaaagagctcttcatcaaaatcgtgccgaacaaagccgataagacattgaccatcatcgacactggcattggcatgaccaaagctgacctcgtcaacaaccttggcaccattgccaaatccgggacaaaagcgttcatggaggctcttcaggctggtgcagatatttcgatgattggccagttcggtgttggattttattcggctttccttgtggccgaccgtgtcacggtcacatcaaagcacaatgacgacgattgctaccaatgggagagctcagctggtggctcgttcatcattcgcaattgtgtcgatcctgaagtcacccgcgggacaaagatcgtcctccacctgaaggaagaccaaacggattatttggaggaacgtcgtgtgcgcgaagttgtgaagaaacactcgcagttcatcggttacccgatcaaattgttggtggaaaaggagcgtgacaaggaaat

SEQ ID NO: 48389 - DNA, 242 bp, Heterodera glycines
ggccgccaaggtttgagcgatcgaattaacaccctttcaatttggctatcatgcaaatcttcgtcaaaactctcaccgggaagaccatcacccttgaggtcgaggcaagcgacaccatcgagaacgtgaaagcgaagatccaggacaaggagggcatcccgccggaccagcagcgccttatcttcgctgggaaacagctcgaggacggacgcaccctggccgactacaacatccagaaggag

SEQ ID NO: 48390 - DNA, 451 bp, Heterodera glycines
ccctctagagcggccgccaagattgttattatatattgctcatcgtctgcacactttaatcccacgaagcgacgtgcccggcgcaacaatggcaagagaggactactgcttcgatgcaacggcggcggcagcggcggagcagtctcggccttcggcaacgacttcaacacttgttcttgttatggcctgtcaagcagcttcgtggacgcgatcatcaggaaggtcaggcattcgcctgtccaacgcttcacggatgagatcaccgacgaggagctcaaacaactctgcatggcggccacggacatcttcagaatgcagccgacgctcgtcaggattcagccgccggtcgtcgtcgtgggcgacatccatggacaattcacggacctgcagaggatcttccacacgcacggcaaccctccagagcagcagtacgtcttcctgggcgactacg

SEQ ID NO: 48391 - DNA, 664 bp, Heterodera glycines
ggccgccagacctattgcttctttaatcaatctctcacaatgtctgaacaatccggggaaacctttgcgtttcaagcggagattgcgcagttgatgtccctgatcataacaccttctactcgaacaaggaaatcttcctccgtgagctgatctccaacttctttgacgctcttgacaagatccgttaccaggcgctgaccgacccgtctcagatggagagtgggaaagagctcttcatcaaaatcgtgccgaacaaagccgataagacattgaccatcatcgacactggcattggcatgaccaaagctgacctcgtcaacaaccttggcaccattgccaaatccgggacaaaagcgttcatggaggctcttcaggctggtgcagatatttcgatgattggccagttcggtgttggattttattcggctttccttgtggccgaccgtgtcacggtcacatcaaagcacaatgacgacgattgctaccaatgggagagctcagctggtggctcgttcatcattcgcaattgtgccgatcctgaagtcacccgcgggacaaagatcgtcctccacctgaaggaagaccaaacggattatttggaggaacgtcgtgtgcgcgaagttgtgaagaaacactcgcagttcatcggttacccgatcaaatt

SEQ ID NO: 48392 - DNA, 467 bp, Heterodera glycines
ggccgccgagcaagtttgagatacacaaatcaaaaattagcatttgccatttataccgagcgaaatgggtgcctacaaatacatgcaggaattgtggcgcaagaagcagtcggaggtgatgcgctatttgctgcgcatccgctgctggcaatatcgccaaatggaggccatccaccgctgcacgcggcccacgcgtccggagaaggcgcgccgcttgggctacaaggcgaagcaaggctttctcatttaccgcgtgcgcattcgccgcgggggtcgaaagcgtcaagtgaccaaagggcaaacgtacggaaagccgaaaacgcatggcgtcaaccagctgaagaacacgcgcagtttgcaggccgttgcggaggcccgtgccggccgccgtttgggcgaacttcgtgtgctcaattcgtactgggtgggccaggactcgacctacaaattcttcgaagtcattctcg

SEQ ID NO: 48393 - DNA, 510 bp, Heterodera glycines
gcgtcgtagcttggatccttaacggcgcagcttttgtccttaaatcgcttgactttcgaagaatgacaaagccgaacaagctgcggaaaaaaaggaaagaagttgggaaaccccatgagagattaaagattcaaaactctgtctcaacatttgcgtcggtgagtctggtgaccgtctcactcgtgctgcaaaggtcttagaacaattgactggtcaaactccggttctttcaaaggctcgttacactgtgcgctcgttcggaattcgtcgtaatgaaaaaatcgctgtccattgcacagttcgtggaccaaaagctgaggaaatcattgatcgtgggctcaaagtcaaggaatatgagctttaccgcgagaatttttcggacactggcaattttgggttcggcattcaggagcacatcgatttgggcataaagtacgacccgtcgattggtatctacggaatggacttttatgtggtgctcggtcgtgctggtttgcgggtggcaaaacg

SEQ ID NO: 48394 - DNA, 690 bp, Heterodera glycines
  unsure (1)..(690): unsure at all n locations
ggccgccaagaaaacattgaaaactttctccgtgcttatgccggtgtccacttcagcttctgccagcttcttttgctggtcgctgctctgatgttgcccttcactatgctcaaatcgccaaaagatttttggtgggcagtgatcggagcgatggtaaccacgacggtggcagtgagcatcattctcttcgccactgcttccgatttctccgtctgtgcttccgctgctcgttaccctcccgtcactgcttccaagttcttcatgagttttggcactgtgatgttcgcttacggcggccacggcgcctttccgaccattcagcacgacatgcgcaagccgtaccgcttccggcgttccgtgttctgcgcttacctcatcatcttttgtatgtatttgccggtctctttactcggctatctcgcctacggggacagtctgattgactcgatcatcccctccctgcaagacttaatcctgcaacaagccgtcaacattctgatcaccctccacgtggtcttggcacttaccattgtgttcaacccgctcaaccaggagctggaagaactgctaaatgtgccgcaagagttcggatttcggcgaatattatgccgtagtgggatgatgctggcggtggttgcagtggccgaaacaatgcctaatttcggtgtactgctcgacctcgntcggagg

SEQ ID NO: 48395 - DNA, 713 bp, Heterodera glycines
ggccgccaagctaattcccaaataatcggagaaaagtcggaaagcggaaaaatggcggacattgaagcggcaccggcaccaaaatcggatgaggaagccaaacggcaggcattggccgccaaaaaggcggaagtgcgcaaacggttggaagaagcagggaaatttggcaagaagaagaagggtttcctgacgccggagcgcaagaagaagctgaggaaactgttgatgatcaaagcagcggagaacctgaagaaccagcagaaacagcttgactcggaacgccaaaatgtgctgagcaagcgaattccgcaatgtccgaatatcgacgcaattgaggacaaaggacagctggagaagatgtacaacgacctgttccagcaaatgctcaagttggaggaggagaagtacgacatcaacttcgtggtctcgcaaaaggacgcggagatcagcgaaataaccatttctgtgaatgatttgcgtggaaaatttgtgaaaccaacgctgaagaaagtgtccaaatatgacaacaaattccgcaaagcggcattaacggagggcgaaagtaccgcgccgaaggaggacttccgatcgaaactgaagacggtggagaagaagaacgtgatggaagagttggagagcaagcagaagaacaggcggagaagccggaatggacgaagaatgtggaaaatgacgccacgggacgccgggcgagc

SEQ ID NO: 48396 - DNA, 624 bp, Heterodera glycines
gccagacattgttaaaaaccgtgccgtacaacatccttcactgggtcggcatactgattatactccaaatgtccaagtttctcgatgtccgacaaatgcatttgaacattcactgctgtacgcaatgggtttaactccatctccacacatttgtaaagtgcgtaggcggcgggcgaggccaactcggggatgtgcagtcggacaatttctttgaggattccgcttcggcttggcgtaattggcaaacgtaaaagagacgaaagaatgcgaatattggccgagtgttgctcctcaatgtgcaagtgtgtcgtcaacatcgacgcactctccgccccctccggaatgctcaaagttgccaacaacacgcgggttgcttgatccatcgcctcttcaccgccaaattggcggcgcatgtgtttgaaaatgcaaaaccgttgaagcagcgaagcggcgtggaaaagaatgttgccgcccttccaaaaaaccaaagaaatcttctcgtaataattggcatagctagtcggtcggatgatttttttgtgcttctctttaccaagttgcataaaactgtgcaaatcttccgcacttttgaacgcttcctgccacaagtccatgttaatcgcg

SEQ ID NO: 48397 - DNA, 223 bp, Heterodera glycines
ggccgccaagaccctttcaatttggctgtcatgcggggggtgggggaggactctcaccgggaagaccatcacccttgagggggaggggagcgacaccatcgagaacgtgaaagcgaagatccaggacaaggagggggtcccgccggaccagcagcgccttatcttcgctgggaaacagctcgaggacggaggcgcgtggggcgactacaacatccagaaggag

SEQ ID NO: 48398 - DNA, 195 bp, Heterodera glycines
  unsure (1)..(195): unsure at all n locations
ggccgccaagaaaagggagttgacctttcgtcgttttctgggtctgggcctantgggcggattttggctgccgatttatcaaaggctgaaggggaatttacgagccgtgggactcaaagctccgcgtcttcgttcatcgatattccgctttcgaacatgcgcaaaacaattgcgaagcgtcttantgaggcgaag

SEQ ID NO: 48399 - DNA, 528 bp, Heterodera glycines
ggccgccagatcaatctctaacaatgtctgaagcgtgcgggggagacctttgcgtttcaagcggagattgcgcagttgatgtccctgatcatcaacaccttctactcgaacaaggagatcttcctccgtgagctgagctccaactcctctgacgctcttgacaagatccgttaccaggcgctgaccgacccgtgtgagatggagagtgggaaagagctcttcatcaaaatcgtgccgaacaaagccgataagacattgaccatcatcgacactgggattgggatgaccaaagctgacctcgtgaacaaccttggggccattgccaaatccgggacaaaagcgtgcatggaggcgcttcaggcgggggcagatatttcgatgattgggcagttcggtgtgggattttattcggctttccttgtgggcgaccgtgtgacggtgacatcaaagcacaatgacgacgattgcgaccaatgggagagctcaggtggtggctcgttcatcattcgcaattgtgccgatcctgaa

SEQ ID NO: 48400 - DNA, 531 bp, Heterodera glycines
  unsure (1)..(531): unsure at all n locations
ggccgcgaattgctttcttctctccctttantgagggtgtgaatggtgagcattaaggtgttaaaatttttcgcagtcaattttccaacgtctcttctgtgaaaatgtcatctgacaagaacaaggaacgcactttcatcgccatcaaacccgacggtgtccagcgcggattgggtgccaaaatcattaaacaattcgagcagcgtggttacaaattggttgccatgaaacttgccaaggcgactgtgccccatttggaggtgcactaccaagacctcaaggacaaacctttctttgccgggctcgtcaaatacatggcatcaggcccgattgtggctatggtttgggaaggtttggatgtggttaaacagggtcgcgttttgctcggcgctacgaatccgttggccagtgccccagggactattcgtggcaatttttgcattgagatgggacgtaacatttgccacggctccnattcggtgccttctgccgaccgtgaaattgcccattggttcaagccggaagaactcg

SEQ ID NO: 48401 - DNA, 288 bp, Heterodera glycines
atagcaatgcgtcgtgcaccaccaactgcttagctccgttgggcgaggtgatcaacgacgagtttggcatcatcgaaggactgatgaccactgtgcatgcggtgaccgccactcagaagacggtggacgggcccagcggcaaacaatggcgagacggacgtggcgcggcgcaaaacatcatcccggccagcgccggggcagccaaggcggtgggcaaagtcatcccggagctgaacggcaaactgaccggcatggcgttccgtgtgcccactccgaacgtgtccgtcg

SEQ ID NO: 48402 - DNA, 167 bp, Heterodera glycines
  unsure (1)..(167): unsure at all n locations
ggccgccaagtaaccatatcaaatggctacttacaatcccaactatgaatccattgggcaggcctttgtccaacacttttacaccaaatttgatgtgcccgatggtgcgactcgcaccgtcggccttcatgatttgtatgatgctgaacactcttttatgactnttg

SEQ ID NO: 48403 - DNA, 568 bp, Heterodera glycines
  unsure (1)..(568): unsure at all n locations
ggccgcacaagtgagaaatggcattgtcaacgaaggtggtgccgcgggctttttcttcgctcttctgcattttgtgcaccaattgcttgcagtcggatggcaaagtcggacgtgccggcgctgagcacgacgaatcagccctacccgtacaaggaacagactccgaagggggttttcgagaagatgggcttgcggaaaacgccggacggcgcttcaatcggcgaatttgcagtgatgcgtatggacgacatgatgaacttgatcgggcgtggctctctttggccattgaccttcggtttggcgtgctgtgctgttgaaatgatgcattttgccgctcctcgttatgacatgatgcggtttggcgttgtttttcgtgcaactcctcgtcagtgcgacttgagcatcggctctggcacagtcacaaacaaaatggcaccggcactgagacggagctacgaccaaatgccgcatccaaaatgggtgatcagcatgggctcctgtgccaacggtggcggggattaccattattcctattcngtgttgcgcgggtgtgaccgggtcatccctg

SEQ ID NO: 48404 - DNA, 299 bp, Heterodera glycines
  unsure (1)..(299): unsure at all n locations
ggccgccaagaccaaaccgatttggactcncaatcccgatgacgtgtgaaatgaggagtatgcggagttctacaagagcttgtcaaatgactgggaggaccatcttgctgtcaagcatttcagcgttgaaggccnactcgaattccgtgctctcctcttcgtcccccaacgcgctccgttcgatctctttgagagcagaaagagcaagaatgccatcaagctttatgtgcgtcgggttttcatcatggagaactgcgaggagctgatgccggagtacctgaacttcatcaaaggagttg

SEQ ID NO: 48405 - DNA, 640 bp, Heterodera glycines
ggccgccaaggggcactaaagttttcatttttactgctattcattcaaaatgactcaaaatgggatgacaacagccagcaatgagttcaacgagctcaatgatttcctgtcaacgcgcgcttatcttcacggttttctgccgtcccacgaagaccaatatgtgttcaaatgcattgcggctgctccctccgccagcgaatatccgcacattgcgcgttggtacaagcacatcaaaagctacgaggatgctgaacgtgccacttggccaaagaaggctggacagccgccgcagaaagtcgtttcgaaagacagtgcaccaccggcaaagaaagccgacgccgaggaggacttcgacctgttcggcgacgaggacagcgatgatgaggagaagaagcgaatcaccgaggagcgcctgaaagcgtacgcggagaaaaaggcgaagaagccgggcccggtggccaagtcgaacgtcatctatgacgtgaagccgtgggacgacaccattgacatcaaggacattgaggccaatgtgcgctccatcgaatgtgacgggctcgtgtggggcacgtcccgaattttgccggtcgcattcggcgtgcagaagttgcagattggatgctgtgtcgtggacgagaaggtg

SEQ ID NO: 48406 - DNA, 355 bp, Heterodera glycines
  unsure (1)..(355): unsure at all n locations
ggccgagcgcacagtccggattcgggtacagagaagcgaagagatggagagcagcactttcgaaatggtcaacgccggagcccacatctgcttcanaatgtccaaacaaatgtcgcccctttctccaacgttcggatggtgaatgtcgttgatgaatttgacaatcggcggagtgcatgggtagtcgcggcgcaaaacgatgtccaaatgaaaggtgcctcacttcgtacggcgactcgggcggtcctttgatggaggccctccaatggtgcaagtctttgccgtcatccatcggtgtcgcggtgcaacccgtgatcggttcctgcttcanctccgccagttcctgtgtgatgcg

SEQ ID NO: 48407 - DNA, 409 bp, Heterodera glycines
ggccgcaagggctgagtcgtgcgactttttgtcctcaccaattacgccaaaaagctgtcaaaacgccgttacagaaagcggtcacttcggcggcagagcgtgcgcttgacattgtcggcaatgcgtcgcgagtgcggcttcaggacttgagggacaacccgggcgcgaggacggtgggcaggcaagtgcgcgcgaagggccacaaccaagcgggtcacaccattggcgagttgcaacacgcgtcgaagccgccgctcggctgggtttggggcgactattacaaaccttggcagcggtcctttgacggcgacagacgcttcaacggggacataaatctccgccgtgaatacattcccatttctttggtggagcttcagcgcctcatcgacttgggctggttggacacgag

SEQ ID NO: 48408 - DNA, 343 bp, Heterodera glycines
ggccgccaagtgagactgaaatataaaccacaaataagccgacgagagcgaaatggctccacgaggaaacaacatgcttcccaatgcccacttcccaagcattggcagcgtcgtatcaaaacttgggtcaaccaaccggcacgcaaggaacgtcgccgcgctgcacgttccgccaaggcggcccgattggcaccgcgtgcggccggcggtctgctgcgccctgttgtgcgttgcccaagcgttcgctacaacaagaaatgccgggtgggccgcggcttcacactggaggagttgaagcggtccggcatgggcaaatacgaggccagatcgttgggcattgcgg

SEQ ID NO: 48409 - DNA, 654 bp, Heterodera glycines
ggccgccaaggtttgagattgttttctcagccaacttccgcttaatcttcagaccttcactattttcttgtttaaaaaagttgcaacgatggtgaaaccaaaggttggcatcaacggttttggacgtattggacgcttggcattgcgtgcagcgattgaaaaggacactgtccaagtggtggcggtcaacgacccgtgtcatcaaactcgactacatggtgtacatgttcaactacgactccacccatggccgtttcaagggcaaaatttccacaaacgccggcaatttggtggtggagaaggaggggaagagcgcgcacaccatcaaagtgttcaacctcaaagacccggccgaaatcaaatggggcgaagcgggcgcggaatatgtgattgaatccaccggagtgtttaccaccattgagaaggcatctgctcatcttaaaggcggcgccaagaaggtggtcatctccgctccgtctgcggatgcgccgatgtacgtgatgggcgtcaacgaggacaagtacgacccggctaaggacgacgtgatcagcaatgcgtcgtgcaccaccaactgcttagctccgttggccaaagtgatcaacgacgagtttggcatcatcgaaggactgatgaccactgtgcatgcggtgaccg

SEQ ID NO: 48410 - DNA, 236 bp, Heterodera glycines
ggccgccaaggcgatcgaattcacaccctttcaagggggcgatgaggcggatcttcgtcaaaactctcaccgggaagaccatcacccttgagggggaggcaagcgacaccatcgagaacgtgaaagcgaagatccaggacaaggagagcatcccgccggaccagcagcgccttatcttcgctgggaaacaggtcgaggacggacgcaccctggccgactacaacatccagaaggag

SEQ ID NO: 48411 - DNA, 391 bp, Heterodera glycines
ggccgccaaggttgaaccaacagcagcagaagcaaaagtgggggggttcgacaacacgctgcccagcgcgaggcggagtcgctccgcactttggccttcttcggcgtgtgcctgtccaccgtggccacggttatcgctgtgctttccgtgccgttcgcctaccatcacttccagcagatcggcgcccaaatgcggagcgaagtggacttctgcaaaatgcgctccggcaacatgtggcgcgaggtgacccgcacccaggcctactccaaggtgtggcacgacagccgtcacaatcgtcatgcaggcggttgctgtggctgcggagtgtgacccccgggcccgcccggaccccctgggccatcgggacaacccggcggagacggagtacccg

SEQ ID NO: 48412 - DNA, 300 bp, Heterodera glycines
agaaaacgaaatgggtcccgaggaaacaacatgcttccaatgcccacttccacaagcattgggagcgtcgtatcaaaacttgggtcaaccaaccgggacgcaaggaacgtcgccgcgctgcacgttccgccaaggggggccgattgggaccgcgtccggccgggggtctgctgcgccctgttgtgcgttgcccaagcgttcgctacaacaagaaatgccgggtgggccgcggcttcacactggaggagttgaagcggtccggcatgggcaaatacgaggccagatcgttgggcattgcgg

SEQ ID NO: 48413 - DNA, 239 bp, Heterodera glycines
  unsure (1)..(239): unsure at all n locations
ggccgccaagngttgagccatcagcagagaaaatgaccgagtggggcagtcgcattcgggcgtacaaattcgttgcctattcgggcgtgactttctccatcgtgggcgttctctctgttgtgggcactctgcccatggggtacaattacgtagcccacgttcggggacagatgcagcacgagctcgggttttgcgagggctcagccaaggacatttacgtggaggtgaaccatatgaag

SEQ ID NO: 48414 - DNA, 535 bp, Heterodera glycines
ggccgccaaggttattattcatacaatgtctaccttttattggggaatgtttcttcgaattgggtgaaatatttatctcttgggacggctttggtcgttggctatgcagtttacattgaccgtaaacgtcgccttgacccggaatacaaacaaaaaattcgtcaaaacaggaaacagaaacaagccaactttttgtacgcaaaaatgagcggaggagttgattttcccgacccaagtgatccacaggcgaatgagatcttcttcttcagtcagatcactcttggagaggagaaaatgcagactgggcacattgaggaggggattacgcatctgtcgaatgcaattgtgacttgctcgaagcctgacgaattgctcagaattttccaacagaccatcccaccggagtgtgtcagtttgcttgtgcaggcgattcctggcgccaaaatgcgtcggaatgcctcttcatcgtatcgccatgggcgagagccgattgatttagactgtgcaaagattgacgatattggtgacaatgcgg

SEQ ID NO: 48415 - DNA, 213 bp, Heterodera glycines
ggccgccaagccgagtcggacggtcgcattcgggcgtacaaattcgttgcctattcggccgtcactttctccatggtgggcgttctctctgttgtgggcactctgcccatggggtacaattacgtagcccacgttcggcgacagatgcagcacgagctcggcttttgcaagggctcagccaaggacatttacgtggaggtgaaccatatgaag

SEQ ID NO: 48416 - DNA, 567 bp, Heterodera glycines
  unsure (1)..(567): unsure at all n locations
ggccgccaagttcgaatttaaaaattccttcgcttttcccaatgtgcccacttttccttctgctcagtgcttttgctttgactgcgttttgcctttttcctccttcgttcgctgccaaagatgcgcaacaattggtcgaggatggcaaaattgggcaaatgccaccgaaatgtttgatgagcctcggggagcaaaagtcgaaatggcacgacgagggggaaaagattgaggctggttccattgtttacgagtgccgtggggcgaaaatggtgccaatcggatgtttggacgaatttggccaacaaattcnacttaatgagacgaccgtggcgaagggccttctgatgcgatgctcactttcgcgttgggcgaccgatttgcaattgaaaatcattggctgtgtgccgaagggaaaagcgaacgaaaccattttggtaggagagaaatggacagagaaagagagtcagacgtggtgggaatgcgcggcggagggaacgaccgtcagagcacggcttggcggatgtgtggacgagccgagtcggagccgacttcgcatcggcgaaagcg

SEQ ID NO: 48417 - DNA, 311 bp, Heterodera glycines
ggccgccaagctccgatctcattgcaaaaaatggttgtatgttggcgggcaggacgaccatgaatacggcccttacacttccactgagatgttgcattggctgaacaactcttatttcgatggctcccttcggttgcgcactacgaatgacaaccgtttttacacactttccgagtggattcaagcttgtgggaatgagattccctttgcgttggatgtgcattctatggagtctttacgtgccaccgccaacagtcgaaattaccggggcatccaaccgaccattgacagtgtgcacaaccaccagcagg

SEQ ID NO: 48418 - DNA, 354 bp, Heterodera glycines
caaggtgtgtgaatttcgaaaaaatgggcggaattcacggcgtggggcgtccggacaacagcacaaagtcgtgcaaagctcgtgggtcagatcttcgtgtgcatttcaagaacacacatgagacggcgcgtgccatcaaacatatgccgtggaagcgtgccatccgctttctggagaatgtacgggagaagaaggagattgtgccgttccgccacttcaacggcggcgtgggacgcaaagcgcaggcgcaagcgtggggcacaacacagggacgttggccgaaaaagtccgccgagttccttctccaacttctcagaaatgcggagagtaatgccgaggtgaagggcctggacg

SEQ ID NO: 48419 - DNA, 448 bp, Heterodera glycines
  unsure (1)..(448): unsure at all n locations
ggccgccaaggttggaggaaagaaaatgcacgaagcgaagagatggtgggaattgcttccctttgttcgctggccgcgattttggccactctcgtggggatcccgcaactatacactcaaatcaacgaaatgaacaaccgcgtgatggacggtgtgcaggctttccgcgtgaacacggattccgcgtggactgagctgatggaggtgcanatcagtgtgactccaccgacccgtccgcgagagaatcccttcaactccattttcctacgccaaaagcgccagggattgcctccccaatgcgtttgccaactgcagcagccaagctgtgctcctggggctcctgggccgcctgggccccccggaacacccggcgagcccggcggcgccgggcatccgggaagcccaggacagcgccggacaacaagcaccgccatgccctccgcccgtg

SEQ ID NO: 48420 - DNA, 124 bp, Heterodera glycines
ggccgccaaggccaacggtcagtaagcgcgatgaagcttgtgcgctttttgatgaaattgtcccatgagtcggtgaccatcgagctgaagaacggcacacaagtgagcggtgctattcagggcg

SEQ ID NO: 48421 - DNA, 369 bp, Heterodera glycines
ggccgccaagaagatttcttaacccgactatttgttgctgagtcggtcgtttagctcatcataatcacctcataatattatattgaatgcttatattgcaagaattggatccgccgacagaggcggtgatcgaaacggagggtcaagtggtcgctcattgggaaaatcattgccttggccagggaactttatattggatagagagcgctttggtttggataagccacggcactaaaaatgggtttcgtttgcctattccgtcaattgtcgtccatgcagcatccggagccaatgaggacttttccgagccatgcctttttctgatggttgactattcaaagactgacattgaatacgttcccgcggagg

SEQ ID NO: 48422 - DNA, 297 bp, Heterodera glycines
ggccgccaagggaaatggtggcgaggattttgcccgaatgtgtggaggaatttcagcggacgtggggcaatcgaagcgaagtgaaaattgacaatgagtactttttgtccccggaaagtgcgggcggcgtctaattgttggccaaagacggcaaaatccgcgtctcgtccactttggaagcgcgtctcgacctcattgccgacaaaatcactccccaagttcgcactgctctgttcggtcccaatcagaaccgccgcttcttcgactgatcggtgccttcgcttcgaccattccatt

SEQ ID NO: 48423 - DNA, 275 bp, Heterodera glycines
ggccgccaagccttaagatggcccgtcgctatgatactcgtgcgacaatcttctctccgaaggccgtctctaccaagttgaatatgcaatggaagcaattggtcaggctgggacttgtcttggaattcgagctcccgatggcattttcattgctgcacaaaaactaacggcaaacaaattgcttgatgatcgaatcatgagcgagaaaatctacaaggtgtcggcgaacatcttctgcacggtggcggggatcaccagcgacgcgaatgtgctgg

SEQ ID NO: 48424 - DNA, 285 bp, Heterodera glycines
ggccgccaagcaagtttgagaccaaatgggtcagaaattagctggtggtcttgacgattattttcatcctgagacggcacctcgaattgacagaccaccgacgtttgatcctttgtatggttttccaaagggtcgcaagccaagagaaatgcaggcttcgtgggaagaattggagaaaatgaaaatgccgattagtgagcgagattattgtgcccataaaatggttgctttgcgcaaatgcgtttgggatagggcgccatttgcctcgcattattgccatggacg

SEQ ID NO: 48425 - DNA, 275 bp, Heterodera glycines
ggccgccaagccttaagatggcccgtcgctatgatactcgtacgacagtcttctctccgaaggccgtctctaccaagttgaatatgcaatggaagcaattggtcaggctgggacttgtcttggaattcgagctcccgatggcattttcattgctgcacaaaaactaacggcaaacaaattgcttgatgatcgaatcatgagcgagaaaatctacaaggtgtcggcgaacatcttctgcacggtggcggggatcaccagcgacgcgaatgtgctgg

SEQ ID NO: 48426 - DNA, 499 bp, Heterodera glycines
ggccgccaaggtttgagaacttaatttgaggattacattggaaataaattaattagacttcaaaatgggcatttcccaagacagatggcacaagcggcgaaagactggggggaagcgaaaccccattcacaaaaaacgaaagttcgaaatgggacggccggcagcaaatactaagattggtcctaaacgaattcatttggtgcgttgtcgtggcgggaacattaaacatcgcggacttcgtcttgataccggaaactttgcttgggcttctgaagggtgcactcgcaaaacgcgtatcatcgacactatgtacaacgcttccaacaacgaattggtgcgcaccaaaacattggtcaagggaatgatcgtctcaatcgatgccattccgttccgccaatggtatgaagcgcattacgcactgccattggcgcgcaaaaagggacaaaagttgaccgaagatgaggaggcgcggattggaggagcacaaaaacgctcaaag

SEQ ID NO: 48427 - DNA, 337 bp, Heterodera glycines
ggccgccaaggctaagcgaaacggaggtggaggagaagaaaaagcgtgtggcccagtcgccaggagggcttgacccgcaagaagtgttcgactcactgcctgcggaaatgcaagaagcgttcgaaacacagagcatggcaaagatatttgaagtggcgaagagcatggactccgaggtgttcaagtaccatttggatcgctgcactgcctccggactttggattccaaacgcaaaggaagccgagggacatggacaagaggaggaggagaaggaaacggaggagaaatgaccgatactcaactcaaagatatggtaaaccatgagaatacgtttaag

SEQ ID NO: 48428 - DNA, 236 bp, Heterodera glycines
ggccgccaaggccggatgtgccgcagatcgctccatttttctgttcgacacccgccagaaagtgccgctgagccgcgtagtgctcaaactgaggacgaacagcattgcctggcatccgcttgagccgttcacttttgttgctgcaaatgaagactacaatttgtacaccttcgacatgcgcaggttggactccgctcgccacgtccaccaagggcacacctccgctgtgatggacg

SEQ ID NO: 48429 - DNA, 509 bp, Heterodera glycines
ggccgccaatattgcacactaaaacaaattactgtgaaacatgggaaccgaacttgatgaaaatgcagtgcttgctgatccttggagcactgttgaacatgtgagcggtggacgagtcaatgcaccaattggtcaccctgaacctttccgaaattaaactgttcagggagtggtatcttaatgacgtggacttttccgtcctttcactttttgattatgtcgcggtgaatagaaaatgcggataaatatttgccgcccaaatgcggttgttatctgcataaccgcttccgtcaggttacctgttcagtggtggaacggttggactcgtcactgatgatgtactggcggaacaaccgtgatagactgatggtggtgcgcattgtgaaacatgtctctgaaatcattgatcttatcaccgcatagaacctcgttcaattgttacataatgctgtgataggcgacggacttagtgcggattacgctccttttttccttgcgggtgcttgtaa

SEQ ID NO: 48430 - DNA, 337 bp, Heterodera glycines
ggccgccaagaagccaccaaaaatgcgtttgtcatttctccgtgccagcgagaaacattttggcaatttgtcgaaggcttacggttggtattacgttcgcattgctccggttgaacagaaagtatggaagggctttttctttgatgcgtttgttaagccggtcaaagagcagttgccccactggtggatgttcttcttccccgtagtcacttactttttggtcaccgactgggccaagaaagagtaccgtcgtctgggacggatcaaagaattcactgacgaagaatgaatgtcgaattggccattcggactgttatttgtaggaaagaccaccgag

SEQ ID NO: 48431 - DNA, 345 bp, Heterodera glycines
ggccgccaaggttttcgacatgaatagcctgtatttcgaggatttgttcaccgtcaaaaacattgaccccgatgggaaaaagttcgacagagtcagtcgtctcttttgtgacagcgaatcattcaaaatggacctcattttggatgtgaacacccaactctacgccatgggaatcaacgacaaattccggttgatgctttgcacttcgattcgggacgacggactcaccgaagagggcgaatacgacaaatcaatagaaaacattccccgggttcgaatgttcgaatatgtgatgtacggcaaaatttaccggattgagaacgacgagggcaccgcagaaacgag

SEQ ID NO: 48432 - DNA, 259 bp, Heterodera glycines
ggccgccaagattagctgttagtcttgacgattattttcatcctgagacggcacctcgaattgacagaccaccgacgtttgatcctttgtatggttttccaaagggtcgcaagccaagagaaatgcaggcttcgtgggaagaattggagaaaatgaaaatgccgattagtgagcgagattattgtgcccataaaatggttgctttgcgcaaatgcgtttgggatagggcgccatttgcctcgcattattgccatggacg

SEQ ID NO: 48433 - DNA, 214 bp, Heterodera glycines
ggccgccacgacaacgcaccaaatgaattcgtttaggaccaatcttagtatttgctgccggccgtcccatttcgaactttcgttttttttgtgaatggggtttcgcttccccccagtctttcgccgcttgtgccatctgtcttgggaaatgcccattttgaagtctaattaatttatttccaatgtaatcctcaaattaagttctcaaacttgg

SEQ ID NO: 48434 - DNA, 520 bp, Heterodera glycines
ggccgcggcgatgatcggcgacagcaggaggccgaacaccgggtacagcacgccggcggcgatcggaatgccggcggcgttgtagatgaaggcgaagaacaggttctgccggatgttggccatggtcgcctgcgacagccgccgcgcgcgcacgatgccggtgaggtctcccttgagcagcgtgacgccggcgctctccatggcgacgtcggtcccggtgcccatggcgatcccgacctcggccgccgccagcgccggcgcatcgttgacgccgtcgccggccatcgccaccaccttgccctgcgccttcagcttcgcgaccacggcgctcttctgctcgggcagcacttcggcctcgacctcggcgatgccgagccggcgtgccacggccgcggccgtggtgcggttgtcgccggtcagcatgatgacgtggacgccttcggcttcgagcgcgcgcaacgccgccggcgtggtcggcttgaccggatcggcgatcgcgatcagcccggcgagctggccg

SEQ ID NO: 48435 - DNA, 215 bp, Heterodera glycines
ggccgccaaggtttgaggagagttgaaattttatcttttgaaaatcgtctagacctatttaatttttcgaaaaatgtctgacaacaaagaagaactcgttcagcgggctaagttggctgagcaagctgagcgctacgatgacatggctcagtcgatgaaaaaggtgacggaattgggtgcggagttgagtaatgaggagcgcaacctgttgtcgg

SEQ ID NO: 48436 - DNA, 450 bp, Heterodera glycines
ggccgccaagcaagtttgaggaaagaaaatgcacgaagcgaaaatatagtcggaattgcttccctttgttcgctggccgcgattttggccactctcgtggtgatcccgcaactatacactcaaatcaacgaaatgaacaaccgcgtgatggacggtgttcaggctttccgcgtgaacacggattccgcgtggactgagctgatggaggtgcagatcagtgtcactccaccgacccgtccgcgagagaatcccttcaactccattttcctacgccaaaagcgccagggattgcctccccaatgcgtttgccaactgcagcagccaagctgtcctcctggtcctcctggcccgcctgggccccccggaacacccggcgagcccggcggcgccgggcagccgggaagcccaggacagcccggacaacaagcaccgccatgccctccgcccgtg

SEQ ID NO: 48437 - DNA, 283 bp, Heterodera glycines
ggccgccaaggtccaattaagaaaaaattaagcccagtccttccttaatattcatcgtaacccatccatctaaatggcagaacagcgcgaggaccacatccaacgggccaagctggcggaacaatgcgaacgctacgacgaaatggccaaggagatgaagcaggtggccgaaatgagcgtcgaactcaccgaagaagagcgcactttgctgtccgctgcgtaccgaagggcgatcagcactcgtcgttccgcgtggcgtgtcatcgaatcccatgtgaaaaag

SEQ ID NO: 48438 - DNA, 286 bp, Heterodera glycines
ggccgccaagaaacaaattcgaacttgttgggtgtggcgtaagaacaaccgttggtggcgttatttgccgcgacgtaacgactcccacaacctaatcgacatggacgagctgggcgaacaatgcgccactttttccgacccaatgcccgccgatccacccaaactttgggtggcgtggctgtacacagattcttacgggtcgggacgaaagatcagggaccaggtgacaaagctctttggcaaagacgcgaaaacgggcgaaatgcaagtgttcaaaaacacactg

SEQ ID NO: 48439 - DNA, 215 bp, Heterodera glycines
ggccgccaagcgcaattcgtattggggggtcaaatcgacggaagtgacgaagaaattatttgcggaccttcgctccgattatcccgaaacgattgggcagaatttcgatgtgaaatttgtgcgcgacttgacgacgggttatgacaacgctcaaccggatgacagggccattctgccgctgagcacctcctccgaaatggtgacgttcactttgg

SEQ ID NO: 48440 - DNA, 233 bp, Heterodera glycines
ggccgccaagatcgaattcacaccctttcaatttggctatcatgcaaatcttcgtcaaaactctcaccgggaagaccatcacccttgaggtcgaggcaagcgacaccatcgagaacgtgaaagcgaagatccaggacaaggagggcatcccgccggaccagcagcgccttatcttcgctgggaaacagctcgaggacggacgcaccctggccgactacaacatccagaaggag

SEQ ID NO: 48441 - DNA, 235 bp, Heterodera glycines
ggccgccaagcgatcgaattcacaccctttcaatttggctatcatgcaaatcttcgtcaaaactctcaccgggaagaccatcacccttgaggtcgaggcaagcgacaccatcgagaacgtgaaagcgaagatccaggacaaggagggcatcccgccggaccagcagcgccttatcttcgctgggaaacagctcgaggacggacgcaccctggccgactacaacatccagaaggag

SEQ ID NO: 48442 - DNA, 422 bp, Heterodera glycines
ggccgccaagcgaaaatatagtcggaattgcttccctttgttcgctggccgcgattttggccactctcgtggtgatcccgcaactatacactcaaatcaacgaaatgaacaaccgcgtgatggacggtgttcaggctttccgcgtgaacacggattccgcgtggactgagctgatggaggtgcagatcagtgtcactccaccgacccgtccgcgagagaatcccttcaactccattttcctacgccaaaagcgccagggattgcctccccaatgcgtttgccaactgcagcagccaagctgtcctcctggtcctcctggcccgcctgggccccccggaacacccggcgagcccggcggcgccgggcagccgggaagcccaggacagcccggacaacaagcaccgccatgccctccgcccgtg

SEQ ID NO: 48443 - DNA, 245 bp, Heterodera glycines
ggccgccaagcaagtttgagcgatcgaattaacaccctttcaatttggctatcatgcaaatcttcgtcaaaactctcaccgggaagaccatcacccttgaggtcgaggcaagcgacaccatcgagaacgtgaaagcgaagatccaggacaaggagggcatcccgccggaccagcagcgccttatcttcgctgggaaacagctcgaggacggacgcaccctggccgactacaacatccagaaggag

SEQ ID NO: 48444 - DNA, 233 bp, Heterodera glycines; identical to SEQ ID NO: 48440

SEQ ID NO: 48445 - DNA, 397 bp, Heterodera glycines
ggccgccatcgcctgttccttgatcactttttcgggcagtggcaaataaatactcaaaatggaatcgacgaatcggacgaggtttggggtggccgaaaggtgaagctgaagccgatcattgggcaaaggggtgcgcagcagcggagccaaacagccgaagacgagcgcatcgatagagcatggcttgtcgccacagaaatatttgttgtctgacaactttgccgaaagtaaattcagtgcctgaattgcatccaaagttagctgttgttggttcttcctgatcgctctgactgttgtgtccattcgtctccgtctcctttccatgtaataaatgttgtatgggaaggtgacctgttgggcatagagagggtgcacaattgtgccgtaattgcatttg

SEQ ID NO: 48446 - DNA, 237 bp, Heterodera glycines
ggccgccaggagcgatcgaattcacaccctttcaatttggctatcatgcaaatcttcgtcaaaactctcaccgggaagaccatcacccttgaggtcgaggcaagcgacaccatcgagaacgtgaaagcgaagatccaggacaaggagggcatcccgccggaccagcagcgccttatcttcgctgggaaacagctcgaggacggacgcaccctggccgactacaacatccagaaggag

SEQ ID NO: 48447 - DNA, 571 bp, Heterodera glycines
ggccgccacatttgaagaggaaatcatcgacgattatttctcacctgttttgaaaatgaaaggccgagcgaaacaacaacaacggatgggcagtttccccgactttttgcttttgcaacttggcagattcgcatttgattggattctcggtacgcagcataaattggacgtggacgtgcatgtttcggacgaattggacattaacgcgttcttttcaacgggagaattacagccgaacgaaaagagtttgcctgttgacgacacttcagccgtcataaaggagcgcttatggcaagagccgaaccatgaaattgtggccaagttgctttcgatgggtttcactgaaaacgcagctaaaaaagcggcgcttttcacaaagaacgaatcagcggaatcggccattaattggattcttcagcattctgacgacactgatgtaaacgatccgcatccgatgttaacgaaacaaagcactccgccactgacatccaaccaaggccagaacgcgtctcagaaagttcgtcacggcaaaggtcattaccgactgcgcgccttcatttcgcacattggg

SEQ ID NO: 48448 - DNA, 363 bp, Heterodera glycines
ggccgccaagttttccctttgttccctctcccaaaatgtcttctcgcgcgacccccggtggcattggcttccaagtggtggcaaagcaagccagcaaattcaatgaccaagagggcaagctgatcctggactgggtcaaaaagctaagtggtgaaaacttcagcacggatgggagccgtgagaatttctataaattgttgaaggatggcactttgttgtgcaaattggccaacggcattcagcccggatcggtcaagaaaattcaacaaccgaccggcaatttcgcctgtatggaaaacatcaacgcttttgtgtcatttgccaaggcccaaggagtgccaacggaagaaacttttcagagtg

SEQ ID NO: 48449 - DNA, 201 bp, Heterodera glycines
ggccgccaagtgcaaatcttcgtcaaaactctcaccgggaagaccatcacccttgaggtcgaggcaagcgacaccatcgagaacgtgaaagcgaagatccaggacaaggagggcatcccgccggaccagcagcgccttatcttcgctgggaaacagctcgaggacggacgcaccctggccgactacaacatccagaaggag

SEQ ID NO: 48450 - DNA, 433 bp, Heterodera glycines
ggccgccaagaatgcacgaagcgaaaatatagtcggaattgcttccctttgttcgctggccgcgattttggccactctcgtggtgatcccgcaactatacactcaaatcaacgaaatgaacaaccgcgtgatggacggtgttcaggctttccgcgtgaacacggattccgcgtggactgagctgatggaggtgcagatcagtgtcactccaccgacccgtccgcgagagaatcccttcaactccattttcctacgccaaaagcgccagggattgcctccccaatgcgtttgccaactgcagcagccaagctgtcctcctggtcctcctggcccgcctgggccccccggaacacccggcgagcccggcggcgccgggcagccgggaagcccaggacagcccggacaacaagcaccgccatgccctccgcccgtg

SEQ ID NO: 48451 - DNA, 2247 bp, Heterodera glycines
atgtctgaacaatccggggaaacctttgcgtttcaagcggagattgcgcagttgatgtccctgatcatcaacaccttctactcgaacaaggaaatcttcctccgtgagctgatctccaactcctctgacgctcttgacaagatccgttaccaggcgctgaccgacccgtctcagatggagagtgggaaagagctcttcatcaaaatcgtgccgaacaaagccgataagacattgaccatcatcgacactggcattggcatgaccaaagctgacctcgtcaacaaccttggcaccattgccaaatccgggacaaaagcgttcatggaggctcttcaggctggtgcagatatttcgatgattggccagttcggtgttggattttattcggctttccttgtggccgaccgtgtcacggtcacatcaaagcacaatgacgacgattgctaccaatgggagagctcagctggtggctcgttcatcattcgcaattgtgccgatcctgaagtcacccgcgggacaaagatcgtcctccacctgaaggaagaccaaacggattatttggaggaacgtcgtgtgcgcgaagttgtgaagaaacacccgcagttcatcggttacccgatcaaattgttggtggaaaaggagcgtgacaaggaaatttcggatgatgaggcagaggaggagaagaaggaagatgaagcaaaggaggaggagaagaagccagaagatgacgtgtcagatgacgaagccgagaagaaaaaagaggaaggggacaaaaagaaaaagaagaccaagaagatcaaggagaaatacacggaggatgaagagctgaacaagaccaagccgatttggacccgcaatcccgatgacatttcaaatgaggagtatgcggagttctacaagagcttgtcaaatgactgggaggaccatcttgctgtcaagcatttcagcgttgaaggccaactcgaattccgtgctctcctcttcgtcccccaacgcgctccgttcgatctctttgagaacaaaaagagcaagaatgccatcaagctttatgtccgtcgggttttcatcatggagaactgcgaggagctgatgccggagtacctgaacttcatcaaaggagttgtcgactctgaggaccttccgctgaacatttctcgtgaaactttgcaacaatcgaagatcttgaaagtcatccgcaaaaaccttgtgaagaagtgcatggaccttttcgaggagatttctgaagacaaggacaacttcaaaaagttctacgagcaattcgcgaagaacattaagcttggtattcatgaggactcggtgaatcgtaagaagctctcagactttctgcggtactacacttcggcctccggcgaggaaccatgcagcttcaaggactatgtttcgcgcatgaaagagaaccaaacatgtatctattacatcaccggcgagtccaaggacgttgtccaaaactcctccttcgtggagcgtgtgaagaagcgcggcttcgaggtcatctacatggtcgacccgattgacgagtactgcgtccagcagctcaaagaatacgacgggaagaagttggtcagtgtgaccaaggaaggccttgagctgccagagagtgaggaggagaagaagaaatttgaagaggacaaggtcaagttcgagaagctgtgcaaagtcattaaggacatcttggacaagaaagtccaaaaggtttctgtctcaaaccgtttggtctcttctccgtgttgcattgtgaccggagagtacggatggtctgccaacatggaacggatcatgagggcccaggcattgcgtgactcctccacaatgggatacatggcgtccaaaaagaacctggagatcaaccctgaccattcaatcatcaagtctttgcgcgaccgtgttgagaaggagcaggacgacaaaactgcaaaggacctcgttgtgctgctgtacgaaacttctctgctcacctccggcttttcattggaggacccgcaacagcatgcgtcgcgaatttaccgaatggtgaaacttggacttgacatccccgacgaggaggagccggccgagcaacagccgagcacttcgggcgagccgacaattgcggagaaaattgctggtgccgaagaggaggcctcgagaatggaggaagttgactgaatggtgacatcgctatccattcttggatctcggctattcattgtttttttgttttcttgtttgacataaatttgaattaaa

SEQ ID NO: 48452 - DNA, 1356 bp, Heterodera glycines
caagtttgagcttagacagacaaatatttcaattctcccaattttataaagcaagtaaaatgtttcttcttttcttattatcaatgcttctacttcagacaaatggttggcgtgcccgcgagcgtgcaattgaattggccgactcggacgaatcgatcgaattgcagaacattggccaacggaaaacggacattcgaacaccgacagaacgaatgtctgctcttcgtcaaatgatcgaacgcggcttttccgattggaatgcttacaaacagaagcatgggaaagcatacgcggaccaagaagtggagaacgaacggatgctgacttatttgagcgccaaacagttcattgacaagcacaacgaggcgtacaaagagggcaaagtgtccttccgagtgggagagactcatattgccgacctgcccttttccgaataccaaaagctgaacggattccgtcgtttgatgggcgatagtttgcgccgcaatgcatccacttttctggcgccaatgaatgtgggcgatttgccggaatcggtggactggcgggacaaaggatgggtgaccgaagtgaaaaaccagggaatgtgcggctcgtgctgggcattcagtgccaccggcgcattggagggacaacacgtgcgcgacaagggacatcttgtttcgctgtcggaacaaaatctgatcgactgctcgaagaagtacggaaacatgggctgcaacggaggcatcatggacaacgccttccaatacattaaggacaacaaaggcatcgacaaagagacggcctacccctacaaggccaagaccggcaaaaagtgtttgttcaagcgcaacgacgtgggggcaaccgactcgggttataacgacatagccgaaggggacgaggaggacctgaggatggctgttgcaacgcaagggcccgtctcagttgccattgatgctggtcaccgttcctttcaattgtacaccaacggcgtttactttgagaaggaatgcgacccgcaaaatttggaccatggtgtgctcgtggagggctacggcaccgacccaacccaaggcgactattggattgtgaagaacagctggggcacccgctggggcgagcagggatacattcgcatggcacgcaatcgcaacaacaattgcggcatcgcttcccacgcctctttcccattggtctgatcggagtgaatttgttgcccttgcgctgattcagagacatttcatttgattaatcgtgctaaatgataagataattgataatccatcagtctatcggtcgatttccattttttatgttcgcaattttattcacatataaataaatgacttatttaaaaaaaaaaaaaaaaaa

SEQ ID NO: 48453 - DNA, 1822 bp, Heterodera glycines
atttgcttagatggatttgttaaaatcttacgacggctcttcatcatcggacaatgaacaagaattggcagatataccttcttcgtccaatcacaacaaattgctcgctttgaaaatcccatccatcaacttaacacccaacgtgattgaacaacgcgccattcaacaggttgcggttgtggatccaaaaaccaaagagttgtatcacaatccgcgcttcgacgaattgtttagaccagagagcggcccacaaaatccgtttaaaagtgaacatcaacgagcagaaaagaacacactgaccggctatgtggagccagcgcatttcaacgccttccattttgagcgttcacttcgctcctacgatacgcttggctatgcggataatccaacggcagacacaaccagcgcaaagttcgttggtgacgttggacaagcgcaagaaaaggccggcgagtcgctttttgaatcagtaaaaactggcggacagaagcgaaagagagtgataaattacgacgcatcaaacgttgacggatatacgggaccgtgggcaaggtttgaggacgagaagacatttgctcgaccggacccagaattgcagaaggaaatggacgaaattgtgcggaaacggaaactgaaaagtcgtgctggccgaagagcggccatcgcggaattgcatttggcagaagagagcaccaaattgcacataaaagatgacactgactatttgggccgttcctttatggaaccgccgaaatacacgggcaccaatctgcgcgaggactttgtgcccgaccgctgtttcccgcccacaaaacaagcacacacctacagcagtcacaccaaaccggtgaccgccatccgatggtttcctcgtagtgcgcacatgtttatctcttgttccatggacggaaaagtcaaattgtgggaagtgtacggcaaccgtaagttgatccgcacatacactggacacaaagtgcccgtgaaggacatttattttaacaacaccggcactgaatttctaagtgccgcttatgacaattacatcaaattgtgggacactgaaaccggtcaggtgaaaaaccgctacacaattggaggccatcgggcgtatgtggtcaaattcaacccggacgatgataaacaaaacattttcatggccggaatgtccaacaaaaagatcatccaatgggacacgcgaactggcgaaatcgaacaagaatacgaccgtcatttgggtccagtgaactcgatcacctttttcgacaaaaaccgtcgtttcgtttctacttcggacgataaatctcttcgcatttgggaatttggcattcccgtggatacaaaactgattcaacatgctggactacattccattccttcaatgactagggcaccaaatgaaaaatggatcgttgggcagtccatggacaatcgaattgtccttttccaaatcgtcgatgacaagttgcgattcgctcgtaaaaaggccttccgtggtcacaatacagcagggtacgcctgctcaactgatttttcgccagagatgagttttctcgcttccggtgatgcggacggtaaaatcacaatgtgggactggcgcacacacaaaattgtctccacatggaaggcacatgataatgtgtgcatttcaacactgtggcatccgcacgagaaatcgcggatgatttcttgcggatgggacaatgtaatcaaaatgtgggtctgacaatgaagtaaagctgacgacgattcaatgatttaaagtgaatttatttgtaatgtctcaaccgataaaaggaaaaacgtccaaaaaaaaaaaaaaaaa

SEQ ID NO: 48454 - DNA, 370 bp, Heterodera glycines
aggaaatggccgagaacatcgaagaaatccttgccgaaatcgacggctcccaaattgaggagtaccaacgctttttcgatatgttcgaccgcggaaagaacggttacataatggccactcaaattgggcaaattatgaacgcgatggagcaggactttgacgagaagaccctcagaaaattgatccgaaaattcgacgcggacggctcgggcaaattggaattcgacgaattctgcgcgttggtgtacactgtggccaacactgtggacaaagacacgttgcgaaaagagctgagagaggcattccgactgtttgacaaggagggcaatggttacatttcgcgccccacgctgaaagaactcaatgctgc

SEQ ID NO: 48455 - DNA, 507 bp, Heterodera glycines
gctcatccatctcttctcatcttcatcctctacttttgtccttctccccatcgccatgtctgaagaggaatcgcaatattccgacgaagaggttgaggaggaaagcattgccgcggatgaagtgagcgtgcaggaaccggcaccgcccaaagaagaggagccggcgccggaagccgaagcggaggcaccgccggcggaagaaaaggaagaggaggaggaagaagagccggggtcacccggaggggcaggcgatgcgccgaaagaagaatttcgtcgcaccagtgttacggagtccgtcgcgccgatggcgcaacttcgccgcgcgccgccccctcagccgaagccggcagaagaatcgatgacggaggcggaagcggcgatgctggcggtgaagaagcgccacgaggaggaggaggaagccaaaatgcgcgacaatgacgagcgacgccgccaggaactcgctgcagttgaggacgaactgcgcgttttgaaagaactcaatgctgc

SEQ ID NO: 48456 - DNA, 559 bp, Heterodera glycines
gtccaattaagaagaatatttttgttttgctttgcttcctgaagagaatacgcaactgaagatgcaaattttcgtcaaaaccttgaccggaaagaccattactttggaagtcgaggcgagtgacacaattgaaaatgtcaaagccaaaatccaggacaaggaaggaattcctccggaccagcaacgtttgattttcgctgggaaacaattggaggatggacgcactttggccgattacaacattcagaaagagtcgacgctccatttggtgctccgtctgcgcggagggatcattgagccgtcgttgcgcatgttggcacaaaagtacaactgcgacaagcagatctgtcgcaaatgttacgctcgtctgccgccccgtgccaccaattgccgcaagaagaagtgcggacactccaacgacttgcgcatcaagaagaagctgaagtagaggaccaaatgtttgctggacgaatgggattattgttgatcgaattatttgattttgtttgatgtcgtgagaagacaattttatgttgaaaaaaaaaaaaaaaaaaaaaaa

SEQ ID NO: 48457 - DNA, 630 bp, Heterodera glycines
gacatggaccaatttgacttttcttatttgaataaggcattcaagcgagcattggagcccaaattgccaagcaccgacatccggccaatcccggatgaacgctgcgttaacacagctcatctcggcgaggcagagaaagagcgcttggaacaaatcggcttgaaagccattgcggaaggtcgcgtggcggccgttgtgttggccggcgggcaggccagccgtctgggctctgcccaaccgaagggcgttcttcgcctgggcaccggacttggccaggacgacgtcgactcacttttgttcattcaggctgcacaaattgtacgccttcaacgcatggcggccgagcagttcccggccgaggctgcgaagagcggtgggcgcatcacttggctggtgatgaccagcaacaccaccaatgccgcggtgcatgaccatctgaatgccgtactcgccgagactggcctcagttcggaccaggtgctgatcttcacccaaaaagaaattccggcatttgactttgatgggaacgcactcatgaaaagcagcactgaattggtcactgctcctgacggaaatggcggcttttatgacgtggtccgcccgcttcttgccgaactggagaaacgcggt

SEQ ID NO: 48458 - DNA, 1169 bp, Heterodera glycines
agtcaacgtccaccgatattgagtttcaacatcatcgccatgtggcagtgcccgcctccgaattgacgccgtccccgtcgaccaccaccgcaacggccactgacgatggttcaacaacaacaaacgctgctgcggatatggaacaacacgaaaatgctgggcgtaaacggcacacaaaggaccggttccgctacggtaactacaaccgctactacggtgtgcgcaaccaaggctttgaccacgacccccgtgtcgacttgtttcccgtccaatggttccatgggcgtcgcgtgttggacattggctgcaatgttggccatttgacgcttgaaattgccaagaagttgggcccagcgcatattgtgggcattgacattgacgaccatttggtcggtgtggcgcgcaaaaacattcggcattattgtggcagcgcgcaaaagctgatcggcaaattccccgcctcactgttaccaccggcggaggaggcggaagcgtcgtcaacaaatgctgtcaatgacgacggcaaaagtgccacaaaaatggagtcggaaaatgggaaaggaggaggggccatcttcgaccaccgcaaagcccgccgttctcccatatgggcaattcccaaaaaatgtgtggtttttgcgcgaaaattacgtgctcgactgtgacgagttccttgaaatggttcgcgaggagtacgacgtgattttggcgctgagcatcaccaaatgggtacatttgaactggggcgacgatgggctgaaacggttcttgcgtcgcacctttttgaaccttcggccgggcggacgactgctgttggaagcgcagccattccccagctattacaaaaaggcaaaaatgacgtctgatatgttcgagacgtacaaggccatccagttcaagccgtaccagttcaaggacttcctgctgtccgacacggttggcttcagcgagtgcgaagagttgggcacaccgacggcaattagcaaaggttttgaacggccaattttggtgttcaagaaggcgtcatcgtcgactacaccaacaacaacaaagcggaaaagggagagatgtcttcgtccgtaaagggcggcgccgagtagttcatcttctgcagacgatcagacacgggaattgtgacgaatttatttcacgaattggacatggatttt

SEQ ID NO: 48459 - DNA, 1034 bp, Heterodera glycines
agggtatacacgcttcatcaatctttcgaaggtcaaatatgccagaggcaattccggaaggcgattacgagagaggaaagaagattttcaagcaacggtgcttgcaatgccatgtgattgattcgactgctacgaagactgggccaactctcaacggcctttggaataggaagagtggctctgtaccaactttcgattattctgctgcgaacaaaagcaagggcgtcatttggaacaaggaaacgctgttcgaatacttgctcaaccccaagaaatatattccggggaccaagatggtctttgctggactgaaaaaggctgaggagcgcgccgatttgatcaaattcatcgaagtggagagtcagaagccgccttcgtaaagtgattgaatcgaacctccgattattagggcaatggttgtttgacggtctataataatagagtctgttattgtcgtaacatttctgtccggttagtctcaaataaaatgttggatgtctaaaaaaaaaaaaaaaaaaaatatcaaaaacataataatcaacttaagcttcagtctcatttcttttttgccatcttacttatgtttgaatgttttatatactcgagcaattattagctctaaaattatttcttatttgatatgagtgcctaagcagtttgttctttccatttttggccctcttgttaacacatgagatttgactgccttagtgccgtgtaatactgcggggaggggtgaatacggcacacaaagcaaacacttgatgaaagagggagaagcggggggggcatcgcccgaaggattgcttatgccgtgcccagcccaatgcccccggcaattcccgtcgcttaattgcatttccattcccttctcatgtctctctctctctctctgtccttttcctccgtcaattcaatggcaaattctgatcaaacacaaataaactttccttaattgggcgtgtcttttcattgccttgtccttttgcaatttcggtctctcattaattaattccattgatttgcctttccct

SEQ ID NO: 48460 - DNA, 690 bp, Heterodera glycines
  unsure (1)..(690): unsure at all n locations
ggaggttcggcacgcagtgaccggcaaacacaactcaaagggttggcaagtgatcccatgccaaggatggaatttgttggacggatgcgacggagtcggctcatggtaggagagaaggagcaaaacacgaaataaccttgcaaaatagccgatattgcgacgtgttggacaaatgcaaagagacggtcaaaggggcgcataaatatgtgaacgatcgcaaggcagaagagtttttgcggcagaataaattgtgccctccgcccaaagcccataggacgatgacttgcagcaaaatcttcaccattgaggatttgccgaaaagtttcttcggccccctccaatcgaatgaatattggctgactttctctttcactgacgggaaagacaaaaaattgggctgcgcgaggctttgggtggacgtgtgcaaataccatctgcaggacaaacagcaaaagtgcctgagggacccaaacgcatttaagaatttcatcaacgaaatcagcagtcaggcggagcaaatccgacagaggacaaacagcggatgaaagaagcggaaaaagcacgcagaaacgggtcactcccccccctccccccacaaatcagcccaatttgaggagaacaataaattaaacaccatttataatgtgactgactcattttcaatttgcccaatgaactttcgaaatccnn

SEQ ID NO: 48461 - DNA, 566 bp, Heterodera glycines
caagtttgagtcaggctttttgattatttttgtgactttattcccgtcctaatgccaccaacgagtaaaaaaacaggaaaggctgtcgcaaaggctgtggaggccaagaagaagctggccaaaggccagcacattgtgcgcaaaaaaaagatgcgcacgtcggtgcacttttaccggcctcggacgctgaagctggcgcgttcgccgaagtttccgcgcaaagcggtgccgaaacggaacaaactcgactccttctccatcataaaacacccattgaccaccgaatcggcgatgaagaaaattgaggacacaaacacattggtgttcatcgtggacgtgaaggccaacaaacatcagatcaaaagtgcggtcaacaagctctacaacatcgaagcacagaaggtcaacactttggtcacgcccgatcatacaaagaaggcgtatgttcgcttagccgccgattatgatgctttggacgtggccaacaagattggtattatttgagtatattctgcgctttgttttgttgatttttgcgaataaattgttgctatgttaaaaaaaaa

SEQ ID NO: 48462 - DNA, 605 bp, Heterodera glycines
gtccaattaagcctaattaactcaacattttctaaaatttccaatggctggtggcaaaagaaaagcgggcaaggacagcggaaaagcaaagtctaagaaaatcatctcgcgcagtgccagggctggcctccaattcccggtgggacgcatccatcgcttcttgaagaagcgcacaacaagcaccggacgagtcggcgccaccgccgccgtgtacagcgcagcaattctggagtatctgacggccgaggtgttggagctggccggcaacgcgtccaaggacctcaaagtgaagcgggtgacaccgcgtcacttgcacttggcaattcgtggagatgaggagttggattcgatggtcactgcgacaattgcgggcggcggagtcattccgcacattcaccgttcattgatgagaaagcctccgagtcaactcaatcacagtcaccagcagaatcattcgcagcagcagatgaccaacgttggcaatggcgacaactgattttggccaaatgaatatcgttctttcaataaaaaaaatattgtgacgatttgtgcaattttaccaaaaccgataaatcttttgctcttcaaaaaaaaaaaaaaaaaaa

SEQ ID NO: 48463 - DNA, 385 bp, Heterodera glycines
gagaatccctgagtcgtttaataattgtagtcagtaaagacaagatttatttaacgaaggacaatgccgcgccaaataactgatattaagcaatttctgctgactgctcgacgcaaagacgcgaagtcagtcaagatcaagaagaacaaagagaacaccaaatttaaggttcgctgtacgcgctttctttacactctcgtggtggatgacaaagagaaagctgagaaattgaagcagtctttgcccccagggcttcaggtcaaagaattgaagtgattgacgcacgaaaattgcatatggttttttgttttgtttttccattttattctcgataaactgttgtgttaaaaaaaaaaaaaaaaaaaaaaaaaaaaaaaaaaaaaaa

SEQ ID NO: 48464 - DNA, 795 bp, Heterodera glycines
caagtttgagatttgctaatttgtccgtcctgacgaagaggcatgaaatggctctttgcatgtggcaacatggagaagaggcactggccaaggcgttggtggcatgtcgcatttacaaaagtttggccaatgaggcagcggaggattacttggaagtggaagtatgtgaggaacttaagacgtatgccgaagagtttcggcaactttcactggaattgctcgaccattgctataaagaagatgacgcacaaacgcttcagttgctgacatacgaacttagctattggggccaccagacatgcttgtcactggccgtcattgtgaacaacaagcaattcctggcacacccttgctgccaaattttgttggccgacctttggcacggcggtctccgtattcgaagcaactccaacatcaaagtgctcatgggcattctgttccctccctcaatctttctgctcgaattcaaatcccgcgaagaattgctgcttcagcctcagaccgcagctgaacatcagaaggacatcaacgaatcgtcgtcgtcctcctcagattcctcctcttcgacctcgtcttctgacagtgaaagcgacggcgacgagtcggacgcgggcgaaagaggcggtgccacagccgaagagcgccgacgcacgtcgcattcgcacggaagcatgcagtcgttgaacttcacctccatttttaaaagtaagcgcaaacgccgtcgtccttcccactcgcgttcttccaccacggccaaagaggacattgagatgggcaaacagaggaaccgagtga

SEQ ID NO: 48465 - DNA, 443 bp, Heterodera glycines
  unsure (1)..(443): unsure at all n locations
agtttgagcgattgaattcaataccccttcaatttggctatcatgcaaatcttcgtcaaaactctcaccgggaagaccatcactcttgaagtcgaggcgagtgacaccatcgagaacgtgaaagcgaagatccaggacaaggagggcatcccgccggaccagcagcgcctcatcttcgctgggaaacagctcgaggacggacgcactctggccgactacaacatccagaaggaatcaactcttcatctcgtcttgcgccttcgtggtggaaagaactagaacgacgaacggaagaaatgagtgatctgtatcgatccatatccgtatcttgagactgtcctgtattattgtgttccgttttattcatcatcatgaaatgtatttcaatgaccacggaacgataaatccatcaaaactcnaaaaaaaaaaaaaaaaaaaaaaaa

SEQ ID NO: 48466 - DNA, 714 bp, Heterodera glycines
gtccatttaagtatcgaaatgaaaaggcctataatgcaaaaagattgtacttcaaaaggtgaaaatgtttctcaactcgataaaagcactagcaaaatggagggaagcaaacctctgcagattgaggaatatgataccagcgacgaagaggatttacgcaacacaattggcaatattccggttcaatggtacaacgactacgaccatgttggatacacattaagtggcgataaaatcaaaaaagatgccattaaaactgacgaaattgacgcgtttttacaaaaagaggaagactcggactattggcgtaaggttttcgaccgtcagtcgggtcagcaaatggcactcactgaccaacaggtggagaaactgaatgccattgcggacaaccggttcccggaaataggttacaatccctaccctcctttcttggacattttctcctccgttcgcgagattcacccaatttccaatcgaccccccgacaaacgctctttcgttccgagtgccgatgaacgtcgaattgtcggccgaatggtccacgccattaaaatgggatggctaaaaaggaaagagccccccaaaggctcagaagaagaggaggagccgaggctttacgacctttgggacgacgagggggacgagcagcggaagagcaaatcgcaaatggcacgcgtccgaatgcatttgccggcaccgaaggtgaaaccaccg

SEQ ID NO: 48467 - DNA, 792 bp, Heterodera glycines
gaagaaagtgaggacgacgaaagcgaagcgatcacttacggcgtcctttccattgtgccattgaacggaactcagaattttcaatcgcaagttgccgcattggttctccaacgttcaaaaaaacacgcgaccgacgaaattttcaaaaaattcgaaaatgttttgggcgttggccgagtgtcgtcaaaagtcggttttctcataaatgaacggatgctcaattttcctgctcaaattgcgggcccggcttttcattcccttgcggaggattacaatggccttgcggaggagcgacgctttgagcacattttggccattttgaaagtgcgaatttgcaccgaacagtgcgcttcctcttccacgagtccgaacattggaaaaaaaagaaaattgggaaaggctgcgcggaagcgattggcagttgaacgaacgatcgaatcggacataatattcgacaatttggaagaacaaatgctctttcagcattcttccgactttcctttcttccaataccccgtcgaatcagaaatcgaaaaatcttcgaaattccattctttgcgccgcgacggtcgaatatttcgccctttccgtcgcgtttgccttctctccgtcgaccaattcctccaattcgcttcgtccgtcgttcgttcgttctccgtttgaccgccattcattgcgtaattacacaaaaggtggaaagagaaaaacaaacgtcaattgttatttgcatttctattataatttttttttggttaaaatttaacagtccaaaaaaaaaaaaaaaaaaaaaaa

SEQ ID NO: 48468 - DNA, 732 bp, Heterodera glycines
  unsure (1)..(732): unsure at all n locations
gtccaattaagaattccgttgtctttctattgtaaaaatgccgaacattatgggattgcatggtggctccatgattgccatgagaagcaaagatagtgtggtgattgcatgtgatctgcgcttgggagagcaagccatgaaaaacattgctactaatgcgacgaagatccatcccatttctgacaacgtttttatcggattgaccgggtttaacgcggacgccaccactgtgcttaacaagttgcgcacacatcaggccatttatgagatgcgcgagcagcgtccaatgtctcccaaggcgttgacttcctatctcgcttggatgctctataagcgcaggttcggcccgttcctgatcgaacccatcattgtggggctgaatcaacaaaatgagccgttcatttcccacatggacgtggtcggtagcgtaagtgagcccgaagactacacggtcggtggcactggtggcgacttggcgatgtctctgtgtgaagctctctggcgacccgatatgacctccgaagaaatgacggtggcggtcggtcaggcgatgcttgcggtggtcgaacgcgacgcatccactggatggggcgttgtcatccacacgatcactgcggaaggagtgaccacaaaaatgattaaatcgcgcatggattgatttgatcagctcctgtcgcttttgttgtattcgaaataagcgataaattcntaaaaaaaaaaaaaaaatttata

SEQ ID NO: 48469 - DNA, 629 bp, Heterodera glycines
ccaagtttgagtgctctttgccttccttttggcatggcttcctcctcctctgatcattcggcttattccaagcaggtcctggaggagttttggcccggccagaatgtgaagatcggccatatgacaatgaattcttttcgagaagtgaacagacattcagaattgccaattgcacgcataaagaaaataatgaaaatcgaggaaggcgtgaaaacccagatgatcagtgccgaagcgcctgtactgctcgcaaaggctgccgaactttttatcgaagaattgaccctccgcgcttggctgaacaccaacgacaaccgccgtaaaaccatccaaaagtcggacatcgccgccggggcggccaaaagcgaaatgttcgactttctcattgacatcctcccgcgcgacgagctgcaaaaagaacaatcggttgactacgatggcacagaaattcaagtggtggacgacggggcggaagaagggccgacaatggcggacggtcagcagaatgtccaatacattctgcagtacgcggacagtggtgagatggaaaattcgatggtccagttggaggacggccgaataatccacgccacccaaattgggcagccaattccgttgtcctccgccac

SEQ ID NO: 48470 - DNA, 1128 bp, Heterodera glycines
  unsure (1)..(1128): unsure at all n locations
ccaagtttgaggtagtgtaataaattcttattgtagtaaaaatgtccgaaaataagtccgaaggtggcgctgaaaagaagaagagcggtggattcaacacgaagaagtttttgttggacctcgcatccggcggaactgctgctgcagtctcaaaaaccgctgttgcacccatcgagcgtgtcaagctgttgttgcaggtgcaagatgcttccattcacatcaccgcggacaagcgctacaaaggcatcatcgacgtcctcgtccgtgttcccaaggagcagggctttctgtcgttgtggcgtggtaacctggccaacgtcatccgttactttccgactcaggcgctgaacttcgccttcaaggacacttataagcgagtcttcacgcaaggagtggacaaggagaagcagttcttgaagttcttcgccatgaatttggcttcgggcggtgccgctggcgccacttcgctgtgttttgtgtaccctttggactttgcgcgaacgcgtttggcagcggatgttggaaaggccgatgcccgtgagttcaaaggtttggcggactgcatcatgaagatcctcaagtcggacggtcccatcggtctctaccgcggcttcttcgtctccgtccagggcatcatcatttaccgcgccgcttacttcggctgcttcgacaccgccaaaatgctcttctccccggagggcaagcagatgaacttcttcgtcaactgggccattgcgcaggtcgtcaccgtgtcgtccggcgttctctcctacccgtgggacaccgtccgtcgtcgtatgatgatgcagtcgggccgcaaggacatcatgtacaagaacactttggactgtgccatcaaaatcatcaaaaacgagggactgctcaagggcatgttcaagggtgctttatccaatgtgttccgtggtactggcggtgcccttgttcttgcgttctacgacgaaatccagaaatatatccactgattgtgtgtgatcttcttagtatatttgtttgtgttgcgtcatattcggtcatttgggtaatgataaagaagataggtgtgttnaaannaaaannnnannannnnnaaaaaanaagaaaaanaanaaaaaaataaaancnaaaaaa

SEQ ID NO: 48471 - DNA, 417 bp, Heterodera glycines
  unsure (1)..(417): unsure at all n locations
gtttgagctttaatccatttattcaaccaagcgtgcaaataaataatggcttcttcaattcgactcgctggcggtgctttgcgagaactccgaattcatctttgccagacaaccgcagcaagcaatggagttcgggaattcatccagaaagattatgtggacctgaagcagaacaatcgggatttccccattcttgtaagagaatgctccggaattacgccacgaatttgggcaagatatgagcatggagttgagacaagcgtttcggttgagaatcagccgcgtcagaagataatggaagtgatcaaagaaatggcaacgaaaaaaattgattgatttgaatttgtttttggctgccgtttgtaaattctttgataggataaataattgtctcccannaaaaaaaaaaaaaaaaaa

SEQ ID NO: 48472 - DNA, 627 bp, Heterodera glycines
gtccaattaagttgtacatccacattcattaatcattcattactctcttcctctttgttttcaatgcacgacatcgatgaaccgagggaaatttttctaagtgctgatgatgcgtttgtttcggacgcattggaaacgattggattaacatttgttggcactgaggatgaacttgaaacggcccctgtttttgcgcccgaatttgcgcatcaacacttcgagagtgaaaaaattgtcggatataaaaacctgaaagtgtccgtgctttattcggatccaaccctttttctgacttccttttatcaatgcgaacagaaagaggatgactctacgaagtgcgacgatattgaatacagaatcaaagacgcgctcccacaaactcaactcaacgcctatttgacaattgagaaattcaggcagaaactcagcgagcaaaagaactttgttcctttcggagaactcatcacaaagttttgccttaaagattcagagattgaacataactttatactttataaattcgagaaaaaacagcaaaacgatgctcaatttgaccagggctgtaaatttctggagcgagtgcaagcgttggcccattggtacatcgatgcggtctcttacactgac

SEQ ID NO: 48473 - DNA, 1372 bp, Heterodera glycines
agtgattctcctgttcctaattggctgcttaacatcggaccaatttcttgccatgcgtggaacaaggacaaaactcaattggctgtttcgccttccaacaacgaaattcacatattcgctcgttcggagaccgtttggaacccgttgcacgtgctaagagaacacgacttgctgatcaccggattggattgggctccgaatactaatcggattgtttcatgttcgcacgacaaaaatgcgtttgtgtggacatgggaggctgaaaagaacagttggaaaccggagatggtggtcgttcggataaacagagctgccacctgtgtcaaatggtcgcccaacgaaaacaaattcgccgttgggacgggtgcgcgtttagtcgctatttgttattacgaacgtgaaaatgactggtgggtagcgaagcaaatcaaaaagctgattcgttccacggtcacctcattgaattggcatcccaacaacattttgttggctgttggcgcctgcgacttcaaaacgcgtgttttttctgcttatgtgaaagagattgacgaaaaaccaacgccaaacccttgggggaccaaaatgccattgggagaattgctcaaggagtaccagtcgaccggatgggtccatgacttggccttttctccctccggttgtaaacttgcctgggtctctcatgattcgtccattgctgtgattgacaagtccaattctcaacctcaggaaaggccaattcagcacaaaactgcctttttgccgttcacttctgtccgatgggtcaatgagacgcatattgtgacggctggtcacgactgttccccaatgcttttcactttcgacgggacggcgttgaattttaaatgcaaattggatgtgccgccagaaaataaaaacggttccaacgtgagctccgctttcgccatgtttcgcagcatcgacaaaaaggcgttgtccgccgactctccgttgggttccaccgcactgaaaacgttgcatcaaaattcgattatgcaaattcaaccgcacactgtctccagccaatcggggacaatcagcaaattcacaacttgtggcctcgacggggtcgtggctctttgggatgttcagaagcctctcggcatgcctttggctaatggcgccgcgcaaatgagttaatttggccaaaagtgattacctgatcaacaaatgctacaaattattgtgcaaagtcgcaaactgtggtgtgtcgcggactccgtcgcttttcgctcgctattttatttttaatcccttccgtaatttgtaatttgcgctatctcttctcataatattatcgatgatttcaaccacatgtttttattatatttcgtttattataatttaaaaaaat

SEQ ID NO: 48474 - DNA, 632 bp, Heterodera glycines
gtttgagaatttataatccagcaaattgaaatgccggaacagagcagcggtgccgatgagtacgaatcgttggctcccacttattcgctttgggttcatttggcggcgggcgcagcggcgggaatggctgagcattgtgtgatgttcccattggacagtgtcaaaacgcgtctccagtcgctgtgcccttgtcccgagtccacgtgtccgactcctatccatggcgttgcttcaatggtccgcagggagggattttggcggacgtttcgcggagtcaatgcggtcgctgtcggctcagtgccagcccacgccctttacttcacggtctacgaaaagttcaagtcttcactgactggcaacactcatggccattcgaattcgttttcgtacgcattggccggcatggcggcaacagtggtccacgatttggtgatgaacccggccgaggtggtcaaacagcgcatgcaaatgctgtacagtccgtacggcggttcgttggaatgtgtgcgttgcatctttcggaacgagggaatggccgctttctatcgctcttactccacccaattgtttatgaacgttccgttccaagccgtccatttcgtatgctatgaattctggcaagagcaatttaa

SEQ ID NO: 48475 - DNA, 673 bp, Heterodera glycines
attttaggtaatttcaagcacattatttttggaaagcttatttgatttatccatcaacagctgcaaaatgacgattagcaagaacaacaagatgatggcgcacctcaactacaaaatgaaggtgatcgtccaggattcacgcgtttttatcggatacttcaaagcattcgataaacacatgaacataattctggccgactgtgaagagatgcgccgcattaagcccaaacaaggagctaagaagtcaaacgtcgaggaggaaaagcgcattcttggcctggtgttgctgcgaggggacaaaatcatctccatttcggtggaaggaccgcctcaaaaggaggattctggtgtgcagttgccaaaggctggcggactcggtgggcctggacaaggacgaggtgccggtcgaggaatgccgatgggtgtggtgccgccaatgggagctgttcctccgggtttgcagggcgccgttcgtggaattggtggtcctgggatgggtgggcccatgcagcccggatacatgcaagggatgccgcagggaatgccgccacgtccattttgatgctcgattttgttttctttgttcgaccattatttgttttcttacttttacacaatgatctgtttgtttgataaataagttatcgaaaaaaagaaaaaaaaaaaaaaaaaa

SEQ ID NO: 48476 - DNA, 802 bp, Heterodera glycines
agacaaggaagtctcaactctcagacgagcctgtcccgcacactttgccttccgcccttcaccatgcaaatcttcgtcaagaccctcacgggcaagaccatcacccttgaggtcgagtcctcggacacgatcgatgccgtcaaggccaagatccaagacaaggagggcatcccccccgatcagcagcgcctcatcttcgcgggcaagcagctcgaggacggccgcacccttgccgactacaacatccaaaaggagtcgaccttgcacttggtgctccgtctccgtggtggtggcaagaagaagaagaagaagacctacaccacccccaagaagatcaagcacgtccacaagaaggtcaagcttgccatcctcaagttctacaaggtcgacgacaacggcaagattacccgtctgcgtcgtgagtgccccgccaagacctgcggcgccggtgtcttcatggcctggcacgtcgaccgccagtactgtggcaagtgcggcttgacctacaagctcgaccccgccaccatcaagaagaacatggccgctgccgccaaggcctccaagcccgccgctgctgccaagcccgctgccgaggctgccgctgccgctggcaagggcaagggcaagaagaagtaaacctttgcttcccactcccttggttctctctggtgtgtgcccttggcacctccacgattgttgctcggttgggtcggtgttgtttcttggatgtcaactttgtgtgttcaaggaatgtatatatcgcccatcttggtttcttgaaaaaaaaaaaaaaaaaaaaaaa

SEQ ID NO: 48477 - DNA, 992 bp, Heterodera glycines
cttcggcggtttaagcccggggcaaaaatcaaaaacccattcattgggggcggtgctcggatggccgtcgatgccaatttcaaagcttactcctgcattctttcactgctgctccgacttcgtcaggcgtgtgttcacctgtctctgaccaggaatgcaattgacattgacgcatttaaacaagacgagggtgagacggacagcgatgcggagaatttagttgcgaaagctctcgaaatgtcaatggctcaaatgagtctcgaagaagaagccctcgagagaaatgaggagcgggaaaaggacgaagggcagcaaatcgaacgcctttttgagaaggaacaccaaagcaccaaagtgaacgctttgatgaaccgtttggatggagtcgttcagaacggtgataaatgcgttatcgtaagccaatggacttcgatgttggctctcattgaatttcacttgcgacaaaaggccatctcttttactagcataacgggagaagtgcgcacggaagaacgtcagtcaagggtggatgctttcaacagaaccaacacgggacccaaagtgatgcttttatcattgaccgccggcggcgttggattgaatctgattgggggaaatcatttgtttatgattgatttgcattggaaccccgcgttggagttgcaggcgtccgacagaatccaccgtttgggccagaagaagaatgtgttcatccacaaatttgtgtgtgcctcgaccattgaacagcgcgtactccaattgcaggagaagaaaaatgccatggccacctcagttttagaaggtgccgctaaaaagttgggcaatttgagcaaggatgacgtgatgtatttgtttgagttggagaaacgtcccaacaatcagcagaaagctggccaatcccagaaaccgacaacgagttcccaaatgtgagacgacaaatggggatttttattgtacgtgcattactcatttgacatttatttatttatttg

SEQ ID NO: 48478 - DNA, 665 bp, Heterodera glycines
agatttaattgaaaacaatgactcgtgggtcaagcgccggatacgaccgtcacatcacaattttctcaccagaaggaaggatttaccaagttgaatacgcgttcaaagctgctaacactgcgacactctccgctgttggcattgctcttgatgaaactgccgtaattgccgtacaacgtcgcgttcccgacaaattggtggacccatcttcagttaaaagcatttataaattgtcctcaaccgtcagttgcggtgttatcggcattgtcccggatgcgatgttccaagtgcgccgtgcacaatcggaagcagccagatggaagtatgagaatggctatgaaatgccaatttcggaactcgcgcgtaaaatggccgagatcaaccagtactatacacaggttgctgaacttcgttcattgggcacactgatgcttatgatctcgtacgacgacgaaaaaggcgcttctgttttttccatcgatccagcaggacattacatttctgttcgtggttacggcattggagtcaagcagcagcagatcaacggttttctggagaaaaaactcaaatcaaaagaccgaaaattcggtgacacggaagtgattcaactggcgcttgaggcactgcaaaccgggctgggaattgacttaaatgctgaccaggtg

SEQ ID NO: 48479 - DNA, 603 bp, Heterodera glycines
  unsure (1)..(603): unsure at all n locations
gtgttattgaaaaattattattacaaaggaaaaatggctgacgcagctgctcaagaacaaaaaaagaaacgcacttttcgtaaatttgtctatcgcggagttgacttagaacagcttctggaaatgaatgagaagcaattcaaccaaatgattcccgcccgtcaacgtcggaagatgaaccgcggattgaaccgaaagcacaaatctttgctcgttcgtctgcgtaaggcaaaactcaattgtcccgagctgatgaaaccggagtgcgtgaagactcatttgcgtgatatgatcgtgctgccggagatggtcggctgtgtggttggcattcacagtgggaaggcatacaatcaggttgaaattcgagctgagatgattggatattacttgggcgaattttctattacgtacaagcctgtcaaacacggtcgtcccggaatcggcgcaacgcacagttcgcgtttcatcccactcaaatgattctttttgcgatcatcggaaattgttgtttaccgatcttttgttattgaattgtttggattttgttggaagttagcggactcaataaagtgaaaatttgttanaaaaaaaaaaaaaaaaaaa

SEQ ID NO: 48480 - DNA, 1423 bp, Heterodera glycines
agaaaatataatgactgccaaattatatggaaatcaagacaactttcgtgtgaaaaaagttctaattgcggccaaattgtccgggaaggatattaaggcgattcctcagcttcctccaacaaatctcttcccattgggacaagcacccgctttcgatgatggaaaagtgtgtcttttcggtgccgaggcaatttccaaatatcttttgggcactggttcaatttatttgccacagaacccggaattggaccaatggattggttggactgcttcttctttgcaaccaaatgtcctttcctatgttttgccttgcgtttccgctgccaaaattgaccaaaatgctttagagacggcaaagaatgaattgcttgcccaactttctctcttcgaccaaattctccttcccaaaacttttctcgttggcgagcgtttgtcccttgcggacatttccgttgcgattgatcttctgccggcttatcaatacgttttgggagaagaagctcgcaaaggccttgtgaatgttaaccgatggtttcaaacggtggtcagtcaaccaggaatcagagaagtgctcggggagttcagcttcatcaaggatcccttgaccttcgatgaaaaagagtacaacaaactcttgaatgctgctggtcaacctgcgaagaaggaacaaaagccggaaaagcagaaaggtgccaaagaggaaaagccaaaaagcgctaaagaggaaaagccgaagaaaaaagccaaggaagaagccgacgaggaaatggacgctgctgacgaggctattgccgctcagccaaaattcagcgacccattggctgcgttgcccccgggctcatttgtgatggacagcttcaagcgcgtttattcgaatgaagacaccgcaaccaaagcaattccttatttttgggaaaatttcgaccccacaaattacagcatttggttttctgaatacaaataccccgaggaacttaaattagtctacatgtcttgcaatttgattggcggaatgtttcaacgactcgagaaaatgaagaagcatgcgttcgcctctgtttgtttgttcggaactgacaacaactcgacaatctcgggaatttggatctggcgtggccagcagttggcgttcgagttgtgccaagattggcaagtcgactacgaaagctatgagtggaagaagctcgaaccggaaaacgaagctgacaagaagatggttaacgagtattttatgtgggagggtgactttggtggtaagaagttcaaccagggaaaaatcttcaagtgattctgatcagtaatcacagttttgttgcctacaactgttattttttgttgacgaatttttatactttattcaagtgattaaaggtgggtcctttcaaaaaaaaaaaaaaaaaaaaaaaaaacctcaagaggctag

SEQ ID NO: 48481 - DNA, 797 bp, Heterodera glycines
caattaaggcgacgcctataaattaaataattctttgttttgtttcgttcttcagtttctatgtccaaacaaattcgaacttgttgggtgtggcgtaagaacaaccgttggtggcgttatttgccgcgacgtaacgactcccacaacataatcgacatggacgagctgggcgaacaatgcgccaccttttccgacccaatgcccgccgatccacccaaactttgggtggcgtggctgtacacagattcttacgggtcgggacgaaagatcagggaccaggtgacaaagcttttcggcaaagacgcgaaaccgggcgaaatgcaagtgttcaaaaacacactgtcgaccaacaaacagttatggaagataaagcatctgctcgaaatacggccggtaacatttccaaacggagagccggggcaggaagatgcgacacatttggagataatggcagatggacgctgtgtaatcaaccggcaaagtttgcctaatgtcgacgactttcaactgattgaccacagcaagcagttcagcccgcgttatttggcttctcgactgatgtcaaaggacgtgaccaagcaggacgtgtacgaggacaccgtctacaacccagaaaatatcagcattggatgaaagaagggcggcacaattattgcaaatttaagatgttctttttgatgtcatttgctctactccgtccatcctatatacttcattttgtttttgtctaaaaattacattttgttgcaaataaacttctcatataaaaaaaacaaaaaaaaaaaaaaaaaaaaaaa

SEQ ID NO: 48482 - DNA, 1686 bp, Heterodera glycines
gtttgaggcacattaaatgaaatttatggcctcgatggtgacgtcatttcctgtgtcattttttctgtttttttctacggctctaatccacggcacaatgggaggccttttctggtcgaaaaagccggcggattcagcggacgattcgctgtggagccgataccatgatcaaaatgcaatggaagagttgttggagaaggtgcacagcaaatgccccaatgtcactcgtctgtacagcgtcggccgatcagtccaaggccgcgatttggcggtcattgaattttccctccatcccggacggcatcaaattttgaagcccgaaatgaaatacatcggaaatatgcacggcaacgaggcgatcggcagggaattgctgctgcgattggctcaattcctctgcgacggatggcggcaaggccaacggtcggtggtggagatgctcaattcgaccaacattcacattatgcccagcatgaacccggacggctttgagttgacgctgaagacaaagccggaacagcgcggatgggtcacgggtcgcacaaacgcgcacggggtcgacctgaacaggaacttccccgacttggacgcgatcttttacaaggccaacgcacaacggctgccgttctttgaccatttgctggaagtgttccacgactccgacaacggccaacagtttgagcccgaagtcactgcagtggccaattgggtgctttcgtggccttttgtcatttccgcaaatctccacgagggcgatttggtggccaattatccattcgacgaaagtctgaacccgaacgaacttcgcgcctattcaaagtcgcccgatgacgtcacttttcgatacatcgccgagacttacgcccgtgcacacgcgcacatggcgaagaatgaccacgcgccatgcgatgggacggcgggggacaatttcgcgagacagggcggcataaccaacggtgccaaatggtactcagtggcgggcggaatgcaggacttcaattatttgtccaccaatgccttcgaaatcactttggaattgagctgtgagaaaatgccggcgccggaacgactcccccaattttgggttgacaataaattggcattgttggaattcatccgtttggcacacattggcatcaaaggaatggtcagcgatgcacgtaacggtgaaccaattgcaaatgccgtggtgtgggtgagaaatgtgaccgacggagacggacaaacggccatcaaacacccggtgaccacgtggatcactggcgattatttccgtccgttggtctccggctgttaccaaatcgcggtggaagcggacggttatgaaattggcatcaaaacgctgaacatcagtcagaaggacgtgaaggaacgacgtccacacattgtgaacttccaattgcgtccgatcgaagttgaagtgccggaggcgcgaattggaagagaaatgggcgaggaagaacggggggaggaggagaacggaccactgacaccagaacaagcagccgaatttttgcaactcatccgaatgcaacagccggtgggcgtacggactgccaatgcgccgtccttctcacaatgaaacggaacaaaagagaaaagggatgatctcgacagaacaatggacagacaaaaagcagcagaaacgaagtgttggttgatatgatttgtgttgtgtgtacattt

SEQ ID NO: 48483 - DNA, 557 bp, Heterodera glycines
ttattattattcgcctgattctttataatgggaaagccgaagggaattagaaccgcaagaaaactgaaaaaacatcgtcaggagcagcgctggaatgacaagcgttacaaaaaaaccaatcttggaactcgttggaaagccgatcctttcggcggagcctgtatggccaaaggaattgttctcgagaaaattggcgtcgaagcgaaacagccaaattctgcgattcgaaaatgtgtccgtgtgcaacttatcaaaaatagcaaaaagatcactgcttttgttccaaacgacggttgcttgaattttatcgaggaaaacgacgaagtgcttgtgtctgggttcggacgaagtggacatgccgttggagacattcctggagttcgtttcaaagtagtcaaagttgccaacacgtcattgctcgcacttttccgtggaaagaaagagagacctcgttcatagaaactgacttcgcatgataaaggatttttcctttcattgtttttgttgattgcgattccgaaataaattgttgttgaaaaaaaaaaaaaaaaaaaaaa

SEQ ID NO: 48484 - DNA, 541 bp, Heterodera glycines
  unsure (1)..(541): unsure at all n locations
gcagacaattcctttgtccgccttttcccaaccgccacaaatagctctgataatggacaaaggacggagcaaaagcccaaatcataacaatgaggcggaggaaactcaaagcgccaaagaggacaagactgatcataaaacaaatgagcaaatgttgctggtgaggaccggactgaaactgaagcgtggcactctcttcaagaagaagcgaaatgttgacccgaaaacaatagatctgaccataaagaaggaacaagagggcccgcggaagacgaaggccgaattggcatttctcaaacggcaggaggagacggcgttcgaccgtttgtcaaagagggcccaaatcagtcaccgggagaaagtggagaagttcaacaagcaaatggaggaactgacggaattcaacgacatcccaaaggtgtcttggaccaaatgagaaggaaggaaaaatactactgtatcatatattacatttgcgatcacaatcagaaaaactaaagcaaatgcattcatttttagtaaaanaaaaaaaaaaaaaaaa

SEQ ID NO: 48485 - DNA, 788 bp, Heterodera glycines
gacacttaaagcgaaaaatgtttgaagctaaatttacaaatgccgcccttctgaagaaaattgtggaagcgatcaaagagttggtcagcgaagcgccatttgactgtacagaaaattcaatgtgtctacaggcaatggatgggtctcacgtggcactgatttccctcaaattggacattggccttttcgaagtgttccgatgcgaccgcaccattgcacttggactgagtatgggcgagctcagcaaagtgctcaaatgttccaaatcggaggacactttgatgattcgctttgaggacagtgagcaggacatggtcacgttcacttttgaggacaccaaaggacggaagcaggacatcacactgaaactgatggacattgacaacgaacacttgggcatcccggaccaaaaatacgctgccgtggtcgaaatgccgtccaccgagttccaaaaagtgtgccgtgacattgcctccttctccgactcgatgaacatcaccgccacaaagagcggcgttgtgttcagcggcagcggagattcggtcacaaacacaattcgctactccaaggacaaaacggcggatgacgacgatgacaaagatcgcgtggacataactgtgaaggagaaggtgaacctcaacttctccatcaagtacctgaccaacttcaccaaggccacttcacttgcggaccgcgtgcgtttgtcgatgggcgacaaggttccgttggtgggcgaatatgacgtcgaaggcaatggatttttgcgtttctgtttggccccaaagttg

SEQ ID NO: 48486 - DNA, 635 bp, Heterodera glycines
aaaagttgaaggtgtaatttttgacgggatgggtgtgcctcatttttgtcttgaaggctattggaatgaacacgtaaatattgcaagtgtcgttggcagaagaaaggatgaaaagggcaatttggtgattcaaatgggcgaaaaacgacgaatttggacagcaaacgctcctttcggtgactcttcacaatacaacttcactaaactcgccatcgaaatgaatcagccggacgattccgtcgctccaacggattcacgacgaaggcccgaccaacgactgatggaggacggggattgggacgaagcgaacaagcggaagaaccaactcgaagaaaggcagcgcaaggcacgtagacaggccgaggcggaagccgagagggcgatggacaacaaccaaatgaccgctgaataccaagcacgctggtttaagaaggtgcaagactcccacacgggctctgtgatccatgttgttcgggacgaagaatattggcgatgcaaaataaaccgggactggtctcgatgtcctgaaattttctaattaaatcggatgggtgcacggggtaacacacggattgtgataatttgccataaattatttcaacatttcaaaaaaaaaaaaaaaaaaaaaaaaaaaa

SEQ ID NO: 48487 - DNA, 311 bp, Heterodera glycines
agacgcttcaattgccgattccgtttgaaaatggttcacgaaaacatccactggtcccggccgcgcaaatttgggcccggctcgcgttcgtgtcgcgtctgcttcaaccaccatggactgattcgtaaatattcactgaacgtttgtcgtcgctgcttccgtgaatatgcctccgacattggattcaaaaaactcgactgaatggcgaagaggaatttatgagcagtcattggagggttgttttttgtttgttctgttcgttattttatgttgataaaaaattgcgttaataaaaaaaaaaaaaaaaaaaa

SEQ ID NO: 48488 - DNA, 790 bp, Heterodera glycines
cacaaattttctttatttgtacaaacatatgaataaattaatattttatacatttttgtattattaaatgtcatcacttatccgtggtgaaattcagcagtttgcatcttttgcaaatgttttccactggtttgatgagcttcatggatgcttccgacctcttcactcttttaaccaattgagaattccttggctctccgcccatttggccactatgtcggatgtggtgcaggcattttatcgacttctctttgtcgacgaggcgctttagtcactggcttagatgcggataaatctgtgctagaaattgctaatggttataaggaaacaatggcgccgacctcttcgcaaaaaaatagaatttattcctggcacgattgagagacttgcgcaagaaaaggatcgaatcggaacattcgatgcggtcgtttcttcggaagtggttgagcacgtttccgacttgcccttgttcattcggagttgttgcaaattggctcgtccgaattctccaatttttttcacaacaatcaaccgtacaatttggagccaactcttggctaaaacaatagctgaggatttgctccggatactgcctcaagggttgcatcaattcgaacaatttgttgctccgcgcgacttgcgcaaattgctactggacgagcagtgcagcgttgggccggtgcttggaatggcctacaacccattttttaacatttggaattggactcggtttactggcgttaattacgcacttgttgctcacactaaaaattaacataatttattgtgc

SEQ ID NO: 48489 - DNA, 849 bp, Heterodera glycines
gtccatttaaggcttgcgcaatggagcagctttttcagcaggcgaatatggaccttcatcagatccatctcgaaatgagacatttggagctttgtaaaaatgagagtgaagcgcagcctctttttcagaagctccaccaacaaataaggcaatctgccgctcagctcgacggcctcgaacgtttggtgaataaagagccttctgggaagcgtcacacttcgaaatatcggtttgaacagctgcgacatgattataatgcccttgaaatggcaattaattcactgcaaaatcgactcacaacgaaatggagaacggctgcggaaagggaggagttgctgaccatgagatttaaaccaaacgaaacgcatttggactttgaggggacggaattgctcgtcaacgaccgactgaaacagtcgcacaacgccgtggacgatctgattgcgcatgggaattcagtgctcacttcgcttcgtcatcaacatttggggctaaaggacgttaaacggaaaatgctcgatattggtcaagtgcttgggttgtcaacgacaacactgcaaatgattgaaaagcgattggaggacgattggctgcttttcctcgtcctttgtgttttgtgcgttgtgttcatgtactgcttctacagattttggaaaggctaagctctttgtcctctctgctcacaatcagaataactcttgaaaaacgttatgatacttcctgaaaaggcattcccttttttcgggtcttttgctgattgtttttttctttcactgaattcttatattattttttcttgtgataataaattagttcgtttaaaaaaaaaaaaaaaaaaaaaaaaaaaaa

SEQ ID NO: 48490 - DNA, 1398 bp, Heterodera glycines
  unsure (1)..(1398): unsure at all n locations
cataaatgttttatcatctttcacttgagcatgaaatccaactacatcctaaatattttggccaaaatttaatggagacagtaaaacagaaactttttagtgaagtggaaggcacttgtacgggaaaatatggctttgttattgcggtgacgacaattgatactattgggcatggaatgatacaaccgggacgtggctttgttacttatcctgtgaaatataaagcaattgtgtttcggccattcaaaggacaagtgattgacgcggtagtcagtcaagttaacaaagttggcattttttgtgagatcgggccgctttcatgcttcatttcaaggcattgtattccaccagacatggaatttgagccgaacaacatcccaccttgctacaaaactgcggacgaaagcatagtgataaaacaggatgacgagattcgtttaaaattaattggaattcgagtggacgcgaatgacatttttgcaattggaactttgatggatgattatttgggtctttgttcgactgaatgaatgaatttttccacgaattcttttagttgcctaatttattaaaaaaattaacttattttaacattagttgttttttcattatatctaaacaatttttacttttttattaatcttataaccaagaatcacagaaatgggccttttcgatttgtcaatttttgacgagttccgtcgcatggatggtcgtcagattctgtatcaatttttaaatttcgccatgattgtcagttcggctctgatgatatggaaaggtcttatggttgtgacgggctctgagagtccaattgttgttgttctgtccggttccatggagcctgcgttttaccggggtgaccttttgatgctcaccaatgacttggacgacccaatcagagccggcgacataactgtgttcaaaattgaaggtcgtgacatcccaattgtgcacagagtaatcaaagtgcacgagaagaacgacgaagagaccaagtttctgaccaagggtgacaataacatggttgatgacagaggtctttatgcccccggccaatactggctgcaacgcaaagatgtggtcggtcgtgccaaaggatttgtcccatacgttggcatggtgactataatcatgaacgactatccgaaactcaagtacaccgttcttgcactacttggtctcttcgtgcttttgcatagagaatgaatggagaaattgattgcgaagaagtgttgtttttttaccgaggcttgatttgtttctcatctgtccattttcttttcggttcggttctatcatcttttttattgctttccttatttatgtataacttttcgctttaactaaatgattaaaacgttgttgcnnannaaaaaaaaaaaaaaaaaaaaaaaa

SEQ ID NO: 48491 - DNA, 813 bp, Heterodera glycines
gtttgaggatgtttttttctaattttgtggcgctcactttctgcattttctccatcttcattctgatcccaaatgtgtcagctgctgcctgcgagtcgcccaaatactccgccaacggttactccacgcaagacggatttttccactacaaaacttcttacattgttgaatttgcgatccaatgctctaacaattacaaggacgcgccattctacgcactggtcggtgaaaaaacgctccaattggctgtgtctgaggagaccaacaagtaccaggtgtcctggcaattggaacatgccgattctggtgcacaaacattcgatattcgcgtttatgacgaagacaaattcgcggagcacaaaaaggccgatgagtccggctcaagttctgtccaaccattgttcactgtccagcattaccacggcggcacctctcacaaaacgtggatttcctcagagtccgtcttccttttgttgggcgtcgtggcgctgtactttacgatgaatttacgccaattgttggccaaaagagactgactgaccaattggttgttgcccattctcccgaatttcacccttttaatccttcaatctgtgaaatgaccattttaagttattcctgacactttgggcttactcaatttatttgtaaccttttttggtggggtattttcgttttaacaacattttcaaccgtctcttcgagccttgttttgtcatccaattgatgactgttgcctaacttcattctttcattgttgataaaaaaagtcgttgaaaaaaaaaaaaaaaaaaaaaaaaaaaaaaaaaaaaa

SEQ ID NO: 48492 - DNA, 627 bp, Heterodera glycines
gtttgagcattccttgatggttcgtcatgtgactgcctcctgctttcgtgcgccatggccttttgaaaaaaagggctcaactggatggcggaagaatgggccggttgttattgaatcgcacaaatggcccggtcaacaaaaggaattccccgagctctcgccaaaatttctaggagcaaactttaaacagctatggagatacaccggagtggcgcccacaggatttaatgaccccaaaactgacgattttgttcatgttcccgaaatggtgcccgaattggtcgtgccggacctagccaatttcgagctgaagccatacgtctcttacaaaacagatgcaaaaattgaagaaaggctacgcaattttgacaaaaaattgacaaaattcggtgggaatgagaaagcagcgattgccaattccaaagagacggaactatggccccctccgccaatcgacgcgaaaattctcttcgactttttctacgctgaaaaaattcgtcaggcatttgaaaaagggaagaagtaaaaaaagattagcagacgatggaccaaagcagacgattgacgccttatttttctctgttttattctccctttgataaacaatgattagctaaaaaaaaaaaa

SEQ ID NO: 48493 - DNA, 1074 bp, Heterodera glycines
ctgaagtatttttttgttataatgatcaacaaccacgtcaatggggcgaatgacgtcgacatggaaaggaccgaaaacgaaagttttggtgaacttaaccagcgactgattgcgcttaaagcggagaagaacaacaaagagagtgccactttggcggtcaaagtgttggccttttttgtcaactgcgacaacctcagtgctgcccaggattttgtggaggcgttgaagaatttgcccgagtcggcctccaacagcgattgggcccggtggttttattatttgggacgcatcgaagcgttgaagggcaccgacgccgagacgtacaaagcggcagagaaacattttgaggtcgcacttcgaaaggccccacaaaacggcgccgtcggcttcaaacaggaagtgaacaaatgggtcgtgctggtcaaattgctcatcggcgaaatccccgagcgcagtctcttccgcacggccgaacttcgccacgtgttggcgccgtatttgctgctgacccaaactgtacgccttggcgacgtggccggctttgaccagacgaagcgcgagcacgggcccatctttgtgaaggaccgcaccgctgcgcttgtcgagcgcatccatcagagcgtcattcggaccgcaattcgcaaaatttcgacgacatattcgcgcatttacgtgtccgacgtggccaccaaattgaattcgaccgagcaggaggcgcatcgcgagttggtcaaggcgatcaaagagggcattgttcgtgctcagttggtcgccggcgacccgttggcgggcgggcggcactacgtcaaatttgggaccaccgatgaccaataccgcgggattgagccccgcagggaattcgacgcgcgggtcaacgaactgttggagctgtaccaccaggcggtgaaggcactgcggtacccggacatgcgcaacccggaggtggagaccattgacgagcagcgcaggcgtgaacagttggctctcgaaatggcagcagcggaagaggaggatgatgacgatttttgaccaaaatgatgtttttgtttcacaaaaattttttatatgctgcga

SEQ ID NO: 48494 - DNA, 659 bp, Heterodera glycines
gtccaattaagaaaattttctctttgcttctctctcctctgtttttcatttccttaaaagcggcaatgaccagtcgaattttgagctgcaatttgcgaaggtacttctccaagatgaaccaacacatcgagttcggcacaacgaagagcgcttcgtccgacaaacaatcgccgccttcccctacaaacaatcaaacgcaacacgagggaatgagtcaggaatgtcgggagcaaatcgagcagatggaaaagctgaagagcgacaacgaaatgctgaccgacaaatacaaaagaacacttgcggacatggaaaacttgcggaagagaacgcagcggcaaattgaggaggcaaaactttttgcaattcagccattttgcaaggatttgctggaggtggctgatgtgcttgacttggcgttgaattcgttggaaaaaatgaaaacggaggacggtgccgcctccttggacagtggagtgaacaaagggatcaaaatgacgaaggaagtgttgctgaagacgttcaaaaagcatgggcttgtaccggttcaacccgaaggacagaagttcgacccgaatttgcacgaagcggtgtatgaaataccgaaggaccagtcagataggcctgccggtcacattgcgcatgtgttgaacattgggtac

SEQ ID NO: 48495 - DNA, 767 bp, Heterodera glycines
caaaggtttcaattttcaacacccgtggcgacaccgtttgggagctcagcgaagggcaccgcaacgaagtgtacttcaacccacagagcacaattctggtcacttgtggcttcggaaacattgcttctggcaagatggagttttggaatttggaaacccgaagcgaaatctgtgcattttgtgctcctcacacgactcactttgaatgggcaccggacggacagcacatttgcacgtcgaccacagcgccaagactcaggacagacaacggatttaaactttggacatatcggggcgattttgtttatgaacaaaaatacgatcgagaggaactttgggagatcaaatggcgaccgtgcgcagcgtataacaaattcaaaattgaggagcccaacagagagcaaagtacatcaaattccagccgaataaacgacggaaatgccaaaacgcccttcgacaatttgccgaagggatcgctgacgcaaacggcgcgttacgtcccaccgcatctgagaggaaaaccgcagaaaaaggaagaaaaagggaagaacgagacaaattcggaagagacggacgtggggaagaaaattcggacattgcagaagaaattggacgatatttcgaagctgaagacgaaaagggccgcgggccatcagttggagttgaaccaaatggacaaaatacgcaacgaagatcgattgctggaggaaatggaacgactgacggccacggccaactgctgaaagaattagcatttaatgtcattg

SEQ ID NO: 48496 - DNA, 478 bp, Heterodera glycines
  unsure (1)..(478): unsure at all n locations
gttttattgcctcagatgcccaaaaaacatacgcaatcgaataaaacgaggaaaaggtcgggaagagaccttgacgagatccatgctgatctgatcaggcccgacaaaatgcaaagaattcaggaacggccttttgacgacgaccttcccggcggaggatggcactattgcgtcgcttgtgaccggcactttgtggacgaacagacaaaagcggggcacgaaaagaccaaaggtcacaagcgtcgcctgcgcgcactgcgagaaaagccgtacacgcaaagagaggcggaattggccggcggattgggcgtggaagagcaaatcaaattggaaagcctggcggatttgacattttagcacccatttcttatagggtgaatttatgtttttttttgttgttgtttttgagttctttatcatacaaacagaaaataataaataacattttcgcaaaanaaaaaaaaaaaaaaaaaaaaaa

SEQ ID NO: 48497 - DNA, 1028 bp, Heterodera glycines
ccaataaagattcctattcttattgctagtctgtttattcatcataaaaagcaatcctggactccattcaattctttgtacctgacgacatgaaaagacaatttgaaccaatggaacaacaccaaggccgaatgtcttcagggaccaagcgataccgagccgatggttacaacgatgcattggctgaagggaaatttgaacttcgtcttttgataccgacgaagtctgctggcgcagtcattggcaaaggtggcgagtcgatcaaatcgctccgcgccaagtacgatgccattgtaaccgtccccgatcgaagcactcccgaacgtgttctgaccatcgtgtgcgcccaggagaagttggctgattgtttcgcggaaattctggagaaactaactgaggaccaaggcagagatgatgtcgatgtgcgtgtgattgtccatcagtctcatgccggagcaattattggcaagcagggcagcaaaatcaaggagcttcgtgaactgatgcaagcacatatcaaagttttccaagaatgcgcaccccaatccacggatcgcgttgttctcataaccactcaacaatccaaaatgccggatgcaattaagcacctgatggagtttatgcgcgaggtgccaattaaagggccaaccaaaccatacgatccgagtagccacgaccctcgcattgtgcagtgttatgggggcttcagcggaccaatgccaccacctccaatgggtggtccaccgatgggaatgcatggaggcggaggaggttatgcaggttttggaccacgtggcggaccgcctatgcctggtggaatgggaatgcccggtggttttatgcaagaacaagtgaccacgactcaagtgaccattcccaacgagttgggcggcaccatcatcggcaaaggcggagatcgcattaatcggtagtcacccaaaataaattcaaattttgttattatgctgacacagaattcgggcggaatcgggtgctcgtattgagatcggaaatgcttatgggaacga

SEQ ID NO: 48498 - DNA, 546 bp, Heterodera glycines
ggtatttcggtctgcagaaatggcttttgtaaattctttatcgtccaacactaaaacaattcactttttgaagaagtatttacttcttgcacacaattattgcactttttcgcgcgaatggtctgagatggaatatgaaaggcgcgctgaggacactttggtggcactcactgagtatttggacacattgccggaccgtgtcgattgtgaatctgccttcgatgtttcatattcaatgggcgttttgaccgcgcacataagcccacgaataggcacttatgtgatcaataaacaaactccgaacaaacaaatttggctttcatcgccagtttctggtccaaaaaggtacgacctcagcgacaaaggccggtgggtgtataagcatgatggagttacgctacacgaattgctcgagaaagaatttagacacattttcaaaaacgatcaaatttcgttacatcagagttaaagatttatcgttttttataccgatataaattttatttggtgaaacccgccgaacgaacaccgctacaaaagagcccg

SEQ ID NO: 48499 - DNA, 1014 bp, Heterodera glycines
aaaaacttaaaaaaaaaaatgaaaaaagtcactttatatatatatttctggcgcagcgtttttatgtacacaaaaaaaaaataaaaaaaaaaataaaattcaactgtaatattaaaaatttattcattaaataaaaaaaaatatataaggagaaaaaaaaaaaatattttttttttacacctaaaaattatattaaaaaatagaaaaataagaaaaacttaaaaaaaaaaatgaaaaaaaaaaaaaacccatctctccgcatcacctttggtaaaggttctaagctcaggtgagaacatccctgcctgaacatgagaaaaaacagggtactcatactcacttctaagtgacggctgcatacttttgagtttaaagctcaaactttccttattcgtgatgaaaaagagtgctaagcccgaaattcaaacagcacagacgcgaatcgcaattgtaaacccggacagatgcaaaccgaaaaattgtgggcagccgtgcaaaaagaattgtcccgtcgtccgcactggcaaacaatgcattgtggttgagccaacatcgaaaattgctgaaatttccgagatattgtgcatcggatgcggcatttgtgttaagaaatgcccttacggggccatccaaatcatcaatttgcccagcaatttggagcgcgagaccacccaccggtacagtgccaattcattcaaattgcaccgcctgcccacgccgcggctcggctcggtgctcggcctggtgggcaccaacggaattggcaaatcgaccgcgctcaacattttgtccaaccgactgaagccgaacttgggcagcttcaagagtccgcccgattggccctcaattttgcaatattttcgcggctctgagctccaaaattacttcaccaaactgctggagaacaaattcaaggcgatcacgaagccgcaatacgtcgaccaaatcccgaaattcctcgaaaaacaaccgctgaaaaaggttggcgaattgttggagaaacgggcgcagaaa

SEQ ID NO: 48500 - DNA, 601 bp, Heterodera glycines
agcttttcattttccttgttaacaaagcaatggcacacatccagtttggaccgcaacaacccgaggtggaggaggacctggtcaactgggacgaggtgccagatgatgagttggaggagactgcgttcgaacgttttgaggggctcaaggaaatgtttccgacaccggtgcgctctgcgttgtccaccactgtgcaattgacatgggtggtagcgcagaattcgttctcttttgcacgcagtgctgcttgggtgttgtcgaccagcgcgctgctcatggtgatgccgtacattgtggacaaggagttgcaagatgtggagaaggcacagttgaaacaacagcaacagttgctgctcggtggacggcccagctgaaatgattgattttgatcaaattggtcgatcagagagcgcaattttcttgatcagcactgattgatttcgatcactttttgttgcttttttccattttttgattgtttcgtttgttgtgttcacaacaattagagcgcctttgccccgtttaccctcaaatcgtcgccattatccgccgtttttctttgtttgaccaatttcttcaagctattgatacataaaatttt

SEQ ID NO: 48501 - DNA, 551 bp, Heterodera glycines
caagtttgaggtaacttatggcgcaaaatactgcacaaattgaagagttcgttcgtttggtgctcagttcatggccttcatatcaatttgcgattaaaaatcagttggcgggatcattaacaagtgccaaggatgcatggtttgtcgaagagctcagtgcgcatttgctgaagcacaaggacatttgtccgtttgcgctgtccgattggatggaggacattttggacacggagttcagcctgatttcggacgatggcactttggagcccaccgccaaattgttggttgagttggccgatttgactgtcggaaggggcgcacacaaaggggcggaggcggcagcaaaactcgaggagcatttgcaaagactgcgaacactttccgctaaatcttgcacaaattcaacaacgccccgtttggacagttcttcaagtgaaagtgaagaaaacaatggaagcgatgaagagaacgattggcagtagattgttgatgagacgactgctttttaatcattgttgttttttttgtaattaaatttgttaattcaaaaa

SEQ ID NO: 48502 - DNA, 955 bp, Heterodera glycines
gtttgagcaattttaaaaagtgattgtgccaatgttgccaatccggctgctttttctgttggccgtgccgtcgtcggcaatgggccaatttgacttgggtggactgctcggcaacgtcaaccaatttacgagccaagcgggcgtcaatttgggcggcattttcggccagatgggtcaacagcagccgaacacggcgcaaagcaatgatcaaccgccacggcattttcatcggggcggaccacccccacaccatcatcgagacggcggcggtggtggcggactcggcaacatcggcggtgccgtggaaggcatactgagccgtgtgggtgtcaacccgcagttggccaaccaatttggcaaaatccaaattccgcccattccgtcgttggcggtgcacaatgtgctggacggagtgccgggcattttgcgccaatttttgcctgcccaaactgtgggccaaatcaccgcaattgcacgccaagcgattgagtccatttgctcttcggataattgtcttcagcagaggccggaatggcttcatcagcgggcgacagttgcgcagtttgaaactttgatcagaaaaacattttcaccaggccaatcggacagtcaaattggtcgtgacgtggagatcagactttcgcgaacattccaagtgaagaaggcgttgattcgcaaagctggcctggagggacgcgttgagccggcgaacaatggcgttttccagcaagatttgctgctaacggaacagcaggcgaatgtgctaattacggagatcaatcagaatgaggttggcgttggtgccgtgccgccttctgacaaccgccgtttcagtcgtcggcacaatttcaatcgccgtcgtttcactcgcgccggcaattcgctgttctttgaagcttctcccacccaaaaatggccagtcggacaaccaattctgtacatgttcgatcagtcc

SEQ ID NO: 48503 - DNA, 1309 bp, Heterodera glycines
gtccaattaagatttgacaaataaaatgtccccttctctttccgttgccaactcaaatgtctctcgaccgcttggccaaccaaaagtagcgggcttcaaagataaggataagccggaaagtgttcgtactagcaacattgtggcagcaaaggctgttgcggatgcggtgcggacgagtcttgggcctcggggaatggacaaaatgatccaatcgggcaacggagaagtgacaattaccaacgatggggcgactattctcaaccaaatgtcggttgtgcatcccaccgcaaaaatgttggtcgagctgtccaaggcgcaggacattgaggcgggcgatggtaccaccactgttgtggtgttggccgggtctttgttggacgctgcagaaaaacttcttgccaaaggaattcatccgaccaccatttccgactcattccaacgggcggccacattttctgaaaaagttctcgaggaaatggccacacccattgacattaacgatgacgacgagttggtgaagctcgccatgacgagtttgaactcgaaggtcgtttcgcaatattcccatcttttggcaccaatggcggtgcaggcagtgaagaaactgatgagttcaccggaggactcaagtgtcaatctgaagttgattaaagtcgttaaaaagttgggcgaaacggtggaggagtcgcagctcattgagggagcgctgatcgatcagaaatcgatgggccacggaggccccgcgcgggtggagaaggcgaagattggcctcatccaattccaaatctcaccaccaaagcccaacatggaaaatcaagtggtcatctctgactatgctcaaatggaccgtgcgctgaaggaagaacgaaattacattttggaactgtgcaagcaaatcaaaaaggccgggtgcaatgtgctgctaatccaaaagtccattttacgcgatgccatcaacgaaatggcgctgcattttttcgcaaaaatgaaaattatggtgatcaaagacatcgagcgggatgacatcgaattctatgccaaaatcctcgggtgtcgcccggtggcatccgttgaccattttgtcccggaatcgctcggaacggccgatttggtggaggaaattgagacggctgatgggaaagtcctcaaagtgaccggccttaaacacactgggtgcgctgtgtccattttggttcccggctccagcaaattggtgttggacgaagccgagcgctctctgcacgacacattgtgcgttattcgctgtttggtgaaaaacacgcccttctgaccgggagaggtgcccccg

SEQ ID NO: 48504 - DNA, 963 bp, Heterodera glycines
ggaaacattatgactttgcttatcaccggaatccttcgcaaatttgcacttacaaaattcccatttactgcatcaaattcttctttgtcgtcatggtgtaaagctcgagagtccccatttcccatctcaatggcgaacaattggaaagcctttttgttgatgaacgcgtccaacgcttgctgctttcgctgaccggccatgacaccgacaaaattttgcgccatcgtcgcatcaaccaaacggagcgcaagcattacgcgttgatgacggacggcatggtgaaggagttcatgtcacgactggaccaacgggcgggcaaatttctgcgaattgtgccgttcaaagagccgcgctcaaaccgaaccgaagtgttggcacgggacgcggaaattgacggatttgacaccgccaaattcgttttcaccgacatttcattcgacgccacagatatggatcgcactgtcgttgtccgggagcaggacggaacgctacgaacggcgttgccggaagaacacgatcggatgaatcggctgttttttgtgcaacccaatcggcctgtcaacgaaccgccgctgtttgcaatgaccgacgaatggttacagaagacgctggaccgtgatgagcatgagtttgtgctggactgggcctgtcatttttacgagccggacgctcccaaatttgttgagctttgtaagtacatttttgaccacacattggaaaatgacaagttggacgtgctgtactccaccagacatttcggcacattggccttctatttggtgatcaacggcaaaatggacaaactgttggaattctatgagcagaagaacagaaatgacggcgtagatcaaacgcgacaactttggcagatactttcttgttattgaagttttaattggatttctttctaaatgtgccgacaattttttgaataaattttgttcattttcaaaaaaccggaaa

SEQ ID NO: 48505 - DNA, 667 bp, Heterodera glycines
ctgaaatataaaccacaaataaaccgacaaaaacgaaatggctccacgaggaaacaacatgcttcccaatgcccacttccacaagcattggcagcgtcgtatcaaaacttggttcaaccaaccggcacgcaaggaacgtcgccgcgctgcacgttccgccaaggcggcccgattggcaccgcgtccggccggcggtctgctgcgccctgttgtgcgttgcccaagcgttcgctacaacaagaaatgccgggtgggccgcggcttcacactggaggagttgaagcggtccggcatgggcaaatacgaggccagatcgttgggcattgcggtcgacacacgccgtgttaaccgatccgttgaatccaccgagcgaaacgttgcgcgtctcaaggaatatcggtctcgtttgatcattttcccgaagaagatgaacaagccgaagaagggcgacagcagtcccgaggagttgaagctggccgcacaaatgcccggctctgtggtgatgccgccggtggtcaaacagcgccggttgaaggctgagccgatcaccgaggcgatgaacaaattctccgcctattgtcaccagcgtcgcgtgcgggcggacaaacggttgaagggcaagcgagaaaagaaagcaagaaacggcggacgaagggctgggcaaaag

SEQ ID NO: 48506 - DNA, 362 bp, Heterodera glycines
gttctctttccgatgacttcgtggcgattgtgtttaggaaagatcagacgaaaagagatggtcagattgtacaaagtgaaaattatgcgttctgatggttccgtcattttcggacgttgcgacgaaccgagggaaatcattcaacttccggtggaccttcggacactcagtgacgacgagcgaaggatgcgaatagccgagcgaaagccaattgccaagaaagtggttgaggatacattggacgactccttcgactttcacaaatatgtgtctcaatggaagcgatgataaaaccctttctttgttcgttagatttttgaataataaaaatggtcaaattaaaaaaaaaaaaaaaaaaaaaa

SEQ ID NO: 48507 - DNA, 669 bp, Heterodera glycines
ttgaggtattactataactcatttattgttaattgttcggtcggaatatctgctcgtccttttggctgtcattcgctttaaatgatttccggtcaccgttcggttggcagatgtttgctgtctctgccacaatttgcaagtcggttgattcccatttacggccatgtccaggcacaatgtttccacttcatgaaaaaacaagtcaccgtcgacccagaaattgcaaaactgagagagggcagaaaacggcgtaaattgacaaaagcaatcaaaaagctggcggagtacagcaaaaagccggtaccggttgaggagattgaggtcgacctacgccaccaggcaacgaagggacagagggaacggacggacaacggagtacaaggacgagacgagaagaaagaggcatatggcagaaagaagttgctcaagcagtacgcccagtcgagagccaggctggccagaacggacatcatgtggattaaacgttcaattgatgcccaagagaatgcgttggaagtgttgaagcaactctctcccacactttacgaagcggcggtacaactcgacgagcgcttattctacacacaaattcaaggtccaccaatcagtccgccgattgacaattacaattgcccagacggggagtaccaagacgtaaccaagaaatgg

SEQ ID NO: 48508 - DNA, 995 bp, Heterodera glycines
cctcgtgccgaattcggcacgaggcattttttgccattttttcattttcgttactgttcattttgtgccatcattgttcatttgccgcttttttgatcaccaattatccaaatccgttaaacaacgcttcgctgtggaaatgcggcatttcctcgccgggccctttgtgcgacccggactcgctgctcaacgaaacggcacggcacgaggcattggagcttttgaagcagtttcaggaccaaacggacattgatgacaatggcgatggcagctgcaaaggcaaaggagtgattgttgggttggcgctaacgaaacagccaatcattgcgaggaatgcgcggatcaatgtgacggacgatctgatgaagaacatttggcagttggacaatcggtgcaacaaggcgctgatgctgacgctgtccgtacagccaacccccgtggtgcgcttcactcggtacatgaccacgccggtgtttgacgacgagttgcaccacctgatctggactgagatgcattggcttcgtgatcgcaattacatcatgtgggtccgcttggtgctggacggacttagggcactgatcgtggaccggcacaacactttgggcattggcccggcccagcagctggcggcagccaacaaaaagtgtgccagccatggcttcgtcattttcagtgcgttcattgccgtcctctgctccatcgttggcactatgtgcgcaccgctgctttggcataaatgctgtgaacgttttgggcccattgttggaaagccttcactgccattcccgatggtccgctttaacaatgaacgtgacatcggcccttacacaacgacaaacaatggccaccaacagcaacaacaacaatgaagcaattacaaatggactttttaagaatttaatgcacagcgaatgctcgatattaataaaataaagttacaaagagatattttaataaatattaacccattttaaacaaatacatattaatgtggt

SEQ ID NO: 48509 - DNA, 1156 bp, Heterodera glycines
gtttgaggtttaaggccttaagcctgctaattgacatcttgaacctcaaaccttctcctgtttaaaaaacgacaaattttttgatggctgctgtagtcacaaacaatagcaaggaattcatcgttggtgtgaaatacaagctcaagcgcaaaatcggtagcggatcttttggcgacatttacctcgccatcaatattcagaatggtgaagaagtggcggttaaacttgagtcagtcaaggctcgccacccgcagcttctctacgagagcaaggtgtacaaaattctgcaaggaggggttggcattccgcacattcgttactacggcatcgagcgcgactaccactgcctggtgatggatttgctgggtccttctctcgaagacttgttcaacttttgttgccggcgcttcacgatgaagactgttctgatgcttgccgaccaaatgatcggacggattgagtacatgcatgtgaagaactttattcatcgggacatcaaacctgacaattttctgatgggtatcggtcggcattgcaacaaactcttcatcatcgattttggattggcaaaaaaataccgtgactcgcgcacgcgcatacacattccctaccgagacaacaaaaatctgacgggcaccgctcgctatgcgtcaatcaatgctcacatgggtatcgagcagtcgcgaagggacgatatggagtcgctcggctatgtgctcatgtatttcaatcgtggaaatttgccatggcaaggcctgaaagcggctaacaaaaagcagaaatatgagaaaatcagtgaaaagagaatgtcaaccccggtggaaatgctgtgcaagggattcccttccgagttttcaatgtatttgaattactgccgtggtttacgctttgacgaggcacccgactacatgtatttgcgtcaacttttccgcatcctatttcgcacattgaaccatcagtacgattacacatttgactggacactgctgaaacagaaggcaacaatgaataacgcgaacagcacggccacttatccaactgaggcggccgccgggacgtctgctcagcagtgaacattatcgtcgatgatttatcattaccacaccatcatcatcatttattttgtaaacattataaagcaccacattttaaaaaa

SEQ ID NO: 48510 - DNA, 1148 bp, Heterodera glycines
gtttgaggcatttgttcactttaatattttgccatgtcttttcttgtcacattagccggctatttgacaattgccatttttctccagaaactctttcgctctctgtacaatgtggttttcccctatttgttcgctgttcctcagaatatcaaggtgctcgcgggtgccgagtgggcagtggtcaccggcagcactgacggcattggcaaggcgtacgcgctcgagttggccaagaaaaacttcaacgtggtgctcatctcacgctccatggacaaactgaacgcagtggcggaggaaatcaaacagaaatatcccaatgtggaagtgaagtgcatctcatttgacttcaccaacgcaaatctgaaggactacgagcagacaattttctcccaactttccaccatcgaagttggaatgctcgtgaacaatgtcgggatgagctacgagtaccccgagcgattggaccgtattgagggcggactgcaacgcgtctccgacattaccgtgatcaacaccctgccgactacggtactctccgcttttgtgctcaaacagatgagggaacggggacgcggcgtcgtcgtcaatttggcctcctcggcagcgtatttcaattggttttacctggccgcttattccgcgtcgaagaaatacgtgtgttggttgtcctccattctgcgcatggaatacgccgacaccgacattgtcatccaaacggtgtgcccgatgatggtggccaccaaaatggccaagattcgcaaggcttccttcttcacgcccagccccgaggaatttgccgcccaagcgctccgcagcattggcttggtcgacgagaccaccggctgtttgtcccaccaaattcaggcggagctgatgttcggctacgtccccgccccgttgctgaacaaattcgtgcgcgacaactcactgcagacgcgcaagcgcgccctgaagaagaaggaagcgacggtggcgaagagtgaatgatgagaaaaaagaaagaaaagtgatgtgaaatattgacattcattgaaacaaccaaagtaaattaaagttatttaataaccaattctaatgccatttttgttattttatattcgtataggatgggaacacacagataaaattctaaagtgcaaaaaaaaaaa

SEQ ID NO: 48511 - DNA, 508 bp, Heterodera glycines
actgcaaggtcaaagctgtttggatcttactttattcatttaatatttatttcaatggcttttggacaaaagggaaaactgttggctgtcattggagatgaagacactgtggtgggctttctccttgggggagtcggtcaattgaacaaagcgcggaagcccaattttgtcattgttgacaaaaacacaagcgtcgccgaaattgaggacgcattccgcactttctgtacccgcgatgacattgcgattattctgataaaccaacacgtggcggagatgatccgataccaggtggaccaacacgtggccagcatcccggccgtgctcgaaatcccctccaaagaaatgccttatgacgcgtccaaagatagcattttgaaccgagcacgtggcctggtgaacactgacgacctcaagtcatagaagaagacattacaaaaaacaaattctcctttattagtcaatgaatgtgtttaattaattatgggaatgacgagaacctacatac

SEQ ID NO: 48512 - DNA, 773 bp, Heterodera glycines
atttaagtcgctttatttccttttgccatttaattccactttgttctcccggttcgatattcaatattatgtttaacctgcaagaccgttgtaagggcgttgaccaggaccgcgattaccacgcgactcgcatttcaattcgggacaaattgctcagccaagagaccaaagagttggaacagaaccttcgcgatttgcccacttgcaaattgattttcccctcaacgtcggcgctgcacgaaatggagctgacggttaagccgaacgtgggcctttacaaaggcggcgctttcaaattcagcatcaccgtcccaccggagtacaacaacgtgcctccaattgtgaagtgtctgacccgcgtttggcatccgaacattaacgaagacggaagcatttgcctgagtttgttaaggcaaaactcattggacggatatggttggatgcccacgcgccgcatccgtgacgtcatcctcggccttgaccaattgttcaccgatctcatagactttgacgacccgctcaatgcccaagcggcgcagcagtggcaaaccaacaaagatggatttgcccaaaaagtcaaggaatacatgaccaaatactgcccaagaaactgacaaaaagacggagaaagggaaaagacgggcgataaattggcaaggattctttaatgatggacggatttgactaaagtttgttttgatcggacattatttcaactcgtttacatttgatcgttgttataaattttctattcttaaaaaaaaaaaaaaaaa

SEQ ID NO: 48513 - DNA, 493 bp, Heterodera glycines
tggaagggcggtgacgagcagaaaaatgtgccggtgccgagccccaaagaaatggcccagcggccggcggagtttgacgagctgacgcacacgggacaggcctgggacattgccgattggcgccgttctcgtttcgagtacatgccgaagcaagtgaacccgaacattgcggcccatttgatcgccgagctggcgcccgtgcccagcgaggagcgcgtggtgcgctgcgacgggggccaccgcgagttgggccacccgcgcgtttacatcaacttggacaagccgggcacacatgcttgtggttactgtggccaacgcttttacaatgtgcacatgacaaaggccgagggattggacattcatcatattcaagtgtagcggttgaagaacatacagatggtgatcgggaaaaagtgatcgaaatttcgttttgtttattttttcgccaaagctcgtaatttacaaggcaattattaaaaaagctgtggattgt

SEQ ID NO: 48514 - DNA, 860 bp, Heterodera glycines
ctataaccggctgccatcgtcaacatgaagctcaacattgccgacccctcgaccggttctcaaaagacctttgaaatcgatgatgagaagcgctaccacgtcctcatcgacaagcgcatctcgcaagagattcccggcgaccagctcggcgacgagttcaagggctacatcttcaagatcaccggtggaaacgacaagcagggtttccccatgaagcagggtgtgctcgtcaaccaccgtgtgcgcctcctcctctcggagggccactcgtgctaccgcccccgccgtaccggcgagcgcaagcgcaagtcgatccgcggttgcatcatcaaccacgacatctcggttgtttcccttgttgtcgtcaagaagggcgaggccgacattgccggtgtcaccgacgtgactgtgcccaagcgccttggccccaagcgcgcgtccaagatccgcaagatgttcaacttgaccaaggaggacgatgtgcgcaagtacgtgatccgccgtgaggtgcccaagaagtctggcaagcccgagtccaaggcccccaagatccagcgtcttgtgacccccttgacgctccagcgcaagcgcgcccaccatgccgagaagcgcaaccgcgccgtggctgcccgtgaggccgctgcttcctacaagaagttgctcgctgaccgtgcccatgagctctacgccaagaagcacgccaagcgtgtccagcgtcgctcgtccacccacgcttcgtcgaccgcctaaggtcggtgacttggaagtctgcgaaaagcactttttgtcaaagtgtgcgtgtgtgtgtgctgctctctttttggatcgggatatatacattcatgcttgcttgaaaaaaa

SEQ ID NO: 48515 - DNA, 645 bp, Heterodera glycines
gtttgagctactcgcaaaccattcgatttcaaaacaattcctttcaaaacaaaataaatgggcacaccctccaggcgtggcaggaaaagaaagtctgaagtagtgcccgataaaagaacatcgacatcttcagcaagatcaaaacctttgatgccgcgcaaatcatttgtgccgttgtccattgaacagtttcggccaaccgcagttggcacacgcgtgctgagctgtggcgagggcgaacaattgggccatccaaatcggaacacaacgaaaaagccgcgtgccgttggcacattcccaaccgacatgacatttgttcaggtcgccgcgggcggtgttcactcgctggtgttgaccactgatggacgtgtgttcagttgtggcatcaacgagaagggcactgtgccggtccaaggcctggaggcggaaggcaccaccgacacattcagcgaaattgtgttcaccacggacatccaacggcttggcaaaattgtgcagataactgccggcgcgtcattttccgcagcgctcaccgaaaagggcagtgtcatcgcgtggggaaatttgagggatacccaaggggaagtcaatgtgcacgagacgctcacggacatacagaagaaaccgatggtggtgatgcggcac

SEQ ID NO: 48516 - DNA, 837 bp, Heterodera glycines
agtccaattaagtttagtttaaacgggttggcgagagtaatgcttctttcgaaaatcccacctcctttttgtattgctttgcgcgccgcttccacaaatccgccggctcgtggcccaagtgtaaaaacctttgaaatttaccgctacaaccctgaaaagccggaacaaaaaccctttctccagaaatacgacgtggatttgaatcaatgcgggccgatggttttggacgcactgatcaaaattaaaaatgagatggatccaactttgacttttcgtcgttcttgtcgagaaggaatttgcggttcgtgcgcaatgaacataggcggcgagaacactttggcatgcatttgcaacatcgaaaagaaaaccaaatattccaccaaaatttaccccctgccgcacatgtatgtggtcaaggatttggtgccggatatgactctgttttacgagcagtacgcttcggtgcagccgtggctgcaaaagaacaaaccgaccaaattaggcgaagccgaaaacttccaaagtcaggcggaacggaccaaattggacggtctctacgagtgcattttgtgcgcctgctgcagcacttcgtgtccttcttattggtggaactccgacaaatatatggggccagccgcgcttctccaatcgtacagatggattatcgactcgcgcgacgacaaagccaacgaaaggttggaacggctgaccgaccctttcagcgtgttcaaatgccacaccattctgaactgcaccaaaacgtgtcctaagcaccttaacccggcgaaggcaattggcgaaattaagaaattgttaaccgggatggaaacaaagccg

SEQ ID NO: 48517 - DNA, 622 bp, Heterodera glycines
  unsure (1)..(622): unsure at all n locations
cctatcacttcattcccaaaatgtccttccttcgtctgatcacttttgttcttctgatcactctgtgctctttgccttctctggtcgaaagcggcctcattggcattgtcggcactcccgttgaagccgcttggtgcggtgttttgggcaaagaatccagccattgccctactgctggaggcggtcaacantggcggaggaggaggagnannnnnnnnannnnnacacnnnngncaanctgttttatttanattacgagagtaccaagaaacatcccttcgcctgcttgtgcacttttcgaacgggcctgagacattacgtggacatttgctctccggtcaaatcgcatgtattgaaagcgctcgtcgaagtttcggcggacgaagagacaaaggcgaaacttacgctgcttagcacggcgtcggaggagggattgcgcgagtacccccaattcatcgtggaggagcggcgcagcattgtggacgtgttgcagcacttccccgcctgcaaaccgcctttagacctgctgcttgaactgctcccgagtctccaggcccgctattacagcatttcgtcctcgccccgcgtggacgcgtcactcgtcgcgggtactgccgttgtg

SEQ ID NO: 48518 - DNA, 911 bp, Heterodera glycines
ctcaggtgggattgaacctgggactccctgtttggtggcaaactcacagaccactaagacaaaaaatcaattagtttttgaactgggggctcaaaattgactcggtgtgttaaactgttttaagcaattttgaattacgactatgatcacaatttttcagttttttgttcccaatccaaagagtgtagttgacaattgaattatataaaattccatgaattttgctcacctttctttgttccaattaagtgttcttttcacgtgaaatttgactaacaaattgactcttcgagtctcttcatttattcatcaacattcgcaattcgtttgtttcttcactaatgagtggtgaattgcggcttgattcgagtcttgatctgatgcggcgtttgccaccgcaaaactgtgagaagcatttgaccgatttggtcgctcttgcgcccgacctttgcgagtctttgcttactgccgttgaccaaccgcttaaagtggcgaaggacaaaacaacggggagggaatatttgctctgcgactacaacagagatggcgacagttacaggtcgccgtggaccaacgcttacgaccccccgcttgaggatggcgtgtctccttccgacaccattcgaaagttggaaattgaagtcaacgccgccttcgaggcctatcgcgacatgtatttcgaaggcggagtgtcgagcgtttacctgtgggacattgacaacggatttgcgggtgtcgtactgctcaaaaaggagacggacaattcgctgtcggggcgccagggcgtcaagggttgttgggactctatccacgtgctcgaagtcaatgagaagacgaaggcggcgaaattcgccaagtacaaattgaccagcacggtaatgctttggctgcagacccaaaacccgacaacc

SEQ ID NO: 48519 - DNA, 730 bp, Heterodera glycines
  unsure (1)..(730): unsure at all n locations
gtttgagcaatttctttttcctgtgtttgaaacttccttttcgaaacaactgatatttcgcaatggctcgtacgaaacaaacggcacgcaagtcgactggtgggaaggcgccgcgtaaacaattggcaacgaaagcggcgcgcaagtcggccccgtccacggggggcgtgaagaaaccgcaccgataccgtccagggaccgtcgcactgcgtgaaatccgccgctaccaaaaaagcaccgaactgctcatccgcaaattgcccttccaacgattggtgcgcgaaattgcccaggacttcaaaacggacttgcgctttcaatcggctgccatcggcgctttgcaggaggcttctgaggcttatttggtcggtctttttgaggacaccaatctttgtgccatccatgcaaagcgcgtcaccatcatgccaaaagacattcaattggcccgtcgtatccgtggagaacgtgcttgaaatggtgggcggtgcgtccgctgctgctttggtggaggatgagcaatgaatgactctgattgagctgaccttcgttcgatgattccaatgattgcgttcccctggcgatgtcttttcccctaaatgttccatcccttttaacttttggtgagcaatgtttctcttcttttccatttttgcttctttctttccattgctctgtaaatttgtcagctgtttcctttctgcataaaaaggggagccatcaaaaaaanaaa

SEQ ID NO: 48520 - DNA, 529 bp, Heterodera glycines
tatttactttattcattcaatggacgaatattcaagggagccatgcccacatcggatttatgcggatgctgggagtgcttttgccatgggactgatcggcggttctattttccacggcataaaaggcttctcaagtgcgccgagaggacaaggacttcttaacatcgctcgagaggttcggatgcgcagtccggtgacgggctctcaattcgccgcgtggggtgggatgttctctgtgatcgactgcggcctcgtttatatgcgtcgaaaggaagaccctctaaattcgatcgctgctggcggtctgaccggcggtttgctctgtgcacgaatgggttggaaaacggcgctggtgtcggctggtttcggtgcagtcattctgacgatgatcgaaggggtgggcattttgatgaaccgagtgatggtggcgcaatccgacgcagcattggcaccttcccccgcttaattgtccaatttgttcattttgttgttttagtccggttttaaagagtaaacattttgaacaaaa

SEQ ID NO: 48521 - DNA, 645 bp, Heterodera glycines
ctaaaaccaacccccttgaatttgatgcgttttcttaatgggctgtccgtaaattaaggaggtcttatccataaagcactgctttcattgttagcgttgaatgattgagaacatagttcccattttcaggtgtacatgttcaactacgactccacccatggccgtttcaagggcaaaatttccacaaacgccggcaatttggtggtggagaaggaggggaagagcgcgcacaccatcaaagtgttcaacctcaaagacccggccgaaatcaaatggggcgaagcgggcgcggaatatgtgatcgaatccaccggagtgtttaccaccattgagaaggttgtgggtagaggacccgggatggctaattataagcaaatttaacatttaatgatgagttttttaaggcctctgctcatcttaaaggcggtgccaagaaggtaaagctttaattgctgtcttttggtgcattttttacgtctcaaaatcaatcccataaatttactacgtcatcaaatttttgcatttgtcacactgattgtaaaaatacgaataaacccaaaaggtggtcatctccgctccgtctgcggatgcgccgatgtacgtgatgggcgtcaacgaggacaagtacgacccggctaaggacga

SEQ ID NO: 48522 - DNA, 632 bp, Heterodera glycines
cttttttcgtcaattttgacatgagttcagaatcggacgaacagagtgccgatgttaacggactctgttcgcaatcgcttcgatcagatgaaaaagtgtgtcccgacccggacacaattaaaatgtttattggccaaattccgaaggcgtgggacgagttacaactgaaggaatactttgaggagttcggtccgatttatcagctgagtgtgctgcgggacaaagagacggcctccagccgtggctgttgcttcgtcacttattatcaccggaaggatgcgatcagtgcccaaaatgagcttcacaatgtgcgcactttccccggactcagtcacccgattcaaatgaaaccggcggatgtcgaaaacaaaaacgagcgcaaacttttcattggaatgcttcccaagtcaatggacgaagagagcgtccgggcgctgttcaaagagtttgggcaggtggaggactgcagcattctgcgagaggacggcaaaagcaaaggctgtgcttttttgactttggtttctcgttcctgtgcccaacaagcgattcgaaaaatgcaccattcgcagattttcgagggctgttccaaaccggtggtcgtcaaattccccgattcctgtcgagaaaaaacg

SEQ ID NO: 48523 - DNA, 637 bp, Heterodera glycines
cggcggtgggggaggatttggcggatatcgcggcggtggggcaggtggtatgggaatgaaccgcacgcaaagttctcgttatggaccgcctatacagacgcgttatcgaatgttggtgactaatttgtcaacacgctgttcatggcaggacctcaaggatctgatgcgaaatgccggcgaagtcacttatgcggacgcacacaaaaaagtgagaaatgaagcagttgtctgcttcgccacccatgaggatttgcgacgtgcagtcgaacgttatcagggcaaggatataaacgggcgcagaatcaaactcgtagatgactccgaaggctatgccgggcgcaaaagtcgctctcgttcgccccgttcgcgttcccgctctccgcgttctcgtactcgttcaccgccttctcgttcacgctctcctcgttcgcgcagcgcttcgcctgctgaaaatggtcggtctcgttcccgatctcgttctcgctccccaactccaagtcgttcccgttctcgttcgccaaatgatgaaaagtgaaccaacgaagaagagtcgatgatggagcacctctttgttggatggattatttttttcctctttttcaaaaatgaccaattctgaagttatcttgttactttt

SEQ ID NO: 48524 - DNA, 691 bp, Heterodera glycines
ctataacacataaatttcataaacattcatcattgaaaatgggcgagaaatttgttggcaaatggaatttggagtcgtccgaaaactttgacgacttccttaaagagattggtgtcagttatttgacgcgaaaggctggcgcatgcatcaagccggtgctcgagtttgaagtgaacgggaacaagtggaagatgacgtccacttccacattcatcaccatctcatgggagttcgagttgggccaggagaaggaggtgaagacggccgacggacgcattgtaaagacaaccttcacctttgtggacggcaaactcattgagaaccagaagaagaccaaggcggaggaaaaggacagttactatgagcgttatgtggacgcggatggaaagctcatgatcaccatggactgcgacggagtgaaggccaaacgagtgtacatcaaggcatgattaaaaactaattgatgaggaggaagaatggacgaaaacggagggactgagagggacacaatgccaaacaaattgcgccaaaaataaatttaaaaaataattgttgtttgtttttgagaccaaatttgatagaccaaagaatgcctagatacaagttggatgattttgaattgttgtagttttttggagtgaaaaataaaacaatttaaaataaaaaaaaaaaaaaaaaaaaaaaaaaaaaa

SEQ ID NO: 48525 - DNA, 660 bp, Heterodera glycines
gttccacggatttttcttgtaatggtggatttcgacacatcgtctttatacagtgtcaaggccattcttatccttgaccaggacgggaagaggataatggcaaaatattacgacaaacagctttttccactcgaaaaggagcagaatgtctttgaaaagaatgtttttcagaaaacccacaaagctaatgcggatataatccttttggatggcctcgtttgtctttatcggtataacgtcgatttgtttttttacgtggtcggaagtgcaaatgaaaatgaattgattctgcaaagtgtgctcaattgcctttacgaagcgttttcgacaattcttcgaaaaaatgttgagaaaaaggctctgttcgagcacattgacacgtcttttctcattatggatgaaatttgcgatgatggcattattctggagaccgatccccaggcagtggtcgcccgttgtgcggtcaaagcggacgaattggcatttggcgagcaaagcatttcccaagttggcatgtcgctgttgggctctgcgaaggaccaattgaaatggtctcttctgaagtgaccgaaggataaaccaattttgtgattaatttttgttgtgggaaaataacaaaagtgttttatttgtattttttctataaataaattggttatt

SEQ ID NO: 48526 - DNA, 410 bp, Heterodera glycines
gtttgaggaaatggaaaaaagggtcacagaatctttggtgtttcacgacgaagtggaaattgaagactttgaatttgacgatgagtttcagctgtatcacttcccatgtccgtgtggcgacagattcgaaattacgcgagagcaactcgagtcaggagaagatgtggcgacgtgtccgagctgctcgctaatgttgcgcgttatctacgacatggaacagttcgtcaaattggagacactgcgcttggaaccgacaaacgctgttgaagcggtcaagtgaatgaatgaatggaagttaatttattaacaaaaaccatatatttattatttaattaagtcatttatcattgataaaaaaaacaccggaataaacataaatttccacgccaaaaaaaaaaaaaaaaaaaaaa

SEQ ID NO: 48527 - DNA, 1092 bp, Heterodera glycines
gagaaatgctttgcaatttccgcaacttcaattgttcgtcctcgcggcacttttcgctcgcttctgttttacttcagcagcaaaaattcgctgctgtttcttcaccgcccaataaaaattggaatgctgtgcttatcgaagcgatgcgtttgaagtcaaccagcatcgtccaggatgatgcaatcactgaacatggccatgatgaccacgggcatggacaccacgcagtcaattatgggccgccgattacctatgactacactcctataccatctcaaccttataagaaggtctataaggaactgaagcagaaattcatcacgtatttggcgatgagcttcgtctttttcatgttttgctgttacgttggctattccactgatgtgctgggacactccgcttggaaacttccgggcagctaccgtaacagaaaagcgattaacgcgcgtttggacgcggaggaagcgaaggcaaaggccggggaaggcgagcaataggaagaaagattgtcaaattgtaggctataattttgttctaattccgagatgtattgtaatagtgcgatcattaattcgttttcgaattgtatttgtttgttgaatgcaacattggacttggtaaggttttgtggcacaaatatgttgtttttctcttcaaagtcactggaattattatttgagcgaaaaccaactcgtactgccctgactcgtaaaatttttcgacaaaaagaaatcgtaataatttttaaagtcgaaattaaacatttaactctcttaaaattctctatttccttataaaatttcaaaaatgatatgattttcatccaaacaaatacccaaacccgtattcgaacaaatagttgaaaaaccaaatcgtattttcactcaaacctacttaaacatacactcatgtcaaaagtattgcaccaaaacatgtatgcacaaataactcaatttttttatttatataaaattctcaaaaattttctgctaggctaacttttgatgctgataaaaaaaagtcttttggaccaactttatcagatcactccttcatggtgatctgaaaagttaaaaatggcttgaaaccggg

SEQ ID NO: 48528 - DNA, 720 bp, Heterodera glycines
gaaatgctttacaacttccgcaatttgaattctttgtcttcgcggcacttttcgctcgcttcggccttacttcagcagcaaaaagtcactgctggaacatcaatggccaataaacgtgtgctcatcgatgctgtgcgatgcaagtcgactggctcctcccagcagtacattctcgctgcgcatggccaggacagccacgggtatggacatcgcgcattttcgacttcaggtgctgcacaagaactgagcagcgcgttggacgaggagatcaaagcggagaaggaactcgttcaggacaaattgggtggcacttccgcgccttcagtgcccggcttcaaaatcaccacgaaaggggccgaagtgcgactgagcaaaacgcacggaaacgaaaagattgaagtcattctgaacgtgaatcattcggtcgacatcgaagaggacgaggagtacgaagacgagccacaagcagaaatggagccagagtctgtgcccgtctcgttgccacacttcaccattagcatcacaaagaacaaccagagtatgttcttcgctcttgaaatggtgaagacggaggacggcggatttgacttcaccgtcgaagagtttttcatcgcaccgtcggtgaatggcgaacccgtgaacgaagttggcgacgacgtgtacagctcgtccggcaaatacattgacccgaaattgcacgatttgctgttcgtcagatat

SEQ ID NO: 48529 - DNA, 678 bp, Heterodera glycines
gaggttttatatttctgtctcacgagcaggaaaatgtcgggcggttgtcctcttgcgggcggtgctagcgttaatgggtgtcctatgtcgaatggcggcgaccaaattgacccatcgaatgccatgccaccaccaaatcagaagccagcccctgatcagcccttcgttctttcaacaaaccgtcaaaagtcaaccattccaaaagcgaaagtgatggtcgatggccaattggaaacttgggaatatccttcggctcagatgttttggaatgcaatgcttaagaaggggtggcgttggcgcgacgatcagttggaccagcgcgacatggacaacatcatcagaatacacaatgctaacaacgaattggcttggcaagaagtgcttaaatgggaacactccttgcatcctgagtgcgatatgccgaagctgaaaagctttcatggagacgcaaaaaatttgtcgcctcgagcgcgcttccgttcatggcttggttatcaattgccgttcgacagacacaattggctggtcgaccgatgcggacgcgaagttccttatatcatcgattattacgacgtcggacatgtgaaccccgaaacgaaattgtttgcccatttggacggtcgaccggcaattcgcgatgccagcacaatgtgggaccgaatggttgtgggatattgg

SEQ ID NO: 48530 - DNA, 337 bp, Heterodera glycines
ccaagtttgagcaatttttttcctaattggtactcaactgagagtaaattaaatggttcacgaaaacatccattggtcccggccacgcaaatttgggcctggctcgcgctcgtgtcgcgtatgtttcagtcatcatggactcattcgaaaatattcactgaacatttgccgtcgctgcttccgcgaatacgcctccgacattggattcaagaaactcgattgaattgatggagaaagcccgagtatttttcattgttttcccggaagcattgttatcaatcacaaattattgttgaattttttgttttgataaatcaaaaagttaaaaaaaaaaaaa

SEQ ID NO: 48531 - DNA, 898 bp, Heterodera glycines
gttttaatatacaaagtaatgaaattgaatattgcttatcctgcgactggggcgcaaaaactcttcgagattgaagatgaaaagaaacttcgcattttcttcgacaagcgaatggcgcaggaagttgaagctgactcgttgggggatgaatggaagggctatgtgctccgaatttcgggtggtaacgacaagcaaggctttcctatgaagcagggagtgatcaccaactcgcgtgtgcgccttctcctctccaaaggccattcctgctatcgccaacgcaagaagggagagcgcaagcgaaagtcggttcgcggatgcattgtcgactcgaatatgtccgtgctggcattggtcgttgtgaagaaaggtgaacaggaaatcgaaggactgaccgacagagttgtgccccgtcgtcttggtccaaagcgtgccacaaagattcgccgtctgttcaacctgaacaaggaagacgacgtgcgaaagtacgtaatccgtcgcacactgccggctaaggaaggtaaaaagccgcgtacgaagacgccgaaaattcagcgtttggtcacgccggtgacgttgcaacggaagcgcaggcgcattgcgctgaaaaacaaacggcgtgttaagcgacgcgaggaagccgctctttaccaccaaacacttgctaaatacgcaaaggaaaagcaggcggaaaaggtcgctcgtcgccactcttccgcttcgcactctcaaggctgaggaggagaaagaaagtgcgaattgacttccgatatgcgctcttttcgtctatgtttggctgttattgttttgttgttttgcaatgataattctttgcgataaattggcgaattgttaaaaaaaaaaaaaaaaaaaaaaaaaaaaaaaaactcgagactagttc

SEQ ID NO: 48532 - DNA, 543 bp, Heterodera glycines
gtccaaataagattctaaaaataaatattaaatcgccatgacgaaaaagagacgcaacaacggacgcaacaaaaagggacgcggccacgtgcagcccatccgttgcaccaactgcggccgctcatgtccaaaggacaaagccatcaaaaagtttgtcgtccgcaatattgtcgaggcggcagccgtccgcgacatcactgacgcgtcggtttacgatcaatacgcactgccgaaactctatcacaaattgcactattgtgtctcgtgtgccattcacagcaaagtcgtgcgcaatcgttcgcgtgaagcgcgtaaggaccgaaacccaccgccacgttttggccaacggtctgccgtcgatcgtccgcaacgtccggggggagcggcccctggaggccccggaggcgttgggatgatgcaagcgattcgaacttaaagtgggcgaccgaagatgcatccttcgctgttttgttgttaccgttttttgtctttgtcaaaggataaaagttgttgaaaaaaaaaaaaaaaaaaaaaaaaaaaaaa

SEQ ID NO: 48533 - DNA, 833 bp, Heterodera glycines
attagtttataattttgcataaaattcactgactgttctttttcaccttccttcaattcaacaaaatggcgaaatctgcaattgatgttaatcgcggcatcacagaagaccaaacagctaccataagaaattatttcacacaaccgcacttaatttacaaaactgtcactggagtgcgcgggcctttggtcatattgggcgatgttaaattcccacaatacgctgaaattgtgaaacttacactgcctaatggagaaaaacgcatgggacaagtactcgaagtaacgaaggacaaagctgtcgttcaggtgtttgaaggtacgtcaggtatcgatgcaaaaaacacaatttgcgagttcactggcgatattatgagaacacccgtttccgaggatatgcttggaagaatattcaatggatccggcacacccatcgacaaagggcccaatgttttggcggaggattacttggacatcgatggacagcctatcaacccatggtccagaatttatcccgaagaaatgattcagaccggcatttccgcaattgatgttatgaatagtatcgccaggggacagaaaattccaattttttctgctgcaggtcttccgcataatgagatcgctgctcaaattgtacgccaagggggcctcgtcaaacagccgaacagaaagaaggaaaatgaggtggagggtgacgacgactttgccattgtgtttgctgcaatgggtgtcaacatggagacggcgcgctttttcaaacaagactttgaagaaacggttccatggaaaatgtgtgcctttttcttaacttggctaaatgaccaaccatcg

SEQ ID NO: 48534 - DNA, 599 bp, Heterodera glycines
gttggattaaatcgaaaagattcaagcgaaagtcaggagcccggtcttcatcctttccagtatgtccaggccggtttctttacgggtgtcgccacaagggcgattatacaaccattcgatgtgctcaaaatccgactacagcttcaagaagaacctttacgtgggaaaagtcgtggaaaatacagtggaatttttcaatctgccaaattgatttaccacgaagagggaatcgcagcattttggcgtggtcatatcccagcgcaaggcctctcaattgtctatggtctggtacagttttgcactttcgagctgctcaccaaacaggccggcgacttcggctttcacaatttctcaaaatcagtcgattttgtctgcggtgcctctgccggctgtttggccaccacttgtgcaatgccttttgatgtcgttagaacgcgaatggtggcacaaggcgcccatcggacctaccgtaacatggcacacgcattcatcaaaacgtggcgttatgaagggccggcggggtatttccgcgggttggtcccttccctcgtgcaaattgcgccattcaccggtctccaattcacattctacaacttggt

SEQ ID NO: 48535 - DNA, 407 bp, Heterodera glycines
ccaagtttgagctttttccaaattattttcattcaacaaaatgaaggaaggccaaaagccccgccagtcacgacacaagggacgactctcaaagaagacgcgcattgtgcgcgagcttgttcgcgaggttgttggtttcgcgccgtatgaacgccgtgtgcaagagttgctcaaaatcagcaaggacaaaaaggcgctgaagttcttgaagaagcgcatcggacagcacacgcgggccaagcgaaagcgtgacgaaatgcagcaagtgttggtggcccagcgcaaggcgcacaaatagacggagagaggagatagaggcgggaaaattttcatggatttccttgttttcctttgttgaaacttggatgatggatggataaattgtttgttgtttaaaaaaaaaaaaa

SEQ ID NO: 48536 - DNA, 638 bp, Heterodera glycines
gtccatttaagctgtccaaaatgatgagtgccaaattttttacgcatttgattaattcggcatcggtacgacccatctccacctcatgctgcagaaaagaattgcgtgaattgtggaaattggacaaacggaacccttttcaagaaattcccgaagcatgggtcacttccctggacgatattgagcagaaaaattgtggactcattcaactccatccagacattttccgtgtcaaaccgcgcttggatttgcttcatcgaaacatcacatggcaatccaattaccggaatttgacgctcctcaaaatgttgtcccgcgccgaaatgccgggcggtggccgaaagccgtggcctcagaaaaagatgggccgtcaccatgcaggaagcattcgttcaccgcatttcattcgcggcggttttgcgcacggcgttcgcggcccgtgcacccaattttacatgctgcccaacactgtccgaattcacgggctccgcaccgcgttgaccctcaaacatgcgcaggacgacttggtcattgtggacagctacgacacgctgaacagcgcggaaccacaatttttgaacgatttggccgacgcacgcaattggggctattccgtgctgtttgttgatctcactgtc

SEQ ID NO: 48537 - DNA, 481 bp, Heterodera glycines
aatttattcaaaataagggaaaatggtcgaagccgccgaacagtcgcaacaacagcccatccgtcgccgtgccggaccgaagtcggcacgtcgcctttatgtgaaggcggtgtttaccgggtacaaacgcggacaccgttctcagcacgagaacacgtccctgctgaagcttgacggggtcaatgacaagtcggatgccagtttctatcttgggaagcgtgctgtctacatgtacaaggggcacaaaacaatcgcacgcggtggtgggccgaagacgcgtgttcgtgcaatttggggacgtattacgcgcgtgcatgggaattcgggagtggtgcgtgccaagtttcgtcacaatttgccgccgaccgccatgggcaagcgaatccgtgtgatgttgtacccgtcaaacatttgaggaaatacagaatgttttttgttacaccgtttttttttttgttgatcgtttataaatgttgatgac

SEQ ID NO: 48538 - DNA, 618 bp, Heterodera glycines
gtttgagataaaataagccaattcaaactgttctaaggaaatggctcaacttcttgctggagagaaagttgtgctgagtgacggttcgaaggtagaagcggaagtgttccttaaggacaaagtggtcgctgtttacttctccgccgggtggtgcccgccgtgtcgcgcgttcactcccaaacttaagaaattctacgaggagctgaaaaaggcaggcaaaaacttcgaggttttgttcgtctcgcgcgaccgtgctgctaaagacctcgtcgaatattaccgtgaccaccacggcgcttgggcctacctcgagttcggaaacccgaaaattcaggaacttctcgagaagtacgaagtgaaaaccattccgacttgcaaagtgataaaacccgacggaacgatcgttgtcaatgacgcacgaaccgaagttcaggaaaagggcgtggagaatgcacttggtctttgggaggaatggctgggattctatgaagcttgaaaaagcccattggcaagcgaaccgacgaacgaaggataatttgataaactttcctcaatgcttatttatatagccttaggcatttcaacattccccgataaagtaatcgcgtgacaaaaaaa

SEQ ID NO: 48539 - DNA, 729 bp, Heterodera glycines
ctggtttctattctaattcattaaaatgacaactgcacatcgtccaacatttgatccggcaaagggtggaactggacgcaatgaaggcgatttagcgaagctttctcaacaatattctagcagggacatgccttcgcatatgacattgaagtacagacaaaaaggacaggcccaccccgaggaagtcgttgcaaagaacctccgccgtgacattgaggaacgtgagcagcattcgcgtgagcgtcgttcacgggattctctggacagttttggcacgggtcccacaaacaaaaaacaacgcgttgaggacacttcatctgcacgtaatcttgacgctgatgaaccatttgatgagctcaacgaggacgacaccgacttggacgaagactctgataacgaggccgaacttatggcggaactcgagcgcattcgcaaagaaagagctgcggaaagggcctcaaaagaggcgaaagaacgcgaagaacaggaacgcattcgagaagagaacattctccatgggaatccgctgctgaaccccgcatcgtcggagtttaaggtcaaacgccgttgggatgacgatgtcgtcttcaagaattgtgcacgaggaattgacgaaaggaagaaaacgccttcattcataaatgacgcaattcgatcggagttccatcgcaaattcatggagaaatacattaaatgagtcgcttactgtgaaaaagcgtttttctgaat

SEQ ID NO: 48540 - DNA, 806 bp, Heterodera glycines
agataatcgaacttattcctttgcattcgacctacaagaacagttttatttactaaatttgaagtatggaaatgcaagcatcgcccggtcctgactgtggctttaccaccccctcaagaacatccacaaacagtaaatttatcgtcgatgtgcctctttcgacaaaacgtgaaaagcttttgcgtggaactccgactcgttttcgacttcctcctgtgcgtcgtctgatgaagtccgctccgaatattcaccacagattctatttggcacgtgaccatatcgaaccatttgcgcaaatcgtttcattcaagcgatcagaagacaggccttcacttagcaaccgatatcggcccgaattggaggagacttatctccaacaatgctttgtacttcagggcagattgggccaaggcgatttcggagaggtggtcagtgtgcgttccaaagacgacggcaaattgtatgcggtgaaaagctctttggacatttatcggaacagcgctgatcggcgtgaaaagctgcaggaagtgcaaaagcacgaaatgctgccgccccatcccaacctcatccattgcgtgaaggcgtgagaatagcgcggccgactttacattcagacggaactctgctctcgaagcttggacgacatggcgagggagcgccacgaaataccggagccagaaacccggtattacctgatcgactcattgaaggctctcgaacacatgcattcccacgacatcattcatgttgacatcaaaccgtcaaacatcctcgttagcacggatggcatttgcaaacatggagac

SEQ ID NO: 48541 - DNA, 756 bp, Heterodera glycines
cccgtattgtgcttccatccgatttcatcaccggttcaaccatttctgtggccacacaagtgccaaaactgattggccatggccttgagaaacggccggacggtgtgtacgcacttatggccggtgtgttacatgaaaatgagcagaaaatgtggcttaatacttccacgaaaagatatgttccacattcgggtgatcgagtgcttggcacggtgacatcgaaggccggagactattttaaggttgacattggctccatcgacttggcactgctcaacttcacttcctttgagggggccaccaaacggaaccgaccgaacgtcaaagtgagcgacctcatctacggcctggtcattctgacatccaaacaacttgagcctgagctgtcctgcgtcgattcggagggccgtgcccgtggcatgggactgatctccgcgcccggcctcgtcctgtcggtgtcgcttggctacgcgcgccgtctgctctcggcggactgcaaaattttggccgagctaagcaagcagctcaagttcgagacaaccattggcatgaacggcacaatttggattggtggcgatgaggacgtcgtattggccgttcgaaatgccctcatcgccggcgagacaatgttcgactcgaacattgcgctgctcgtgcaaaatgccgtacaaaatgttcacttccaaaagccaccagctgatgataatgccgatggtggcgcagaacaaatgccaatggaaaccacataaaaattga

SEQ ID NO: 48542 - DNA, 573 bp, Heterodera glycines
attcaccagctctcttcaacaaaaccttcgcctctccacatttcgacgacaaaatgcctccaaaaccatccggcaaaggagcgaagaaggcggtcaagtcgaccaaggcggtgcgcacgggagacaaaaagcggagaaaggcccgcaaggagtcttactcggtgtacatctaccgtgtgctcaagcaggtccacccggacaccggcatttcctccaaagcgatgtccatcatgaactcgtttgtcaatgacgtgttcgagcgcattgcggcggaagcctcgcgattggcccattacaacaagcggtccaccatctcatcgcgcgaaattcagacggctgtccgactgattctgcccggcgagttggccaagcatgccgtgtccgaggggaccaaggcggtgacgaagtacacctcgtcaaaatgagcaggagatgatgaaagcggtggtgatcggacggaaaaaactatcccaaacggccctctttagggccacaatcactcaaatggacgcgaatgacactttttttcctgttttgtatttgaacgcaaataaattggctttacgcttcaaa

SEQ ID NO: 48543 - DNA, 708 bp, Heterodera glycines
attaaaatggcatcgaatttgacggttaaagttcaccccatcgtttacatgtccatcgtcgacgcctatgagcgtaagtcatcttcgaacatcaacagtcgcgtgggcaccgttcgttccgtggaaacaacggaaaaccgagcgttgggcacgttgttgggattttacgagaagaatgtcgtccaggtgacaagctgttacgccgtgccgttccgcgagacctccgacgacattcccgaaataaatgatgcattgaacagacaaatgtggcacatgtccaaaaggacttcgccgtccgaacaaatcgtcggatggttcttcactgtgcccgacctttctgaaatgtgtccgcattatcacggctattacacggggttagtcaatgaaacgccgcgaaaagagccgccgcccattattctgatcaccatggatttcaccttttcgggagagagcgccgaccgacttccgatcaaagcatacgcggcacgcgaggcgggggtcccggggaaaggagcgactcaagcgacgattttctacccgttaaaagttgaaatggacgtgttccctggcgaatccgttgcactttcatttataatgaggggtttggactcggaacggcgcgagattaaaattgccaacagtcaagagcaatttttggagaatgggaaacagatggtccactggttggagaagatgctcggctacctg

SEQ ID NO: 48544 - DNA, 417 bp, Heterodera glycines
ctcttgctgaatcgcctacattccaaatctttctttagcattttggcactttcattgaatatttcatttcaaaatgagcaaaactcatccacccgaattgaagaagtacatggacaaacaagtcaacatcaagctcaatgggaacagaaatgtgtccggtattctgcgtgggtttgatccatttatgaacatcgtcgttgaagattgtattgagcacctcaagaccggcgaatcgcagagcattggaatggttgttgtccgtggcaattctgtcgtcattatggaaccgatggagcgaattgggtgactgtcgcagacagaaaaaaattggcagtgatcattggtctctagctttgttaattttactctttttgttcataaattttgctttaaaaaaaaaaaaaaaaaaaaaaaaaa

SEQ ID NO: 48545 - DNA, 622 bp, Heterodera glycines
gtttgagggtttaaaatatttctgaatttgttgtggtattttgtccaatgtctgtgctaatcaccgagagaaatcaggatgcgacaatttatgttggtggtctggacgagaaggtcaccgaggcgatcctctgggagttgttcgtcaacgctggtccggtgaccaacgtgaacatgccgaaggatcggatcaccggcactcaccagggcttcggctttgtggagttcatgagcgaggaggacgctgattatgccataaaaatcatgaacatgatcaagctgtttggcaaaccgatcaaagtgaacaaagcctctgcgaatgagaagaacatggacgttggggcgaatttgtttgtgggcaatttggacccggaggtggacgagaagttgctgttcgacacgttcagcgcgttcggtgtcattttgcagcccccgaaaatcatgcgcgacgtggagacaggcagcagcaagggctacgcgttcatcaattttgcatctttcgaagcgtccgatgcagcgctcgaggcgatgaacggccaattcctgtgcaaccggcccatcacgtgttcgtacgcgttcaaaaaggacaccaaaggggagcggcacggcacaaccgcggagcg

SEQ ID NO: 48546 - DNA, 666 bp, Heterodera glycines
gtttgaggtgcaaatgaccatttccatttttccgcgtatttgtccctcttttcctccttttctccggcattttccttcttcgtccgctaattcgctcgcttttcgtcgccacttttctctgaccggcccccgtcacagctttttcttcgattatttcactaaacaccccaaggacatgccccctctccgcgactatttgccccgtccgacgtgggtaaaacatggcaatgaatttccgttgcgacagcttttaccaggacattatgatgatcccgagtggcaccccaaagaccgcggttacgccggttcaccgcgttttggcgacaaaatacccgaagacatcatgatatatcgtagaagtcccaccgaagaagaagtgccatttctccacaaggcaatgcacaaattgatgtccatggtattttggtattgggttttctacacaatctattggcatcatcaagagcagtttacgggtgaatggtacttcccgtaccattacgaatggacggacgaggagctcggcgttccgcccgacgacgcgcctgacccggaggaacgccaattctggggccatccgggcgaactgatcggcacttaccgcgcatagaaagagccgtttacattaggagtcttcattaatgacgagttgatcgaaagcaaata

SEQ ID NO: 48547 - DNA, 1115 bp, Heterodera glycines
caacggttcgccgccgtcggatgagtccgtcgtttattcgtcctccaattgcttttcaaccgccgatgcaatggcaccaccgccggcaacagtcgacgaatacaccctgtcgcagtcacgctttccttccgttgcttcactggcgccgcccaccgttttgatgatgtccaccgctggtcaaacgcccgtccaccgcaggcgacactgtagcgccggctcaaacaatgcgcagcccaacaacagtcacgaagcaatctccagaatggacgtgttaagtgagcggatccgtgacttccattacaacgaggaccaaacgcacgcacagctcaatcgaaaattgcaattacgcgaccaactttattacgcaatttcaccgattttcccaatgtgcggactttacattgtcggctcgtcactgaacggattcgggacgaagcggtcggacttggacctttgtctgatgataaccaatcgcgatattgaccaacgcactgatgcggttgttgtcctgtcgtcggtgatgcggacattggagagcaatcaaattgtggccgagcagaatctgatcctggccaaagtgccgattctacgcatcaaatttatcggcactttccacgacataacggttgacctgaacgtcaacaactcggtggccattcggaacacgcatttgatgtgttactacagctcttttgactggcgtgtccgaccgttggtgatggtggtcaaagagtgggcaaagcgtcacggcatcaacgactcggcctgctcctccttcacatcgtactcgctggtgctgatggtcatccactatttgcagtgcggtgcacagccaccggtgctgcccaatctgcagcaaatgtacccgaaacggttcagcgtacgtgcggatgtgcgcacgctgaacgtgtcgttgccgttcgagccaattccaaccgcgatgggctggcagttcaaggacgacgcgacgctcagcgagttgctgctcggcttcctccgctactacgccttccaattcgactttgacgcggacgcgataagcattcgaatgggcaaaaaggtcaacagggcacaggtggcacaaaatcaatcgcccttcaacacattgtcccaat

SEQ ID NO: 48548 - DNA, 992 bp, Heterodera glycines
attgaattgatttatttatttattttgctgctatattcttccaattgtttgctctcaaatggtgctcaccgactcggcccatgccgaccccaaaaatgccgtgcccttccgtctgcgcatcgacggccattgggtgcgcgtggacgagcggctgctgcgcgcgcacccgggcagcggcgcaatgctcgcctaccgggacagggaggcgagcactgtttttcattcgttccatgccggctcaaagcgtgcctaccgatggatgacggaacaccgtgaaaatggtggtgccaccgccgaaactgaggcgacaacagaggcaaacggaacggcagcaaaaaccaaaaaaagcaatggcacgggcgccggcgccgccctttggccggacaaaatcgacgccataaatatgggcaaatttgggaggagtgccgaggcaaatgaaaagatttgccgttcctttgatgttctccgctcccgcgtccgttcgcttggcttctccgcgcagacgacgcccttttcgtgctcaaatttattcaatgcgttgctctgattgcgttcgccgttttcctccagtcgcgcgactttttcctcgcctccgccctttgcatgggcatcgcctggcctttgaatacggtcatcagcagcactttggctcctggtggtggaacgacgtttgtggctatgtgtgcggcaatttgatgcaggacttttcgcttggcggttggaaacgcattgacagtgtttctccgctcgcccatttgttgcccttccagcatttgtattggtccttcgcgttgccgttgctccgtttttcgtggctgctccaatccgtccaatttgtgtgccaaattcggcacagttttcacgacatcatcgccagagggccctggtggagcagtgttcgttggcattgcattggtcgctggtgttcgtctaactaactgtaaggcggtgaagaaggcggccaacgggaagctgaagggcattttggcgta

SEQ ID NO: 48549 - DNA, 558 bp, Heterodera glycines
gaccattcaacaaatttgattttcaacaatggaaggtgttgttctagaagagactatggaagagaatgtaatggatacagaattggacgacctcaaaaaaggagcagcggtaaaaaggggccgtggttttgaggggtcgcagaaaagtgctgtccaagtctatgaaactttggacgaggagggctccgtcggaggaccacagcgttctgttgaaggatggatagtttttgttacgaatgtccacgaagaagcacaggaagacgaggtgaaagatctgttcaaagaattcgggaatgtgatgaacatgcatttgaatttggaccgtcggaccggctatttcaagggctataccattgtgcagtacgaaagccaagaggaagcggcagaggccattgccgggctgaacggctacgactttttgggacaggaattgcgagtggattggtgttttgtgaagggcgggcgcgagagaaagcgatgaatcggatgagaagaagacccaatcactcattatttgttcatccattgatcattagtttggatttcctgcattatttc

SEQ ID NO: 48550 - DNA, 664 bp, Heterodera glycines
catgtcaggcgatggttcggaaactgcacgcggaattggattatgcaagacattttccgaaggcttatctggacaaagcgcaaaggcatgtccctatgaaagtgtacgacaatcgctttggcgctccgccggtcattcgttgggcaattcgacccgatgattgggcgatgagaacgaaacgtccgtgggagtacggagaagtggaaaatgtgatcagacaggagaagatgtaccaaaggcaactgttttccacaaaattctaccgaaaaaaatggaacaaaatgccgataattccggcagaaaattggacaattttccccggcgacactgtccaagtgatggtcggcaagcacaaaggccgcaaaagcaatgtatcccacgtgatcaaagaatcaaatgcggtttttgtggagggattacacactaaactcgtggacaaattcaacaaggacagaatgaaagaaatgggaattggcgatgtgttcttcgaccagtgggaggagcagccactttttctgcacaaaggcgaagtgcaattggtggacccgagcgacggtgaaccgtgcatggccaaatgggtgctgaacgactcgaagacggaataccagcggatcagctcccgcaccggcttcctcatccctctgcccagtcgcgccttcaccac

SEQ ID NO: 48551 - DNA, 951 bp, Heterodera glycines
cgggaacataacctaacaccaaaagttccaataatggattatgaattatctaatcaacaactgcgccccttttctcgatcctttacttcttcatccttttcacagcaacgatccaacaacccaagtctttttcagtatatcaatcccaactctgacaaagcgttacgcgttttccaagcccacactcgccattctgggaaggcagaagagaattacaaaacggtgatgtgccagaattggctggaacaggcggagtgtcgtttcgggtcaaagtgccgttttgcccacggtcctgaagaactgcgagttgcaacaacgcctcttccgatcaacaacaaatacaaaacgcgtctttgcgaaaagtacacgaagaacggcgtctgtccttacggcgagcgttgtctgttcattcatcccgaccagcagttcggactgccctcgtccacattcgccgcttcactgcctctttcgctgttccgtttccaacagatgacaacggccactttccatcatcgctcgcatcagaaattcccatcgaatcgtcagattcgcaatttgttgccacagattgaagaagaattgcgtcgtgaacgtgaagagataaagcaacagaaccatcagcagaagtgcaacggactgcgagtggaaatccctcagccatctgtgggcgcgtcttcgtcacacactcctgaacaaatcgaatggcgtgggatggtcgaaatggtcgacaaattgaccttgacgccgtccgctaacaataagttgtgtccagctgacttcccctcctaacacccctaaccctaacccctccctccttccccacatgttccccgccgacttccccctaacccctcccgcccctccctaatactaacattttttcaattataaatattgtttagtattttatttgcattccacatacatacaaagaataaataagagcaattc

SEQ ID NO: 48552 - DNA, 596 bp, Heterodera glycines
ttttcttttccctttcattttttattcgttcaatcccttctttctttttgcaatgcttctccgtttctccctcactgttcaacttttgctgcttttcttcgcttttgaagttcttggcgctgaaccgccagaaggtgcacaaaatgaagaaggccaacgagacagcaaaagattggaaatggccaggaaagggctgaacgttcacatgttttcctcccccaatttcgccccaatgtttggcattatcgccggcctttccgttgttcttatcattgccattgttttcattgtcgtcggattgctcagcatggaacccgcgaaggattcgattatctatcggatgacaacaactcgcctaaagaaggactgattgtgagcaaagtgtgggagagagtgccgtgccgaaaaggaaaagtccgtcccccattaaatgatttgtttcatttgatagtgaatggtcacccaccctttgtcggtgttgcaatccgcaacgaatcatcaaaacatttaattttatagaatgtctatttcttcccattcattgtaatcatgtagagaataaattttttattttcaaaaaaaaaaaaaaaaaaaaa

SEQ ID NO: 48553 - DNA, 613 bp, Heterodera glycines
cggaacttttcatcatgggtatctctcgcgactctcgccacaagcgtgcgcacaccggtgccaagcgcgcccactaccgcaagaagagaaagttcgaactcggtcgccaagccgccaacaccaagctcggcgcgacccgtgtgcaccaagtgcgtgtgcgcggtggcaacatcaagttccgtgctttgcgtctcgacaccggcaacttctcgtggggctccgagtcgtgcacccgcaagacgcgtatcttgggcgtcgtgtacaacgcctccaacaacgagcttgtgcgcaccaacaccattgtcaagggcggtattgtcgagattgacgccaccccgttccgtcaatggtacgagtcgcactacgtccaagcccttggccgcaagcagaaggatgttgccgaggttgaggagctcaacaagaagcgctcgtcccgcgtcctccgcaaggttgaggcccgtcaagccaacgccaaggtcgacccccatctcgcgtcgcagttccagaagggccgtctctacgcccgcattgcctcgcgccctggccagtctggtcgcgctgacggctacattctcgagggtaaggagcttgacttctacctccgcaagctcac

SEQ ID NO: 48554 - DNA, 906 bp, Heterodera glycines
attctctgatcaacaatgctctcaaaaaaacttttccagtctatcttgaacaaatctccaaagactgctttctcaacttcggctcgtttgtctgcgtcaagtgctgaagtttccaggattttggaggagaaaattcttggacaggcgtcacaaatcaatttggaggaaactggaagagttctttcaattggagatggaatcgcacgtgtttatgggcttaagaacattcaggcagaagaaatggttgagtttgactctggaatgaagggaatggcacttaatttggaaactgacaacgttggtgtggtcgtctttggaaatgataaagtgatcaaggaaggtgacgtggtaaagcgaacaggttcaattgtcgatgtgggcgttggcgaggctttgcttggacgtgtcgttgacgcgttgggcaatcccatcgacggaaaaggtccaatcaatgtcagcaaacgctctcgtgttgaagtcaaagcgccgggaatcattccgcgtgttggtgtgcgagagccaatgttgacgggggtaaaggcggtagactcattagtgcccattggccgtggacagcgtgaattgatcatcggagaccgtcagactgggaaaactgccattgccatcgacaccataatcaatcaaaagcgtttcaactcaagcacagaagaaaagaagaaattgtactgcatttacgttgccattggccagaagcgatcgacggtggcacaaattgtgaaacgactcactgacacggacgcaatgaagtacacaatcatcgtttccgccactgcttcagatgctacgccgctgcagtttttggccccctattctggcgccgacatgggcgagatttttcgcgataacggcaaacacgggatgaatatcgacgacgaatctctccaa

SEQ ID NO: 48555 - DNA, 658 bp, Heterodera glycines
caagtttgagatagcactttttgattaccatcgctgtacgcaatgaagacagagacgtgcgtttattccggctacaaaatccacccgggccatggcaagcgagtggtgcgcgctgacggaaagatccaaatctacctgagcaagaaggcacagcgtggtgcagcactgaagcgcaacccgcgtgacgtgccgtggaccgtgctgtaccgacgaaagcacaagaagggagtacacgccgaggagggcacgcagcgaaagcgcgtgaagcgcaccgtccaaattgcttctcgacccatcgccgacctcaccgtggaggcactgttggcccagcgcaatcagaagcctgaattccgtaaacagcaacgcgatgcggccatcaaggctgccaaggagtccgcccgagtcaaaaaggacgagaccaagaagaagcagcagaagattgacaaaaaggcagcgccaacgaagacgaaggcggccaagcaggtgaaagcgccgaaacaatttgtgggcggaaagcgctgattttgtgatggttgacgaaaagatgggatgtgcttgtgtgaattcggggcgggaattttgttcgagttctttgtcctcctcatttttgttgttgaaaaattaaaaaacaaacaaaaaaaaaaaaaaaaaaaaaaaa

SEQ ID NO: 48556 - DNA, 782 bp, Heterodera glycines
gttgtgcactaaaagccaacatgatacaggcttggcgcacgcattttgttctcgaggaaggcatgttggaagtcgagtgcacttcacttacaccagaatacgtcttaaaagcttctggccatgttgaccggtttatcgactggatggtgaaagacaaacaaacgggtgcttgttttagagccgaccacttggttaaaaatcaagcggaaactttgattcgggacaaaaaaactgatgaaaaaacaaagtccgaacttatgaatgtgcttgttatgcttgatgggatgagctgtgatgacttgcacgaagtcattaagaaattcaatttcaaatctccgctaaccggcggtgacttgtccgaacccgtttctttcaatctgatgtttcccactgaaattggacctacctgtgatcagcgagcctttctgagacccgagacggctcaaggaatctttatcaacttcaaacgccttttagaatttaaccagggacgacttccttttgctgcagcccaagtcggttctggctttagaaacgaaatttcgcctcgacaaggacttatccgcgtccgagaatttacaatgtgtgaaattgaacactttgttgacccgaccgacaagagacatcccaaattcgagaaaattgcacatttggaacttactttgtttcctgcttgcaatcaaatggaatcaaaaaatccccaaaagatttcaattggaaacgcagtcaaattgggtatcgtaaacaatgaaactttgggttattacatggcgcgaactcat

SEQ ID NO: 48557 - DNA, 504 bp, Heterodera glycines
caagtttgagctcataaattgtcttgcagaagtatttaattaaaatgattgaaacactcgagacgagcgaagtgttgaagcgggtccttaagtctgcgctgattgtcgacggagtggcacggggtttaaacgaagcggcacagactttggacaagcgtgaagcgcacttttgtgtgctggccaaaagctgtgacgaggcgtcctttgagaaattggtgcgctcattgtgcaaagagcacatcattccgattttggaggtggaggacaaagccgaactcggtcaaatggttggccagtgcaaatacgacaaagacggaaaagcgcgcaaaatcgtcggctgttcggtggcggtggtcaaagactacggacgggacgaagaggcgaagaatgacttgcaggaagtgctgaagaaaatcagcgactgatgaggttcctatgtcatcatattgttgtttttgtttggttgttaccgcggctataaaagactcttctgtttaaaaaaaa

SEQ ID NO: 48558 - DNA, 421 bp, Heterodera glycines
gtttgagaaaatttcacatttaacagaatacaaacaaaatgtccaccggcgttatccaaccattaaatcctaagccgtttttgaacaatttgacgggaaagccaatcatttgcaagctcaaatggggaatggagtaccgtggcattttgatgtccattgacggttacatgaatttgcacttggccaacacggaggagtacattgacggaacaaacactggcgcattgggcgaagttcttatcagatgcaacaacgttttgtggatctctgctgctgaagagggtgaacagtgaacacaccaagcaccaaatggttgaacacttttgttgatttcacttttaatcgatctgtttttcctatttttcaaaaaaatccatcaaccatgaaaaaaaaaaaaaaaaaaaaaaaaaaaaaaaaaaaa

SEQ ID NO: 48559 - DNA, 1141 bp, Heterodera glycines
agattttcaaaatacaatttttatgtgtaataattttcaacgcattgcttttcgattcgcggttaaatgaatcgcgaagaaacgaataaacacccattgattgtcacttacgccggccgtcactatgacatctccggctttgtcagccgacatccaggtggtgagcgggtgcttcggatggttgcgggtgctaacgtggacagttttatcgacggcacttcggagttgttgggcctaaggcacgaacattccgccgccgcttatggaattttggcccgttattctttggaccaggagtttaagagagaccctttggtcgatagcaaagcgccgatgctttggagggtgggcgaattgagggaacgctattggacatggattcaccacccttacgacggagtgcttcggcttttcgagtccgaccttttggagcaattgactcggactaaatggtggcttattcccctcatttggcttccaatcgtttcgtattttttcttcaccggcctttcccttctgcgggaggacttcggcttttccggtggtcctttgctggccttcggtctgttcgccttcggctgtttggcgtggactcttctcgaatattcgcttcaccgtggccttttccattggcacccaaatgcccattcctaccgccaaatcactctccattttctactgcacggtctccaccacaaaactccgatggattccgaccgtctcgtctttccgcccgccgccgctgtgcttatcgtcggctttttctacaccatttaccggtccctcctcccttttcccattttttgttgcttcgcgagtggaaaactcttcggttacattgtgtacgacatcacccattattatttgcatcacggaaggcccgagacgaacagcggatggcactaccgaaaaatttaccaccacaaccaccacttcaaagactccgattcctcctttggcatttccaccactttttgggactacgttttcggcactgtgggcactttcaactgaatccgtgagaatgcgatgtccatgtgaaatgtcaaattgagcaattctcatcagtcatttatcccggcgcttctaattgtaaaaaagctcccatatttttgaaaacatttgcaaatttttacttgac

SEQ ID NO: 48560 - DNA, 805 bp, Heterodera glycines
acggactttgcagaagagcacacagattttgtacacgccggacattggaaccattctgctgctgttggacgtgaagccgggcgcacggatttgtgagaccggcacaggcagcggttctttgtctcacgccattgccaccgcagtggcaccggacggccatttgtattcatttgacatcgatgagaaacgtgccaaaactgttcataatgatctcaaactccacggtttgtcccaaaatgccactgtgctttgccgtgacgtgtcccagcatggctttgccgcaaccgattgtgcggagaaagagtggcgttgtgacggcgttttcctggacttgcccgccccgtggttggccattggccatgcccacaaagtgttgcttcaaaacgggcccgagcgccgtccgtctcggctggtcagcttttcgccatgcattgagcaggtgcagcgggtgtgtgccgagttggagcagcacggctttgtggacattgagacggttgaggtggtgccaccaaaactgaaggtggtcgacttgccctgcgaaagtttgtccgaatacgcagccaaaggagcgaacgcacagacattcttccagaaagaatctcagcacaacaacactgattgtgaacagcaacggcagaagggacgccggggtgccaagcgcaaggcggacaatgcgggggaaaagaccaaaatggaggaggacgcggacacatgccaaaatggactgaacggaaaagtcgctgctgccagtattgcgcaggaaagcgatggtcctcagaccgagactgatgccatgccattccct

SEQ ID NO: 48561 - DNA, 1286 bp, Heterodera glycines
gtcttttctttccgatgtctgaaattggtaatttcgaaataagaaatgtgtctaaagtcgaacgtatcggtgcacattcccatatcactggtctcggcttaaaggcaaatttcgaaccaatttttatttccgatggaatggtcggacaatgtgcggcacggaaggcagccggattgattgttcgcatgattaaagatggacaaattgcgggcagagctttgctaattgttggcgagccggggacgggcaaaacggcggtggccatgggaatttcgaagtcaattggcggcgatacgcccttcatttccatttcggccagtgaagtgttttccatggatctgagtaaacccgaagcattgactcagtcattccgaaaggcaattggagttcgaatcaaagaggagactgaggtcctttgcggtgaggtcgtacaactcgaaattgaccgtccccagtcgggtgccgggccacgagttgggaaattgactctgaaaacaacggacatggaagcaatttacgacattggaaacaaaatgactgaatccgtcatcaaagagcgaatcacggccggcgacgtcatccaaattgacaaggcaaccggtaagatttcgaaaattgggcggtcgcttgcccggtcaaaggatttcgacgcacttgggccccaggacaaattggtcgcctgtccgtcgggggaaattcagtcccgcgtggaaacggttaacacaatttcattgcacgacattgatgtgatcaattcgcgttcctccgggtatttggcggttttttcgggcgatacgggcgaaattaaaagcgaagtgagggagcaaattgacaaaaaggtgatggcatggcgggaggaaaacaaagcgcaaataatcccgggtgttctgttcgtcgacgaagtgcacatgttcgacctcgagtgcttctccttcatcaaccgttacatcgaatcggacctttcgcccattttggtgatggccaccaaccgcggcattgtgaacattcgtggcacttccgttgagtctccccacggcgtgcctttgttcttattggaccgcagccttatcatcaggacgtcgagttacaaagaaaatgaaattggagagatactgaaaatccgtgcttctgatgaactcgttgaaatggaggatgccagcatcgcagtgctcgtccaaatagcattggaaacatcgatgcgttactgcatgcaactcatttcaactgccgacattttacgacagagaagaaaaggcgaaaagacaaaatgtttacgtcactgaaga

SEQ ID NO: 48562 - DNA, 733 bp, Heterodera glycines
catttaagcttcaaatggttttaaaaatccattcaactattttttgagattaatttgtaacatccttttcactggtataatttgaacagaaataaacaacgaattgcagcaaatgtctgtgcctggctctcaacctccgcaacagggcgaggacgccgaggagcggctgatcaacgaggagtacaaaatctggaagaaaaactgcccgttcctttacgacatggtgatgactcatgcgttggaatggcccagtttgaccgtccaatggctgcccgacgtgcaacgacaggagggcgccgactacacaatccatcgcctcattttgggcacgcacacgtcggacgagcagaatcatttggtcatcgccaaactgttactgcccaacgacgacgcacagtttgacgcgtctcgctacgacactgaccgaggcgaatttggtggctttggcacagtgaccggcaaaattgaggtggaaatcaaaatgaaccacgagggcgaggtgaaccgggcccgatacatgccacagaatccggttctgattggcaccaaatcaccctcctcggaggtgtacgtctttgactacacgaagcatccgtccacgccggctgacgtggagtgcaagccgcagttgcgactgcgtggacacaccaaggagggatacggcttatcctgaaacaacaatttgcctggtcatttgttgagtgcctccgacgacatgaccgtgtgcctgtgg

SEQ ID NO: 48563 - DNA, 558 bp, Heterodera glycines
aagaaatgaactatgataatggaattagcgatgatgatgatttggaaatggatgaaaatggaagcgatggcgtagaaattgtggattttgttgaagagccgcacaaggaagacaattccgccgcaaaaattgctgcgcattcgaaagatgtgttttgccttgccctttccccggatggccattggctcgcttcggggtcggaggatgaaactgcagccgtatgggacttgcggcacggaatgacttctcccctcctccaccgcacaatttcttcccattccgactctgtccatttgttggcatggaacgtttccgcaaatattctcgccagtgcggacatggccggtcgcataatttgcacaaaagtgacgggcgatgaagccacacaaacggcgtcacttacaatcgacgattgcttcgtcgaaccttcacggagagacgacgacaacggggaggacgaggaaggccaaggctctgaccctgagcaaattggctggctgttttggcactcgactgtcgagggcattctttttgcgggatgtaacgacggatcccttt

SEQ ID NO: 48564 - DNA, 675 bp, Heterodera glycines
ctaaaggccatttaactaaaacataacttaatattcttcttctccgttcacccaaacacaatgtcggactttgaaatggacgatggagaagattatggcttgcaatattcggacgactcgggcagtgagccggacgtggcgctggagaaccaatattatgcagcaaaaacgctgaaatcggacggcgaccagcgcggcgcgttggacgcctttcgccgcgtgttggagttggagacggagaagggcgactggggcttcaaggcgctcaagcagatgatgaagctgaactatgccatgggcaattttgaagagatgctgcgccattatcgcaatttgctcacttacattcgttcatcggtcaccaaaaattacgcggaaaagtccatcaactccattctcgactacgtgtccctctcgaagaacacggcactgctgcagcaattctacaaaatcacgctggaagcgctcaaggaagcaaaaaatgagcggctctggttcaagacgaacacaaagttgggcaagctgtactttgacttgaaggagttcgaccggctcaagcaagtgctgaaacagttgcgcaactcgtgccagacggagcatggggaggacgaccagcgcaagggcactcaattgttggagatttatgcgctcgaaattcaaatgtacacggagcag

SEQ ID NO: 48565 - DNA, 785 bp, Heterodera glycines
ccctcataaaggttttgacccatttttggagtcgcaaaacggaagaaatccgttgcattgccttcgtggcgttgtgcaaaattgccaggctcgactccgagtgtttccccgccgtttacaaaaattgttacacggcgtatgtcgccaattgcaaaaccattgacgatgaaacattgcctttcattcactttatgcagtgttctctcgccgaactgacttttgtccatccttcccaagcttaccaatacgcattcgtttacatccgccagttcgccattcaccttcgaaatgcaatgattgccaaacgaaaggatttgatccaaaccgtgtacaattggcagttcgtcaagggccttcaactttgggttttggtcatttgcgaaggctctaaacgctttcggccgtcgtccgacaaaagtgccagttggttctatgagttggtccatccgctcgtggaagtgatcaattccctttggaggcttttcccttccactaaattcttcccattgcgaattcattcgattcaaatgcttttggacatccaaagagagtccgaagtgttcgtcccgagtttggcctttgctgttgagcttttggatgagttggcacagatcgacgccaaaaggccaacggcgggcaaaggtcgaacacgcgaaccgaacgccgaacgaatgctccgattgtcgggcgaacagttggacgacgccggagtccgtgctcatttggcccagcgactgttcgcactgatcaccgattgtcttaacttgctgaactctcgagaaagc

SEQ ID NO: 48566 - DNA, 970 bp, Heterodera glycines
ggaatcgctagtaaattcctgtctaaattttccggtgccatcccccgtctcgacgaatttgctgactgtcgcttggccgacataattccaatcaccgaccaacacttcgtgaagagcacctttttaattgaaattttaaaaatctgaaatattgtggcgtcggaaaaccgaccaatgggcgagccatgcgagacaaaaacgatggaggcttaaactgaatttgtaccgggaaaaggcattggatggcctacttgcttcgttgtatctcctcagaatctcttcaagagtttggcgtattcgttgaatgcatgactcatctccaaagccttccctgggcattggtttttcgtaaattgagcgatattcggagtcgacgagaggaaaccgcctacggagttcagccgattcctcaaagccaggcggactttcgcaaagttacatataaccatatcaaatggctacttacaatcccaactatgaatccattgggcaggcctttgtccaacacttttacaccaaatttgatgtgcccgatggtccgactcgcaccgtcggccttcatgatttgtatgatgctgaacactcttttatgacttttgaggggaaccaagtgaaaggtcgacaggccattttggacaaatatggagcgctacctttccgaacgattcaacatgggattacaaagactgacagtcagccgcttccggatgggtcaattttggtgacggtgattggtcagcttaagaccgacgatgacccagtgaattcattcaaccactgcttcattctgagaccaaattcttccgggggatttttcatttcgaatgaagtgttccgtcttgttttgcattgaagtgctgaagccgttctctcgtggacatttgcaacctgttgttgttctttttcctctacaatttccattgattgcgcagtttgatttgtttcgcctttgtttcaacttttgccctca

SEQ ID NO: 48567 - DNA, 750 bp, Heterodera glycines
agagagagagagagagagagagagagagagagagagagagagagagagagagagagagagagagagagagagagagagagcctcgtgccgtttgagcaagacaaaaaaatcagaagcgaaaatggtcaacccgaagggataccgtcgcggcactcgttacatgttcgcccgcccgttccgcaagcacggcgttgagccgctttcaacattctaccgcgtgtacaagcggggcgacattgtcaccgtcaagggcaacggcgccttccagaagggcatgccgttcaaggcgtaccacggcaagaccgggcgcgtgttcaatgtgaccaaacatgcgctgggcgtcgtcgtcaacaagcgtgttcgccatcgcatcatcccgaaacgcatcaatgtccgtgttgagcatgtgaaaccgtccggctcccggctcgagtttctgcagcgatgcaaagcgaatgacttgcagaagaagcagcacaaggagggcaacgcaccgtttgtggcgctgaagcggaagccgaaggagccccgggtggcgcacttggtcaaagtgaagagcaccaaagttgagcggctggcgcccgtcaaattcgaaattgtcgcctgaggcgttgtcgggggcaaacgaatggacgagcacagaaaaccaaccgacaattgttatttttaatttgttgatccgtttcgtgttaaagaaaaagttttgaaaaaaaaaaaaaaaaaaaaaaaaaaaaaactcgagactagttc

SEQ ID NO: 48568 - DNA, 501 bp, Heterodera glycines
aagtttgagaattttttataagtagactttaattaaatcaaaatcagcaaattacgaatgaattctcctgtaatttcccgcggaatgcatggtttttcaactactatctccaagagattcgcatcaagcattagcgaaggacatgccgaatattaccgagagttcaatcgacttgcttctgctggaatttgggaccagttaaacatgcgaccaaaagttttcagcactaaaactgagaaagcagcggctatgaaagtctggcaaaaaatgcttccggaagatgccggttggttcgataggcgtcctggtggagtttttctcaaaatgcttttgcacatttctctggcctgctttgctgtttttatgattccctacacttacgaaaaagtcgtgcccgaagaataccgttgcaagatcaaatacaaaaagaacgacggacaccattaggtgtattgctcactcattaggaaatgttcatttgataaatattttccaaaaaaa

SEQ ID NO: 48569 - DNA, 568 bp, Heterodera glycines
gtccaagtttgagttaatctagaaaaagtaatggcttcacgaaaaggaaaggtcaaggaagagcagccggctgtttctctgggtcctcaggttcaagaaggcgaaaatgtctttggtgtggcgcacatttttgcgtctttcaatgacacttttgttcatgtgaccgatttgtctggacgtgaaaccattgtcaaaatcaccggtggaatgcgtgttaaggccgaccgagacgaggcaagtccgtacgctgctatgctcgccgcgcaggatgttgcggaacgttgtaagcaggttggcattaatgctcttcatgtcaaattgcgtgcaaccggtgggaccaaaaccaaaacgccggggcctggtgctcaggcagcgctgcgtgccctcgctcgttcgggtatgaagattggtcgaattgaagatgtcacgcctattccttccgactcgactcgccaaaaaggaggccgtcgtggacgtcgtctttgagttgattcaaatgcgtcccgatttttgttgttgtttgagttctctatcgcttttcttcaaataaactttttgttgaaaaaaa

SEQ ID NO: 48570 - DNA, 1309 bp, Heterodera glycines
cctcgtgccgattcggcacgagggtccaattaagattattttctcaacaaacttccgcttaatcttcagaccttcactattttcttgtttaaaaaagttgcaacgatggtgaaaccaaaggttggcatcaacggttttggacgtattggacgcttggcattgcgtgcagcgattgaaaaggacactgtccaagtggtggcggtcaacgacccgttcatcgaactcgactacatggtgtacatgttcaactacgactccacccatggccgtttcaagggcaaaatttccacaaacgccggcaatttggtggtggagaaggaggggaagagcgcgcacaccatcaaagtgttcaacctcaaagacccggccgaaatcaaatggggcgaagcgggcgcggaatatgtgatcgaatccaccggagtgtttaccaccattgagaaggcctctgctcatcttaaaggcggtgccaagaaggtggtcatctccgctccgtctgcggatgcgccgatgtacgtgatgggcgtcaacgaggacaagtacgacccggctaaggacgacgtgatcagcaatgcgtcgtgcaccaccaactgcttagctccgttggccaaagtgatcaacgacgagtttggcatcatcgaaggactgatgaccactgtgcatgcggtgaccgccactcagaagacggtggacgggcccagcggcaaacagtggcgagacggacgtggtgcggcgcagaacatcattccggccagcaccggggccgccaaggcggtgggcaaagtcatcccggagttgaacggcaaactgaccggcatggcgttccgtgtgcccactccgaacgtgtccgtcgtcgacctgaccgcccgtctggagaagccggccccgttggacgccatcaaagaggcggtgaagaaggcggccaatgggaagctgaagggcattttggcgtacacggaggaccaagtggtgtccacggactttcttggagactcgcactcgtccattttcgacgctggcgcttgcatttcgttgaacccgcactttgtcaagctggtcagttggtacgacaacgagttcggctactcctgccgtctggtcgatctgatcactcactgtgcttccaaggcatagaaagacgacgcgcaaaagagggaggaggaaaagagaaatatgctaattttgactctgcgtttattccatttctcttttttgatgccgtccaatgacttgtttctcctgaatttttttaggaattagagcgcacttttaatcacgttatacgtaaataaaaaaaaaaaaaaaaaaaaaa

SEQ ID NO: 48571 - DNA, 646 bp, Heterodera glycines
gtccatttaagatatactattagtgggtgtaatgcgtgttctgtcatttgctggattacaactcaaattggacacaatcggagatggtgagaagatagcggccaaaatccgcgagtgtgccggcttggaggtgttggaaatgcgcggcaatacgcttggtgtgggtgcgaccgctccgatcgccgaagcattggagtgccagagcaacttgaagagagccctttggagtgacatgttcaccgggcgactcaaagaagagattcccaggacattgaaaactttgtgcgacgcaatgattctgagtggagcgaggctgaccgagcttgacctgagtgacaatgccattggtcctatggctgtgccggggataaaagaatttcttgctggcgaggcggcctttgccttaaagacgctgaagcttaacaactgcggccttggaattgcgggaaagacaattgctcactgtttgatagaatgccatcggcgatcagttagccatggcactccgctttgtctgaaaatctttgtcgcccgaaggaatcgcttggagtacacgtcaacagctgcgctagctgaagcatttcagataattggcacgcttgaggaaatctccatgccacaaaacgggattagcgctgaagggata

SEQ ID NO: 48572 - DNA, 890 bp, Heterodera glycines
aagcagtcacagaacaatgcttttgcaaacgatgggctttcagtctgaagaaaagcatggaaagcgagaatttcgaaaggcatttccgtttggccattcaatcggtcactgcggaagactatgaaaagatgcgtcagtatcggcaccgggaggactctctcgcgactttggccggtcgtctcttcctccgtaaggctgtccaatgcctttgcggtgtccgttgggccgacattgaaatttcacgaacggaacggggaaagcctttcattgttcgacccgagaacatttccataggactgaacgtttctcaccaaggcgactacaccgtttttgccagcagttgtaccaaccaagttggcgtggatgtgatgcgattggacatgtgccgaggcaataaaactgcggatgaatacatcaattcgatggcgaagtcggcttcggcgggagaattgcgaacgatgcgcggccagccgacagaacaaaagaaaatgaccgttttctaccgatattggtgtctgaaagaaaccattatgaaggcgacagggcatggactcgtgaacgacttgagccgttttgatttcatcatcgatccaaatgaacgttataagcaaggcagtttcatcacatcgacgaccttcacggaggacgcaattaagcagccccaatgggttttcgaagaatcatttgttgatgcgaatcacgtagccgcggtttgcagagagaaagctcttcccgcggtctgtacgtttaggaaagagcagtgcgcgaaaatatttttctccaaaatcgattttgaatttttgttggacgatgcttccattctcaaccctttggctgatgggggcgcttcagagtacaacaattttatgcaaaaaccgcggaagaaattt

SEQ ID NO: 48573 - DNA, 914 bp, Heterodera glycines
gtttgagcgatcgaattcaacaccctttcaatttggctatcatgcaaatcttcgtcaaaactctcaccgggaagaccatcacccttgaggtcgaggcgagcgacaccatcgagaacgtgaaagcgaagatccaggacaaggagggcattccgccagaccagcagcgccttatcttcgctgggaaacagctcgaggacggacgcaccctggccgactacaacatccagaaggaatcgacacttcatctcgtcctgcgccttcgtggtggaaagaactagaacgacgaacggaagagatgattgatccgtatcgatccatatattatgtaacttgagaccgtcctgtattgtgttccgttttattcatcatcatgaaatgtatttcaatgatcacggaacgataaacccatcaaaactcaaaaaaaaaaaaaaaaaaaaaaaaaaaaactgggcggtcactaccggcggcttctttgagtttaaatggcgagtggcgaacgccaaaagttggtcaacaattcgacagctgaacgtccaattccgtcccaacatttttccgtccattcgaatggttacggcgccatcgccgccgatgcgacgcggccatcggtcagcggttcgtccaattcgtcgtccgatggctttcattgtcacgcggacggcgaccgacggccaacggacgcgcaaaacggcgcaagtgatcagaggagggcacggacagtgctgtggatgtccgtgggggtgtgctttgtgtttatgatttgcgaagtgatcggcggagtgttggccaattctttggcgattataacggacgccgcacatttgctgaccgacttggcgagcatgctcatttcgctgttttcgctttacattgcctctcggcccgcttcccagcgcatgagtttcgggtggcat

SEQ ID NO: 48574 - DNA, 650 bp, Heterodera glycines
gtttgagttacctaattactagtaattagccggcaaaaatgtcctcttccaacacaattttgttggactgcagcgacgacagtgccgtcgtcgtcggcttcgagcagtgcgccaccagcgaaggcggaggggcggtagaaccgcagcagaaactgactaagaatcagcagaagaagcgcgcacgcatggaacggttcaatgcggggaaagcggaatggagacggaagcaaagggagcggcataaggagcggaaacgcgcgcggaaagcggacggacagacggcgacggttgtgcacaacgacaggccgaacaaactgaacacgatgaacgagtccaaatgtcgcgttcgcgttgctgtcgacatggcctacgacgacttgatggacgaacggtcggtgtgcaaaacggtgtcccaacttcgccattgctacgcgtccaatcgccgggcggcggaccctctccaattttatgtggtcaatttggacgaaaaggccaaaaaggttttggacggcatcaccggctggcaacaatgggacgtccatttgttggcccaacccttggccaaactgtgggacgaccgcgaaattgtctatctgacagccgactcggaaaacgtactcagcgcattggacgagcagaaagtgtacgta

SEQ ID NO: 48575 - DNA, 911 bp, Heterodera glycines
  unsure (1)..(911): unsure at all n locations
attaagataactgtgggcactaaagttttcatttttactgctattcactcaaaatgactcaaaatgggatgacaacagccagcaatgagttcaacgagctcaatgatttcctgtcaacgcgtgcttatcttcacggttttctgccgtcccaagaagaccaatatgtgttcaaatgcattgcggctgctccctccgccagcgaatatccgcacattgcgcgttggtacaagcacatcaaaagctacgaggatgctgaacgtgccacttggccaaagaaggctggacagccgccgcagaaagtcgtttcgaaagacagtgcaccaccggcaaagaaagccgacgccgaggaggacttcgacctgttcggcgacgaggacagcgatgatgaggagaagaagcgcatcaccgaggagcgcctgaaagcgtacgcggagaaaaaggcgaagaagccgggcccggtggccaagtcgaacgtcatctatgacgtgaagccgtgggacgacaccattgacatcaaggacattgaggccaatgtgcgctccatcgaatgtgacgggctcgtgtggggcacgtcccgaattttgccggtcgcattcggcgtgcagaagttgcagattggatgctgtgtcgtggacgagaaggtgtcgacggattggctcgaggaacaaatcacaggcttcgaagacctggtccagtcggttgacgtggtcgcctttaacaaagtttgaatgatgacagacgaatatattgacaatgactatttcacacacacacaaatattattattatgatgatgatgcccattgttattttgttggtggtggctgttttgtccattgttgttgatgttgtatagtaagtaaaaatggttgacactcnnnnnaganaaaaaaagaaagaaataatggaaa

SEQ ID NO: 48576 - DNA, 638 bp, Heterodera glycines
acgttaattgttttattcatttattcggcaatgaatgcagaaaaaataaagaaactgcaacaaaatgcagaacatgtgcgcacaggtggaaagggtactgcaagaaggaagaagaaagtcgtgcacaaaactactgcaatggacgacaaaaagttacagacgaatctgaaaaagctttcggtgactaacattcctggcatcgaagaggtcaatatgatcaaagacgacgggacagtgatacactttaacaacccgaaggttcaggcttcggtaccggcaaacaccttctcgatcactgggacagcggagaacaagcaaatcacggacatgttgccgggcattcttaatcaactcggggcggagtcgcttactcatctgaagaagcttgccaacaacgtgaccacgcaattcaaaccatcggctgaggacgacgatgtgccggatttgattggcgattttgaggaggcgtcgaagaacgaatcgaagaccacggaggaacttgtccattagtggtttttaccatcgttacacgagccacaactgttgcagtgggattggccaaccaatttccacattatcaaccccaccgttatgacaaatcagattgagttgttaaagtttcattctttattcattga

SEQ ID NO: 48577 - DNA, 651 bp, Heterodera glycines
caacgaagttgttgcctggcctttttcttcgctcttctgcattttgtgcaccaattgcttgcagtcggatggcaaagtcggacgtgccggcgctgagcacgacgaatcagccctacccgtacaaggaacagactccgaagggtattttcgagaagatgggcttgcagaaaacgccggacggcacttcaatcggcgaattcgcagttatgcgtatggacgacatgatgaacttgatcgggcgtggctctctttggccattgaccttcggtttggcgtgctgtgctgttgaaatgatgcatttcgccgctcctcgttatgacatgatgcggtttggcgttgtttttcgtgcaactcctcgtcagtgcgacttgatcatcgtctctggcacagtcacaaacaaaatggcaccggcactgagacggatctacgaccaaatgccgcatccaaaatgggtgatcagcatgggctcgtgtgccaacggtggcggttattaccattattcctattcggtgttgcgcggctgtgaccgggtcatccctgtcgacatatatgtgcccggttgtcctccgtctgccgaggcgttgctctacggcgtgcttcagttgcagaagaaaattaagcggctcaagaaagtgcaaatgtggtatcgca

SEQ ID NO: 48578 - DNA, 629 bp, Heterodera glycines
gttttagctaaaccagccaaacagataaacgacgacaaatgggtgtcgccttcgtcctgtgctgtttctccgtcgcctttacgccttcgctgttcatttttcgccgtttcgttgcccccgacccgttgcgcatcattctcttcgtgctcggtgccttcttttggctctgttctctgctcttgtccgccgtcgttttcgccgtgttcggccaacatctgttgctggtcgccattttcttctccattctgttccaagaagtggcgcgcgcactcttctacctgttgttgtacaaaacgcaaagcaatttggcccgactgatggccgccgatgcgaaccgcaccggcacagtgtccagcatgcgcttgctgtactcgtcccggcacattttggccattgtctgtggcctcggcatgggcaccgctgcggcactgtttcatctggccaacgtgttggccgcctattgggacgacggcgttgtgggcctgccgggcgctgtgcaggcaaatcgtaccatggccgaaccaacggacgcgtcagcaacggcacagccaaacgcagtgccattgccccatcactcggacccggccattcttctctctgccgctgctgacggtggcgtcaccgccgtc

SEQ ID NO: 48579 - DNA, 1122 bp, Heterodera glycines
gaagaataagacttataattgctattattcaaaggatgtcggattcaatcaaacgtatttttgcacgttatatttatgactctcgtggaaacccaacggttgaggttgatttggaaacggaaaaaggtcttttccaagctgctgtgcccagtggtgcatcgactggagtctacgaggccttggaattgcgtgataatgacaaaactgttcatcatggaaagggcgttttgaaggcggtcgataacatcaattcaaaaattggtcctgctttagtcggacaaaactttgccgtaatgcagcaaaaccaaattgacaaatttctcatcgacttggatggcactgacaacaaagggaaacttggtgcaaatgccattttgggagtctctttggcggtgtgcaaagctggcgctgtgcacaaaggccttcccttatacaaacacatcgctgagttggctggaacgcggaaggtgattttgcctgtgccggctttcaacatgattaacggtggatcgcatgctggcaacaaattggccatgcaggagtttatggtgctgcccactggagcgaaaacattcaaagaggccatgcaaattgggtccgaaatttaccaccatttgaagaaggtcatcaaagaacgctatggattggatgcaacttcagtcggagatgagggaggatttgcgccgaacatccaaaacaacagagagggattggatctgctcaaagaagcgttcgccgcatctggacaccaggacaaggtcattattggtatggatgttgcggcaagcgaattctataaagagggaaaatatgacttggacttcaaaaatccaaacaccgataaagcgcagtggctgaccggagaacagctcgccgatatgtacaagtccttcatcaacgactatcccgttgtgtccattgaagatgccttcgaccaagacgactgggaaaattggagcaagttgcaggctgccatagacattcaacttgtcgtcgacgatttgacagtcaccaacccgaaacggattcagaaggcggtgcagaaaaaggcatgcaactgcttgttgcttaaggtcaaccaaattggcacggtcactgagtcaatcgaagcttcaaaactgg

SEQ ID NO: 48580 - DNA, 622 bp, Heterodera glycines
gttattttatggtcggatagactgcagtaccatcttacaccccttttttcttggtgttggctgttctacataaaccaacacgtgaatcagaattttttttctgcttgctgtcacttatccccccttccccctttaaagcttaatacccattttaatggctgggattgattttgggaatttgacttgttacatggctgtggcgcggaacaaaggaatcgaaattgttgagaatgattactctttgcatgccacgccttcatgcgtttcctttggacaattcgctcggatgatgggtttcggggccaagcagcagctgaacgtcaattacgggaacagtgtcgtgaatttcaagcacatcctcggacgcactttcaatgacaaagtcgtgcagacatttcgtcagcacattccttgcggactgatggggaagttcaccgatgaccaaattgagataaaagtcactcatttgggcacgacgcgagtgctttccccggaacaggtggtcgcctgtctcttgacacatttgcgggttcagctcagccgttctctcgggacggatgccactgaatgcgtcattaatggcccgattttctaccaagaaaaccaaccccgagctttgctg

SEQ ID NO: 48581 - DNA, 787 bp, Heterodera glycines
caacattggaaatggcttttccgcctccttttccgaatccattgcttcctcgccttccgaatcagtcggttcaattccctggacagaagtttggcttcttttctccacaacgtcaaagtattctgcccgggattccgctgctccgtccacgttttcgtccgaattttattccaagggaactgcggccacccaatccattggcaagacccaccgggccaccaacgaccacaacagtttttattgggaacatttccgataaatgtccggaccgaatcatacaggaagttctaaagaagtgcggttccgtgtgcaattggaaacgtctccaagactcacgcggaaaatttaaagcgtttggattttgcgactttatgtacccagacggagcaaagaaagcactgagtgtcctcaaggacttccccatcggcgacaaacgtctgaatgttaaagtgagtttggtgctcaaagtcagcgaaatagtggccattttcaggcggacgaacaaacggagaaactgctggatgaattctccaagaataagctcatcgccgccaacgaggagagcgacgacgccgtcagagcttcgatccgaaagtttttggaggacgaggcggccgacctggtggacatgccgacggacgaaggttttcggtgagggaaggcgaattgtgaccaaacaattcaggcgaatccaaagaaaaaagcccggccgaaggaagcactaaggtttttagcttctttcattatttaaactttgctctttccgagtccgtccttcttaaatcac

SEQ ID NO: 48582 - DNA, 812 bp, Heterodera glycines
gtttgagcaaattttgaaaattgcactcatttttcttaattcataaacccacaaattctcgatggcatcgtcaataatctttgcaccactggccctcaaaattccactaaaatttgcaaaaatggacaattttggtaaacaaaagatttgcccgattttattaatggatgaccacgaatttatggaggggatggagcaggaagatgaggatgagtttatcgaagagccaatgtctgctgatttcgacttagggaatataaatgatccaattggtgttgacgaacctattaatcacgaagttcaaccgaagcctcccacagttaactccgctggcatcgatttggattcgctttccaatgactacacagattatgctctgatgaacaggctgttgttcattgccgacgtttgtccgccgcttaaagttgaagccttgaaaatgctcatcacttatgtcattaaaaaaactcaaaattggtcgatgcttagtgccgcgtatcagcgcgtggaatctgcgaaggcgagcggaattcagggggtagagagcatcccggaattggacaggacttgggtggaagttaccactgtgaagggcaacagccgattggaggcactgctcgccgagttcaaacggcagaaggacgaggcggttaaggagtcaattagacgtgcccttgaggatttgttccagcaatacgtccaaatgggaaacttgcaagaagcactgaagctgtacgggcgagggatgcgtgaatattgcaccgctcccaaccaaatcgtacagatgctcatcaattggattagcgttacag

SEQ ID NO: 48583 - DNA, 1070 bp, Heterodera glycines
atggcccacctcatccaggacggttttgtcgtcaatgacgcaacatggaaactaggcattttcatcaccgatatgaacatatcgcgagagttattcgttcgcggtgacatgaccatcggtagtctgatgatgcagttggtggggcaaattggcgagactcaggactggagtgaccattacatgtggtggcctgaccgccgtaagtggctgaaacacacgcgaagcacgttggaccaaattggaatcactgcagcgacttacttggaatttacaccgatgcataagcatgccaaggtccaactccccgatttgcagattatcgatgcccgactcgatttttccgtgcccattttgaaggtcacccaaaaaatctgccaagaacttgccatccgtcacccggaagaactgtcgctgaagcgtgatattccgccagatattttgcgaaaaggcgcatctgtcgaatcggaggctcagattcagccatacatgaagccgggcgaggagtccattggacccggcactctccgaacggccaaacccatccgcgcttcaactgtcaacctcactagcgggcgaggctcacctgcactttcgcaggcatctgcaatgggccccggtcacttgtttaacgcttctgaaattggcacactgccgaagatgggaacgattccgcgcggaatgagccccgggccagccgcatatcgcgaagtgcttggacgaacaccggagcccggttactctgaaggaggcggtctcgaatgtgaccagttcgacgaaaatttgataaactcaccgaaaataactccgggtcgtgaaacattcagaccccaaaattatttggagaaagccgcgttgaaccggggatggttggactcatcgaggtcgctgatggaacaaggcatttgcgaaggcgatgttgtgcttcttcgttttaaattcatgcagtttttcgacatgaatccattaagaaagtgctgcagatgcaagcaggaagggcagcggcagcgcaaaacggtgcacaaaacaagaagaaatcgcaaccggtgcagctgcccacggatttcaattcg

SEQ ID NO: 48584 - DNA, 1484 bp, Heterodera glycines
ggcttttttgcttgccgaatgaggcttttgaaaattttcatctgcgagccctgggcatatatatacataattatttacacaatctgttgaatatcgttgttgtatgcataatatcgtccatctgattggtcagtcagttcggcactttcttctcaggccgtcttggtgtggctgccgccctccggtgtccacaattccatgttttccctcatcatgcgcaagttgagcgaggcgtcatcagccaatggtaccgtcaatgtggcaatctccgcctgggccaagtcaattgcctaaaaatccggggagaatttagccacattatacaatgaaagaaaaagcatgatgaaaatcatcaaattggtcccactttttgggccaatttgcgcgcctcgtccaccgattttaagatttcgaagttgaacacggagaagttgagtgcaaggccaagacgagtcggattgatcgctgcaattttggaggtggcgatgtccatggcttcttgcaaaagaacaaacttcgcgtgctttcccgacccactgaactcgtaagtttggggcgctgatttttggcagacaatacattcaacggtgacccgaacggcgtgatgccgaaacaccttgtgtggctcgactttgttcgtttggtgtgccaaaatagatgcgtttgtgcatatgtaatttgtcgacaaatcgctgcacatcgacgcattgtaccactgggataacgaagccgtatccggattgctgctgtcagaggaagtagaacgagaacgggccatttatcgaataatgaccacgggctcggaccgaacacaactccaactgcaattacattttaacgcaaataattcttccgaggcatcccaatcacaaaattcctccgaacaaatgcaaaattgttcaaccaatgaaagagtctctggagaagattcggtgccattcatcgacagagagacttttggagacgcggagagtgacagaggaaggggaccgccgcccgatcggtttcgactggtctatctgatcgtgcttctacatggaatgggcatgttgctgccgtggaacactttcattacgatcgcaggggattattatttgcaattcaaattcgcaaatgtgagcaatgaagacaattacaaagtgtactttttcaattatctgacggtttgtgcccaaattcccaatttgcttctaagttttctgaatttatttgtcgtcataagaggcggcttttaccgtcgcatttacttcactttggccgtcatttttggcatatgtctcgtcacaattgcgatggtttacgttccaaccgataactggactttcggctttttcctcttcacaatgctatccgttgtgcttctgaatagcgccagtggtgtttatcaaaacagtatttggggattggtcgctgattttcccggggaattcgccggtgccattattcttggcaacaatttatgcgggattctgatggcggtgcta

SEQ ID NO: 48585 - DNA, 742 bp, Heterodera glycines
gccatatatctttagacttttttcagataatcagttttgcgatctcaataaaacttttctttatttgtcaacttcaattgagagaaaagacaaaagcaattggattccgattaccaaggacagcgaagctgaccaacacgtcggtgtcattcaaaattttgggcacagctttgtcaaaaccttaaaggtgtcaatttcaggtgttgagtcttatgattccggcatttactatgcgtttagggcatatatgatgaatgaattgggattttcagaagatgtcaaaaagggtctctgtgaagcgtcctgctattatgtcgacgatgtcgaccaggatgattatacaaacagtggctttaaaaacagagcgtcacgttttgctgatggtgcaaaatgtgaaacaatggtgaaacttaattttgatctcgctcgtcagcccaattttttgcttaataactctgacgtgatttttagcatacaccgtaacaccgatgtttttctaattatggcaccgccatatgtttccggaaatgcagtcatagtgaacccgcacacatatcgtattaacatacacgatattagaatttatgtaaaaacagtagatgttacccagtcattaaataacataataagcaatcagctacaaaccaccccggccaaatatcctatgagaaaaattgagatcaggagtcttttcatcccgcgtggcacttctgatctttcacacaatgtttttacaagcatt

SEQ ID NO: 48586 - DNA, 876 bp, Heterodera glycines
agccctctaaaattcacgaaggtgtttttgctattgttcgtaaagttggtggtgaacatattcgtttgtgccgtttgataagtgggcaacgcgtgctaattgaacgactgagttttaatccgaaagacgcaattggacatttttatgggattttcgaagtcagcaatggtggtgacatgctttgccccattgaattcgcctcaaagcttttttttaccgaattttcaaatgggaattcagcaggagataggggtcacggaaatgaaagcactcaacaacttacaagcaatcaaattatgagcttaaaagaggatggaatcactacaaacgaattagtttccaaattggtcagcggaaattgccacttccaatctcgtacaaaattttcaaaagaaaaatatatgcgaaagaaagttcaaaagcattcggaccgggttgttattttgcagcccaatattcgccttttggccgactgttactaccgaaaggaccccgaacgactcggacatttgagaattgaccagctcggactgatgcttcagctttccgggcttcactccggcaaatgcaatgcttttgtcttcgaccaagttctcggattgcttggcgctgctgtgttggaacggataaacccttttggccactgcatttttcttcaccgcggcgattggccccaatccattccatgccttgactcattcactactgacgctcagaaaagtagagggtttttgacattacgaatcacaacactgctccagcgaaacaatggacgggacgaggagaaaacgaacaatctgaaaaacacggaggaaagggagccgggcaagcgagaggatgtggcagaggaacgccgggaacagcaaatacagaaga

SEQ ID NO: 48587 - DNA, 735 bp, Heterodera glycines
gtttgaggtatttaactaaaaatcgcatccctattaatcactttaaagccgttctctttgaattttcactttcctgctcattttttgataatgggtcgacacaggcgttatccgatgaaaaaaacagcaaagaatacaaaccaagcccaaaaaatagaacgattgtcctttgacactgatcagacgcctcttcaaacaccaaaggacagcaggaaaaacaagaatatgaacaaaaagccatccaattcgatgttggaggaacagccaacaacatggaaagagcaaatgttgaagaaactgacagacgaagttgcacaacaaaaaaataaaatacagaaaaggaacaaaaaaccaaagaatcgacttttggaagaaacgcagaaattgggttatcatcacatgccctgggaaagtgcaaaaacactgatttaccgaattcagcaagaccaaaacaaggctataaatgaagaacttttaaaggctcgatttgcaaaagcaggaagagatgttaaggaaatagcggaggaatacaaaataatggacgaaaaaaacaaaatgaaaaaggagcggagaaaagcattgcacgagaaacagagcaaattaagagccaaagaaaaagacattgacgaaggaatcggagcgaattcggaagaagaaatggaccaaaacgaaatggaagaagggaagagagaagacggaagaggcggagaagcgcaagagaaaagagcaggtcca

SEQ ID NO: 48588 - DNA, 1144 bp, Heterodera glycines
aattgtgccaaaatgcgctgctcccactcccttccgctgttcctatgttttgtgctcttcgctgggttggcatcgctaatttcggcccgacttgcgcacgaatcgttcgccaaacaccgccaccactcgcgcggcggtgccgccactcggccagaagcagcagcaggcgatcaaccgcagaagcgcaaaagcatttacaactcgaacaaatgctaccggcaaccgtcggacgcggaacgcgtccaaaaacgaacttcgatgcgtctttatgagttcgacgactatttgtttgacgagttgccagagacttgggattggcgcaatgtcaacggagtcaactacgcgtccactgatcgcaaccagcacatcccacaatattgtggctcatgctgggcaatgggtgccacttcttcgctggctgatcggatcaacatcaagcgcaaaaacgcgtggcctcccgcctatttgtcggtgcaggaagtgatcgactgcagcgaggccggctcatgcgaaggcggcacgccggacaaagtgttcgagtacgcgcacaaaaatggcattccgcacgaaacgtgcaacaattaccaggcgcgagacggaaaatgtgacccgtacaaccgttgtggttcgtgttggcccgacaaatgtttcaccgtccaaaattacactttgtacaaagtcggcgacttcggctcggccaatggaatccaaaagatgaaggccgaaatttaccaccacgggcccatcgcttgtggggtggcggcaacgccgcggtttgacaattattcgggcggaatttacaaagagcgaacgaatgaggatattaaccacgtcatcagtgttgtcggatggggcaaagatgcggcttcgggtgtgccgtactggatcggccgcaacagttggggcaccgcgtggggagaacaggggtggtttcgtgtcgtgacgtcggagtaccgcgacgcgggaaacaaatacaatctgaaaattgaggaggattgcacctggggcgagccaattatcatctgaatgaggagcgaacaatccgagcactgttcaagccgatgccaaaattttttccatttttgtccaagcatttttaagccaaaataattacggaatttgacaaattaggcaaatatcaaaa

SEQ ID NO: 48589 - DNA, 667 bp, Heterodera glycines
agagttgaaattttatcttttgaaaatcgtctagacctatttaatttttcgaaaaatgtctgacaacaaagaagaactcgttcagcgggctaagttggctgagcaagctgagcgctacgatgacatggctcagtcgatgaaaaaggtgacggaattgggtgcggagttgagtaatgaggagcgcaacctgttgtcggttgcatacaaaaatgtggtcggtgcgcgtcgttcctcgtggcgcgttatctcatccattgaacagaagactgagggctcggagaagaagcagcagatggccaaggagtatcgggagaaggtggagcaggagttgcgagagatctgtcacgacgtgctggatttgctcgacaaatatctgatcccgaaggctggcaaccctgaatcaaaggtgttctacctgaagatgaagggtgactactaccgctacctggctgaggttgccaccggtgacgaccgaaacgctgttgtcgagaagtcgcagcagtcgtaccaggaaagcgttgacattgccaaagacaaaatgcaggccacccatcccattcgtcttggtctggcgctgaacttctctgtgttctactatgaaattctgaactcaccggacaaggcgtgccaactcgccaaaaaggcgttcgatgatgcgaatggtgag

SEQ ID NO: 48590 - DNA, 525 bp, Heterodera glycines
taacacattttccaacattggctaattaccgtccctaactaattggcttttttccctcccacttaattgtgtaccatcaaaaatgccgaaggtggactttgactatttggacatgttttcacccatcttggtggcgtttatttttgcggtcatcctttttttcatctccttcacgtgcatcaattggtactgtatcacgcacaaggatgaccttacggtgttcgaaaagttcggcacccgcttgaatcttcgtcttggcccccattcaatggcagtgatcaaacgaggcggctacgcgtccacctacgcccgcgaggaggcaaagcggtcggaatgtaccggaccacaacagcaacaactgaacacgcttggggacggaaaatgccaaattagccacgcttgacaaaaatgattggcattttttcaaaatcattttaattttgatgaaaattttctatgggttttcaattaaccaaagaatttttttttatgccaattaattcctcttcttttaatgcaataaat

SEQ ID NO: 48591 - DNA, 1090 bp, Heterodera glycines
caatttgggtttataaattgttttggatataaatttgccaacattgccttcgtttttcctggggatgaacaccagcacaccgcgcgatgctccgacggcgcaagacgcacgaactttgcgccaaatggcgtcacttcgccggtccatgcgcagcactctgtccccaattgtggcggaagagggggagagagaagtggggacttccgccgccgccgcaacccaacggcgttcaaccgacttggcccagtcgttgctccaacgacggtcagtgctcagccaatttggcagtgcccagtcgtcggtgtcttcctccgtcgggagttacactccgtcaatgatggccagcaaaattgacaatcggcccgccattgtcatcgaaattggcactcgactgaccaggattggctttgccggtgattttttgccccaggagattttccgctccgaattcgttgacccattggacggtccgtccccgtcctccccaattgcactgtttgaccggtcgcgcactgagcaacagcagtacgaagtgctcgtcaaattcttcaaaaacatcgttttcggcaaattgttgaccactatgagctcgcgtcgtgtggtggtggtcgaatcgcttttggtgtctaattggcaacggaatgccattgcccgggccctcttccaatgcccttctctaagcgctcattccattttgttcgctccgtcccatttgtgctgcacttttcccttcaacacaaaaacttgtctggtcattgacatgggtgctgacgaagccgtgctctttccggtagctgaaggggtgctgatgctgaacagtttggagaccagtgtggcgccctccgcgacggcgttggagcaaaatgtgcgtcgtttgatggcccaatttggccgtctgcggaccggggccgaagacgatgcggagggacggccgctcactgagactgagttggaacaagcggaccgaatgcgactgtgggaggacgtggcggtgcgcttctgtttcgccacaacggccgcgcgcggaaaacgcattcagacgtatttggccaattccgctgcttcttcgtctgccgattgttccgctgcg

SEQ ID NO: 48592 - DNA, 652 bp, Heterodera glycines
gaaaagggaggcgatcctgaacaaattcgcaaatctcaagtgggccgcttcgcagatgtttcattagtggacaaagtgatttcggcggactccgaatggcgaaaagagcgtttctttttggacggtttgaatcgtgcgataaaagtgtgcagtactgcgattggtgacaaaatgaagaagaaagagtcggctggtgactccgatgccattccggaaggacaaatcaaatcacttgcagaactgaaaatggatgacatcaaagaaatgaaaatttcgcaaattaaaacagtcaagggaatggtggacgaagaagtcagacggaccaaactcagaatggaaacgcttgagggggacagaaatgagcatttggccaaaattgggaatttgctgcataattcggtgcccatcagtgacaatgaagacgaaaatcgagtcgaacggacatttggcgactgcgcaagcagaaaaagttattctcatgttgacctcgtggtgatgtgcgacggatttgaccgagagagaggcaccaatgtggcgggaggacgaggctattttctgaaaggaccggtgggggtccttgaacaagcgctcatcgcattggcattgcaaatgctcaacaagaagggcttcacgccgctttacacgccctttt

SEQ ID NO: 48593 - DNA, 651 bp, Heterodera glycines
acggctataaaagccagctacagcaccaccacctgcaaaacagtttcctccgtcgccgtctccaccaccagcacagacgcgtccgacggagcggccagcaaagcgcgacggccgccttttcactggacaacggtgcgacggcacccgcggcgagcccattgcgatttgacgacaaagcaccgcccgcgcgcattaaccaagctgttttccggcagcaaagtctgctgaacgccgcttccgccgagctcagtccgtgcgtgcagccgcttcgccgcggcaattgtcaggaagcgagtctgcgctatttctacgacttggccctggaccagtgcagactgttctacttttcgggctgcgacggcaacgaaaacaacttcgccacgttggccgagtgcgaagtgcggtgcaaaattgggtttactcccaactcggtaccagcccaacaacaacagcagcaacaacaaaaaggcagcattggcccatgccccagcggcgaattgcccctcgggggtaaaaacccggtgttgtgcggcgatcggtcggactcaatcggctgtccttccggctttttctgcgccgatgggcccccgtcggtgtgctgtcccggccacaaaagtgccgcttctgtcggcgatgtccgacgaaagccgt

SEQ ID NO: 48594 - DNA, 1163 bp, Heterodera glycines
gtccatttaaggcaaccaattactatttgcgttgaaaaaggcattggcagtaacgacattttgtcaaacatttcgtccgtctttgtcggtgtgatcgatcacccaagtccaacccatcagaataacaacaattaaacggtcttttcaaattcccaactcattcggctgactgattcgataatcgcgagtcgtcatcttttcccttttcttttccatcgacatttttggctgggttaaactaccaaccaacaaaaagagagcgaaacgaagggaggcaaaaccaatcaatttagtcgagaaagccgagtgaaggaaacagcctcaacatattccatttgtcttataacggaactacaataaaatggcggatcagctaaccgaagagcaaattgccgagttcaaagaggctttctcgctgttcgataaggacggggatggcacaattaccaccaaggaattgggcacggtcatgcggtcgctgggtcaaaaccccacggaggcggagttgcaggacatgatcaacgaagtggacgcagacggaaacgggaccattgactttcccgaattcctcacaatgatggcacgcaaaatgaaggacacggacagcgaagaagagattcgggaggcattcagagtgttcgacaaagacggcaatggcttcatctctgcggccgaactgcgtcacgtgatgacaaatttaggagagaaactgacagacgaagaagtggacgaaatgatcagggaagcggacattgacggggatgggcaagtcaactacgaagaattcgtaacgatgatgacgacgaaataatcgcttcggcacagccctcaacaccgtcactgcatcgatcttttcatttccttcgttcatttaaattatctcctctccacccatccattcattcaccgaccatttttcccgtggattcgattgattttatgtattctataattttttatttgcttttccgtgttcttttgagcagatactgagaatatttgtattgcgttttcttggtctccatcccatcaatcgtctcgtacacctttaatttgtttgtgtttctgtcgggaaacatcgctgggggccaattcgatgagacacattcaaaccagacgatcattgattgtatttcgttttctcaataaacgatttaaaagtt

SEQ ID NO: 48595 - DNA, 664 bp, Heterodera glycines
tttgagctcaattcgccaaaattcttaacttcaaccaacttcacaaacttcacaccgacatttctctcctgaacatgtccgagaaatttgtcggcaaatggaatttggagtcgtcggagaactttgacgacttcatgaaggaggtcggcgtcaactttctcacccgcaaggccgccggctgtgtcaaaccggtgctggaattcgaagtgtccaacgccggcgagcactggaagatgacgtccacgtcgacgttcaccacctggaactgcgagttcgacctgaacaaggagttcgaggtgaagacggccgatggacgcacggtgaagaccattttcgcctacgaaaacggcaagctgaccgagaagcagtccaagctcaaggacgacgagaaggacagctactacgagcgctacatcgatgaaagcggcaaactcgtcattacgatggaagccggctcggtgaaggccaagcgcgtgtacacgaaggcggcctgagaaccgaagaagatgacgccgatctccgaagacgacggacgcttctgacccgttttcgtcattcttgaggccttttgatccgcaattcttaatttccatctaatttatttaatgcgatcaataaaagggttctctctgaaaaaaaaaaaaaaaaaaaaaaaaaaaaaaaa

SEQ ID NO: 48596 - DNA, 650 bp, Heterodera glycines
cattaatggtcctacaaaaaaagaagaaatcgttttccggttttaaaatacagaattttgtttatgggctagattcacagataagttcgctggataagtatttgttgaactttaaagcaaagaaaaatggcggttcttgtctcctctcgggcagaacaaatactggaaagacgcttgttctcgaatcactaatccagaaacatttctctgatgatgattgtgatataaacatcagaagagttgacgggctttcgaagatgacaaaattatttgaaaagttagatcttgaagggccggtcttgattgttgtcgatcattttgaacttttcgcatataaacaacaacagaatttcctatacagcattttgaacggcagtcaaactcttccttggtttgtcgttctaattggcacaacggaaaacagcgttaatctattggagaaaagagtgaaatcaaggttctcagcgctaagagtcaacttcaatgtgacattttcactcgaacaattcgacgaaggatttggccaacttttggattgttcttccctctccaaaaagatgattaagaaaacaaaggaagatgacaatggcaaaaaattactgtgtgcttttgattgtccggaccattggtttggttatttgaagaaaaat

SEQ ID NO: 48597 - DNA, 780 bp, Heterodera glycines
  unsure (1)..(780): unsure at all n locations
cctgtcgctgtgctttgtactatcatttccttatcaaatgcctcccccaatttcctctcacagcccaaaatatgagaaaaacgagttgcacacacagaacaaaccgtcgaatgttgttgaggcattgacactctctctctgcccatggcttcgtcgtccgctgccagcgatgactcatccgccgtttcttcgcctcctccgccgcttctctcttctcccatccgatcggaaatggtcgctgctgccaaacagtttctggccaacccgcgagtccgcaacactccaatcagtgaacagaccgaatttttgcgtggcaaaggactgacagagacggaaatacaaaaggcaatgaaattgacaacggacggagggggagaggtgccgtccacttcgctttcgtcccttcctcccgcgtccgctccctctccctccgctcgtgccgtcgtcgacttggcacgttccgcgcttctcttcggcactgccggttacatggtctacagatttgttcgttcgtggctgctcccgcagcttctcaatgtgccggacccggccgaggagcgtatgcaacgacttgagcaacaggtcgaaaggctgagcgattccacgcgatgcatcgccgaatcggtgacacaaacactcgttgcggtgacggaacagaacgagcagctgagccgaacgatgatgatggtgcagggagggacgaangggacggtttgcaccgccgacattgaccgtgtacataccgaaattggcattgtcaagtcgctgctactcaaccaa

SEQ ID NO: 48598 - DNA, 710 bp, Heterodera glycines
  unsure (1)..(710): unsure at all n locations
cagcatcatcatttgcttctgttcatccatatgattgtgaagcctgttaaaaatttttttcaaaagaatgtgaccaaagtttggctgaagccgccgcctcatgacacttttattgagccttggtttccctatgctttaattctaaagccaattggtcgagcatttcagcgtttgggcgtatacacttacaacaatttcatcgcccgaaccacttttggtctttacccgcgagaatggaacccgcgtgtccacggcccatatgttcattatcgttactacggaacaaacaatgacattccgctaatggaagtcaaagtcaatgacttggccgcgtacatcgcccgtcgtgacaaatctccgcgtgccatttggcgcgaatttatgcgcaacttctacaagcttcagtacttctacttctcggggcccgagttcggcaaccctttgacaatgatttggcgctatctcgtcattttcatcgtcggctttttcttgaccctccgagttgtgaccggcgcggacacgcgtttccgacacgctttgtaccattggtagacggacggacaaagagggccgatgagagaaaaaggaaacagagcgatagagcagaaacaccgtccgaattattgttaggcaatgtctccatattttctgtgctgttattaaagcctattgtagtttaaannnaaaaaaaaaaaaaaaaaaaaaaaaaa

SEQ ID NO: 48599 - DNA, 634 bp, Heterodera glycines
cccgtctccaatatttcctcgtctccaatctgttcgccggtttcctcatcgcacacgtggtcacctacaaccactactccaccgacaaattcgcatatgacgacccaatcctggagaactttgcctgtctgcagctgtacaccacgcgtaacatgcggcccggcccgttcatcgattggctttggggtggtctgaactatcaaattgagcaccatttgttcccgacaatgccgcggcacaacctgaagaaggtgatgccgttggtgaaggaattctgtgccgaaaatgacatcccttacatggtggacgattatttcacgggctttcgcctggtcatcgaacatttgcgccgagtggcggaagcggccacagaaacgctggtcagccatcacagccaaaaagtgccatgaacggacacagcagcagaaagtgatcgggtggaatgggagagcttttcatatgatcaatccgatcactcactcactgctgttaattacgattttaaagagctgaaagcatttttcctctgacacattccatcgttttgttatttttccgctgtcatttaatacaacaaatgatacggtttctcttcttctgagactgttatatgtattcacactttttgaattat

SEQ ID NO: 48600 - DNA, 604 bp, Heterodera glycines
agcaaacttccgccggagctcactcagcaagtgatgcgcggtgaaatgcccgacttgaccaagttgccgttggatttgcagcagtggatcaaagataactttgaccggcttgttgcttcgttggagaacaatcccgatctgagcattgacgaaatcatgaagaagttgcccacgttcgagcacccgctcatgtccaccttctccccctacgacatcaacaaggtcgacgccgatttggtggtccaacagcgcaacgaggaggaggccaaccaccgtttctggcgcattttcgccgccagcgccttggctttggctggtgccgtgacgctgggcgttctcagtgccttcttctggtacctgaaacggagcagacgtctggcggacccgccgatggcgccgccgattggcattgacgggggccccgagctgccctcggtgattcgtgagcagtacttccgaccgtctgcctcttcaacgctcaagtgatcactgatcagtcgcgatgttcttgttcgggtgtgattgattagacttttatttagtttccgctttttatttccttaacattcctaaaaagtcatctgttcattcctgtgccgacttc

SEQ ID NO: 48601 - DNA, 708 bp, Heterodera glycines
tacagtgcactggacatgcacgagcaggcgcaagaatttttgaagcgggcgattaaattgtgcccgacaaatgcgtccatttgggtgcttttgggacacgaatatttggagacgaaaaaccaccaattggcctcaacggcgtacaaaaaggcaacagagatcgattccgtttgttaccgcggatggtacggactcggccaactttacgaaatactgaagcaatcggagaccgccctttactattaccaaaaggcgcacaaatgtcggccagcggactcgagaattttgatcgcattaggtgtgattttctccaaaatcgaccggaaatcggatgcagaaaaatgctttaaaaaggcatttcaaattggcgacgtggagggaaatgcgctgacgcatttggccaaactttacgaagaacaggaaaaccagcaaaacgccgccaaagcatatgaagcttatttgacgctttacacggaggaattggtcggcgacctcagtctaatcgctgaagcgtgtcgctttttggctcgtcacaatttggaccttggcgatttggacacgtcctacgcctatgcccagcggtgtttgaattatgacctggccaaagaggagggccaacgcatcctccgactgataatgagcaaacggaaggaggagcaggagcgcaagctggcactccctgtcggaacgcctcagcagcaaaacatt

SEQ ID NO: 48602 - DNA, 683 bp, Heterodera glycines
attttgcagaactgtggaccgaattcgtttccaaaatgctattctttcaaaacggtccggtcgagcagtgtccgcaccaacagcagcagaatgccgcgccgctgtcccaccgccccacggcattttccctccccgcaacttcgcctttctcaacaatttcatcggtgggctcactgccgtcggagccaacaacgcccacagaaagaatgagcacaggaaatgtgatgatgatgatgagcccgaaaagaatggacaaaggaaacggaggagagaaaggacaaagacagaaagccccgggcaaagagcggccaaaggacggcaaagagcgcgtgcacaagtgcgaccagtgccaaaaggcgttccgcttcaagtccaacctgttcgagcacaaatcgctgcatttgggcagcagcagtcggaaccctttcgtgtgccctttctgctccaaaacgtgccgtctgaagggcaatctgaagaagcatttgcaagtgcacgtcaccagcgcggaggacttggaatgcttgtggaaacgctctttctcacgcagttccggtcgtccgagtaaaaatgcaccgcccgctccgttgccaaagcccggcgacgacctcggcatggtgccggtgctcgtctctcagcaggatgcttcttcctcctctccatttggctcctcccccaccatcaaa

SEQ ID NO: 48603 - DNA, 516 bp, Heterodera glycines
attaagtttttaaagcttatattaatagcaatgactgaaggaggtgaagaagtgaatccaaaggcctaccctttggcggatattcaactttctcagaagttgcttgatcttgttcagcaggcaacgaactatcatcaattgaaaaagggtgctaatgaggcaaccaaaacactgaaccgaggcattgctgaggtgatcattttggcagctgatgcagaaccattggaaatcattttgcatttgccattgttgtgcgaagacaaaaacgtcccatatgtattcgtgaaaagcaaggctgcacttgggcgtgcatgcggtgtgactcggccggtgatcgcaacttcgatcattcaaaatgaaggatctcagttgaagtctcagattcagaagattaaagaagatgtggaaaagttacttatttgattaaaaatttgcaagcttatcactgttttgttattccatcttgttttgttgtttcatgatttgttcgacgacaattaaaatgactctgaaaaa

SEQ ID NO: 48604 - DNA, 669 bp, Heterodera glycines
cttggtttttagcccgagaatgttcaaaacgtacgggccaaggcccgagtcgttcacgcttgacgacggtgaacgttattatgtcggtgcggacgtgggccagtacttgaaataccatcgcggcacgctgtacaaacgctacccccaactgtggaagcgaatggcatcggtggaggagaagaagaagatccaggagttgggctgtgccacctcctacatcaactcgaacattatgctggtcaaagcgaacgaggttgaagacatttttgacggacaagaggagaaatatcgcgcgtcggtcagcggcggcagtgcgtacggacgcgcggagggtgcgcaaacgctgcgaagtcggggcagtgctccgtggctgaaccagcaggtggccaaaaaacaaatgtgaccagcggttcccaccacctcgagtccgtgccctgctccaccccttcggcgcacgggcgaggccatttcaaaaatcgcgactacgcttacgtggcggatgacctcgagtcgtatcgccgggtgatggaaaatgcgcaggccggcgaatgtttggtgcccattcggctggacatggaattggacaatattaaactgcgggactgcttttgctacaacaaaaatgacaaactgatcacaccagaaatggttgcagaagtgttgtgtgaa

SEQ ID NO: 48605 - DNA, 867 bp, Heterodera glycines
catctgtccaattcgtccgtttcttcagggccttcttcttccatcggttgttgagcacgaacgtgaactcggcactttgatcggatcgtaagcgcagcagaactcgaacagaagcagcagagaatctgtagctcatccatctcttctcatcttcatcctctacttttgtccttctccccatcgccatgtctgaagaggaatcgcaatattccgacgaagaggttgaggaggaaagcattgccgcggatgaagtgagcgtgcaggaaccggcaccgcccaaagaagaggagccggcgccggaagccgaagcggaggcaccgccggcggaagaaaaggaagaggaggaggaagaagagccggggtcacccggaggggcaggcgatgcgccgaaagaagaatttcgtcgcaccagtgttacggagtccgtcgcgccgacggcgcaacttcgccgcgcgccgccccctcagccgaagccggcagaagaatcgatgacggaggcggaagcggcgatgctggcggtgaagaagcgccacgaggaggaggaggaagccaaaatgcgcgacaatgacgagcgacgccgccaggaactcgctgcagttgaggacgaactgcgcgttttgaaagaacgccaagcggagaggcgagcggagcgcgagaaggaggaggccgaattcgccgaacgacggcgtcaagacgaggaccgacggcggaaggatgaggaggaacgaaaggcacgactcgaagcggagaaagcgaagcgcgacgaggagaagcggaaagcgccacctgatgatggccggcggaattggcggatttgtggcggcggacgcggaaggagcaggcaaaaactttggagttccccagaaa

SEQ ID NO: 48606 - DNA, 1328 bp, Heterodera glycines
aggtaatatttatttgcttacagcaatttaaaaaaatggctgcatttttgaatggcaatgctcacagcagcattgaatgcaatggtgtcgtccatgacaaaaatggcattgatcagaatggcaccaaattggctgatcgcttacaacattcggtgcaaattgggaccaaaaaagcgccggtgtcaaaggggagcatcaatgtcaacaaatatgtgctggaagtgatcagtgacactgatcagctgcacacattggaacaatatgccattgactacgctcattcaattggtttggtggccccactttcggacccgccggagggaaaattcaccaacatttatgccgttccgcctccaatcgcattgcttccatccccgttcccgcgcgaactgtacgaccacgcagtgaacgtgcaacaagcgatgaacgagctgtactttcgtgttgcatcggaccatgactttttgatggacgcatttaaggacgtggtcaaaggcgacccatttatggcacgccttgtgcaaatcgcccaagtggtccacgacgagggcattcatcagccattggctgttcaactccaacgttcggattatatggcacattgggacccgtcagatgggagcatggcactcaaacaggttgaagtgaacatcggaccaattgggggccctggctttgcctttggggtttccaaattgcatcaaaaaatgctggacaaacttgcgattgcgcatgatggaaagccagcaattttggccaattcggaagcgcccctgaaccgctctcgccaaaacattgcctacacactttatcagtcatggaaattgttcggtgacccaaaagctgtgcttctttttttggacacgccgaacatcacgcattttgagcagttgcaattcattcagtttgaagtggaaaagttaggcaaacaacaaggcaattttgtgaaggtgttggtgctttcgctgaccgaagcatcgaaaagaatttcgcttgacgaaagcggcgacttttcattgtatttggacggcacaaaacgtgtggcattggtgcacattgctgacggcaatgtgccgcatgagtacccaacggagcacgaatggacggcacggacaacgatcgagcgatcaaatgccattttgtcgccaaacattcgcttccacctgagcagcaccaagaaaattcagcaggtgttggccaagcctggcatggtggaacgcttctttcccaacgatccgaaacgtgtggcactgatccgcagcacattcaccggactgtggggccttgaggttgaagacgaggcgacccgagaagtgattgaggatgct

SEQ ID NO: 48607 - DNA, 636 bp, Heterodera glycines
gttcatactcgcacaaacagcgagatggagaacgctcatacgaaaagtgaagacgaattgtttcggtttttcggcacagggccagacggactgacagaggaacaagcagacgaattgcgggataaatatggctataatgaaatgcccgcggaggaggggaaaaagctgtgggaattgattctcgagcagttcgatgatctccttgtaaaaattttactcctagccgcaataatttcttttgtccttgccttgtttgaggagcacgatgaccagacgagtgcagtcactgcgtttgtggaaccttttgttattctcctaattctcattgcgaatgccacggtcggagtttggcaggagagaaatgcggaaagtgcaattgaagcgctgaaggaatacgaaccggaaatggcaaaagtcatccgagcgggcaaacacggcattcagatgatccgtgcaaaggaactcgtcccgggcgatctcgtcgaagtttcggttggagataaaattccggccgatttgcgacttgtcaaaatttattcgacgaccattcgcattgaccaatccattctgacgggagagtctgtgtcggtcattaagaatttggacggggtgcccgacccgagggcggtcaaccag

SEQ ID NO: 48608 - DNA, 666 bp, Heterodera glycines
ccttatcctcgaaaattcctttctggactaaactctgccccttctccaaacaacagccggaacagcagcagtcttcccccgtcgcagaagacacaattccgccccagcaacaaaaagaaggtgccgcaatgtctgccgaaggaaacgacgcaccgccagccgcagagcaaccgccaccagccgaagcagcaccagctgaagcggtccctgtccaggaggcggcggcaccgccagtagaagcggcggccgaaactgcaccagcggaagcagcgcaaccggtagaggaggcggcaccgcctgctgaggcgcccgttgaagcggcaccagcggaagcagcgccaccgatagaggaggcggcaccgcctgctgaggcgcccgttgaagcggcaccagcggaagcagcgcaaccgatagaggaggcggcaccgcctgctgaggcgcccgttgaaccggcaccaccagtggaagagccaaaggcagcagagcctgaggcacccgtttcggaagctgttccagcggcagaagcgccagtgaaagaagctgttgctgcccccattgaagtcgcgcccgcagaggcagagcccgtctctgccccgccagctgaagcagtaccagccgaagaagcgccggctgctgaggtcgcccagctgagtttggaggaacaag

SEQ ID NO: 48609 - DNA, 669 bp, Heterodera glycines
acaagtttgagcaggcaaaatggcctccaaatttgtattcagtcttcgcttttcctacccaaggctcttaaccagcagtgccctcaacaacaaaaaattggtgccaaatctcattcagtctcggtcaattgtgaccaaatttgacctggaattgcctgacgattacccggagccttggccctacaaacaatggggcttcaaccaattcatgcaacatcttgacaaaacgctgaagcgttggcacatcaactcgaaactgatcgttttcgaaagcaacattggcgtgggccggtcgtcgatcgcaaaggaattggccgatgcgttgggcttttattatatgccggcctttaaaatggacgacattttggttgaccgttacaacaatgacatgcgcgactattatcatttgtttccgaaacgctttcggttcccggacatcaacatgttctacaaggacccggccgacgaccaaacggccgtcatgcaagatctgatgtacgactgccgttgggagcagtacctaaacgcacaggcacaccttttcaacacgggccaaggcgtcgttttggagcggtgcgtccacgcggactttgttttcgcaaatgcaatgcgtgccaaggattggatcagcagagaatacctcaatttttacatgtacaagcgcaagca

SEQ ID NO: 48610 - DNA, 1140 bp, Heterodera glycines
tgatgacctattataatgattcgaatagcccctttctgatcactctgttgggaaggatttgtctgagtttgctgctggccaaagtgtgtcgctctctgtacaacattctctacccttatgtgatcgcaaaaccgcgcgacctgcacgaacttgcgggaggggatgccaattgggccgttgtaacgggtgccaccgatggcattggcaaagcctatgccgcggagttggccctgcgcggcttcaacctggtgctgatctcgcgctcggcccacaaattggaggcggtggccaccgagctgaagcagtattcggccaccagcggacagcggggcgaagtgcagctgcggacggtccaattcgacttcaccaacgccaacccggcggactacgaacgacacatttttggtgccatcagtgacttgaacattggcattttggtgaacaatgtcggcatgggcaacccaaatgattacccggaacgatttgacgaaatgtcgaccaaattgttgtccgacatgacgattgtcaacactttgcccgttaccgttttgtcctcttttgtcctccgacaaatggtcaaacgccgtcgcggtgctgtcataaacatttcgtccgcatcggcgtatatgaaatggtaccagtacgccgtctattcctctacaaagagcttcattgtccatttgtccgaaatcttgcgcaaggaattcgcctccgattgtccgggcattgccatccaaacggtgtgtccaatggtcgtggccaccaaactgacgcagcgttcgtcccgtgacggcctttcttcccttttggccgccagcccaacggaatttgcgcgtcaagccatccaaacggttggcctcgtgccggagacgagcggatgtttgtcccaccaaattcaggttgagctgttgttctcccttttgctcactttcgtcccaaattcgctgttcgactttttcgtccgtttggaggcgcatttgcacaaaagtgtgctgaacacggcatccaaacagcacgactaaatacataaaatggcaacatcattaacgatgccaccaatttaaaaattgagcgatcttttcaatttccaatttcaaattattaattttgcttatcccaataaattctcaatttttaaaa

SEQ ID NO: 48611 - DNA, 638 bp, Heterodera glycines
gatcagttcaatgttagcctctgtgatcaacgaccgcttcaaccggcacagccaatacgcccctttcttttctttggaattttaccctccgctgaaagaacaccccaaaaatttggcggacttcttcgaaatgttggatcatctgaagcaggcgcagcctctgtttgtggacatcacttggtcaagacgaaatgacccgggaaatttggccaaattgaattcttcgtcggccattgccattgccaccgcggcttcattttcggcaaagaacgcacaatgctgcatatctgctgcaatgatcacacgaggactgagtcgattagtcatgtgaagcaaacattgagccatggcattgcgaatattatggcactgaggggggacgacatgccaacggagcaaacgcttctcaccaaaaacacaaaacacttcgccatcgatttggtcaaatggactcgagaattggaagagaccgacggatattttggcaatgatcggctaacgggggccgttgcgggacacatttatccgccgatgaaaaatatttcttacagacaatgcatggaacatttgagggccaaagtcaatgccggcgccgacttcgtcgtcactcaattctttttggatgccaatttgtttga

SEQ ID NO: 48612 - DNA, 595 bp, Heterodera glycines
actgtaccggcttcacacttcgaccggtggccggccttctaagttcccgcgattttctggccgggctggcattcagggtgttccattccacccaatacattcggcattcgtccaagccccactacacacctgagcccgacatttgtcacgaactgttgggccattgtccactgtttgcggaccccgattttgcccagttttcccaagaatttggactcgcatcgcttggcgcctccgatgaaatggtggagaaattggctacgctctattggttcaccgtggagttcggcatttgcattcaaaatggggcaaaaaaggcgtacggtgcgggactgttgagctcatttggcgaattggaatatgcgctcagcggacagcccgaattggctgcgttcaacccgccggagacgtgccaaaccaaatacccgatcactagctaccaacccaaatattttgtggccgaatcgttcgcggatgccaaaaacaaactcgctacatggtcaacgagcataccaagacagttccaagtcaactacaacccatacacacaacgcatcgaaatgttggacaatgagagtgcagcaaacaagcttgt

SEQ ID NO: 48613 - DNA, 706 bp, Heterodera glycines
  unsure (1)..(706): unsure at all n locations
ccaagtttgagttgttgaatgcaataatcctaaaatgttccgcaaccaatacgatagcgacgttactgtgttcagcccgcagggccgtcttcaccaaattgattatgcagtcgaagcgatgagacagggcagtgcagcagtagcaattcgtagcaaagattatgctgttgtggtcgcacttatgcgtgcacaaaacgagctttcttcatatcagcagaaagttttcaaattggacgatcatctcggcttgtctatgtctgggcttatttcagatggacgcattttggcacgctttatgcaaagtgaatgcgccgagtttcgctggaactatcataatccaatttcggttgaactgctcaaccgtaaattaggcttgaaacttcagtccaatacccaatattacggacgccgcccatttggtgtgggactgctcatcattggatatgatgacaaagggcctcacgttgtgaaagccgaaccctcgggggacgtgtccgaaatgtttgctgcttcgattggcgctcggtcacaaagtgcgcgaacttatctcgaaaagaacctaccagaatttgagacggctgacagagacgcattgattcgccatgcgattcgctccctcaaagagacgctgcaggcggacgctggcagtttggatgagaataacacgtntattgcgatcatcggattggacaaccttctacctttt

SEQ ID NO: 48614 - DNA, 659 bp, Heterodera glycines
ctcacgaacggacgtgccctggtgcaacaatggcaaaggaggaatactgtttcgatgcaaaggcggcggcagcggcggggcaatctcgtcgtccttcgacaacggcatcagtacttgtgcaaggagatggccagtcaagcagatttgtggatgcgatcatcagaaaagtcacgcagccgcctcttcaacgcttcacggatgagatcaccgacgaggaactcaaacaactctgcaaggcggccacggacgtcttccggatgcagccgacgctcgtcaggatccgcccgccggtcgtcgtcgtcggagacatccacggacaattctcggatctgcagaggatcttcacaacgcatggccccccgccggagcagcagtacatgttcttgggcgactacgtcgacagaggagcacactcgatggagacaatcatccttctcttctgctacaagatcaagtacccatcgaacttcatgctgctgcgcgggaaccacgaatgctccaacatcaacaaagcttatggcttctacgaagagatcgaccgccgttacccgcgaacgggcgctcgtcgactcttcgacctcttcaatcaagtcttcgcctggatgccattcgtcggactgatcggcgagaagatcctctgcatggacggcggcatctcc

SEQ ID NO: 48615 - DNA, 1022 bp, Heterodera glycines
attccggccccatcaacggtctctctgttgatgcatctgacggtttgcactttgtcacggttggccaagacgcgcagttcaaagtgtggccgttgccaattgaatttgatggaaatgctcagccaacgcagcccgtccattcgttgtcccttgacggggtccctcacggctgttcccacgtggcgatgtccagcgatttcgtcacctgtggtgagggcatttcggtgtggcggttgcacagatcttcgcccattcgccattacgctgttgggcccaacactgtgcagcatattaactgcaaccccatagaggaaggcattatggccggatgtgccgcagatcgctccatttttctgttcgacacccgccagaaagtgccgctgagccgcgtagtgctcaaactgaggacgaacagcattgcctggcatccgcttgagccgttcacttttgttgctgcaaatgaagactacaatttgtacaccttcgacatgcgcaggttggactccgctcgccacgtccaccaagggcacacctccgctgtgatggacgtcgactttgcgccatctggtcacgaatttgtcagtgggagttttgacagatccttgcgcattttccctgttgaacaatggcgaagtcgggaagtgtaccacaccccgcggatgcaatatgtgctgtccgtcttgtggtcttccgacaacaaatttgtgttgtccggcagtgatgacatgaacattcgcctgtggaaggcaaacgcagccgaaaaacttggcccgctctgtccacgcgagaaagcggcgatcgaatacagccagaaattgcgcgacactttccaaggccatccggaagtgcggcgtatcgtcaaacatcggcatgtgccgaaagctatttacagtgccacgcgggagcacagaatcatacgtgaatcacagagaagaaaggacaaaaacaggcggaagaacacgaaaagtgccgcaacagaaccatttacgtcggagagggcgaaagccattgtcagcgaaggg

SEQ ID NO: 48616 - DNA, 625 bp, Heterodera glycines
gtccatttaagatttgtttttctgtttaatttctcgaaatgcatgcaattcgcacaatttcccgcacattttccaggtcgaccaccgcgccagtgggcattccattcgtggtggacaatgacgggaaaacagaacgcgtctacgacatttattcgcggctgctcaaagatcgcatcgtttgcgtcatgaacccgattgatgacttttttgctgcctctgtgatcgctcagctgctttttctgcaaagcgaaagtggcaaaacggcgattaacatgtacatcaactgtccaggtggcagtgtgacggctggcctcggcatttacgacacaatgcagcacatttcggcccctgtcgccacttggtgcattggccaggcgagttcaatgggcagtcttttgttgacggccggtgccaagggaatgcgcacttcgctgcccaatgctcgcattatggtccatcagccgagcggtggcgcttacggcacggcggcggacattgtgatcagagcggaggagatcaaccgaatgcgaaaacggctcaacgaaatctatgccatgcacacgggccaaacggtggaaactattgaccaggcattggacagggatcgtttcatgagcgcactgga

SEQ ID NO: 48617 - DNA, 638 bp, Heterodera glycines
cacaaacaagcgcattgtttggattgacggaggaatgcatgccagagagtgggcttcaattcacacggcactttggttcatcgatcagctgatctcactgtatggagtggacccgcaagtcacagcttacatggacacgttgaacttttacgttttgccgttggccaacccggacggatttgaatactcgcgctctgacgtcaacccgcagacgcgcttttggcgcaagaaccgaggccagcaagtgtgcaagaaggaccgctggagacgggaacgatgctgcggcggggtggacctcaataggaacttcgacttccactggggagagactggctccagttctgacatgtgctccgacatttaccaaggtgcctacgccttcagtgagcccgagtcgcgcgcaattcgcgacaaaatgatgtcatcggaattgtacggcaaagttgacgcgttcctcacactgcacacatactcacagatgtggatccatccctacaaccatgaacgcaaatcattcccaaatgacattgaagatttgcaagaagttggccgacgtggcgtccgtgcgcttgaacaattgtacggtactcgctaccgttttggtaccggcgccgacatactgtacccgtccgccggag

SEQ ID NO: 48618 - DNA, 654 bp, Heterodera glycines
cagatcatggcgcaagagccgcccttacaaattgtgattcccagattggatgatgataaaccgttggtgcgtcgaccgacgcctcaggcacaaccggcggctccagcggtgccggctgaactacgcgtgtccaatcgggaggaggacgcgcagaacatcgaaccgtcaatgagtggcaaacaaatagtcgggttgatcattccaccgcccgacattcgaacaattgtggacaaaacggcgcttttcgtggctcgcaacggattggaatttgagatgaaaatcaaagagcgcgaggcttccaacatgcgtttcaactttctcaaccctaccgacccatactttgcctactatcgcaacaaggtcaatgaatttgagacgggcgttgcatcggcggacactcagtccaaagtgaagttgccggaggctgtccgtgagcatgtgcagcgggccgaatttattccgcggctgccgcccaaaccgttcgaattctgtgccgatcctttgacgctaaacgcattcgatttggatctcatccatttgaccgctttgtttgtggcgcggaacggccgtcaatttctcactcagctgatgaaccgggaggtgcgaaacttccagtttgaattcctaaagcctcaacactccaccttccaatac

SEQ ID NO: 48619 - DNA, 1204 bp, Heterodera glycines
ccaagcgcacaacgacaatgaacacggcgacaaattgggagtcccctccccgcagcgtctcttctctcccaacacttcgttccacacggaactgcccgcggacggccccggcggcactcagtccaacgcggcgagtgaagcaggcggtgtcgctgccagtgaccaaaaccagcgacactttcacatgcgcatcaaaaaacgcattttccgcggagaattgatgagccgagaagttcgcgccagtggggtgctcgccattggcaaactgtgccttttggacgaacagttggccaagaagtgcatccccgtgtttgtgcgacaattgcgagaaaacccggaccattttgtgcgcaacaatatcgtcgttgtcatctgcgacctttgtattcgttacacttccgaagtcgaccggtacagcaccattctcgcctcgtgcctttgggacagttccattctcatacgccgccaaacgttgctgctgctcaccaatctgatcaaagaacagtacctcaaatgggaagggacggtcatttaccgttttgtgaccactcttttggacccggagcagtgcattgaagaatatgccaatttttgtttgacggacattttgttgccccaatttcgtgagcggatgttcttccatcactttttggaatgcatgttcaatttcaacggagttcggcatgtctcttggatccccagcgctggctatgaactgagtgaagaggtacaaaagcgttgttccctcgaaggtcgcgaattgttcgactcgcgaatgcgcctttacaaatatatgctgaacactttcgaagaccaacaaaaggtgtacattttggagaagatcggtttggagatatttgtgccgatcgttgagggtcgactgaaactttcggatgtgaaagtgcgcaatttgttatttgatgcttttaagattatgggcactgaagagataaagttgaaaatgcaattgggcaaaatggacgcggattacgagggggacgacgacgaaccgcccgaattggttaagactgctgctaaaaaattcatcgcgacgacatttcgcaaaagcattgcggagacggtgatgccccacttattcctgctgaagtcctttctatgcgagaagcgaagtccgttggccaaaaattgttattcggtcattttggatttctgtcgggagcacgaggagcagttggacgccttt

SEQ ID NO: 48620 - DNA, 769 bp, Heterodera glycines
ccaagtttgagctttaaaatgagtttggagaattttggcaatggtttcatgcgacggttgggatggaagcaaggggatgaggacgagggatggtccaaaaaggcggttgacagtttgctgaaaaagttgcaaaagcagcacaacaaagagggtttaactctgttggaaaatgctttgcgtacggagggcaaagagccgagcgaatgcgtcaccattccgcgctcattggacgggcgtctgcaaatttcacatcgaaaagcacttccgcacgtcatttactgccgcgtctaccgatggcccgatttgcaatcgcatcacgaacttaaagcgtcccaatgctgccgtttttgtttcgaatccggtcaaaaagatgtgtgcatcaatccttatcattacgaacgcgtggacagctccaacttgttgccgcctgttcttgtgccccgcttcagcgattcgccaccgaaacgtcagccgggcggcgaacatcgcgttcttctcggccacgaccctattccgtttgtgccatgccagcactgggccaccattagctattacgaattgaacacccgggttggtgaacaggcaaaagtcagtgcaattgaatgtgtggttggtttttaatgctttttcccaaattcttttgactttcggtcgatgggttcacagatccgagcagcggagaaacgaacgaccagcacaaaatttcactcggtttattttcaaatgttaatagaaattctacggtggaaaacacgcggagggaaattgg

SEQ ID NO: 48621 - DNA, 659 bp, Heterodera glycines
caagtttgagacaatgcaacacatcagtcgaacaagcaaacatttcttgaacaaattttcacccaacactttttggcagccttctcgaaatgcctacaaatatgttggcgaaactgccgcttcggacggcactttgcaaggcgataccagtgctgcaatggcgagcgcgctttttcacgaaatgatcaaaggtgctgctaccattgtgggccacactttcatggagccggtcaccattaactacccgttcgagaagggtccgctgagcgcgcgttttcggggtgaacacgccctgcggcgctacccgtccggcgaggagcggtgcattgcgtgcaaactgtgcgaggcgatttgtccggcccaggcaattaccattgaaacggagacacggccggacggcagtcgtcgaacaacgcgttacgacatcgacatgaccaagtgcatttactgcggactttgccaggaagcgtgccccgtggacgcaattgttgagggccctaattttgagtactccaccgagacgcacgaagagcttctatacaacaaggaaaagctgctgtccaacggggaccgatgggagcctgaattggccgcaaatcttcagtccgaatttctgtatcgataaacacacaaaaattttcgggaaaaattttcaacat

SEQ ID NO: 48622 - DNA, 960 bp, Heterodera glycines
ctgggctttgacggaattgaccgggaccgagctgccccgtaaaagcccccaggctcgtccgctcaatattaaaaactgcgtttgctcttgcctctggtgctagaaacgaaataaattccaagacggaagagattgtttttcattcattaataattgggagcaacacacacccgaaaaaaaaatacacaaatcaaaaattagcatttgccatttataccgagcgaaatgggtgcctacaaatacatgcaggaattgtggcgcaagaagcagtcggaggtgatgcgctatttgctgcgcatccgctgctggcaatatcgccaaatggaggccatccaccgctgcacgcggcccacgcgtccggagaaggcgcgccgcttgggctacaaggcgaagcaaggctttctcatttaccgcgtgcgcattcgccgcgggggtcgaaagcgtcaagtgaccaaagggcaaacgtacggaaagccgaaaacgcatggcgtcaaccagctgaagaacacgcgcagtttgcaggccgttgcggaggcccgtgccggccgccgtttgggcgaacttcgtgtgctcaattcgtactgggtgggccaggactcgacctacaaattcttcgaagtcattctcgtcgacccatcgcacaaaaccattcgtcgtaacccggacacccaatggatcaccaaacccgtgcagaagcatcgcgagcagcgcggactcacctcggccggccgcaaaagccgtggcctcggcaaaggaatgaagcacacgaagaccattggaggctcgcgcagaaagtgttggaaacgccaaaacaccgtcgaattccatcgcaagcgttgagcaattcattcatttattatggtccattggacagaacggagattctgctgttacttttttctttttttgttgataaataaagcaaaaaattattaaaaaaaaaaaaaaaaaaaaaaaaaa

SEQ ID NO: 48623 - DNA, 1356 bp, Heterodera glycines
tattgttaccgaagagggtgaggatagtttgtaccctatcgctgtgcttattgatgagcttcgtaacgaagatgttcagcttcgtctcaactcaatccgtaaattgtcgacgattgctttggcattgggcgatgaacgaacgcgcaaagaattgattcaattccttacagacaccatttatgacgaggatgaagttctagtggcattggccgatcaattggggaatttcactccgttgggtggcggacctgagtatgtacactggttgctgccgccacttgaaaatttggcgaacattgaggagactgtcgtgcgtgacaaagcggtggaatcgctgcaaaaaatagcagaaaaacacagtgcagctcaactcgaggaatatttcattccgatggatctgcgattgtcagctggtgattggtttacttcgcgcacctccgcttgcggattgttcagagtggcatacgctcgggccaatcctgctcaaaaaactgaattacgtgccgcattccggggcctctgtcgcgacgatacaccgatggttcgccgggctgccgcatacaaattgggcgactttgccaaagtgcaggaggaggactatttgaaaaatgaaatcacccaaatgtttgaggacttggccaaggacgaacaagactctgttcgactgctttcagttgaggctggcattgtgatcgttggtctgttgtccgaagactcggcaaaattggcccaagtgaaaccgatcgctgtttcgttggtgcaggacaaatcctggcgtgttcgttatatggcagctgataaaattgttcaaattcagcaagcattccgtaccaaaattggcattgaagaaattgtcggatggtacaccggacttttgaaggactgcgagggcgaagtacgcgatgcagcggcagagaaactacaatcattctgtgctgctctgtcggaggaaggccgaaaaaagggaatcattgaagaaattttgccagtgattcgaccactaacaactgacgcgaatcagcatgtcaaaattgcgttggctcaggttgtgatgggattggcgcctctgctcggcaaccaatgcaccattgagcatttgttgcctatttttttgtcaatgcttcgtgatgatacacccgaagttcgcttgaacatcatttcttcattggaaaaggtcagcgatgttattggtgcagatgagctccaatactcacttttgcccgccatcatcgacttagcacaagatggaaagtggcgagttcgcttggccatcgtggaatacatgccgttgcttgccaaacaacttggccagaaattttttgacgagaaattgcttaaactgtgcatgaattggtt

SEQ ID NO: 48624 - DNA, 584 bp, Heterodera glycines
tgagcgcggcgtggccaaccgatggcgctcactgttcatcatcatcggggacaaggccaaggatcaggcggtcactttgcatcacattttggccaaggccaccaccggggggcgtccgtcggtgttatggtgctacaagaaggagacggagttcagctcgcacagaaagaaacgcatcaaagagttgaagaagcgcaaagagtcgggcctgttccagtcaaaggaggacaacctgttcgagcagttcatcctgtccactcaaattagctactgttactatgccgactcgcatcgcattctgggcaacacctttggcatggctgtgctgcaagactttgaggcacttacgcccaaccttttggcccgaactgtcgaaacggtggagggcggtggcctcgtcgtgctgctcatccaatcaggcacctcactgaaacacgtgttcaccatgaacatggacgtgcacaaacgctaccggacggaggcgcacgcggacgttgtcgggcggttcaacgaacgcttcatcctttcgttggccagctgtgccaactgtgtggtgatggacgactgtctgaacgtgttgccca

SEQ ID NO: 48625 - DNA, 632 bp, Heterodera glycines
gtatgtatcagtttctttaaaatttgagaattaataattttgtgttcaaatgtccaacgacaacgacaaaagagatgcatcatcaattccaacgaatgcccttgttaacaaagaagagtctccggacggaaatgaagagaagaaaattttctgcggtgggataagctacgaaacatcgaatgaagatttggctgtttatttcgggcaatatggcaaagtgaaggaagtacaagtgaaatatgatcgagtgactggacgttcgcgcggtttcgcctttgtggagtttgatacggttgcagcatgtcaggcatcgctcgtacaacgtgaacaagtgataaaaggcaagcagtgtgagataaagccggccaaatcgagggaagttggctacatgaacaagaaggtatttgtcggtggattgcctggagatttcccagaagaagaacttcgaaagcacttcaaccagtacggcaaggtggaggagatcgagtggccgtttgacaaactttccaaaacgcgcaagaactttgcatttgtcgtgtttgaagatgaggagtcggcggaccgtgcaactgcattgcccaaacaaaattttgcgtctcgggagtgtgacgtcaagaaaggcgggccccaaa

SEQ ID NO: 48626 - DNA, 651 bp, Heterodera glycines
gagatttgttacaaacgcttggaacttgcagtgagaacaacaattgcaacaatttttggccttgagccaacacaccatcagttattctgttcaacacttagtacgaccaaagaagacccctttcaattgcatgtgaacatggccgagaaaaggaagcttctgaacgaaattgataaatgttataaaaagatcgacgaaggctttgaaattttcgatgacatcatggagaaaatgaacgaagcaaacagcgacaatcaacgagagaaattccaggacgacctgaaaaaggagataaagaagctccaaaggttaagggatcagatcaaaggatggcaaaactcttcggagatcaaggacaaggactctctgtcaaagtttcgaaaactgattgaacaaaggatggaaatattcaaggacgtggagagagaaaataagacgaagccgcacagcaaacagggactgtcagcggaggacaagttggacccgagggagaaggaaaagtgcgagaccattgaatggctgaattgccaaattcggagaatacaggacgaaattgacaggacggagtctaaactggaaacaatgtcatccatggccgactcaaataggaaacggggcaagaaagacgaagccgaaaagaatgagaaagag

SEQ ID NO: 48627 - DNA, 1032 bp, Heterodera glycines
cactcatattattgcaagttttgtgaaaatgtcgcaatgaggatgaatatgactatctttttaaagtggttctgatcggcgactcgggcgttggcaaatccaatttgttgtcccgtttcacacgcaatgagttcaacttggagagcaagtcctccgctggtgtcgaattatttttcgaattctcaccttccattaaggtggacggcaaaacaatgaaggcacaaatttgggacacggcgggccaggagcggcaccagcccattgtgtcggcattctatcggcgtgccgtcggcgcactgctcgtctacgacatttccgtgcggctgacatatgaaaatgtggggcgatggctcaaagaactccgtgaccactccgacccgaacattgtgatcatgttggtgggcaacaaaagtgatttaggcaatctccgagcagtgccgaccgacgaggccaatgcgtacgcggagcgcaaccaaatggcattcattgagacgagcgcgttggacggcacaaatgtgggcgcggcgttcaccaacattttgaccacaatttgtcgttcacagtcaacaactgcgggcagcacaccgaaaattgacattaatgatgatctgattgacgaggacgcattgctcgagcccgaggacttacagcgccctgaacaatctgccgcttgcggtgtgccatcggatggcgatgagcagtcaaaaaagcgtcgggcatgcaaaaattgcacctgcgggttggccgagcaaatgcaaactgcggcggacgccaatggcgacactaacaacaaaatggaggcgaaatcggcgtgtggaaattgttatttgggcgatgccttccgctgctccacgtgcccccatttgggaaagccgcccttcaaagcgggcgaggacggaacgattaaattggcgtcggttgatgacttttaaacagtgtctttatgtgtctgtctgtctgtggtctttttttggtgtgttattccgtttgatgtccaacaataaataagcaataaaaatattccattttaaa

SEQ ID NO: 48628 - DNA, 647 bp, Heterodera glycines
ggagaattcactgctttggacaagaaagtgataaacgccttattcttgacttggatgaccaacaagcggggccttcggagcaaaaagtcggcaggagagggcctggacggaagtcagcgaatccgacattggacaatcttctgggccatgcaaacttagaacatgcccgtgggcggacaaaggaggccatgacttttcttttcgaagtagtcaagctggccccttaccatgtgcagacatacaaagaactttcggatttgtactcggaattgggccaaaaagagaagagctttgaattcaaaatgttggctgctcttttaaactctaagacaacagccgaagaatgggatgaaatagccgggactgctaagtcgtttaaccggttggaattggctgtcgcatgtttggccaaagcgattcgatgtgaccccgagaattggctttactacgaaaaacgcatccaaattcttgatgcatccggtgaaacggatcttgcaatgaagacacgactccaagctgcccaatcgatcaattgtcaaacttccaaaatcaacttcgcatggatcgataaattgataaaaacggcagccgattattattgcacgctgaaagacgaagaacgggcgaccgaagcattggaaacgttc

SEQ ID NO: 48629 - DNA, 747 bp, Heterodera glycines
gactattcattagaacaaatggatggattgactgagccaatgctttcgacacggccaagcccttcgattggagccgagggaaaagagcgttttgcgcgtgaaaatcacagtgaaattgaacggcgaagacggaacaaaatgacacattacatcaacgaacttgcggacatggtgccgcagtgcgctgcacttggtcgtaaacctgacaaactgaccattctgcgtatggccgtttcacatatgaaagtgattcgtggggccaatgcgcaaagcaacaatttgtctggcacaatgccaagccaaccgtctttcctcacggatcaggaacttaaacatttgattcttgaggcggccaatggctttttgtttgtggtttcctgcgaaagtgcgagggttgtctttgtgtccgattcgattgggcccattttgaatgtttcgccggaacaatggttgaactctccctcgttttacgatgtcattcatccgcaagacgtggaaaaagtccgcgggcatctcctcggtaccgatttcagccacaacagtcgcgtgctcgacctgaagacgggcaccgtcaagagggagcacagctctgcccgcgtgcatttgaactgtcgcaggggattcatttgtcgaatgcgaataggtgacgtcaattgtttgccacgtctgcgcaatcgccatccaatttttgagtctgaagggcgctctttcatccccgtccattgcacgggttatgtgaagaaaacg

SEQ ID NO: 48630 - DNA, 646 bp, Heterodera glycines
attacgctgaacaaccctttttaatcgaaagctttgacttgacatgactgatgcgaaaactgaccaaaaagataatgtgaagagtgaagttggagatgtgcccaatggcgggacgtcattcactgcacagcttagcgacgatttcactatccaatcgaatacgaatgaggtggtcgattcattcgacaacatgcaactcaaggacacattgctgcgtggcatttactcattcggttttgagaaaccatccgcaattcaacaacgtgcaattgttccatgttgttcagggcgtgatgtgatcgcgcaagcccaatctggaaccggaaaaacggcaactttctctatttccgttcttcaacgtgtcgatgagaatgcaccggatgttcaggcacttgtgatggcaccaactcgagagttggcccaacagattcttcttgttatgcgtgcacttggcgagtatatgggggtcaagtttcacacttgcatcggcgggacgagtgtgcgcgacgaccagcgcaaattggaggggagcgttcaagtgatcgttggaacaccgggacgagtcaatgacatgatcccgcccggagcactcaagaatgacaaaataaaaatggttgtgcttgacgaggctgatgaaatgttgtct

SEQ ID NO: 48631 - DNA, 1029 bp, Heterodera glycines
aatgtcatccataagtttgtccgtgacaaatacgaaaaacggttccccgaattggagtctctcgtgccgatgccattggattacattaacacggtgaaactgctcgccaatgacattgacacgaactcgcgaaaggaaatcatccatcaaattctgccggctgcaacttgcattgttgtcagtgttaccgcctccacttcccagggaaagccattggagcaaaatgagctggatgttatcatcgaagcttgttcaatggctgaggaactgtatgatttgcgcatgaaaatgcatcttttcgtcgaattgcgaatggctctcatcgccccaaatctctgccgaattgtcggtgccggcaccgctgccatgctaatttctcaggcgggcggactcgtaccgttggctaaaatgccggcgtgtaatgtgctaatccttggaaaacagaagaggactttggccggcttcagctcctccgtgatccttcccaacaccggcttcatttaccaccacccaatcgtccaaactctgccgcccgaccttcgcagaaaagcggcgcgattggtcgctgcaaaatgcacattggcttcccgagtggattcaattcattcttcgttggacggacgaattggggagcgattgtcggtagaaatcaaagggaaattggaaaaaatgcaagagccaccgccggtcaaaaatgccaagcccctaccaaaaccacttgacaaagccagcaaaaaaaggggtgggaaaagagtgcggaagcagaaggaactgctaaaggcgaccgaactcagaaggaaagcgaaccgaatgaatttcggagagttgcaagaagatgtgatgcaggaccatttgggcttcactttgggacaagcgaacagtcactcacttccctcgggtggaagactgagggcgtcacaagtggacaacaaaacacgagtaaaggtgtcacaaaaattacagcggacaattgaaaagacgcgccaacacggcggaatcacttcgctggccgcgaagagtcacgggtcg

SEQ ID NO: 48632 - DNA, 908 bp, Heterodera glycines
aaaccatcggaacatcgccaatttgcattttcaataaaaatctgtcgtcgacaatgagtgcttatcaaacaattgaaaagggttctcttcatacccttaactatcgcgtattttttaaaaattcggatggaaaattgatttctccttggcatgacattcctctctatgcgtccgagtcaaacaaattgttcaacatggttgtcgagattccgcggtggactaacgctaaaatggagattgccactaaggaagtgatgtctccaattcgtcaagacgagaaaaagggtcttccccgcttcgtcaacaatattttcccgcaccgcggatacatttggaattacggagcgcttcctcaaacgtgggaagacccaggacataaggacgagaacactggcgaaaacggagacaatgatccaattgatgtgattgagattggaagcaaagtgcagaagaggggcgccgtcattcgggtcaaagttttgggagttttggcacttttggacgaaggcgaaacggattggaagttggtagcaatcgacgaaaatgatgagttggctccgaagttgaacggaattgaggatattgaaaagcatttgcctggactgctaagtgccactcacgaatggttccgcatttaaaaaattccaacgggaaaacccgctaacaaattcgccttcaatggccaattcaaagaccggaacttcgcccacaaaataatcgaacaaacgcatcaattttggaaaaagcttgtcacttccgctagtccgcatccattgaacactgactgtcacaaggaagaggctgttttcaaagcgaatctttcggattgggaaagctttatatcgaaacagccaaagtttggtcatgcccagcaggtgccggaacatgtcgacaaatggcactttatt

SEQ ID NO: 48633 - DNA, 1090 bp, Heterodera glycines
gaaatgccggccttccgcctcattctttcgccttttccgtccgtttttgctcgtctctcccattcccatgtcccattgttccgccaatgttctgctgctgcttcgtccaattcgccatctgtcaattttctcagctccaattttgcccttccggctgagtgggacggtcggctcggccatttgagcgtggagcaactcggcggtgacaatttcgaatggatcgtcgcggttcagaaaaagttcaccggggttggtaaggctagtgcgatcgacttggacttggcctgctccgtccccgttggctccgatcacttggccgatttggtcgacctttgctacaaatttcgacatacagactctgcgggagatttgctcccttccactgaatacactctgtgccgtcttttactggaattcggcgaatttggcgttttcatgaatttgcttaatgacccgatcaactacggcatctttcccaatgagcacatttgctgcatgttcctcgaccattttctcggctccgctcagttgcaatatgcggccaaaattgccatttatgtgatgctgcaggaaatgttcgacttccctttgctcacttttctcgccactcgcgcccttctcgagtggacgcaaggggaacgaaaactcgatgagcaaatccatccgaaaatggcaccttctctggaggacgagactaacttcaatgaggagaacgtgcgcctttttcgctacccttttctgaagaaccctttttgggatggacacttcgatgagaatgactccgaccgaatggcaggcaaagccctcgaatggctttcataccatttgaaattggcaaaaaatgacgaaacgaattacgacgagacactgatcagagtgatcagacttttggggttgagcatacagcggaaatggacggaagcgaagtcattggcggaagagatgtttatcacagttgctccatcggacaatgcgcggcaaatgatttattcctccatggaacaaatgcagcaatttttgaattttgacgaacagattgaagcggcggagaagcaaacggaaagagaaaaagacgaccaaaattcggagg

SEQ ID NO: 48634 - DNA, 630 bp, Heterodera glycines
gttcggtgtatcaaagatcagaatgggaatcatgttgtgcaaaagataatcgagcgtgttcagccgcaccagctgcagtttatcatcgacacgatggtcaacggttttacggactcggtcacttccctctccgtccatccgtacggctgtcgtgtcatccaacgtgtgcttgaacactgcacggagggacaaaaacggcctgtgctggaacaactgcatgagaatgtgctcactttggtcaccgatcagtacggcaattacgtgatccaacacgtgattgagcacggactgtttgacgatcgggagcgcattgtgcgcgctttgcatggagacatcctgaaatatgcacagcacaaattcgcctccaatgtcatcgaaaagtgtctcatttgcgggacgacagaccaaaagaatgcgctgatcgacgaagtttgtgcggacaacggttcttccaacccacccctcttggagatgatgaaggaccctttcgccaattacgtcgtgcaaaaaatgctggacgtcgcggactcgacccatcgcaagaagatgatgtttgccatcaaaggacacattccggcactgcgccgtttcaactacgggaagcacattatcacgaagttggagaagtac

SEQ ID NO: 48635 - DNA, 609 bp, Heterodera glycines
ctattggtcttttgttagagcaaccggtgaaaaaacgcaaaattgaagttggggaaagcgatggcaatgagcagcggagtgttgcggtccgtctcttctcggaggacggaaaagagatcggccaggcacccgtcgttcttcttgcttccaccactgctgaacagctccaagtgctttaccaccaattgttgcgcagtgaaaaacagcaaaacggcgaatgcggcgacgacggagactttgacgaagggacggcgcccgtccaatttcggaccgtcgcagacgaaaaaagtggcggaaaagggacggaaattgtcgattctttgctcgactcactgccctcagaacgcctcttcttggaaaagcccctcgagttggtctgtctgccacaggccgtgttccgagttcggcccgtcactcggtgcaccgcttcgttgcccggccatggcgaacccgtcctttccgtacagttcagtcccgacggaagctgtttggccagtggttctggtgaccggacagtgcgtttgtgggatttgcacacgaatctgcccaaacagacgttgaccggtcacaacgattgggtgctgtgcatcggctggtcgccggacggtc

SEQ ID NO: 48636 - DNA, 658 bp, Heterodera glycines
ggaaggtcaggcattcgcctgtccaacgcttcacggatgagatcaccgacgaggagctcaaacaactctgcatggcggccacggacatcttcagaatgcagccgacgctcgtcaggattcagccgccggtcgtcgtcgtgggcgacatccatggacaattcacggacctgcagaggatcttccacacgcacggcaaccctccagagcagcagtacgtcttcctgggcgactacgccgaccgaggcccccagtcactggaaacaattgttcttctcttctgctacaaggtcaaatacccagcgaacttcatgctgctgcgcgggaaccacgagtgcgccaacatcaacagagtgtatggcttcttcgatgaggtcaaccgccgctaccagcgtccgggtccccgccgcctctacgacctcttcaatcagacgttcgcctggatgccctacgtcggcctgatcggcgacaaaatcctgtgtatgcacggcgggcctctccgaccagatcaacagcctggagcaactcagccagctgaatcctcccgcaaatacaaccccccggcttcggacgctggagaaacggatccttttgtggggagaaaccctgccgaacaggaaatatcgatggcaggcatacccccgaacaaccatggagaaag

SEQ ID NO: 48637 - DNA, 677 bp, Heterodera glycines
ccaagtttgagcataattcagtgatgatgtacagcctggggtctttctatggtgctcctcccattgcttacaatcctacaccgctcgccgccgccactcctggcgttggtccaatgcgtccgccagttccaatgagtgtccatggagcatcgcctcaacagatctatcagttcaagccaccgacttttgacccgtacctttgcgatcagtttttcccacgaagcagcacagaggctgaggaaacagctcagacacagttcttattggccaaacacaatgacattctgccttctacggtggaacaatctgctatttcggcattggttggaaaagtgaagcagactttggacaaaatcattgttgctccggaaacatttaactctgtggccattgaggaagtgcgcgaggtcggctcttacaaaaaggggacaatgttggccaagcacaatgtggccgatttggtcattgtgctgaagactttgcctctaatcgaagcggttaatgcacttggccagaaaatagtgcttgatctcaaggcagaaaaccatgccgatatttttggttgtgtaatccgagaatttggctgtgaaattgctggcactcacgcggtggttcgagttctcattaccattttgccacaacttgcgactcaattggacaaagacttgcatttgccc

SEQ ID NO: 48638 - DNA, 477 bp, Heterodera glycines
ttactcaatttaaaagcaaaaacaaatcataatgaaatacgtcgctgcttacatgttggcatcgctgggcggaaatggcgacccatcgcccaaggatttggaaaaaattcttgccgccggcggacttgaggtggacatggacaatgtgaacgccgtcatcaacgcagtgaaaggcaagtccattgacgaggttattacggcgggccaaaagaaattggccaccatgccaaccggtggaggcgctgcggcaccggcagcagctgcagcaacgggcgctgctgcgccggccgggaaggaggagaaggaggaaaagaaaaaggaggaagtgaaggaggagtcggacgacgacatgggcttcggactgttcgactgatcaacggacggacggaatgccaaagtggattgtgccgtcggaaaattctttctgttttttcttgttatcccctgtcaaaaaatcataaaattgtttttgttgaa

SEQ ID NO: 48639 - DNA, 944 bp, Heterodera glycines
gacaaatggttgccgccaatctgaagctttccctgatttttgtggccggcttttgcctgctgttcatcgccgactccgatgccgggaagtcgtgcaaaccgggagaaaagggaccgccaggccctccggggaagccgggaaacaaggggaagcccggcgtgtgcaagcccaaatatgaaacaacttccaagtacggtacgactacttccaagtacgacaccaccacttccaagtacggtacaacaacacccgaatacgatacgacaacatccaaatacgatacaacgacttccaaatacgacacaacaacttccgactacggtacgacaacttccaaatacgatacaaccacttccaagtacgacacgacaacttcaaagtacggtacgactactcaaaagtaccgtggcaaacgctttgcggatgccgtgctcgttcgggctgctcgcgctgagtacgacgccgattgcccggccggtcccccgggagatgccggcattgccggaccgcccggcccccccggcgagccgggcaaatgctatggcagcgggtccaaagagtccaaagaaaaggagtacaaacccagcaagcgcagcattgacaacttcgagcatggcttgcgcgtcgccaggggctacaagcaagaagtcggaccccctggccccgcgggaccgcccggccctcccggaccggacggaccgcccggagaatgcgaatgcaaatactgaggatgatgctgaagatggtccacgatgtgagctcaaccgttttgttcctttgcctgattatccatcgatgtgtgaaactgtagcattagtagtactgtattgtcgatggaataaaaattttattaaagaatatttttcaatgttttttttgcgaaattaatgttaagtctcgaagcgtaaataaagcaaaagctcaaaaaaaaaaaaaaaaaaaaa

SEQ ID NO: 48640 - DNA, 831 bp, Heterodera glycines
gtccaattaagatcaaaggaaatggtcagttttccgccttctcttatgccgtctttccaatgtttttgtgcttcctcttcccgtctcttttgctcatctgcttttgttcgacccgtccgcgtgcgcttcgccccttcccccacgggggaacttcatttgggctccgttcgcactgctttgttcaattttctgtgggcacgtaaatacaacgggaaatttgtgttgcgaatcgaagacaccgacagagagcgattggtggagggatcggagcaaaggattgagcagaccctctcccactttggacttacacccgacgaaagtccgttgcgtggtggccaatttggttcctattaccaatccgaacggttgcctctttaccgggaattggctgatcagttggttgacatcggccattcgtacaagtgcttctgcagtcaagaacgactcgactttttgcgtcgaaaagcgaactccgaacgcattccgttccgttacgatggcatttgtcgccagctttcgacagaagaaacgcgagctcgggaacgaaacgaggaacaatttgttgttcggttcaaatttgacgggagaagggccggatttacggacatcgtattcggcgattatgaacattattcggaggagggcgattttgtgatcctcaaaagggatggatttcccacttatcactttgccaatgtcgtggacgaccgacggatgaaaatcagccatgtaataagaggagcggaatggatatgttcaacaacaaaacacttgcaaatttacagtgccttcggttggtctccgccacactttgcccatttgcctctgatc

SEQ ID NO: 48641 - DNA, 656 bp, Heterodera glycines
cgcattggaaatgatcgaggaccttagaggagctttccaacaaatgcttgtggccaacgattggatggactcggacacgcgcgaatttgcgatggaaaaggcacagcaaatgatcaatttgatcggctttcccgactttctgttcaatgacacgcaattggacgattattacaaaaatttggtgctccacccaaatgaccattacgccgaaatggtggagaaagtgtcggcgtgggcacacaaaaagctattccgacggctaattgaggaggtggaccggtccgaattcggcacttccagcacagtggtcaatgccttttattcgggcgtcaaaatatgcgatcacgtttcccgctgccatccttcaggcgccgttcttcgaccaagccttcccaaaagcagtgaattacggtgggattggagcagtgattggccatgagatcacccacggcttcgatgaccaaggcgcacaattccacggcattggcaacctcaaagattggtgcgaccccaacacgcagcagcactttgtggagcgaaagcggagcatcatcgaccaatattcttcctttgaagtgcccgacataaatttgcacgtcaatggcattttgacgcaaggacgaaaaattgcggacaatgggggccataagcaagct

SEQ ID NO: 48642 - DNA, 801 bp, Heterodera glycines
gtgaaaacggcgtttgcggatgtggcggggtgtgaagaggcgaaaatcgaaatcatggaatttgtcaactttctgaagaaccccgcacaatacaaagcactgggcgcaaaaattcccaagggtgctcttctgactggccctccgggcactggtaaaactcttctcgccaaagcaactgctggcgaagcaaatgtgccatttatcactgtgtccggttccgagtttttggagatgttcgtcggtgttgggcctagccgagttcgggacatgtttgaaatggcgcggaaaaaggcaccatgcattctgttcattgacgaaattgacgctgttggacggaaacggggcggaaagggcgccatgggaggccactccgagcaggagaacacactgaatcaattgctggtcgaaatggacgggttttcaactgatgaatcgaacgttgtggtcatcgctgccacaaaccgcgtggacattctcgaccccgcgttgatgcgtccgggccgatttgatcgacaaatattcatccccgttcccgacatcaaaggccgtgcttccatcttccgcgttcatttgacaccaatcaaaacaaccttggacaaaatcgagctttcccgcaaacttgctgcgcacacgcccggattttccggcgcagacattgccaatgtttgcaatgaatcggcactaattgcggcccgagatgcacacgatgaggtgacttccaaggactttgagaatgccatcgagcgggtcatcgccgggatggagaagaaaagtcaggtcctgcagccggacgagaagaaa

SEQ ID NO: 48643 - DNA, 914 bp, Heterodera glycines
  unsure (1)..(914): unsure at all n locations
aaaactatggccacaattacgctcacttcgcaacattcgcaaattgtccctgaagtaattcgtcagcaatttttggccgccgatttggaagagtccgtccgattgagggaggaggcgaaaaagggacaattcaaaactcaaattgtttggcgaaatgtgcttctctttgtgctgctccatttcggtgcccttgtcggtttgtgccaattaatttcttctgccaaatgggccaccatcggatggtgcattttcctatggttcgccgggggcgttggcattacggcgggggcccaccgcctttggtcgcacaagtcttacaaggctcgtttcccgcttcgtgttctgttggtcgttctgaactgtgtcgccttccaaaacgatgtgatcgaatggtcgcgcgaccaccgatgccaccacaaatggacggacaccgacgctgaccctcacaatatcaaccggggcttcttcttctcccacatgggctggctgttggtcaaaaagcacccgcaagtcaaagccaaagggtccacgttggatttgtccgatttgacttccgaccctttgttggcattccaacgaaaattttacctccctttggtccttctcttctgttttctgttgcccacgctaatccccgttttgttgtggaatgaatcgtcaagcgtcgccttttacaccgccgcagtgtttcgctacactttcacacttcacgcgacttggctgatcaacagtgtggcacacatttttggctaccgtccctacgacgtttcgatcagttccgccgagtccgtgtggacgactcttttggcggttggcgaangcggccacaattaccaccacacattcccccaggactatcggacaagcgaaatgcgaacactgctcaacttcaccaaggcattcatcgatttgtt

SEQ ID NO: 48644 - DNA, 1333 bp, Heterodera glycines
ctattctctgcactattacatctgatttctgctgctcaccgactccatcgacaacgacacgcgatggaagaactcgtggcgctctcccctggaatccgcgtcggccgctggacgatcacaaagaagctgggcgccggagcattcggagccgtctacctgtgcgtgaacgaccaaggagagcaggccgcgctgaagacggagccggtcaacacgccacatccgctgctcgtcatggaggctcacgtgatgaccaagctggacgcccttcgagacggagacgggaagcacttctgccgctgcttggacctcgggcgcgatgagcaaaaggaccaacaatcgggacaaatgaagaagttcaactacatcgtcatgtcactcgtcggtcgtggcctggacggagtcgtcaaggatgccggtggccgcctcagccttggaagcgcagtcggcgtctcgatccagatgctcgccgctctcagaggactccacaccgtcggctacctccaccgcgacatcaagccgggcaactcgaccatcggacgtccggaatcaaacgaaatccgcctgctctacctgatcgacttcggaatggcgcgcaaatacaccagggacgacgggagccaacaccgcccgcgcgctgtcaccaacttccgcggaagcccccgttacgctgcgatcagcgctcatctcggacgcgaatacagccgcaaggacgacatcgaatcgtggttctactgcatgatcgagctcttaaaaggcgcacttccatgggccaacgtgggggaaatgaaagcgataggcgaggcaaagatcaaacgccagaagaaacaaccggaagccgttcgacgccaggcaatcgccgacttgctctccggatgcccgaacgagttcggccaggtcctcaaatacatcgacgacatgaagtacaccgacaagcccgactacgactggatcatcgcgacattgcgcagcagcctcagcaacgccggcgtccaggaattcccctacgactgggagacgggcaagcgcaacgcggcaccgggcgctggaggcggcggaggaggagggggaggagacagctacttcaactgatgagccgtgcagcagcagcagcagcagaagaatcgccaagaagcgtcaccgtgctgaattgatcatatgaccactattactgtattgtatgtattattttgtgtccatgctgccatccccgatatacacatgtattgtattgttgacatatgtattgattgaaattgttgttgcataactgtgtttgtacatatgacttttggcgaaataaaggacattttgtaaaaaaaaaaaaaaaaaaaaa

SEQ ID NO: 48645 - DNA, 1191 bp, Heterodera glycines
gtccaattaagcttttccttcgcttttctcctccgtcccaccaaaatggcctccggtcattacgaagtttggcactcgcaaagcgtcggctttcccattttctatttgccctatgaatacgacgacaagtgggcgttggagaagcgcgtgtggaacccggcccaggccaaatggctccacccggtgttcatccgccattggcacatttccttctttttggtgttcctttatatcgccggcatccattatctcaagtggtggatgcgcgacagaaagccgttcgaactgcgcaactttttggtcttttggaatgccggattggccattttcagcaccttcggggcgttgaggttcagcgaggagtttctctacgttatgaagaacagatcattccaagattcggtgtgcctttccatttcgcccactcagccggccgctctttgggcctttcttttttcgctttccaaagtggccgagtttggggacaccgttctgctggtgctgaggaaacgcccgctcatcttcctccattggttccaccattcggttgtgctgatttacagttggcattccgcgactgaactcaccgcagccggccgttggttcatccaattgaattactcagtccacgccatcatgtacacttactacacattcgccagcctcggaatccgattccccaaatgggtgtcgatgactgtgaccacgctgcagaccacccaaatgcttatcggcgtgttcatctctctgtacgtcgcccgcctgaagcttttctcctcccgtccgacggtgtgccaacagtccgttgaaaatatgtgcatttgcttctccatttacaccgcgttcgccttccttttcatccgcttcttcgtcaattcgtatttactcggcaaaaaaccgacggcagcgaaagccgtggcgaagaaagcgcaatgagtgaagcagcataagcccgggatgctcagaacattccatccgcgcactttcgttgatgggagcagcccaaaagccgggaacacattctatgccccaaatcctccaacttttttaattgttgctggcgggaaaatcatttggcatccctccccttttatttattatatttttatttatgtatagtacagtacacactcaaattatttcctatgctttgataaatttaaagtttctaaaaaaaaaaaaaaaaaaaaa

SEQ ID NO: 48646 - DNA, 716 bp, Heterodera glycines
ctttcttttccttccgccctctttttggccacttcctcccccactttttctgccttctcccccactttcttccgccaatgctctcatcgcccccaaaggaatttgttgcgcctgtgggagaggtgcatgcgtttgtggtcaaatgtatgcaaagtgtcggcacttcggcggcgcacgccgcgcaattggcggaccttttgttggatgccgacatcgtcggccattacagtcatggccttaaccgcctttgcatttacattgaggacgtcgcctcgggcgtaaaaggcgacggtgaaccgaaggtgctcaagcagaagggtgccaccgcttgggtggacgggtgcgatttgcttggcgccgtcgtcggtaatttctgcacagaattggccataaagttggccaaagagcacggcatcggctgggtggtgtgcaagcggtcgaatcattacggcatttgccaacattatgccaaaaagatagcaaatgccggcttgttgggactgtcgttcaccaacacttcgcccatcattttccccactcgctcttcccaaattggccttggcaccaacccaatcagttgttgtgccaattcacgcgaaaaaggcgacggattcattttggacatggcggcgtcgacagttgcgcttgggaagggcgaaatcgcaaaagtgaacggcaaatcggccattccgtccgcttggggcgcagactccgcg

SEQ ID NO: 48647 - DNA, 633 bp, Heterodera glycines
aattaaaaaatttcgggaccaatgatcttcacaattgcccgctgcccctcccttcccctaaaatttaaattagaattgctgcaactgttgtctctgttcactcactattcattctagcaaaggaacaaaatgataaaggccattttggtgttcaataaccatggaaaaccacgactgctgaagttttacacacaatatagcgaagaagaacagcagcaaattgtgcgggagactttccagcaagtgtcgaaacgtgacgacaacgtgtgcaactttttggagggcggaaaattaattggggggtcggactgcaaattgatttacaggcattacgcgacattgtactttgttttttgtgtggacagctccgaaagtgagttgggcattctcgacctgatccaagtgtttgtggagactttggaccgatgttttgaaaatgtgtgcgagttggatttgattttccatgtcgaaaaggtccatcacattttaaacgaattggtaatgggcggcatggtgctggagacgaacatgaacgaaattctgctgaggatccaagagcaggacaaaattgagaggcaagaggctggcatcgccgctgcccccgcccgcgctgtgtccgctgtgaagaacatg

SEQ ID NO: 48648 - DNA, 1330 bp, Heterodera glycines
tacgtggagaccgccgatcggttggtggaaattgcgcggaacgaattgccaaatgcgaggttacccgccttccaagtggcacaagcggtcgatgtgctcacgttgggctcctacccgcggctgccacaaaatatcaaagaccgttttattccgccacttccgttgggtgcggccgaacggcgcctgacattgcgccaactgaataagttgattgaattccatttggcacaacaagcggcgcaactgtctccacgaattcgacacattactgtacaaaacggaatggcatgtctggtggtccccggagaatttgaaatggagctgactcggctgggcgatgagccgaccacccggtggacccttctgaacatccgaattctcgtggaaagtgccgaagtcggagagggacagcaaatggtccatccgctgcaaatcaatttcctccatcaaatggtgcaggaaaaactcgacacagcaaacgaacccattatggcggcttacattgttttgcattggttctgtcgctctctccatttggacattcttttatgtcaggctctccaaattgcgaaaataaaccgaagcggcaaagggagtgagggctcctcgcagcaatacatccgagtggacgagtacaatgagaaggagtgccgtttggcgatcagttattggctgaggagagagggcggcaccattcacggaaggctgtcgtctcattaccgaatgctcatttttggagacaaaaacaattcccatgtcggactgaaaattcgtcaccatccgcccagcacggaattgcccacaattgaccatgaacagagtccctccctccaacgattgctcaacgaaactgtccttttccggtgccgagaacgtctcctggcgggcaaacaactgcttgaagcagcttttagaactctctcctcccaatccaacacaaaatgtccgtcgtccgcctcgccttcgtccaccaattcggaggacacagcccaacagtttgtccaccaatctggtcactctctgctcacattgagctgtcccctcgtgctaatcggcgactgccatcccgacgaatgtctcaccgtggcagtgaacactttcagcggtgcggtcattgcccgggtggaagtgctcggtcaacgagaggagatccacaagttggagcatcagctgaacacgtgcccaactgtgctcctccactcctccgcctcgtctctgtcggccttttctgtcagttcgattggccgtctgctggcacggctccgcgttctcgtcattggcgaaagactgaacagggcgttggtcggaatgcaggtgaattcgttgaatg

SEQ ID NO: 48649 - DNA, 745 bp, Heterodera glycines
cattggcattacgtgccacgctgggtgaagttgaggcggcatcactcaaattgggagaaccggacatgccaatgaatgagattgaccgtgccgtggaagtacgtcttgagcgagtgcaggaggtcaaaaagtcgatgctcaaggaagccggactggaaacagacattgaacccgcaaatgacggcgtttttcagggcgatttgctgttgaccaccgaacaatgtgacgagctgatcaaccaactgcaaaatgacaccacagccgaaggcaccgcggttgtgtcattggaagcgcaatcgttgctggacagtgagacggacaccgaagttggctccaattcgccatcattagccacttacaatgcgacccattcaattttgccggatgccgaaattgaggggaccgcttcagctgttgccgctttggcaccgcacctacgggcaaaacgggcgggcaacgcactgttctttgaacttatacccatcgaaaaatggccatatgacaagccaattgcctttttcttggacaaagcattgcgtaacgatgaaagaaagcaagtgcgcttcgcgttgaaacaaattcaaagcaattcgtgcattaaattcaaagaatatgcagcaaaacccacccacacaacacatcttcattatctgaaggaaacaagcttgggagcttgtggcttcagcgaaattggcatggttaagccattcaatcgcataatgttgagctttcgatgtcccagcca

SEQ ID NO: 48650 - DNA, 640 bp, Heterodera glycines
ttagattagagtgggttgagtgatatgcatatttacaaagatccttatgctcctccgttggctccaaaagtgcctgatgatccaccgccatggtttccttcgtggaaagaatacaaacggcgaaccgaatggtgggcttctcttggatacaaagaccttgacctgaagcgtggcttgacaactggtttttatcctttttttgaggaaagggacattcgttatgttgattcgaaagtgcctgatggaacttcgatggtcgggccgcaagggaaggacagtcgctaccaccaaagaaaaatggtcaaatggggaattcccggaaagtttgaagacttccagaagcagatcagggagaactgttcgcaatacaaacaaatcgctgaaaaatgggacctcagggacgagcacccgggcattgcggtcaacccttcgctcgactcgatcattcgccaaaaataccgtccaattggcacggtgttccctctatttcctaaaatattggcttggccgcgtttttgggataaaccaatgaatgagggctgtttcaaaaagggacttgcactggccaaatattcgctgccgatcacttggattgcttatgcaggagcacttcgtggatatgatccgccagccaccaatg

SEQ ID NO: 48651 - DNA, 1062 bp, Heterodera glycines
cacaatcattcatccacaggcaataataataatataatgcctttttgtccgatggcatcgcagcggacgcactgcgccctctttcagcagcgacatttggccacaaaatacgtccgatttccgctagttcctcccgacaacaaaaatagcgtgcaaactctgcagcagctgatcgcctcgcaaaaggacccaaatgcctttgtttttggcacaaatatggcgggccgagtgggccaatggctgacgaagcgttcctttgagaaaacggtggacaccgaactgcgcattctgctgttgaagtcggccaaccaaatgtacctttgctgtgccaacaaatacccattcattccgttgttgaacgaatttggccttcccgaccattactcaagctggtacaggctgacactgttgcatatttggatggcattgtgccgtgtccaacagtcgctggaggcaatggcctacatttacttcatgcaccaagtgttggaggtgttcaacacggactggtacactcgcttggacaaagcagcgaaagaaatgggcatgtcggtgaacaagcgcaaggagggcatggcattgcacgccatttacatcagcacgttgcacgactatgacgagggatttttcggagatgaccgcgtgttggccgccgccgtgtggcgctcatttttccttcagctgccggacgtgtgcccggcacaaatcaaccgggtgggccgttacatgagggcaacgatggcctcgctggcacggatggacgacacgcgcctgttgaccgacggcattgagcgctgggatgtggcggaagagttggcacgtctggtgagcgcggaacagtttggcaccattccggcagcgccgccttcatcctcgatggatggtgatggccgcaactcggcacaaccggcgccaaaagtggcggcatcaaattaattcattacttttaataagcagacccatttaaaaaaaacattgtttattagttgttttgtttttgtgaatttcaattgtgccgattaaacttgtaaataattaaaaaaaaaaaaaaaaaaaaaaaaa

SEQ ID NO: 48652 - DNA, 877 bp, Heterodera glycines
gtttgaggttattatgatattaaaattgaaagttccaattctgctgtattgttttgttcaatgtttaagtgctgtcaaagtggacaatgccgagcaatccgaccaaccaactggcgattcttcctccggacaattcccaatttcgtatcctccaataaaatatgaaaacgatttggcctatgtggagaaaccgagtggcaacgagcgttgtctattctacgcggaaggactttctgtcgtcgtttttgccactaaaaaaagtcaatcggcgtgggcggactatcgctctgacaccaaagaaagtccgaagtataccgcgtcaattgaatgccaaggcaatatgaatgtgggcagcagctttgatgtctatttgaaaattgacggcaaagcggaaggagttgtgagagctgacattggaaaaaaggacgcaaaaagtgtcttcactgttgaaggagccgaatttatactcaacttcaacgtcacacaagtcggcttttggcaattggttggtgccaccgtggaaagaattgaagtgaaaggctcttcggatttcctgaacaaaaatttgaatgtcgacaaaaaatggactttggagccttcagttgttccatccacaaacattaacggcttcaaagactacagctttgcttgtggtcagaccaacccgatagtgtgggccctaaaggactcaaatgattacgcagtcggaattacgctgaacaatgtgcagttccaaccattcaatgcaacttacactgccggtggaaaagaagctgaccgtttaaaatttgggtggaaagtcaacgattgccaggggctggtcagcattggcacttggatgggcttggtagttgccactctgctcatcggcgtgctc

SEQ ID NO: 48653 - DNA, 1032 bp, Heterodera glycines
acaacccatacccaaaaactctttaatgagccgggtggcaaagatgtttatgaaggcgtaaaaatcgactacagcggaaccgaggttaaccctgaaaatttcgaagcggtccttttgggcgatgagcagcgatcggagggaaagccggtgctgaaaagcactgaaaaggacaaagtgttcgtgtacttctcggaccatggcgcggtcggagttatcggattcccagcagccgacttaacggttaaacaattgactcaaacactgaaggaaatgcatgccaaaaaaatgtacggcgaattgacattttatctcgaagcatgcgaatcgggctcaatgtttgaccacacattggcgcagagtttgaaaatttacgcagtcaccgcggccaatggcgacgaatcgagctggggctgtttttgcgacaccaaatttttgcccggaaattgtttgggcgatcttttttcagtgaattggatgcaagactcggaccaggaaaatttacgcaccgaaactctgcggaaacaatttggcattgtgcgcgaagaaacgaacaaaagccacgtgatgcactacggcgacttgcaaattcaggacgaacacgtttctgagtttatgggcaaagagcaggcgcaaaagcgcaacgaacgcccaccatcaccgcacaaatttccaatgtttccttctcgagacattcccatgttcatgatggcacgacgtcagaatgagtctaagcagattcagcgaaatctccgcgtggcgtggaaaaaaagaagctttctcgagcaatcgattaaacaaattgtgcaccaacttgtgcacgacatgaacaaccggcgacagatgttgacgacttatccgcaacaaattcgcgacttggactgtcaccatgaggtgatgcacacgttcagcaatctctgcttcagatttagcgagaatccgtacgcactgaaatatgcctatgttttggccaatttatgcgagcgacccgagttggacgccgaacgtatcagaatggcactgattgaacactgt

SEQ ID NO: 48654 - DNA, 713 bp, Heterodera glycines
tggtcaatccttgattttgcatgtttactgattgaaataaaaagttcaaaaaatgcaatcatatcattacatttatcgtttgagctaatacaaattccctttgcctaactatgcctcttcattggacttctgtggacactcgcaacgcacttttgtgcgccgccgttccttccattggcgccttcgtgggctcgacgatggccatcaaagatcaggaattggttcaatttctcaagaatcaaaactttccttctttcgcccgttgttgcaaatacaattatttgctggccaacactgccgtcaccattccgttcggttacgcttcttatttggtctacaaaattggaggaggttttgattacacggacacgactgttgcattgggactgtacggggcgacggtgctcagcggctgttttttggtgcccatgctcaagaagcaggatactaaggcgctgactgccaacgctgttgtccttgccggactttccgtcgccacttctgtggctttctacaacatcgacaagatttccgcttattggaccatgcccttcactctttgggccattttctgcgctggacttacggtgaaggcttgaaatgtttgaagtcggctgcctttttctggattgtcattttatgttaactcatcttttgttgagttaggaatattttacttccaagtaaattgtctcgacaaaaaaaaaaaaaaa

SEQ ID NO: 48655 - DNA, 691 bp, Heterodera glycines
atatttatataataattatctcgattactgaaacgatacactgataaatttccatacataattaagcttttagttcgtaaaatgctccgttatgtctgcctttttccaaggaggtcgtttcatttcagcacatttttgcccaaggattactacaaaatattgggcctatccaagacggccaaggagtcggatatcaaaaaagcatattacgagatggcaaaaaaataccaccctgacgtcaacaaagcgaagggcgccagtgaaaaattccaggaactctctgaagcgtatgaggttcttggggacccgaaacgacgcgctgaatatgaccgttttggggccggcggtccgcagcccggcgcggcctctggcagccccggaggcccacaaagtgcccgcgactttggctgggagttccactcgggcaaatcggcggagcaagtgttccgtgacattttccgcgacttcgacccgttcggcaatgccggcgcgtttggctccggccgccgttcctttggcgaaacgcagcacggttttgacgcagcacaggaagtggtggtcaacgtcaccttcgaggaggcagcacgcggtgttcgcaaggaagtgcgcatcaacgttgtggattcctgttggaaatgcaacggcagcggtgttcagccagggtttaagaaggtgtcttgtccgtactgca

SEQ ID NO: 48656 - DNA, 862 bp, Heterodera glycines
ttggcgcgcgaccgaaagtatcgcattccggtggcgcttaagattctcttcaaatctcagctggtcaaagggaatgtggagcaccaattggtccgtgagatagaaattcatgcccacctcagacacccgaacattttgcggatgttcaactattttcacgacgataagaaagtgtacctcatattggagtacgctcttcatggcgaattgttcaaagttttgcaaaaaagtcgtcggttctctgagtcaacttctgcccagtacatctttcaagtgtccgatgcgctcaattattgtcactcaaaaaaggtcatccatcgtgacatcaaacccgagaatattttgctttgtgccgatggtaaaattcggattgccgactttggttgggctgtccacgccaaaaataggcgtcagacaatgtgcggcacacttgattacttgccacctgaaatggtcttgaaacgacaacacgatgaaaaggtcgattattggtcagtgggcgttttatgctacgaatttttggtgggaaggccgccattcgaaactaaaactcaggaggagacgtacacacgcattatgaaggtgcaatactcattcccgagctttatgagtccggacgcgcgagatttaatttcgaagttgctggtcaaagagccgtcccgccgcttgagtttcgagcacgtgctgaaacaccattggatcatcgcccattgcaataagaacaacgacgccgactcgtccaccgcgtccagcgaatgttggtgattggagaagcgaacaaatgggggacagcactcactgcctttgattttatttccttatttctatccgatctcttttgtgaataaatggctgtaagcaa

SEQ ID NO: 48657 - DNA, 636 bp, Heterodera glycines
atcgaattcaacaccctttcaatttggctatcatgcaaatcttcgtcaaaactctcaccgggaagaccatcacccttgaggtcgaggcgagcgacaccatcgagaacgtgaaagcgaagatccaggacaaggagggcatcccgccggaccagcagcgccttatcttcgctgggaaacagctcgaggacggacggaccttggccgactacaacatccagaaggagtcgacgcttcatctcgtcttgcgccttcgtggagggatgcagatcttcgtcaagacgctcaccgggaagaccatcacccttgaggtcgaggcgagcgacaccatcgagaacgtgaaagcgaagatccaggacaaggagggcattccgccagaccagcagcgccttatcttcgctgggaaacagctcgaggacggacgcaccctggccgactacaacatccagaaggaatcgacacttcatctcgtcctgcgccttcgtggtggaaagaactagaacgacgaacggaggagatgattgatccgtatcgatccatatattatgtaacttgagaccgtcctgtattgtgttccgttttattcatcatcatgaaatgtatttcaatgatcacggaacgataaacccatcaaaactc

SEQ ID NO: 48658 - DNA, 765 bp, Heterodera glycines
tttggcctccgacgaaacggcctatctgattgcggacacctattaccgaacacacaaatatttgtccgccctctccctgtccattccctgtgtcagttacaaatggatccaacagtgtgtggccgagaaacaattgaccgaccatcggccctttttgttgccagctggcgagtcttcattggataccaagcaacaattcgaatggagaccactaaagggcgtgctgatgaagggaaagcgtgtgctgatttggtcgagctccgccgagacggaccctggcattgtcagttttgccgaaatttggacaccgatcctgcaaaatttgggcgcaacattagtcggcattggtcctggtgaaccatttgcctccaaatcgagcgctaaccttgaggaaaagatggaattctgttccaaaattgagcctcccgttgatgtgctgctggcggagacggactgccaggccgaggtggccaagctggtcgaggaacggggcggtttggccgtgtccagcgaatgggtcattcaggccatcgtcactggttcgctgcccgacctgggcgagcccggaggcgagaagttccgctacgattttgtttagtgttggctgaatgaacatccacagttttggtggtgaatgacggcggcaatggactttgactctacttgaacacacctaacaatatcataaaccattcgcttttttggaacgacacccggaaacttttctctttttgttgcagaattatctgccctatttaattatta

SEQ ID NO: 48659 - DNA, 684 bp, Heterodera glycines
tgagcattaagtgaagtaaaaaacaatgattgtcaatggttcgttgaaaatttgccggacagcgctcggtccgtttgttcgtcgggcatcggcttccgcgctgggtcttccgcttgaggacggtccgtccgtttctccaccttcggtggaccgcgcgaaggacatttcgccgcgcgtccgttcgctcgtcgaccaaattgccgaactttcattggtcgaagtctccgatttgaattttgctctgaaaaagcgtctgaacattcccgacactcccgcgatggcaatgagtccggaaatgtttgcagctgccggaatgtttggagcacaagcgggcggagcagcgggagcacaaacatcacaagccaacgcggacgacgattcggcgtccacaaagacttcgtacgcggtcagattggccaaatttgacgatgctaaaaaaatcgcactgatcaaagaggtgcgaagtgtgatccccggcatgaatttggtacagaccaaaaaactgatcgaatcggcgccggtggaaatcaaaggggacatgggcaaaacggaggcggacgaactgaaggcgttgttggagaagcacggggcggaatgcgaagtgatctgatgaacatttgaggggcgaagggacatttttgtttctgtttggactattattttctatatttgttcttttagtcg

SEQ ID NO: 48660 - DNA, 994 bp, Heterodera glycines
gtttccattcagtacagactcggcataatcggattttcatcgacgggcgataagcaaatggcaggaaacttcggcctttgggaccaattcgccgcgttggaattcgtttcggaaaacattgcgcaatttggaggaaaccctgcggacattaccctttttggcgaaagtgccggcgccgcgagcgtttctttcctcggactttccccgcacagccaaggtcttttccaaaagtgcgtccaattaagcggctcgcctttgtccgcgtgggcactaaatggacgcgtaattaacgaaactgcccaattagcagcagcgattaattgcgctgagaatggacgggaaggaatcaaagaatgccttaaggggaaaacggtggacgaattgttcgaaggggtcgaaaaagtgggcaaaacgcgccaggaatacgacttcaccaaatggggcccccttttggacggcgactttctgccggcggacattccgcaactgatcgaaagagcaccgccgaagcccacagtgatgggaattgccgatttagagacacttttatggacattggccatcggtcacaacgacagcatttcactttatgcaattccatgggacgaaatggccaattttgacagacgacgctttgaaatgtttgtccaaaactttgtgactaaacgcgaattatttggccagcaaatggcgacggaattgcaacgagaaattgtgcaattttacacaagagacaaagcggtggagagaattgaaaatgagggcgaatattatgtgaggaaaatcactttgcttttgtctgacctccaattcgccgtgccggtcatttgggaggcggcgcaaaaggcgcagaaggggtggccgatttacttcttcaaaaacagttacttcaacgaagtggtcttcccaaaagtggtcaaagtcagacaaaatttccacgccaacgattttatttattttttcgaccgaaaagtgtatcgttttgaattcaatg

SEQ ID NO: 48661 - DNA, 786 bp, Heterodera glycines
ccaattaagacttattagatatttgcttccgtattccctctttgttgtcctgtccattcattttccatgctgctcaacaatcggtctcaattgccgttgagtgtttacggcggtggcattggcagcggagtttcggcactttccgccggtgccaaagaccattccgccaccgcttcttccgcgtccgttcgtcggcccccggtcagccaatatcagagcacggagtgcgtgctgttcggcagcattttcaacgatcagaaagaccaactgatccaacggctgaagggtctgtgcgacccggacggaccgacgcccttttttgagcacaacatggtgttcaagctgaagacgggcattgagtcgcctgtccaagtgcaaatgcgccgtcgtttcaaagtggacactgtgcattggcactgccgttacgtgtcccaacccgaggcacacattaaggacgtggtcgtgcgcaaggtcatcgactcgttgattcactccaccgacatgatgagctttgtcaaatcgttggggctgaggatggaatacgaatacattgccaacggtttcctgttcaccaagggtgacatccgcattctgctctaccaactccaatgctcggagaccatcggcaactacaacaagttgaagcagttcggcgactcctttctggtggaggcctccgttctgttgccgggccatgggctcgagcacttgcaacaggcggccaaatcggtgaaggaatttgcggaccaactgcacccgttgtgcaagctgagctacgtggactat

SEQ ID NO: 48662 - DNA, 629 bp, Heterodera glycines
gtttgagattgattgactgattgatgcatgccaatttgccagctgctgtaattgattgtggcaccgggtacacaaagcttggctatgcaggaaattcggagccacagtttatcattccgtcggctatcgctgtcaaagatgcgaatattttgaaaagtgtcggcggaaaaatcccggacttggactttttcatcggtgacgaggcgttgtctccttcggctgcgaattattttgttaagtatccaattcgacatggaattgtcgacgattgggacctaatggaacgtttttgggagcattgcattttcaaatatttgcgagccgagcccgaagaccattactttctgttgacagaaccaccgctgaacacgccggagaaccgcgaattcactgccgagataatgttcgagtcgttcaatgtgcccggcctttacatcgctgtccaggctctgctcgccttggccgcttcttggcaaacccgcgagttcaaccaccgttctctgactggccttgtggtggacagtggagacggcgtcacccattgcatcccggtgtgtgatggctatgtcatcggttcttgcattaagcacattcccatcgccggacgcgacattacgtactttttgcag

SEQ ID NO: 48663 - DNA, 635 bp, Heterodera glycines
ctaattcgtcgcttggccgtgcttacacgcccgggggaggaggtattgaaggagtggtcgagagtttgaacggtgccaaccacaacaacggaggaacgtccggacaatcggccgcacggcacgctgaccattcaggcattggccagccgtgctccagccacgtgcgcgaactgcccacgctgaacacccatttgacttctcccgcagcagccgtcgctctcggcctcatttatctgcgaacgggcgattgttggatcagagaaacgctggcaattgctgacacattttacgagattgaccaaattcgtcctgacatgctaatgattcgcactttttcgcgttgccttgtcgatttcgaagacattaaatgcacgagagaatgggtcgatgcccaaattccgcagataattcgtaaatatgtcaaacgctttttggaagtcaagtccaaggaggacatgtggtggtccgatttcattgacatggccacagttgcaaaagcttatttctattgttttgctggtgcttctttcgcaatggctttacgttttgcctcaaaatgggaaattaaagcacttcaagtcattcaaagtttttacgaaattctcaaaactgacacgagtgaacttgccacgtca

SEQ ID NO: 48664 - DNA, 645 bp, Heterodera glycines
agaacacagtaaaaattacaaatgattcaaaccggcggtgctccactgataattatcaatcggtcggccgaacgtgaacaaggccaccgggtccaaaagcagaacattgctgcggctaagatggttgccgacgtgattcgcacaagtttgggaccgcgggcgatgctcaaaatgctgatggacccgatgggcggcattgtgttgaccaacgacggcaatgccatccttcgcgaaatcaccgtcaaacacccggccgcaaagacaatgattgaaattgcccgcacccaagacgaggagaccggggacggcaccacctcggtgatcatcttggccggtgaatttttggcacaggcggaacagtttttggagcagagcattcacccgaccgtgatcatccatggctatcgcatggctctcgaggatatcattgagtggacagaggagaaattcagcaaaccagtcgatttggcctccgagtcggaactgaccaccgtggtgaagtcatgtttgggcaccaaaatgttggccaagtacatggacctggcggtgaacatcgccctctccgcggtgcgcaccatcgacgtgaccaacaacgactttcgtgagatcgacatcaagcggtattgccgaattgagaaaatcccc

SEQ ID NO: 48665 - DNA, 652 bp, Heterodera glycines
ggaaggcgaccgccgcccgatcggtttcgactggtctatctgatcgtgcttctccatggaatgggcatgttgctgccgtggaacactttcattacgatcgcaggggattattatttgcaattcaaattcgctaatgtgagcaatgaagacaattacaaagtgtacttcttcaattatctgacggtttgtgcccaaattcccaatttgctgctaacttttctgaatttatttggcgtcataagaggcggcttttaccgtcgcatttacttcactttggccgtcatttttggcatatgtctcgtcacaattgcgatgggactttcggctttttcctcttcacaatgctttccgttgtgcttctgaatagcgccagtggtgtttatcaaaacagtatttggggattgttcgctgattttcccggggaattcgccggtgccattattattggcaacaatttgtgcgggattctgatggcagtgctagacatcctcatcattgtgttaggtttgcgattcgtccacttcgcttttgttcggttcgcttttagtcggtgccaatgccgcactcgccgcaacagtttacttcggtctcgctctgtttaccgtcgtcctttgcattttttctttccattttcttcaaaaattggttctat

SEQ ID NO: 48666 - DNA, 788 bp, Heterodera glycines
ctcaaacaaaaatattcacaaatgacatcttcggacgaagaatttaaaaaagaatgcacttttgcctcacttccgcgcactgtgcgtggaatgcctttggttgtttcgtcgaattcggatggaaccaaattcctttactgcaatggaaatagcgtgttcatcagagacgaggaaaatattgccgattgtgatgtgtatacggagcacgcgactttgacaaccgtggcaaaatattccccctctgagttttacattgccagtggagaccaatcgggcaaaatccgtttttgggacaccacacaatcaacgcatattctgaagtcggagttcgctcttctttcgggcgcaattcgcgacatttcgtggtctgaggacagcaaaagagtcgcaatagtcggcgaaggccatgaaaggtttggccatgtcttcctctttgacacgggtacgagcaacggcaatttgtcgggacaaagtcggccgatgaatagcattgattttcgtccgacacggccttatcgtttggtcagtggttcggaggataacactgtcgccattttcgaaggccctcctttcaaattcaaatcgatttttcatgaacattcgcgttttgtccaatcagtgcgttacaacaaagacgggctccctttttgcggcaggcggaatggatgggaaggtcattcttttcgaaggtcaagagggagggaaagttggcgaattggtggacgaaacgtgcaaaggcacagccgcgcatagcggcggagtgttcgcgttgaattggcattcgggtg

SEQ ID NO: 48667 - DNA, 894 bp, Heterodera glycines
tccatacatctcaaactcaaaaattttcttcgtttttctactgcttctcgtcaatataattgcttatgagctcaatccatacaatactttgggaattcgtcggacagccagtcaaaaagacattaaagatgcttataagaaattagccttgcaatggcatccagacaaaaacaagaatcccgagtccaatcagcggtttatggatgtcaatcaagcttataaaattttgtcgaaccctcagagaagaaaggcttatgatactttcggcttcacagatgagcaatttgaaggcatgcgaaaggaattctttcgcgaacaacagcagcatcagtttcagtttgtcagatggccccaacctccaaggaaaaaacaaacggatatttctcaatttttgttgccattcggaagtgtgcttggaacactatttttcattttcgtcgttgggtacttccttaaccatatgaatgtttcggagcaatcgaagagacggagacagccacaaaaccgcgcagaagaagctaataaaatgggaggaggagacacgaaaacagaggacaatgaaaaagagcttgctgaggaccaaaaggcaccattgactgaggaggagcggcagcagaagttgcaagcgcgggtttggcgagtgatgggtccgatgattcgggaattgcgagctgaaactcagttcgggctgatacggctgctgaagccgggctgtcgttcgatcatcgtcctcgtggacaaggacagtaaggacaaactgctccagcagtttgcccgtcacctgtactgcttgagaaacaacaagactttctcattcggtttcctaatggtgccgaagaatctcagctggttccgttctttgctcgagctgactcttccagacgaacagcaaaa

SEQ ID NO: 48668 - DNA, 854 bp, Heterodera glycines
gtttgagcttcaataacctttcaattggaagccatttgtctgcttacctgttaaatggcttccatcgcatgtttgaacccaaaagcggagttggcccggcacgcggccgcactggagatgaacatcagcggtgctaaagggttgcaggaagtgatgaagaccaacctcgggccgaagggcacgctgaaaatgcttgtctccggttcgggtgaccttaaagtgactaaggacggcaatgttttactccatgaaatgcaaatccaacatccgactgcttcactgatcgccaaggcgtgcaccgcgcaaaacgacgtcaccggcgacgggaccacgtcgaccgttctgctgattggcgaactgctcaaacaggccgagaattacgtcagcgagggtgtccacccccatttggtcaccgagggtttccaattggcccatgaccatttgctccaactgttggccgcctccaaaaagacgttgcctatcgaccggccgctgctcatcgaagtggccaggacgacgttgcgcacaaaattggaccaaaagttggccgaccacgtcacggaatgtgttgtggacgccgttttggcaattcgtcgggatgaaaacgacacggagcccgacttgcatatgattgaaattcagcaaatggaacacgagatggagacggacacgcagctgatccgtggcctcgtgcttgaccacggcggccgacacccggacatgccgaagagtgtgcgaaacgtgcacattttgacatgcaatgtttcgatggagtttgacaaaactgaggtcaactcaggcctcttctacgagactgcggctgagcgtgaacgtttgctgcaagcggagcgtga

SEQ ID NO: 48669 - DNA, 1056 bp, Heterodera glycines
gatttttccccacatttaaggcagatgctgaacatcccactgatgctgctgttgtggacaacttcgagacgcgcgctcgccgcttcttcgacctgatcaacgacggcaacatccaacacttgtgacagatcgcaaacggaaattggtagagagacgaaaatttgaaaaattccataattttacccatcatttttctcccacagccgcatttgccatcggacaacgaacttcttcttctgctgctgcttccccggttcaattacatcacagaaagcaagcaaaggacacgcaccaacaacctgcgcaccctctgtcagtgcatggcacccgcattttgttgtgtttgagtctctgaatcgcatccctttcccctctttcagcactgatgatggcaccggcaacttcttcctgagcgcatatgccatgtcagcgcaaaaaatcgccagcgattcggagtggaagaaaacggtgggtttttgggggatttggccggaaattttttatttttaaaattaattcatttatttttcagcccctcggacaaactggcctcttcaatatgggaaatacgtgcttcatgaacgccactcttcagccactgttccatacgcccggattttctcaactgttccaagaaaagagcgcgcagcgattcgtcaatgggaacaactcgtttggcacgaatgggatgatctccggctcattctctgcgctcatcgacctgatctggtctggcaagttcaacgcacttcggcccaccaccttcctggaattcttcgctcgccgtgtcaacaccgaaatggccgaccgacggcagcacgacgcccaagaatttcaactctatctgctggacgcgcttcacgaggacaccaaccgggtcaacaagcgacaatcgtttgaacagaactacgacgacaccgatttgggcgccagcgcttcggatttcaatgagaggtcgaaactgttctcttcgtcgccggtcaacgatctgttcaacctgacaaacatctctatggtccaatgcagcacgtgcaatacgacgagtgttcgcttcga

SEQ ID NO: 48670 - DNA, 756 bp, Heterodera glycines
  unsure (1)..(756): unsure at all n locations
gtttgagaaaatcatattaaactaaaaatgggacgtcgtcccgctcgttgctatcgctacattaagaacaagccttatcccaagtctcgcttttgtcgcggtgtccctgacccgaagattcgcatttttgacttgggtaggaaacgcgcaactgttgacgagtttccatgctgtgtgcacatgatatcgaatgaaagggaacatttgtcgtctgaggctctcgaagctgctcgaatttgtgcgaacaaatacatggtgaagaattgcgggaaggacggctttcacatgcgcgtccgaatccacccgttccatgtgattcgcatcaacaaaatgttgtcctgcgctggtgctgaccgtcttcagacgggaatgcgcggcgcctttgggaaaccccaagggttggtggcgcgtgtcggcatcggtgatatgctgatgtcggttcgtgtccgtgaccagcatcaagcccacgctcttgaagcattccgtcgagcaaagttcaaattccccggccgtcaatacatcgtcatttcgcgcaaatggggcttcaccccttttgaccgcgaagtttacgagaagcaccgcaaggaagggcgagtcattccggacggagtcaactgccgattcctcaagcaacacggaccattgacggaatggctcaaaaatccaatctgatcaattgtacgacggatatattcccttttatatgctttgttgattaaattgttggatctnnnanaaaaaaaaaaaaaaaaaaaa

SEQ ID NO: 48671 - DNA, 1549 bp, Heterodera glycines
ccaagtttgagcagagccgggcccaaacacattctctcccgtgagcagcaatcagcaaaagctgaacacactccttcgaactcactgattatttgatccatctctgagagcaacttctgatcagccaaagatgccggaaagcgaaaacgacttcgatgaggaggcgcccaacgccaccatggagaccaaagtggcgggcggcggcgcggcgccgaagcgcgtcgggcgctggacgttgtcacagctgcgccagacggacggcatcatcccgtcccaggccggttggaacaagggagactcgcagaagttgatgaccaactttggtacgccgcgtaacaccaccaccaaagtcaaagtggagaatctggccgagattccggaggacattttgctgaaaagccacggggaggtgcgtctgcagtccggtaccaaccggttcgcctcccagaagggctttgtttcgttcggtaccggacgtgatgtgtgtcgtgaaggtgtgaatgtgaacatcctgccggccgacttggagccgctgccggaggagaaaatccgcgccagtgacggcattgtgcgtctgcaagccggtacgaacaaattcgactcgcagaagggcatgaccctgttcggtaccggacgtcgtgagaccaccagaatgaaggacagcaagcacccggagtactcgcacgagcgcgacattgacaacacggagattccgcttcagatgggtacgaacaaattcgcctcgcagaagggcatgactggcttcggcacaaaccgtcgtgagaccaccaaaatgttggacacctcgcacccggagtacagccacgagcagagcatcgaccagaccagcatcccctaccaaatgggatcgaacaaatacgcgtcgcagaagggcatgaccggctttggacagccacgttgggaggtgcttgacccgtccatttcgtaccagaaccgcaagtcgcaaggcatggttcgtctccaatccggcaccaaccgattcgcctcccaggcgggcatgaccggctttggcacgccgaggaacaacacctacgaggcggaggcgggcgagctgccttacgaggatatgaagaagtcggaggcgatcatcccgtcccaggccggatggaacaagggcgactcgcagaagctgatgaccaactttggcacaccgcgtgacgtgaagggcaaacatttgaagcgcatttgggaattggagtacccggaggaagccgaagtgtcgctggaccgtctctgatcagcgacacggattgaattgtgctgctgatcagcacatgaatacacacggaggaaggaggagtaggacaaatgccatcgtcctcatcaagttggagcagtacacacccaccacaccgtcatcctttgccgtccggagagtgatcgatccattgtttgatagattgattgatcagaaaacatccatccatcctccgatcacagcccctggcattttttgctgcttaaaactttgtggttttaaatacatttagtgcctgcggcaacactttttttcaaatttttgcctaat

SEQ ID NO: 48672 - DNA, 1410 bp, Heterodera glycines
gagccatggatggatggattaacaacttcaccagcagatgaacgcgttggaattcaaaaaatgaatcactctgttatttcctcgtgtttcacaataaattctgtgtgtgtctacgcttttttctactgttttttcaactattttggttttggagtgtaccgatacatacgaatcaatttttgtacattttttaatatttttttttgcaaattttaatcgctgtttattgactcttttttttggcaaatttactggcaaatcaacaaaaaattaggcaatcgaccgctaccatgacgacgacagaaacgccgacggcaccgcgcttggaccacaccacgggctggacctgtttggcgtgcaaattggtgttctccagcgggcaattgcagcgggaccattaccgcagtgaatggcacctgtacaacatgaagcggcagattgccaacctcccgcccgtgacggaatgtgacttcctggagaagcttcagtattttttgcaacaccagcagaagaatgctttcgatgctgaccatcgtcgtctgtcctccctctctgtttctgctgctgcttcatctcttcccctcggtgcctctgctgttgcttcttctcttcccccattgtcttcctccaagttgtcgtcttcttctccgtcttctttggtttgcactgtgtgccgcaacaaacgctttcggtcgcgcaacgcctttgacaaccatttgcagtcgcgtcggcacaaagaggaagaacaactgcaacagcagcagaagacgacagcgacaattgaggctaatgagtgccaaacggaggggcgagaaaatggcggcatggaagcaaaattgccaaagattgtggcacaaaacattgatggtgaagaagaagcggttttgccaatcgaaagtgataatgatgacgatgaagaagcggagcagaaagaagacaacagttttgccaaaaaagaagacggcatcccgccaaacgaatgcctttactgtgaactcaaatccgacacttgggaggcaaatttggcgcacatgagcaagcagcacggttttctggtcccggactcgccattctgcacggaatgtgcccgggttgctcacttatttggttgtggcactttgcttttccaatttctttttctaattacatttcaaggcttcaaagtcggggacggcctaacctgcgtccgatgccaatgcgcccgtttccgttcgattgacggactgctaaagcacatgcgacgactccaaccattgcaactttcgaatctattcacaacaggaggtgcttgctgttcgttgtgtaaatgaagagcccggagagggagaaatttaggggaactaagaaatggttatttatttgataagattgaaaatgatccttagggggatgtcagacatctaatatatc

SEQ ID NO: 48673 - DNA, 1225 bp, Heterodera glycines
ccaagtttgaggtttattatttataaatttataaaatgcaaaatcaacagaatatggacaattcagcaaggtcaattttcgttggcaatatttcttacgatgtgagcgaagacgaattgcggaagcttctctcagcatgtggtcaaattgttagctttcgccttgtccatgaccgcgagacggggcgccccaaagggtttggtttttgtgaatttgccgatgtgcctcaagcggaggcagcaattctttatttcaatgggttcgagtttcggggacgtccacttcgtgtcgactcggctacgggcaatgatcggagtgctgatgagatgcaacacttccaaatgactttgactcgtccgcaaaatcccaccgacgaattgagtccttatgggcccgaattggagccgggaaaagcaccggaagtaattgcccgcacagtcgcgtcaatgcctcccgaaaaaatgttcgaattgatgcgatccatgaaggaaacggtgaacaacaatccgcaaatggcgcgccaacttttgatggaaaatccgcagctgtcgtatgcattgctgcaggctcaagttgtgatgcgagtggtggacccgaagattgcctaccaaatgcttcatcgtgaacatgctcagccgcttgtaccgccgacttccatccccactcatatccctcaacaatttgctggcaaaccccctcaattgcctccccaattcaacatacctccgccctccgtcccctctcatcagtttcaaatgcaacctcctccattggtgccaggccaatttcaccacggatttccatccatgggcatggctccgccttcgctactgcaacagcagcagcaacagacgccttttacacaacaaaagccgacacccatcgctcctttggcagtgcctccggcagcgaccgctccgcaacagcagcaggctgttagtccgcctccgcttagccaacaagcacagcaaagcaacagcgacaatttggacgaggagcagcaggcgcaaatgcttatccgcgtgctgcaactcaccgatgagcaaattcgtatgttaccaccaactgagaagtgcggatgcaaatgcgtgaccatatcaaatcgcactgacagaggtcgaaaagccaactgatctcttctttctccatcaacctatttttatataatgtttgatttttttgttgttgaaaatcaagatttaatgaaaaaatttttactaggaaa

SEQ ID NO: 48674 - DNA, 862 bp, Heterodera glycines
gctatttgagaatttattgaaaaatgactgaagccaaaaaattgccggaagtgccggagacgctgctgaagcgacgcaaaatcagagccgcacaacgggctgccagggcgaagaacagcttgaacaccatcaaaaaagcgaaggccaaaaagacggaaatcttcaaacgggcggaacattacttggttgagtaccgccagaagcagcgccaattggtcgcgttgaaacgggaagcgaagaaagtgggcaattactacgtgccggacgagcccaaacttgcatttgttgtccggatcaagggcatcaacaagatccatccacgccctcgtaaagtgttacagctgcttcgtctgcgtcagatcaacaacggcgtattcgtcaagttgaacaaagcgacaatccagatgttgcgcattgctgacccgtacattgcgtggggctacccgagtcagaagatcattcgccagttggtgtacaagcgtggttatgccaaggagagtgggcagcgcattccgatcacggacaatgccattgttgagcgaaacatgggcaaatcggacgtgatctgtgtggaggacatgattcaccagatttggacagtcgggccccacttcaagcaagtgaccaactttttgtggcccttcaaactcagcaaccccgtgggcgggttcaagaagaagtccaaccattttgtggagggaggcgactacggaaaccgcgaggaccaaatcaacaaattgcttgaaaaaatgatctaatttcggaaacaattgcgatgagttgatgtgcagcggacggcacgcttttgttgttgttattttacagataaacttttttgttaaaaaaaaaaaaaaaaaaaaaa

SEQ ID NO: 48675 - DNA, 774 bp, Heterodera glycines
ctattgctttctttcaatcaaatctctcaaaatgtctgaacaatccggggaaacctttgcgtttcaagcggagattgcgcagttgatgtccctgatcatcaacaccttctactcgaacaaggaaatcttcctccgtgagctgatctccaactcctctgacgctcttgacaagatccgttaccaggcgctgaccgacccgtctcagatggagagtgggaaagagctcttcatcaaaatcgtgccgaacaaagccgataagacattgaccatcatcgacactggcattggcatgaccaaagcggacctcgtcaacaaccttggcaccattgccaaatccgggacaaaagcgttcatggaggctcttcaggctggtgcagatatttcgatgattggccagttcggtgttggattttattcggctttccttgtggccgaccgtgtcacggtcacatcaaagcacaatgacgacgattgctaccaatgggagagctcagctggtggctcgttcatcattcgcaattgtgccgatcctgaagtcacccgcgggacaaagatcgtcctccacctgaaggaagaccaaacggattatttggaggaacgtcgtgtgcgcgaagttgtgaagaaacactcgcaggtcatcgggtaaccgatcaaatgggtggtgaaaaaagagcgtgacaaggaaatttcggatgatgaggcagaggaggagaagaaggaagatgaagcaaaggaggaggagaagaagccagaagatgacgtgtcagatgacga

SEQ ID NO: 48676 - DNA, 1080 bp, Heterodera glycines
gataaacttaaaaattgggaggcattttctgaaaaaaaattcgaaaaattgaattataactttttgtacaagttcggtttcaatgttcagattggtcattaggcaaagggtccctccaaataacacgccctcaatcaacttataaagttgtatttagagacaaaaattatcgtaaatggctgtcggaaagaacaagaagatggggaaaaagggagcaaagaagaaggccgtcgacccatttacgcgcaaggaatggtacgacatcaaagcgcccgcaatgttcacacaccgaaacgttggcaaaactttagtgaaccgcacccagggaacacgcatttcaagtgactttctgaaaggtcgggtctacgaagtttcgttgggcgatctcaacagcacggacgccgactttaggaagttccgattgatctgcgaagaagtgcaaggcaaaatttgtttgaccaatttccacgggatgacattcaccagggacaaactgtgctccattgtcaaaaagtggcatacactcattgaggccaatgtggcagtgaagaccaccgacggtttcttactccgactcttttgcattggctttaccaaacgaaatgccaatcaaatcaagaagacgagctatgcaaagacatctcaagtacggatgattcgtgccaaaatggtggaaataatgcaaaaagaggtctcttccggcgacttgaaagaggtggtcaataagctgatcccggactccatcggcaaggacattgagaaggcgtgctccttctactacccgttgcaggacgtttacatccgtaaagtgaaggtgttgaagaagccgaagttcgagctgggcaaattgctggagatgcacggcgagggtgccggaacggtcgccactattacgacggccaccggagagaaaatcgaaagtcggccggacgcatacgaaccgcccgttcaacaaagcgtttaaatggtcagattgacaaaatggagatttatttgactgtttgcatccgaattgttttgctgttgttgttaaactgactttgttgaaaaggagggaaaaacattcaaaacttgataaat

SEQ ID NO: 48677 - DNA, 818 bp, Heterodera glycines
cttcggagtttggcaaatatcgtcctttgccatccgacagaaaatgtccccgcaaaggctgcgccagcgacccgcccccggccactcattgtcagcccggacattcttctgaaaatgggactgtccaaccgacgaaaacgagcagtttgatcagctcaaagaatggatgcgctgaggcggaggaggagcaatgcctttttgtggaacattttggcccaattccccaatacagcgaaacggacgaaaaagagaatttgcggctgcggaaattgcacgaagtcgcattagaaatttatcagaaacaacgcgcttatgttatgaaattgcaactgattgggctcaattatccgaggcatttgaatgactgtgaaaaaagaatgaacaaaaaattgctccattccaaacacgtcatcagacgaatcgcggatcactttcagactattttaaatgttcatcttacgtttttgcataatttttatgacaaaattcttaaatgggattctcggaagcccgacttggccgaagtgtttcagaagaatgccgattttctaaagatctgcagacttttcctcaccgagaaacaaaaactcgtcgctgagttgcaacagactctcaatgagaaccacgagttggccgaggcgacactgacatttgagcaagcactgtctaaagaaacctcaactcgtcacagtttctccggcggaagaagcaattgcgcttctgtgaacgacttgaagggcatttccatcgttttgcaattggatgctgttcatcaaaacgttgtccagtacaaacttctgatggaacgttatcggaaa

SEQ ID NO: 48678 - DNA, 1113 bp, Heterodera glycines
gttatttttctgtcaaacaaatttcacaaaacaagcttaattctgcagcagaaacatccaatggagcttcaaaaacagccagtcatggcaacaaaagaacagttgcgtctggctgaactcacccagacagggcatgacgctaccattgcacatgatgacattgctgggcagaaacgtgtcaagaaggttatcgaattgacacgctgtactcagtcgcaggccgaagttgcgctaattgacagtgaaggcaatgtggaagatgcggtcgctcgtttgttggacagtccggaaaagttggtgttgtggagtcagcaaggcaaaaaacaaaagacgaaatcgtcaactccatcggttgcccggactactaccactcacaatcagaccaaaggcaaaggacagaatgagcagaattcggctgggccgcgtgttcgcactgaacgtcagggacagggattcaagggacaaaaccgcacttttaccgccggaggagcgtatcgacgtgacaatgttgcagcgaacaagcagaccaccaacaaagttgtgggaacgggaacaaacaccggcgacttttcttcaactgttgagcaatcttatggcgaaacagcgggacacgaaaacgacgaatggaaaaatgggcctcgtgtgtttatgccatcttcggctgctactgttgtgatggcggaaacatcgacaaatggtggtgtgaagtggcccgctctggacaactttacgccttccgttgagccggctgaacccgccgcggttcacaagccgaaaacatttgccgctgttgctgcggctaaaaaggcatcaccacagccttcacctccacaacatcagcaacaacaacagcagcagcagacaatcacatacgaaagtcgggagccggattggacgaaagaaaattggacaacggagccgacgaattggtcgtcagaaaattgggcatcaaccggcaaattggaaagcaccgaaatattggacaacccggaaaaattggataccaccgaaaaattggaaaacaccgacatgttgggcaccgctggcaacattgaagctgccaacaatttggacacctctgtaatgctggacaccagttgcaaattggacacg

SEQ ID NO: 48679 - DNA, 632 bp, Heterodera glycines
attcaataccccttcaatttggctatcatgcaaatcttcgtcaaaactctcaccgggaagaccatcactcttgaagtcgaggcgagtgacaccatcgagaacgtgaaagcgaagatccaggacaaggagggcatcccgccggaccagcagcgcctcatcttcgctgggaaacaactcgaggacggacgcaccttggccgactacaacatccagaaggagtccactcttcacctcgtcctgcgccttcgtggagggatgcagatcttcgtcaagacgctcaccgggaagaccatcactcttgaagtcgaggcgagtgacaccatcgagaacgtgaaagcgaagatccaggacaaggagggcatcccgccggaccagcagcgcctcatcttcgctgggaaacaactcgaggacggacgcactctggccgactacaacatccagaaggaatcaactcttcatctcgtcttgcgccttcgtggtggaaagaactagaacgacgaacggaagaaatgagtgatctgtatcgatccatatccgtatcttgagactgtcctgtattattgtgttccgttttattcatcatcatgaaatgtatttcaatgaccacggaacgataaatccatcaaaactca

SEQ ID NO: 48680 - DNA, 635 bp, Heterodera glycines
ccgaatattggaaatcttacgcgaagaaattctgtgaaatctgcaagatttggtatgccgacaacaaagtcagcgccgaacgccatgagcaggggcttcggcacaaagccatggttcagcaacggctccgcgagagtgcgaagaaggcaaaggataaggaagttgaagaccatgaacttcggatgacacttttgtcaatggaacaggcggcgcgggcgagcttttcctctcgggaggaacgcgaagtgccaatggtcccagccccacggataattacatcgcaaaagcaaacggccgaaccgaccgaagaagacgaagtgaaagcaaagcttagggaacagaaaagaaagctcgccgcattgaaaaaacgttcaaagcaatcgcaattttggtcaccggacgaaggggaaatgggggaaggcgatttgccacttgaagaggaattggccgattgggtgcaggcggagacatcggacggacaattttactattggcacatttacacgggggaaactcgttgggaacaacccgagaaattttacacttctgcccaatacgccgaacgttatgccaacattgtggaagagacaactgaccagagggaagtcggacagtgtgccaattccgcctacgat

SEQ ID NO: 48681 - DNA, 928 bp, Heterodera glycines
gtttgaggcttttcaaattaaaaaaaacgggaccagtaaactagacctttgccgtcccctgctccattttcttttcctcctcctcttcatcacattttcgcctcctcatgtcccctccctgctccttttccccttcctccgcctcctcttcctctgacagtccctcagcagaaggccaagcccagcaaaatggccaagttttggccccccgtccattgcccacgtgggaggaaatccgtgccgcggtgcccaaagagtgttttgaaaagtctctccttcgttctctgtactatttggccatcgatttgctcgtcattggcttcctttacgccgttgtgccttttgtagagacaaatttcggactgatcggactgtttttctggtactgcttgctcggcatgtttttgtcctctctgttttgcgttggccatgactgcggccacggcactttttccgattggacatgggtcaacgacattttcggccatatttcccacgctttgctaatggtgcccttttggccatggcaaaaaagccaccgtcaacatcaccaattcacttctcatgtggacaaggacaaaggtcatccctgggtgttggaagatgactacgaaggtggcggatggctgcgaaaacattttgctaagattcccttgtccggactgatcaggtggaatcccatttacactgtcgccggtctccccgacggctcccatttttggcccttttctcggctgttctccaacaatacagagcgtttcaaatgtctgatcagttcctcactttgtcttatcacttcttgggccattttcgttttgcttgaccacagtccgtgggcctttctcaaatattattatgtgccgctgatgtttcagggctattggatggtgatcatcacatatttgcaacatcaggacgagcaaatcga

SEQ ID NO: 48682 - DNA, 746 bp, Heterodera glycines
ggcaacagcacatcatttagctaaaactcatcaacacacagaacacctgcaagaaatggtcatcaaatccaattcggtcatttcacgttcgcattctgatcattttcaagaagcttctggttcattgtcagcaacttccggttccgaagatgcaattaagcactggggttggtggaggcattttgtcgcaggtgccactgctggttgtgtcagccgatcagtgacggcaccgctcgaccggctaaaagttttccttcaggttaacgccaaccataagactccacacactttgccatccgcagtcgattatttgtatcgcgaaggtgggtttctgtctttctggagaggcaatggcatcaacattctgaaaatagcacaggaatctgctatcaagtttatgttttatgaacaggtgagctcttcaatatttgttctttaatttttggatttagataaagcaagagttccaaaaattaacggggcatcgcgatctcgacatttttgagcggttcatggcaggggcttctgctggtgttatcgcccaaacggccatttacccgttagaagtgctgaagacgagattggctcttcgaagaacaggcgaactcaatcgtgggctgtgtcattttgctagagaaatgtaccaccgtgagggcttcacctgtctttacagaggatatgccgccaattgtattgggattattccatacgccggcatcgatttggctgtttatgagacgctaaag

SEQ ID NO: 48683 - DNA, 633 bp, Heterodera glycines
ctaatattcaattttttgaattaacataattcttttggaatggctcctgcaccagaaaaggaaaaaactgaagataagaaactgaaagacgggcaaaaaccaaatgtgaccacggatcacgcacactgtttgagcaatgtccaaccaaatcttcccgtcaataaagtggtggtgcatccgctcgttctgcttagtgtggtcgaccacttcaaccgcgtgaacaaaacgcacaaagtcaatcgagtggtcggtgttttgcttggttgtatgaagcacgacaaaacccttgacatcgcaaattgttttgctgtgccttatgacgaggactccgagaattcgaacattttctttcttgatgctgattttctggagaacatgtttgggatgttttacaaagtcgcggcacgtgaaaaaattgtcggatgggatcactctgggccgcgtctttgcaagaatgacattctgatcaacgaagtcatcaaacgctttaccccgaaccccgtgctgggcataatccaagcttcccaaggccgacaggatttggcactgccgacggatgcttatgtggaagtccaggaagtgcacaatgatggttctcccccggtgaaaactttgaacacgttcccagtggaa

SEQ ID NO: 48684 - DNA, 705 bp, Heterodera glycines
caagtttgagcattgttttgaatttcgaaaaaatgggcaaaattcactactgcaagcgtccggacaacagcacaaagtcgtgcaaagctcgtggttcagatcttcgtgtccatttcaagaacacacatgagacggcgcgtgccatcaaacatatgccgttgaagcgtgccatccgctttctggagaatgtacgggagaagaaggagattgtgccgttccgccacttcaacggcggcgtgggacgcaaagcgcaggcgcaagcgtggggcacaacacagggacgttggccgaaaaagtccgccgagttccttctccaacttctcagaaatgcggagagtaatgccgaggtgaagggcctggacgtcgaccatttggtcattgaccacatcgtcgtgcaagcggccgccaaaatgcgtcggcgcacttaccgcgcgcacgggcgcatcaatccgtacatgagttcgccgtgtcacatcgaagtgattctgaccgagaaaaaggacgtcgttgcgaagccggccggcgcattggtcaaagtgaagaaagagtcgaagaagaagcagcgacggcaattggcacgtggcgaattctgagtgacccgaggacatccccgaaccacactctctttgtgcggcttgttttgttatttggtggcgataaaatttgttgaaccaaaaaaaaaaaaaaaaaaaaaaaaaaaaaaaa

SEQ ID NO: 48685 - DNA, 671 bp, Heterodera glycines
tttgagtctaaattctgtttaatgtgtcaatgagcaacaacgacatcatttttggaaatgaggaaggcgttaattatttggcaccatggacatattcctgtctcatcaaaacttcgatagatcggttgaaaactgctttatctgagaatcgtgaagccatacatgctttaaatcatttacaagaagtctttcgtcaaattgaccgtgcttctccctcctttctttatgatttctcaaaacttttgctgatcgagtcgggcgttgcaggaactaatgtgcaggaatcgtaccttcgaatgcatgcaaacgcggccacagaagagctggaactgccacaatttgcacacattgcagaatttcaatatttgtcaatgagagctgtttcactgtgcaaggtgcttgccagaattccggacgaaatgactgatagaaggccatttctggagaccatcaaagagattgcttcgtccattaagcaattgttggacacgacaaacgcgatcattgctcttgtgcctcgctgctaccaacctcgtcagattaatttaactccttttctttcttatttttaaaattggttaagtgttgagaaacgtaagagggaatttgtacaagttagcaaaagggtcagcagcacattgaaggattattttaagcaccaagagcccaac

SEQ ID NO: 48686 - DNA, 723 bp, Heterodera glycines
cacaatatacctatatgttaattatgtcatttcggtcagcagcggcattagggcttaacttgcgtaaagcatccaaatttgtgttgttcggcgcattggccaccggtggcagtgtgttgctgtactcgttggagaatagcggtgcgcgtgcctacgactttgttgtgcacccgagccattttttttgggttcgtcgcggttaccaagtgtacaagcaagtgtgtgccgcatgccattccttgaaattcatccgttacaaccattttgtcgacaatttcatgacacgggatgaggcgaagacggaggctgccgagaaaaatgctttcacaagaagaaatttttcgaaatacacgaactgttgcccaaggattggatgcattgagggaagaaaatgaggccatcaagaacaaattgttggtagggatggacgtgttgacacctgatgaacgtcaactcatcgatgagaaggcgtcaattgtggaaaaaaatcttgaaaacatccaactcggactggaagaatcgcaggtgatgttggcattggcatcgcatttacaaaatttggaggcggaaaaacaaaaatataaagcgcaagtgcgtcgtctttgtcaggaaaatgcgtggattcgggacgagctgaactcaacgcaacaacagcttcgccaatgcgaacaagacaaggcacaactcgaggaagaaaacaagcactttgaaattattgaacag

SEQ ID NO: 48687 - DNA, 653 bp, Heterodera glycines
gtttgaggtaaaatttgtgcgtaaacacagagccaacaacatgggatctcgcagtgtcgctggtggtgttggtgcttcgattatgaacaaacaagccagcaaatacaacgagagtgagggtgagctgttgctcaactggatcaagcaggtcaccggtgccacaatgacggtgaacggaacgcgcgaaaacttccaagcacaactgaaggacggcacattgttgtgcaaggtggcactgaagctggaaccaaactcgatcaaaggggtgacggacaaggccagctccacgttccagcagatgagcaacttggagctgtttatcgaattctgtcgcaagcagggagtcatcacgcaggagttgttccgcgccgtggacctggtcgaggcgcgggacctctactcggtgtgcatgacgctcaactcgttgggccgaattatgcaaaagaagggcaaatcccacccgaagcacgtgtcggcatccgaaattgtgaacatcccctccacggatgcgcttcgtctttgatcagtgatcaaacattgaaaatggggtgggtatgcggcaccaaatttttgcagtgatcggagttattggctcataaagatgtgtgttccgtttattggcagttctgtgaataaatttggcacttggaaaa

SEQ ID NO: 48688 - DNA, 1564 bp, Heterodera glycines
gagatttacaatctcttagggatgctcagttctttccccttattattgtccttggtcggcctcatcgccgtccacgccgaagtcttcttcaaggaggagttttctgatgacagttggactgatcgatgggtcacgtcgaagagcaaggatgactacgggaagttcgagctgtccgccgggaagttcttcggggacaaagtgcgggaccagggcctgaagaccagccaggacgcccggttctacgccatctcggccaagttcccgaagaagttcagcaacaagggaaagccattggttgtgcagtttaccgtcaaacacgagcagaacatcgactgtggcggcggctatatgaagctcatggcttctgacatcagccaagagaacttccacggggagacgccgtaccatctgatgttcggcccggacatttgcgggcccggcactaaaaaagtgcacgtgatcctcggctacaaaggcaaaaaccagctaatcaaaaaggacattcgctgcaaggacgacgaactcagccacctgtacacactgatcttgagcccggacaacacttacgaagtgcaaattgacggcgaaaaggtcgagagcggcgaattggaggccgattgggaccttttgcccgcaaagaaaatcaaggaccccgacgcgaagaagcccgaggactgggacgacaaggaatacatcgacgacccggacgacaaaaagcccgacgattgggaaaagccggaacacatcccggacccagatgccaagaagcctgatgactgggacgatgaaatggacggcgattgggagccgccgatgatcgacaacccggaatacaaaggcacctggaagccgaagcagatcaagaaccccaactacaagggcaagtggatccaccccgagatcgacaaccccgagtaccagccggacgacgacctctacttgcgagaagattggggcgccatcggaatagacatttggcaggtcaagtcgggcaccatcttcgacaacattttggtagcggactctgtggaggacgcgaagaaacacgcggcggacactttcgaccagctgaaggaggcggagaagaagcagaaggaagcgcatgacgaggaggagcgcaagaagttcgaggaggaagagaagaagcggaaggaagaagaggagaagaagccgaagattgacgaagaggaggttgaagaggacgaggaggagaagaaggaggaggagcacgacgagctttaggacggcgcccgaccattggccttgtcactttccatcctcaatgattgcaccttcccgggttctccctcatctcttcttttcggtatttaatggcaatttgttatttaattggttcaagagggactgttcgatgattccttcgaccgcccacaatggtctctctcaccgcctttttgatatttctttctgaaagtgaataatgaatgaatcgctgactcccatctttcctccgtgcttgttgtttttcttttgttcttttacataaaaatatttattgtcccaatttgaaaataaattgttaatttgttaaaaaaaaaaaaaa

SEQ ID NO: 48689 - DNA, 721 bp, Heterodera glycines
gtttgagctaattatggcacggaatcggccaaatgctaatatcataacgagtgatctcggcgaggcacaaataaaaaagcacaaaccaaaagacacgaggttactacaacagagactcgttgcatggcagcctattctgaccgctaaaacggtcattccgttggttttcagtataagcattttgttcatcccaattggaattgttcttcttcgcataagtcaatctgtccaggaatatgtcgttcaatatgtaaacgatgccaacgagtgcaaagactaccatgcgaatggccaatgcgcagtgaacttcactctgaatgaggacttcaaaggcgatgtttacttttattatgctctcgagaatttcttccaaaatcatcgtcgttatatgaaaagcagaaatgatcagcaattatcgggcattgattttttaaataccaaagattgtactcccttcgagaaagctccggacggtcgtccgatcgccccttgtggcgcaatagcaaattcattattcaatgattcattccaactcaattatcttgggggcaatggttatgcaaatatttcatggagtcacgaagggctcgtctggccggtcgatttggagtcgaaattcagaaaccccacttgtgatggccagccatgcaaaacaatcgctgaattgtgtcacaaattttccttaaccgtccgaccgcccaactgggaaaaggacctctgc

SEQ ID NO: 48690 - DNA, 1439 bp, Heterodera glycines
tttgagataatgccaatcatactgaaccaaggcatattatcaaccacatgtgatgaccagcaaagagagacgctcaagcttcaacttgagccagcagcagaatacaatgaaacaaattttaaacgaacggtgttaaatgcgtccggtacaccaatcaatggagcgttcactttttggtcagccccttccactgctgctccggcagcgacagcatctgtctccaatttatcggccacaacaacagttatctcatctgaaccggatctcactccactcacaccgtccacttcggacgtgacagttaatggccacagcagcaatgtgaaggtgcttaagccggtgccgttggtgatccgaacccaaagtgcggacgaaattgcgggtgccgttgcgcacccgaccaaaccgtcggagatccggaaactgatccggtcaaagatggcccgatgtcgcatttgcaggaaccgttttctggacaagcacatttatgagcgacatttgcgcgacaggcatcccaaggaacacgcggcttatctgagccaacaggaggacgaagttcgacagcaaagaaaggaagaatttgaagcgaaccgattagacgaactcgtcaggggcggtttcattccgcctcaggaggatttggatgcatcgaaatacgaagtgaacatcaaagagattccattgcccggcgaattgaccggcggcgtgcccgcccggtttgaccgcttcggtgtgctctttcaaccgaagcgggtgtacaagaagaaggtgtcaccgcagtgcccattctgtgacaagcgctaccgcaacgaatattcgctgaagaaacacatcgccaaaaagcatacggaatgcgcggaatgggcccaatgtttgaagtgcttcaaggcggtgccgagcaaggccgagatggtggaccatctgggtgaaatgatttacctctgttttgaatgtgtgccgccgcgcaatctgtgcaacgacgtgcgcctgtacaaccaccggacaaaattccatcgtggccaaaattcggggttcaaatgcaacctgtgcaatcagaagtttttgacgccgcgcaagttgcgcaagcacaagaaaatgtcgcatgtgttcaccaagacttaccagtgccatttctgcgaggaactgttcatcaacgaaacggcggtgaccacccacgagcgcatccacacgggcatcatcaaatttgagtgcaaaatttgtgactacaaatgcaatcgtttcctgaacatggaggaccatgtgaaggaggaccatggctatctgtgctccatttgtcagagcaaactcagcgaatggggtgacctcaaaaatcacatgctcatggaccacggcggctatctgtcgtcagagttcaactcagggtacatcgaaagcccgcgcgtttggctgatgttcaagggggactgattgatttgacg

SEQ ID NO: 48691 - DNA, 786 bp, Heterodera glycines
gagttcgtgatgatggttaaatcggcactttctaattcattgagtattctcaatggtttcactagtcgcgctttcaccacctccaacattaggagtttgagattccgttcgcaaaggcctcaaaatgagctgaggacagttggaaaaatggtcgcccaatcggacagtccgtacgaaaagggacaatgttttgttcacaaattgtttgcttacaggggagttattatccgatcgaaaaattgctcagtctttacgaaacgaatcagcgacacgcaaactgtgcaacaggaagtcctccccttttaccaagtgctcatagacaaagatgattggtcggaaatgaattttgagacggacatgaccacctttttgaaatccaccgggaatcgtgaagaaaccgccatcagcggaatggacatcgtttcccacgacgaaattctgccctttgagccatccgtcagtgaattgaagtcgctaagtgatgggagcggcgaagcagctcccataaaacattatctttacgaccaactgttcaagaagaaaacaggcgaagagacgaaaagggacgcgggcgtcaatcggcaaaggcctgaagaggaaatgtgctggatatttccaattgctgtgacgaaacagactacggattgttttgaagtgcaagtcagcactttcaacttgggttcaaataatttgaacagaagtcatagccctcacaattggcgcattgttttgcgggttgagaattcacagaacaacaccatgtatttgagaaataccgtactgaaa

SEQ ID NO: 48692 - DNA, 1350 bp, Heterodera glycines
ttagaataaatacaaattattttaaaaatgcgtgaaattgtccatattcaagctggtcaatgtggaaatcagatcggttcgaagttctgggaagtgatttctgatgagcatggaattcaaccggacgggacttacaaaggcgaaacggacctccaacttgaacggattaatgtctactataacgaggcccatggtggcaagtacgtgccccgcgctgtgcttgtggacctcgagccgggcacaatggactcaatccgggccggaccttacggtcagcttttccgtcccgacaacttcgtgttcggacaaagcggagcgggcaacaactgggccaagggccattacaccgagggagccgaattggtggacaatgtgttggacgttgtgcggaaggaggcggaggggtgcgactgtctgcaaggctttcagctcactcattcgctcgggggaggcaccggttcaggaatgggaactctgttgatctcaaagattcgggaagaatacccggaccgtattatgtcttcgttttctgtcgtcccttcgccaaaagtttctgacactgtggtcgagccttacaacgccactctttccgtccaccaactcgtcgagaacactgatgagactttttgcattgacaatgaagcgctttacgacatctgtttccgcactttgaagcttcaaaaccccacatacggggatctcaatcatctcgtttccgtgacaatgtccggagtgacgacttgtcttcgttttcctggacaactcaatgccgaccttcgcaaacttgccgttaacatggtccccttcccgcgtctgcacttcttcatgcccggctttgcgccgctttctgcgaagggagcggctgcatatcaagcgtgttccgtggcagaactgaccaaacaaatgttcgacgcaaagaacatgatggcggcgtgtgacccgcgccacggccgttatttgacagttgcggcaatgttccgtggtcgaatgtcgatgagggaagtggatgaccaaatgatgtcggtgcagaacaagaactcctcgtacttcgtcgaatggattccgaacaacgtgaagaccgctgtctgtgacattccgccccgtggcctcaaaatgtcggcaactttcgtcggaaactccacagccattcaagaacttttcaaacgcatttcggaacagttcactgctatgttccgtcgcaaggctttcctccattggtacaccggtgagggcatggacgagatggaattcacggaagccgagtccaacatgaacgatttgatctccgagtatcagcagtaccaagatgccaccgttgacgatgagggcgaatacgaggctgaggacacc

SEQ ID NO: 48693 - DNA, 695 bp, Heterodera glycines
tgagcaaacgacgcaataaaatacaagccgaagaaaagcggaagaaggagacattgaaggcgactctcgacttggacgaaatatttggcaacgaaaacgaaggtggaaaatcggccggcagcagcagttcgtcgacgagttcttcgcgttcctccagccccgacttgaccaagtcacgttctccttctcccgaagtcaaacaagagattaaaacaagggatgaaattatccgttgccaacttttccggcgaaagctcgcgaaatttgttcatgctccgttcttcgctaaaacagtggtcggttgtttcgttcgcatttcaatcggtcccaacaaatcggatgggaagcaagtgtacagagcggctcaggtagtcgaagttgtggagacagcaaaagtttacgaagtcgagccgaacagtgacatccgtacaaacaaaggctttcgcctcaaggtgagcgatggcgagccaatgcgagtctatcggttggagttcgtctccaacagtcttattatggaaagcgagtttctgttttggttcaacaaaatgcggtcttcgaacacgcccatgctaaccgtcgactttgttgaccggaaaaggaaagaaattgtgaacgcactcaactacaaatacaatgaggcggagatcaatttgctgatcaaagaaaagcagcgcttcaaaagacaaccgaccaat

SEQ ID NO: 48694 - DNA, 1371 bp, Heterodera glycines
gtcgacgacagcacacacagccgaaaagcgcttcttctcatcgccttcgccttcaaaacttagaagcaccaatcccaaccagaaaaaatgtgcgacgaagaagttgctgctctcgtggtggacaatgggtccggaatgtgcaaggccggtttcgcgggcgatgacgcgccccgcgcggtgtttccgtccattgtgggccgcccccgtcatcagggcgtcatggtcggcatgggacagaaggactcgtacgtgggagacgaggcgcagtccaagcgtggtattctgacgctgaagtacccgattgagcacggcatcgtcaccaactgggacgacatggagaagatctggcaccacaccttctacaacgagctgcgtgtcgcccccgaggagcacccggtgctgctcacagaggccccgctgaacccgaaggccaacagagaaaagatgacccaaatcatgttcgagacgttcaacacgccggccatgtacgtggccatccaggccgtgctgtccctgtacgcctccggccgtaccaccggtctcgtgttggactccggcgatggtgtcacccacaccgtgcccatctacgagggttacgccctgccccacgccatcctccgtttggacttggccggccgtgacctcactgactacctgatgaagatcctcactgagcgtggttactccttcgtgaccacggccgagcgtgagatcgtccgtgacatcaaggagaagttgtgctacgtggcactcgacttcgagcaggaaatggccactgccgcctcctcctcctcgctggagaagagctacgaactgcccgacggccaagtgatcaccgtcggcaacgagcgcttccgttgcccagaggcgctgttccagccgtccttcatcggcatggagtcggccggcatccacgagtccacctacaactcgatcatgaagtgcgacatcgacatccgtaaggacctgtacgccaacaatgtgctgtccggcggcaccaccatgtacccgggcattgctgaccgcatgcagaaggagatgaccgcgctggccccgtccaccatgaagatcaaaatcatcgctcccccggagcgcaagtactccgtctggatcggcggctccatcctcgcctccctgtccaccttccaacagatgtggatcagcaagcaggagtacgacgagtcgggcccgtccattgtccaccgcaagtgcttctgagcagcagctgcacgaccgcacggaggaggaggagaagaccaacgaagccgggacactcgccatccgccgacccattcgccaccccccaccaccatctgttttttgctgaaaattatgcaaaaatatttttgaataaaatctatgaacaaaaaa

SEQ ID NO: 48695 - DNA, 1314 bp, Heterodera glycines
gactgaatctcaaaaatgaacggttctctgacaaatggcaacaaagtcgaccgcggcgtcaccattcttttgggcgcccaatggggcgacgaaggcaaaggcaaagtgatggattttctcatcggacatcacaagattgacattgacgcgcgatgccaaggcgggaacaatgcgggccataccgttctggcaaatggccgcgagtatcatttccaccttttgccttccggattggcctcaaaaaaggtgttgaacattgtcgggaacggagccggcctcaatttggacgcccttttcgaggaattggagagcaacaaaattgaggattcggcagaccgactgttcgtcagtgacagcgcccatttggtgttgcctgtgcacatcgcaacggatatcatgcggcaaaatgcgttgggacaaaactcaaaactcggcaccaccaaacgaggcattggtcccgcctattcgagcaaatgcttccgcaatggcatacgactgggcgaactgctccaccaaccagagaaatttgaacaaaactatcgttcgctggtcgcccacttcaaaactcttttccctgacattgaattggacacggaaagtgacgtcaaacagttgaaggcccatgccgcacgtcttctccaaatgggcattgtctgcaacacaaccgttttcctgcacaaaaagcgtttggagggcaaatcgattttggtggaaggagccaacggcactctgttggacatcgactttggtacctatccgttcgtcacttcgtccaattccaccgtcggcggttgcatcaccggccttggcattccgccgacagccgtccgtcgcgtcatcggcgtggtcaaagcctaccaaacgcgtgtcggctccggtccattcccaactgaactacttgacgccgatggacagcccagcgaagagggcaaacgtttgcaagaagttggtgctgagattggcgtgaccactcgcagaaaacggcgctgtggttggcttgacttggtgctgttgcgttattctgcaatgatcaacggattcacttctttggctgtaacaaaagtggacatcctggaccaatttcatgaaattaaaattgccattggttacgaattgaatggacggcaaattgagtaccctccagcgaccgtcgatgattgggcaaatttgtgcgtccattacaaaacctttgagggttggcagtcgccaacgaccagtgcccgtcagtgggaacagttgccggacaaatgccgtgcctatttggagttcatacaaaatcaactgggcgtacccgtcgaatacatcggagttggg

SEQ ID NO: 48696 - DNA, 1470 bp, Heterodera glycines
acgctctcttcgtcggacgtcggtggtggcaatcgcagtagtaacagcgagcactcctcagccgacaacactaaccgaggaaagaaagcggcaaaggtggtggtgaacaagaggagggaagtgaaggaatttgtgttggtcggaggaggtggtgacgtgaaggaggcagaagtggccgccggaacggtaacacttccggaaggagcagcaggggtgggaagagtggacgacccgaggcgggaaaacagcaaccgaatggttgccgcctgtgttgcgaccccctccgtcactgttaccgccaccgccgccacttatttcaatcacaatcagacggggtttgccggcactctcggaggtggtggtggttccaaaaaagggatggaggcgaacagtaacccatccaaagcctcgaaaggagtgaccatgaccaccgcagaggtggaccagctcaggcaacagctgcaatcggtggttgaaaatggagatctcactgcttcgaatgtgtgtgttgaacagttggaaagtgcggtgttaagcaaggatacactcgaggcaactcgtatcggccgttttgtgaacgacgtgcggaagcagactgcccagcaatggcccgacttctccaaacgttgtcgtgcgctgataaagcaatggcagaaggtggcagagtacaggcccagctcctcctgcgaaggctcttccaatggcggcactcctcagcttgtctcgccggctttgaagcgcgggctgacaccacgggcgggggccgtgacgacgcccggcaaacgcacaacaccacatcaaccgcaacaacaactacgggtcacttccacagggctttgccctccagattctcgccaacatacgggtcgttcgtcttcaactttggcctcctccgtttcgccggtggagaatggcgtgccgacagcgagcggaagttacgcgccgctgccgtcgactgtcaaaaaagagtcgcctcgacagatcacagcaactgttcagcaacaacattccatacacaagtccgcctcagttggtgcctccctgagctgtctcggcggctcatcggctgcaaagcgaacagggccaatgcttaatggcattgccgaagatgggggaacagtcagcggaggagcgcacttggcctccagctctttctacggtacccggccgtttctttagatggctctaacccccgcctcgttgtgttgtggtacagccgacgtgacgaaggatttgagagctgtacaaccgtcgctgacggcgccttccgcgccattggcctctaatccgccattgacgctgaagttgaagcgttctgccagtggagtgcaacgactgacctcctcgctgtcgccaccgtcggacaatggcattggtgcagcttcgacttcgtcgtcagcgccgcttgttgctcaacaacctcttcagcaactatcggtgcttgctgcgcgacaacaaaatgtgcaatcg

SEQ ID NO: 48697 - DNA, 1218 bp, Heterodera glycines
tggaattgtgccttttatgggagatacgccggaggcgttatttgccaacataattaatgaagacgtggaatacccggagggggacgaggcattggattcggatgctgagtcgttgattcatcttttgctggagaaaaatccgctggaccgactcggaaccgtcggcggtgctccccaagtgtccgcgcatccgttctttgcaccactcgactttgacacaatcttgcggcagaaggccgagtttgtaccccaactcgagaatgacgaagacacttcctacttcgactcgcgctccgaccgttacaaccacgacgccaatgagtcagcggaggacgacgacgcggcggcggtgccaatgttttggtccttctcgacggcatcgcctcggcatagcattgtcgggttggaattgcccgccgggggaatggcaatgcttcaggccgcccatgcagcagcaattgaacggagtgggcagccgctgcagcaacaagaccgaattgtggacgatgaccgggtcgagagccgcagacgactcctttcctcggcaaccaccgcttcttccggcattggcagcgggccaaactcggcattcggtccattgtcctctacacttttaacgcgtggtggcaattgctccgactcccaagattcttcccacgaaagtgccgttggcagacgagcaaccgctgctgcttctgaattcgcttgcgatgtgatgccatcggcagtcattctgcgacggcgtttctccaaccagcggcaccatacaaatgattcgtcaaccagcagttcggctggtacaacaattggtacaacagcgggcggtggggtcggttcatcaacagacgactcgtcgtccttggacatagcgacgacgatgcatttagaacagccgagacggtcccagggacagttgccgagacttgcaatatcaccatgcggtaccactttcaactcttcaactgggggtgccattgtgacacaccaacgggaaagtgcgtgtggcaccggcggggaattcttgtcgccggtcaatgaacggcatatcactgccggaggcggaagcggtggaatgaagcggatggagaagcgtccttccgccgttgtacacgaattgataaccgatgtcgtccgtgtgtcctcctcctatgggcagtctttggcccgtcagtctcgctcctcttcatgtcgcgtcagtaacatgtctcccggggccgc

SEQ ID NO: 48698 - DNA, 948 bp, Heterodera glycines
agaattataataattacggagtcattgaaggcccattaaatggcttcataaaatgaacatttccaatggcagcgattggctttctgttcctcttctacctaatcggcctttcttttcctcagatttaaacagaagtggcgaatgttcgtcgtcgtccgctgctgccttttcccccccgccgttcggcgctccgttttgccaatgtcggccaatgcgaacggcagccaaagccaccacttccattgtcggccattaactctctttgcattgggcaacaacagcagcagaaaaaggcgacaaaaagccgaacattccgccgctggctcccctcagtcgctgacggactgttcttccgcaatgggcgtggaacttccgccgacgataaccgagcgactgagcactttgaagaaggatgtgatcgatgctttgctggacaaaaacgcggtgccccccgaactgatcacttcgctgatggccggcgtcggcggctcggctttcagcaaagcgctcgaattggtcccgtcgtacaaccaaaacttgcagaagatggccaagtattacttcacggcaaaaggcggcaaactcatccgaccaacagtttcgctgctgatgagtgccgcgtgcaatcaatgcgcgaaaaggccaacgacgccggcggacaccgccccgggcaggacaccaaccagcattgtcaatgagtcggaagaacagccaattgagatcagtatgaatcagtacaggatagcgatggtggccgaaatgattcacaacgccactttggtgcatgacgatgtgattgatgaatcgaacacgcgacggggacagccgacggcgaacgcccggtggggcaacaaacaggctgttttggtcggagattttattttggcacgcgcaacaaaagttttgtgcagcatcggagagccgcccgtcattgagacaatggctgag

SEQ ID NO: 48699 - DNA, 967 bp, Heterodera glycines
aaccgattggaagtgttggacgcgtcgctgcgcagggccggccgattcgacagagaaattgcgctgggaatgcccgaccaaagagcgcggatggaaattctgaaaatagtgacgaggcacatgaaactggacgtggacgtggatttggctgtgcttgcccgactttcgcccggttatgttggcgccgatttgctggcattggtgcaggaatcaaattcaaaggctatcagtcgtgcgtgctctttgttccgtcgttgatgcgaatgtaaacactgagaatattgtggaaaatttcccacctaaaaacatcgacgacattcgtggagaactgacaagaaccttaaattggcttaacactcctttcgccgagcaccaaaaacgattgaatatggacgaatttcgcgtgcgaatgtctgacttcgaatgggcccttcgcgtggtcaaaccatcggcgaaacgagagggattcgcgacggtgccggacgtgcgatgggaggacattggggcattgaacgcagtcagagaagagttgaaatggtcaatattgtaccccatacaaaagcccgaactgttccaacactttggcacttccgcacagccgcaaggcattttgctgagcggaccgcccggttgtgggaagactttgttggcaaaagcggtggccaatgagacgggcatgagttttatcagtgtgaaagggcccgaactgctgagcatgtacgttggcgaaagtgaaagggccgtcaggacagtgttccaaagggcgcgtgattcggcgccgtgcgttgttttcttcgatgaaatcgacgcgctgtgcccaaaacggtcgcaaagagagaacagtggtagttcacggctggtcaatcaattgctcaccgaaatggacggattggatggacggagaaatgtttttctgatcggagccacaaaccgaccggacattgtcgaccccgccatcactcgcccg

SEQ ID NO: 48700 - DNA, 814 bp, Heterodera glycines
attttctttaattagttagctaaaattctcaatggatgatttgttaaatgacatcgatgaagatcagcagcaaagcgaaagtgggagcagttcgcttccaccgcagtctgttaacacgatggcttggctggaacaaaacaaacagaaccaagcgcgggcattctccgagaatttgttgaaagatttgagcgctgtttcagagacgggcaaatctgctgaatttaacgtcaaagatgaaatggaatgttaagcaggagacgaagaggagaatcagttcattcagaattgtcagcggattcgttcttaccaagtggcttccgagaagaattgcaaccacgaggcaatcgtcccctatgacgttgaatatcaacagctaaaaaagaccaacaccccggcaaagctttacgagttcaaactcgacatgttccaaagccaggcactcaaatgcctggacaatcaacagtctgtgctggtctcggctcacacatcggccgggaaaactgttgttgccctctacgcaattgccatggcattgcgggacaaacagcgagtgatttacacgtccccaatcaaagcattgagcaaccaaaagtaccgtgaacttgttgaagagttcgaagacgttggccttgtcaccggggatgtgacactgaacccaaatgcatcatgtgttgtgatgaccaccgaaatactgcgttcaatgctttaccgaggctgtgaaattgtgagagaagtcggctgggtgatctttgatgagattcattacatgcgcgacaaagaacgtggcgtcgtctgggaagaaactctcatttta

SEQ ID NO: 48701 - DNA, 644 bp, Heterodera glycines
gtttgagccaaatgttcgacttccatcaattcatgggtttgggcggtggtgctgtcgccacttattcagtgcaattgcgtgccttttctgcgccatttttccagcgacacgatgaacgaagaatcaacgaactcaattacggcggaaagattctgttgccaaattcgtgtctcgacaatttgatgcgtcgcaacattcagtacccgatgctcttcaaattgactaatgtcggcccggcccttcagaggggcacccatgccggtgtgctggagtttctggcggaagaaggccgctgctatttaccttcctggatgatggcccaactcgctctgagggagggcgacctcatcaccgtggagtacaaagcgctcccgaatgccacttacgccaagttcaagccgatgtccaccgacttttacaacatttcaaatccccgtgccatgctcgaggtcgaactgcgcaagttttcctgtctgaccaaaggcgatgtcatcgcagtgcagtacaacgaacaagtgtacgaattccaagtgaaggcactgaagccggaaaatgcggtgaccatcgtcgagtgtgacataaacattgaatttgacgctgcggaaggctacgtggagccgaacagaacgcatcaacaacggaat

SEQ ID NO: 48702 - DNA, 716 bp, Heterodera glycines
ttatttaaatctgagaaatgccgtcgcgaaatttgtcagcaaagaaaaaacaacagaattcgttagttcgggatgagtcgacctcttcacccagcagaacgcccaaatcggtgtcgaaagcgagtaacagcaacagtagccaacagaaacttcagaagaagcagaattcatcagaactgtccacgattagcagtgaaagtgtcgaaaaggatctcagctcttcaatgtctaccaatccgcacggacatccgacggacaaaaaatggaccattggggagaaagtgttatgccgttatctgaactcggagcacatttattatgaggctaaagtgatgtttctgaaagacttgtctggcggagatgtcggctatggcattcattatccgggttggagcaaccgtcacgacgaagttgtaccacaacatgaagcactaattcgcttcaagaattactccgatgaagaggcaaccaaggcaaaggaagacgtgaaaagggctcagcagatgctaaatgccaaaaaaagaaagcgatcggaactgaagaaccgctcgcaagcgcatgatgaaagtagtcgctccagcacaccaggaagcgccgacaacgcatcaaaacgtaagatcgcccgtcggacgacaattgaaactagcgcagtggccaaaaaggacatgccccaagtcacattgaccgaccctttgcgacgcattctgatagacgac

SEQ ID NO: 48703 - DNA, 637 bp, Heterodera glycines
catgatgatcgtgtgccagcatttacggaacttacgcttatcagacattcacccgactctgagaatattcaaatgcaattcgccgcgttttttatttacagcggccttggaagattgatgagaccagttaggaaccttttatttgatcaaatcgagcaaataggaatttttgaacaagtttacctttccattataattgaccccgaagaggcagaaccgggcgtaacaatgcaccaagaacttcatccctcgtctctgttctcattcgctggcaatttgattccttttcccgatcacaaccaatcgcctcgaaatgtgtatcaatgtcaaatgggaaaacagacaatgggggtcccagtccacgcttggcagacgcgtacggacaacaaaatgtacaaattgcaaactgcgcaaaaacctttactcaaattggaggcccatgacaaatacgaaatggacgaataccctctaggcacaaatgcgtgtgtggccgttatttcgtacactggatacgacatggaagatgcaatggtgatcaacaaggcttcgtatcagcgtggctttgcacatggaactgtcgttaaagtgcagaggatcagtttggttgatcgctccaccggtggttttggtcagaaca

SEQ ID NO: 48704 - DNA, 640 bp, Heterodera glycines
cttccttggattgagttcaagaaatgtctttcctcaaagtgttcgcccgtcgtctctttttgcatgtcacttttcttcgggtaccaacgatgatgttttatttgaacgggtcaatcaaaaattggtcatcacgctgaacaggcccaaggcattgaatgctcttaactttccgatgattcgcaaaatttacccccagcttaggaattcttccttcgatttggcacttgtcaaaggtacgggtggtttagccttttgtgccggtggcgatgtcctcgctgtctcaaaatcctataaggcgaatgatccggaccgaatttttcagcaatttttcctacaagaataccaactcaatcatttaattggatcactcagccgaccctacgttgccttcatcgatggcattacaatgggcgggggatgtggcctctcattgcacggggcttttcgcgcggctactgaacgaacaatattggctatgccagaaacggcacttggcctttttccggatgttggcggaacgtactttctgccgcgactcagcggtcaactcggcatgtttttggcactgacaggttttcgtctccatggtgcggatgtgttccatgccgggctggcgacgcattatgtcgagtcagccaaa

SEQ ID NO: 48705 - DNA, 897 bp, Heterodera glycines
cacaatttgctgtcccattgtttcccgatgctgtgaagaagcaatgcttgaaggaattgaaacagcgatatgaaaataaagaaattaaaagtccgccggaaaattttgaagaatgggttctgcaccattttggaccccaaattttggatgtgttcttcaatccgtactccaaaaaagtgtggacagtgaaaccgtcgaaaatgtctccaatttgggttggcactcgggtggcaaaattgccacaagaaaagctggaggaactgtgctcaatggatgccaatgtgttgaaaaatgccgattttggatggggcccaaatgcacaatttaatttcccaaaatacggtggcaccggcgccgtgtggaaaaatatgacggagaaattgccatcggaatggttcaaatataattcaaaggtccttcgcgttgaccatcgccaaaagtgtgtgcattacgtccaactgaatgccaatggtcagccgacgggcccaacaaagtcactgaaatacgacgcactgatcaactccagtcccatcgacgcgttcgtggcggacaacaaaatttgcgagatgccgttgttggagcacaacaaagtttttgttattggcgtcggattgaaactgccaatgactgagttttgcgagaaatacacttggctctactttcctgaccctgacgtgccgttctatcgtgtcacatttttcacggtatggtgaagtaactccggacaacaccaaattttggtccgttttgtgcgaatgcgcacggcccagcgatgacacgatgaccgaggccgaaattcgccaatgggccatcgagggtctgatcaccaaatcgatcattaaacgtgagcaaatcatcaatgaatattccatctgtttgccctatggctatccgatt

SEQ ID NO: 48706 - DNA, 714 bp, Heterodera glycines
aataccatcacggcccggctgattttaaaattccagtttcctcattatcaactgtgcttctattgatttacgtacctttttatgatggacgaggacatggaagaagtcgaaattgtttttgctcagcgattggccagcggtgaaccaacggcacgacaaagggccatgaaacacttgcgaacgcacataagagaaaggacgaaaactgatgcaaagggcttttcctctgtttcgttagcgcgactttgcaaagggttgcattatgcgctttggatgcaggacaaaatgactttgcaggaggaacttgcggatgaaatctgcgctctttgcaactattttcgcaccgacgagcaactgcttgaatttgtcgttgttctgttcactacgctttctaaggaatggccgtacatcgaccggtggcgaatggacaaatttctcatgttggtccgtcgtttggttcgcactttgttccgtcgattgtcctcccaccgctgggacccgccattgtgtgaccaatttttgcaaatgttttgctcttcgctgctcagtgccaattcgcctttatgcgagtctttgaaattccattgcgcgtccgtttggttggacgaattggacacagcggcaacagcgaaagtgacgccgagcgaagggaacgccggcaaaaattgcgaagcctttccattggatgcacagcgctcgttggactttgtttgg

SEQ ID NO: 48707 - DNA, 700 bp, Heterodera glycines
atttggaccaaatgggcgagtcgacttgggccatcaggagttccaagccgtggtcgaccatttcgcggtacggccaataccaagcggagtcctttcgccattctctgaaagaggaaacggaaaaactgcgccaggccaaccccaaattgttccaacagcaaacgcccagcacttctgacacgccacccgtcgactgtgcttcgccagcaccgtcgaagaagcgcaaaacggccgcttcaatggccgcggggagcggaacgccgacgagcagaggccgcgtggaggagagcagcccgtacaaaatcatcaaattcggcaccaacattgacctgagtgacgagcgaaaattctatgtccaactgaaggaattgaacaaattgcccgccttttgtcgcctccattccgccagtaatatgctcagttatctcggccacaccgtttttgggatgaacactgtccaattgtatttgaaagtgcccggctgcagaacgccaggccacctcgaaaacaacagttttgccagtgtcaatgtgaacattgggcccggcgaatgcgaatggttcggcgttccttacgaatattggccggtgttggaaaatctgtgcaaagagcggaatatcgattttcttcgtggcgcgtggtggccgagtgtttcggacttggttaagtctgacgtgccattctatcggtttacgcaaaa

SEQ ID NO: 48708 - DNA, 1691 bp, Heterodera glycines
gtttgtatatcaaattcaactcaaacaaactcgaaaaaaatacttgtttaaactgcagtgaaatggatttagggggattttaacctttaattaggaatttgatcacagttaaagaattaagacactttgttttatatttgaatgcattggcgttttttacgccaacaatttattggcgacttttcgttttttttaccgtccgtggaaaggggcacccattttgggccctttcctggcgaatgggctgggctgggggcgaccccgctattttgtatgttgttacttgaacagatttaagcattatttaattttctttttcaactgtcacagtttaaatgttggaaatgaacggtgttggaaattccaaagactatgacaccaaagtgaaggcaattctcgaacaatgccgaatatcacagaagctcttgaactatactgagcattttaactatccctatgtcagcgaagtgacatattacgagcagttgttgaagattggacaaggaacatttggcgaggttttcaaggcgcgttgcaagcgaactggcaaattggtggcactgaaaaaaattttgatggaaaatgaaaaggaagggtttccaataactgcacttcgcgaaataaaaatgctacaaaggcttcgacatcagcacataactgaactggtggaagtgtgcacaagcaaacaaaagagtgggaaggagaaattctgcttttacttggtgttcaccttttgcgagcacgatcttgccggtctgttgagtaacacccaagtgaaaattcgactggtggacatcaaaacgatgatgcagcacattctgcgcggattgcacaaaattcactccagtcaaatattgcatcgcgacatgaaagcggccaatgtgttgattactggtgacggggtgctcaaattggcagattttggtttggcacggataatgtataagcaaccagaacattgctacacaaatcgagttgtcactttgtggtatcgaccccccgagttgttattgggcacgcggaactacggcccggcgattgacatttggggcgcgggttgcatcatggccgagctttggatccgtgcaccaatccttcagggtaacaccgaacaatctcagctggagctcatttcgaaactgtgtgggtcgattaatccgcacagttggccaggtgtttgttggcgtttggcttttcctaaaaaaccaaatccgccaaagggtgtgacaagttgccttattacaacaatttgcaaggatcgttacagcaaaatttaccgagacgcgtgagagagcgtataaatccatttcttcagaacaatgagcaagccctttcgctcatcgattttatgctgacgcttaaccccgagaaacggccctctgcgtccgctgccttggaccacaacttctttttcgagacgcccatcccagcaataaacattcaggaattgctccaacagttaagagggaccaatttgttcgagtacacttcgggctgtggagctcatgctaaccgtcgtcggccggttgctcctgccgctcccatgcaccagcaacaaatacgcggaaaaatgccttctgttgggggagcgatgcatcgggcaacgggaggggcaccgcaaagggcacaacaccaaacggtgggcggtcctccaaacatccaccggtcaacgggcggagcaccgcaaaggg

SEQ ID NO: 48709 - DNA, 815 bp, Heterodera glycines
attaatatgattggtgcgacttggataaagaatttaaaaatcactgcccagggacgtgagatttatgactctaactcactttatgcttataaagcatacttggatgccgaactttcttattccaaaaacgtaaaggagtcagacctacaggcgagcgggtattatgtggacagtgagaatcaggacggcacggatattactcagcagggttttgaactgagaagaaaattgttttcacaaagtcaaactgcacaatttattacaaaattggatgcagatatttttaatcaggacagatatatggtgaatggagttgagattgatatacaacttacccctaatgacaatgagtttatggtaatggcagcggccgacgataaatatagaatagaaattaccgcttgtaaattatatgttaaaactcttgaagttgttgatggtcttgcattagacatacagaaaaaacttgaaagcaaagaagcaaaatatgcccatagaaaaactttgatcaaatccacatttataagcgagaatcgaactgaatacaatggaacgctatttacgggtcaattacctaaacgagtcattctcggaatggtggagaacgctgcatacgtaggcaaccaaaagaaaagcccatttaattttaaaccatttgatattcgatccgtcacattgatagcaaacgggaaacaatggcccgcagcgccatttgagcttaatttcaacaaaaatttatataccagggcattccacgaaatgaatgaggcattaggtatggccagttcaacagacagtaacggaatttctcttga

SEQ ID NO: 48710 - DNA, 643 bp, Heterodera glycines
ctcaaaatgattatcagcagcaaagccgtccaacttttgacttgctacagaaataggatcaccagaaaactacaatattcgactacggagaatgtgccggtgaatgtgcctgagccggtcatttcctcctccaacatggcacagttccgcaagggagcgggcggtcgttccagcttctcgggcaatgtcattacagtttttggcaacaccggatttaccggccgaagggtggtcaatcggttggccagacacgcaaatcagctaattttgccgtaccgctgcgattcgtattttctcagagaattgaaagtgccttgtgaccttggccaagttctgttttttcctttccaattggacgacgatgaaagcattcggaaggcagtcaaatacagcaacgttgtgatcaatatgatcggcacatatgtcgacacaccgaattattccatttatgacgccaatgtggagggtgcgtggagaattgcgcgcatttgtcgggaaatgggcgtggaacggctgatccatgtgagcgcattgaacgcggacccatcgtacaaaacgcaattcatcaaaaatggcgcctttctgaaaagcaaaggcatggccgagcaggcggtccgtgccgaattcccaagtgccaccatca

SEQ ID NO: 48711 - DNA, 1026 bp, Heterodera glycines
ttgtttggttcgtccatcggcacttcttcgccttttggcagcaagccgagtggtggtctctttggcgctgcgaacaccgcagttgtgcagcccagcacttcgaccacaacgcagcaggacatcgaggttccacaagctcccgatgacactgtgcaggcaatgaaattcaatccgctggtggccgggtctcccatttttttggctgctggttcctgggacaacacctgtcgcatttggcaggtcaatgaaaatggaatggttgaaccgaaggcaatgcaaaatgttggagcgcccattctttcgctggattggtcggaggacggctcaaaaatattcatcgctggtgcagacaaacaagcgttcgcctgggatttaggctcaaaccaaatggctgttgttggcacgcacaatgagccagtgcgaagttgccattggatagcgacaccccaatattcgtgtctaatgacgggaagttgggaccggacgctgcgtttttgggacatgcgccaattgcccacccaaaactccctggcaaccatccaactgcctgaacgcgtgtactgctccgacatggttttcccgctgatggtcgttgctttggccgacagacacatcaaaatgtataagttggacggaacaccctctgaaattcaagacgtggaatctcagttgaagtttcagagtcgttgcattgcgattttcaaagacaaaatgacgggacagcccaatggattcgctcttggctccaccgaaggacgagtggcgattcaatgtttgcagccaaaggacccgaaggacaatttcactttcaaatgccatcggtcagccgaactcatcaacaattaccaggagatttacccggtcaatgacgtcgcttttcatccgacccaccaaacattggccacagcgggcgcagacggaaaatattccttttgggacaaagacgcgcggacgaaattgaagggttccgatgccttgccaatgccaatcacaaaatgcgccattcattcgggtggaaacataatg

SEQ ID NO: 48712 - DNA, 779 bp, Heterodera glycines
ccacggccaatttcctgacttgatgagaatcttcaactgcctcgggaccccgccggagaagaaatacctgttcctgggcgactacgtggaccgtggcgcgcaatccgtggagaccatcatgctgctgctttgctacaaggtcaaatatccgacatcgattgtgctgctgagagggaaccacgagacgagcaacatcaacgcaacgtacggcttcaaaaaggaactggaggaacgctatccggcccattcgcaagccctgttcgacagcttcaatgacaccttcgcgtggatgccgctgaccgggctaatcggccaaaaaattttatgcatgcatggaggcatcagcaacaaaattcgaagcattgaacagctcaaacaattggaacgcccgatgctgctaccgccgaccgatagtctgcacattgaccttatgtgggccgacccgatggaagcgcaaggacaacgaccgaatccacgaggcgcaggtgtcctgttcggcgaagatgtggttatcagaacttgccagctgctgaagatttcgtgcatcatccgagcgcaccaattcatccaatccggatttgagccaatgttcaaccaacgactcatcaccgttttctctgcacccgcctacacaggccaaacaaacacgggcgcggtactggaagtgaagacgtcgagccactttaccactcactttttcccgccccaatcccagtgattgattgtactttgtattgttgtcgttgttgtgtttataataaatgctcttttgtgcaaaa

SEQ ID NO: 48713 - DNA, 897 bp, Heterodera glycines
aaaagtttcatcgattcggcaattgcatttgtgcgaaagcacggctttgatggcattgacatcgtaagagaatacccaaagggcggagagcagaagcgaaacttcagcagattttttaaggaactgaaagacgccgttcggaaagaagcgtcttcaagcggaaggccgcgtctgctgatcactgctgcggttgcggcggggacggaaaacattgacaacggatacgacattccgacagtcggaaagcttctcgactttgtgcttctgatgggctacgacttccatggctcgtgggagcagcagacggggatgaacgcgccattgtacggacggtccaaagatgtgccggagaagcgcttgtggaatgtggctggtgctgcgaattattgggctaagaagggcatgccgaaatcaaagattattatcggaatcccaacatatggccgtggatggacactgagcaacccgcaacaattccgtggcatcgaagcaccggcccaagtggcaaaagcgacaaaatttgtcaaattggcgggcatcggatcatactttgagttctgcgaaatgctggcaaacggtgcgcagcgttacgtggaccgggaaacgctggtgccctttttggtggcggacaacgaccagtggttcagctacgacgacgtggagagcatcagaaacaaactcagttggattcgccaaaactctttcggcggcgctttcgtgtggactttggactttgacgatttcaacggacaatgccccggcagccaactcggccgttacccgctgatccgcacaattgcccaagaattgggcggcatccaactctcacagacacccgtctcggcactttcgaattcgccttcgccgtctacgggcgcagctttgccggctgtcaca

SEQ ID NO: 48714 - DNA, 846 bp, Heterodera glycines
tgagcgtaaaatatgcaagaaactcacattgttctcggcattgcctcgctgtgctctctgctggcgattatcgccaccgtagtcactctgccatcgctttactcggagatgaaccaactgaacaacaaagtgcgcgacggcgttgaagccttccgcgtcaacaccgactcggcttggactgacctgatggacgtgcaagtagtcgtggcaccaccgtcaaaggcccgtgacaacccattcaactccatcttccgtgccaagcgtcaattgcccggccattgccattgcggtcccccacaacggccaaactgccctcctggcccacctggtccgtccggaccgcctggccaacccggacagccgggaggcgcaggactgcccggacagccgggagcacctggacaacctgctcctccgtgcccgcctcagaacatcccgtgcccacgctgcccggctggcccacccggcagccccggaggacaaggaccgcccggacagcaaggagcccccggccagcctggtgcgcccgctccaggcggaggacaaggaccgcctggcgcgtccggaccccaaggacagcctggacagccaggacgcagcggaacacccggccaacccggacagcctggaaataacgctgttattttcaacaccattcctggcccgaggggagctcctggtgcgcctggccaaccgggaagtcccggcagtcaaggccaacccggacagcccggaggccaaggaccgcctgggccctctggtgcgcctgggctgcccggcctgtctggcaacagcggtcagcctggacagcccggggcacccggccaacccggcaaagacagcggc

SEQ ID NO: 48715 - DNA, 657 bp, Heterodera glycines
gagaaaattcgtagatgggaaattactacagtccacctaaacgagtggggcagaaccctttcactcgttctggggcgccgccgcctaaattggtcattaggaaggacaaggatgtgccgatgcaccgagtcaatgacccgatgagtttgcagctgcatatggcggatgaacgcgttcggactgcgggactctcgaaggcggagagagagtggagagaaaaatgggttcatgaccagagtatgcatccggatgagcctatccatgtcgacgcggtccaccgccaactgaatccaatcagagtgctttatcgatggccaatggataagctttacaagcatttcttgcgaccaacttttgggaattactgggcaacgattatccgtgtctatgttcccaagttcttctggttctttatgacattcgaatttttctactacgtgtggaaatacgaatcgaagagttggcaaaaacgaattggcttttccactatcaatcgaccggatcgttatgtgcttgtcaaagaccacgatgaggagacgcttaagcttggcctgacagactacagccgatctgactattttgacaaggaattctaccagcgcattaaaacggccaacatcgacttcggccccccgaagaggccgtggtgatcgctgc

SEQ ID NO: 48716 - DNA, 560 bp, Heterodera glycines
  unsure (1)..(560): unsure at all n locations
atttttaaagtaataattgatttaaaatgtctaagcgaggtcgtggaggcgcttctggggcgaaattccgggtttctcttgctcttcctgttggcgcagtaattaattgtgccgataacactggagcaaagaatctgttcgttattgctgtttatggcattcgcggtcgactgaatcggatgcccagtgccgccgttggagacatgttcgtctgttcagttaagaaagggaagcctgaactgcgtaaaaaagttttgcaagctgtcgtcgtccgtcaacggaaacaatatcgacgcaaggatgggaccttcatctatttcgaggacaacgccggagttatcgtcaataacaaaggcgagatgaaggggtccgccatcactgggcctgttgccaaagaatgtgccgacctttggccgagaattgcttctaacgccagttcgatcgcctaatttgtttgcgttattctgttgatttttgttacttggatgcaaaaattgttatttgtctaattttttcaattagtaaaaattctacngttnaaaaaaaaaaaaaaaaaaaaa

SEQ ID NO: 48717 - DNA, 728 bp, Heterodera glycines
  unsure (1)..(728): unsure at all n locations
gtttgaggttttaaaatttttcgcagtcaattttccaacgtctcttctgtgaaaatgtcatctgacaagaacaaggaacgcactttcatcgccatcaaacccgacggtgtccagcgcggattggttgccaaaatcattaaacagttcgagcagcgtggttacaaattggttgccatgaaacttgccaaggcaactgtcccccatttggaggtccactaccaagacctcaaggacaaacctttctttgccgggctcgtcaaatacatggcatcaggcccgattgtcgctatggtttgggaaggtttggatgtggttaaacagggtcgcgttttgctcggcgctacgaatccgttggccagtgccccagggactattcgtggcaatttttgcattgagatgggacgtaacatttgccacggctccgattcggtgccttctgccgaccgtgaaattgcccattggttcaagccggaagaactcgtcgactgggaaagtgcgcagaatgcgtgggtttacgaatgatggaaagaggcaaatttgtgcagtgaaaggcctctgctttcgaatcgatgaccaatgacgaccatccaatttttgtttgacattcttccattctgttagttaggtttttcttttgttgttggctttgtttgtgttcttccttttcaattcgagcataaaattcctaattgttnnaaaaaaaaaaaaaaaaaaaaaaaaaaaaaaaa

SEQ ID NO: 48718 - DNA, 845 bp, Heterodera glycines
  unsure (1)..(845): unsure at all n locations
tcattctaccccgattcgtactaaattttcccaaacatgtaaaatgtgttgagtgttcatccaaatttttcaaccaaaattccccatttctcgcttctttacaattttatttctataccattattcgacttcaaacagagtttattaacgacatgccaggcaatgaaacaattcgaggccatttggaaaaacggaaggattggatccgacggacgagggaccatcaggaaaagtcggcggatatcaaaaagttgaagagaagcgcacgggaacggaaccccgacgaattccattttcatatgttgcggagtcaaatcggatttgatggaacacatcgcgacttagagacggaagaggaggagaaaagcgaagcgcaacgccttttgagcgatgtcagcgatattaatttcgtacaattcaaattgggcatggaacgaaaaaaaattgaaaaattgaaagcggtgctccacttttgtgatgagacggaaaaaccacagaacaaacacataatattcgcggaggacgaagaagaagcacgcaatttcgaccctcggcaatatttcaacacttccgaacaattcttggcacggactttcaatagaccaatcgaaggcgacgcgcggaaaagcctcagcgtaacggagaaacgaaaattaaaagaaacagagaaggagcgacgccgtccttacgccgaactttgcaaacgcatggaaagggaacgcgaactgacggtggtgttgcaaaaagtggaactgaagagagatttggcactgttcaaaaagtctgagttaaagccgaaactgatcaaaaaaagggacgcacnngaggcagccatttacaaatgg

SEQ ID NO: 48719 - DNA, 628 bp, Heterodera glycines
gtatacaatacatataagctaaacaaagaaaaagctttcaatggaccaaaacaacgaccaacgccgtgctgttaacgaatatcggcttaatgaggacaatgaactgcgtttagaagtgggcaaagaagaagtcattctcgaattgctggagggttctgccgaaatattcggctcccaaatatccatgcacaaacgctactctctccccccagggtttcgcgccgccgttttcacatataaaggtgcccttattgaagtggtcggtcgaacagatagtgcttacattgcacaacaaacacctatgattatctatttgaatactcatgccgctctcgagagtatgcgaaaaagtgccgagacacaattggtggccgaccgaacatcttccgcccgtggtccacgtcttttggttgccggaccaactgatgttggaaaatcgactctttgtcgaatattatgcaattacgccgtccgggagggaaggacacctctttatgtggaccttgacattggacagggcagtgtttccattcccgggaccatcggatgcctttacattgaaaagcccgcagacattgtggacggattcgatcgaaaagccgcctatgttcacaacttcggtcacatt

SEQ ID NO: 48720 - DNA, 693 bp, Heterodera glycines
caagtttgagatggcatcaaaaattgttccaattgccgtttcgccctctttcaactttttgcgtcgtccattgccttcgttggtctttcgtcgttctcttttcaaatcgccattggacgcgccgttctgtggcatttacaggacaaatggcgggatttgccggacggatgacattttggtgtgccaacgcaagatggactatcaccttggagcaaatgtccgtcatcaacggggtcggaaccagcacttgttgaaagctaattgtgacgggacggttgtgatcacacgcggcaaaacgttcgaagagttcaagcaggagtatgagcgtgagtcggtttcgaggcgtgcggcatttactcgcggcaccattttcactgttcttttttatccgggcatttttgttggcattttggcggtcatcagtgtcatgtctcatcgctggtacacttatcatggcactggccgtgaacttcgccccgtgtcgaacgccttcgtccgctttgtcgccgctttcttcggttgttacagctattttccctacaacactgaccccgaccctgaaccaatcgctgtcgttgaaaaggaatgagtggtgaagaggaaatacgatttaggcaagcaaccacaacactttggtctttttattgttatttccctggcacataaacacagaccaaatgcaaaaaaaaaaaa

SEQ ID NO: 48721 - DNA, 658 bp, Heterodera glycines
ccttaagcctttgctaatggaggttgaccatcaatcacttgacagcatttgcgaaaatattttgtcaatttctcgtcatttggatcttccgctagctgataatctcgacaatgcccatttgtcactcttcaagactaagctgactgaatttgctaaagaaagcaaaaaacaaaaagccattccgagtttattgcttccgtcgaatttgtcgttgaatgacaacgaatgggccaaatttggacagtacgtcgacttaatgaatgccgattatgcggagagggcattattgctgaagagacgtgccgaagtgaccatcgattcttttctttggtcggatcgcgtcaaacaaattgaggacaaaattcgacaggttttggaagtcggcggattcacaaatgttcattttgaccctgtccatgccgacgatgttttggccgctaatttggaccttttatatgtgacgaaaacaagtgacgcgcaactgagaagggggaagcgcactttcgtaacggaccatcgcgtgaaggcggacattgtgccggacagagggggaaggacggagcaaatgcaaccgatgcagcgggagacattccaccagcaggagacacaacggcagcagcaacagcaattccggggaggaggcgcaggagctggacgt

SEQ ID NO: 48722 - DNA, 1129 bp, Heterodera glycines
ggcgaattacaccaacaaaaacttctatacaaaattgaccttggcgctgtgtacaatcgtccgccgtgtgaccgcaagaatattggtgaattttttcccgtggaacgggaactcgtctttgacatcgatttgaatgactacgacacaatacgacaatgttgcaaggacaaaagtgtgtgcaaaaagtgttggcgttggatcataattgcggttgatgtgctggagcatcttttacgaactcattttggcttccaacatttgctctgggtcttttccggacggcgtggcattcactgttgggtggcggacaaaaaggcacgcgcattgagcagtcgcgggcgtgaggcgatcaccaaatatttgacatttaacaaagatggctctgcgatcaacaaatatcgggtgcacccatttgttacggaatcgtaccgaaaaatcatggaatccgacgattttgagcagttgatcatggaacagggatggttggactcggccgaccaatggaactctacaatccttgcccattgggccgacaaaaatttggctgaactgctcgacaaaagcttttcaaggcttcaaacgccaaaattgcgttgggaatcgatgaaactccgatttgatgatgcaacgcgaatcaatgcgcgagggatcaaattgccaccgacaccttccgatgaagcgagacgttttttcatttcattggtcatgaaatttgcttatccgcaactcgacgcaaaagtcactgctgggctcaaccatttgctgaaatcgcccttctctgttcatccagaaaatggaaatattgccgttccgttgagtgccaaagaaatccgtgcctttgatccgaatgtggtgccacgaattgataaattgttagcacaacttgcctcattgcgagaatccagccaagaaaacaaggagaatcaacgttcaattgtctatcgtcaaacttcattggctccacacattgctgtgtttgaacaatggaccgcacaaattctcaattctgaagcgcaaaaatgacagagcaataacaacaactcattccttcatcattgctatttttgaacactttttaactgtttaatttaacattttgattttgccaaaaaaaaaaaaaaaaaaaaaa

SEQ ID NO: 48723 - DNA, 1065 bp, Heterodera glycines
gtttgagtgcgtctgatgttgtgctttcttcgttctgcaaatggttgctcctccgtgggattctcttcgtctgtctgttctcgttttgcttttcctcgcctttgtgtgttggcttcgttgtccaatgagtcgggactgagcgagtgccttccccaatcggttgaaagtgtttcggcatcggctgctgcaattcgggagagagaacgccgtgagcgccttctgacgatatcggacgcaatgaagttttacctggagaggaagcaggacgaaatggcgattctggagaaggagaagttgctgtacgcgcaaggaaagcgccacttggccaacataatgggcttcgaccccgactcgatcagcggggaccaaatatcgcagtccatccgttatttgttccccagcggcctattcgacaaaaaagcgctacccgtgatgaaacccccggaggaagtgttcccgaaaatcgtgaagattgacgtggacgcctccggctctccgaagcattcgctgtttttcactgccaaacccaaattctattctttgctttcggacataaacaaacgcacacaaaaactggtgaatgcattcgacggacatcagacaaaagtgaacgaagttgaaaagatgcaaacgatggaattggcacttctcggagaaaaaccggccgagaaaggacagatcaatttgatgggcacccaatgggtgacgaaggatcagctgcagcagcaaatgcaggagatcctttccgatgacgaatatgcaaattttataattgcgctcgaatacatttcgcaattgccaaattccgcggaggaggaggactttatcatgtcattgcgtcgtgggattggagcaagtgaaaaaaatagacttttccgcgcaaaagtaccggaggtgacgataaacgaagatggcaggagagaatgctggagaatttgcaagacgagggcttccgccgtgaaaattgtggtcagagacggaggcaccggccttttcacagtcaatgggcaacactattgcacgttccgttcgctcctcgcgagagaatgtctcttggctccaatg

SEQ ID NO: 48724 - DNA, 1066 bp, Heterodera glycines
  unsure (1)..(1066): unsure at all n locations
gtccaccaactttggtgcagacacaggtagaaggtggctctacccttttctccctgaatttcttcggcgagtccgctttcctcactcagtcttctcagctttacctcgaaacgtgcattgcctcgttgggcgattgttattgcatttcgcagtcttaccgcgctgaaaagtcgcgcacgcggcgccatttggccgaatattcgcacgtggaggctgagtttccatttatcaccttcgaaggtcattttcaaagtgtagagaaccagcgaagctgtgtgttcagatttgatggtgcgcattgaggaaatgacatgtgacacagtcaacagagtgatggccgacccggaaatacgcgaacttatccagcagcagtggcaaaaggattcccaatatgagttcgtcgctcccaaacggccttttcttcggatgacttatgcggaggcaattgaatggcttcaaaacaatgaagtgatgaacgaagaggggaaacccttccaattcggcgaggatattcccgaaggccctgagcgatttatgaccgacacaattggacaaccaattcttctcaatcgctttccgcatggaattaaggctttttatatgtcacgttgtgcagatcaaccggaattgaccgaatctgtggatttgctaatgccgggcgttgtctagatagtcggaggatcgatgaggatttggaaggaggacgaactgcttggggccttccaaaaagccgacatcgatcccaagccatactactggtacgtggaccagcggaaatacggaggttgcccccacggaggttttggacttggtctggagcggttcgtatgctggttggccaatcagcatcatatccgtgatgtgtgtctcttccctcggaacatcgggcggtgtgcgccgtagcttttttccgtctctgaaaaggaccaaaaacgaacccatacgaatatgggtattgttcatttttggcgttaaaacaaatgtatcttctaaattgtgcatttttttttgttgttgttattgcataaagggataaaacgcntaaaaagaaaaaaacaaaaaaaaa

SEQ ID NO: 48725 - DNA, 396 bp, Heterodera glycines
ttgagaccaaaattaatttgctccctctctaaatgccgaaggaagaagtgcccgaaggagttgaccagctgacttattttcgtgagcaatgcgagcataaggttgcccatttgaagtccattttggaggaatgcaacgagcgcgtgcggtccaagccgaagaccactgaaatttgtcacatggagatgatcgactacgtggagggcctcgatcattgtgccaaaccgaaggcattcaaagcactgaaatgatgcccttcaccgccggatgattactttaggttttttgtctgttaatgtttttcggatttatgacgacgatatcagcaagcttttcaaatggatattaatcaactggtaaaatatgtaattaaaaaaaaaaaaaaaaaaaaaaaaa

SEQ ID NO: 48726 - DNA, 495 bp, Heterodera glycines
gtgacgcaaaagattgtgaagaaaaaacagaagaaaggggcgcaggcgggcaaatacgtcaccaaaacggtgaccaacgaaagcttcttcaactttttcgatccgaaagtgacgaccatcacagaggaaatggacgacatcgaggaacagaaaaccaatgatgacttcgaggttggacagatcattcgtgaacagctgattccccgtgcggtgcttttcttcactggtgaggcggcagaggaagacgaatatgacgagttcgatgacgaggaggaaatgggggacgaacagtcggaagaggaggacaatgccatgcactgaaggaccattggacgctgttaatgacaattgtttagtgacgctgatgatgttctctatttaaaagttgttttgttgacacttatctttatcacacacattctgttaatgcgcgtacacacaaacaaaagatttattctgttaaaaaaaaagagaagcggactctagaattaaaat

SEQ ID NO: 48727 - DNA, 1104 bp, Heterodera glycines
ctgactttgacaaacacgctgcccagcgcgaggcggagtcgctccgcactttggccttcttcggcgtgtgcctgtccaccgtggccacggttatcgctgtgctttccgtgccgttcgcctaccagcacttccagcagatcggcgcccaaatgcagaacgaagtggacttctgcaaaatgcgctccggcaacatgtggcgtgaggtcacccgcacccaggcctactccaaggtgtcgcacgacagccgtcacaagcgtcaggcaggcggttgctgtggctgcggagtgtcgcccccgggcccgcccggaccccctggcccatcgggacaacccggcggagacggacaacccggaggctcaggacagcccggagcaccaggccaggcagctcctcgcccgtacccgccaagcggcggatgcgtgccgcaatgtgaggccgcccagcccggactccccggcccgcccggaccccccggacccgagggacagaacggccaacccggacagtcggcaccacccgcgtctcctggccgccccgggccccagggacctcctggacccgatggacagcccggcaaccccggagagtctggccaacccggccagcccggcaaactcacccagggcccgcccgtcgttggaccgcctggcccatcaggaccccctggccagcccggacagcccggcgagaacggacagcccggccagcctggaaaccccggcccgcaaggataccctggcgacggcggaagccccggccaacccggcaaccccggaggcagcggcgagcccggacagcccggagcacagggatccagcggccaatgctaccactgcccaccgccccgcaccgcccccggctactgagtgtgatcagtcgaccatcgacaattggagaagaacccccactgatgatccacgaggctgctgtcctttcgtctctcaccattttcccgatcattttggcatttccaaaacgctgatcggacaattctcaatgttatttttgtatttgtgcaaaatttcgttggattgttctgtcgcacaaaaaaatcaaagaataaattgatcggagctcaaaaaaaaaaaaaaaaaaaaaaaaaaa

SEQ ID NO: 48728 - DNA, 647 bp, Heterodera glycines
caaatgttgagttggttggaggacaaaaacgagaagttcttgaacattgtcacggacattatgcagaaagtgatcacgaagaattccgaacaaatgacatttttcatcggaatgaacggacaccaaaaactggtcggactaattgccaattgtcgtcaggaggcactgttatggagagttaccaaactgatggacaaaattgtgcagatggacgcggaaagaatggtcggcgcgggactattggaagcattgcaacgccatttggaccatccgagccaaagactgcttcgtcaagtgctgtcgtgcgttcgaagtgtcagtcacgtgccaaccgccgaccgaacagttcagccacttctgcagaaactgctccaacttcttggaacgagtgacattcgcctaaaagaaaattgtgtggacattttggccaatttgtgcgccaacaattcccaaaataaatccttccttgttgagaacggcgcggtgccatcgatgtttcagttgctctacgagttggactccgttaggagcggaggaggagaacagccgacgggagacgaccccttccaacggcaattggagggcattcaggagacggcgctgaccttactgaagtccctgtgcagtggacagaacgacgatgcgag

SEQ ID NO: 48729 - DNA, 631 bp, Heterodera glycines
cttttttttcttttttaccgtccatgcgtcgttttgataaccgtagcagtggcggcagattcgccaagatttcggcgaacaaaagagggtgcgcgctcaaccgagtcgacatatcgaagctgaacatcaatttcgaaagcccaaaatggcaggaaaggaaagaggcattggacgcactgcaacaattgttgttgcaatcgccgcgacttgctgatttgccaaattaccgggagctaatcggacgcttaacaaagattatggcaaatgatgcaaatatctttgtcgccgcaagtgccaccaaatgtgtgatgctgttcgccaaaggattgcgtgccgaattcacgcctcacgtgtcgttggttgtcccggtgatcttcgacaagttcaaagtggagaaacggttgctcagagatgctctcgtcgagtgcatcgatgtcatcgcagcatataccagtttcgaccacctaagcaaggccttgctcgaggctatgacctccaaacagaatccgagtcagaaatcacagacggatttgttcatctaccgcctgttccgttctcttccggccaaagacgttcccaagggtttgctgaaggatttggtggccattctgagcaaacatggctttgatgc

SEQ ID NO: 48730 - DNA, 612 bp, Heterodera glycines
gtccaataaggtgcctatttttcgatttttgtgcctaaaaaaggaagccctactcattgccaaatgctctgttctctacgtggagttttgccaaatttcttcaaaagacatttatctgttgccattcaaaaaaatataccggaggagcatgacgagggttttgtggacgttgcgaatacggagatactgtgcaaatatgttttcatcaattaccagtttggagcagaaggaccgggcccgaaaatacaacacaactctgagtatcccgcatggcttttcacattggaccttgaaccgtcaaaggagctcgaagacttggatccggaaaacagtggatggaaatattgggagaaatgggaggagcgaagacagcagcaaatgttgcgccatgacgaactaaaatacaaatatttttggcttcaaaattcgcctgccgttcagacgcacatgcgcttcaccactgaaaaatacaaaacacacaagttcctcactattcccgtgacgacgccgggcgtttatttgaagcatacgcgtcgactgcgtctcaaacagcgggtgtggaagtcgttggaagagtcggagcaaatgatgaaggaaaatgatggttgggga

SEQ ID NO: 48731 - DNA, 650 bp, Heterodera glycines
gcaacccggagcagtacctggccaatttacatgagctttacctaaagacgcacaaattgctgggccttctgcaggagaaattccgcacgaattcattggacccccaatttttgccaacgctcactcagtcggtgttcggcccctatttggtcacatatgcaaaaattgagcacaaattcatcgccgacaaatgcacttttacgctccgaaagttctacgagtccaaagggcaccaaaaacggagtattctctcgagcggacttcaagaactcaagtcgcgtctgctgacagcggaggattttggtggcgaaacttttctttccgaaatcatagcgataaacattctgcaggagtttaagaatgccttcgcccgctgttcatcgctttgcaaaaaaacggagtctcttgaactgaacacagtgctttttgacatgcttctcaaatttctgtacaccgaacacgtggaatacgccattgagcttggcctcgcatgcattcccctttccgagccacggattgagccgtctccaaatttcttcaaagtgatccaacagaagtccgccatcactcatttgttcgccaaattatttgatgacacaattcaccccggaaaaagggacacacaaatagagggacgcattgcttcgaaa

SEQ ID NO: 48732 - DNA, 620 bp, Heterodera glycines
taagctcccattgtattattactatgaccaaaacggataatgggaagttcaccgaaaaaaataacacgttgatggcaaatggaaggacaaaaccctcagagaaaacatctctgtccacatgtatatacaacaaacaggacgggactttcttagggcgttctgcaaagtcttgggcacagatcatcggattctacatcgtcttttacatatttctagctctcttttggttgggatgtctgtggacctttcttaatacgaacgatgattttattccgagataccacggggaaaacacaattattggcgcaaacccaggtgttggttatcagccttggctggccagcaatcccgagtccacgctgatcaaattttacgaaaacgacacctcaagttacaaggattatctcaatgccatcgatacgtttctggagaagtatcacaacacagaaaacactcgcttctgcgacgagaacggcatagattccaattctcaacacgtgaaggacggcaaagtgtcgtcgttaaacgacgtaaaggcgtgccgcttcgagctcggctttctcgacgacaatggctgtggtaagaaagacgactacgggttcaacaaaggacagccgtgt

SEQ ID NO: 48733 - DNA, 627 bp, Heterodera glycines
cctcgtgccgcttttcctcccgcttctctcctctctccctccctctcctccctttccgccatttctctcgataattgactcattacgctttctttgacctcccgccgtgtcggtgccaattcagcagatgccctcgccgtccctcgtgcccatttcggcaactgctgacacagcgaatgcatcgcccgccgctgacgacaattgttgcgccgtttgcgccgacgacgcccacggggtgcacttcggcgtacaggtatgccgtgcttgtgccgccttcttccgacgctccaccatcgcggcacgcgtctatcggtgccgttacgacggaaactgtgacatcgcccaaagggaagtgcgttgtgtgtgccgcgcgtgtcgattagccaaatgtttggcgcttggcatggacccggacgctgtccaacgacaccgtgaccaaattgggccccgacaaaataaaacgaaattggaaaatgaaaagcgacggacggaggacggcggacgaaagtgccaacgccattcgccaccaacaacagattcaatgtgccaacaacattttgaatcgacaaatgcggaggggacgaggccgaataattttatgagagaaactgagcagcagcaaaatat

SEQ ID NO: 48734 - DNA, 905 bp, Heterodera glycines
gctccaccaagcctttttggaaagcggcaggcagcactggatcggggttacagaagatatgaacgggtacagacaggagggactcgggaagatggacatgacgattaaagacgggagacggtggagcgcatccagcgcatatctgactaatattttggaccggccaaatctgttcactaccgccggtgtcacttgcacctctgttttgttcaacaatcatagagcaatcggaatcgaatttatacgatatcatcgtttcatgctcaccgaagaagtggatgcctactcacgggagaaaatttactgcgaagactctgtgattctttgtgccggtgccattaatacgcctcaattgctaatgctcagtggggtcggaccggcatctcacttgaaagttcatcaaatccctgtcgtgcaggacatgccgggcgtgggccaaaaatctacaggaccatcttgaactttatgtacaacagaaatgcaccaagccgatcacattgtacaacaaatccacgtggcgacacccccaccgcatggtcatcaacggtcttcagtggttcctcaccaaaaagggcttggctgcgacaagtcatctcgagtctggcggctttgcccggtccagcacagaaattgatcaccccgacttgcaattccatttccttccgtcgacggttcacgaggacggcaggcaaagtccgaattgccatgcctttcaagttcacgtgggcccaatgcggacgaagtcggcaggggaaatcactttacagagcaaggacccgcgcacatcgccgcttatgaaccccaattatttgtcacatgagaatgactttgttgagttccgaaaagctgtccgtctgtcgcgtgaactttttgcacaaaaggcatttgacgagtttcgaggggaa

SEQ ID NO: 48735 - DNA, 546 bp, Heterodera glycines
gtttgagattaaaagaattgatttgtgaaaaatgacccgcgtgaagacccatgaacttcgggccaagaagaaggaggagttgatgaaaatgttggaagaacagaaaacggagctggccagtctgcaggtgtccaaggtgacgaacggggcggtgtccaaactgtccaacatccacgtggtgcgcaagaacattgcccgcattctcaccgtgatcaaccaggcgcagaagatgaacttgctcaagttctacaagggcaagaagtatcgtccgattgaccttcgcttcaagaaaacgcgtgccatgcgcagagagttgaccaagcatgagctttcattgaagacacacaaacagaaggtcaaagaacgccgttgtccaacgcgtatttatgcgcttaaggcgtgaagcggccacagcctaggcgatgtgtttcgacagagagggaaatgtgacgaggattttgatggatcaaattttttgttgttgttgaccaacttttaaatgattaaaaaaaacaaaaaaaaaaaaaaaaaaaaaaaaaaaaaaaa

SEQ ID NO: 48736 - DNA, 622 bp, Heterodera glycines
tggcaatcattgccacggtgtgcacaattccgtcgctgtactcgcagatgaacgagatcagcaacaaagtgcacgacggcgttgaagttttccgcgtgaacaccgactcggcatggaccgatctgatggacgtgcaagtggccgtcgcgccgccgtccaagccgcgtgagaacccgttcggctctatcttccgtgccaagcgtcagctgcccggctactgccagtgcggtccgattgctcaaccgtcgtgcccgccggggccgcccggcccacccggacccgcggggcatccaggacagccaggacatcccggcgggcccggacagcccggagcacccggtcaaccatctgcgccatgtcctgtgcaacatgttgcgtgcccgaaatgccctgccggaccccccggacaccccggaggccaaggcccgcccggaccggctggaggcccgggccagcccggtgcgccagctcacggcggtggacaaggcccgcctggaccacccggcccgcaaggatcgcctggacagcccggacaccccggaggaaagggacagccgggcaacccgggtgcacccggaacatcatcgaaatccatccccggaccgaaaggaccgcccggaca

SEQ ID NO: 48737 - DNA, 716 bp, Heterodera glycines
gtgaaatatttaatggcacaacctgctaagcgtgttgctgtcagctcagttaactgggctaagttggccgaacggctgacgccacaacaggaggaggagcttaatcgtttgaaagcacaaaactcttcatatcatgcagaggttgtacaacaccaggctgatctgcctaaagttgactgggctacactgaagaagcaaatgccggaaaattcgactgttcttgactcattgcagaagcaatgggaagcgttgagcattccatacggaacgatacctgacaatctgaagaaacaaattgaccagtgggtgaaattcaatgaggcccgagtcaagtttcacgagcttaagacggcggatggacttgtggaaatgaagaagattgaagacaaatgggcgaaaatgccgccagtcgagcagctttggcgtgaccaactcgtccagtatttcccacataagtatcaggaccttcgctatctcaacgagtattatgacccatggggcattggtgttaatgacaccaattggcgcgagcgtttcaaggacttccagagtcgtcctcgagagggtgcaacgcttcactgatcgcatgattttacaatttaggaaattcaacgtgattttatttggaagaagttattcgatagagatgttattaaatggacattctcttttgcacaaattggtttagatgataaaaatttgttgctctcaaaaaa

SEQ ID NO: 48738 - DNA, 626 bp, Heterodera glycines
agactgtggaacctttggttggccatgtttagcattgccggctgtctggtgaccagctacgcgctgctcagagagattggcacctacgggctggtcagctcgtacacgaactgtcgcgacttcttcgagggattcaccggcttgtggacctggtggttctgcatgtcgaaatttgccgagttgggcgacacttacttcatcgtcctgcgcaagaagcccctgatgttcctgcattggtaccaccacgtggccacgctcaactacggtctgatgtcctacgtggacaacaccgcgttcaacacatggattgtgtggctgaacttcagtgtgcacgccgtcatgtacacctattactttttggccgcctgccgcatccgtctgcccgcttggttcgcccagtgtttgaccacctctcagatcacccagtttctgatcactttggccatccttgcccacgtcggtgtgcgactgttggtcgggtcccacgtggacaccacaccgatgacctatggggactgcttgctgatggagatcagctaccggggtttggttggcaactttttctaccattcgtacatcggccggagggggcaaaaaattccaaaaggaaaagcaaatgaaacagc

SEQ ID NO: 48739 - DNA, 669 bp, Heterodera glycines
ccaattaaggggtattcattttttgtgcaatgtctcatagtcagtccgagaaatcgctcgaccagcagttcgattgttgtgagtgcgtcgtcgatgatttgctgaagggccgacttggcgattcgcaatttgcgcaaaggaataacgtcttgagagattgtatccaatctctccaatccgtggccaaaacaatcgatggcctttcgttgttcagtgccaatgattccgtcgaagaacttccgacgaactctctccgttttttgctcgtcccagcttatttggccaccgcactgcaagaaatcggcgtggagatggacaaacggggcgcatatttgagagcttcgaagacatattatcgcgaattcctgcagaacatgtcaatttttgggctggtaaacttccgacttccttggcttaatgaagatgagcgcaattccgacgaccagcaaaaagagaatgggcgcaaccgatcgaaactgatcagcagttttgacgatgcaaaagcacgtcgacagcacaccatttcccgtcttcaacaattggaacagctcgaaaagactgtcgaacagctgaaaaacgaaaaacgacgcaatgatgacgaggcggcgcagcgtgaactgattttcgcacttttgcgtttttggtccattcgatctgtgaaggaactgg

SEQ ID NO: 48740 - DNA, 715 bp, Heterodera glycines
aattaaggcgtattgttagtcaaaaatggtgaattggccttggagtgcgaaacagcgcgacgaaccggcgcaagacaagcaaaaagttgtgaccactcatcccgaacccactcaaggcattcacggaatccgaaccattctgatgggtccacccggtgcaggaaaaggcactcaggctaccaaactggcgaaaaagtacgagtcgtgccacctgtccactggcgatctgctcagagccgagataaaagcaggcactccacttggccaaaaaatcaaagggctcgttgaagggggcgacttggtgtcggatgacattgtgtgtgagatgatcgacaagcatttgtccaccgccgagtgtcgcaacggattcattctcgacggttttccgcgcaacaccgcacaggcggagaagttggacgctctgttggagaaacgccagcgccctttgcaggcggcgcttgaattggcgttggatgactctttgctggtcaaacgcatcactggacgtctgttccacgtgccgtccgggcgcagttaccacgagcagttcaacccgccgaaaaaggcgatgactgacgattttacgggcgaaccgttggtgcaccgtgaagatgacaatgagaaagtgttgcgcaaacgcttggccgactatcattccgtgacaatgccgctgatcgactactactcaaaacggcgcattcaccacagaatcgat

SEQ ID NO: 48741 - DNA, 970 bp, Heterodera glycines
gtttcgaacggatgactgaaatccaagccaaaagcatcccgccccttctggagggaaaggatgtgctcggatccgcaaagacggggagtggcaaaactttggcatttctcattccgtcgattgaattgttgctgagaaatgggtggaaacagcaacaaggcaccggtgttcttattgtgtcgccaacacgcgaattgtcaatgcaaacgtacggagttctctatgaattgatggagaaacacccgaacatttcccacgggctcgtgatgggcggcgcaaatcgccaaaatgaggagaaacgactcgctggaggcgttgccattctcgttgcaactcctggccgactgctcgatcatttgcagaatacatccaattttgtcgtgcgcaatttgaagtgtttaattgtcgacgaggcggaccgaattttcgacattggatttgagcaggaaatgcaccaaatcgtcaaattgttgccaaagaaacggcagagcatgcttttctccgccacatgttcgcccaaagttgacgagttggtaaagactgcgctgaaaacggacccactgaaaatcggagtgatggagcagcaaagggacccaaatgacatggccacggttgaggggttggagcagggttacgtcgtttgtccttccgaaaaacgttttcttctgcttttcacttttttgaagaaaaaccggaacaaaaagattatggtctttttttcatcttgtgcctccgtcagattccatagcgacttgctcaacttcatcgaccttcccgtcatgaacattcatgggaagttgaaacagcagcaacggacgcggacattcttccaattttgtcaggcttccgctggcactttgctgtgtactgatgtcgccgctcgtggtttggacattccccgtgtcgattggattgtgcaatatgatccgccagatgagcctcgtgagtacattcaccgggtgggaaggac

SEQ ID NO: 48742 - DNA, 662 bp, Heterodera glycines
gtccaattaaggtcaataatttcgctttctttgtttgagcttactatttccgcataatggacgaggaacaacttttggattatgaggaagaacaagaagagactcaggaacaacaatcaaaaaatgatgcagcaacaaacggagatgcaacaaagaaaattaaaggtaattatgcgagcattcacagcagcggattccgagatttgatgctccgtccggagttacttcgtgcgataattgattgtggatttgagcacccttctgaagtgcagcatgagtgtattccacaagctattcttggaatggacattgtctgtcaggcgaaatcgggaatgggtaaaactgcagtgtttgtgcttgccactttgcaacaactgacaccgactgatggcacggtctctgttctcgtcatgtgtcacactcgtgaactcgcctttcaaatttcgaaagaatatgagcggttcagcaagtacatgccaggagtgaaggtttctgtgttttttggtggtatgccgattaagaaagatgaggaggtcctggccaaaaacactccgcacattgttgttgggacgccgggtcgccttttagcactgggacgcactggacatctgaagcttaaaggaggcaaattcttcgtgctggatgagtgtgacaaaatgatt

SEQ ID NO: 48743 - DNA, 1157 bp, Heterodera glycines
attggccgctgataattttgacgctcaacgtgttttgaacattttggccgagagagacaatttccaaagtaatgaactcgccgatcagttgtccattgaccaccagcgactgatcggaggcctcaaaagtctgcaggtcaaagaagggttgggttgcgcttcagaagtcaaaatcaaacgcatccaattgaccgcggaaggggaggaaattattcaaaagggttcccacgagtttaatgtgtgcaaaatcgtcggagaaaagggcatttccaaatcagaaattgaaaaaacttcctttggtcgcatcggattgggcaaggccatgcaatgcgggtgggtgggcatggacacgcgcgaacgagtgcctttggtggtgcggaaggtggctaatggcgaggacggggacaaggagcgattgaaattggtgaagaacggaaagggcgaccaattgacggcccaatgcgtggcacaactgaggaagcgctaatggataatggacagcgcaattaaagccctttccgttgccaaaggggcgaacttcgccacgactgtgcagaagcaggaattggatttgacttcggagatgattgcctcgggttcgtggcgtggcaagcagttcaaacagtacaatatctccgcgatgggcgtgccgcccccctccggccatctccaccctttgctcaaagtgcgtgccgaatttcgcgacattttcttccaaatgggtttctctgaaatgccaacaaatcgtttcgtggagagttccttctggaactttgacgctctgttccaaccccaacaacacccggcacgcgactcacatgacaccttttttctttcaagaccggcactttcaacagaattcccggaagattaccttgaaagtgtcagaaaagtgcattctgagggcggtttcggttctattggctatcgctacgattggaagttggaagaagcgcagaagaatttgctgaggacgcacaccaccgccgtttctgcccgtcagctttaccttctcgcacaaaaacctttccaaccgtccaaaatgttcagcatcgaccgcgtgttccgcaacgaaacattggatgccactcacttggccgaattcaccaagttgaaggtgttgtggcagaacgaaacctctcactagcgcatgtcat

SEQ ID NO: 48744 - DNA, 1130 bp, Heterodera glycines
ttttgttttatttgtgctttttccacgctcaaagtcccattcattcctttgcttttgccgatcgattgatccgaacaaaacaaaatataatcgaagtccaagagaagacgacgtaaaggaatgccttcgggaggcgacgatgaacaacagtttgaggaggcggtcaaaccggcattggagtcccttttggcggatttgcaaaagaccaccgaagttcttcggcaaggcaaacatggcaaaggccgacggcaacagaaggaggacgaatccgccgctttgttggacttgaagaagcttcggaactctccccgccagcgaaaccaatcgccggcagcggtcgccaatttgcgaaacggaagaagcgaagagctgcagcctcgccgtgacccgatgcttgagggcgacaaattgggcatccacacgataccgaagggggactgtgcttcgtgcaaccaagcagtgattgggcccgtggtgatagcccttgggaagatgtggcatcctgaacatttttgctgcgctcattgcggagattccattgaaaatcggaattttttcgagcggcaaggaaaggcgtactgtgaaagcgattaccacgatttattttcacctcgttgttcctactgtaacgggcccatcaaagaacgttgtgtaacagcacttggcggaaagaattttcacgtggagcattttgtttgcgccgaatgcggcaaaagcttcggagacggcggattccatgagaaatccaattccgcgtactgtcgcgattgtttctaccgtacttacgcgcccaagtgtcagtcctgcaaacagccgatcactcacaaattcatcacggcactcaacacacattggcaccccgaatgcttttgctgtcaggagtgtggccaacccttccattgtgtctctctgttcgaccatttgggccgtcttctctgtgagatgtgtctccacacgcgcgtcggctccatctgcgcgcgttgtcggctgcccatcagcggccgttgtgtgtccgcgatgagtcaaaaattccatccggaacatttcacttgctcctactgcactgaccaacttgacaagggcaccttcaaagagagtgccgggcgacccttttgcctccgctgctatca

SEQ ID NO: 48745 - DNA, 860 bp, Heterodera glycines
cactttttctttctttcgtccttttcttctccattaatttctctccttccgtcgttgcccaacgcacccaatgggacgcgttcaatttccccaacccaacggcgcccggcgatttccatcgctgcaaaatgcgatcgacggcacttttgtgtgacccggacgaggtattaagcgaacaggagcggtaccgactgaactacgaattgggactgatcgaatcggcaacgagacaggaaaacggaagggaattctgtgagcggaaaggaattaacgcggccgtagcaattgcacgccaagtgaagggcgggcaggagcaggatgtgcggaatatggccaatgaccttttgcgacgctggacgttggacaaacaatgcgaaaaggcacttgttattgtgctgtcgctggaggaccgccgcttttgggtggcgcggatgccgcgagtgccggtttatgcgcaggaattcacggaactcttcaaaagagagcaaggcactttcaaaaccggtcgcaattcggagggccttcaaaatgtaatccgcgccatccgcgaccgcgctctctccaagcagtttccctccgcacgccctgacgacgacggccgttctaaaggcactccgtttgtgccgatgccaaaaccaacgcctcacccggagggaaagcacaagcagaggggcggcggaggagtgcttagttggctgttcatccttctggtcatcgtcttcgtggtcatccccttggcatgctgctgctgctgtctttatttctgctttttccgcaaaaaggacagcggcagcaacaaccgcacaccacacaatgcggaaaacggtggctctggcgcggaaagacggggcggcaccgga

SEQ ID NO: 48746 - DNA, 633 bp, Heterodera glycines
ggaagctgacgcgggtctgctcatggctgggttcagagctgaactatgatcccgcaaagatcatgctttataagaatgtgttacatggtgacaagcccggcatgtggataccgcaccaacaattgttggaactgcaggttagccagatgctcaacctgaacacaggcagttacgacccacgttttcaacgcatcttcaaatttttctatgccaaattgccacttccaatggtcgactttgataatcatgcacatgtattgctgcacttgatgaatgaaaaattccagctaacggaaatgagtatttttgtggataaaaacgcaagcgtgcaaacactcctggatgaggcgagaaaagagttcaggttctcgtcgatggggaccaaaactcttagacttgtgcaagcctcggccgacgggacttttagagtctatcaggtcctcaagaacgacattctttacaaggatatccaactccgaccatctttaatgctgcgtgtggaagaaatcccgaaggatcagctcgaagttggcaccgacgaatatttgctgccagtggcccatttcgacagagagccgaatcggacattcggagtgccattcttcattaaaatttgcaacggggagaaagtga

SEQ ID NO: 48747 - DNA, 561 bp, Heterodera glycines
gtgtgctcagagtgagcgatttaaccaaagccaacgaaagagtacccttccgtttgctgaacctttccctcgcttctttggatgtgaatatgcgccccttttgcgactctgagggccattcggccgtccgattgcccggctttttgctcattttgtccggccaaatggtcctttcgcgccctttgcctccactgaatgcgtcgtcccttcgtttgtctctcactttggagcaaaactccgtttgggtgggccgaatttgtgacaaagggcgaagtcaaagtgcctttttatccgacgattttagtaccttttctctgtgctcccttctgccggacgcgtgcaattcgctggaggctttggcttccaaatatgctgagagtgatttccccctgcttttgccactgtccgatctgttcccgactgatcagccaattgctctcgtgccaatggccaatttcccattgctcgagggctattggaaggcgcaagcgcaaatccaagcggacgacggaaacgcaatggaggaggaggaggacgaacagaatgagcagcatattctga

SEQ ID NO: 48748 - DNA, 662 bp, Heterodera glycines
ctgcgaccattaatcatatatctgcaagcaacggaaatgatcaaaaacggcgacatttggcaagtggaaatgagccgttgcaacgcttcggagaggcaaaaaaatggatgactgatatctatgggcaattggatggacatgttggagagttactcgaattctatttgggtttggttaaaaacggacaaaaatttgttcctcccgctcaaattgatgaaattggacattttcgcgactcagtaagggcaattcgtgaagtaatcgggcgggacaagatgaaggtcgtcttcttcgggagaacaagcaacggtaagagcagtgtgatcaatgcgatgttgtcatgccgagtgttgccccaggggatggggcacaccacttgctgtttcttacaagtggaaggggggtcggagcaggacaagtacttcatgatggaagacggggcgaagcactttccaattgctgaattggattcggttgggcatgcgttgggctcggaaggcatgggctccctgggacgcgactcgctcattcacattttctatccaaaatcggcgtccaaattgcttcaaaatgatgttttgatcgtggacagccccggcgttgacctcagtcccgagtttgacagttggattgacaagcactgtttggatgcggatgtgttt

SEQ ID NO: 48749 - DNA, 639 bp, Heterodera glycines
gtttcttttgctcaaatggccacactatcaaacacagacagtgaagaaatcccacagaagcggccacgggaaaatgacaaaaaggatttaacgacgtcagcagaaaaaaataacagcgcgaatggtggaagttcagagagtgccaaaaccacggctgtttcgcacagggctccctttgacgcgacccatcgcataaatcgccttggtggaaaataccatgttttattagcggtgacgggctccgtggcctcaataaaagtgaatgaactgatcgccgaattgtacaagcaatcacccgagaaccgtttagcaattaaagtggttgcaacccaaagtgctctgaacttctttgacgcggctgacacacaagaaattgtttacgatgacagagatgaatggaatatgtggaagaagcgcggagacccagtgctccatattgaactccgaaaatgggctgattcgatgctggtcgcacctttggatgcgaattctctcgctaagatagcaaacggaatttgtgacaatttggtgacgagtgtcgtacgagcgtgggatcagcgaaaaccgctttattttgctcctgcgatgaacacagcgatgtgggagaacccattgacatatcaacacttgaaaacgctg

SEQ ID NO: 48750 - DNA, 867 bp, Heterodera glycines
gcccatttgaatgcggcggaaagggggcgcccttacctttttattgttgcgcattacgacacttacggaataatcccgtcccttggcattgggtccgactcaaacggcagcggaactgcggtactgctcgaactactcgccattctaagccaaatttattcattaccgtcacacaaagcacgctacaatttggtttttgttctttcggcaggagggaaattcagttaccagggaagtcgcagtttcatcgacgacttcaatgaacgccattcggatgagcgtattgcccttgcaatttgtttggacagtttggctcgcggcgattctctttttgtccacgcctcaaaaattccatcggatgagacgaaggcttttcgcttcattcaaactttgaggcattttgccaatcgaccagtcgagcttatctcgaaaaaaatcagtttggcttctgataggttggcttgggaacacgaaatttacaacatccgacgtattcacgccgttaccatttcccacttcagcaaccattccaaccctttcagaaattcgttgctggacattccgacttcgttagatttctccatgttagaggacaatgccaaattaattgccaatgctttggtttcctttgtgttcgacttggactcgcgactttgcaacaacgccaaagagaacaatttggcctgttcactgcttaatgatgcagttgaagttgacccaaaaaggctcaaggcgtgggtgtcgatgttcgggtcaaagtcgcgcccaattgtcgtgtctcagcaccaattggtcgccaatctgttcgaagttgtcaaacgacttgctcacagtgcacacgtttcagagattgtggtcaatgattat

SEQ ID NO: 48751 - DNA, 843 bp, Heterodera glycines
agatattttaagcaaatattttttattttttctaattttaaaatgaccaacgaagcaggaaattggtgtttgattgaaagtgaccctggccttttcacagaattgataagtgggttgggtgtcaaaggaacacaagttgaggagctgtactccattgacgatgagcagcatctgtccagcttaagacccatttacggtctcattttcctcttcaaatggcgtcccggcgaagaattggagggcactccgatgcccgacgcccccgtgtactttgcccagcaggtgatcacaaatgcgtgtgcctcccaagcactgatcaaccttttgctgaacatttcgtcgtccgatgttcaactgggccccatcctcgaccatttcaaaagtttcaccgtcggctttgacccggcaacgcgtggccttacgctgagcaacagcgaagatattcggaagttgcacaactcgttcacccgggaacactttgtggagttggacgtcccaaaagccaaggcggaggacaatttccactttatcacttacgtgccggtggacggaaagatttacgaattggacggaatgcgcgaggcgcccatttgcctggcggacattgagccgggaaaagaaagttgggtggacaccctgcgcccattcatccaacggcgcattcaaaagtacacagagggcgaaattcacttcaatttgatggcgctggtgccgaatttgaagaccaaatacgagcagcgggttgccgagctgagcgcggttgggatggactcggacgaagtgacaaaggaactgaatgaactgcacatgttgatcagtggcgaggaggaaaagttcaggaac

SEQ ID NO: 48752 - DNA, 626 bp, Heterodera glycines
caatgactgaaccttccgcctcaattgttcgtccaactttcttcgattcggttgaaagatgggccgaccgcgactttggagaagatctcagaaattttttggaagagattagttactccgatttggcaagttacgcgcagttgatccatcacaaagatatcattatccaatgtctcctccgtcacttggccgatcggtctctctctttgcccgctttttgcgatttttgttcggctattgcgacggatttgcgtgacgattttcacacgcatttttggcagatttttgatgcaatttcaaatttggttttggcatcgaaaggtaaagagcaatgcagtgataacgaattggagtgcacatttcgcgcgatggaacaaattgtgcgaattaattttcgattcgtttcagcgcggctaaaacaattgtttagccgtcttttaccgctctttgcttttccttctgatgggcgcctccgttttatctccgcccgaactttttcctttgtttttctaaaatcgcctttcccccacaaattggccaaatttcttctcgtcaaatgtttttctgattgtggccatttgcgcgacggactttcgctggttttcttcgacccttttttgggagtt

SEQ ID NO: 48753 - DNA, 704 bp, Heterodera glycines
ccacgtacggattgacatttgccaacccgtcggtgagtgccaacaattgccagggcactttggttgcgcaaatgttgcggcgtgccaccaaaaatctcgaccttggtgccgaatacatttaccatagggacgaacggtttcctggcaaacagtcgaacactctcagctacgccttgcgctacattcagcccacttggatattttcgggaactcttgcgccaaccgaactccatttgtgttactaccacaaacagagtgaacacttgcagttcggcgttgaatttgaggcgaatttcaagcttcaggaggtgaacacgaccttcgcctatcaaattgaagtgcccgactctctgactctgagggcctgctgcgacacaaattggaaggtcggtgctgtgctggagaagaagctgtccaagcagttgcccttctcgctggcgatcagtggcgtgctcgatcacgtcaaagcgcagggaaagttcggcatcggactgctcattggctgattggcgactgatgaggggagaagcggcgaatgttcgcaattgttagcttctgccaatttacattttacaccattttttgctggccgaccattttctgttgtgtcgccgttgtttgttatcattttacattagattgattcatgcgattcaaaacggataaaaattgacattttcaaaaaaaaaaaaaaaaaaaaaaaa

SEQ ID NO: 48754 - DNA, 1527 bp, Heterodera glycines
gcaacactgaaacttcaggattttcttcgacaaagacttttttccatcagtcaaccaaaagttgtcagtgtccaagctcgtcagtttccagttacaatttattttgaacgacgcactccaacaaattatttggaagcaacattcaaaaaagtgtgtaaaatccacgaggaataccctgcgggtggcatccttgcgttcgtcaccggtcaacgtgaagtcacacatttggtcaaattgctagaaaacaaatacacaaaaatatctgcatcaaaattactgagaaaagagaaaatgaaaaagtgtcggaaaaaagagacaaaagaggaggaggaagagggactactgcttgacaacgacgaattcggaacttcggatatggaccttgaagacgaggcgtggcaaaataccttttttgggtctgacgatgaatcacttaatgcttcgcaatcgttcaaaaagtaccctcctctgctggccatccctctctattctctcctaccagtgaatttgcagaagaaaattttcaacgaaccgccagatgacgggtctagggtgtgtgtagtttctacaaatgttgcagaaacttcgttgacgattccaaatgtccgttacgtcatcgattctgggcgggaaaagaagagggaatatgacccgattacgggagtttctcggtttgtggtcggatggtgttcaaaggcgtctgcagaccaaagatccggtcgtgccggacgagttcagtccggatacgcattcagattgtattcttcggctgtttacgaagatatgcgcgatcattctactcctgagatccttaataaaccgatcgaccaattgattcttatgttgaaagcaatgaatttcacgaaaatcgacaattttcctttcccgactcctccaagattggaccaaatcaaatcttctgagctgagactttctcacataggggcgcttagagttcaagaagggctttataccatcacacaacttggacaatcacttgcgcagctgcctctcactccttcttttgcgaaggtcgtcatcagttcaattcgtggcggacttcttccttttgccgtcactttggtgtcggctctctccgttcgtgaaccattattgttcatttcaagcacaaaagaggacggaacggaagagagacgaaaaagaatgtccgaagtgattaagcaaagatttctttggtgtgctgttggggaggctcgactctttggtgatttgacagtaattctgaacactgttggtgctgctgactatgaggaagagaacgctcgcgcaatcgaagccctaggacttcgccctaaggccctaaaggaaatcaacaaacagagacatcagctgacgcttcttctgaacaaatccgattctgtggagaagttgcccgagaagttcagaatggatgcaccctcccaagaacaactgaggagattaaggcatataatggtgaaatgccatccggataaattggcaaagaaagttcagtcattggatgcaccaaagggcgcatataaaaca

SEQ ID NO: 48755 - DNA, 1521 bp, Heterodera glycines
ccacaaactaaaccagacctatttaatcaagtcaaatcttagtgagagaaaacatcaaaaatgcgtgaagtgatctctattcatgtgggacaagcgggcgtgcaaattggaaatgcttgttgggaattgtactgcttggaacatggcattcagcccgatggaaaaatgccatccgaccaaaacaaccaagacgattcgttcagcaccttcttctcggaaacaggcaatgggcgtcatgttccgcgtgcggttatggtcgacttggagccaacagtgatcgacgagatccgcactgggacttacaagcatctcttccaccctgaacagctcatcactggaaaagaagacgcggccaacaactacgctagaggacactacacagtcggcaaagaaatcatcgaccccgtcttggatcggattcgtcgcatcgcggataactgcaccggacttcaaggctttctcatcttccattcgttcggtggtggcactggctctgggttcacatcgctgcttatggaacgtctctctgttgactatgggaagaagtctaagctcgagttctccatctaccctgctcctcaagtgtccaccgctgtcgttgagccgtacaattcggtgcttactacgcacacgactctcgaacactctgactgtgcatttatggttgacaatgaggccatctacgatatttgtcgtcgaaatttggacgtggaacgaccttcttacaccaatttgaaccgtttgatttctcaagttgtctcttcgataaccgcttcacttcgatttgatggtgctttgaatgtcgatctcactgaattccagaccaatcttgttccttatcctcgaattcactttcctcttgcgacttattctccagttatctcagctgagaaggcctaccacgaatcattgtcggtttccgaaatcaccaacatgtgctttgagccgtccaaccaaatggtcaaatgcgatccacgtcacggcaaatacatggccgtgtgccttctctaccgaggtgacgtcgtcccgaaggatgtaaatgcggccattgcttcgatcaaaacgaaccgttcaattcaattcgtggactggtgcccgaccggcttcaaggttggtatcaattatcaacctccgactgttgttcccggcggtgacgttgccaaagtcccacgtgccgtgtgcatgttgtccaatactaccgcaattgctgacgcttggtctcgtttggaccataaatttgatttgatgtacgccaaaagggcatttgtgcattggtacgttggggagggcatggaggagggcgaattctccgaagcacgtgaggatttggctgccctggagaaggactacgaggaagtggccattgacactgtggagggagatggcgctggagacgacgactattgattgaaaacattgttcgattaaattatattttggtttggaaatgttcttattgtattgctttattgagacgtaactgctttgatgctttttatataaatatgcttatcttttaac

SEQ ID NO: 48756 - DNA, 2375 bp, Heterodera glycines
gtttccttacctcattgacaatttttttcttcattttgagctgttttcatcatgagtgacgacaactgctgcggctctgttggtgcccgttctccgactggctccatctcatcaagcggttccgctgactataacgttgccctttcgccaacccaattgcttgcaatggcaatcaagaaacgtcgtcacttgctcgaggacaagcagcgcgactaccaacgggagctgctccactcgcacctcatccagaacttgtagcgatgccaattttggtggtgatggtggaggccggggcccacggtggctcaacaaacgctcttctcactctgacgacggtggacctccgatgaaacgaaaccgggcggactcttccgaggatgggctcacattcattgatctcaaccataccttgtgaggttgggaagttcgatggagaatttgcagatggtggacggatattctgatcggaatggcatggtcgtcatgatatgattacagtttctttatttttttctacgtgtattttttttttaccgcagataaataatttatagatcacagcgagcaaaataatcactggaaggtcttttgtgtgtagagcatttatgcgttctttcatactggcaagttgaacgtataattcaaacgatcaatggtgatttgtcatttatccaacgttactttttctagttttaattgcagaaaatcgcaactttgcgcggagttttaaaaatgctcaaacattgcacccaaattcgttcatttgccacccaccaaagcaccttctacgacgtggtcattgtcggtggtgggttggtcgggagtgcgatggcttgctccatcggcacaaattcggctttgggtccatccacgagggtgctcctgttggagagtggacgactgcacagcgtcaagcagtcaaaagaagccgaaaccaaacacacttataacaaccgcgtttccgcggtcagcccatcctccgttgaaatgttcataagtaatcctgagtctctcaaccaagtgctttatccgagaatatccaaattcttacctatgttgctgattctgccaatccaattccatcctcttcccttaaaattagccattccttttttattcacaattcggtgtttgggatgagatttgctcgaagcgagttcatccaatttctgcgctttacgttcgtattatttttctggttcaacccattaaaattagtgaagaaaagaaacgaaaaatcaggttgaggatggctgtgccaaatccaaaatccatttcaaacaattggataagcgttcaccgattgctcacatcgtcgagaatgagctcatcgtcgccgcactgcagcaatgcattcgggaccgatgtgccaatgtggaagtgcgccaaggcgcggttgttgaccagaatttgagtgttcctgacaatctcggccaaaatgtcaccattcagttcgaagatggcacaattgaagcttcattgatgattgccgccgatgggtccaaaagtacggcacggaaaagggccggcattgattttgaagaaacggcctatgagcagcgtgccgttgtgggcacattggccctccagcacaattcggagtccgatgaatccttcgcttggcaacgctttgtgccgtcgggccccgtcgcgcttctgccgcttggccgtgaactgtgctcgttggtttggaccgtgtcaactgccgacgcggcacggcttctccaactgtcgcccgaacactttgtggaagagctgaatgggacacttcaatttgacaactcttcggctaattccctcgtcaacaattcgttggattgtcttggcaaggcactgaactttttgccgtccaaagaatcgcctgccaaatgcacaattccccgcgttttgtcgctgccttacgatgaccgtgccgtgtttcctctgtcccttggctacgcttacgactacattcggccgcgggttgcgcttattggagatgctgcgcatcgtgtccatccgctggcggggcaaggcgtcaatttgggctggtccgatgttcgcttcctcaccgctgcgcttcagcgggctttcgacgagggaggcgatttgggttcgttgacatatttgcgcgactttgacagtgcgagccaaaggcgaaatgggccgattatattcgcaattgactgtctgaaccgactttactcgaccgaccaccccttttgcacgttgttccgttccgttgggctcaacattttggaccggattcttccggccaaggatttgattgttcatctggcctcatgatttgatttggtctttactcgatttatgacgaatttcgttgatttgtactgccttttttattttgagtaaatttttttatttcaaaaaaa

SEQ ID NO: 48757 - DNA, 638 bp, Heterodera glycines
cgcgagtttatgtcggcagttaaaggacgacgtgagcaggacagaaaggaatgggcagcctattggaatattcgatggaaggaggtggagaattcattcgtcggcaaatactcttattacacaaaccgttttttggattggccggtcacttggttccgtgagaacattgtggaacggctgcacgacaagcacaagatgccgtattaccatcgcaaaatcagcagagtgcccgaaatcgacgaatgcggcgtcaacgaccgaatttgtctcttcgaagctgaagaacaattccgactggacaaattggtggaccattacattcgcgatattttgtaccaacgcttcactcagtgcgttcgcgccgaagggtacgaccatttgtacaaatgcgcaaagcacgttgacgactacgaaaatgccgagttgaacttctttatcaagtatggcgaattgggcagtgagcagactgtggtggcgtgttacatgaagcaaaagcatcggctgatttgggagcgtcgtcaccccgaaataatggaggagcgaaagcgagcgcatgaagaacacacagagaacatgaacaaggacaaattcaacatgcacttttggatcaaggacaacatttaccgaaagaagcagga

SEQ ID NO: 48758 - DNA, 548 bp, Heterodera glycines
gcatggaagactctgagcagaatattaccgaacaatcggtatcggctcccaccactgatcacgacgaatatgaagaactttgcaaattggtcaacccaatctcaaaaccgcttgcaaacagaaaattggcaaagaaagtctacaaattggtgaaaaaagcggcaaaagagaagggctttttgagacatggattggctgatgtgatgaaagccttccgaaagaatgaaaaaggaattatcgtcttggcaggaaacgtttcaccgattgacgtgtacagtcatattcctgccatttgtgaagaaaagggtcttccttatgttttcactccgtcccgtgaacaccttggtctttgtgctggctataaacgtcctgcaattgtccttttggtgaagcgacacgattcgttcgcggagcttttcgatcaaacgcacgagtcaacttatgcgctggtggtggaaccggaataagcttttaattccaaaattgttgtttgttcgttttgtttcactcaataaacaaattgtcttaaaaaaaaaaaaaaaaaaaaa

SEQ ID NO: 48759 - DNA, 898 bp, Heterodera glycines
caaaataaaaatgtttgtgcttgacgaggctgatgaaatgttgtctcgcgggttcaaagaccaaatttatgaagtttttaaaagcttgccgaacgatgtccaggttgttttgttgtccgcaacgatgcctaatgaagtgctcgacgtgaccaagaagttcatgcgcaaccccatccaaattctgattaagaaggaggaattgacgctcgaaggcattcgtcaattctacattttcgtcgacaaagaggaatggaagttcgagaccctttgcgacctctacgacaccgtaaacatcactcaggcggttattttcgctaacacgcgaagaaaagttgaggatttggcgcgaaatatgacgcagaagaaattcactgtgtctctcattcacggcgaaatggagcagcaggaccgcgacgtgattatgcgcgagttccgttccggctcttcccgcgtcctcatcaccaccgacctgctcgcccgtggcatcgatgttcagcaggtgtcagtcgtgataaactacgatttgccgggcaaccgtgagaattacatccatcgaatcggtcggtccggacgattcggtcgtaagggagtggccatcaactttgtgacgaaacaggaccagcaaatgttgaaggaaatcgagacatattattccacccaaatcgaagaaatgcctgccaacatcggggacatgatttgagcgttgacagggcaggatcgataaatgggaaagtgatttgggagttattatgtttggattaccacccacccgccctttcaaatcattcggtattaccattattatgttggtcccatttcggctcctggttataaatcgattgttgttttggagggatatgaataatatttgttataaaaaaaaaaaaaaaaaaaaaaa

SEQ ID NO: 48760 - DNA, 734 bp, Heterodera glycines
ccaattaagaccaaactacaatttttttaccgacggtcgctctgccaacaaatttacaatttcttttatttgtcatagcaaaaatgaacaactcaaaccacacacagtcggtggaagtgaaattgttaaaggatgacgattggaaacgcattcagcagaacactttcacgcgttgggtcaatcagcaccttaagaaggcgcctggaagtcctaaaattgaaaatttggcgactgatttccatgacggcattttgctgattcaattagccgaagtgttggcccagcggaatttggtccgattcaaccgaaagccgacgatgcggactcagaaattggacaacatttcgacggtgctcaacttcttccagaaggaagaacacatcaaaattgtcaacattgacagttcgcacatcgccgaccacaacctgaagctgatcctgggcctcatgtggacactcattctgcactattccctctctcagtccatcgcatcgacggagagtgtcaacggcgacgaagacggccttggtaacggcaccgaccaccagcggcacccatcgccgcggaagagtacgtcgtcgtccgcatcggaacagcaaagcccgaagaaacgtctgttggcgtggattcaggaacgggtgccgcacctggtggtcaccaatttcacgtcggattggaccaatggaattgtgctgggcgcactggttgatgcgtgcctcgggtcgggtgctttc

SEQ ID NO: 48761 - DNA, 964 bp, Heterodera glycines
gttgaatttactcttcaattctccaatttctgtgcattatttatttcggcgacattttgctcactttcctttgatgaaagccgccgttgtgggcgaaggcgccgttggggcgagcgttgcattggccatccgtcgagcacatcccaatgccaatatcactgttttctcggaccgggactttgaaaagaccaccagttacggaccggaaggcatttttcgggttgatgtgccgggaacggagcgattggccaaagagtcattcgaattttgggcgaaaaccgaaagggacgagttggcccacaaaactggcgttcgcctcatttcgggctattgccaatccaacgacagaaaatggatcgaagcgcaagaaagttcaatgtccgacattgtgtacaattggaagtggctcagtgagcgcgaattgcgcacacttttcgtccgtccgtattgttatggcgcccattacaccacttacgcggcggagggtcggctgtatgtgccgtggctccgtgcccaattggtggccgaaagtggccaagggcttttgcatttccaacgccaacgaattgaatctttggagcagttgatcgactcagatcagttcactttggtggtgaattgtgccggattggaagggggacgattggccggtgacgatggcacttccgtttacccaaaccgcggcgttggactcgaagttgaggctcccggacacgtccatttcacttattggggcagagacatcttttgcattccgatggtgtccaacaatcgtctaatgattggcactcttcgacaagacaattgttgggagttggaagtgactgagcaggaccgaagcgcaatttggacgcgtttcatcgaattgcaaccgaactttagagatgccaaaattgtctccgcgtggtgtgggctgaggccgaatagacacggcggggtcagaattgagcatcaattacgcacc

SEQ ID NO: 48762 - DNA, 642 bp, Heterodera glycines
caattaaggcaagctaaatatttccctaaattgcaaatgtcagcgtcaaaattttttctgaagtcgaacgacgatgaggtgtttgaggttgaccgcaatgtgatccgtctctccaccacactcaacacgatgtttcaagaccttggaatggaccaggccgaggcgggtgaaaagatgtacaccgacccaattccattggcaaacgtcaacggtgcaattctccgtaaggtgattgcatggtgcaatcaccacaaggacgatgctccaactggcgaagatgcggagtcgaaagagcgtcgcactgatgacataccgagttgggatgtggagtttttgaaggtcgaccagggaacgctgtttgagctaattttggcagccaactatttggacgtgcgcgggttgctcgacgttgcgtgcaagacggtggccaacatgatcaaaggcaagtcgccggatgagattcgtcgcacattcaacatcaaaaacgatttcacgcccgaagaagaggagcagattcgtcgcgagaatgcctggtgtgaggactgattggattcgattgtttgttttttgtgctgtgtgtacctatcgccgacagtaaaatcggctatgatcatattcatttactgcttgtctatttcatta

SEQ ID NO: 48763 - DNA, 2092 bp, Heterodera glycines
gtacagttaagtattgtcaaattgctttttcaaaaatgccagctaaagctaatgcaattggtattgacctcggcacgacgtattcgtgtgttggagtcttccagcacggaaaggtggagatcatcgcgaacgaccaaggcaaccgcaccacgccgtcctatgtcgcgttcaccgacaccgaacgtttgatcggcgatgcggccaagaaccaggtggcgatgaacccatccaacaccgtgttcgacgccaaacgtctcatcggacgcaagttcgacgacccggcggtgcagtcggacatgaagcactggccgttcaaagtggtgcagggagagggtgctcgtccgaaagtgatggtggaagtcaaaggcgaggacaaagcgttcttccctgaggaggtttcgtccatggtgcttatcaagatgaaggagacggccgaggccttccttggccagactgtcacggatgcggtggtcacagtgcccgcttacttcaacgactcgcagcgtcaggccaccaaggacgcggggaccatcgccgggctgaacgtgttgcgcatcatcaacgagccgacagccgccgcgattgcctacggcttggacaagaaggggcagggtgagcgccatgtgctcattttcgacttgggcggtggcactttcgacgtgtccatccttaccatcgaggacggcatcttcgaggtgaaatcgaccgccggtgacactcatctcggtggcgaggacttcgacaatcgaatggtcaaccactttgtcgcggagttcaagcgcaagcacaagaaggacctcagttcgaaccctcgtgcgttgcgtcgtttgcgtacggcctgcgagcgcgccaagcgcactctgtccggttccacccaggccagcatcgaaattgactctctcttcgacggcatcgacttctacaccaacatcacgcgcgcccgcttcgaggagctttgcgccgaccttttccgcaacaccatggaccctgtggagaaggctttgcgcgacgcgaagatggacaagtcccagatccacgacattgtgttggtcggcggctcgactcgaattccgaaggtgcagaagcttctctccgactttttctccggcaaggagctgaacaaaagcatcaacccggacgaggcggtggcctacggagcggctgtccaggcggccattctttccggcgacaagtcggaaactgttcaggacttgctgctgcttgacgttgcccctctctccctgggcattgaaacggccggcggcgtgatgacttcactcatcaagcgcaacacgaccattccgacaaagacgtcgcagacattcaccacctattcggacaatcagcctggtgtgctgattcaggtctacgaaggcgagcgcgcgatgaccaaggacaacaacctgctgggcaagttcgagctcagcggcattccgccggcgccacgaggagtgcctcaaatcgaagtcactttcgacatcgacgccaacggcattctgaacgtgtcggcccaggacaagtctaccgggaagcagaacaagatcaccatcaccaacgacaaaggccgcctttccaaggaggaaattgagcgcatggtgcaggaggcggagaagttttccaaggaggacgaggtgcagcgtgaccgtgtgtctgccaagaacgccttggagtcctactgcttcaacatcaagcagacaatggaggactcaaatctgaaggacaagatcagcgaggacgacaagaagaaggtgctggagaagtgcggtgaggtgctggcatggctcgacgccaaccaggcggcagagaaggaggaatttgagcaccagcagaaggaactcgaagggatctgtaatcccatcatcaccaagctctaccaagccggcggcgcaatgcccggcggtccaatgcctggcggagggatgcccggaggtggcggcgctgctggtgcgggaggagccggtggaccgaccatcgaggaagtggactaagcgagtcgatctcttcgcgatcattttttgtttgatcgattatttaattttatttttttctcgcgtaaattgtttgacatataaattcattggttgcttaaaaa

SEQ ID NO: 48764 - DNA, 730 bp, Heterodera glycines
aaattcttctgcaaaattaagtgaaaaatcctcaaaaattattttttagatttaattcttaaatatgagtagtcagcaacaacagttggatgtgcttattgtcatagatggtaccaacattgataagccttgtgtattttttgatcttttcaaatttcaacatttaacttatttaatttaaaggttgatattttttcgagttctggctttgttgcttcttgtctcaattgggtttcaaagcttcattctcctaatgtaattgttgcgttacccaatcaaccgaatgatgtagcagccgaacttttaaaaaaatgggcttctaaattcaagcagcttcaggcatttggtgtttcaaattgccaatctttaaacgatgttcttcgtgaagttgattttcgacaaattcttagaaatgatttcatgctcatacaaaatttagccactttttgtttttcctatctgacgcgacaaatcgaaaaatttcgaaacgataggcggcaaaacaacaaaaatgtgctcacattgctttattactcaaaacgaaattatggaaggaaattcgaggaagatcggtctctgattggatacattgaacaaactcaaaaattaacacattatgagaacattggcaaacatagaacttttactgttccaaagagtgaatttttacatgacacggttttccgggttgacctgttctcctgtgggattgcgctttgtggaatcgaat

SEQ ID NO: 48765 - DNA, 709 bp, Heterodera glycines
aagagaatcgtacgtatttttgctgaaaatgggaatagacataaaccacaaatatgaccgcaaggttagacgtacggcacccaaaagtgaggatccgtacctgcgcgttttggttaaactgtaccgcttcttggccaaacgtgtggacaccagcaaacgctttaatgctgttgtgctcaagcgtttgttcatgtcgaagcgcaaccgtccaccactttcaattgcgcgcattgtgcgctatgtgaaaaagccaggtaatgagaagaaactcgtcgtctgtgttggctccgtgacggacgacaagcgcatttacaccgttccggcgatgactgtctgtgcgttgcgcttcaccgacgcggctcgcgcgcgaatcatcgctgcgggcggcgagtgcatcactttcgatcagttggcattgcgtgcaccaaagggcgagaacacgctgctgttacagggacgacgaaaggcgcgcgaggcggagaagcacttcggaccgccgccgggagtgcctggcagtcacgcgaaaccgttggttcgcgcgaagggaaggaaattcgaacgtgcacgcggtcgccgaaagtctcgcggttacaagaactgaggaattcctgtttcgctttgttgagatatattcccttgtcatgttacctttttgttatggaaatgaaatctttcttatccataatcaaagaaaaaattgttgattttc

SEQ ID NO: 48766 - DNA, 964 bp, Heterodera glycines
ccctcaatacggcgtttctcagcccatatgtacgaaggaaccaacagaaaaggatttgagactaacgaaagaactcgagagttatctaagaagctctggcattttcgagtcggacttggacatacagaagagatttgatgtcttgaggaggataaattcgttggtcaaaagttgggtcaaacaagccttttttttataggtaccgcccgaacagttggacactgtcggtggcaaactgttcaccttcggttcctaccgtctcggcgttcatacgcccggggctgacatcgattctctgtgcgtcgtcccccgtcacatcgaacgcatcgatttctttacttcattttaccaaatgcttaaagaggatgaaaaaacggcggacctccacaaagttgaggacgccttcgtacctctgatcaaactgcgctacgatggcattgaactcgacattttattcgctcggttggcgttgaaagaaataaaggaagaccaggaactctcagacgacaatttgcttaagaacttggacgagaagagcattcgctctctgaatggttgtcgtgtggccgatgaaattttgcgattggtcccaaatcgactgaatttcattttggttcttagagccggtaagctttgggctaaaaaccatggcatttattccaatgtgttgggctttcttggcggcatttcttgggcaattctcgtcgcccggacctgtcaattgtatccaaatgcaacaccttctgttttattgcagaaatttttcctcgatttttctgcatgggattggccacatcccgtcattctgaaggatgtcgacgctaccccgcggattgacataccctatttcattgacatgatttgggatccgagaacacgcgcatcggaccgctaccatttgatgccaatcattacgccagccttcccagaacagaattccacatttaatgtgacaaggtcaacg

SEQ ID NO: 48767 - DNA, 801 bp, Heterodera glycines
gagcatttaattttaagccttcaagccgaataaaatcttttttcttcgatggatcaacaggagaaaagttccggatggtttgcaaatgttgaaatgggtccaccggatgtgattttgggcgtaactgaagcatttaaacgcgatgacaacccgaaaaaggttaaccttggagtaggcgcatacagagatgaccagggaatgccttttgttctgccgagcgtaaaacaagccgaaaaagaattactcgaagcaaacctcgacaaagaatatgctggcattgccggtttgccggacttcaccgccaaggccattgaattggcgctcggaagagattctgaagttttgaaagcgaaacgaaacgcgacggttcagtcggtgtccggcacgggagcattgagaacgggcgccgaatttctctccaaatggtttccgcacaacaaagttgtttatcagccgacgcccacttggggcaaccatgtgcccgtgttcaagtttgctggctttgaaatccaaaagtaccgctattacgacccgaagacttgtggctttgatgagaatggctgcttggaagacattctgaacatcccggcgaagtccgtcattttgttccacgcgtgcgcccacaatccgacgggcgttgacccgacaccagagcaatggacaaaaatttcggatgcatgcaaaagccgcgacttgtacgtctttttcgacatggcctaccaagggtttgccactggcgacgtcgatggggacgcacatgcattgcgctatttcgttcaacaaggggacaacatttgtcta

SEQ ID NO: 48768 - DNA, 956 bp, Heterodera glycines
gtttgagtgatagtatccttattttataaactcaaatttgctgaagtatcatgggagttccagcctttttccgttggctttcacgaaagtatgtgtcgatcattgttgacgcggtggaacagcgcagaagagaaattgacggagtaaaaatcccaatagatgcaactcaaccaaatgagaattaccaagagtttgacaatctttacttggacatgaacggcattatccatccgtgcacacatccggaagaccgacccgcaccgaagaccgaggaagaaatgttcattttgatcttcgagtatattgaccgcctcttttccatcgttcggccaagaaaacttctctacatggcagttgatggggtcgcccccagagcaaagatgaaccaacagcgaagtcgtcgatttcgagcagcacaagaagcggcggagaagcgcgagctcatcgaaaatgtgcgtaagcggttggagtcggaaggaattccgttgccgccaccgcgaaaggaagaggaacactttgactccaattgcataacacccggcacgccgtttatggcccgtctttctgttgcccttcgctattacgtgcacaaacggatcacctacgacccggcatggcaaaagatccaggttattctttccgatgcgaatgtgccgggtgagggcgaacataaaatcatggactacgtccgacgtcagcgcgcttcgccggcgcatgacccgaacaccgttcactgtctttgtggcgccgatgccgaccttatcatgcttggattggccacccacgagtccaatttcaacataattcgagaagagtttttgccgaatcaaccgagggcgtgcgaactttgcggtcaatacgggcacgaggtcgaacattgtgaagggttggcacgtgccgagaccggggcggaccaaagggacccgttgaagaaggagaaaaacttctccttcata

SEQ ID NO: 48769 - DNA, 981 bp, Heterodera glycines
tattgatgaaaatcgacgatggagtgacttacgctgtttaacagatagggcgtctacatttgccaattcaggattcgtccctggaatcaagaatttgaaagaagttcataaaatgccggtgctagttgttggtgctggtgggcttggctgtgaaatccttaaagacttggctttatctggtttccatgacattcatattattgatatggacacaatcgatctctcaaatttaaaccgacaatttctctttcgtgaaaatgacattggacgctcaaaagctgaggtggcggctgcctttatcgagaaaagggtgtttggctgtaaagttactccccataattgcaaaatccaggacaaatctctcgaattttatcgtaaatttttcattattatttgcggacttgactccattgaagctcgccgttggcttaatgcgactgtgtgttctttggttgaatttgatgacggaaataacccaaaatccaacaccatagtgccgttgatcgatggtggaacagagggattcaaaggaaattcacgtgtgattattcctttcatgacgccgtgtattcagtgcacgatagatctttacactccccaggtcaactttccggtgtgtacaattgctcacacacctcggcttcctgagcattgtgtggaatatgtaaaagttgtgctttgggaaaaggagaagccttttgggcaaggtgaaaatggtaaataactccatcaccattttccatttccatagacgttaaattggatgctgatgaccctgctcatgtcgaatgggctttccgtgctgctcaacaacgcgcgaatgagtatgaaataaaggatgtcgatttgcgactcacccaaggcgtgctcaaacgtataatcccggcagtggcttcaaccaatgccatcatagcgggaagctgtgctcttgaggcattgaaactggcatcaaagtaagcattcagtggcagcaatttcaca

SEQ ID NO: 48770 - DNA, 1443 bp, Heterodera glycines
gagattgattggaagaaccggctgcccttcgtcggtcgctgctgcgactcattccttcgcattttccgctgtttgtgcgttttccgtgccttttctgtttccccccttttcgactgccgcaaaaacaacaaattaataaataattaaaacgaaacgaattttaatgggacaactgctggtcgcttttcggggagcagccaatggcaacagaaacaacgacaaccaaaatgcagcaacaaatccatcggcagggcttagacgactgttcgttctgctcagtgcttttttgccgttcggacagcaaacagcgaataatttggagcaacggaacgacaataatcagcagggagagtcagcagaaatgggccaattccgtgccgggttcggcaggcgccgccggcgccatgcgccggctcctcccgatttgtcgggcagcggcgaggcgggcggtcacggcagtccgtgcggtgccaacggcggcggctcatttttcggctcgcactttctgatgggcggtgagctgtacgactcatcaaagccggaagtctttttgtttggcgaccagcaggacttggagctgttgggcagcaaatcagtgaagttccctttctcggccaaaggcgtcaccgattcgatcggtgttctgaacgcgttggtcaatgtgcgcaaggactccgtcaaattcacaaaagttggccgtgccggcggcggttattcctccggcttttaccgtttggaattcgtcttcgactgcgacgtgtcctgctttgtccaaattcacttctgtgcccgggaacaaattgacgaacagcagccacaacttctccagattgtctctcgtcagccccaatttgaacactccgaacgtttccatttccccgtgggcgccaaccaacacttcagccatttcaccttcaaaccgcaccgatacgacatgaaaatgatgcattgggacggcggcccagttttcccggtggtcatcgaaattcgatcggtgtccgaccaattccctgaacaggtccaaaccacgctttgcagcatcgaacggtccaatgatcagtcggcggtgctaattctgaagccaatgaagcagaaactgttctcggacggtgtcctatttttgctgcaagaaattttcggcattgagaacaaagagatggagacggcgccgccggcgttggcggatgaaaacggcgccgaatgcatcatttgcatggccaactcgagggacacaatgattttgccgtgccgtcatttgtgcatttgcaatggttgtgccgaaacactgcgatataagctgaataattgcccaatttgccgttcgccgtttaaagcactgctaaaaatcaaagcgatgcgcaattcactggtgggcaaaggggtcggctctgacgggagtatgaccacggcacggattcgtcatgagccggtgactctgattga

SEQ ID NO: 48771 - DNA, 399 bp, Heterodera glycines
ggcaccgattcgactaattacttgggtgttcgccttttgtgggtgacgggtcaatcgggcgcaacgctgcaggccaaactctctaaggatttgatgttggtgcatatgtcggtgcctcgtacaatgtctcccgttgccatctccgttctcggcgagttcgttcagccggcactgaagtcctgggacgtgttgagcgttcaggaagaaatggcgtacgacctgagccaacagagtccatacgacttgaccatcgaagggttgtaccgggcggcgttcaggaacggatcattgtccaacgcactgttgtctccccattatcaaattgggaacatcaccaacaagcgcactcaacaatttgtcaactcgcgctggttgaccaaggagacggcactgatcggg

SEQ ID NO: 48772 - DNA, 750 bp, Heterodera glycines
gagatttataaaatgctttataacggcaaatttttaaataagaaaaattatacaattacctttgaattagcaggaagttttgtggagaatcatcgtggcactgtttattccgtgtctttcaatccttttactcactcggaagcgcccatttattttgccactgtagggaaaaatagggtgtctgtgtacctttgtccacccgaaaagggctttcaattggtgcggcaattcgaagaccaagacgcgaaggacgagttttattacacggtcacttgggcttataaccttgaaaaagcacaacatgtgttggtcgtcggcggatttcgcggaatcatccgtgtgattagcccactcaatgggcgacttcattgcgcattaatcggtcacggcgactccatcaacgaattgtgcacttcgcccgtctctccgatgattgtcgcttcagcgagtaaggatctgacagtgcgaatttggaacgtcacttactcgcaatgtttggccatcctcggggggaccaacggacaccgtgaccaagtgatttctctggatttcgattcgtccggcgcttttttggccactgcgagtatggaccacgcggttaaactatggcacattggcaaaggcaccgaagtgcacgaaaacatcaccgcttcgctgaggggccaattgaattctgtccaaagtgtcgaaatgcattttccgatatgccattcaaaggaccagcacacgaattacctcgactgcgttcga

SEQ ID NO: 48773 - DNA, 587 bp, Heterodera glycines
ggtgagcgctcagagtgattctcctgttcctaattggctgcttaacatcggaccaatttcttgccatgcgtggaacaaggacaaaactcaattggctgtttcgccttccaacaacgaaattcacatattcgctcgtttggagactgtttggaacccgttgcacgtgctaagagaacacgacttgctgatcaccggattggattgggctccgaatactaatcggattgtttcatgttcgcacgacaaaaatgcgtttgtgtggacatgggaggctgaaaagaacagttggaaaccggagatggtggtcgttcggataaacagagctgccacctgtgtcaaatggtcgcccaacgaaaacaaattcgccgttgggacggcgtgaaaatgactggtgggtagcgaagcaaatcaaaaagctgattcgttccactgtcacctcattgaattggcatcccaacaacattttgttggctgttggcgcctgcgacttcaaaacgcgtgtttttttctgcttatgtgaaagagattgacgaaaaaccaacgccaaacccttgggggaccaaaatgccattgggagaattgctcaa

SEQ ID NO: 48774 - DNA, 865 bp, Heterodera glycines
ggacggggaccacgttgtgttcaccgactttgagcacgccgaactgaacgaacttccaccagtgccagtcactttgaagggaagtgagtgccaccactgaacatttgttggttcatctacagtcctcccatttttaggcaaagtcttcaacattggaaatgctctcgcggccttttctggcgcagttcaaggccccgtttcgcgtggacgtgttcagcaagtcaaagtgcccaagaaaatgtccttctattcattgtctctcgcactcgccgagcccgactttatgatttgggactttgccaagttcgacgaacctgcgcaacttcacgccctttggcaggctttgtacagttttgaggagatggttcgtcatcttgcgactttccatttgtttgggttttcctttcagaaaaactacagccctttgccccgttccgatgccgacgcaaaattgttaaaggaaatgctgccaaaagatgcgcccgaaatgccggactcactgctcttaaacttctcttaccaggtcccttttgtgccattttcaacttcgaattcctcccccgtcttaaggcgtgcggaaatctccaacccatcgcttcgctcatcggcgggttggtggcccaagaggcgatgaaggcagtgacgcaccacacgactcccctcaagcagtttctgtacaccgattctcttgaggcgttgccgggcgcagattcgacctttgacgccgccaagttggagaagaacgattgtgcaccggtgagtttttggacggacaactaattgctgttggagtattcaaaaactgtccatttgcagcgcaacaatcgctacgatggacaggcggccgttttcgggtgggcctttc

SEQ ID NO: 48775 - DNA, 614 bp, Heterodera glycines
catacctaactatttttaaataaaaaaattacaaccagcctgttgaatggggaattcgtcaactactgctcgatcggatgatccccagtcgacactaacagccggtgaaacgctttctgattacgatgagaacattatcaacagggggcgagtggcaccacgaaaagagtcgttttgcaagggtcttgcattcagcaaccgacccataagcatcaatgagatcgtatgcattcgattgagtgagatcggcactaattggagcggagttatgagattcggtgtcactaatgttgatccggccagttttcgcgacattgaattgccaaagttcgcgtgtcctgacctcacctctaagggcggctattgggcaaagtctcttgctgaacgatattccgtggaaggctcaattttgcattttttcaccaatgccaatggcgaaatgtattacggcgttaatggggtgcacaaagggctcttcttgagcggaattaatgtgcttagtccactgtggatcattgtggacatttacgggaattcgattgccgttgaatttatcgatccaagtgaggtgcaacttcaatcgaaacgaacttcgtccaaaaatagggctggat

SEQ ID NO: 48776 - DNA, 622 bp, Heterodera glycines
  unsure (1)..(622): unsure at all n locations
gttgagctttatgttttcatgaatcaacgaagcgaaatgccagcgcaactccgtttccaaccgtccaatgctattggaacgcaccagcgctcaattataactgcacaacaatttcaacagcagcctttttgtgtaaaacgcgcccgttatgattatgatttatacgaagggcaatcgcatcataatttccaaagacagcgttttaatcaaacaccgccctccgctattcatccaatgcgcactttccaaattcgtcatcgttcaacggataaaacgcgcgggttgcgtcattttgctcaaaaagtttgtgagaaagtgaagcaaaaagttcaaactaattacaacgaagttgcggaagaattggtcaatgaatattttgacaatattgctgaagtcccatctgacccggaaaaattacaatatgatacaagaaacattcgccgtcgtgtttatgatgcgcttaatgttttaatggcgatgaacataattgaaaaagaaaagaaagagattcgntgggtgggcttgcccacttcgtcgttggccgagtgccgacggctcgaagaagaaaaggacaacgtcaggaacgaatccgtcaaaaaaccgaacaacttcaggaactgat

SEQ ID NO: 48777 - DNA, 872 bp, Heterodera glycines
  unsure (1)..(872): unsure at all n locations
gatatttaaattttctaacatgacacagcagagaaatcccaatgggatgaaaaagaccaacaaagaattgacggaactcaacgactgcttatccaaatttgcttatcttcggggttttcttccgtctcaagatgatcagcgcctattcgaaagtttttcctcggctcctccacagaaagaatatctgaatatcgctcgttggtacaaccatgttcaaacttacgaagatgttgaacgtcccacacagaccagataaatcgtctaacattggcaaggaagagacagcaccaaagaaagacagagttggggaagattccacgaaagtgacaacccaaaaacgatttgccgagatgtttggtcatttgcacttccacgaggtgggcaaaaacgacacaaccgaaggttatgtgcggacagagaacacagaacgacttctaagagagcacgtcaaagcggggggaggaaaggttgtcacgcgttttcctcctgaacccaatgggattttgcatatcggacacgcaaaagccatcaacattgatttcggattggcaaaggcacgtgggggtatttgctatcttcgcttggatgacacaaatcccgaaaaggaggaggagagatttgtgcaggaaattgaggacatggtcaattggataggctattcgccctacaaaatcacacatgcttcggattaatgtgaccaactttacagctgggcattgacccttattcggaagaatttgggctacgtttggccgccgagtacggatgaaaagcgggggtttaacccctctccttccccctggcgggaccggccnctggaagaatgcctagggttaattcaggcgaagaaagacggagcattggacggaggg

SEQ ID NO: 48778 - DNA, 847 bp, Heterodera glycines
tcttctcaaaatgccttctgtttcttttgtggatgtccccgttaattcgccgtttacctttgagaatctcccgttcggcgtcttctcaacaaatgaaaatagcaaaaaacgcattggagtagcgattggagcccaaatcttggacctttcggtcgtgaaacatctcttcaccggtccgctgctttccgagagacaaaatgtttttagtcaagaaacgctgaaccaattcatgggactgagtcggcagtgttggctcgaggcgcgtctcaccctccaatcgttgctgtccaatgccaacccaatgcttcgcgatgacagcgaattgcgcgaaagggcttttgttgcgcagtcggaggccaagatgcatttgcccgccctaattggcgattacactgacttttattcatctatttatcatgccacgaatgttggcacaatgtttcgtggcaaagacaacgcacttatggagaattggaaatggctgcccgttgcttaccatggcagggcgtcaagcattgttgtctccggcacggcagtcaatcgcccgtggggccaagtcaaggcggaagatgatacccagccgaactttgtgacaagtcggttaatggactttgagttggaaatggcatttttcgtgggagggcccgaaaacgctttgggcacgccaattccaattgagaagacggaggaacacatcttcggaatggttctgatgaatgattggagtgcaagggacatccaaaaatgggagtatgttccgctgggcccattcctcggcaaaagtttcgccaccaccatttccccgtgggtcgtcacaatggaagcactccgtccgttcgtcgtcgac

SEQ ID NO: 48779 - DNA, 836 bp, Heterodera glycines
cctctactctgtttgctgctgatcgtccgcttttcctccccttcagcttaaacactcaaacccctctcccccccccccccgcctccattctccgctgactgatctgtccgcccccgcacttcttttgcccgtttcttccgccgttacacactcatctcacatagtcccacaaaacatttcaccaacaaaagcagcagaagaattaccaaacggaagagcagagaaatgccgtcccaaggagaactcaaagaaatcttcaacctttacgatgaggaattggagggcaaaatcgacgccacgcaaattggcgacgtggcacgcgcgtgtgggctgaagccgaccaatgcgatggtttggaaagcggcgggcgaagaatacaaacgcaagggcgagaagaaattggcattcgaagaatggctgcccatcttcgaacagttgcagaaggagaaggaagtgggcacttacgccgacttcgtcgagggtctgaaagtgttcgacaaagacgagagtggcaaaatcatggcagccgagctcaggcacgtgctgctggcgctgggcgaacggctgagcgcggaggaagcggacgaacttttgctgggcgcccaggacggcgagggaatgatcaattacgaccagttcatcaaaaaggtgttggccgggccctaccccgaggattgaaagacgcaacgcaaattagacaaaacacaaaatgagagatgggaaaagtccacccgaatgacgaaagagatgatacaactgttttctcgccccatttccaaattggcaattgctccaataaaaggcgttcaattttcaaaaaaaaaaaaaaaaaaaaa

SEQ ID NO: 48780 - DNA, 1127 bp, Heterodera glycines
attaagatgcttctttttggcagcaaaaatctttctacccttaaaataattttaagaaaaaatgccacagctgcggttcaggcagaaagtccaaaacaacaaaaggtcgaagttacgattgatgacaaaaaagtgttggtggatcctggcatgacaattcttcaagcctgtgctttggttggtgtggacattccgcgcttctgttaccacgaccgattgtcaatcgcagggaattgtcggatgtgtctggtcgaagtggaaaaatctgtgaagccggtcgcttcttgtgctatgcccgtgatgaacggaatgcgagtcaagacgaattcagcagcgaccaaaaaagctcgcgaaggcgtgatggagtttctgttggtcaaccatcccctcgactgtccgatttgcgaccagggaggcgagtgcgaccttcaagaccaatcgatggcttttggctctgatcgaagtcgacaccaaaatgaatatgacgggaaaagagccgtggaagacaaagacattgggccattggtgaagacaatcatgacccgttgcattcattgcacgcgttgcattcggttcgccaacgaaattgccggggtgcccgacttgggctcgaccggcagagggtccgacatgcaaatcgggacgtacgttgagaagctgttcgcctctgagctttccggaaatgtcatcgacttgtgccccgtgggtgcactgaccagcaaacagtacagtttcgttgcccggccatgggaaactcggaaaacggaaagtgttgacgttatggatgcattgggctcaaacattgtaattgcacacagaacaggagagattttgaggataattccacgaatgaacgatgaagtgaacgaagaatggttgtcggacaaagcccggttcatttgcgacgggctgaagcggcagcgactgttacagccgatgctcaaaaatgagtcggacgttctgagtccctgcaattgggaagaagccctcttcacagcggcacaaaaacttcgtcagatcactccaaatgcaattgccgggttggccggcggcctcgtcgatgcagaatctctaatcgcattgaaggatctgctgaatcaaatcaactcggaaaatgttttcagtga

SEQ ID NO: 48781 - DNA, 1041 bp, Heterodera glycines
gctttgttgaatttctttcactcaaaaatgtccagcgatattgtcgagaaaaaggagacaaaccccaatgagacggatgacaaaaccaaagaaataaaatcgcttgacgaggatgaaattgccgcacttagtaattacaacatgggaccgtacgcggatcagttgaagcaggcggagaaggacattgatgaaattcagaagcgcataaacactctttgcggagtgaaagagagcgacacggggctggcgccgcccattctttgggacattgcggccgacaaaatggccatgtcccatgagcagccgctgcaggtggctcgctgcacaaaaatcatcaaagaagagggcaaagaaacgcgttacatgatcaatgtgaagcagttcgccaagttcgtcgtggacttgcacgaaaatgtggcgcccactgacattgaggagggaatgcgagtgggggtggaccgcaacaaataccagattcatttgcctttgccggcaaagattgacgcgtccgttacgatgatgcaagtggaggacaagccggacgttacctacgcggacattggcgggtgcgaagaacagatcaaaaagttgcgtgaagtggtcgagtttccgttgcttcagcctgagcgtttcacgagtttgggcattgagcctccgaagggcgttttgttttttggtccgccgggcaccggcaaaactttgtgtgcccgcgcggtcgccaatcggacggacgcgtgtttcatccgcgtcatcggttccgaattagtcaaaaaatacgttggcgaaggcgcgcgcatggtgcgcgagctgttttcgctggctaaaacgaaaaaggcgtgcattctcttcttcgacgaagtcgacgccatcggcggagcgcgatttgacgacggaaaagggggcgacaacgaagtgcaacggacgatgctcgagttggtcaaccaactggacggattcgactcacgcggggccatcaaggttttgatggccaccaacagaccggacacactcgacccggcgctcattcgtcccggtcgcatt

SEQ ID NO: 48782 - DNA, 1030 bp, Heterodera glycines
aaaagcatccagaaatgctagatgaaacctcagcctccagagcaattggttccaatgaaactgctgtgatgatcaactcggatgaacacgaattggacaccgatcccggcgttcagggcagtgacaatggcgcctcctcttccatgcaaaggcagctgtccgccgctatgcaggcggtcgtggaggagccgaccttcaatttgcgtttaattgacgcggtcaggcaaagccattgtctctacgacgcttcggacaaacaatacagaagcgcggactacaaaataaaggtttggaatcggcttgtacacgttctcgggttccaaggtgacgcgcggacattgtacaaccggtggaagcaattgagagacaaatacggaaaagagaaaaagaaactgaaatacagcggggagcagcactcgcaatggcaatattttaagcatctcgaatttctcgatccgcacatggtggacaggacacaacaacgttttgagcgcaacaaagaaggcaaaactgaacaacgccaaattgtcattaccgacccaaactttgctcttcacctgatcaaccaagttcggacgcagccttgcttatacgatatcaaggacacgaagtatcgtcacacggagtacagaaatcaggcatgggctgagattgcaaaaaacctggcatttcctggcgatgtgagtgccctttacaaacagtggaagaaaataagggatcgatatgtgcgcgaaaaaaggaaactgcgcatgaccaatggtacggagaatgaggagcccaattgggagttgtaccgggaattggtttggatcgaccgatatttggacgaacgcgcagcgcaggtaaagcggaagcaagagagcagcgacttgtccggagaggaattcatagaggatgcttactccacccaaaatgcttccggccttagtaattcgttgcccggaaattccgccaccccattggactctgcccatccccaccaccacccgcagcaacatcactacgccaatgtgctcatgccaaactctgg

SEQ ID NO: 48783 - DNA, 612 bp, Heterodera glycines
gtttgagcacttttgaaaagtttataattgaattttgctcatatttttgcataaatgaaccaagaacaagacaatatcccaactttcaagcttgtgttggttggtgacggtggtaccggaaagaccacttttgtgaaacgccatttgactggagaattcgagaagaaatatatcgctacgcttggtgttgaggtccatcccctcacttttcacacttcgcgaggtcaaatccgattcaacgtttgggacacagccggccaggagaagtttggtggacttcgtgatgggtattacatccaaggccaatgtgctattgtcatgttcgacgtgaccgccagagtcacatacaaaaatgtgccgaattggcaccgcgatttggtccgagtttgtgagaacatcccaattgtgctgggtggggaacaaagtggatgtcaaagatagggaaagtcaaggcgaaaaagcatcacttttaaccgcaagaaaaatctccagtattaacacatttccgcaaagaacaactacaatttcaagaagcccttcctttatctggcaagaaaactgatcggcgaccccaaactccgaattctggggaaagccggccctccctccccc

SEQ ID NO: 48784 - DNA, 745 bp, Heterodera glycines
ccaaagtggaggaaatccgacgcactgtttatgtgggcaatttgccaaagggatgcgacggcgaggaggtgctcaacttctttaacgcgtgcattggcgaggtgatgtatttgcgaatggcggccggcaacgactatttgccctgtgactacgcttacgtcgagttcagtcagcagtcgtcggtgccattggcactgcaaaacagcgactcattggagtttcagggacgtccattaagaatccaacattccaaagttgcgatcataaaaccgcaacgcaaaacggctgaccaggcacttgaggaggtggaggaagcgatcaaaagcggcagcgacggacgcacaacgacggacactggccgtggctattcgccgttccgtcccggggtcagcgccccgcgcgttgtgccgacctcaccgcgtccatccgtcaaacgctccacccgctcacgttcaacgtcctccagtcacagtcgtcgttcccgctctcgttctcgccgacgtcgttcccgttctcgctccacccggtcgccgtcccgttcgcgtcgccgccgttcgcggtcacgcgatcgcaaacgctcgcggtcgcgtcgccgttctcgctcgcgcgataaagaccgcaaaaaggccagcaaacgctctcgttcacgcgaccgttccaccagagaaagcggcagcaaagcatcgaaacgggacaaagacaggagcagcagagagcgcgacaaggagaagagcagcaaaaaaga

SEQ ID NO: 48785 - DNA, 658 bp, Heterodera glycines
ctttccatggcttcagaatgttgtatacaggttttttgtcgggttcgcgcctttgaacgagagcgagaagaagaacagttccaccaatgtcgtcaagtttcagtccaaagacaccatcgtcgttgggggaaaaccgtacgcctatgaccatgtgtttgagccaagttccaaccaagaggccgtgtacagcactgccgcccgacacattgtgcaggacgtactcaccgggtacaacgggacaatttttgtctatggacagacttcgtcgggaaaaacgcacactatggagggtgttattggcgactccgagaaacagggcataattccacgcatagtcaacgacatattcactcacatctacaattttgttgacacggaaatggaatttctgatcaaagtgtcttacttcgagatttacaacgaacgaattcgcgaccttttggatgttaccaaaacaaatttggcaattcacgaggacaaaaaccgaattccgtttgtgaagaatatcaccgaagtgtttgtgacaaacccggacgaagtgttggcttacatcgaagaaggaaagacgaaccgacaagtggcggtgacgaacatgaacgagcattcttcacgatcgcacagcgtattccaaatacaggtgcagcaagacaacaaaacg

SEQ ID NO: 48786 - DNA, 615 bp, Heterodera glycines
gacggtcggcacggcgtcttcttccgcaacgatctcttcccgtacagctccggctcatccccggtcgcctccttccgcttggccgtccaccattcgcgcgctccctccacttgcggcaaattcaacgagtcgcttctcggtgaattggccaattcggccacgttgcagtcgtcgctgtgcgtttgcacgtccattcgacggacggccgcggtggtggaggaggaagaagaagcgacggagggccggaagctgaagcttaaggagcacccggtgaccgacgaatacaaagtgtcacatgagatcgtcggcattggcgaaagcggtaaagttatggcgtgtttccataaacgacgcggcgaaaagtgcgcgctcaaagtgttgcgtgacaatgcgcgcagtcggcgcgagttggcgctgcatttgtcggtgtttgggcatccgcacgtggtgtccattgaagacatgttcgagaacagcttcgacggattcaaatgtttgctagtgggggtcgaattcatgggaggaagagaagtgctgaccatctttgagcagaacggacgattgggctactcggaaaaatgtgtgggccgaattgtgagccaaattggaagtggt

SEQ ID NO: 48787 - DNA, 374 bp, Heterodera glycines
  unsure (1)..(374): unsure at all n locations
cttttctggcgaatattgtgctctttgagtgtcctttcattggcccattgtgcttacagtgccgcacagcatcgttcctaccttcgcctcgttggccaacctttcactcatttgcctgcggaccttactacacaaacgttgctcagtcttttgttcgccattgtttctgccagtttcgttgttggcgacttccaaccgattcgcaccgaccttttgatttcaaaaaagtcgtgggatgtgctcggcaattgtccctccttttacgtgtacaatcatcgtgccaaatgtttgatgccaaaatttgatgacattgattaattttttggcacttttttcaataaatgtttttattnnaaaaaaaaaaaaaaaaaaaa

SEQ ID NO: 48788 - DNA, 627 bp, Heterodera glycines
cattttgtgtgttataaggcggggagacgttcgatatttattgtgtgtgttagaagaggaagagaagaagcaggaagagtggaagatgagcgcgaatacggaatgctatcgttgccacgaattcgggcacatttcgcgtgactgtcccaatgccggtcgtagtggtggtggtggtggtggcggtggcggctcgcgcggcggtggaggcgaaaccaagtgttataactgtggacgttctggacattttgcccgtgaatgccgtgatgccggagaccgcgaccgtgggcgcggtggtggtggcgggggcggcggacgaggtggcgatgaccgcggcagcaaatgttacaactgcggtggttacgggcactttgcacgcgaatgtcgcgatgagagaagcgccagcggcggtggacgtggcggcagagacgacagggatgaccgaggcaacaaatgctacaattgtgggaaaagcggtcatttttcgcgcgagtgtccggagggaagcgaccgccgcggtggtggcggcggtgggcgcgaccgtgacgaccgtcgctgctacaactgcaatgagccagggcacatgagccgcgactgtcctaaggaagcgcgatagatcacgtcgctctg
